United States Patent Application Publication US 2005/0244851 A1 - sequence listing, part 22

SEQ ID NO: 838719 - DNA, 25 bp, Homo sapien
gagaataaagagctacttcagttgg

SEQ ID NO: 838720 - DNA, 25 bp, Homo sapien
aggttccttagcctgcatgccttca

SEQ ID NO: 838721 - DNA, 25 bp, Homo sapien
taagttcttggtttcaatctagtgc

SEQ ID NO: 838722 - DNA, 25 bp, Homo sapien
tgggtattcaggatgatcgcgccac

SEQ ID NO: 838723 - DNA, 25 bp, Homo sapien
catgaaatgggtattcaggatgatc

SEQ ID NO: 838724 - DNA, 25 bp, Homo sapien
ttcatcatgaaatgggtattcagga

SEQ ID NO: 838725 - DNA, 25 bp, Homo sapien
gaaatgggtattcaggatgatcgcg

SEQ ID NO: 838726 - DNA, 25 bp, Homo sapien
tcctatgacagtatgacagtgacct

SEQ ID NO: 838727 - DNA, 25 bp, Homo sapien
gcaccgtcttggcactcgtgggagt

SEQ ID NO: 838728 - DNA, 25 bp, Homo sapien
tctcaactcaaggtgcagcaaatca

SEQ ID NO: 838729 - DNA, 25 bp, Homo sapien
taaccaatggtccaaagcctcaagg

SEQ ID NO: 838730 - DNA, 25 bp, Homo sapien
caaggtttaagggtggcacgcctca

SEQ ID NO: 838731 - DNA, 25 bp, Homo sapien
aggtttaagggtggcacgcctcaca

SEQ ID NO: 838732 - DNA, 25 bp, Homo sapien
taagggtggcacgcctcacacatgc

SEQ ID NO: 838733 - DNA, 25 bp, Homo sapien
gtttaagggtggcacgcctcacaca

SEQ ID NO: 838734 - DNA, 25 bp, Homo sapien
gctgccacagcgctcggcctcttgg

SEQ ID NO: 838735 - DNA, 25 bp, Homo sapien
gctactgcccagtcttcatcctggg

SEQ ID NO: 838736 - DNA, 25 bp, Homo sapien
tggagttatgagaaaccagacagaa

SEQ ID NO: 838737 - DNA, 25 bp, Homo sapien
gggctttctgcccgcacgctgggac

SEQ ID NO: 838738 - DNA, 25 bp, Homo sapien
ttcttattttgaccccagctccgca

SEQ ID NO: 838739 - DNA, 25 bp, Homo sapien
gcttccatcgtgtcgtgatgaggat

SEQ ID NO: 838740 - DNA, 25 bp, Homo sapien
ttcccggcagagacccgcaatgagt

SEQ ID NO: 838741 - DNA, 25 bp, Homo sapien
agctccgcagcttccatcgtgtcgt

SEQ ID NO: 838742 - DNA, 25 bp, Homo sapien
gcccattatacggaattcatttcca

SEQ ID NO: 838743 - DNA, 25 bp, Homo sapien
ctagtaattggctgcccgttgtcca

SEQ ID NO: 838744 - DNA, 25 bp, Homo sapien
acattgagggcacacgaaggaacag

SEQ ID NO: 838745 - DNA, 25 bp, Homo sapien
cctttgtcgcccattatacggaatt

SEQ ID NO: 838746 - DNA, 25 bp, Homo sapien
cattggcggccacaatgttgctgct

SEQ ID NO: 838747 - DNA, 25 bp, Homo sapien
catggaagattcatgggagatattg

SEQ ID NO: 838748 - DNA, 25 bp, Homo sapien
gctttcaggtacatggaagattcat

SEQ ID NO: 838749 - DNA, 25 bp, Homo sapien
gtgttctcattggcggccacaatgt

SEQ ID NO: 838750 - DNA, 25 bp, Homo sapien
ctatggagacctgctttgaaaagat

SEQ ID NO: 838751 - DNA, 25 bp, Homo sapien
cctatggagacctgctttgaaaaga

SEQ ID NO: 838752 - DNA, 25 bp, Homo sapien
gcctatggagacctgctttgaaaag

SEQ ID NO: 838753 - DNA, 25 bp, Homo sapien
tgaaaaattggtgtattacttgccc

SEQ ID NO: 838754 - DNA, 25 bp, Homo sapien
ttaaatggataaataggtatgttct

SEQ ID NO: 838755 - DNA, 25 bp, Homo sapien
gtattacatttctactgtgtttatg

SEQ ID NO: 838756 - DNA, 25 bp, Homo sapien
gtattacttgcccttcctattgtgt

SEQ ID NO: 838757 - DNA, 25 bp, Homo sapien
ctgctgttccagaactgattcaatt

SEQ ID NO: 838758 - DNA, 25 bp, Homo sapien
tatcttctgggtatagggagggcac

SEQ ID NO: 838759 - DNA, 25 bp, Homo sapien
gatacctcaaacgagagactgctac

SEQ ID NO: 838760 - DNA, 25 bp, Homo sapien
ctacattgcggtgcgttggtgagac

SEQ ID NO: 838761 - DNA, 25 bp, Homo sapien
tcatggttgtgagaccgagaactca

SEQ ID NO: 838762 - DNA, 25 bp, Homo sapien
tggaacatggtcctcctgtctctga

SEQ ID NO: 838763 - DNA, 25 bp, Homo sapien
gacgctcataaggttctgtgggaac

SEQ ID NO: 838764 - DNA, 25 bp, Homo sapien
ctgtctctgacgctcataaggttct

SEQ ID NO: 838765 - DNA, 25 bp, Homo sapien
tgctccaaagctggaacatggtcct

SEQ ID NO: 838766 - DNA, 25 bp, Homo sapien
tggctttccaagttccgccatcttc

SEQ ID NO: 838767 - DNA, 25 bp, Homo sapien
tggctatgcagcggctcccatgcag

SEQ ID NO: 838768 - DNA, 25 bp, Homo sapien
ccaagttccgccatcttcaggtgac

SEQ ID NO: 838769 - DNA, 25 bp, Homo sapien
tatgcagcggctcccatgcaggcca

SEQ ID NO: 838770 - DNA, 25 bp, Homo sapien
atggtagtcaaataaagcagtagga

SEQ ID NO: 838771 - DNA, 25 bp, Homo sapien
gtaactggttgcgatcaattagtta

SEQ ID NO: 838772 - DNA, 25 bp, Homo sapien
atggagaaggaacaaagaaatctgt

SEQ ID NO: 838773 - DNA, 25 bp, Homo sapien
aaatggtagtcaaataaagcagtag

SEQ ID NO: 838774 - DNA, 25 bp, Homo sapien
aaagtcatttttcaccggcattgtc

SEQ ID NO: 838775 - DNA, 25 bp, Homo sapien
tcctgtggactggtcagtgttgaaa

SEQ ID NO: 838776 - DNA, 25 bp, Homo sapien
gagggccatcggctatttttcagga

SEQ ID NO: 838777 - DNA, 25 bp, Homo sapien
caccttgctgattagttgggataac

SEQ ID NO: 838778 - DNA, 25 bp, Homo sapien
tcaataacatcagctgggtgtccta

SEQ ID NO: 838779 - DNA, 25 bp, Homo sapien
gcacagaccctacatgttaagaggc

SEQ ID NO: 838780 - DNA, 25 bp, Homo sapien
gcatgagtgactgcgactggcccat

SEQ ID NO: 838781 - DNA, 25 bp, Homo sapien
taaggaggcctcagttaaccctgtc

SEQ ID NO: 838782 - DNA, 25 bp, Homo sapien
gatctccacactctcgttttagcca

SEQ ID NO: 838783 - DNA, 25 bp, Homo sapien
cacagtccgtcatcgcagcactgtt

SEQ ID NO: 838784 - DNA, 25 bp, Homo sapien
cctgggagccgaggatggtagccct

SEQ ID NO: 838785 - DNA, 25 bp, Homo sapien
ttctaactcatgtaagacaatgggc

SEQ ID NO: 838786 - DNA, 25 bp, Homo sapien
ctttaccgaatagtagggactacag

SEQ ID NO: 838787 - DNA, 25 bp, Homo sapien
aaaactaagtccctccttgctcaag

SEQ ID NO: 838788 - DNA, 25 bp, Homo sapien
gcaattctattgtctcactttaccg

SEQ ID NO: 838789 - DNA, 25 bp, Homo sapien
ccctgcccatggtttaacttgaaag

SEQ ID NO: 838790 - DNA, 25 bp, Homo sapien
gaagccatttctgccggttgcctgc

SEQ ID NO: 838791 - DNA, 25 bp, Homo sapien
ctgcagtcgtagagtggaagccatt

SEQ ID NO: 838792 - DNA, 25 bp, Homo sapien
tccaccacctggagagttgctctca

SEQ ID NO: 838793 - DNA, 25 bp, Homo sapien
ggttgcctgcagatcgcttccacca

SEQ ID NO: 838794 - DNA, 25 bp, Homo sapien
ccgtttcccctcatatctgctctct

SEQ ID NO: 838795 - DNA, 25 bp, Homo sapien
gctaaggttcctcagcgactccttc

SEQ ID NO: 838796 - DNA, 25 bp, Homo sapien
ggctaaggttcctcagcgactcctt

SEQ ID NO: 838797 - DNA, 25 bp, Homo sapien
tccaattctcatcccgtttcccctc

SEQ ID NO: 838798 - DNA, 25 bp, Homo sapien
cctggaaaacagtcttctcctcttc

SEQ ID NO: 838799 - DNA, 25 bp, Homo sapien
taaagagaaagcgaggctccctttc

SEQ ID NO: 838800 - DNA, 25 bp, Homo sapien
ggaaaacagtcttctcctcttctcc

SEQ ID NO: 838801 - DNA, 25 bp, Homo sapien
ccttcctccacgtggactcaaagat

SEQ ID NO: 838802 - DNA, 25 bp, Homo sapien
gggctttgctgccactgttgaagat

SEQ ID NO: 838803 - DNA, 25 bp, Homo sapien
ggacagttggggctttgctgccact

SEQ ID NO: 838804 - DNA, 25 bp, Homo sapien
cactgttgaagatggattggactac

SEQ ID NO: 838805 - DNA, 25 bp, Homo sapien
ctttgctgccactgttgaagatgga

SEQ ID NO: 838806 - DNA, 25 bp, Homo sapien
gttgttgctggctaattggacttgg

SEQ ID NO: 838807 - DNA, 25 bp, Homo sapien
ctggactggggactaagatggccca

SEQ ID NO: 838808 - DNA, 25 bp, Homo sapien
tgctgttgttgctggctaattggac

SEQ ID NO: 838809 - DNA, 25 bp, Homo sapien
cccagagcttcggtgttgctgttgt

SEQ ID NO: 838810 - DNA, 25 bp, Homo sapien
gtttcttcacgccactggatggagg

SEQ ID NO: 838811 - DNA, 25 bp, Homo sapien
ctagatggttcggtattgctgggcc

SEQ ID NO: 838812 - DNA, 25 bp, Homo sapien
ttcacgccactggatggagggcatg

SEQ ID NO: 838813 - DNA, 25 bp, Homo sapien
ggttcggtattgctgggccactatt

SEQ ID NO: 838814 - DNA, 25 bp, Homo sapien
agcaggggggattatctaccaactt

SEQ ID NO: 838815 - DNA, 25 bp, Homo sapien
tagcaggggggattatctaccaact

SEQ ID NO: 838816 - DNA, 25 bp, Homo sapien
atttagcaggggggattatctacca

SEQ ID NO: 838817 - DNA, 25 bp, Homo sapien
tttagcaggggggattatctaccaa

SEQ ID NO: 838818 - DNA, 25 bp, Homo sapien
tctttgtgagccagaccactgatat

SEQ ID NO: 838819 - DNA, 25 bp, Homo sapien
tctgtttcaattccatctgagggaa

SEQ ID NO: 838820 - DNA, 25 bp, Homo sapien
tttcaattccatctgagggaagcca

SEQ ID NO: 838821 - DNA, 25 bp, Homo sapien
tagagagttaacttggaagcaggtt

SEQ ID NO: 838822 - DNA, 25 bp, Homo sapien
gatttcctactctaccctgactcat

SEQ ID NO: 838823 - DNA, 25 bp, Homo sapien
actctgatttcctactctaccctga

SEQ ID NO: 838824 - DNA, 25 bp, Homo sapien
ctgactcactctgatttcctactct

SEQ ID NO: 838825 - DNA, 25 bp, Homo sapien
ttacctactccaccctgactcttct

SEQ ID NO: 838826 - DNA, 25 bp, Homo sapien
ggtggacctttactggacactgcca

SEQ ID NO: 838827 - DNA, 25 bp, Homo sapien
tcccttatgggtctttcgactctca

SEQ ID NO: 838828 - DNA, 25 bp, Homo sapien
catcgtaaagtgagagaagtccctt

SEQ ID NO: 838829 - DNA, 25 bp, Homo sapien
cccgagcggatgtgtagtagtattg

SEQ ID NO: 838830 - DNA, 25 bp, Homo sapien
catgtagctggtgccgcctctgatc

SEQ ID NO: 838831 - DNA, 25 bp, Homo sapien
gcatgtagctggtgccgcctctgat

SEQ ID NO: 838832 - DNA, 25 bp, Homo sapien
ggaaattgttgtaggtgaggcggtc

SEQ ID NO: 838833 - DNA, 25 bp, Homo sapien
aggtgaggcggtcgcgagctgctgc

SEQ ID NO: 838834 - DNA, 25 bp, Homo sapien
ccattgcgatggccatgtcagcttc

SEQ ID NO: 838835 - DNA, 25 bp, Homo sapien
ttgcgatggccatgtcagcttctgt

SEQ ID NO: 838836 - DNA, 25 bp, Homo sapien
agccattgcgatggccatgtcagct

SEQ ID NO: 838837 - DNA, 25 bp, Homo sapien
cattgcgatggccatgtcagcttct

SEQ ID NO: 838838 - DNA, 25 bp, Homo sapien
ggggtgcagtggtggtgaatgaaac

SEQ ID NO: 838839 - DNA, 25 bp, Homo sapien
gtgcagtggtggtgaatgaaaccaa

SEQ ID NO: 838840 - DNA, 25 bp, Homo sapien
cagtggtggtgaatgaaaccaatac

SEQ ID NO: 838841 - DNA, 25 bp, Homo sapien
tgcagtggtggtgaatgaaaccaat

SEQ ID NO: 838842 - DNA, 25 bp, Homo sapien
taccacggggtccatgataaagccc

SEQ ID NO: 838843 - DNA, 25 bp, Homo sapien
ggggtccatgataaagccccgttca

SEQ ID NO: 838844 - DNA, 25 bp, Homo sapien
ggtccatgataaagccccgttcaaa

SEQ ID NO: 838845 - DNA, 25 bp, Homo sapien
gggcttagtaccacggggtccatga

SEQ ID NO: 838846 - DNA, 25 bp, Homo sapien
gagggtgatgtggtccttctcagca

SEQ ID NO: 838847 - DNA, 25 bp, Homo sapien
gatgtggtccttctcagcaagaaag

SEQ ID NO: 838848 - DNA, 25 bp, Homo sapien
cctcactgaggagggtgatgtggtc

SEQ ID NO: 838849 - DNA, 25 bp, Homo sapien
gtgatgtggtccttctcagcaagaa

SEQ ID NO: 838850 - DNA, 25 bp, Homo sapien
accaccagctcaatccttggtgtca

SEQ ID NO: 838851 - DNA, 25 bp, Homo sapien
tggagccaccaccagctcaatcctt

SEQ ID NO: 838852 - DNA, 25 bp, Homo sapien
gccaccaccagctcaatccttggtg

SEQ ID NO: 838853 - DNA, 25 bp, Homo sapien
agccaccaccagctcaatccttggt

SEQ ID NO: 838854 - DNA, 25 bp, Homo sapien
ggatctcatttgcctctttcaacat

SEQ ID NO: 838855 - DNA, 25 bp, Homo sapien
tcatttgcctctttcaacatcacac

SEQ ID NO: 838856 - DNA, 25 bp, Homo sapien
atctcatttgcctctttcaacatca

SEQ ID NO: 838857 - DNA, 25 bp, Homo sapien
ctacggctgcaggatctcatttgcc

SEQ ID NO: 838858 - DNA, 25 bp, Homo sapien
ctcattgcgatcattgacgataggc

SEQ ID NO: 838859 - DNA, 25 bp, Homo sapien
cagctcattgcgatcattgacgata

SEQ ID NO: 838860 - DNA, 25 bp, Homo sapien
tgacgataggcagcttccctttctt

SEQ ID NO: 838861 - DNA, 25 bp, Homo sapien
gacgataggcagcttccctttcttg

SEQ ID NO: 838862 - DNA, 25 bp, Homo sapien
tcttcttcatgttggtgtgggcgat

SEQ ID NO: 838863 - DNA, 25 bp, Homo sapien
cttcttcatgttggtgtgggcgatg

SEQ ID NO: 838864 - DNA, 25 bp, Homo sapien
ttcatgttggtgtgggcgatgatgg

SEQ ID NO: 838865 - DNA, 25 bp, Homo sapien
tcttcatgttggtgtgggcgatgat

SEQ ID NO: 838866 - DNA, 25 bp, Homo sapien
accatggccatctgatacaatgaat

SEQ ID NO: 838867 - DNA, 25 bp, Homo sapien
caccatggccatctgatacaatgaa

SEQ ID NO: 838868 - DNA, 25 bp, Homo sapien
tcaatcaggttcttcgcctgggctg

SEQ ID NO: 838869 - DNA, 25 bp, Homo sapien
gcgtcaatcaggttcttcgcctggg

SEQ ID NO: 838870 - DNA, 25 bp, Homo sapien
cagcgtcaatcaggttcttcgcctg

SEQ ID NO: 838871 - DNA, 25 bp, Homo sapien
cgtcaatcaggttcttcgcctgggc

SEQ ID NO: 838872 - DNA, 25 bp, Homo sapien
gggccagctgtaggccatcacttcc

SEQ ID NO: 838873 - DNA, 25 bp, Homo sapien
caaagtgccgggcatactcggccac

SEQ ID NO: 838874 - DNA, 25 bp, Homo sapien
gagctgcagcccatgcccacgtgca

SEQ ID NO: 838875 - DNA, 25 bp, Homo sapien
cctggggccagctgtaggccatcac

SEQ ID NO: 838876 - DNA, 25 bp, Homo sapien
cagggccttgaccatgttccccatg

SEQ ID NO: 838877 - DNA, 25 bp, Homo sapien
cccatggtctggatgccgccattgg

SEQ ID NO: 838878 - DNA, 25 bp, Homo sapien
tgttccccatggtctggatgccgcc

SEQ ID NO: 838879 - DNA, 25 bp, Homo sapien
catgttccccatggtctggatgccg

SEQ ID NO: 838880 - DNA, 25 bp, Homo sapien
tgagaagaagtacttgctggggacc

SEQ ID NO: 838881 - DNA, 25 bp, Homo sapien
gacctccgtggtggcggccagaagg

SEQ ID NO: 838882 - DNA, 25 bp, Homo sapien
aagaagtacttgctggggacctccg

SEQ ID NO: 838883 - DNA, 25 bp, Homo sapien
ggacctccgtggtggcggccagaag

SEQ ID NO: 838884 - DNA, 25 bp, Homo sapien
ttcaacttatccccctccatgaagt

SEQ ID NO: 838885 - DNA, 25 bp, Homo sapien
cttcaacttatccccctccatgaag

SEQ ID NO: 838886 - DNA, 25 bp, Homo sapien
tcaacttatccccctccatgaagta

SEQ ID NO: 838887 - DNA, 25 bp, Homo sapien
acaggttgcagaccccagtatcctg

SEQ ID NO: 838888 - DNA, 25 bp, Homo sapien
agacaggttgcagaccccagtatcc

SEQ ID NO: 838889 - DNA, 25 bp, Homo sapien
gacaggttgcagaccccagtatcct

SEQ ID NO: 838890 - DNA, 25 bp, Homo sapien
cctcttcttgtaagagtgcaggcct

SEQ ID NO: 838891 - DNA, 25 bp, Homo sapien
acaaatctctccacgatttcgtccg

SEQ ID NO: 838892 - DNA, 25 bp, Homo sapien
agtcgccgcgactctcatgcttcat

SEQ ID NO: 838893 - DNA, 25 bp, Homo sapien
tctcaagctgaagtcgccgcgactc

SEQ ID NO: 838894 - DNA, 25 bp, Homo sapien
gtccgtatatgcctctcaagctgaa

SEQ ID NO: 838895 - DNA, 25 bp, Homo sapien
gtgggtccagaaacggaagtctgtc

SEQ ID NO: 838896 - DNA, 25 bp, Homo sapien
tactcaatgccgttaattaagtaac

SEQ ID NO: 838897 - DNA, 25 bp, Homo sapien
tcttgtaggaggagtaaatatggtc

SEQ ID NO: 838898 - DNA, 25 bp, Homo sapien
cattactggagacctggtcttgtag

SEQ ID NO: 838899 - DNA, 25 bp, Homo sapien
taaatatggtcggagggtcacagga

SEQ ID NO: 838900 - DNA, 25 bp, Homo sapien
ctcagaggccgctcggtggactcgc

SEQ ID NO: 838901 - DNA, 25 bp, Homo sapien
tatctgtcagcggagaccgttcctc

SEQ ID NO: 838902 - DNA, 25 bp, Homo sapien
tggcgcggccggaaggagggtatct

SEQ ID NO: 838903 - DNA, 25 bp, Homo sapien
gaggcgctcgtggaatacgcccagc

SEQ ID NO: 838904 - DNA, 25 bp, Homo sapien
ccgccaccgccttctccaccgccac

SEQ ID NO: 838905 - DNA, 25 bp, Homo sapien
ccgccgccaccgccttctccaccgc

SEQ ID NO: 838906 - DNA, 25 bp, Homo sapien
gccccccggaggccgcagccgaggc

SEQ ID NO: 838907 - DNA, 25 bp, Homo sapien
gaggccgcagccgaggccgctgccg

SEQ ID NO: 838908 - DNA, 25 bp, Homo sapien
aagtgtccaacaggttgagccgggc

SEQ ID NO: 838909 - DNA, 25 bp, Homo sapien
ggccctgccgactctcggcctcgtt

SEQ ID NO: 838910 - DNA, 25 bp, Homo sapien
gcagcgctggcagaaagagtgcagg

SEQ ID NO: 838911 - DNA, 25 bp, Homo sapien
cttgggcgcccggctctggatgttc

SEQ ID NO: 838912 - DNA, 25 bp, Homo sapien
agcccagcatgggcgcgggcagcat

SEQ ID NO: 838913 - DNA, 25 bp, Homo sapien
gtggcggggtctcggccgagcccag

SEQ ID NO: 838914 - DNA, 25 bp, Homo sapien
ggtggcggggtctcggccgagccca

SEQ ID NO: 838915 - DNA, 25 bp, Homo sapien
tcggccgagcccagcatgggcgcgg

SEQ ID NO: 838916 - DNA, 25 bp, Homo sapien
cttgggtggcgaacggcgacgagcc

SEQ ID NO: 838917 - DNA, 25 bp, Homo sapien
ttgggtggcgaacggcgacgagccg

SEQ ID NO: 838918 - DNA, 25 bp, Homo sapien
ggtggcgaacggcgacgagccgctg

SEQ ID NO: 838919 - DNA, 25 bp, Homo sapien
tgggtggcgaacggcgacgagccgc

SEQ ID NO: 838920 - DNA, 25 bp, Homo sapien
gggccgcccggctgttgagaatgcg

SEQ ID NO: 838921 - DNA, 25 bp, Homo sapien
ggcggcgcggtcaagtccacagcgc

SEQ ID NO: 838922 - DNA, 25 bp, Homo sapien
agttgctggccgagcgcgacacgcc

SEQ ID NO: 838923 - DNA, 25 bp, Homo sapien
caaaagtgcgagtggcaggggccgc

SEQ ID NO: 838924 - DNA, 25 bp, Homo sapien
ccgagattccggctgcaggagactc

SEQ ID NO: 838925 - DNA, 25 bp, Homo sapien
cagcgggcgggtagcagttaactgg

SEQ ID NO: 838926 - DNA, 25 bp, Homo sapien
tgcagccggcaaagaacccgagatt

SEQ ID NO: 838927 - DNA, 25 bp, Homo sapien
acaaagctttgtggaggcagcgggc

SEQ ID NO: 838928 - DNA, 25 bp, Homo sapien
tcaaataacgtgagtatagacgaga

SEQ ID NO: 838929 - DNA, 25 bp, Homo sapien
taacgtgagtatagacgagatgatc

SEQ ID NO: 838930 - DNA, 25 bp, Homo sapien
acgagatgatcaggatcatatggac

SEQ ID NO: 838931 - DNA, 25 bp, Homo sapien
agtatagacgagatgatcaggatca

SEQ ID NO: 838932 - DNA, 25 bp, Homo sapien
gcctctctcctagatataactgcat

SEQ ID NO: 838933 - DNA, 25 bp, Homo sapien
caattttaacttgtggtcattcacc

SEQ ID NO: 838934 - DNA, 25 bp, Homo sapien
gctgaacagtacgttaacaacacaa

SEQ ID NO: 838935 - DNA, 25 bp, Homo sapien
aaactcccagtttgctactcattag

SEQ ID NO: 838936 - DNA, 25 bp, Homo sapien
tactgatacctactaacaggtgaat

SEQ ID NO: 838937 - DNA, 25 bp, Homo sapien
tcctcagggaaatgacaatgtatcc

SEQ ID NO: 838938 - DNA, 25 bp, Homo sapien
tatataggactgacaggtaacacag

SEQ ID NO: 838939 - DNA, 25 bp, Homo sapien
gagaactgctggagggtctataaag

SEQ ID NO: 838940 - DNA, 25 bp, Homo sapien
gggagactcttcacctataatcaaa

SEQ ID NO: 838941 - DNA, 25 bp, Homo sapien
aaatgtattataccaggccgggtgc

SEQ ID NO: 838942 - DNA, 25 bp, Homo sapien
tacttgaccttgcaggaggagcatg

SEQ ID NO: 838943 - DNA, 25 bp, Homo sapien
cactgctgcctttggtaagagatat

SEQ ID NO: 838944 - DNA, 25 bp, Homo sapien
tcttaaaacgagagtacttaccaca

SEQ ID NO: 838945 - DNA, 25 bp, Homo sapien
taaaacgagagtacttaccacagag

SEQ ID NO: 838946 - DNA, 25 bp, Homo sapien
gacacggtggcgcatacttgtcatc

SEQ ID NO: 838947 - DNA, 25 bp, Homo sapien
cagaatggaagaagatagcgagaat

SEQ ID NO: 838948 - DNA, 25 bp, Homo sapien
agaggagtgtaggcatttgaggcca

SEQ ID NO: 838949 - DNA, 25 bp, Homo sapien
cagaggagtgtagggatttgacacc

SEQ ID NO: 838950 - DNA, 25 bp, Homo sapien
agaggagtgtagggatttgacacca

SEQ ID NO: 838951 - DNA, 25 bp, Homo sapien
acaaaatagatagaacactaccaag

SEQ ID NO: 838952 - DNA, 25 bp, Homo sapien
aaatagatagaacactaccaagact

SEQ ID NO: 838953 - DNA, 25 bp, Homo sapien
agacatattcacagccaattctacc

SEQ ID NO: 838954 - DNA, 25 bp, Homo sapien
tagatagaacactaccaagactaat

SEQ ID NO: 838955 - DNA, 25 bp, Homo sapien
catccagtcaaaccaagcttgataa

SEQ ID NO: 838956 - DNA, 25 bp, Homo sapien
cacatccagtcaaaccaagcttgat

SEQ ID NO: 838957 - DNA, 25 bp, Homo sapien
cgttaagcgcggccagaaagaaagg

SEQ ID NO: 838958 - DNA, 25 bp, Homo sapien
acgttaagcgcggccagaaagaaag

SEQ ID NO: 838959 - DNA, 25 bp, Homo sapien
aatgagctgttggatatgaaccaca

SEQ ID NO: 838960 - DNA, 25 bp, Homo sapien
gggatgagatacgtgctaatgttga

SEQ ID NO: 838961 - DNA, 25 bp, Homo sapien
gaaaaactcatggagcttcacagtg

SEQ ID NO: 838962 - DNA, 25 bp, Homo sapien
cttcacagtgaaggtagcagtgctg

SEQ ID NO: 838963 - DNA, 25 bp, Homo sapien
aatacattgattccggatagcactg

SEQ ID NO: 838964 - DNA, 25 bp, Homo sapien
gatgtggtcaatacattgattccgg

SEQ ID NO: 838965 - DNA, 25 bp, Homo sapien
ggtcaatacattgattccggatagc

SEQ ID NO: 838966 - DNA, 25 bp, Homo sapien
gattccggatagcactggaaaagac

SEQ ID NO: 838967 - DNA, 25 bp, Homo sapien
tgacatcaagactactacttatgat

SEQ ID NO: 838968 - DNA, 25 bp, Homo sapien
tgttgacatcaagactactacttat

SEQ ID NO: 838969 - DNA, 25 bp, Homo sapien
atgttgacatcaagactactactta

SEQ ID NO: 838970 - DNA, 25 bp, Homo sapien
gttgacatcaagactactacttatg

SEQ ID NO: 838971 - DNA, 25 bp, Homo sapien
taatattgataatactgtggtgcaa

SEQ ID NO: 838972 - DNA, 25 bp, Homo sapien
taaacaagcctactgagctgccagt

SEQ ID NO: 838973 - DNA, 25 bp, Homo sapien
cagtcctgcaagcaccaccatgata

SEQ ID NO: 838974 - DNA, 25 bp, Homo sapien
cactccctgactcattcagagcaaa

SEQ ID NO: 838975 - DNA, 25 bp, Homo sapien
tggctgcaaactgggcaacgaatga

SEQ ID NO: 838976 - DNA, 25 bp, Homo sapien
cagtagtgtccttcacaaaaaagtt

SEQ ID NO: 838977 - DNA, 25 bp, Homo sapien
ctactgtactgctgggaacctcagt

SEQ ID NO: 838978 - DNA, 25 bp, Homo sapien
ctgcaaactgggcaacgaatgactc

SEQ ID NO: 838979 - DNA, 25 bp, Homo sapien
gaaagtttatctcccacagcaagcg

SEQ ID NO: 838980 - DNA, 25 bp, Homo sapien
gaggacttaagtgctcaacactgta

SEQ ID NO: 838981 - DNA, 25 bp, Homo sapien
ggcctttgacaaggttcacatcagg

SEQ ID NO: 838982 - DNA, 25 bp, Homo sapien
caagcgtgtctgttttggcctttga

SEQ ID NO: 838983 - DNA, 25 bp, Homo sapien
acatagaaattcatatggtagttat

SEQ ID NO: 838984 - DNA, 25 bp, Homo sapien
attcatttattcgctcagacagggt

SEQ ID NO: 838985 - DNA, 25 bp, Homo sapien
tagaaattcatatggtagttatgtt

SEQ ID NO: 838986 - DNA, 25 bp, Homo sapien
tcatttattcgctcagacagggttt

SEQ ID NO: 838987 - DNA, 25 bp, Homo sapien
gattatagggattgatctcatctac

SEQ ID NO: 838988 - DNA, 25 bp, Homo sapien
tcatctacttccttagcctcacaca

SEQ ID NO: 838989 - DNA, 25 bp, Homo sapien
gtttttgattatagggattgatctc

SEQ ID NO: 838990 - DNA, 25 bp, Homo sapien
tttgattatagggattgatctcatc

SEQ ID NO: 838991 - DNA, 25 bp, Homo sapien
gagccattcaacacactctacacaa

SEQ ID NO: 838992 - DNA, 25 bp, Homo sapien
gcttctgcgttgtcctcacagcttg

SEQ ID NO: 838993 - DNA, 25 bp, Homo sapien
gatgagctctgatacacgtcttgca

SEQ ID NO: 838994 - DNA, 25 bp, Homo sapien
tctacacaaaacccattggcttctg

SEQ ID NO: 838995 - DNA, 25 bp, Homo sapien
aataacctggtgtgcactcctctgg

SEQ ID NO: 838996 - DNA, 25 bp, Homo sapien
caaccagtgtagagtggctattaac

SEQ ID NO: 838997 - DNA, 25 bp, Homo sapien
gtgccaatttgtacttcaaccagtg

SEQ ID NO: 838998 - DNA, 25 bp, Homo sapien
taccacctgctaaggatatttgaaa

SEQ ID NO: 838999 - DNA, 25 bp, Homo sapien
gttctaacaactgacagtctcgaca

SEQ ID NO: 839000 - DNA, 25 bp, Homo sapien
cgctggctggtgacaccaactgcct

SEQ ID NO: 839001 - DNA, 25 bp, Homo sapien
aaaggacaaaacactggtcgctggc

SEQ ID NO: 839002 - DNA, 25 bp, Homo sapien
tgacagtctcgacatgtcagtttgt

SEQ ID NO: 839003 - DNA, 25 bp, Homo sapien
gggtcccaactcaagacaaggagac

SEQ ID NO: 839004 - DNA, 25 bp, Homo sapien
tagtgcagactttcagggtcccaac

SEQ ID NO: 839005 - DNA, 25 bp, Homo sapien
cttgaggagccagcgatatgatttc

SEQ ID NO: 839006 - DNA, 25 bp, Homo sapien
tatcgggagcctagaccatcataag

SEQ ID NO: 839007 - DNA, 25 bp, Homo sapien
gagtttagcagggatatgctctccc

SEQ ID NO: 839008 - DNA, 25 bp, Homo sapien
cctagactatgcatggaccttagaa

SEQ ID NO: 839009 - DNA, 25 bp, Homo sapien
tgtagatctaccaacttaccaaggt

SEQ ID NO: 839010 - DNA, 25 bp, Homo sapien
tatccagtccgaaacctgtcttgta

SEQ ID NO: 839011 - DNA, 25 bp, Homo sapien
tagctaggtagctagcacttacagg

SEQ ID NO: 839012 - DNA, 25 bp, Homo sapien
cacactgctcggcttcaattattgc

SEQ ID NO: 839013 - DNA, 25 bp, Homo sapien
cccgagtagctaggtagctagcact

SEQ ID NO: 839014 - DNA, 25 bp, Homo sapien
ttcaattattgcataaagtggtaag

SEQ ID NO: 839015 - DNA, 25 bp, Homo sapien
ttcatataaaaatatacaatgagga

SEQ ID NO: 839016 - DNA, 25 bp, Homo sapien
ataaaaatatacaatgaggaaaaag

SEQ ID NO: 839017 - DNA, 25 bp, Homo sapien
ctgaagaaataagcaaattatttca

SEQ ID NO: 839018 - DNA, 25 bp, Homo sapien
aaatatacaatgaggaaaaagtcca

SEQ ID NO: 839019 - DNA, 25 bp, Homo sapien
ttccatcagtttggtgattagtgta

SEQ ID NO: 839020 - DNA, 25 bp, Homo sapien
ccatcagtttggtgattagtgtatc

SEQ ID NO: 839021 - DNA, 25 bp, Homo sapien
ttttccatcagtttggtgattagtg

SEQ ID NO: 839022 - DNA, 25 bp, Homo sapien
catcagtttggtgattagtgtatct

SEQ ID NO: 839023 - DNA, 25 bp, Homo sapien
ataaggcaggcatctcaaatttcag

SEQ ID NO: 839024 - DNA, 25 bp, Homo sapien
caagaagtaaaaagtgtgcggaaca

SEQ ID NO: 839025 - DNA, 25 bp, Homo sapien
caatccctgtatcctagtgtcttaa

SEQ ID NO: 839026 - DNA, 25 bp, Homo sapien
gaatgctttccaactaagtttctgg

SEQ ID NO: 839027 - DNA, 25 bp, Homo sapien
tagataacagccatctaggccgcat

SEQ ID NO: 839028 - DNA, 25 bp, Homo sapien
gattgtagccatctagacaccatag

SEQ ID NO: 839029 - DNA, 25 bp, Homo sapien
taggccgcatagcaagagtcattgt

SEQ ID NO: 839030 - DNA, 25 bp, Homo sapien
ggttatgagataagccagcacaagg

SEQ ID NO: 839031 - DNA, 25 bp, Homo sapien
ccatcagtgtaaatatagcaacttt

SEQ ID NO: 839032 - DNA, 25 bp, Homo sapien
actgatgcagtagagcttttccttt

SEQ ID NO: 839033 - DNA, 25 bp, Homo sapien
ctaactgatgcagtagagcttttcc

SEQ ID NO: 839034 - DNA, 25 bp, Homo sapien
caactttaatatcctgttccacctg

SEQ ID NO: 839035 - DNA, 25 bp, Homo sapien
ctccaattgtttagagagtccagcc

SEQ ID NO: 839036 - DNA, 25 bp, Homo sapien
tcatgcgatggtcctttgcaaggct

SEQ ID NO: 839037 - DNA, 25 bp, Homo sapien
tcctgttgttgttgcataagtttca

SEQ ID NO: 839038 - DNA, 25 bp, Homo sapien
taaagtaatgctgtactgctgccac

SEQ ID NO: 839039 - DNA, 25 bp, Homo sapien
tcttatggatgagcacagaaaagtg

SEQ ID NO: 839040 - DNA, 25 bp, Homo sapien
acttaggtgataccgcagctactgg

SEQ ID NO: 839041 - DNA, 25 bp, Homo sapien
taccgcagctactggctttgagagg

SEQ ID NO: 839042 - DNA, 25 bp, Homo sapien
attccataaacttaggtgataccgc

SEQ ID NO: 839043 - DNA, 25 bp, Homo sapien
gaaatacattatgcggctgggtgca

SEQ ID NO: 839044 - DNA, 25 bp, Homo sapien
taagaaatacattatgcggctgggt

SEQ ID NO: 839045 - DNA, 25 bp, Homo sapien
attaagaaatacattatgcggctgg

SEQ ID NO: 839046 - DNA, 25 bp, Homo sapien
agaaatacattatgcggctgggtgc

SEQ ID NO: 839047 - DNA, 25 bp, Homo sapien
caccacattgagaaaatcagcacca

SEQ ID NO: 839048 - DNA, 25 bp, Homo sapien
caggatggagactatagcactgata

SEQ ID NO: 839049 - DNA, 25 bp, Homo sapien
tactgcgcttcgtaagtactgtaaa

SEQ ID NO: 839050 - DNA, 25 bp, Homo sapien
agcacatgctcacgtgtctctgtca

SEQ ID NO: 839051 - DNA, 25 bp, Homo sapien
gatgtcacacaatgccgaaattacc

SEQ ID NO: 839052 - DNA, 25 bp, Homo sapien
cagtgatatgctgtacagatcagag

SEQ ID NO: 839053 - DNA, 25 bp, Homo sapien
cagatcagagcaaaagagtaaacca

SEQ ID NO: 839054 - DNA, 25 bp, Homo sapien
gaatgcatccccgtcatcaagcaac

SEQ ID NO: 839055 - DNA, 25 bp, Homo sapien
attttgagcccagaaactaggatca

SEQ ID NO: 839056 - DNA, 25 bp, Homo sapien
ttgcacgaaggaggtgccgtaaccg

SEQ ID NO: 839057 - DNA, 25 bp, Homo sapien
aattggatggtgttgttggtcactg

SEQ ID NO: 839058 - DNA, 25 bp, Homo sapien
gcatcacaccttgcacgaaggaggt

SEQ ID NO: 839059 - DNA, 25 bp, Homo sapien
gctaggctgatctgtgttgggaact

SEQ ID NO: 839060 - DNA, 25 bp, Homo sapien
ttgggaacttggataactggtttga

SEQ ID NO: 839061 - DNA, 25 bp, Homo sapien
tatgctggagccgtaattgagctag

SEQ ID NO: 839062 - DNA, 25 bp, Homo sapien
cacgacaggattctgcttaggcatt

SEQ ID NO: 839063 - DNA, 25 bp, Homo sapien
gttgcacctgttgcctctgagccat

SEQ ID NO: 839064 - DNA, 25 bp, Homo sapien
tgatgagagatggaaggttgctgga

SEQ ID NO: 839065 - DNA, 25 bp, Homo sapien
acaggtgctggcctccgttgcacct

SEQ ID NO: 839066 - DNA, 25 bp, Homo sapien
tgcattctagggtttggtaaaccca

SEQ ID NO: 839067 - DNA, 25 bp, Homo sapien
gccagcaattacagacccagtgaaa

SEQ ID NO: 839068 - DNA, 25 bp, Homo sapien
gaagctgattctaagcaagtgaaat

SEQ ID NO: 839069 - DNA, 25 bp, Homo sapien
cactgggtttacctctcattaactt

SEQ ID NO: 839070 - DNA, 25 bp, Homo sapien
ttcaagagtggccagcaattacaga

SEQ ID NO: 839071 - DNA, 25 bp, Homo sapien
tagaactctgccacagatcaatcaa

SEQ ID NO: 839072 - DNA, 25 bp, Homo sapien
attgtaccagaattggacctaggcc

SEQ ID NO: 839073 - DNA, 25 bp, Homo sapien
gatgggcagactttcagaatttgtg

SEQ ID NO: 839074 - DNA, 25 bp, Homo sapien
gagagggattgccacctagattttg

SEQ ID NO: 839075 - DNA, 25 bp, Homo sapien
agtttatcaaacgtggaggcggttg

SEQ ID NO: 839076 - DNA, 25 bp, Homo sapien
tgaaagtttatcaaacgtggaggcg

SEQ ID NO: 839077 - DNA, 25 bp, Homo sapien
ctgaaagtttatcaaacgtggaggc

SEQ ID NO: 839078 - DNA, 25 bp, Homo sapien
ccaagaaagccatctgtagggggtt

SEQ ID NO: 839079 - DNA, 25 bp, Homo sapien
gtttggtggatatctcagttgttga

SEQ ID NO: 839080 - DNA, 25 bp, Homo sapien
cttgtcgtggtatgttctggtttgg

SEQ ID NO: 839081 - DNA, 25 bp, Homo sapien
tatggcttgttgagccaagaaagcc

SEQ ID NO: 839082 - DNA, 25 bp, Homo sapien
gatggggttccctgtccactgctga

SEQ ID NO: 839083 - DNA, 25 bp, Homo sapien
ttgatggggttccctgtccactgct

SEQ ID NO: 839084 - DNA, 25 bp, Homo sapien
tggggttccctgtccactgctgatc

SEQ ID NO: 839085 - DNA, 25 bp, Homo sapien
ggttccctgtccactgctgatctgc

SEQ ID NO: 839086 - DNA, 25 bp, Homo sapien
ggaagattataagaccctcccactg

SEQ ID NO: 839087 - DNA, 25 bp, Homo sapien
tcataggtgaaccaaaagcctttcc

SEQ ID NO: 839088 - DNA, 25 bp, Homo sapien
tatcctgctgcactagtaatcgtgg

SEQ ID NO: 839089 - DNA, 25 bp, Homo sapien
cctcccactggtgagctcaaatcga

SEQ ID NO: 839090 - DNA, 25 bp, Homo sapien
cactgatgaatttggtgactggacc

SEQ ID NO: 839091 - DNA, 25 bp, Homo sapien
cttggctggccatgatctatattag

SEQ ID NO: 839092 - DNA, 25 bp, Homo sapien
tgactggaccgttctgtttgagggt

SEQ ID NO: 839093 - DNA, 25 bp, Homo sapien
ccagcataatagtacttgaacagtc

SEQ ID NO: 839094 - DNA, 25 bp, Homo sapien
gatcaatgggttcagacttaaggca

SEQ ID NO: 839095 - DNA, 25 bp, Homo sapien
tgaactgatgaaggcccaaactaaa

SEQ ID NO: 839096 - DNA, 25 bp, Homo sapien
caaggaagatctaattaaaagcagc

SEQ ID NO: 839097 - DNA, 25 bp, Homo sapien
gattctggactactgccctaaaaag

SEQ ID NO: 839098 - DNA, 25 bp, Homo sapien
gggtgtacactagtcatagtaacag

SEQ ID NO: 839099 - DNA, 25 bp, Homo sapien
tgtacactagtcatagtaacaggtc

SEQ ID NO: 839100 - DNA, 25 bp, Homo sapien
cttcctcggcttccaacgctggagg

SEQ ID NO: 839101 - DNA, 25 bp, Homo sapien
cgctggaggcactaggtgaacgtat

SEQ ID NO: 839102 - DNA, 25 bp, Homo sapien
aatcataattttccggtggtccact

SEQ ID NO: 839103 - DNA, 25 bp, Homo sapien
tttgtgtgtagagtcagctcctgct

SEQ ID NO: 839104 - DNA, 25 bp, Homo sapien
tgttttattcgaattggctccagca

SEQ ID NO: 839105 - DNA, 25 bp, Homo sapien
catgaccactgggactttgtgtgta

SEQ ID NO: 839106 - DNA, 25 bp, Homo sapien
accatgcataggaatagcattgcaa

SEQ ID NO: 839107 - DNA, 25 bp, Homo sapien
tagcattgcaagcattcataattac

SEQ ID NO: 839108 - DNA, 25 bp, Homo sapien
ggaatagcattgcaagcattcataa

SEQ ID NO: 839109 - DNA, 25 bp, Homo sapien
gcataggaatagcattgcaagcatt

SEQ ID NO: 839110 - DNA, 25 bp, Homo sapien
agcagggaggtgagtatgcttcttg

SEQ ID NO: 839111 - DNA, 25 bp, Homo sapien
tgagtatgcttcttggataattggc

SEQ ID NO: 839112 - DNA, 25 bp, Homo sapien
cagggaggtgagtatgcttcttgga

SEQ ID NO: 839113 - DNA, 25 bp, Homo sapien
ggtgagtatgcttcttggataattg

SEQ ID NO: 839114 - DNA, 25 bp, Homo sapien
tctccaacatgaagaggtgacttct

SEQ ID NO: 839115 - DNA, 25 bp, Homo sapien
tgggaaggatccaaccattcagact

SEQ ID NO: 839116 - DNA, 25 bp, Homo sapien
gggcatctgatcttagcacagtctc

SEQ ID NO: 839117 - DNA, 25 bp, Homo sapien
aggttgatctcctgtactatcaggg

SEQ ID NO: 839118 - DNA, 25 bp, Homo sapien
tgggcacatgacaagaaagatggaa

SEQ ID NO: 839119 - DNA, 25 bp, Homo sapien
acttttcacagcagaggagttcccc

SEQ ID NO: 839120 - DNA, 25 bp, Homo sapien
ttcccctccgttttgacaaactgca

SEQ ID NO: 839121 - DNA, 25 bp, Homo sapien
aaaatttgtcaatgtgggcacatga

SEQ ID NO: 839122 - DNA, 25 bp, Homo sapien
gcacaaagaataagcggaagggtat

SEQ ID NO: 839123 - DNA, 25 bp, Homo sapien
tgtgggaagggaagtactatcttac

SEQ ID NO: 839124 - DNA, 25 bp, Homo sapien
tcattgggattttggagtatacact

SEQ ID NO: 839125 - DNA, 25 bp, Homo sapien
ggaaaacctagactattcattggga

SEQ ID NO: 839126 - DNA, 25 bp, Homo sapien
caacttctggtttagataagtctcg

SEQ ID NO: 839127 - DNA, 25 bp, Homo sapien
tctataggtgttaacttaacaaggc

SEQ ID NO: 839128 - DNA, 25 bp, Homo sapien
gtgactgggagcatcacaatcatat

SEQ ID NO: 839129 - DNA, 25 bp, Homo sapien
taagtctcggcagaaagtgcaaatc

SEQ ID NO: 839130 - DNA, 25 bp, Homo sapien
agaaataaaagtaggcgctcacact

SEQ ID NO: 839131 - DNA, 25 bp, Homo sapien
gaaataaaagtaggcgctcacactt

SEQ ID NO: 839132 - DNA, 25 bp, Homo sapien
taattattttgtaataatcaggcac

SEQ ID NO: 839133 - DNA, 25 bp, Homo sapien
ttaattattttgtaataatcaggca

SEQ ID NO: 839134 - DNA, 25 bp, Homo sapien
tttaattattttgtaataatcaggc

SEQ ID NO: 839135 - DNA, 25 bp, Homo sapien
ttcaggttttgagtacatggaataa

SEQ ID NO: 839136 - DNA, 25 bp, Homo sapien
cattgaattcagcacagttttgaaa

SEQ ID NO: 839137 - DNA, 25 bp, Homo sapien
aaagatcaatctaaaatcagctaca

SEQ ID NO: 839138 - DNA, 25 bp, Homo sapien
acatggaataatcttcttgtagtct

SEQ ID NO: 839139 - DNA, 25 bp, Homo sapien
ggctgtacaaagtcatcatctgaat

SEQ ID NO: 839140 - DNA, 25 bp, Homo sapien
tataccagcattggctacttctgaa

SEQ ID NO: 839141 - DNA, 25 bp, Homo sapien
caatgcttttgaggcgtttcttccg

SEQ ID NO: 839142 - DNA, 25 bp, Homo sapien
taagcaactggcgttcttcaatgct

SEQ ID NO: 839143 - DNA, 25 bp, Homo sapien
tacccttctgttgcaccgtttggcc

SEQ ID NO: 839144 - DNA, 25 bp, Homo sapien
caggccatataattcacgggtagtg

SEQ ID NO: 839145 - DNA, 25 bp, Homo sapien
agtagctatcactccagactgtggt

SEQ ID NO: 839146 - DNA, 25 bp, Homo sapien
taaaaaccagcacaagctagtggtg

SEQ ID NO: 839147 - DNA, 25 bp, Homo sapien
tacttccctcagtggaagaagttga

SEQ ID NO: 839148 - DNA, 25 bp, Homo sapien
aaagctatactgcaaacaatgaggc

SEQ ID NO: 839149 - DNA, 25 bp, Homo sapien
gcttgttgtaaaaggatcacctgta

SEQ ID NO: 839150 - DNA, 25 bp, Homo sapien
aaaaatggccttgaaaacctgctat

SEQ ID NO: 839151 - DNA, 25 bp, Homo sapien
gattaacttcggcaaaccatttaga

SEQ ID NO: 839152 - DNA, 25 bp, Homo sapien
tctatatcagctgaaccgggtaggt

SEQ ID NO: 839153 - DNA, 25 bp, Homo sapien
ccgggtaggtctggcacattaagaa

SEQ ID NO: 839154 - DNA, 25 bp, Homo sapien
catcaaatacagtgcacgctgctgt

SEQ ID NO: 839155 - DNA, 25 bp, Homo sapien
gccaaagatggttagggtgaaacaa

SEQ ID NO: 839156 - DNA, 25 bp, Homo sapien
ccacagctgctgtgctaaaaataaa

SEQ ID NO: 839157 - DNA, 25 bp, Homo sapien
gaaaacccaatgaattagccacagg

SEQ ID NO: 839158 - DNA, 25 bp, Homo sapien
tatggaagaataaactgtcagacga

SEQ ID NO: 839159 - DNA, 25 bp, Homo sapien
gaaaagtcagttgcttggcacctag

SEQ ID NO: 839160 - DNA, 25 bp, Homo sapien
taaagacgaagactactgcctcaga

SEQ ID NO: 839161 - DNA, 25 bp, Homo sapien
tccataagccctagccagaagtgtg

SEQ ID NO: 839162 - DNA, 25 bp, Homo sapien
tatatcactggtcaagtacttgggc

SEQ ID NO: 839163 - DNA, 25 bp, Homo sapien
taatccaagatacttaccacccgct

SEQ ID NO: 839164 - DNA, 25 bp, Homo sapien
tatttatggactagtagcttgcccc

SEQ ID NO: 839165 - DNA, 25 bp, Homo sapien
agcaaataggttggccccatgaaag

SEQ ID NO: 839166 - DNA, 25 bp, Homo sapien
gctggtatgaggcagaataatccaa

SEQ ID NO: 839167 - DNA, 25 bp, Homo sapien
tttgaggatgttgttctttggtcat

SEQ ID NO: 839168 - DNA, 25 bp, Homo sapien
gaaagagggagtcctggcacttttg

SEQ ID NO: 839169 - DNA, 25 bp, Homo sapien
ctgtgaaagagggagtcctggcact

SEQ ID NO: 839170 - DNA, 25 bp, Homo sapien
tgtgaaagagggagtcctggcactt

SEQ ID NO: 839171 - DNA, 25 bp, Homo sapien
ttctctgtctggtgcctgtggtcac

SEQ ID NO: 839172 - DNA, 25 bp, Homo sapien
cttccagtcggtagtaggcattgca

SEQ ID NO: 839173 - DNA, 25 bp, Homo sapien
ctttcagccttccagtcggtagtag

SEQ ID NO: 839174 - DNA, 25 bp, Homo sapien
gcattgcgttcagggtttgctccat

SEQ ID NO: 839175 - DNA, 25 bp, Homo sapien
tagtaggcattgcattgcgttcagg

SEQ ID NO: 839176 - DNA, 25 bp, Homo sapien
ggtggcaccatttatatcccaggta

SEQ ID NO: 839177 - DNA, 25 bp, Homo sapien
gaaccagcggctccctgtgtcgcat

SEQ ID NO: 839178 - DNA, 25 bp, Homo sapien
ctgtgtcgcattggtgcaatggtgg

SEQ ID NO: 839179 - DNA, 25 bp, Homo sapien
caccacgatgcgcgctttggggatg

SEQ ID NO: 839180 - DNA, 25 bp, Homo sapien
gtgtttggtgctctatgcattccaa

SEQ ID NO: 839181 - DNA, 25 bp, Homo sapien
tgtgtttggtgctctatgcattcca

SEQ ID NO: 839182 - DNA, 25 bp, Homo sapien
tgtttggtgctctatgcattccaaa

SEQ ID NO: 839183 - DNA, 25 bp, Homo sapien
tatttttcgctgatattgtcccaaa

SEQ ID NO: 839184 - DNA, 25 bp, Homo sapien
gcatccacagtgcactcgaagctgg

SEQ ID NO: 839185 - DNA, 25 bp, Homo sapien
ttcaacaccgtctacatttacacag

SEQ ID NO: 839186 - DNA, 25 bp, Homo sapien
gggctctggtagctgcaaacttcaa

SEQ ID NO: 839187 - DNA, 25 bp, Homo sapien
tagtgccggcctgattggcttcctc

SEQ ID NO: 839188 - DNA, 25 bp, Homo sapien
gtgctgctttgcgattgtttttctg

SEQ ID NO: 839189 - DNA, 25 bp, Homo sapien
tgaagtgctgctttgcgattgtttt

SEQ ID NO: 839190 - DNA, 25 bp, Homo sapien
gtgtgaagtgctgctttgcgattgt

SEQ ID NO: 839191 - DNA, 25 bp, Homo sapien
aagtgctgctttgcgattgtttttc

SEQ ID NO: 839192 - DNA, 25 bp, Homo sapien
agtgaatagcaaaccatttcacaga

SEQ ID NO: 839193 - DNA, 25 bp, Homo sapien
tgaatagcaaaccatttcacagatc

SEQ ID NO: 839194 - DNA, 25 bp, Homo sapien
ccttgatgacctgggaagtgtcatg

SEQ ID NO: 839195 - DNA, 25 bp, Homo sapien
gacctgggaagtgtcatgagtgttc

SEQ ID NO: 839196 - DNA, 25 bp, Homo sapien
taacatcggaatggtacgcactatt

SEQ ID NO: 839197 - DNA, 25 bp, Homo sapien
atcggaatggtacgcactatttctg

SEQ ID NO: 839198 - DNA, 25 bp, Homo sapien
tgtaacatcggaatggtacgcacta

SEQ ID NO: 839199 - DNA, 25 bp, Homo sapien
acatcggaatggtacgcactatttc

SEQ ID NO: 839200 - DNA, 25 bp, Homo sapien
ataagctctgtcgatccggcggcgc

SEQ ID NO: 839201 - DNA, 25 bp, Homo sapien
cataagctctgtcgatccggcggcg

SEQ ID NO: 839202 - DNA, 25 bp, Homo sapien
tcttcagggcaaccttgtcttctgg

SEQ ID NO: 839203 - DNA, 25 bp, Homo sapien
tttcttcagggcaaccttgtcttct

SEQ ID NO: 839204 - DNA, 25 bp, Homo sapien
ttcagggcaaccttgtcttctggtt

SEQ ID NO: 839205 - DNA, 25 bp, Homo sapien
tctttttcttcagggcaaccttgtc

SEQ ID NO: 839206 - DNA, 25 bp, Homo sapien
cctttgttatatgtaattggctgtc

SEQ ID NO: 839207 - DNA, 25 bp, Homo sapien
tatgtaattggctgtccccttgtca

SEQ ID NO: 839208 - DNA, 25 bp, Homo sapien
attggctgtccccttgtcaaatata

SEQ ID NO: 839209 - DNA, 25 bp, Homo sapien
tgttatatgtaattggctgtcccct

SEQ ID NO: 839210 - DNA, 25 bp, Homo sapien
tgtagctttttaggaacttatagtg

SEQ ID NO: 839211 - DNA, 25 bp, Homo sapien
tttgtgaaggtaggtcatggattac

SEQ ID NO: 839212 - DNA, 25 bp, Homo sapien
gaaggtaggtcatggattactttcc

SEQ ID NO: 839213 - DNA, 25 bp, Homo sapien
aacttatagtgagggacgcgaagca

SEQ ID NO: 839214 - DNA, 25 bp, Homo sapien
gaacctgctccttaattctaagcaa

SEQ ID NO: 839215 - DNA, 25 bp, Homo sapien
atgaacctgctccttaattctaagc

SEQ ID NO: 839216 - DNA, 25 bp, Homo sapien
ctgcaggatatggctgacaggatgg

SEQ ID NO: 839217 - DNA, 25 bp, Homo sapien
gcaggatatggctgacaggatgggc

SEQ ID NO: 839218 - DNA, 25 bp, Homo sapien
gcaccatggcctataccaggggcta

SEQ ID NO: 839219 - DNA, 25 bp, Homo sapien
tggcctataccaggggctacagcat

SEQ ID NO: 839220 - DNA, 25 bp, Homo sapien
catggcctataccaggggctacagc

SEQ ID NO: 839221 - DNA, 25 bp, Homo sapien
aggcaccatggcctataccaggggc

SEQ ID NO: 839222 - DNA, 25 bp, Homo sapien
tcatggcctggccactcagtgactc

SEQ ID NO: 839223 - DNA, 25 bp, Homo sapien
agttgacccaagacaggctcatggc

SEQ ID NO: 839224 - DNA, 25 bp, Homo sapien
gtgactcctggcatagcaaaggctg

SEQ ID NO: 839225 - DNA, 25 bp, Homo sapien
aggcccacagagttgacccaagaca

SEQ ID NO: 839226 - DNA, 25 bp, Homo sapien
cacagcagttgttgcagttaccaaa

SEQ ID NO: 839227 - DNA, 25 bp, Homo sapien
tagcctcgccatcctcttttgaaga

SEQ ID NO: 839228 - DNA, 25 bp, Homo sapien
caatgcaacagtaatcagggaagtc

SEQ ID NO: 839229 - DNA, 25 bp, Homo sapien
ttgattgcaattttcgacacggccg

SEQ ID NO: 839230 - DNA, 25 bp, Homo sapien
aaatcatgctatgggccctcagctg

SEQ ID NO: 839231 - DNA, 25 bp, Homo sapien
aatcatgctatgggccctcagctgg

SEQ ID NO: 839232 - DNA, 25 bp, Homo sapien
ttaaatcatgctatgggccctcagc

SEQ ID NO: 839233 - DNA, 25 bp, Homo sapien
taaatcatgctatgggccctcagct

SEQ ID NO: 839234 - DNA, 25 bp, Homo sapien
ccagcaagggcagtaatcaccacca

SEQ ID NO: 839235 - DNA, 25 bp, Homo sapien
gtcctcactggtgaacccatatgag

SEQ ID NO: 839236 - DNA, 25 bp, Homo sapien
gatcctcccagatgcatctgtgtga

SEQ ID NO: 839237 - DNA, 25 bp, Homo sapien
tatgagggagctccaagctcaagag

SEQ ID NO: 839238 - DNA, 25 bp, Homo sapien
tcctggatggcacagccgaggagta

SEQ ID NO: 839239 - DNA, 25 bp, Homo sapien
tctcctttaaacacatcctggatgg

SEQ ID NO: 839240 - DNA, 25 bp, Homo sapien
ggcctcccctcaacaacagggttga

SEQ ID NO: 839241 - DNA, 25 bp, Homo sapien
caagttctatgtcggggatggttac

SEQ ID NO: 839242 - DNA, 25 bp, Homo sapien
tgtgtttcaatctcccatttcttac

SEQ ID NO: 839243 - DNA, 25 bp, Homo sapien
cttccagcctctaactgatgtgttt

SEQ ID NO: 839244 - DNA, 25 bp, Homo sapien
ttccagcctctaactgatgtgtttc

SEQ ID NO: 839245 - DNA, 25 bp, Homo sapien
tgatgtgtttcaatctcccatttct

SEQ ID NO: 839246 - DNA, 25 bp, Homo sapien
tgtatccagtgacaatcagccgtcg

SEQ ID NO: 839247 - DNA, 25 bp, Homo sapien
gtgtgcagtgcatgcccttcagctg

SEQ ID NO: 839248 - DNA, 25 bp, Homo sapien
ggagccctggacatgcacagatgta

SEQ ID NO: 839249 - DNA, 25 bp, Homo sapien
gagactgtacccagcttgccctgat

SEQ ID NO: 839250 - DNA, 25 bp, Homo sapien
tggtgatgaacagcggccttcagac

SEQ ID NO: 839251 - DNA, 25 bp, Homo sapien
tgtcctgacagtagccatccttctg

SEQ ID NO: 839252 - DNA, 25 bp, Homo sapien
ccatccttctgatcatggagggcct

SEQ ID NO: 839253 - DNA, 25 bp, Homo sapien
tctgaagtgctctggactatggtga

SEQ ID NO: 839254 - DNA, 25 bp, Homo sapien
gggacacgggctcagctacgagtcc

SEQ ID NO: 839255 - DNA, 25 bp, Homo sapien
ggttttttccgatccccatccatga

SEQ ID NO: 839256 - DNA, 25 bp, Homo sapien
cgggctcagctacgagtccgggttt

SEQ ID NO: 839257 - DNA, 25 bp, Homo sapien
gagagcccttgtagggcagttagct

SEQ ID NO: 839258 - DNA, 25 bp, Homo sapien
gcgttccatgtctctgcgtttatca

SEQ ID NO: 839259 - DNA, 25 bp, Homo sapien
tagccgcttgcaagtggcaggcctg

SEQ ID NO: 839260 - DNA, 25 bp, Homo sapien
ggcagcaagcaaataggggtcctct

SEQ ID NO: 839261 - DNA, 25 bp, Homo sapien
gggtcctcttccttgcgttccatgt

SEQ ID NO: 839262 - DNA, 25 bp, Homo sapien
tgaagatcacacgaatgctaagcac

SEQ ID NO: 839263 - DNA, 25 bp, Homo sapien
cacgcagggctgagtgtgtgcatct

SEQ ID NO: 839264 - DNA, 25 bp, Homo sapien
cgtgtgcacgtgaaagtctgcgtat

SEQ ID NO: 839265 - DNA, 25 bp, Homo sapien
tgtaaatctcaggtacgggtctaac

SEQ ID NO: 839266 - DNA, 25 bp, Homo sapien
gaaactgactggtaacaggagctcc

SEQ ID NO: 839267 - DNA, 25 bp, Homo sapien
tgtccataagccaagagccaggtta

SEQ ID NO: 839268 - DNA, 25 bp, Homo sapien
catggatgatagctctgaaactgac

SEQ ID NO: 839269 - DNA, 25 bp, Homo sapien
tagatttctcctttgcgccaccaga

SEQ ID NO: 839270 - DNA, 25 bp, Homo sapien
tgcccggtgcaggtgagccggtcct

SEQ ID NO: 839271 - DNA, 25 bp, Homo sapien
ctgctgcaggtgagtcgactcccac

SEQ ID NO: 839272 - DNA, 25 bp, Homo sapien
caggtgagtcgactcccacctgcag

SEQ ID NO: 839273 - DNA, 25 bp, Homo sapien
gtgagccggtcctgcggagttgtgc

SEQ ID NO: 839274 - DNA, 25 bp, Homo sapien
tgggtggtgagcggtcaagcttgag

SEQ ID NO: 839275 - DNA, 25 bp, Homo sapien
tgagcggtcaagcttgagctgttgc

SEQ ID NO: 839276 - DNA, 25 bp, Homo sapien
gtggtgagcggtcaagcttgagctg

SEQ ID NO: 839277 - DNA, 25 bp, Homo sapien
gtgagcggtcaagcttgagctgttg

SEQ ID NO: 839278 - DNA, 25 bp, Homo sapien
aatgcattcggtcattcaatgaggg

SEQ ID NO: 839279 - DNA, 25 bp, Homo sapien
cgttttaagtgcctaagttaatgca

SEQ ID NO: 839280 - DNA, 25 bp, Homo sapien
gcctaagttaatgcattcggtcatt

SEQ ID NO: 839281 - DNA, 25 bp, Homo sapien
cgcccagcctatccttcgttttaag

SEQ ID NO: 839282 - DNA, 25 bp, Homo sapien
gtactcgtccactcctgtgcggcag

SEQ ID NO: 839283 - DNA, 25 bp, Homo sapien
gctgccgcgatccagccgtactcgt

SEQ ID NO: 839284 - DNA, 25 bp, Homo sapien
tccagccaacagctgccgcgatcca

SEQ ID NO: 839285 - DNA, 25 bp, Homo sapien
cctgtgcggcagcaccgggctgctt

SEQ ID NO: 839286 - DNA, 25 bp, Homo sapien
ccttccccattagccacaaattggt

SEQ ID NO: 839287 - DNA, 25 bp, Homo sapien
tagaaaccatgttagccttactccc

SEQ ID NO: 839288 - DNA, 25 bp, Homo sapien
ccattttgtgcaccgagcctgggtc

SEQ ID NO: 839289 - DNA, 25 bp, Homo sapien
gccacaaattggtggcgatcaccat

SEQ ID NO: 839290 - DNA, 25 bp, Homo sapien
ccaggggcccttgggagtgacatgc

SEQ ID NO: 839291 - DNA, 25 bp, Homo sapien
tggcttgccttatttggttctcccg

SEQ ID NO: 839292 - DNA, 25 bp, Homo sapien
tgccttatttggttctcccgctctt

SEQ ID NO: 839293 - DNA, 25 bp, Homo sapien
gagtgacatgcaagggcagcactgg

SEQ ID NO: 839294 - DNA, 25 bp, Homo sapien
tacagagggactatcttgagagagg

SEQ ID NO: 839295 - DNA, 25 bp, Homo sapien
acctcccttggtgcctagaagaaag

SEQ ID NO: 839296 - DNA, 25 bp, Homo sapien
cttatagtttcttgtgcacctccct

SEQ ID NO: 839297 - DNA, 25 bp, Homo sapien
gaaatgacagttaagcccaggactc

SEQ ID NO: 839298 - DNA, 25 bp, Homo sapien
tgaaggctaaaacttgggcaccggc

SEQ ID NO: 839299 - DNA, 25 bp, Homo sapien
aggctaaaacttgggcaccggcagg

SEQ ID NO: 839300 - DNA, 25 bp, Homo sapien
gcagtgaaggctaaaacttgggcac

SEQ ID NO: 839301 - DNA, 25 bp, Homo sapien
gagccgtggaagacaggatgaagcc

SEQ ID NO: 839302 - DNA, 25 bp, Homo sapien
gacagaatgcaatatccctggcgtg

SEQ ID NO: 839303 - DNA, 25 bp, Homo sapien
gagagagcagtgaccaaaccattgg

SEQ ID NO: 839304 - DNA, 25 bp, Homo sapien
tggagtggcccattcacaacaactg

SEQ ID NO: 839305 - DNA, 25 bp, Homo sapien
tcctccaaagagctgaatgctgggc

SEQ ID NO: 839306 - DNA, 25 bp, Homo sapien
ttgaaagaacaacgggcctcatgcc

SEQ ID NO: 839307 - DNA, 25 bp, Homo sapien
agactggagggcatctcagacacca

SEQ ID NO: 839308 - DNA, 25 bp, Homo sapien
taccccgattccatgaagcgactga

SEQ ID NO: 839309 - DNA, 25 bp, Homo sapien
cacaaggtttaaagacacaagagcc

SEQ ID NO: 839310 - DNA, 25 bp, Homo sapien
caaaagttaggtaagttctgttgct

SEQ ID NO: 839311 - DNA, 25 bp, Homo sapien
ttgatacagacatgccccatataat

SEQ ID NO: 839312 - DNA, 25 bp, Homo sapien
tataatatggactctgtgttacata

SEQ ID NO: 839313 - DNA, 25 bp, Homo sapien
aactgtagctgtgttgaggacagtg

SEQ ID NO: 839314 - DNA, 25 bp, Homo sapien
tcttcaccagcattaggactacatg

SEQ ID NO: 839315 - DNA, 25 bp, Homo sapien
gaaatcctggtcaaatgtatatccc

SEQ ID NO: 839316 - DNA, 25 bp, Homo sapien
taaaattactgaggcaaatgacctg

SEQ ID NO: 839317 - DNA, 25 bp, Homo sapien
tggtgccaatgtgctctacacagcg

SEQ ID NO: 839318 - DNA, 25 bp, Homo sapien
ggagttttcaccgtggtcatttcta

SEQ ID NO: 839319 - DNA, 25 bp, Homo sapien
ttctacctccggagcaaggtgccag

SEQ ID NO: 839320 - DNA, 25 bp, Homo sapien
aggtgccagcgccagtactagagcc

SEQ ID NO: 839321 - DNA, 25 bp, Homo sapien
tagagcctgcttatccacatttgcc

SEQ ID NO: 839322 - DNA, 25 bp, Homo sapien
caccaattttccgattgcatttatt

SEQ ID NO: 839323 - DNA, 25 bp, Homo sapien
aattttccgattgcatttattaagc

SEQ ID NO: 839324 - DNA, 25 bp, Homo sapien
ttcaccaattttccgattgcattta

SEQ ID NO: 839325 - DNA, 25 bp, Homo sapien
tccttcaccaattttccgattgcat

SEQ ID NO: 839326 - DNA, 25 bp, Homo sapien
tttgttttctgagaagaggtttgaa

SEQ ID NO: 839327 - DNA, 25 bp, Homo sapien
tttctgagaagaggtttgaagacat

SEQ ID NO: 839328 - DNA, 25 bp, Homo sapien
tgtacgatgaacctgctgctttgtt

SEQ ID NO: 839329 - DNA, 25 bp, Homo sapien
gtgtacgatgaacctgctgctttgt

SEQ ID NO: 839330 - DNA, 25 bp, Homo sapien
aacagagcaccgtgcagaacttcca

SEQ ID NO: 839331 - DNA, 25 bp, Homo sapien
catcaaagcaatccgcgaggagctc

SEQ ID NO: 839332 - DNA, 25 bp, Homo sapien
gctctcccagaaacagagcaccgtg

SEQ ID NO: 839333 - DNA, 25 bp, Homo sapien
gcctcgcctcgcagatttgccaagt

SEQ ID NO: 839334 - DNA, 25 bp, Homo sapien
ggactgcagggccctgggctgggtt

SEQ ID NO: 839335 - DNA, 25 bp, Homo sapien
actgcagggccctgggctgggttac

SEQ ID NO: 839336 - DNA, 25 bp, Homo sapien
ggggactgcagggccctgggctggg

SEQ ID NO: 839337 - DNA, 25 bp, Homo sapien
tgcagggccctgggctgggttaccc

SEQ ID NO: 839338 - DNA, 25 bp, Homo sapien
tatcacccgacctttcacatcatgg

SEQ ID NO: 839339 - DNA, 25 bp, Homo sapien
cacacactcacgcagagacaggaga

SEQ ID NO: 839340 - DNA, 25 bp, Homo sapien
gcctggcatggatccgcttaacctc

SEQ ID NO: 839341 - DNA, 25 bp, Homo sapien
cagaagatggttgcgtaggctccag

SEQ ID NO: 839342 - DNA, 25 bp, Homo sapien
ttcttaataaatgagctgctccttg

SEQ ID NO: 839343 - DNA, 25 bp, Homo sapien
gctgctccttgttggtaactgccac

SEQ ID NO: 839344 - DNA, 25 bp, Homo sapien
aaatgagctgctccttgttggtaac

SEQ ID NO: 839345 - DNA, 25 bp, Homo sapien
tctgtggtaccgtttatccccagtc

SEQ ID NO: 839346 - DNA, 25 bp, Homo sapien
cagttggagccaccgtcatctctca

SEQ ID NO: 839347 - DNA, 25 bp, Homo sapien
ttaaacatgccagaactttgctgat

SEQ ID NO: 839348 - DNA, 25 bp, Homo sapien
aacaccttcttaattgtctccctgc

SEQ ID NO: 839349 - DNA, 25 bp, Homo sapien
gttgaaatgatagaccaggtgctgc

SEQ ID NO: 839350 - DNA, 25 bp, Homo sapien
aagccccacctgaaactgaacactg

SEQ ID NO: 839351 - DNA, 25 bp, Homo sapien
tgactgtgttggagataagggcctt

SEQ ID NO: 839352 - DNA, 25 bp, Homo sapien
tgttgatgtaagactttccagcctc

SEQ ID NO: 839353 - DNA, 25 bp, Homo sapien
tctctctggccaggttaagacacag

SEQ ID NO: 839354 - DNA, 25 bp, Homo sapien
gcttaatgggctaccctctgtgaca

SEQ ID NO: 839355 - DNA, 25 bp, Homo sapien
tgccaccctggaggaaagtgatccc

SEQ ID NO: 839356 - DNA, 25 bp, Homo sapien
tactctataagtctgggttaagcag

SEQ ID NO: 839357 - DNA, 25 bp, Homo sapien
tagtcaggttccttctaggtatggg

SEQ ID NO: 839358 - DNA, 25 bp, Homo sapien
gacattgtgatatttccatgtatga

SEQ ID NO: 839359 - DNA, 25 bp, Homo sapien
ttattagagttaccctacagtgcct

SEQ ID NO: 839360 - DNA, 25 bp, Homo sapien
gtcaccacagacaaagttatcatta

SEQ ID NO: 839361 - DNA, 25 bp, Homo sapien
cattactttgccttgggaacattca

SEQ ID NO: 839362 - DNA, 25 bp, Homo sapien
ctgtgggcttcactgcgttttgtgc

SEQ ID NO: 839363 - DNA, 25 bp, Homo sapien
gtatttatggcccacgtgttcacat

SEQ ID NO: 839364 - DNA, 25 bp, Homo sapien
ggcccacgtgttcacattcatcagg

SEQ ID NO: 839365 - DNA, 25 bp, Homo sapien
tcactgcgttttgtgccacctgggc

SEQ ID NO: 839366 - DNA, 25 bp, Homo sapien
ctctcccaaactccgggaccacagg

SEQ ID NO: 839367 - DNA, 25 bp, Homo sapien
gctctcccaaactccgggaccacag

SEQ ID NO: 839368 - DNA, 25 bp, Homo sapien
ccacagggttacgggagtgcccgtg

SEQ ID NO: 839369 - DNA, 25 bp, Homo sapien
cagggttacgggagtgcccgtgtgg

SEQ ID NO: 839370 - DNA, 25 bp, Homo sapien
agaaggacgagccatccgaaagcag

SEQ ID NO: 839371 - DNA, 25 bp, Homo sapien
caaatagcacgcgatctctgcattc

SEQ ID NO: 839372 - DNA, 25 bp, Homo sapien
ttagcaagggagaaggacgagccat

SEQ ID NO: 839373 - DNA, 25 bp, Homo sapien
accaacacaaatagcacgcgatctc

SEQ ID NO: 839374 - DNA, 25 bp, Homo sapien
gtgagccacaccagatccggctcag

SEQ ID NO: 839375 - DNA, 25 bp, Homo sapien
agaatgagtccaggacagcctttgc

SEQ ID NO: 839376 - DNA, 25 bp, Homo sapien
tcctgatggcaggtacacgtcagtg

SEQ ID NO: 839377 - DNA, 25 bp, Homo sapien
ctttggagaatgagtccaggacagc

SEQ ID NO: 839378 - DNA, 25 bp, Homo sapien
gtcagtgatcaacaccctacctgtg

SEQ ID NO: 839379 - DNA, 25 bp, Homo sapien
tcagagacccgagtgtttttacgcc

SEQ ID NO: 839380 - DNA, 25 bp, Homo sapien
tttaatgccacagccgttaggcgac

SEQ ID NO: 839381 - DNA, 25 bp, Homo sapien
gactctgtgcatgaccgtgctggaa

SEQ ID NO: 839382 - DNA, 25 bp, Homo sapien
aagaagtgacatcgggctggcagaa

SEQ ID NO: 839383 - DNA, 25 bp, Homo sapien
gtgggcctcagccaccggatccagg

SEQ ID NO: 839384 - DNA, 25 bp, Homo sapien
gccaccggatccaggtctttctgtg

SEQ ID NO: 839385 - DNA, 25 bp, Homo sapien
ctgtggcagcatccccatgcggtca

SEQ ID NO: 839386 - DNA, 25 bp, Homo sapien
gtctttctgtggcagcatccccatg

SEQ ID NO: 839387 - DNA, 25 bp, Homo sapien
caataaggaggtgattaacaccctc

SEQ ID NO: 839388 - DNA, 25 bp, Homo sapien
ataaggaggtgattaacaccctcct

SEQ ID NO: 839389 - DNA, 25 bp, Homo sapien
ctggattggagcatcaataaggagg

SEQ ID NO: 839390 - DNA, 25 bp, Homo sapien
gattggagcatcaataaggaggtga

SEQ ID NO: 839391 - DNA, 25 bp, Homo sapien
tatagagctgcaaagtacttagtgg

SEQ ID NO: 839392 - DNA, 25 bp, Homo sapien
agcagatgctaacaacccagaggta

SEQ ID NO: 839393 - DNA, 25 bp, Homo sapien
ctgtgtggaccagaagtggtataga

SEQ ID NO: 839394 - DNA, 25 bp, Homo sapien
tagtacttagacaacagctgtcagc

SEQ ID NO: 839395 - DNA, 25 bp, Homo sapien
gagagtctggcgtgtcatagccagt

SEQ ID NO: 839396 - DNA, 25 bp, Homo sapien
tctggcgtgtcatagccagtcctgg

SEQ ID NO: 839397 - DNA, 25 bp, Homo sapien
gagtctggcgtgtcatagccagtcc

SEQ ID NO: 839398 - DNA, 25 bp, Homo sapien
tggcgtgtcatagccagtcctgggt

SEQ ID NO: 839399 - DNA, 25 bp, Homo sapien
agacatacatgcaggattgggccag

SEQ ID NO: 839400 - DNA, 25 bp, Homo sapien
ggaagcagcatggaagatgcgtccc

SEQ ID NO: 839401 - DNA, 25 bp, Homo sapien
caaaccgaacttatgtgagggttgc

SEQ ID NO: 839402 - DNA, 25 bp, Homo sapien
ccttttgcagcaaaccgaacttatg

SEQ ID NO: 839403 - DNA, 25 bp, Homo sapien
gtagagagagcatctgatgaaaggt

SEQ ID NO: 839404 - DNA, 25 bp, Homo sapien
gagagagcatctgatgaaaggtttc

SEQ ID NO: 839405 - DNA, 25 bp, Homo sapien
tagagagagcatctgatgaaaggtt

SEQ ID NO: 839406 - DNA, 25 bp, Homo sapien
agagagagcatctgatgaaaggttt

SEQ ID NO: 839407 - DNA, 25 bp, Homo sapien
acatgatgctgataacctcagcagg

SEQ ID NO: 839408 - DNA, 25 bp, Homo sapien
catgatgctgataacctcagcaggg

SEQ ID NO: 839409 - DNA, 25 bp, Homo sapien
gaatggcccacagtacgacttagcc

SEQ ID NO: 839410 - DNA, 25 bp, Homo sapien
atggcccacagtacgacttagccat

SEQ ID NO: 839411 - DNA, 25 bp, Homo sapien
atcctgtccctgcaggaatggccca

SEQ ID NO: 839412 - DNA, 25 bp, Homo sapien
aatggcccacagtacgacttagcca

SEQ ID NO: 839413 - DNA, 25 bp, Homo sapien
ctgaggagttctcccaggctatcgt

SEQ ID NO: 839414 - DNA, 25 bp, Homo sapien
ccaggctatcgtagagagcctgcgc

SEQ ID NO: 839415 - DNA, 25 bp, Homo sapien
ttctcccaggctatcgtagagagcc

SEQ ID NO: 839416 - DNA, 25 bp, Homo sapien
ggagttctcccaggctatcgtagag

SEQ ID NO: 839417 - DNA, 25 bp, Homo sapien
ctccacgagcggcagaggcttccgt

SEQ ID NO: 839418 - DNA, 25 bp, Homo sapien
ctgatctgagatcattcagtttctt

SEQ ID NO: 839419 - DNA, 25 bp, Homo sapien
tcagtcactctgcacgggccaggta

SEQ ID NO: 839420 - DNA, 25 bp, Homo sapien
gggccaggtacctctccacgagcgg

SEQ ID NO: 839421 - DNA, 25 bp, Homo sapien
gatgtgagacagtgggatagtaata

SEQ ID NO: 839422 - DNA, 25 bp, Homo sapien
gggaagaagagtagctgatgtgaga

SEQ ID NO: 839423 - DNA, 25 bp, Homo sapien
aagaagagtagctgatgtgagacag

SEQ ID NO: 839424 - DNA, 25 bp, Homo sapien
ctgatgtgagacagtgggatagtaa

SEQ ID NO: 839425 - DNA, 25 bp, Homo sapien
gaagtattgccgtctactgttcggg

SEQ ID NO: 839426 - DNA, 25 bp, Homo sapien
catcttggattgttgctgagtgacc

SEQ ID NO: 839427 - DNA, 25 bp, Homo sapien
tactgttcggggttgctaggaagaa

SEQ ID NO: 839428 - DNA, 25 bp, Homo sapien
ctgagtgaccctgaggaagtattgc

SEQ ID NO: 839429 - DNA, 25 bp, Homo sapien
atctgtatatctcgaattgtgtaac

SEQ ID NO: 839430 - DNA, 25 bp, Homo sapien
aatctgtatatctcgaattgtgtaa

SEQ ID NO: 839431 - DNA, 25 bp, Homo sapien
caaatctgtatatctcgaattgtgt

SEQ ID NO: 839432 - DNA, 25 bp, Homo sapien
aaatctgtatatctcgaattgtgta

SEQ ID NO: 839433 - DNA, 25 bp, Homo sapien
gaactgacctgatcccacatgggtg

SEQ ID NO: 839434 - DNA, 25 bp, Homo sapien
tgtgttaagggaccagtagtctctc

SEQ ID NO: 839435 - DNA, 25 bp, Homo sapien
cagagcttgtttgtgttaagggacc

SEQ ID NO: 839436 - DNA, 25 bp, Homo sapien
cacatgggtgtgacatttggaattg

SEQ ID NO: 839437 - DNA, 25 bp, Homo sapien
ccagtgtgtgcctagaggagacccc

SEQ ID NO: 839438 - DNA, 25 bp, Homo sapien
ggagaccccactctttggtgggcaa

SEQ ID NO: 839439 - DNA, 25 bp, Homo sapien
aggttgtgggcattggccgtcaccc

SEQ ID NO: 839440 - DNA, 25 bp, Homo sapien
gatccaagtgcaggacagatggctc

SEQ ID NO: 839441 - DNA, 25 bp, Homo sapien
aagttggaaggccagtcttggtcgc

SEQ ID NO: 839442 - DNA, 25 bp, Homo sapien
atcaggagcttgagcaaacacaact

SEQ ID NO: 839443 - DNA, 25 bp, Homo sapien
gagccttggcggaagataggccaca

SEQ ID NO: 839444 - DNA, 25 bp, Homo sapien
gaagggatgagtgaaagaattgcca

SEQ ID NO: 839445 - DNA, 25 bp, Homo sapien
taacttctgtggatgttgaacttgc

SEQ ID NO: 839446 - DNA, 25 bp, Homo sapien
tggtcttgggtaatgaacagggtag

SEQ ID NO: 839447 - DNA, 25 bp, Homo sapien
aagtgggtcatctctagttttggtc

SEQ ID NO: 839448 - DNA, 25 bp, Homo sapien
gaatgagttgttgaagtggaacatg

SEQ ID NO: 839449 - DNA, 25 bp, Homo sapien
agaaaacctcttggaaagcgccctg

SEQ ID NO: 839450 - DNA, 25 bp, Homo sapien
ctggccacggatctttccagggaaa

SEQ ID NO: 839451 - DNA, 25 bp, Homo sapien
agctattggtattacttctgcaagg

SEQ ID NO: 839452 - DNA, 25 bp, Homo sapien
ccagatgcgggcaggccggccgtgt

SEQ ID NO: 839453 - DNA, 25 bp, Homo sapien
ggcccggccggcctcgtgcgcccca

SEQ ID NO: 839454 - DNA, 25 bp, Homo sapien
gcccggccggcctcgtgcgccccag

SEQ ID NO: 839455 - DNA, 25 bp, Homo sapien
ctggcccggccggcctcgtgcgccc

SEQ ID NO: 839456 - DNA, 25 bp, Homo sapien
tgctggcccggccggcctcgtgcgc

SEQ ID NO: 839457 - DNA, 25 bp, Homo sapien
ggaagaagattgttcgttcttgtaa

SEQ ID NO: 839458 - DNA, 25 bp, Homo sapien
tcttttggaagaagattgttcgttc

SEQ ID NO: 839459 - DNA, 25 bp, Homo sapien
gaagattgttcgttcttgtaaacat

SEQ ID NO: 839460 - DNA, 25 bp, Homo sapien
gagaggatgaatgcccataatccca

SEQ ID NO: 839461 - DNA, 25 bp, Homo sapien
ctgctctaattctgacagctttggc

SEQ ID NO: 839462 - DNA, 25 bp, Homo sapien
gacagctttggcatcacagtacaag

SEQ ID NO: 839463 - DNA, 25 bp, Homo sapien
ttggcatcacagtacaagttgctga

SEQ ID NO: 839464 - DNA, 25 bp, Homo sapien
tttttgcttcagtccatgttggcca

SEQ ID NO: 839465 - DNA, 25 bp, Homo sapien
ttggatgaagatagttgttccagcc

SEQ ID NO: 839466 - DNA, 25 bp, Homo sapien
gctgcctctcctatcaacttggatg

SEQ ID NO: 839467 - DNA, 25 bp, Homo sapien
tccacattggagtttgtaaatagca

SEQ ID NO: 839468 - DNA, 25 bp, Homo sapien
cttccgttgagaacatgtttgctgc

SEQ ID NO: 839469 - DNA, 25 bp, Homo sapien
tatgattataataagggtttttgta

SEQ ID NO: 839470 - DNA, 25 bp, Homo sapien
ttgtttgttggaagctaaaagcttg

SEQ ID NO: 839471 - DNA, 25 bp, Homo sapien
ttatcacttaaattgcctaatatga

SEQ ID NO: 839472 - DNA, 25 bp, Homo sapien
ttggaagctaaaagcttgataaaag

SEQ ID NO: 839473 - DNA, 25 bp, Homo sapien
cccctaaggaatgtgttatataagg

SEQ ID NO: 839474 - DNA, 25 bp, Homo sapien
ccatcgagggatttagtctccatta

SEQ ID NO: 839475 - DNA, 25 bp, Homo sapien
agtgcttcagtttgacttgtctaca

SEQ ID NO: 839476 - DNA, 25 bp, Homo sapien
ttgctgtcagcatgggaatctctat

SEQ ID NO: 839477 - DNA, 25 bp, Homo sapien
tactttatgttgcaatgctgtgtgc

SEQ ID NO: 839478 - DNA, 25 bp, Homo sapien
gattcttcaaaacgccaggttggcc

SEQ ID NO: 839479 - DNA, 25 bp, Homo sapien
tagcattcttacaggcctaacatag

SEQ ID NO: 839480 - DNA, 25 bp, Homo sapien
gatgttccctcttttataagtgcca

SEQ ID NO: 839481 - DNA, 25 bp, Homo sapien
gaaggatgagcagtatatccactcc

SEQ ID NO: 839482 - DNA, 25 bp, Homo sapien
tgatgtgggacagcctttaacgagg

SEQ ID NO: 839483 - DNA, 25 bp, Homo sapien
catcctcagccagtagtacagagta

SEQ ID NO: 839484 - DNA, 25 bp, Homo sapien
tgaaaggacctcagcaatactgtgc

SEQ ID NO: 839485 - DNA, 25 bp, Homo sapien
cttattctggtgatatttggcggga

SEQ ID NO: 839486 - DNA, 25 bp, Homo sapien
aaccgcccacgccagaaaagttgct

SEQ ID NO: 839487 - DNA, 25 bp, Homo sapien
taaatccggactgggacttcggagc

SEQ ID NO: 839488 - DNA, 25 bp, Homo sapien
tgaggatcccatgagatccctggac

SEQ ID NO: 839489 - DNA, 25 bp, Homo sapien
ccccaaccgggactgctggtgagaa

SEQ ID NO: 839490 - DNA, 25 bp, Homo sapien
atgctgggcaagtgccccaaccggg

SEQ ID NO: 839491 - DNA, 25 bp, Homo sapien
ctgccgccggcacatgctgggcaag

SEQ ID NO: 839492 - DNA, 25 bp, Homo sapien
aggcctgcgaccagctgcacttctg

SEQ ID NO: 839493 - DNA, 25 bp, Homo sapien
gtggcggcacctccgcctggagggt

SEQ ID NO: 839494 - DNA, 25 bp, Homo sapien
gggacgtgctgcagcgcgccgggcc

SEQ ID NO: 839495 - DNA, 25 bp, Homo sapien
ccaggctccgggacgtgctgcagcg

SEQ ID NO: 839496 - DNA, 25 bp, Homo sapien
cgccgggcccgagcgtttcctgctg

SEQ ID NO: 839497 - DNA, 25 bp, Homo sapien
cgcgccagcgaccatggcggagccc

SEQ ID NO: 839498 - DNA, 25 bp, Homo sapien
cgccagcgaccatggcggagcccac

SEQ ID NO: 839499 - DNA, 25 bp, Homo sapien
cccgcgccagcgaccatggcggagc

SEQ ID NO: 839500 - DNA, 25 bp, Homo sapien
agggcccgcgccagcgaccatggcg

SEQ ID NO: 839501 - DNA, 25 bp, Homo sapien
tcggactagccactttccaataaag

SEQ ID NO: 839502 - DNA, 25 bp, Homo sapien
ttcggactagccactttccaataaa

SEQ ID NO: 839503 - DNA, 25 bp, Homo sapien
attcggactagccactttccaataa

SEQ ID NO: 839504 - DNA, 25 bp, Homo sapien
cggtcttactggctctttctactca

SEQ ID NO: 839505 - DNA, 25 bp, Homo sapien
tgtctacaagctttcccttgtagga

SEQ ID NO: 839506 - DNA, 25 bp, Homo sapien
taaacctgcctaggttatcactgtc

SEQ ID NO: 839507 - DNA, 25 bp, Homo sapien
catgtaactatgcttgtctctccta

SEQ ID NO: 839508 - DNA, 25 bp, Homo sapien
tctacagaataggtcagatcttggc

SEQ ID NO: 839509 - DNA, 25 bp, Homo sapien
aattcttcgttgtgtggcactaacc

SEQ ID NO: 839510 - DNA, 25 bp, Homo sapien
tagacagtcgtacagggtacagaat

SEQ ID NO: 839511 - DNA, 25 bp, Homo sapien
tgtttgctgtgccacgcctgatgcc

SEQ ID NO: 839512 - DNA, 25 bp, Homo sapien
aatttcattatgtaaacgctcaggc

SEQ ID NO: 839513 - DNA, 25 bp, Homo sapien
tactctctcggacaagctgtaggtc

SEQ ID NO: 839514 - DNA, 25 bp, Homo sapien
taagagccgattagaggctacttcc

SEQ ID NO: 839515 - DNA, 25 bp, Homo sapien
caggcatgactacgctgtttgaaac

SEQ ID NO: 839516 - DNA, 25 bp, Homo sapien
caatatgtccaaagtggaactctcc

SEQ ID NO: 839517 - DNA, 25 bp, Homo sapien
caccactagctggatatttcacagg

SEQ ID NO: 839518 - DNA, 25 bp, Homo sapien
cattggctcaagcagaaatctggaa

SEQ ID NO: 839519 - DNA, 25 bp, Homo sapien
tctgggagagttactacaaatgctt

SEQ ID NO: 839520 - DNA, 25 bp, Homo sapien
catcggtttttacttagagcccttg

SEQ ID NO: 839521 - DNA, 25 bp, Homo sapien
tgcttggaccaatatttccttcctt

SEQ ID NO: 839522 - DNA, 25 bp, Homo sapien
ccttaccagtcaccaaagtttcctg

SEQ ID NO: 839523 - DNA, 25 bp, Homo sapien
tttagcagacaagttataagtcaga

SEQ ID NO: 839524 - DNA, 25 bp, Homo sapien
tgttggaaagtttaccttgtctcag

SEQ ID NO: 839525 - DNA, 25 bp, Homo sapien
tagtttactgtatgccatggttttg

SEQ ID NO: 839526 - DNA, 25 bp, Homo sapien
aatttgggagaaatctaatcatgcc

SEQ ID NO: 839527 - DNA, 25 bp, Homo sapien
tctcagatgtaactggtaaaggctg

SEQ ID NO: 839528 - DNA, 25 bp, Homo sapien
gacacaggtttgttggatgttcact

SEQ ID NO: 839529 - DNA, 25 bp, Homo sapien
tttaatacaaagttctcgctgggac

SEQ ID NO: 839530 - DNA, 25 bp, Homo sapien
tttagtctgtgttagctgtagagtt

SEQ ID NO: 839531 - DNA, 25 bp, Homo sapien
ctggattcccatgaaaactgtggag

SEQ ID NO: 839532 - DNA, 25 bp, Homo sapien
tgtggacgatctcacccgcaagttc

SEQ ID NO: 839533 - DNA, 25 bp, Homo sapien
ccagaggtttttagagaacggcagt

SEQ ID NO: 839534 - DNA, 25 bp, Homo sapien
gacctcttgcatggaaatccaggca

SEQ ID NO: 839535 - DNA, 25 bp, Homo sapien
tcacatcctggacgaatgaccaagg

SEQ ID NO: 839536 - DNA, 25 bp, Homo sapien
cactacagttccctctgaacagagg

SEQ ID NO: 839537 - DNA, 25 bp, Homo sapien
gcagcctcagctcatttttagaaga

SEQ ID NO: 839538 - DNA, 25 bp, Homo sapien
tcaaggcctcacatcactagaaagt

SEQ ID NO: 839539 - DNA, 25 bp, Homo sapien
caggaggagggtgtttgcttttact

SEQ ID NO: 839540 - DNA, 25 bp, Homo sapien
caggagagatatgaatgcaagacac

SEQ ID NO: 839541 - DNA, 25 bp, Homo sapien
gaagtgattttgagttggccactga

SEQ ID NO: 839542 - DNA, 25 bp, Homo sapien
gaactcagtgtgtttccctaagaac

SEQ ID NO: 839543 - DNA, 25 bp, Homo sapien
cccagctcagatgcacttttataca

SEQ ID NO: 839544 - DNA, 25 bp, Homo sapien
tacctggcttatatcatggtgagtg

SEQ ID NO: 839545 - DNA, 25 bp, Homo sapien
ggctctagaggcagtaaaccatccc

SEQ ID NO: 839546 - DNA, 25 bp, Homo sapien
tagggttggttttgactgatgacat

SEQ ID NO: 839547 - DNA, 25 bp, Homo sapien
gctcatgtgatctcgtctggtctat

SEQ ID NO: 839548 - DNA, 25 bp, Homo sapien
ttcctcctcggtgcaggctgtggct

SEQ ID NO: 839549 - DNA, 25 bp, Homo sapien
tcttgcaaggccctcggtgctttcc

SEQ ID NO: 839550 - DNA, 25 bp, Homo sapien
tgtcccactcttggtacaactgtag

SEQ ID NO: 839551 - DNA, 25 bp, Homo sapien
caactgtagggtatgtgcggattct

SEQ ID NO: 839552 - DNA, 25 bp, Homo sapien
ttttgccgatgtgggtgtttcctct

SEQ ID NO: 839553 - DNA, 25 bp, Homo sapien
tgctttgcggtttttgccgatgtgg

SEQ ID NO: 839554 - DNA, 25 bp, Homo sapien
tgactgtttcgcaagttgaatagaa

SEQ ID NO: 839555 - DNA, 25 bp, Homo sapien
tagatgggaagaggactagttgact

SEQ ID NO: 839556 - DNA, 25 bp, Homo sapien
ttaaatccctttgaagcagtgtggc

SEQ ID NO: 839557 - DNA, 25 bp, Homo sapien
gcctgccttgggacaactctcttaa

SEQ ID NO: 839558 - DNA, 25 bp, Homo sapien
gcagtgtggctcacgtctcgggcca

SEQ ID NO: 839559 - DNA, 25 bp, Homo sapien
gctgcaaggtttgggttaagactct

SEQ ID NO: 839560 - DNA, 25 bp, Homo sapien
ttccctagacgtggcggagccagta

SEQ ID NO: 839561 - DNA, 25 bp, Homo sapien
ttttctgatgcctggcgcgtagcag

SEQ ID NO: 839562 - DNA, 25 bp, Homo sapien
ttcctgaagttgtagcagccgcggg

SEQ ID NO: 839563 - DNA, 25 bp, Homo sapien
tcatcaccgcttttctgatgcctgg

SEQ ID NO: 839564 - DNA, 25 bp, Homo sapien
tgcagggcccgcgcttctacctttg

SEQ ID NO: 839565 - DNA, 25 bp, Homo sapien
ccttccttccggcacctccagacat

SEQ ID NO: 839566 - DNA, 25 bp, Homo sapien
tttgcagttcccttccttccggcac

SEQ ID NO: 839567 - DNA, 25 bp, Homo sapien
ggcccgcgcttctacctttgcagtt

SEQ ID NO: 839568 - DNA, 25 bp, Homo sapien
ctgggaggggcacggcttcgccggg

SEQ ID NO: 839569 - DNA, 25 bp, Homo sapien
tgggaggggcacggcttcgccggga

SEQ ID NO: 839570 - DNA, 25 bp, Homo sapien
ggcacggcttcgccgggaccccgca

SEQ ID NO: 839571 - DNA, 25 bp, Homo sapien
gcacggcttcgccgggaccccgcac

SEQ ID NO: 839572 - DNA, 25 bp, Homo sapien
caaactcaacttgctgggccggtgc

SEQ ID NO: 839573 - DNA, 25 bp, Homo sapien
tgcaactattcgcagtccgagcggt

SEQ ID NO: 839574 - DNA, 25 bp, Homo sapien
tagcctcttgacctgagagccgaga

SEQ ID NO: 839575 - DNA, 25 bp, Homo sapien
gtcgcaagtactgccagagaccctg

SEQ ID NO: 839576 - DNA, 25 bp, Homo sapien
aaagaaggctcgcggagcccggctg

SEQ ID NO: 839577 - DNA, 25 bp, Homo sapien
ctaaagaaggctcgcggagcccggc

SEQ ID NO: 839578 - DNA, 25 bp, Homo sapien
taaagaaggctcgcggagcccggct

SEQ ID NO: 839579 - DNA, 25 bp, Homo sapien
gaagattcactaccaacagaggcag

SEQ ID NO: 839580 - DNA, 25 bp, Homo sapien
tcagtcggctggcttataaaacacc

SEQ ID NO: 839581 - DNA, 25 bp, Homo sapien
ggccagagccccaagatcgctttta

SEQ ID NO: 839582 - DNA, 25 bp, Homo sapien
gaaactcggtggcatctgggctccg

SEQ ID NO: 839583 - DNA, 25 bp, Homo sapien
gagaaacttgcacatcggggcctgg

SEQ ID NO: 839584 - DNA, 25 bp, Homo sapien
caaaagttcgtgagaaggcagaaac

SEQ ID NO: 839585 - DNA, 25 bp, Homo sapien
gcaatcgttgttctttaagagggca

SEQ ID NO: 839586 - DNA, 25 bp, Homo sapien
gcacggtggtggaggagaaacttgc

SEQ ID NO: 839587 - DNA, 25 bp, Homo sapien
gggaggaaccgatctgaaatcttgg

SEQ ID NO: 839588 - DNA, 25 bp, Homo sapien
tccaccgtgattgaggtacaagcag

SEQ ID NO: 839589 - DNA, 25 bp, Homo sapien
tagcgattctaggtaagcaagacca

SEQ ID NO: 839590 - DNA, 25 bp, Homo sapien
ttcagggcaccgagttagcgattct

SEQ ID NO: 839591 - DNA, 25 bp, Homo sapien
tactcccggaggcacttgcagtgat

SEQ ID NO: 839592 - DNA, 25 bp, Homo sapien
gattaatgcctctctcgactcccat

SEQ ID NO: 839593 - DNA, 25 bp, Homo sapien
tgcaggttcgaggtagggaaatccc

SEQ ID NO: 839594 - DNA, 25 bp, Homo sapien
ttgccagtacagtactcccggaggc

SEQ ID NO: 839595 - DNA, 25 bp, Homo sapien
ttgctgaaggtatgccaaggcacta

SEQ ID NO: 839596 - DNA, 25 bp, Homo sapien
tgagttgctgaaggtatgccaaggc

SEQ ID NO: 839597 - DNA, 25 bp, Homo sapien
ccatgagttgctgaaggtatgccaa

SEQ ID NO: 839598 - DNA, 25 bp, Homo sapien
tctctgtcattgaccggggccatga

SEQ ID NO: 839599 - DNA, 25 bp, Homo sapien
cttgacgtcggtcttgtgagtcccc

SEQ ID NO: 839600 - DNA, 25 bp, Homo sapien
gcctcagcgtttcgccgcatccaca

SEQ ID NO: 839601 - DNA, 25 bp, Homo sapien
gcatccacacagcacgttctgtctc

SEQ ID NO: 839602 - DNA, 25 bp, Homo sapien
cagcgaaggccgcgcctcagcgttt

SEQ ID NO: 839603 - DNA, 25 bp, Homo sapien
tgtgctgtacgcctctgcctacagc

SEQ ID NO: 839604 - DNA, 25 bp, Homo sapien
ttcttttgtcagtgtgctgtacgcc

SEQ ID NO: 839605 - DNA, 25 bp, Homo sapien
acagggtaatagctccagtgaaatc

SEQ ID NO: 839606 - DNA, 25 bp, Homo sapien
caacagggtaatagctccagtgaaa

SEQ ID NO: 839607 - DNA, 25 bp, Homo sapien
ccacaaattagtatcctcttcttct

SEQ ID NO: 839608 - DNA, 25 bp, Homo sapien
cagagctctcttgtagtcacccagg

SEQ ID NO: 839609 - DNA, 25 bp, Homo sapien
cacaaattagtatcctcttcttctt

SEQ ID NO: 839610 - DNA, 25 bp, Homo sapien
ccaactttgttcctttgttcttcat

SEQ ID NO: 839611 - DNA, 25 bp, Homo sapien
gccttttacgaatactagcatcctc

SEQ ID NO: 839612 - DNA, 25 bp, Homo sapien
tctttctatcctcctatgcctttta

SEQ ID NO: 839613 - DNA, 25 bp, Homo sapien
ctatgccttttacgaatactagcat

SEQ ID NO: 839614 - DNA, 25 bp, Homo sapien
cgaatactagcatcctctattctgt

SEQ ID NO: 839615 - DNA, 25 bp, Homo sapien
agaagtaggtgcaagctaggttcac

SEQ ID NO: 839616 - DNA, 25 bp, Homo sapien
ttgtttatacatcccaagaaagaag

SEQ ID NO: 839617 - DNA, 25 bp, Homo sapien
gctgcttcagcttgtttatacatcc

SEQ ID NO: 839618 - DNA, 25 bp, Homo sapien
gcaagctaggttcacccagacttca

SEQ ID NO: 839619 - DNA, 25 bp, Homo sapien
aacaggaaaagcagcgataaagtcc

SEQ ID NO: 839620 - DNA, 25 bp, Homo sapien
gaaaagcagcgataaagtccacagc

SEQ ID NO: 839621 - DNA, 25 bp, Homo sapien
aggaaaagcagcgataaagtccaca

SEQ ID NO: 839622 - DNA, 25 bp, Homo sapien
aaaagcagcgataaagtccacagcc

SEQ ID NO: 839623 - DNA, 25 bp, Homo sapien
gttcttagcacagataaagcctaca

SEQ ID NO: 839624 - DNA, 25 bp, Homo sapien
gtggtaagagacacccatggtcatc

SEQ ID NO: 839625 - DNA, 25 bp, Homo sapien
cacacatggttgtagtagcagccca

SEQ ID NO: 839626 - DNA, 25 bp, Homo sapien
caggcagtccagcaaaaatgttaac

SEQ ID NO: 839627 - DNA, 25 bp, Homo sapien
agtggaagaggaggcggttttggag

SEQ ID NO: 839628 - DNA, 25 bp, Homo sapien
tggaagaggaggcggttttggagtc

SEQ ID NO: 839629 - DNA, 25 bp, Homo sapien
gaaatcaatatctatgtgatagaga

SEQ ID NO: 839630 - DNA, 25 bp, Homo sapien
gagaaatcaatatctatgtgataga

SEQ ID NO: 839631 - DNA, 25 bp, Homo sapien
agagaaatcaatatctatgtgatag

SEQ ID NO: 839632 - DNA, 25 bp, Homo sapien
aatcaatatctatgtgatagagatt

SEQ ID NO: 839633 - DNA, 25 bp, Homo sapien
gcagtattcgcttatatatatctat

SEQ ID NO: 839634 - DNA, 25 bp, Homo sapien
tatatctatagcttcttggtagtga

SEQ ID NO: 839635 - DNA, 25 bp, Homo sapien
gatcgcatatagtggattgaggcca

SEQ ID NO: 839636 - DNA, 25 bp, Homo sapien
ctgaagattttgatgaaagctcatc

SEQ ID NO: 839637 - DNA, 25 bp, Homo sapien
cataaacattaagggcaaggtattc

SEQ ID NO: 839638 - DNA, 25 bp, Homo sapien
cttgtagtagcagagggccacataa

SEQ ID NO: 839639 - DNA, 25 bp, Homo sapien
ccacataaacattaagggcaaggta

SEQ ID NO: 839640 - DNA, 25 bp, Homo sapien
tgtagtagcagagggccacataaac

SEQ ID NO: 839641 - DNA, 25 bp, Homo sapien
gctctgccattgtaaaggcgaaaat

SEQ ID NO: 839642 - DNA, 25 bp, Homo sapien
gaatttgctgaaggtaaacagccaa

SEQ ID NO: 839643 - DNA, 25 bp, Homo sapien
tgcgatggtactatcaggaatttgc

SEQ ID NO: 839644 - DNA, 25 bp, Homo sapien
caggctttaagattgagtgcgatgg

SEQ ID NO: 839645 - DNA, 25 bp, Homo sapien
tgttgacgtgtaccaagcagagaaa

SEQ ID NO: 839646 - DNA, 25 bp, Homo sapien
gagaatgttgcacacaaagctatgg

SEQ ID NO: 839647 - DNA, 25 bp, Homo sapien
ggtaataatctatggcctcctgtgt

SEQ ID NO: 839648 - DNA, 25 bp, Homo sapien
tctgcatggtgcctacaagttagcc

SEQ ID NO: 839649 - DNA, 25 bp, Homo sapien
gccttttgaggttagaagtacactc

SEQ ID NO: 839650 - DNA, 25 bp, Homo sapien
tttccccaagactgactctaggtag

SEQ ID NO: 839651 - DNA, 25 bp, Homo sapien
tctggtacatttgacatagccttct

SEQ ID NO: 839652 - DNA, 25 bp, Homo sapien
gtacactctgatgtcctaacttgga

SEQ ID NO: 839653 - DNA, 25 bp, Homo sapien
gcctgatgagttctttagcaaattc

SEQ ID NO: 839654 - DNA, 25 bp, Homo sapien
gattgtgcctgatgagttctttagc

SEQ ID NO: 839655 - DNA, 25 bp, Homo sapien
cagattgtgcctgatgagttcttta

SEQ ID NO: 839656 - DNA, 25 bp, Homo sapien
tagcaaattcaaaggatgaagaagc

SEQ ID NO: 839657 - DNA, 25 bp, Homo sapien
aaccacagagggatacgttcctttg

SEQ ID NO: 839658 - DNA, 25 bp, Homo sapien
taccaaagcagagtaggactgaact

SEQ ID NO: 839659 - DNA, 25 bp, Homo sapien
gacacctggatctacactgccttgt

SEQ ID NO: 839660 - DNA, 25 bp, Homo sapien
tcccttggagtaaagcattacttgc

SEQ ID NO: 839661 - DNA, 25 bp, Homo sapien
tctttctaatcccactctctaagaa

SEQ ID NO: 839662 - DNA, 25 bp, Homo sapien
ttttgacctcaaatctaacttcaaa

SEQ ID NO: 839663 - DNA, 25 bp, Homo sapien
cactctctaagaattatccctattt

SEQ ID NO: 839664 - DNA, 25 bp, Homo sapien
tttaacaaccacttatattgccctg

SEQ ID NO: 839665 - DNA, 25 bp, Homo sapien
ctaaaggcacccgccataacacccg

SEQ ID NO: 839666 - DNA, 25 bp, Homo sapien
ggactaaaggcacccgccataacac

SEQ ID NO: 839667 - DNA, 25 bp, Homo sapien
gggactaaaggcacccgccataaca

SEQ ID NO: 839668 - DNA, 25 bp, Homo sapien
gactaaaggcacccgccataacacc

SEQ ID NO: 839669 - DNA, 25 bp, Homo sapien
gatccttcttaacagccttgtcata

SEQ ID NO: 839670 - DNA, 25 bp, Homo sapien
cttaacagccttgtcataattaaac

SEQ ID NO: 839671 - DNA, 25 bp, Homo sapien
tctcctctctgcttttgatccttct

SEQ ID NO: 839672 - DNA, 25 bp, Homo sapien
tctgcttttgatccttcttaacagc

SEQ ID NO: 839673 - DNA, 25 bp, Homo sapien
aaatcaccaagtttagcctagcttc

SEQ ID NO: 839674 - DNA, 25 bp, Homo sapien
tcaactaggggaggtaaaacctgca

SEQ ID NO: 839675 - DNA, 25 bp, Homo sapien
cttgacgaaggtagtaaatcaccaa

SEQ ID NO: 839676 - DNA, 25 bp, Homo sapien
ggaatgacatcaactaggggaggta

SEQ ID NO: 839677 - DNA, 25 bp, Homo sapien
ccagatccttaattaagttataagc

SEQ ID NO: 839678 - DNA, 25 bp, Homo sapien
gatccttaattaagttataagcttc

SEQ ID NO: 839679 - DNA, 25 bp, Homo sapien
taattaagttataagcttcttgtac

SEQ ID NO: 839680 - DNA, 25 bp, Homo sapien
ttaagttataagcttcttgtacatc

SEQ ID NO: 839681 - DNA, 25 bp, Homo sapien
ccagcagccaagtatctatataaca

SEQ ID NO: 839682 - DNA, 25 bp, Homo sapien
ttctctgttctatccctggcttgaa

SEQ ID NO: 839683 - DNA, 25 bp, Homo sapien
ggaagctccagcagataagtttcat

SEQ ID NO: 839684 - DNA, 25 bp, Homo sapien
gagacactcatttagtttccagcag

SEQ ID NO: 839685 - DNA, 25 bp, Homo sapien
tgaacccatttcctggccaagggct

SEQ ID NO: 839686 - DNA, 25 bp, Homo sapien
gaacccatttcctggccaagggctg

SEQ ID NO: 839687 - DNA, 25 bp, Homo sapien
tggccaagggctgcattgaccactc

SEQ ID NO: 839688 - DNA, 25 bp, Homo sapien
taactttgcaacctatagattatca

SEQ ID NO: 839689 - DNA, 25 bp, Homo sapien
caggagagcctattgctgcttgcac

SEQ ID NO: 839690 - DNA, 25 bp, Homo sapien
tgctgcttgcactttgatagtcatt

SEQ ID NO: 839691 - DNA, 25 bp, Homo sapien
tgcaacctatagattatcagtgatt

SEQ ID NO: 839692 - DNA, 25 bp, Homo sapien
agaactgctgggcaattttcatatg

SEQ ID NO: 839693 - DNA, 25 bp, Homo sapien
gaactgctgggcaattttcatatga

SEQ ID NO: 839694 - DNA, 25 bp, Homo sapien
aactgctgggcaattttcatatgat

SEQ ID NO: 839695 - DNA, 25 bp, Homo sapien
cggtcaatatatgccccactccaat

SEQ ID NO: 839696 - DNA, 25 bp, Homo sapien
gccccactccaattatgaagcagat

SEQ ID NO: 839697 - DNA, 25 bp, Homo sapien
tcaaacttcacggtcaatatatgcc

SEQ ID NO: 839698 - DNA, 25 bp, Homo sapien
tatgaagcagatcataagtacagat

SEQ ID NO: 839699 - DNA, 25 bp, Homo sapien
gaaaatttgcagctacacgtttgct

SEQ ID NO: 839700 - DNA, 25 bp, Homo sapien
tggaaaccacaaagtagtctcaaag

SEQ ID NO: 839701 - DNA, 25 bp, Homo sapien
ttagagggactcgatattgacggca

SEQ ID NO: 839702 - DNA, 25 bp, Homo sapien
gctgagcaactctgtccaacaaggt

SEQ ID NO: 839703 - DNA, 25 bp, Homo sapien
catccgccagtataaccaagctgtt

SEQ ID NO: 839704 - DNA, 25 bp, Homo sapien
cgccagtataaccaagctgttcctg

SEQ ID NO: 839705 - DNA, 25 bp, Homo sapien
gacacatccgccagtataaccaagc

SEQ ID NO: 839706 - DNA, 25 bp, Homo sapien
cagtataaccaagctgttcctgcac

SEQ ID NO: 839707 - DNA, 25 bp, Homo sapien
tacgacattacccaggtcatttttc

SEQ ID NO: 839708 - DNA, 25 bp, Homo sapien
ttcattaactacgacattacccagg

SEQ ID NO: 839709 - DNA, 25 bp, Homo sapien
taactacgacattacccaggtcatt

SEQ ID NO: 839710 - DNA, 25 bp, Homo sapien
cattaactacgacattacccaggtc

SEQ ID NO: 839711 - DNA, 25 bp, Homo sapien
aattgcttaagcaggaagaaacagg

SEQ ID NO: 839712 - DNA, 25 bp, Homo sapien
taaatgagttgaggtaaatcaaaac

SEQ ID NO: 839713 - DNA, 25 bp, Homo sapien
ttgcttaagcaggaagaaacaggaa

SEQ ID NO: 839714 - DNA, 25 bp, Homo sapien
atcaaattgcttaagcaggaagaaa

SEQ ID NO: 839715 - DNA, 25 bp, Homo sapien
gaattaacatataaaatataaccat

SEQ ID NO: 839716 - DNA, 25 bp, Homo sapien
gagaattaacatataaaatataacc

SEQ ID NO: 839717 - DNA, 25 bp, Homo sapien
ctgagaattaacatataaaatataa

SEQ ID NO: 839718 - DNA, 25 bp, Homo sapien
aattaacatataaaatataaccatc

SEQ ID NO: 839719 - DNA, 25 bp, Homo sapien
gaaaaacatcccaagaacaggtcac

SEQ ID NO: 839720 - DNA, 25 bp, Homo sapien
tgaaaaacatcccaagaacaggtca

SEQ ID NO: 839721 - DNA, 25 bp, Homo sapien
aaaaacatcccaagaacaggtcaca

SEQ ID NO: 839722 - DNA, 25 bp, Homo sapien
ctgaaaaacatcccaagaacaggtc

SEQ ID NO: 839723 - DNA, 25 bp, Homo sapien
attgcctgttgcagctttggcttgg

SEQ ID NO: 839724 - DNA, 25 bp, Homo sapien
ctggtattgcctgttgcagctttgg

SEQ ID NO: 839725 - DNA, 25 bp, Homo sapien
tcttcgccctcactggtattgcctg

SEQ ID NO: 839726 - DNA, 25 bp, Homo sapien
tttggcttgggcataattaaagtta

SEQ ID NO: 839727 - DNA, 25 bp, Homo sapien
aaaagataaggatgtttttagatag

SEQ ID NO: 839728 - DNA, 25 bp, Homo sapien
ttgaccattttattccagtgagaaa

SEQ ID NO: 839729 - DNA, 25 bp, Homo sapien
aaagataaggatgtttttagataga

SEQ ID NO: 839730 - DNA, 25 bp, Homo sapien
cccttgaccattttattccagtgag

SEQ ID NO: 839731 - DNA, 25 bp, Homo sapien
gctaaccagctgaggtaaatgtaat

SEQ ID NO: 839732 - DNA, 25 bp, Homo sapien
ccgagctaaccagctgaggtaaatg

SEQ ID NO: 839733 - DNA, 25 bp, Homo sapien
agcaccgagctaaccagctgaggta

SEQ ID NO: 839734 - DNA, 25 bp, Homo sapien
caccgagctaaccagctgaggtaaa

SEQ ID NO: 839735 - DNA, 25 bp, Homo sapien
ttaagataaagttcccaggctagtc

SEQ ID NO: 839736 - DNA, 25 bp, Homo sapien
caatgagctgtaagagactgaagga

SEQ ID NO: 839737 - DNA, 25 bp, Homo sapien
gactcgccggaggtttccatcttaa

SEQ ID NO: 839738 - DNA, 25 bp, Homo sapien
gactgaaggactcgccggaggtttc

SEQ ID NO: 839739 - DNA, 25 bp, Homo sapien
cagccttcttagcttagccttattc

SEQ ID NO: 839740 - DNA, 25 bp, Homo sapien
ccactttggtttcctaaagtgcagg

SEQ ID NO: 839741 - DNA, 25 bp, Homo sapien
gagttttcttacttggcaatcataa

SEQ ID NO: 839742 - DNA, 25 bp, Homo sapien
attgctgggcaactctctttatggt

SEQ ID NO: 839743 - DNA, 25 bp, Homo sapien
aacgtatgtggtaatacttgcagta

SEQ ID NO: 839744 - DNA, 25 bp, Homo sapien
aatacttgcagtaaagagattgcac

SEQ ID NO: 839745 - DNA, 25 bp, Homo sapien
cttgcagtaaagagattgcacagaa

SEQ ID NO: 839746 - DNA, 25 bp, Homo sapien
ctgaataagagaacgtatgtggtaa

SEQ ID NO: 839747 - DNA, 25 bp, Homo sapien
tgggttctctcccagctatgatcat

SEQ ID NO: 839748 - DNA, 25 bp, Homo sapien
tcccagctatgatcatctggaaaat

SEQ ID NO: 839749 - DNA, 25 bp, Homo sapien
tattcagggttaggatccagcctct

SEQ ID NO: 839750 - DNA, 25 bp, Homo sapien
cgtttgccttcccaatattcagggt

SEQ ID NO: 839751 - DNA, 25 bp, Homo sapien
tctacttgggtgttacctgtgcttc

SEQ ID NO: 839752 - DNA, 25 bp, Homo sapien
ctgtgcttctcagtaaatggagcac

SEQ ID NO: 839753 - DNA, 25 bp, Homo sapien
taaatggagcacttctcgaagggtc

SEQ ID NO: 839754 - DNA, 25 bp, Homo sapien
gatccggatcatgtattctacttgg

SEQ ID NO: 839755 - DNA, 25 bp, Homo sapien
tcatacagggtcacagactatggca

SEQ ID NO: 839756 - DNA, 25 bp, Homo sapien
tctgttcagccaggagactaagtct

SEQ ID NO: 839757 - DNA, 25 bp, Homo sapien
tagaagctggttcctaggacgctgg

SEQ ID NO: 839758 - DNA, 25 bp, Homo sapien
taaaatgggataacgtacagagacg

SEQ ID NO: 839759 - DNA, 25 bp, Homo sapien
gatgggacccatctagttcctaaga

SEQ ID NO: 839760 - DNA, 25 bp, Homo sapien
gaaataaccccttgagacagtcctg

SEQ ID NO: 839761 - DNA, 25 bp, Homo sapien
tatagcaggttctacccagatggga

SEQ ID NO: 839762 - DNA, 25 bp, Homo sapien
gacttacgacagagagcctagccat

SEQ ID NO: 839763 - DNA, 25 bp, Homo sapien
gcaggaactaccagcctcttagtgg

SEQ ID NO: 839764 - DNA, 25 bp, Homo sapien
tctcttctaaagagtaacttatggg

SEQ ID NO: 839765 - DNA, 25 bp, Homo sapien
ctagtatgattcagcaggaactacc

SEQ ID NO: 839766 - DNA, 25 bp, Homo sapien
gcttcttggggaatatgtacttttc

SEQ ID NO: 839767 - DNA, 25 bp, Homo sapien
ttctgaaagtgcactaagccacaga

SEQ ID NO: 839768 - DNA, 25 bp, Homo sapien
cccttggcttccgtctacttggatg

SEQ ID NO: 839769 - DNA, 25 bp, Homo sapien
gaggaggaaagcagtcccttggctt

SEQ ID NO: 839770 - DNA, 25 bp, Homo sapien
tgtaactattgtgatatcatgcctg

SEQ ID NO: 839771 - DNA, 25 bp, Homo sapien
tgtaacactccatggtttcaaggct

SEQ ID NO: 839772 - DNA, 25 bp, Homo sapien
gctggaaagctcaaacatcaaaata

SEQ ID NO: 839773 - DNA, 25 bp, Homo sapien
tacggttcacaggagccagtttaaa

SEQ ID NO: 839774 - DNA, 25 bp, Homo sapien
aataatgtttgcagttaattgatac

SEQ ID NO: 839775 - DNA, 25 bp, Homo sapien
atccccagctaattattgtattttt

SEQ ID NO: 839776 - DNA, 25 bp, Homo sapien
ccaggtctccaactcctgacctcag

SEQ ID NO: 839777 - DNA, 25 bp, Homo sapien
gtttcgccacgttgaccaggtctcc

SEQ ID NO: 839778 - DNA, 25 bp, Homo sapien
ggtttcgccacgttgaccaggtctc

SEQ ID NO: 839779 - DNA, 25 bp, Homo sapien
caacgcgcctggcctgagctatttc

SEQ ID NO: 839780 - DNA, 25 bp, Homo sapien
ggcctgagctatttcttattacaac

SEQ ID NO: 839781 - DNA, 25 bp, Homo sapien
acgcgcctggcctgagctatttctt

SEQ ID NO: 839782 - DNA, 25 bp, Homo sapien
gcctggcctgagctatttcttatta

SEQ ID NO: 839783 - DNA, 25 bp, Homo sapien
atgtcaaattttaaaaagatgaact

SEQ ID NO: 839784 - DNA, 25 bp, Homo sapien
tgtcaaattttaaaaagatgaactc

SEQ ID NO: 839785 - DNA, 25 bp, Homo sapien
acctaagtgtccattggtagacgaa

SEQ ID NO: 839786 - DNA, 25 bp, Homo sapien
gacgaatggatacattgttatatat

SEQ ID NO: 839787 - DNA, 25 bp, Homo sapien
cattggtagacgaatggatacattg

SEQ ID NO: 839788 - DNA, 25 bp, Homo sapien
taagtgtccattggtagacgaatgg

SEQ ID NO: 839789 - DNA, 25 bp, Homo sapien
tggaaaacattacggagattcctcc

SEQ ID NO: 839790 - DNA, 25 bp, Homo sapien
caacaaggagatataacttcatgcc

SEQ ID NO: 839791 - DNA, 25 bp, Homo sapien
cctttgtacgctgttggtagaagcc

SEQ ID NO: 839792 - DNA, 25 bp, Homo sapien
caaggatatgggcaaaagggaacct

SEQ ID NO: 839793 - DNA, 25 bp, Homo sapien
tccccacacatggatagttcctatc

SEQ ID NO: 839794 - DNA, 25 bp, Homo sapien
gagccatgtgcccacctatttagca

SEQ ID NO: 839795 - DNA, 25 bp, Homo sapien
taagcagctgtggaactcttcacaa

SEQ ID NO: 839796 - DNA, 25 bp, Homo sapien
tatttagcaggcatttacctgactc

SEQ ID NO: 839797 - DNA, 25 bp, Homo sapien
ggtagtctttcgaagctccttaata

SEQ ID NO: 839798 - DNA, 25 bp, Homo sapien
cagagtttccagtaaaccagtattc

SEQ ID NO: 839799 - DNA, 25 bp, Homo sapien
taattctgggttaagtccttgctca

SEQ ID NO: 839800 - DNA, 25 bp, Homo sapien
taataaccagtgatatttccttggt

SEQ ID NO: 839801 - DNA, 25 bp, Homo sapien
ctgttgctcagttttcctcttttcc

SEQ ID NO: 839802 - DNA, 25 bp, Homo sapien
tgttgctcagttttcctcttttcct

SEQ ID NO: 839803 - DNA, 25 bp, Homo sapien
gttgctcagttttcctcttttcctc

SEQ ID NO: 839804 - DNA, 25 bp, Homo sapien
gttggatcccccacataaatagaag

SEQ ID NO: 839805 - DNA, 25 bp, Homo sapien
gagacgctcgcgtccactgtcgtgg

SEQ ID NO: 839806 - DNA, 25 bp, Homo sapien
gcacagaggagacgctcgcgtccac

SEQ ID NO: 839807 - DNA, 25 bp, Homo sapien
taaatagaagcaggccgctgagcgg

SEQ ID NO: 839808 - DNA, 25 bp, Homo sapien
tcgccagggtcgccgcggccgccat

SEQ ID NO: 839809 - DNA, 25 bp, Homo sapien
ccatcgccagggtcgccgcggccgc

SEQ ID NO: 839810 - DNA, 25 bp, Homo sapien
catcgccagggtcgccgcggccgcc

SEQ ID NO: 839811 - DNA, 25 bp, Homo sapien
cgccatcgccagggtcgccgcggcc

SEQ ID NO: 839812 - DNA, 25 bp, Homo sapien
ggtgagtgcggaccgtgtccccttc

SEQ ID NO: 839813 - DNA, 25 bp, Homo sapien
ggcgcgctgcgtgcctgcccgccct

SEQ ID NO: 839814 - DNA, 25 bp, Homo sapien
cggcgccacggtgagtgcggaccgt

SEQ ID NO: 839815 - DNA, 25 bp, Homo sapien
tccgccggcgccacggtgagtgcgg

SEQ ID NO: 839816 - DNA, 25 bp, Homo sapien
tccgcttttgctcgagccggcgctc

SEQ ID NO: 839817 - DNA, 25 bp, Homo sapien
cctccgcttttgctcgagccggcgc

SEQ ID NO: 839818 - DNA, 25 bp, Homo sapien
cgcttttgctcgagccggcgctcgc

SEQ ID NO: 839819 - DNA, 25 bp, Homo sapien
gcttttgctcgagccggcgctcgct

SEQ ID NO: 839820 - DNA, 25 bp, Homo sapien
cgggggcggctgcaagggcagcggc

SEQ ID NO: 839821 - DNA, 25 bp, Homo sapien
tcggcgcggctgacctcgcgctggg

SEQ ID NO: 839822 - DNA, 25 bp, Homo sapien
gggtactcgggctcacgctcgggcc

SEQ ID NO: 839823 - DNA, 25 bp, Homo sapien
gccggctcgcggtacggctgcggct

SEQ ID NO: 839824 - DNA, 25 bp, Homo sapien
gcggcggctgctcagcccgggaagc

SEQ ID NO: 839825 - DNA, 25 bp, Homo sapien
cggccgcggcggctgctcagcccgg

SEQ ID NO: 839826 - DNA, 25 bp, Homo sapien
ggcggctgctcagcccgggaagccg

SEQ ID NO: 839827 - DNA, 25 bp, Homo sapien
ccgcggcggctgctcagcccgggaa

SEQ ID NO: 839828 - DNA, 25 bp, Homo sapien
cagctctcgtcggtggggtccttaa

SEQ ID NO: 839829 - DNA, 25 bp, Homo sapien
taactgaactccacgcagctctcgt

SEQ ID NO: 839830 - DNA, 25 bp, Homo sapien
tggggtccttaagcaccagctccag

SEQ ID NO: 839831 - DNA, 25 bp, Homo sapien
cagcagctccgggtaactgaactcc

SEQ ID NO: 839832 - DNA, 25 bp, Homo sapien
gaaggcggcgggtcctgaggctccc

SEQ ID NO: 839833 - DNA, 25 bp, Homo sapien
gggaaggcggcgggtcctgaggctc

SEQ ID NO: 839834 - DNA, 25 bp, Homo sapien
ggcaggagggaagaatcttctgtac

SEQ ID NO: 839835 - DNA, 25 bp, Homo sapien
aaggtgcaaaccagctggggaaggc

SEQ ID NO: 839836 - DNA, 25 bp, Homo sapien
gggagtggagaaagcagcgctcacc

SEQ ID NO: 839837 - DNA, 25 bp, Homo sapien
agtggagaaagcagcgctcaccgcc

SEQ ID NO: 839838 - DNA, 25 bp, Homo sapien
ctcaccgccccgtccacccgctcgg

SEQ ID NO: 839839 - DNA, 25 bp, Homo sapien
ctggggagtggagaaagcagcgctc

SEQ ID NO: 839840 - DNA, 25 bp, Homo sapien
aaatctgaggttccgaaaggtgcac

SEQ ID NO: 839841 - DNA, 25 bp, Homo sapien
tctactggaacgacagctgtagcgc

SEQ ID NO: 839842 - DNA, 25 bp, Homo sapien
aagaaaacgagctcggcgcggcgtt

SEQ ID NO: 839843 - DNA, 25 bp, Homo sapien
acggcgcccagcaaaacaaacagtg

SEQ ID NO: 839844 - DNA, 25 bp, Homo sapien
tccaataccaacacgagagaaaaat

SEQ ID NO: 839845 - DNA, 25 bp, Homo sapien
cacttaaataatatgacgggtaggt

SEQ ID NO: 839846 - DNA, 25 bp, Homo sapien
caattacaatatgaacgaactccac

SEQ ID NO: 839847 - DNA, 25 bp, Homo sapien
taaagtgggatccttagtctctgaa

SEQ ID NO: 839848 - DNA, 25 bp, Homo sapien
tgcctctcctgatgttcatcattaa

SEQ ID NO: 839849 - DNA, 25 bp, Homo sapien
tcttgcctctcctgatgttcatcat

SEQ ID NO: 839850 - DNA, 25 bp, Homo sapien
ctcttgcctctcctgatgttcatca

SEQ ID NO: 839851 - DNA, 25 bp, Homo sapien
cacctcttgcctctcctgatgttca

SEQ ID NO: 839852 - DNA, 25 bp, Homo sapien
ctatatcaattaaatcttgtagccg

SEQ ID NO: 839853 - DNA, 25 bp, Homo sapien
taaatggatctgtctcatcatagcc

SEQ ID NO: 839854 - DNA, 25 bp, Homo sapien
tgtagccgatccttccggtgtttac

SEQ ID NO: 839855 - DNA, 25 bp, Homo sapien
aatggatctgtctcatcatagccaa

SEQ ID NO: 839856 - DNA, 25 bp, Homo sapien
ggatggagtcaacgctataattaga

SEQ ID NO: 839857 - DNA, 25 bp, Homo sapien
cattgtacagagtcagcaaaccatg

SEQ ID NO: 839858 - DNA, 25 bp, Homo sapien
gaaaccacagggttcacaaagtcta

SEQ ID NO: 839859 - DNA, 25 bp, Homo sapien
caaaccatgagatgcactggccaaa

SEQ ID NO: 839860 - DNA, 25 bp, Homo sapien
ttctggaaaaggtagaactctgaag

SEQ ID NO: 839861 - DNA, 25 bp, Homo sapien
accagtaggtgccagtgattaggag

SEQ ID NO: 839862 - DNA, 25 bp, Homo sapien
tctgaagacagttaagaccagtagg

SEQ ID NO: 839863 - DNA, 25 bp, Homo sapien
gaaaaggtagaactctgaagacagt

SEQ ID NO: 839864 - DNA, 25 bp, Homo sapien
aagaatcatttggttcgaccatagt

SEQ ID NO: 839865 - DNA, 25 bp, Homo sapien
tcaagggcaaagacactaagttatt

SEQ ID NO: 839866 - DNA, 25 bp, Homo sapien
aataatatgtcaagggcaaagacac

SEQ ID NO: 839867 - DNA, 25 bp, Homo sapien
cgaccatagttgttttatgtctgaa

SEQ ID NO: 839868 - DNA, 25 bp, Homo sapien
tagccgtatgcttttaagtggagaa

SEQ ID NO: 839869 - DNA, 25 bp, Homo sapien
tctgtcttagccgtatgcttttaag

SEQ ID NO: 839870 - DNA, 25 bp, Homo sapien
tattttttctgtcttagccgtatgc

SEQ ID NO: 839871 - DNA, 25 bp, Homo sapien
ctattttttctgtcttagccgtatg

SEQ ID NO: 839872 - DNA, 25 bp, Homo sapien
ttcttcagtatctgaagcttggcga

SEQ ID NO: 839873 - DNA, 25 bp, Homo sapien
gagaagcgggaactaattcatcata

SEQ ID NO: 839874 - DNA, 25 bp, Homo sapien
agcttggcgaaactgtagagtgcca

SEQ ID NO: 839875 - DNA, 25 bp, Homo sapien
catattttgttgttagagaagcggg

SEQ ID NO: 839876 - DNA, 25 bp, Homo sapien
tccgcttccgcttcttcatctcaat

SEQ ID NO: 839877 - DNA, 25 bp, Homo sapien
tccgcttcttcatctcaatatcatc

SEQ ID NO: 839878 - DNA, 25 bp, Homo sapien
ttcctctttccgcttccgcttcttc

SEQ ID NO: 839879 - DNA, 25 bp, Homo sapien
tcctctttccgcttccgcttcttca

SEQ ID NO: 839880 - DNA, 25 bp, Homo sapien
aaaatgggaaggtctggatcaccgc

SEQ ID NO: 839881 - DNA, 25 bp, Homo sapien
tgctcagatttaagtccgggacgtc

SEQ ID NO: 839882 - DNA, 25 bp, Homo sapien
caagaagtacaggtagaccctctgg

SEQ ID NO: 839883 - DNA, 25 bp, Homo sapien
gaccctctgggagtgtaggtaccac

SEQ ID NO: 839884 - DNA, 25 bp, Homo sapien
ctatttaagagaaaaggtctaggct

SEQ ID NO: 839885 - DNA, 25 bp, Homo sapien
tgcccagtcagttatttctatttaa

SEQ ID NO: 839886 - DNA, 25 bp, Homo sapien
atgcccagtcagttatttctattta

SEQ ID NO: 839887 - DNA, 25 bp, Homo sapien
agagaaaaggtctaggctgggcgca

SEQ ID NO: 839888 - DNA, 25 bp, Homo sapien
gttgcagacttctacgagcagacaa

SEQ ID NO: 839889 - DNA, 25 bp, Homo sapien
gcagacttctacgagcagacaaaag

SEQ ID NO: 839890 - DNA, 25 bp, Homo sapien
aagttgcagacttctacgagcagac

SEQ ID NO: 839891 - DNA, 25 bp, Homo sapien
tgaagttgcagacttctacgagcag

SEQ ID NO: 839892 - DNA, 25 bp, Homo sapien
taaggtgatggctaacccaattacc

SEQ ID NO: 839893 - DNA, 25 bp, Homo sapien
tagtataggtcacagtagggtagct

SEQ ID NO: 839894 - DNA, 25 bp, Homo sapien
tcaagagaccaagacatcctaacga

SEQ ID NO: 839895 - DNA, 25 bp, Homo sapien
taggctaatctaggataacaacccc

SEQ ID NO: 839896 - DNA, 25 bp, Homo sapien
tattcatatcctgtgtaaagaattt

SEQ ID NO: 839897 - DNA, 25 bp, Homo sapien
gaatattattcatatcctgtgtaaa

SEQ ID NO: 839898 - DNA, 25 bp, Homo sapien
tattattcatatcctgtgtaaagaa

SEQ ID NO: 839899 - DNA, 25 bp, Homo sapien
ttcatatcctgtgtaaagaattttt

SEQ ID NO: 839900 - DNA, 25 bp, Homo sapien
gcacaaaagcttcaaggtgggagta

SEQ ID NO: 839901 - DNA, 25 bp, Homo sapien
tgacagggcctagttcttgtagctg

SEQ ID NO: 839902 - DNA, 25 bp, Homo sapien
ggagtagacaccactgcgaatgaca

SEQ ID NO: 839903 - DNA, 25 bp, Homo sapien
tcttcagacgttttactagtgtttc

SEQ ID NO: 839904 - DNA, 25 bp, Homo sapien
tggcacacttagcttgactacgagc

SEQ ID NO: 839905 - DNA, 25 bp, Homo sapien
gcagaggttctcttaaacgatcatc

SEQ ID NO: 839906 - DNA, 25 bp, Homo sapien
caggcatgacattgctaacagccag

SEQ ID NO: 839907 - DNA, 25 bp, Homo sapien
cagtcctcctggtatttaaatagct

SEQ ID NO: 839908 - DNA, 25 bp, Homo sapien
taaagacggaatctacctttccaca

SEQ ID NO: 839909 - DNA, 25 bp, Homo sapien
ccaacactgcctatataatatgctc

SEQ ID NO: 839910 - DNA, 25 bp, Homo sapien
tacttgctgaattgcttaatggaat

SEQ ID NO: 839911 - DNA, 25 bp, Homo sapien
taaggacttcagattataatgtaaa

SEQ ID NO: 839912 - DNA, 25 bp, Homo sapien
tggtcctatgacacgttttcctggt

SEQ ID NO: 839913 - DNA, 25 bp, Homo sapien
ctttcttggtcctatgacacgtttt

SEQ ID NO: 839914 - DNA, 25 bp, Homo sapien
tcttggtcctatgacacgttttcct

SEQ ID NO: 839915 - DNA, 25 bp, Homo sapien
ttggtcctatgacacgttttcctgg

SEQ ID NO: 839916 - DNA, 25 bp, Homo sapien
cttaagataatcttcagcagactgg

SEQ ID NO: 839917 - DNA, 25 bp, Homo sapien
taactcatagcatcccaatttgatc

SEQ ID NO: 839918 - DNA, 25 bp, Homo sapien
ctgcatccagcccttaggccacagg

SEQ ID NO: 839919 - DNA, 25 bp, Homo sapien
tatttggttctaactcatagcatcc

SEQ ID NO: 839920 - DNA, 25 bp, Homo sapien
tctgagatgactagacagcatgctg

SEQ ID NO: 839921 - DNA, 25 bp, Homo sapien
tcataaccatttgggagtcttccct

SEQ ID NO: 839922 - DNA, 25 bp, Homo sapien
tacatctatctctgtgtgcgcgact

SEQ ID NO: 839923 - DNA, 25 bp, Homo sapien
gtgcctggcctctacactgactatt

SEQ ID NO: 839924 - DNA, 25 bp, Homo sapien
gagcagaagtaagatgattatgaac

SEQ ID NO: 839925 - DNA, 25 bp, Homo sapien
gaagtaagatgattatgaacactcc

SEQ ID NO: 839926 - DNA, 25 bp, Homo sapien
gattatgaacactccggctttcctt

SEQ ID NO: 839927 - DNA, 25 bp, Homo sapien
taagatgattatgaacactccggct

SEQ ID NO: 839928 - DNA, 25 bp, Homo sapien
cagtagactactagcagtgaagttc

SEQ ID NO: 839929 - DNA, 25 bp, Homo sapien
caaccaactcaatgcatctctgata

SEQ ID NO: 839930 - DNA, 25 bp, Homo sapien
cagttgacccctgaggatgaagacc

SEQ ID NO: 839931 - DNA, 25 bp, Homo sapien
tatatgaaaccaaacaacttagaat

SEQ ID NO: 839932 - DNA, 25 bp, Homo sapien
taggtgcaggaatcacctttttctt

SEQ ID NO: 839933 - DNA, 25 bp, Homo sapien
tgggtttaggtgcaggaatcacctt

SEQ ID NO: 839934 - DNA, 25 bp, Homo sapien
ctttgggtttaggtgcaggaatcac

SEQ ID NO: 839935 - DNA, 25 bp, Homo sapien
tttaggtgcaggaatcacctttttc

SEQ ID NO: 839936 - DNA, 25 bp, Homo sapien
cttaagcatagtggggaaagaatgg

SEQ ID NO: 839937 - DNA, 25 bp, Homo sapien
aagcatagtggggaaagaatggaga

SEQ ID NO: 839938 - DNA, 25 bp, Homo sapien
gaggaagggtctttaccatcacctc

SEQ ID NO: 839939 - DNA, 25 bp, Homo sapien
ggagaggaagggtctttaccatcac

SEQ ID NO: 839940 - DNA, 25 bp, Homo sapien
tatccttgagccaactggagggccc

SEQ ID NO: 839941 - DNA, 25 bp, Homo sapien
ccttgttgaagtagcctggctggca

SEQ ID NO: 839942 - DNA, 25 bp, Homo sapien
gagacacatagttctgctggacagc

SEQ ID NO: 839943 - DNA, 25 bp, Homo sapien
taaccgaagccaccagggatgttgg

SEQ ID NO: 839944 - DNA, 25 bp, Homo sapien
ggctgttaccactgaagaccctgag

SEQ ID NO: 839945 - DNA, 25 bp, Homo sapien
tgttagtgctggagtggctaccctg

SEQ ID NO: 839946 - DNA, 25 bp, Homo sapien
tagacaatggtttggtagcaccctg

SEQ ID NO: 839947 - DNA, 25 bp, Homo sapien
ggagatttgaaaccctgcgtggaga

SEQ ID NO: 839948 - DNA, 25 bp, Homo sapien
tcacatggacgtacagaacatacat

SEQ ID NO: 839949 - DNA, 25 bp, Homo sapien
gaaggctacgcctactcaagtgtga

SEQ ID NO: 839950 - DNA, 25 bp, Homo sapien
actgtggtataaaagggcgactgac

SEQ ID NO: 839951 - DNA, 25 bp, Homo sapien
ttgggagtggaacagttagtgcccc

SEQ ID NO: 839952 - DNA, 25 bp, Homo sapien
gagtgaggcactcagctaattgaga

SEQ ID NO: 839953 - DNA, 25 bp, Homo sapien
cagaatacaaagaagtggcatagag

SEQ ID NO: 839954 - DNA, 25 bp, Homo sapien
taaatttgccttcaatgaacataca

SEQ ID NO: 839955 - DNA, 25 bp, Homo sapien
gagataaaatataggcccggcgcag

SEQ ID NO: 839956 - DNA, 25 bp, Homo sapien
agtacctacaaagcataaacagtat

SEQ ID NO: 839957 - DNA, 25 bp, Homo sapien
tattacatgtatcaatgagcattat

SEQ ID NO: 839958 - DNA, 25 bp, Homo sapien
aatgagcattattaattaaggactg

SEQ ID NO: 839959 - DNA, 25 bp, Homo sapien
ttattacatgtatcaatgagcatta

SEQ ID NO: 839960 - DNA, 25 bp, Homo sapien
gagcattattaattaaggactgatt

SEQ ID NO: 839961 - DNA, 25 bp, Homo sapien
ggctttgatgccatgtttacgaata

SEQ ID NO: 839962 - DNA, 25 bp, Homo sapien
tctaactcctgaaagcgggttttca

SEQ ID NO: 839963 - DNA, 25 bp, Homo sapien
cgctaacatatttggactgcaggga

SEQ ID NO: 839964 - DNA, 25 bp, Homo sapien
tctgaaattacactccttgaggtaa

SEQ ID NO: 839965 - DNA, 25 bp, Homo sapien
caaaggtgatgtcatgagagtcaga

SEQ ID NO: 839966 - DNA, 25 bp, Homo sapien
tttgatttgttacagacaaaggtga

SEQ ID NO: 839967 - DNA, 25 bp, Homo sapien
agtcagaggtgaggcattagccaat

SEQ ID NO: 839968 - DNA, 25 bp, Homo sapien
attagccaataatgatgctcctgct

SEQ ID NO: 839969 - DNA, 25 bp, Homo sapien
ggtcactggaacaaggccacccagc

SEQ ID NO: 839970 - DNA, 25 bp, Homo sapien
gtcactggaacaaggccacccagca

SEQ ID NO: 839971 - DNA, 25 bp, Homo sapien
tcactggaacaaggccacccagcat

SEQ ID NO: 839972 - DNA, 25 bp, Homo sapien
tctgagttaggctatggtggaaagc

SEQ ID NO: 839973 - DNA, 25 bp, Homo sapien
ggaaagcggctgaggtagatcccga

SEQ ID NO: 839974 - DNA, 25 bp, Homo sapien
gatcccgaggtggttgtcactccag

SEQ ID NO: 839975 - DNA, 25 bp, Homo sapien
actccagctgtgtccgttccaaagc

SEQ ID NO: 839976 - DNA, 25 bp, Homo sapien
cttctaaaactagagcacgtttttg

SEQ ID NO: 839977 - DNA, 25 bp, Homo sapien
gcacctgacttcgaaggccttctaa

SEQ ID NO: 839978 - DNA, 25 bp, Homo sapien
aatgaaaactgatttatgtaatgca

SEQ ID NO: 839979 - DNA, 25 bp, Homo sapien
cataacccaacacaactgacttcct

SEQ ID NO: 839980 - DNA, 25 bp, Homo sapien
aacagacttgtcagtcatctttaaa

SEQ ID NO: 839981 - DNA, 25 bp, Homo sapien
aaacagacttgtcagtcatctttaa

SEQ ID NO: 839982 - DNA, 25 bp, Homo sapien
ggaaagcgttgctgcatgctgagct

SEQ ID NO: 839983 - DNA, 25 bp, Homo sapien
cgtgaaatgcttgctgtaagtgtgc

SEQ ID NO: 839984 - DNA, 25 bp, Homo sapien
gagtgggaaagcgttgctgcatgct

SEQ ID NO: 839985 - DNA, 25 bp, Homo sapien
aggtgagtgggaaagcgttgctgca

SEQ ID NO: 839986 - DNA, 25 bp, Homo sapien
ctaatgtcagatttcagagcgatct

SEQ ID NO: 839987 - DNA, 25 bp, Homo sapien
gcctaatgtcagatttcagagcgat

SEQ ID NO: 839988 - DNA, 25 bp, Homo sapien
ctgcctaatgtcagatttcagagcg

SEQ ID NO: 839989 - DNA, 25 bp, Homo sapien
cctaatgtcagatttcagagcgatc

SEQ ID NO: 839990 - DNA, 25 bp, Homo sapien
ccagctgagtgtgtgctcattctaa

SEQ ID NO: 839991 - DNA, 25 bp, Homo sapien
gaaagtctgctactgggacaaggct

SEQ ID NO: 839992 - DNA, 25 bp, Homo sapien
tctaacctagctttaagtgacagga

SEQ ID NO: 839993 - DNA, 25 bp, Homo sapien
taattcctgattatttgtgtaaaca

SEQ ID NO: 839994 - DNA, 25 bp, Homo sapien
ggtagattccatcagtcaactaaac

SEQ ID NO: 839995 - DNA, 25 bp, Homo sapien
ctatgaccacataagtactttccca

SEQ ID NO: 839996 - DNA, 25 bp, Homo sapien
catttcgtctcctttgcttgctggg

SEQ ID NO: 839997 - DNA, 25 bp, Homo sapien
gagatttccgtggtaatttagtgtc

SEQ ID NO: 839998 - DNA, 25 bp, Homo sapien
ctggctttgctcaagtaatgttttc

SEQ ID NO: 839999 - DNA, 25 bp, Homo sapien
accacagtgcttgggacgagagaat

SEQ ID NO: 840000 - DNA, 25 bp, Homo sapien
gggacgagagaatgtaaacatcgac

SEQ ID NO: 840001 - DNA, 25 bp, Homo sapien
cagtgcttgggacgagagaatgtaa

SEQ ID NO: 840002 - DNA, 25 bp, Homo sapien
gattttcgagggtgtgctatgcagc

SEQ ID NO: 840003 - DNA, 25 bp, Homo sapien
tgctacacactggaggagattcaag

SEQ ID NO: 840004 - DNA, 25 bp, Homo sapien
tgcagctactgtctatcggagatag

SEQ ID NO: 840005 - DNA, 25 bp, Homo sapien
taaaagcagcaaagcaataaccctg

SEQ ID NO: 840006 - DNA, 25 bp, Homo sapien
taataatcacctgaaggaccactag

SEQ ID NO: 840007 - DNA, 25 bp, Homo sapien
ctaataatcacctgaaggaccacta

SEQ ID NO: 840008 - DNA, 25 bp, Homo sapien
tttcgtaaaagcaagaggtccacta

SEQ ID NO: 840009 - DNA, 25 bp, Homo sapien
cagtcaccagggatcttcatatggc

SEQ ID NO: 840010 - DNA, 25 bp, Homo sapien
gatcccaaaggacgcagagttctca

SEQ ID NO: 840011 - DNA, 25 bp, Homo sapien
tgggctaacaacatccatcagaggg

SEQ ID NO: 840012 - DNA, 25 bp, Homo sapien
caaactgcggttctaacgctagcct

SEQ ID NO: 840013 - DNA, 25 bp, Homo sapien
tagtctagcgcaccttaccaatgtg

SEQ ID NO: 840014 - DNA, 25 bp, Homo sapien
tattcaaagggcgaaggtggcctct

SEQ ID NO: 840015 - DNA, 25 bp, Homo sapien
tactgggtctgagggatggttcaac

SEQ ID NO: 840016 - DNA, 25 bp, Homo sapien
ttgaacctggtaacactggttcctc

SEQ ID NO: 840017 - DNA, 25 bp, Homo sapien
caagaggaagtcatgaaatgccgca

SEQ ID NO: 840018 - DNA, 25 bp, Homo sapien
gcacaaaattttcaccagctggaga

SEQ ID NO: 840019 - DNA, 25 bp, Homo sapien
taaagtcttctaaagcaggcctgca

SEQ ID NO: 840020 - DNA, 25 bp, Homo sapien
tctgacaatttaagggcaggttgcc

SEQ ID NO: 840021 - DNA, 25 bp, Homo sapien
tacacctggaatatgagcaaggctg

SEQ ID NO: 840022 - DNA, 25 bp, Homo sapien
tcatttcctggtagctagcgtttag

SEQ ID NO: 840023 - DNA, 25 bp, Homo sapien
aaatggaaatacctcggctcagtgc

SEQ ID NO: 840024 - DNA, 25 bp, Homo sapien
tcagtgcagggttcagtagcagcag

SEQ ID NO: 840025 - DNA, 25 bp, Homo sapien
tggccggaactggaactcttatgca

SEQ ID NO: 840026 - DNA, 25 bp, Homo sapien
ccggaactggaactcttatgcattg

SEQ ID NO: 840027 - DNA, 25 bp, Homo sapien
gaactggaactcttatgcattgctg

SEQ ID NO: 840028 - DNA, 25 bp, Homo sapien
tgcctggccggaactggaactctta

SEQ ID NO: 840029 - DNA, 25 bp, Homo sapien
gctgtgaaggtgatctagctcctcc

SEQ ID NO: 840030 - DNA, 25 bp, Homo sapien
gccaggacgtggatgccaagctaat

SEQ ID NO: 840031 - DNA, 25 bp, Homo sapien
catgacagcctgacttaggaagcgg

SEQ ID NO: 840032 - DNA, 25 bp, Homo sapien
cccaatgtggagctaacagttttac

SEQ ID NO: 840033 - DNA, 25 bp, Homo sapien
ctttggctggaacaaggctgtctcc

SEQ ID NO: 840034 - DNA, 25 bp, Homo sapien
ctttctagagaaccacggcaggcct

SEQ ID NO: 840035 - DNA, 25 bp, Homo sapien
gagagtgcaaaccatgccaaaggca

SEQ ID NO: 840036 - DNA, 25 bp, Homo sapien
ggagtcaaatcccagtccacgtgtc

SEQ ID NO: 840037 - DNA, 25 bp, Homo sapien
ttctagttattagtcttatccagtg

SEQ ID NO: 840038 - DNA, 25 bp, Homo sapien
tgtcattgacttgaaaccctctctc

SEQ ID NO: 840039 - DNA, 25 bp, Homo sapien
tagtcttatccagtgtcatctcaaa

SEQ ID NO: 840040 - DNA, 25 bp, Homo sapien
aaatgtcattgacttgaaaccctct

SEQ ID NO: 840041 - DNA, 25 bp, Homo sapien
cattgctggcttagattgccccggc

SEQ ID NO: 840042 - DNA, 25 bp, Homo sapien
cctaggcctggatgacatttatagc

SEQ ID NO: 840043 - DNA, 25 bp, Homo sapien
aatgaaacgtctccccattgctggc

SEQ ID NO: 840044 - DNA, 25 bp, Homo sapien
tcaggagtgtccctacaaatcagtt

SEQ ID NO: 840045 - DNA, 25 bp, Homo sapien
gagtgattccttctcgtcactgcca

SEQ ID NO: 840046 - DNA, 25 bp, Homo sapien
aagttaacccactgatgacatcctg

SEQ ID NO: 840047 - DNA, 25 bp, Homo sapien
tcaaaacagacaagctggacctgct

SEQ ID NO: 840048 - DNA, 25 bp, Homo sapien
catcctgcagcatggaaactgcagt

SEQ ID NO: 840049 - DNA, 25 bp, Homo sapien
tccagaagcttgcaggcaagagaaa

SEQ ID NO: 840050 - DNA, 25 bp, Homo sapien
tctagtccctgtaatacggagagca

SEQ ID NO: 840051 - DNA, 25 bp, Homo sapien
aacctcagggcagcacactcctgac

SEQ ID NO: 840052 - DNA, 25 bp, Homo sapien
cggagagcagcatacaaaaatttgg

SEQ ID NO: 840053 - DNA, 25 bp, Homo sapien
gctactgtgggattttaggtctacc

SEQ ID NO: 840054 - DNA, 25 bp, Homo sapien
ttttaggtctaccatggcctccaaa

SEQ ID NO: 840055 - DNA, 25 bp, Homo sapien
tactgtgggattttaggtctaccat

SEQ ID NO: 840056 - DNA, 25 bp, Homo sapien
gggattttaggtctaccatggcctc

SEQ ID NO: 840057 - DNA, 25 bp, Homo sapien
ggaaacccctgttgatggcagaggc

SEQ ID NO: 840058 - DNA, 25 bp, Homo sapien
ttcagagtacaggaggttggttgct

SEQ ID NO: 840059 - DNA, 25 bp, Homo sapien
tgctaccacacagtacttcagagta

SEQ ID NO: 840060 - DNA, 25 bp, Homo sapien
gagctaggggaagtctgctaccaca

SEQ ID NO: 840061 - DNA, 25 bp, Homo sapien
cagctaggcatccatattagtcagg

SEQ ID NO: 840062 - DNA, 25 bp, Homo sapien
taaagagacccattaaggatctcca

SEQ ID NO: 840063 - DNA, 25 bp, Homo sapien
tagtcagggttcagcaagaaaaaga

SEQ ID NO: 840064 - DNA, 25 bp, Homo sapien
cactgtaggcctttcaagcggacag

SEQ ID NO: 840065 - DNA, 25 bp, Homo sapien
tctttagcacgttatttcaggcaac

SEQ ID NO: 840066 - DNA, 25 bp, Homo sapien
ttatttcaggcaacaaaattgcaca

SEQ ID NO: 840067 - DNA, 25 bp, Homo sapien
cgtaattcagtatgtttcgttgttc

SEQ ID NO: 840068 - DNA, 25 bp, Homo sapien
tattgacaacacgtaattcagtatg

SEQ ID NO: 840069 - DNA, 25 bp, Homo sapien
gtgtattttattgacaacacgtaat

SEQ ID NO: 840070 - DNA, 25 bp, Homo sapien
cagtatgtttcgttgttctgaaaaa

SEQ ID NO: 840071 - DNA, 25 bp, Homo sapien
tgaactgccacaagactcttatctt

SEQ ID NO: 840072 - DNA, 25 bp, Homo sapien
tcttgtcagggtccaaattgttcag

SEQ ID NO: 840073 - DNA, 25 bp, Homo sapien
cagagacatctctaaggcaaggccc

SEQ ID NO: 840074 - DNA, 25 bp, Homo sapien
gggaatcacaagagtatccgatttc

SEQ ID NO: 840075 - DNA, 25 bp, Homo sapien
taagcaactggaacagtggttgact

SEQ ID NO: 840076 - DNA, 25 bp, Homo sapien
taatgtgtagctggggtcaagaact

SEQ ID NO: 840077 - DNA, 25 bp, Homo sapien
tgtgtagctggggtcaagaactgct

SEQ ID NO: 840078 - DNA, 25 bp, Homo sapien
taagcttaatgtgtagctggggtca

SEQ ID NO: 840079 - DNA, 25 bp, Homo sapien
gtagctggggtcaagaactgctgtc

SEQ ID NO: 840080 - DNA, 25 bp, Homo sapien
gcttactccagaagtctaggttaga

SEQ ID NO: 840081 - DNA, 25 bp, Homo sapien
taatgtaggtacatggccactactc

SEQ ID NO: 840082 - DNA, 25 bp, Homo sapien
aggcccttgaagtcaatacggcaag

SEQ ID NO: 840083 - DNA, 25 bp, Homo sapien
aaattgttcagctccgaaagccctg

SEQ ID NO: 840084 - DNA, 25 bp, Homo sapien
tgcaccgatgctccggacgttgaac

SEQ ID NO: 840085 - DNA, 25 bp, Homo sapien
cttccggttgaagcgttgaggccat

SEQ ID NO: 840086 - DNA, 25 bp, Homo sapien
caaattggccggatcttcgagactc

SEQ ID NO: 840087 - DNA, 25 bp, Homo sapien
agctttgctccagcggccgttagat

SEQ ID NO: 840088 - DNA, 25 bp, Homo sapien
ccacatcaccgcgccaaaggcttta

SEQ ID NO: 840089 - DNA, 25 bp, Homo sapien
aaaagtccacatcaccgcgccaaag

SEQ ID NO: 840090 - DNA, 25 bp, Homo sapien
aacaaaagtccacatcaccgcgcca

SEQ ID NO: 840091 - DNA, 25 bp, Homo sapien
aaagtccacatcaccgcgccaaagg

SEQ ID NO: 840092 - DNA, 25 bp, Homo sapien
aggggtgacgtatgctgggagttgt

SEQ ID NO: 840093 - DNA, 25 bp, Homo sapien
ctagcgcccacgtgaggggtgacgt

SEQ ID NO: 840094 - DNA, 25 bp, Homo sapien
cccacgtgaggggtgacgtatgctg

SEQ ID NO: 840095 - DNA, 25 bp, Homo sapien
ggggtgacgtatgctgggagttgta

SEQ ID NO: 840096 - DNA, 25 bp, Homo sapien
gcaaacgacgcgctcacacaacata

SEQ ID NO: 840097 - DNA, 25 bp, Homo sapien
catcgtcacttcattttcgccttac

SEQ ID NO: 840098 - DNA, 25 bp, Homo sapien
gcgctcacacaacatattcaactat

SEQ ID NO: 840099 - DNA, 25 bp, Homo sapien
tttcctctttggtacgtcatcgtca

SEQ ID NO: 840100 - DNA, 25 bp, Homo sapien
cttaggaggccaatgccttatccat

SEQ ID NO: 840101 - DNA, 25 bp, Homo sapien
taggaggccaatgccttatccatta

SEQ ID NO: 840102 - DNA, 25 bp, Homo sapien
cctggcttaggaggccaatgcctta

SEQ ID NO: 840103 - DNA, 25 bp, Homo sapien
ggcttaggaggccaatgccttatcc

SEQ ID NO: 840104 - DNA, 25 bp, Homo sapien
tgggtgtgtgcagattctcgaaaat

SEQ ID NO: 840105 - DNA, 25 bp, Homo sapien
gacctgcggctcagacaaaggacat

SEQ ID NO: 840106 - DNA, 25 bp, Homo sapien
caaaattcaacgtattgacgtctcc

SEQ ID NO: 840107 - DNA, 25 bp, Homo sapien
gcagcccaccagctagtaaaaacac

SEQ ID NO: 840108 - DNA, 25 bp, Homo sapien
cccgactgttaactgaaggtaccag

SEQ ID NO: 840109 - DNA, 25 bp, Homo sapien
cgaaccttattaatcgaaggcccag

SEQ ID NO: 840110 - DNA, 25 bp, Homo sapien
ctgttaactgaaggtaccaggacct

SEQ ID NO: 840111 - DNA, 25 bp, Homo sapien
gcccaggggcgccgtaacaaaatca

SEQ ID NO: 840112 - DNA, 25 bp, Homo sapien
ctaatggtacggtcggacagactac

SEQ ID NO: 840113 - DNA, 25 bp, Homo sapien
cccctatcgactgacgagcagtgga

SEQ ID NO: 840114 - DNA, 25 bp, Homo sapien
tacggtcggacagactaccgactcc

SEQ ID NO: 840115 - DNA, 25 bp, Homo sapien
gactgacgagcagtggaaccgctca

SEQ ID NO: 840116 - DNA, 25 bp, Homo sapien
cgtggtgcccaacggcgtcctacga

SEQ ID NO: 840117 - DNA, 25 bp, Homo sapien
gtccttctccgagcgtggtgcccaa

SEQ ID NO: 840118 - DNA, 25 bp, Homo sapien
tgtcctgtccttctccgagcgtggt

SEQ ID NO: 840119 - DNA, 25 bp, Homo sapien
ttctccgagcgtggtgcccaacggc

SEQ ID NO: 840120 - DNA, 25 bp, Homo sapien
gaagtcctcgaaaagtgtgcgacgg

SEQ ID NO: 840121 - DNA, 25 bp, Homo sapien
tgtcgcgatagggtcggccggtggc

SEQ ID NO: 840122 - DNA, 25 bp, Homo sapien
caaggtaccgataggccgcggtgtc

SEQ ID NO: 840123 - DNA, 25 bp, Homo sapien
aggtagcgcaactcccgcagaagtc

SEQ ID NO: 840124 - DNA, 25 bp, Homo sapien
gaatatctagtgttagaatctgaaa

SEQ ID NO: 840125 - DNA, 25 bp, Homo sapien
cgctcctggcctaatcccctttctc

SEQ ID NO: 840126 - DNA, 25 bp, Homo sapien
caatagcgtgaacatggctgctgat

SEQ ID NO: 840127 - DNA, 25 bp, Homo sapien
tcgctccgtggcctatgctggagag

SEQ ID NO: 840128 - DNA, 25 bp, Homo sapien
gctagagatacaggtccacagagaa

SEQ ID NO: 840129 - DNA, 25 bp, Homo sapien
gcagcaagtcagaaattcttaaccc

SEQ ID NO: 840130 - DNA, 25 bp, Homo sapien
taataaataagcattcactagagtg

SEQ ID NO: 840131 - DNA, 25 bp, Homo sapien
ttcttaacccagctagagatacagg

SEQ ID NO: 840132 - DNA, 25 bp, Homo sapien
gaaattcctgatgtagggccacatg

SEQ ID NO: 840133 - DNA, 25 bp, Homo sapien
ggaaatgaagctcatgttgggctct

SEQ ID NO: 840134 - DNA, 25 bp, Homo sapien
ttccggatgctacgcaggaggcaga

SEQ ID NO: 840135 - DNA, 25 bp, Homo sapien
agataggtggcagcttggaaatgaa

SEQ ID NO: 840136 - DNA, 25 bp, Homo sapien
gccagcagactcctccaccgagcgc

SEQ ID NO: 840137 - DNA, 25 bp, Homo sapien
aagccagcagactcctccaccgagc

SEQ ID NO: 840138 - DNA, 25 bp, Homo sapien
caagccagcagactcctccaccgag

SEQ ID NO: 840139 - DNA, 25 bp, Homo sapien
agccagcagactcctccaccgagcg

SEQ ID NO: 840140 - DNA, 25 bp, Homo sapien
aggctgatggggcaacttgagaccc

SEQ ID NO: 840141 - DNA, 25 bp, Homo sapien
caggctgatggggcaacttgagacc

SEQ ID NO: 840142 - DNA, 25 bp, Homo sapien
ttctcctatgaatgcagcatccaag

SEQ ID NO: 840143 - DNA, 25 bp, Homo sapien
aaatacatattgatagaaattattc

SEQ ID NO: 840144 - DNA, 25 bp, Homo sapien
catcagtctagtgcaaaaagttcag

SEQ ID NO: 840145 - DNA, 25 bp, Homo sapien
gagtaaagatgaaatgtccagttaa

SEQ ID NO: 840146 - DNA, 25 bp, Homo sapien
gaaaaacaacatcagtctagtgcaa

SEQ ID NO: 840147 - DNA, 25 bp, Homo sapien
gcctggctaaggcttgtactacttt

SEQ ID NO: 840148 - DNA, 25 bp, Homo sapien
ccgtcgccacgacgggagcgcgcac

SEQ ID NO: 840149 - DNA, 25 bp, Homo sapien
gtcgccacgacgggagcgcgcacgc

SEQ ID NO: 840150 - DNA, 25 bp, Homo sapien
cgtcgccacgacgggagcgcgcacg

SEQ ID NO: 840151 - DNA, 25 bp, Homo sapien
tcgccacgacgggagcgcgcacgct

SEQ ID NO: 840152 - DNA, 25 bp, Homo sapien
gccacccgccagaagccgtcaaccc

SEQ ID NO: 840153 - DNA, 25 bp, Homo sapien
cagaagccgtcaaccccccctcaag

SEQ ID NO: 840154 - DNA, 25 bp, Homo sapien
caccgccacccgccagaagccgtca

SEQ ID NO: 840155 - DNA, 25 bp, Homo sapien
accgccacccgccagaagccgtcaa

SEQ ID NO: 840156 - DNA, 25 bp, Homo sapien
cttgggacagaagcgacacgggcca

SEQ ID NO: 840157 - DNA, 25 bp, Homo sapien
acagaagcgacacgggccaagcaag

SEQ ID NO: 840158 - DNA, 25 bp, Homo sapien
gcgacacgggccaagcaagctctcg

SEQ ID NO: 840159 - DNA, 25 bp, Homo sapien
agcgacacgggccaagcaagctctc

SEQ ID NO: 840160 - DNA, 25 bp, Homo sapien
acgtgtacgtggaagacgacagccc

SEQ ID NO: 840161 - DNA, 25 bp, Homo sapien
gggaagagtccggactgcgctcctc

SEQ ID NO: 840162 - DNA, 25 bp, Homo sapien
cgctcctcacgacgacgtgtacgtg

SEQ ID NO: 840163 - DNA, 25 bp, Homo sapien
gggttgcgggaagagtccggactgc

SEQ ID NO: 840164 - DNA, 25 bp, Homo sapien
gaaggtgcgctgctgtctcggtggc

SEQ ID NO: 840165 - DNA, 25 bp, Homo sapien
gatgggggaaggtgcgctgctgtct

SEQ ID NO: 840166 - DNA, 25 bp, Homo sapien
gcgcagaccgggcccttttgggctg

SEQ ID NO: 840167 - DNA, 25 bp, Homo sapien
ccgccgccgcctcgaggcgtgcgga

SEQ ID NO: 840168 - DNA, 25 bp, Homo sapien
cgcgcatctgggcctgcgccgacat

SEQ ID NO: 840169 - DNA, 25 bp, Homo sapien
cgcgcgcatctgggcctgcgccgac

SEQ ID NO: 840170 - DNA, 25 bp, Homo sapien
gcgcgcatctgggcctgcgccgaca

SEQ ID NO: 840171 - DNA, 25 bp, Homo sapien
ccgggaggtgcccatcaactggtcc

SEQ ID NO: 840172 - DNA, 25 bp, Homo sapien
cgtcccgggaggtgcccatcaactg

SEQ ID NO: 840173 - DNA, 25 bp, Homo sapien
aggtgcccatcaactggtccagcat

SEQ ID NO: 840174 - DNA, 25 bp, Homo sapien
tcccgggaggtgcccatcaactggt

SEQ ID NO: 840175 - DNA, 25 bp, Homo sapien
acctcctggatacccatttccacct

SEQ ID NO: 840176 - DNA, 25 bp, Homo sapien
ctctcccacctcctggatacccatt

SEQ ID NO: 840177 - DNA, 25 bp, Homo sapien
cccacctcctggatacccatttcca

SEQ ID NO: 840178 - DNA, 25 bp, Homo sapien
tctcccacctcctggatacccattt

SEQ ID NO: 840179 - DNA, 25 bp, Homo sapien
ccaaggttacaattagaggtacagc

SEQ ID NO: 840180 - DNA, 25 bp, Homo sapien
catcggcacgattttcagtggcaca

SEQ ID NO: 840181 - DNA, 25 bp, Homo sapien
catttatgcagtatgccaggcatcg

SEQ ID NO: 840182 - DNA, 25 bp, Homo sapien
caatgtttcaactcacgcggtaccc

SEQ ID NO: 840183 - DNA, 25 bp, Homo sapien
cttacttgaggagaactaaacaact

SEQ ID NO: 840184 - DNA, 25 bp, Homo sapien
gaagcatatgcttacttgaggagaa

SEQ ID NO: 840185 - DNA, 25 bp, Homo sapien
tccaggaacgatgcaatgttatatg

SEQ ID NO: 840186 - DNA, 25 bp, Homo sapien
tgaagtaaaagaatgtctcagaagc

SEQ ID NO: 840187 - DNA, 25 bp, Homo sapien
tgccttccaatatctattctagcag

SEQ ID NO: 840188 - DNA, 25 bp, Homo sapien
ctagcagctgctagtgcatgagaac

SEQ ID NO: 840189 - DNA, 25 bp, Homo sapien
ttttggccctgccttccaatatcta

SEQ ID NO: 840190 - DNA, 25 bp, Homo sapien
caatatctattctagcagctgctag

SEQ ID NO: 840191 - DNA, 25 bp, Homo sapien
aatatacagaacaccatgtgcaggg

SEQ ID NO: 840192 - DNA, 25 bp, Homo sapien
ttagtcctagcaacatgccctgccg

SEQ ID NO: 840193 - DNA, 25 bp, Homo sapien
ggaagcactccctctaacacaatgg

SEQ ID NO: 840194 - DNA, 25 bp, Homo sapien
tggtgtccagactcacgtgaatcga

SEQ ID NO: 840195 - DNA, 25 bp, Homo sapien
gcattggcaccatgtgggctcacag

SEQ ID NO: 840196 - DNA, 25 bp, Homo sapien
attggcaccatgtgggctcacagca

SEQ ID NO: 840197 - DNA, 25 bp, Homo sapien
gtgcattggcaccatgtgggctcac

SEQ ID NO: 840198 - DNA, 25 bp, Homo sapien
ggagtgcattggcaccatgtgggct

SEQ ID NO: 840199 - DNA, 25 bp, Homo sapien
gtaattctgacatagtaacaattgc

SEQ ID NO: 840200 - DNA, 25 bp, Homo sapien
taacaattgcactctggatagccgg

SEQ ID NO: 840201 - DNA, 25 bp, Homo sapien
ggtgccttctatcatccagaacttt

SEQ ID NO: 840202 - DNA, 25 bp, Homo sapien
tgcactctggatagccggtgccttc

SEQ ID NO: 840203 - DNA, 25 bp, Homo sapien
tcatgtggaatcaaagtaaaagcga

SEQ ID NO: 840204 - DNA, 25 bp, Homo sapien
aagggaagaaagagtactatgccaa

SEQ ID NO: 840205 - DNA, 25 bp, Homo sapien
tactaaggagccaatctgatcattt

SEQ ID NO: 840206 - DNA, 25 bp, Homo sapien
gcacagtaactcttatactaaggag

SEQ ID NO: 840207 - DNA, 25 bp, Homo sapien
aaatccccttccatatatcaggagg

SEQ ID NO: 840208 - DNA, 25 bp, Homo sapien
aaaaataagcccactgtcattccca

SEQ ID NO: 840209 - DNA, 25 bp, Homo sapien
gagaacacctgagtcacaagtatac

SEQ ID NO: 840210 - DNA, 25 bp, Homo sapien
tgtcaccaatgtatcagagcctaag

SEQ ID NO: 840211 - DNA, 25 bp, Homo sapien
caacctggagtaatagctttgacaa

SEQ ID NO: 840212 - DNA, 25 bp, Homo sapien
catatctggctttggcaaatggctt

SEQ ID NO: 840213 - DNA, 25 bp, Homo sapien
cacccggccgaggatatattaatgg

SEQ ID NO: 840214 - DNA, 25 bp, Homo sapien
gaacagtaagtaaaccatatctggc

SEQ ID NO: 840215 - DNA, 25 bp, Homo sapien
tttgttaaactaatggctcaggcct

SEQ ID NO: 840216 - DNA, 25 bp, Homo sapien
gactgactacaggtaaaagtccaaa

SEQ ID NO: 840217 - DNA, 25 bp, Homo sapien
ggacaatgtctttgagccaagtggg

SEQ ID NO: 840218 - DNA, 25 bp, Homo sapien
ggtgaggacctcaagctcatgttag

SEQ ID NO: 840219 - DNA, 25 bp, Homo sapien
taaaacaaggggccagattgttcat

SEQ ID NO: 840220 - DNA, 25 bp, Homo sapien
ataaaacaaggggccagattgttca

SEQ ID NO: 840221 - DNA, 25 bp, Homo sapien
aaaacaaggggccagattgttcatt

SEQ ID NO: 840222 - DNA, 25 bp, Homo sapien
ctcccttgcagattgaggtaggcag

SEQ ID NO: 840223 - DNA, 25 bp, Homo sapien
ggcctttctgacactcccttgcaga

SEQ ID NO: 840224 - DNA, 25 bp, Homo sapien
ggcttggcgaatgcggggcctttct

SEQ ID NO: 840225 - DNA, 25 bp, Homo sapien
ccttgcagattgaggtaggcaggca

SEQ ID NO: 840226 - DNA, 25 bp, Homo sapien
gcttcagagcagttcaacaataggt

SEQ ID NO: 840227 - DNA, 25 bp, Homo sapien
cacatgatatgcctggagcactcca

SEQ ID NO: 840228 - DNA, 25 bp, Homo sapien
tactgaagcaagaactattggtgcc

SEQ ID NO: 840229 - DNA, 25 bp, Homo sapien
tcgatgaatgaaaacctactggtga

SEQ ID NO: 840230 - DNA, 25 bp, Homo sapien
gagttagagagggtagaataacgcg

SEQ ID NO: 840231 - DNA, 25 bp, Homo sapien
gtagaataacgcgtttaagagcgta

SEQ ID NO: 840232 - DNA, 25 bp, Homo sapien
gaggagttagagagggtagaataac

SEQ ID NO: 840233 - DNA, 25 bp, Homo sapien
gaataacgcgtttaagagcgtacaa

SEQ ID NO: 840234 - DNA, 25 bp, Homo sapien
cccagacgccatttcttccactatt

SEQ ID NO: 840235 - DNA, 25 bp, Homo sapien
tgcgaatccccactgaaccccagac

SEQ ID NO: 840236 - DNA, 25 bp, Homo sapien
tattttgttccagctgaagtgtctc

SEQ ID NO: 840237 - DNA, 25 bp, Homo sapien
actattttgttccagctgaagtgtc

SEQ ID NO: 840238 - DNA, 25 bp, Homo sapien
tctgagagccctactattactagct

SEQ ID NO: 840239 - DNA, 25 bp, Homo sapien
caacatgcagttgcagtaagtgtac

SEQ ID NO: 840240 - DNA, 25 bp, Homo sapien
cattataaatcagctcaagagggat

SEQ ID NO: 840241 - DNA, 25 bp, Homo sapien
tgcagacccactaagagagtttata

SEQ ID NO: 840242 - DNA, 25 bp, Homo sapien
cactgaatttgattcgttgacgagt

SEQ ID NO: 840243 - DNA, 25 bp, Homo sapien
gaatttgattcgttgacgagttgta

SEQ ID NO: 840244 - DNA, 25 bp, Homo sapien
ttgattcgttgacgagttgtatctc

SEQ ID NO: 840245 - DNA, 25 bp, Homo sapien
aggacatcatgaggacaacagttga

SEQ ID NO: 840246 - DNA, 25 bp, Homo sapien
tccaacaggtccatcatcatgcagt

SEQ ID NO: 840247 - DNA, 25 bp, Homo sapien
cgatgatactctaagatcaacatct

SEQ ID NO: 840248 - DNA, 25 bp, Homo sapien
gagaatcaaattctctgttccacat

SEQ ID NO: 840249 - DNA, 25 bp, Homo sapien
cttccaaattaaaacgatgatactc

SEQ ID NO: 840250 - DNA, 25 bp, Homo sapien
caatgagggaggaacatagtctttc

SEQ ID NO: 840251 - DNA, 25 bp, Homo sapien
ggatgtaggattatactggcccaca

SEQ ID NO: 840252 - DNA, 25 bp, Homo sapien
gcaaattcacaaaagagggctatct

SEQ ID NO: 840253 - DNA, 25 bp, Homo sapien
gaagaatgcttgactactcaggcag

SEQ ID NO: 840254 - DNA, 25 bp, Homo sapien
gatcctggtaacttatagctccaca

SEQ ID NO: 840255 - DNA, 25 bp, Homo sapien
tgtggaccaaataactatacctgat

SEQ ID NO: 840256 - DNA, 25 bp, Homo sapien
cattactgcatgaaatgtggaccaa

SEQ ID NO: 840257 - DNA, 25 bp, Homo sapien
tcccagaagaccaggttttgcacaa

SEQ ID NO: 840258 - DNA, 25 bp, Homo sapien
ttcataatccgctcttaaagccagg

SEQ ID NO: 840259 - DNA, 25 bp, Homo sapien
caggtcatggactttcagacattct

SEQ ID NO: 840260 - DNA, 25 bp, Homo sapien
cgctcttaaagccaggtcatggact

SEQ ID NO: 840261 - DNA, 25 bp, Homo sapien
ctttggatgcaatttcataatccgc

SEQ ID NO: 840262 - DNA, 25 bp, Homo sapien
ggccacttctgttctacgatcacaa

SEQ ID NO: 840263 - DNA, 25 bp, Homo sapien
cgatcacaatctgcaatgaatgact

SEQ ID NO: 840264 - DNA, 25 bp, Homo sapien
tgttctacgatcacaatctgcaatg

SEQ ID NO: 840265 - DNA, 25 bp, Homo sapien
ttcttggccacttctgttctacgat

SEQ ID NO: 840266 - DNA, 25 bp, Homo sapien
tcatttaactcatgaacacgttctg

SEQ ID NO: 840267 - DNA, 25 bp, Homo sapien
catttaactcatgaacacgttctgc

SEQ ID NO: 840268 - DNA, 25 bp, Homo sapien
tccaccttggctaacaatttaccaa

SEQ ID NO: 840269 - DNA, 25 bp, Homo sapien
agctcctagttgttccaccttggct

SEQ ID NO: 840270 - DNA, 25 bp, Homo sapien
tcatgaagtcctaaataggcagagc

SEQ ID NO: 840271 - DNA, 25 bp, Homo sapien
gatcagccagtcgtctgtcattatc

SEQ ID NO: 840272 - DNA, 25 bp, Homo sapien
gcagacttcacagactcgaagtttc

SEQ ID NO: 840273 - DNA, 25 bp, Homo sapien
caataaatcccaggtgcagtttacc

SEQ ID NO: 840274 - DNA, 25 bp, Homo sapien
aaatcacaagttcccatgccctgtg

SEQ ID NO: 840275 - DNA, 25 bp, Homo sapien
cactggagttttaacttggagccta

SEQ ID NO: 840276 - DNA, 25 bp, Homo sapien
tctgcaaagactcccaagtaggaac

SEQ ID NO: 840277 - DNA, 25 bp, Homo sapien
ggagatgtccctaggcattttctga

SEQ ID NO: 840278 - DNA, 25 bp, Homo sapien
tactgagtccattcttaaacagctt

SEQ ID NO: 840279 - DNA, 25 bp, Homo sapien
aacagtaataaatgaggagaatatt

SEQ ID NO: 840280 - DNA, 25 bp, Homo sapien
aagtactgccagaaataatcattag

SEQ ID NO: 840281 - DNA, 25 bp, Homo sapien
tatcctaaactttatattatctggt

SEQ ID NO: 840282 - DNA, 25 bp, Homo sapien
ctcttcgtttcagccgttcctggtt

SEQ ID NO: 840283 - DNA, 25 bp, Homo sapien
attcaacttcaattacttggcccat

SEQ ID NO: 840284 - DNA, 25 bp, Homo sapien
tcaacttcaattacttggcccatta

SEQ ID NO: 840285 - DNA, 25 bp, Homo sapien
aattacttggcccattactccatac

SEQ ID NO: 840286 - DNA, 25 bp, Homo sapien
cttcaattacttggcccattactcc

SEQ ID NO: 840287 - DNA, 25 bp, Homo sapien
tagcacacaggtaacgctcaatgaa

SEQ ID NO: 840288 - DNA, 25 bp, Homo sapien
tctgagatctacatactcttggagc

SEQ ID NO: 840289 - DNA, 25 bp, Homo sapien
cagaaaccacttaccagcttggaaa

SEQ ID NO: 840290 - DNA, 25 bp, Homo sapien
tatggctagtaggacaccacaggga

SEQ ID NO: 840291 - DNA, 25 bp, Homo sapien
ttttggattcttgctgtgtgatcgg

SEQ ID NO: 840292 - DNA, 25 bp, Homo sapien
ttggattcttgctgtgtgatcggga

SEQ ID NO: 840293 - DNA, 25 bp, Homo sapien
tggattcttgctgtgtgatcgggac

SEQ ID NO: 840294 - DNA, 25 bp, Homo sapien
ctttttggattcttgctgtgtgatc

SEQ ID NO: 840295 - DNA, 25 bp, Homo sapien
caacttcactacttatacctgtctt

SEQ ID NO: 840296 - DNA, 25 bp, Homo sapien
ttgaaaaagacaacttcactactta

SEQ ID NO: 840297 - DNA, 25 bp, Homo sapien
tcactacttatacctgtcttatgta

SEQ ID NO: 840298 - DNA, 25 bp, Homo sapien
aagacaacttcactacttatacctg

SEQ ID NO: 840299 - DNA, 25 bp, Homo sapien
cttgggaaatagtctctagagctga

SEQ ID NO: 840300 - DNA, 25 bp, Homo sapien
ccccaaatattaacgctgaaagtca

SEQ ID NO: 840301 - DNA, 25 bp, Homo sapien
ctgtgatggtataagcgtgaggcac

SEQ ID NO: 840302 - DNA, 25 bp, Homo sapien
tgaagaaagctcaacgactggaatg

SEQ ID NO: 840303 - DNA, 25 bp, Homo sapien
catcctggctgacgtgtgaaaaata

SEQ ID NO: 840304 - DNA, 25 bp, Homo sapien
ttacaaggcaaacatattatctagg

SEQ ID NO: 840305 - DNA, 25 bp, Homo sapien
taaattagctgacacaactggcccc

SEQ ID NO: 840306 - DNA, 25 bp, Homo sapien
tgttttcaacaaagggaccagctta

SEQ ID NO: 840307 - DNA, 25 bp, Homo sapien
agaaagggatctatacaggtttgta

SEQ ID NO: 840308 - DNA, 25 bp, Homo sapien
ggtttgtaggcagtaaataaagata

SEQ ID NO: 840309 - DNA, 25 bp, Homo sapien
gttcctgcactaaacttagtgctta

SEQ ID NO: 840310 - DNA, 25 bp, Homo sapien
ggaggttgagtagcaagtaaaacaa

SEQ ID NO: 840311 - DNA, 25 bp, Homo sapien
catggagaggacataaacgtttgac

SEQ ID NO: 840312 - DNA, 25 bp, Homo sapien
gtttgggagaaagaacacttgcgaa

SEQ ID NO: 840313 - DNA, 25 bp, Homo sapien
ccacaatatgcatgtctagtcacag

SEQ ID NO: 840314 - DNA, 25 bp, Homo sapien
gacacttttatagcctccaccaggt

SEQ ID NO: 840315 - DNA, 25 bp, Homo sapien
tctcagagagcaatcagtaatgtat

SEQ ID NO: 840316 - DNA, 25 bp, Homo sapien
tgaaagcaacttttgaaccactact

SEQ ID NO: 840317 - DNA, 25 bp, Homo sapien
aaatctacactgaattgctggtgtg

SEQ ID NO: 840318 - DNA, 25 bp, Homo sapien
tggtgatcacatcgctgcagtccag

SEQ ID NO: 840319 - DNA, 25 bp, Homo sapien
tgtttctacctttgtaattactata

SEQ ID NO: 840320 - DNA, 25 bp, Homo sapien
tatatttctcatttattaaagcctt

SEQ ID NO: 840321 - DNA, 25 bp, Homo sapien
ctaccagacaagatttgattttgtt

SEQ ID NO: 840322 - DNA, 25 bp, Homo sapien
tacctttgtaattactatatttctc

SEQ ID NO: 840323 - DNA, 25 bp, Homo sapien
ggagcgagatcgatgtctgcgatgc

SEQ ID NO: 840324 - DNA, 25 bp, Homo sapien
gagcgagatcgatgtctgcgatgct

SEQ ID NO: 840325 - DNA, 25 bp, Homo sapien
tcccgagatttggatcgagttctcc

SEQ ID NO: 840326 - DNA, 25 bp, Homo sapien
tgctcctatctctagaactgtgccg

SEQ ID NO: 840327 - DNA, 25 bp, Homo sapien
cttctctggtggctacggctgcggc

SEQ ID NO: 840328 - DNA, 25 bp, Homo sapien
tcttggatcgttctctgctcctatc

SEQ ID NO: 840329 - DNA, 25 bp, Homo sapien
caagagtgtgagataagaggcctac

SEQ ID NO: 840330 - DNA, 25 bp, Homo sapien
ttatttctgaacactgcactgaggg

SEQ ID NO: 840331 - DNA, 25 bp, Homo sapien
tgacagttgggcagatttgacacag

SEQ ID NO: 840332 - DNA, 25 bp, Homo sapien
ttcatcaacgcaggaagcatcaggg

SEQ ID NO: 840333 - DNA, 25 bp, Homo sapien
aatggtcctcatttacgcagggcac

SEQ ID NO: 840334 - DNA, 25 bp, Homo sapien
tggttctttacaggtgacacagcac

SEQ ID NO: 840335 - DNA, 25 bp, Homo sapien
gacactagatgccaaacagtcccag

SEQ ID NO: 840336 - DNA, 25 bp, Homo sapien
gatctgaggcactaccaagaacctg

SEQ ID NO: 840337 - DNA, 25 bp, Homo sapien
tagacgaatatacccatgacagagg

SEQ ID NO: 840338 - DNA, 25 bp, Homo sapien
tctgacaaattacagagcactacca

SEQ ID NO: 840339 - DNA, 25 bp, Homo sapien
tacaggctactctcatctcagagac

SEQ ID NO: 840340 - DNA, 25 bp, Homo sapien
cactaccatagttgataagggcatt

SEQ ID NO: 840341 - DNA, 25 bp, Homo sapien
tatctttccgatctctgtcacgagg

SEQ ID NO: 840342 - DNA, 25 bp, Homo sapien
gatgctaagtcttggtctctgaatc

SEQ ID NO: 840343 - DNA, 25 bp, Homo sapien
gatctgccattagcactctcatagg

SEQ ID NO: 840344 - DNA, 25 bp, Homo sapien
cgaggtgatctgtctcttgaactcc

SEQ ID NO: 840345 - DNA, 25 bp, Homo sapien
aagctgcagctgtttggactaggaa

SEQ ID NO: 840346 - DNA, 25 bp, Homo sapien
tccgtaggaagcttaaggactgaag

SEQ ID NO: 840347 - DNA, 25 bp, Homo sapien
caggttcagttcagatcaagttaga

SEQ ID NO: 840348 - DNA, 25 bp, Homo sapien
gatactgtacatctagcctagctgg

SEQ ID NO: 840349 - DNA, 25 bp, Homo sapien
aaagtatgtaatgcaacagctgttc

SEQ ID NO: 840350 - DNA, 25 bp, Homo sapien
tgcttattacgaaaagagtccctgc

SEQ ID NO: 840351 - DNA, 25 bp, Homo sapien
gggtgtagcctttatactccacaca

SEQ ID NO: 840352 - DNA, 25 bp, Homo sapien
catcctgaacatagcaattcaacag

SEQ ID NO: 840353 - DNA, 25 bp, Homo sapien
gtttcttctgcaggtcgagcccttc

SEQ ID NO: 840354 - DNA, 25 bp, Homo sapien
tcattacaaacaaccctgaagtggc

SEQ ID NO: 840355 - DNA, 25 bp, Homo sapien
gagcccttctctataacggtcatta

SEQ ID NO: 840356 - DNA, 25 bp, Homo sapien
acagctcatctggaatctttgcaag

SEQ ID NO: 840357 - DNA, 25 bp, Homo sapien
tataccatctagaaaccacagctgc

SEQ ID NO: 840358 - DNA, 25 bp, Homo sapien
tcaatcatgtaaagagccatgcggt

SEQ ID NO: 840359 - DNA, 25 bp, Homo sapien
cacagtgatggtgcgctttatgccc

SEQ ID NO: 840360 - DNA, 25 bp, Homo sapien
ttagaacagcacagactacccggaa

SEQ ID NO: 840361 - DNA, 25 bp, Homo sapien
tgctttctaccagtcaccaacacag

SEQ ID NO: 840362 - DNA, 25 bp, Homo sapien
caaaggagctttagggtaatacttg

SEQ ID NO: 840363 - DNA, 25 bp, Homo sapien
acttagcaaaacactccccagaggg

SEQ ID NO: 840364 - DNA, 25 bp, Homo sapien
tgttgataagctcagcaaaggagct

SEQ ID NO: 840365 - DNA, 25 bp, Homo sapien
gtaatgcatactgggcgatggctca

SEQ ID NO: 840366 - DNA, 25 bp, Homo sapien
aatcacaggtaagaaagtctttgtt

SEQ ID NO: 840367 - DNA, 25 bp, Homo sapien
gaaagaatttacgacatcaaatggc

SEQ ID NO: 840368 - DNA, 25 bp, Homo sapien
ttcggaaaaacttaaatgatgtaca

SEQ ID NO: 840369 - DNA, 25 bp, Homo sapien
gagaacatgccagtgtgctgcctgc

SEQ ID NO: 840370 - DNA, 25 bp, Homo sapien
ctggagaacatgccagtgtgctgcc

SEQ ID NO: 840371 - DNA, 25 bp, Homo sapien
agaacatgccagtgtgctgcctgct

SEQ ID NO: 840372 - DNA, 25 bp, Homo sapien
tgcctgctgaccctagagcccccaa

SEQ ID NO: 840373 - DNA, 25 bp, Homo sapien
gagtttcaacctctactttagagca

SEQ ID NO: 840374 - DNA, 25 bp, Homo sapien
gaagagctacacagtaggttggtct

SEQ ID NO: 840375 - DNA, 25 bp, Homo sapien
ggttggtctgcatggaattcctcta

SEQ ID NO: 840376 - DNA, 25 bp, Homo sapien
ttaaaaggtccacaagagtctggtg

SEQ ID NO: 840377 - DNA, 25 bp, Homo sapien
taatagatgagactcgaggaaaaaa

SEQ ID NO: 840378 - DNA, 25 bp, Homo sapien
cagacggaacagcagcagtcttctt

SEQ ID NO: 840379 - DNA, 25 bp, Homo sapien
aaaaaatgcgcaggtagagtgtgcg

SEQ ID NO: 840380 - DNA, 25 bp, Homo sapien
agtgtgcgggttaagagtacagacc

SEQ ID NO: 840381 - DNA, 25 bp, Homo sapien
ggagctggctgtgcggaaacccctc

SEQ ID NO: 840382 - DNA, 25 bp, Homo sapien
cttgtagaactcagtctgttcggac

SEQ ID NO: 840383 - DNA, 25 bp, Homo sapien
gcaatttaatttatgcttgtagaac

SEQ ID NO: 840384 - DNA, 25 bp, Homo sapien
ggacagaccagataccatcagccac

SEQ ID NO: 840385 - DNA, 25 bp, Homo sapien
acctgcatggactcaatcagcggga

SEQ ID NO: 840386 - DNA, 25 bp, Homo sapien
cccatgacctgcatggactcaatca

SEQ ID NO: 840387 - DNA, 25 bp, Homo sapien
ggatgaaacattcggggaaccagga

SEQ ID NO: 840388 - DNA, 25 bp, Homo sapien
cagcccatgacctgcatggactcaa

SEQ ID NO: 840389 - DNA, 25 bp, Homo sapien
caaaggactgtgcagatatctgacc

SEQ ID NO: 840390 - DNA, 25 bp, Homo sapien
gtgttgtagtgtcgttgtgtgcccc

SEQ ID NO: 840391 - DNA, 25 bp, Homo sapien
aaagcacatgtctgattcaaccccg

SEQ ID NO: 840392 - DNA, 25 bp, Homo sapien
gaccggatattctcgctgcttgaaa

SEQ ID NO: 840393 - DNA, 25 bp, Homo sapien
gaaatgcattttctcggcgtgcgga

SEQ ID NO: 840394 - DNA, 25 bp, Homo sapien
gcattttctcggcgtgcggaacgct

SEQ ID NO: 840395 - DNA, 25 bp, Homo sapien
aatgcattttctcggcgtgcggaac

SEQ ID NO: 840396 - DNA, 25 bp, Homo sapien
aggaaatgcattttctcggcgtgcg

SEQ ID NO: 840397 - DNA, 25 bp, Homo sapien
gtggtactttacccgccatgctctc

SEQ ID NO: 840398 - DNA, 25 bp, Homo sapien
caggtggtactttacccgccatgct

SEQ ID NO: 840399 - DNA, 25 bp, Homo sapien
gagtagcaggtggtactttacccgc

SEQ ID NO: 840400 - DNA, 25 bp, Homo sapien
gtagcaggtggtactttacccgcca

SEQ ID NO: 840401 - DNA, 25 bp, Homo sapien
gatcactttcctcgcttgatggtta

SEQ ID NO: 840402 - DNA, 25 bp, Homo sapien
cactttcctcgcttgatggttagtc

SEQ ID NO: 840403 - DNA, 25 bp, Homo sapien
tcgcttgatggttagtctgccttta

SEQ ID NO: 840404 - DNA, 25 bp, Homo sapien
cctcgcttgatggttagtctgcctt

SEQ ID NO: 840405 - DNA, 25 bp, Homo sapien
tcaaccacaccttcattatcaattt

SEQ ID NO: 840406 - DNA, 25 bp, Homo sapien
ggttcaaccacaccttcattatcaa

SEQ ID NO: 840407 - DNA, 25 bp, Homo sapien
gttcaaccacaccttcattatcaat

SEQ ID NO: 840408 - DNA, 25 bp, Homo sapien
ctggttcaaccacaccttcattatc

SEQ ID NO: 840409 - DNA, 25 bp, Homo sapien
ctgggaacaagtcaatggctgtctg

SEQ ID NO: 840410 - DNA, 25 bp, Homo sapien
atctgggaacaagtcaatggctgtc

SEQ ID NO: 840411 - DNA, 25 bp, Homo sapien
tctgggaacaagtcaatggctgtct

SEQ ID NO: 840412 - DNA, 25 bp, Homo sapien
ctcggatggcagcatttggcttcta

SEQ ID NO: 840413 - DNA, 25 bp, Homo sapien
agcatttggcttctataatttgacg

SEQ ID NO: 840414 - DNA, 25 bp, Homo sapien
tcggatggcagcatttggcttctat

SEQ ID NO: 840415 - DNA, 25 bp, Homo sapien
tggcttctataatttgacgaagaca

SEQ ID NO: 840416 - DNA, 25 bp, Homo sapien
ctgaatcaggaattatttcttttct

SEQ ID NO: 840417 - DNA, 25 bp, Homo sapien
tgaatcaggaattatttcttttctt

SEQ ID NO: 840418 - DNA, 25 bp, Homo sapien
gataagatgcatagtctttgtgttg

SEQ ID NO: 840419 - DNA, 25 bp, Homo sapien
taatccaattgaagggaaagtctgt

SEQ ID NO: 840420 - DNA, 25 bp, Homo sapien
catagtctttgtgttgcgctggtat

SEQ ID NO: 840421 - DNA, 25 bp, Homo sapien
ttggaaaagagcagtactgagctcc

SEQ ID NO: 840422 - DNA, 25 bp, Homo sapien
gatattatagcccaggacttgagcc

SEQ ID NO: 840423 - DNA, 25 bp, Homo sapien
gctgggtgagttcttggtccacgca

SEQ ID NO: 840424 - DNA, 25 bp, Homo sapien
catggtcaaatgtttccctcagctg

SEQ ID NO: 840425 - DNA, 25 bp, Homo sapien
tcaagtggtttgaatcagcagataa

SEQ ID NO: 840426 - DNA, 25 bp, Homo sapien
ctgccagagtgtgatgcttagacct

SEQ ID NO: 840427 - DNA, 25 bp, Homo sapien
ttgtcttttcccaatgagtccttga

SEQ ID NO: 840428 - DNA, 25 bp, Homo sapien
cttttcccaatgagtccttgagcat

SEQ ID NO: 840429 - DNA, 25 bp, Homo sapien
atgcttagacctgaatcctttgtct

SEQ ID NO: 840430 - DNA, 25 bp, Homo sapien
catagcacttgccacatcctactgt

SEQ ID NO: 840431 - DNA, 25 bp, Homo sapien
tagcacttgccacatcctactgtca

SEQ ID NO: 840432 - DNA, 25 bp, Homo sapien
agcacttgccacatcctactgtcat

SEQ ID NO: 840433 - DNA, 25 bp, Homo sapien
atagcacttgccacatcctactgtc

SEQ ID NO: 840434 - DNA, 25 bp, Homo sapien
tgtggttccagccatcacacctgca

SEQ ID NO: 840435 - DNA, 25 bp, Homo sapien
catcttcaggattccctcatggtca

SEQ ID NO: 840436 - DNA, 25 bp, Homo sapien
ctcatggtcacactatagccactgt

SEQ ID NO: 840437 - DNA, 25 bp, Homo sapien
catcatccttagtatatagcctaca

SEQ ID NO: 840438 - DNA, 25 bp, Homo sapien
aacgtccgaacgatgagcacagaga

SEQ ID NO: 840439 - DNA, 25 bp, Homo sapien
gctcagggaagatgagcgcctttct

SEQ ID NO: 840440 - DNA, 25 bp, Homo sapien
tgacccccaaactcttgataaagga

SEQ ID NO: 840441 - DNA, 25 bp, Homo sapien
aaaggagagaaacgtccgaacgatg

SEQ ID NO: 840442 - DNA, 25 bp, Homo sapien
ctgcgggcgaacgcggcctgggggc

SEQ ID NO: 840443 - DNA, 25 bp, Homo sapien
ggcgcggggcgcgcggcgaggggcg

SEQ ID NO: 840444 - DNA, 25 bp, Homo sapien
ggggcgcgcggcgaggggcggcggc

SEQ ID NO: 840445 - DNA, 25 bp, Homo sapien
cgcggggcgcgcggcgaggggcggc

SEQ ID NO: 840446 - DNA, 25 bp, Homo sapien
agcccgacccggatcgccgcagcag

SEQ ID NO: 840447 - DNA, 25 bp, Homo sapien
ctcgtagcccgacccggatcgccgc

SEQ ID NO: 840448 - DNA, 25 bp, Homo sapien
gctgccctcgtagcccgacccggat

SEQ ID NO: 840449 - DNA, 25 bp, Homo sapien
gctggtgctgccctcgtagcccgac

SEQ ID NO: 840450 - DNA, 25 bp, Homo sapien
taatgctgcccaggtcctccttgtc

SEQ ID NO: 840451 - DNA, 25 bp, Homo sapien
tgtccttggattcagggtgccagga

SEQ ID NO: 840452 - DNA, 25 bp, Homo sapien
tccttgtccttggattcagggtgcc

SEQ ID NO: 840453 - DNA, 25 bp, Homo sapien
ttaatgctgcccaggtcctccttgt

SEQ ID NO: 840454 - DNA, 25 bp, Homo sapien
aacacatcgtgctctgggtctggga

SEQ ID NO: 840455 - DNA, 25 bp, Homo sapien
cagggctcagttcctacatgggaca

SEQ ID NO: 840456 - DNA, 25 bp, Homo sapien
catgagtcagagagcaaggcaaggc

SEQ ID NO: 840457 - DNA, 25 bp, Homo sapien
cccagaatggtacccggatgttgca

SEQ ID NO: 840458 - DNA, 25 bp, Homo sapien
tcagttaccgtttatccacttgttc

SEQ ID NO: 840459 - DNA, 25 bp, Homo sapien
catgaggctcaggtaactcctctgc

SEQ ID NO: 840460 - DNA, 25 bp, Homo sapien
agatggggtgaagtcagttaccgtt

SEQ ID NO: 840461 - DNA, 25 bp, Homo sapien
ccatgaggctcaggtaactcctctg

SEQ ID NO: 840462 - DNA, 25 bp, Homo sapien
tggagagaatctgtacagaatggga

SEQ ID NO: 840463 - DNA, 25 bp, Homo sapien
tcttgagagatttcacctcaggttc

SEQ ID NO: 840464 - DNA, 25 bp, Homo sapien
agagatttcacctcaggttcctgcc

SEQ ID NO: 840465 - DNA, 25 bp, Homo sapien
gagagaatctgtacagaatgggaat

SEQ ID NO: 840466 - DNA, 25 bp, Homo sapien
cacagattcgtagtcagcataagtt

SEQ ID NO: 840467 - DNA, 25 bp, Homo sapien
ttcattcacagattcgtagtcagca

SEQ ID NO: 840468 - DNA, 25 bp, Homo sapien
gattcgtagtcagcataagttctgc

SEQ ID NO: 840469 - DNA, 25 bp, Homo sapien
agtcagcataagttctgccttctgg

SEQ ID NO: 840470 - DNA, 25 bp, Homo sapien
tgaagaagggttactacagtgaacg

SEQ ID NO: 840471 - DNA, 25 bp, Homo sapien
aaaacttccgctacagcacaccgta

SEQ ID NO: 840472 - DNA, 25 bp, Homo sapien
gttgagcctgccgatgaagaagcat

SEQ ID NO: 840473 - DNA, 25 bp, Homo sapien
acaccgtactcacctgtgttccaag

SEQ ID NO: 840474 - DNA, 25 bp, Homo sapien
gatggcgaacagaaggaccgcgatg

SEQ ID NO: 840475 - DNA, 25 bp, Homo sapien
cgaacagaaggaccgcgatggcacc

SEQ ID NO: 840476 - DNA, 25 bp, Homo sapien
atcaccaccaagatggcgaacagaa

SEQ ID NO: 840477 - DNA, 25 bp, Homo sapien
tggcgaacagaaggaccgcgatggc

SEQ ID NO: 840478 - DNA, 25 bp, Homo sapien
gacagaccgggacacatcagatgtg

SEQ ID NO: 840479 - DNA, 25 bp, Homo sapien
gacctgctggtctaaggcctctgga

SEQ ID NO: 840480 - DNA, 25 bp, Homo sapien
tccaggttgaaacagatgccatctc

SEQ ID NO: 840481 - DNA, 25 bp, Homo sapien
tccacgaacagatcggcgggtatgt

SEQ ID NO: 840482 - DNA, 25 bp, Homo sapien
cagggcgcttcgcacttgatgcagc

SEQ ID NO: 840483 - DNA, 25 bp, Homo sapien
caccgcctcgtgggtgtggcagtac

SEQ ID NO: 840484 - DNA, 25 bp, Homo sapien
gtagcacttccttccgtagagcagc

SEQ ID NO: 840485 - DNA, 25 bp, Homo sapien
tgggttcctcggaaaagaagtagca

SEQ ID NO: 840486 - DNA, 25 bp, Homo sapien
ggctccctccgcgtgaacttgaaca

SEQ ID NO: 840487 - DNA, 25 bp, Homo sapien
ggaattcgtccccaactctgcgtag

SEQ ID NO: 840488 - DNA, 25 bp, Homo sapien
caactctgcgtagtccaatccaggg

SEQ ID NO: 840489 - DNA, 25 bp, Homo sapien
tccgcgtgaacttgaacataaattc

SEQ ID NO: 840490 - DNA, 25 bp, Homo sapien
gaaggaccccaagaaggagtgcaag

SEQ ID NO: 840491 - DNA, 25 bp, Homo sapien
caagggaaaggacctctgcagtgtc

SEQ ID NO: 840492 - DNA, 25 bp, Homo sapien
caaggctggaggtagaccctcacaa

SEQ ID NO: 840493 - DNA, 25 bp, Homo sapien
tggttgtcaggtggtcagcacgcca

SEQ ID NO: 840494 - DNA, 25 bp, Homo sapien
agacactccgtcgacaccagcctgg

SEQ ID NO: 840495 - DNA, 25 bp, Homo sapien
tggtgggctccacgaagacacactc

SEQ ID NO: 840496 - DNA, 25 bp, Homo sapien
agcctggtgggctccacgaagacac

SEQ ID NO: 840497 - DNA, 25 bp, Homo sapien
cagggccgggtcatcagacactccg

SEQ ID NO: 840498 - DNA, 25 bp, Homo sapien
caagtataggccatcttgctgcaca

SEQ ID NO: 840499 - DNA, 25 bp, Homo sapien
tcaagtataggccatcttgctgcac

SEQ ID NO: 840500 - DNA, 25 bp, Homo sapien
aagtataggccatcttgctgcacac

SEQ ID NO: 840501 - DNA, 25 bp, Homo sapien
tccgctggaagcaggtcttgagcag

SEQ ID NO: 840502 - DNA, 25 bp, Homo sapien
gacactgagcttcagaagggacagc

SEQ ID NO: 840503 - DNA, 25 bp, Homo sapien
gcgtctgtgcgtgcgtgtacctatg

SEQ ID NO: 840504 - DNA, 25 bp, Homo sapien
catatgggatttaactgctgagcca

SEQ ID NO: 840505 - DNA, 25 bp, Homo sapien
tttggaagtgtgccctgcctcgggc

SEQ ID NO: 840506 - DNA, 25 bp, Homo sapien
ctttggaagtgtgccctgcctcggg

SEQ ID NO: 840507 - DNA, 25 bp, Homo sapien
tggaagtgtgccctgcctcgggcat

SEQ ID NO: 840508 - DNA, 25 bp, Homo sapien
ttggaagtgtgccctgcctcgggca

SEQ ID NO: 840509 - DNA, 25 bp, Homo sapien
tgcttctggtgcaagcactcagcag

SEQ ID NO: 840510 - DNA, 25 bp, Homo sapien
tggtgcaagcactcagcagagagtg

SEQ ID NO: 840511 - DNA, 25 bp, Homo sapien
gagctggccacagaccaagaggaaa

SEQ ID NO: 840512 - DNA, 25 bp, Homo sapien
aaacaggcagatacccctccacctg

SEQ ID NO: 840513 - DNA, 25 bp, Homo sapien
gttgtcgatatttcccttaagcata

SEQ ID NO: 840514 - DNA, 25 bp, Homo sapien
tgataagctgcttaatagccaaggc

SEQ ID NO: 840515 - DNA, 25 bp, Homo sapien
aaaatgataagctgcttaatagcca

SEQ ID NO: 840516 - DNA, 25 bp, Homo sapien
agctgcttaatagccaaggcggccc

SEQ ID NO: 840517 - DNA, 25 bp, Homo sapien
cacctctgctccgagggctgctggg

SEQ ID NO: 840518 - DNA, 25 bp, Homo sapien
cgaataacctccagcttcgccaggt

SEQ ID NO: 840519 - DNA, 25 bp, Homo sapien
agccctgaaaacgaataacctccag

SEQ ID NO: 840520 - DNA, 25 bp, Homo sapien
tgaaaacgaataacctccagcttcg

SEQ ID NO: 840521 - DNA, 25 bp, Homo sapien
gcacttgagctacgtgcgccacagc

SEQ ID NO: 840522 - DNA, 25 bp, Homo sapien
agggcccttgccactgcgcacttga

SEQ ID NO: 840523 - DNA, 25 bp, Homo sapien
acccggagcctcgtggcttgctggc

SEQ ID NO: 840524 - DNA, 25 bp, Homo sapien
tgctggcccattgccagggcccttg

SEQ ID NO: 840525 - DNA, 25 bp, Homo sapien
gggtcccattgtggtgaactatgtt

SEQ ID NO: 840526 - DNA, 25 bp, Homo sapien
tcttaactgatcaagtccttgctac

SEQ ID NO: 840527 - DNA, 25 bp, Homo sapien
catcatgacgtcgtgtgcttctaaa

SEQ ID NO: 840528 - DNA, 25 bp, Homo sapien
cggtctccgaggtgaaatgacttat

SEQ ID NO: 840529 - DNA, 25 bp, Homo sapien
cttatatagggtcactgtccccggg

SEQ ID NO: 840530 - DNA, 25 bp, Homo sapien
tcagccttgagactggtggtcacac

SEQ ID NO: 840531 - DNA, 25 bp, Homo sapien
gacctgctgtgacctaaagggcatt

SEQ ID NO: 840532 - DNA, 25 bp, Homo sapien
caagcagatgttcccgtcagcgctg

SEQ ID NO: 840533 - DNA, 25 bp, Homo sapien
gactcaaagtctagttcggtgggag

SEQ ID NO: 840534 - DNA, 25 bp, Homo sapien
ggctgggttttccatatatctgctg

SEQ ID NO: 840535 - DNA, 25 bp, Homo sapien
tcagcctggtccattgagacccact

SEQ ID NO: 840536 - DNA, 25 bp, Homo sapien
cttagcatcctctcagagatggtca

SEQ ID NO: 840537 - DNA, 25 bp, Homo sapien
tcttctgtagtccagcatgcgcact

SEQ ID NO: 840538 - DNA, 25 bp, Homo sapien
ccccggtcatcgttgcttaagtgaa

SEQ ID NO: 840539 - DNA, 25 bp, Homo sapien
cacaaactgtgacctaatggcaata

SEQ ID NO: 840540 - DNA, 25 bp, Homo sapien
tgacatccgcaaaccccagtgaatg

SEQ ID NO: 840541 - DNA, 25 bp, Homo sapien
tgtgagatcggcaatattagtcccc

SEQ ID NO: 840542 - DNA, 25 bp, Homo sapien
atgcaccgtgggactcagctaaagg

SEQ ID NO: 840543 - DNA, 25 bp, Homo sapien
tatgaaccatttagtgatactcccg

SEQ ID NO: 840544 - DNA, 25 bp, Homo sapien
taattaatagcaatgcgtggcctca

SEQ ID NO: 840545 - DNA, 25 bp, Homo sapien
gcaggccagagatgtccttaccaaa

SEQ ID NO: 840546 - DNA, 25 bp, Homo sapien
aagtagaccctaggacagaaaatgg

SEQ ID NO: 840547 - DNA, 25 bp, Homo sapien
tcttgttggcctgtcaagtagaccc

SEQ ID NO: 840548 - DNA, 25 bp, Homo sapien
gaaatggctcggtgctctcaactag

SEQ ID NO: 840549 - DNA, 25 bp, Homo sapien
tctgtctgcttaagttggaggctac

SEQ ID NO: 840550 - DNA, 25 bp, Homo sapien
tcagttcgccttactggagagcacc

SEQ ID NO: 840551 - DNA, 25 bp, Homo sapien
tataagtagactggagggacatcca

SEQ ID NO: 840552 - DNA, 25 bp, Homo sapien
tagcccattaggtctcatcccgagt

SEQ ID NO: 840553 - DNA, 25 bp, Homo sapien
tgttaatgcccgttgtctttcctgg

SEQ ID NO: 840554 - DNA, 25 bp, Homo sapien
gagtccgtggatctcgaaagaaata

SEQ ID NO: 840555 - DNA, 25 bp, Homo sapien
cagttccgccatttgtgaggccaga

SEQ ID NO: 840556 - DNA, 25 bp, Homo sapien
tctgtagacaaccaccaacctctgt

SEQ ID NO: 840557 - DNA, 25 bp, Homo sapien
cctaccttgtgttcaactccaatga

SEQ ID NO: 840558 - DNA, 25 bp, Homo sapien
gtagggctagcggtcgtcacagaca

SEQ ID NO: 840559 - DNA, 25 bp, Homo sapien
ttgaatccacccctagtcgcgtagc

SEQ ID NO: 840560 - DNA, 25 bp, Homo sapien
tagtagaatgtagcactcagcaccc

SEQ ID NO: 840561 - DNA, 25 bp, Homo sapien
cctccagaatgtcgggctgcagcct

SEQ ID NO: 840562 - DNA, 25 bp, Homo sapien
gccctccagaatgtcgggctgcagc

SEQ ID NO: 840563 - DNA, 25 bp, Homo sapien
tggtgtgggattggcgaagcccagt

SEQ ID NO: 840564 - DNA, 25 bp, Homo sapien
attggcgaagcccagtccgggctcc

SEQ ID NO: 840565 - DNA, 25 bp, Homo sapien
tcggggctctcgtcctctgagagct

SEQ ID NO: 840566 - DNA, 25 bp, Homo sapien
agcttggcaagctctgactcaaccc

SEQ ID NO: 840567 - DNA, 25 bp, Homo sapien
tctcgtcctctgagagcttggcaag

SEQ ID NO: 840568 - DNA, 25 bp, Homo sapien
cgtcctctgagagcttggcaagctc

SEQ ID NO: 840569 - DNA, 25 bp, Homo sapien
gtacttgctgctagggtctggtgac

SEQ ID NO: 840570 - DNA, 25 bp, Homo sapien
gccaggctgtacttgctgctagggt

SEQ ID NO: 840571 - DNA, 25 bp, Homo sapien
ccagggcgagcattctggttgacag

SEQ ID NO: 840572 - DNA, 25 bp, Homo sapien
gtgccacatgccagggcgagcattc

SEQ ID NO: 840573 - DNA, 25 bp, Homo sapien
acgtctccttttgcaagtcctggtc

SEQ ID NO: 840574 - DNA, 25 bp, Homo sapien
gtcatgacgatgcagcctccaagca

SEQ ID NO: 840575 - DNA, 25 bp, Homo sapien
tggtctgtccccaacagtaccgtca

SEQ ID NO: 840576 - DNA, 25 bp, Homo sapien
agagccagcgctcctgtgggcctgg

SEQ ID NO: 840577 - DNA, 25 bp, Homo sapien
gccgcaggcaccaaacctaagctta

SEQ ID NO: 840578 - DNA, 25 bp, Homo sapien
gctgcatcccattggacattctgct

SEQ ID NO: 840579 - DNA, 25 bp, Homo sapien
tgcataagctttgccaggccgcagg

SEQ ID NO: 840580 - DNA, 25 bp, Homo sapien
ccagcgaggtttactcctaacccag

SEQ ID NO: 840581 - DNA, 25 bp, Homo sapien
cctgaaccagagaggacagtgtcca

SEQ ID NO: 840582 - DNA, 25 bp, Homo sapien
gctgactccaaggttcgtgttctca

SEQ ID NO: 840583 - DNA, 25 bp, Homo sapien
tgttctcacccacgaacacggttag

SEQ ID NO: 840584 - DNA, 25 bp, Homo sapien
cacatgccgaagttagacagctgac

SEQ ID NO: 840585 - DNA, 25 bp, Homo sapien
tagaacacctctaaggcaccttgtt

SEQ ID NO: 840586 - DNA, 25 bp, Homo sapien
gaaatacgcatgctcacggaagcca

SEQ ID NO: 840587 - DNA, 25 bp, Homo sapien
cattataatcccatcatgcagcagc

SEQ ID NO: 840588 - DNA, 25 bp, Homo sapien
cagcagcctgcactattgaccggtc

SEQ ID NO: 840589 - DNA, 25 bp, Homo sapien
aaacccacccgttgagcacacatgg

SEQ ID NO: 840590 - DNA, 25 bp, Homo sapien
acccgttgagcacacatggccaggc

SEQ ID NO: 840591 - DNA, 25 bp, Homo sapien
agaagaaacccacccgttgagcaca

SEQ ID NO: 840592 - DNA, 25 bp, Homo sapien
gtagaagaaacccacccgttgagca

SEQ ID NO: 840593 - DNA, 25 bp, Homo sapien
gtaccagtgctaggcctgactcaaa

SEQ ID NO: 840594 - DNA, 25 bp, Homo sapien
gctaggcctgactcaaaagagaaag

SEQ ID NO: 840595 - DNA, 25 bp, Homo sapien
acaaacagaagtaccagtgctaggc

SEQ ID NO: 840596 - DNA, 25 bp, Homo sapien
catctattattgtggctaacaaaca

SEQ ID NO: 840597 - DNA, 25 bp, Homo sapien
cctcatttcttccagtgagagcgct

SEQ ID NO: 840598 - DNA, 25 bp, Homo sapien
tcttccagtgagagcgctggtatca

SEQ ID NO: 840599 - DNA, 25 bp, Homo sapien
gcttcttacagaacggcctctgggg

SEQ ID NO: 840600 - DNA, 25 bp, Homo sapien
atttcttccagtgagagcgctggta

SEQ ID NO: 840601 - DNA, 25 bp, Homo sapien
gctgaatgtgaaaccactggtaacc

SEQ ID NO: 840602 - DNA, 25 bp, Homo sapien
ggtccttgtaacttctagaggcaaa

SEQ ID NO: 840603 - DNA, 25 bp, Homo sapien
ggtaaccacctatcttgctaaagga

SEQ ID NO: 840604 - DNA, 25 bp, Homo sapien
caaaacctcttgtagacagtgctga

SEQ ID NO: 840605 - DNA, 25 bp, Homo sapien
gaaaatcagttcatcagcctgtcac

SEQ ID NO: 840606 - DNA, 25 bp, Homo sapien
ctaaatgggatcaggaagctaaggt

SEQ ID NO: 840607 - DNA, 25 bp, Homo sapien
tgtcctttctccgagtcatggagaa

SEQ ID NO: 840608 - DNA, 25 bp, Homo sapien
gcagaaggagcagctaacatactgc

SEQ ID NO: 840609 - DNA, 25 bp, Homo sapien
gagtcctgtcagacagcttctgctt

SEQ ID NO: 840610 - DNA, 25 bp, Homo sapien
tgggccagtgtcattggaaggatag

SEQ ID NO: 840611 - DNA, 25 bp, Homo sapien
gtcagcgtatgtgctggtctcatgg

SEQ ID NO: 840612 - DNA, 25 bp, Homo sapien
ccagtgtcattggaaggatagatgg

SEQ ID NO: 840613 - DNA, 25 bp, Homo sapien
caagtgatgcccaaatcaccaggct

SEQ ID NO: 840614 - DNA, 25 bp, Homo sapien
tcaccaggctgctatgaggacaagt

SEQ ID NO: 840615 - DNA, 25 bp, Homo sapien
gtgagcagagcagacggccctgccc

SEQ ID NO: 840616 - DNA, 25 bp, Homo sapien
tgcagtccgtaagagagagaatggt

SEQ ID NO: 840617 - DNA, 25 bp, Homo sapien
tggccattccaaggatggctccgtg

SEQ ID NO: 840618 - DNA, 25 bp, Homo sapien
ccattccaaggatggctccgtggaa

SEQ ID NO: 840619 - DNA, 25 bp, Homo sapien
caatgggtgggccccttgtcaacct

SEQ ID NO: 840620 - DNA, 25 bp, Homo sapien
aagccagcgcaatgggtgggcccct

SEQ ID NO: 840621 - DNA, 25 bp, Homo sapien
acagtggcagagcacagcgaggcat

SEQ ID NO: 840622 - DNA, 25 bp, Homo sapien
cacagtggcagagcacagcgaggca

SEQ ID NO: 840623 - DNA, 25 bp, Homo sapien
gcaggagcctcatctgagcacagtg

SEQ ID NO: 840624 - DNA, 25 bp, Homo sapien
ggagcctcatctgagcacagtggca

SEQ ID NO: 840625 - DNA, 25 bp, Homo sapien
actcacacctgcctgcttagagtca

SEQ ID NO: 840626 - DNA, 25 bp, Homo sapien
tggtttgatggcgtgcacgtctcca

SEQ ID NO: 840627 - DNA, 25 bp, Homo sapien
ttgctggtttgatggcgtgcacgtc

SEQ ID NO: 840628 - DNA, 25 bp, Homo sapien
cacctgcctgcttagagtcaggccg

SEQ ID NO: 840629 - DNA, 25 bp, Homo sapien
gagctcgctcttgtccggaccacag

SEQ ID NO: 840630 - DNA, 25 bp, Homo sapien
cctaaccaggagtgctgtgagcaga

SEQ ID NO: 840631 - DNA, 25 bp, Homo sapien
gagagctcgctcttgtccggaccac

SEQ ID NO: 840632 - DNA, 25 bp, Homo sapien
cagcaggtcctaaccaggagtgctg

SEQ ID NO: 840633 - DNA, 25 bp, Homo sapien
ccagtgggtcgcgtccctctgtctc

SEQ ID NO: 840634 - DNA, 25 bp, Homo sapien
gctttccgagcctgtgtctgttgca

SEQ ID NO: 840635 - DNA, 25 bp, Homo sapien
ttcaggtggctttccgagcctgtgt

SEQ ID NO: 840636 - DNA, 25 bp, Homo sapien
tctccatggaagttgaaggttcagg

SEQ ID NO: 840637 - DNA, 25 bp, Homo sapien
gattgctccctctaaacgtagctgg

SEQ ID NO: 840638 - DNA, 25 bp, Homo sapien
caactctgaagtcggtggtacctaa

SEQ ID NO: 840639 - DNA, 25 bp, Homo sapien
cctgcctctgtaccttcgttaatga

SEQ ID NO: 840640 - DNA, 25 bp, Homo sapien
gagtggagtccgctgaggtctacta

SEQ ID NO: 840641 - DNA, 25 bp, Homo sapien
tactgactgcaaccccgccatggag

SEQ ID NO: 840642 - DNA, 25 bp, Homo sapien
gactcgtgagcgtccatgttgcgct

SEQ ID NO: 840643 - DNA, 25 bp, Homo sapien
tgttgcgctttgtccttcccatctg

SEQ ID NO: 840644 - DNA, 25 bp, Homo sapien
aagcccataacagaccaccataagg

SEQ ID NO: 840645 - DNA, 25 bp, Homo sapien
tggattccgtgtgataggcaagttg

SEQ ID NO: 840646 - DNA, 25 bp, Homo sapien
tagaatttggattccgtgtgatagg

SEQ ID NO: 840647 - DNA, 25 bp, Homo sapien
ccgtgtgataggcaagttggttctt

SEQ ID NO: 840648 - DNA, 25 bp, Homo sapien
aatttggattccgtgtgataggcaa

SEQ ID NO: 840649 - DNA, 25 bp, Homo sapien
tcagaaggcctgaacccatggtagc

SEQ ID NO: 840650 - DNA, 25 bp, Homo sapien
gcagcagtgattcagcaccagatta

SEQ ID NO: 840651 - DNA, 25 bp, Homo sapien
gacccttgatggttccagtgagccc

SEQ ID NO: 840652 - DNA, 25 bp, Homo sapien
caatagtcactgtctatcggcagga

SEQ ID NO: 840653 - DNA, 25 bp, Homo sapien
gatagcctggtaagccgaaaagact

SEQ ID NO: 840654 - DNA, 25 bp, Homo sapien
tagtgctcacagaaaaagggctgtc

SEQ ID NO: 840655 - DNA, 25 bp, Homo sapien
gacgtgagcacgtttcccagcatta

SEQ ID NO: 840656 - DNA, 25 bp, Homo sapien
ggttagcaaactagggtccacaggc

SEQ ID NO: 840657 - DNA, 25 bp, Homo sapien
tcatttcccagaaaggaccagcctc

SEQ ID NO: 840658 - DNA, 25 bp, Homo sapien
ccagaaaggaccagcctctcttgct

SEQ ID NO: 840659 - DNA, 25 bp, Homo sapien
tttcccagaaaggaccagcctctct

SEQ ID NO: 840660 - DNA, 25 bp, Homo sapien
ctgtctgtggccctgtgatgccagg

SEQ ID NO: 840661 - DNA, 25 bp, Homo sapien
ctggatcccattatgacctgggcct

SEQ ID NO: 840662 - DNA, 25 bp, Homo sapien
cctgggcctgtgtttatgaggcggt

SEQ ID NO: 840663 - DNA, 25 bp, Homo sapien
cctgtgtttatgaggcggttggcca

SEQ ID NO: 840664 - DNA, 25 bp, Homo sapien
gatcccattatgacctgggcctgtg

SEQ ID NO: 840665 - DNA, 25 bp, Homo sapien
ttagacagtgacacctggcgggagt

SEQ ID NO: 840666 - DNA, 25 bp, Homo sapien
aataatccggtgagtgaagcctgac

SEQ ID NO: 840667 - DNA, 25 bp, Homo sapien
tgggttgagccaaagtgccagagct

SEQ ID NO: 840668 - DNA, 25 bp, Homo sapien
gaagcctgacaatagagagttttga

SEQ ID NO: 840669 - DNA, 25 bp, Homo sapien
tgccacttcgtatttaggttggtaa

SEQ ID NO: 840670 - DNA, 25 bp, Homo sapien
gctgctgtgccacttcgtatttagg

SEQ ID NO: 840671 - DNA, 25 bp, Homo sapien
gctgtgccacttcgtatttaggttg

SEQ ID NO: 840672 - DNA, 25 bp, Homo sapien
ggctgctgtgccacttcgtatttag

SEQ ID NO: 840673 - DNA, 25 bp, Homo sapien
ctctggtggccgtcccgggtaccag

SEQ ID NO: 840674 - DNA, 25 bp, Homo sapien
ccggtaccgacagcacatattctct

SEQ ID NO: 840675 - DNA, 25 bp, Homo sapien
gagtgaatctggagggttgggtgcc

SEQ ID NO: 840676 - DNA, 25 bp, Homo sapien
gatgggcaatggttgagtgaatctg

SEQ ID NO: 840677 - DNA, 25 bp, Homo sapien
caccaggccccgtgcggacagacgg

SEQ ID NO: 840678 - DNA, 25 bp, Homo sapien
accaccaggccccgtgcggacagac

SEQ ID NO: 840679 - DNA, 25 bp, Homo sapien
accaggccccgtgcggacagacggg

SEQ ID NO: 840680 - DNA, 25 bp, Homo sapien
tcaccaccaggccccgtgcggacag

SEQ ID NO: 840681 - DNA, 25 bp, Homo sapien
ggactccatttccaccgaggtgttg

SEQ ID NO: 840682 - DNA, 25 bp, Homo sapien
gaggtgttgatgacagccttcaggt

SEQ ID NO: 840683 - DNA, 25 bp, Homo sapien
tccaccgaggtgttgatgacagcct

SEQ ID NO: 840684 - DNA, 25 bp, Homo sapien
catttccaccgaggtgttgatgaca

SEQ ID NO: 840685 - DNA, 25 bp, Homo sapien
gctctactttctacagcatttctcc

SEQ ID NO: 840686 - DNA, 25 bp, Homo sapien
ttgatttgccatctgctctactttc

SEQ ID NO: 840687 - DNA, 25 bp, Homo sapien
tttgccatctgctctactttctaca

SEQ ID NO: 840688 - DNA, 25 bp, Homo sapien
tctgctctactttctacagcatttc

SEQ ID NO: 840689 - DNA, 25 bp, Homo sapien
tccctgcgagttgtggaggtggtac

SEQ ID NO: 840690 - DNA, 25 bp, Homo sapien
cctctccctgcgagttgtggaggtg

SEQ ID NO: 840691 - DNA, 25 bp, Homo sapien
tctcagcatccgtgccaactttccc

SEQ ID NO: 840692 - DNA, 25 bp, Homo sapien
ttccctctccctgcgagttgtggag

SEQ ID NO: 840693 - DNA, 25 bp, Homo sapien
gggattagtacgtgcacacttgaaa

SEQ ID NO: 840694 - DNA, 25 bp, Homo sapien
cgtgccttccacttgttcagaaaag

SEQ ID NO: 840695 - DNA, 25 bp, Homo sapien
ccaaaccagagcatttgtcactgaa

SEQ ID NO: 840696 - DNA, 25 bp, Homo sapien
cttgaaatcactaacactggtggtg

SEQ ID NO: 840697 - DNA, 25 bp, Homo sapien
tcgtcctgttgacctgaaaaacagg

SEQ ID NO: 840698 - DNA, 25 bp, Homo sapien
caacagttgcgacttccttctgtgg

SEQ ID NO: 840699 - DNA, 25 bp, Homo sapien
cactctcgtgtgtaaaggggtcgct

SEQ ID NO: 840700 - DNA, 25 bp, Homo sapien
ctgaagcctgcaccgttcaatgggc

SEQ ID NO: 840701 - DNA, 25 bp, Homo sapien
ttgtagccaagtccttcatggacag

SEQ ID NO: 840702 - DNA, 25 bp, Homo sapien
tgtagccaagtccttcatggacagg

SEQ ID NO: 840703 - DNA, 25 bp, Homo sapien
tttgtagccaagtccttcatggaca

SEQ ID NO: 840704 - DNA, 25 bp, Homo sapien
ctttgtagccaagtccttcatggac

SEQ ID NO: 840705 - DNA, 25 bp, Homo sapien
ctgctggcactgagcgagtcacagc

SEQ ID NO: 840706 - DNA, 25 bp, Homo sapien
tgctggcactgagcgagtcacagct

SEQ ID NO: 840707 - DNA, 25 bp, Homo sapien
caagcatgcattgtgccaaccctcg

SEQ ID NO: 840708 - DNA, 25 bp, Homo sapien
tccggggcgataccaggctaagcat

SEQ ID NO: 840709 - DNA, 25 bp, Homo sapien
attgtgccaaccctcgtctgccatg

SEQ ID NO: 840710 - DNA, 25 bp, Homo sapien
ctggcaagcaagcatgcattgtgcc

SEQ ID NO: 840711 - DNA, 25 bp, Homo sapien
ctccgaggctttgaccaggagcaca

SEQ ID NO: 840712 - DNA, 25 bp, Homo sapien
gcactttgcacagagcgcctcttca

SEQ ID NO: 840713 - DNA, 25 bp, Homo sapien
gacggtagagagagcaccagtttgc

SEQ ID NO: 840714 - DNA, 25 bp, Homo sapien
gacagcaaataagtcctccgaggct

SEQ ID NO: 840715 - DNA, 25 bp, Homo sapien
ctagttgctctctgatttctcatgg

SEQ ID NO: 840716 - DNA, 25 bp, Homo sapien
ctctctgatttctcatggtcctcac

SEQ ID NO: 840717 - DNA, 25 bp, Homo sapien
tgctctctgatttctcatggtcctc

SEQ ID NO: 840718 - DNA, 25 bp, Homo sapien
agttgctctctgatttctcatggtc

SEQ ID NO: 840719 - DNA, 25 bp, Homo sapien
ttgcattggtggtggacttggctcc

SEQ ID NO: 840720 - DNA, 25 bp, Homo sapien
tgtgtgcaccagtctgatcccttgc

SEQ ID NO: 840721 - DNA, 25 bp, Homo sapien
gcttcagcccatgtgtgcaccagtc

SEQ ID NO: 840722 - DNA, 25 bp, Homo sapien
gcccatgtgtgcaccagtctgatcc

SEQ ID NO: 840723 - DNA, 25 bp, Homo sapien
gagccatctccactagtttgtgaaa

SEQ ID NO: 840724 - DNA, 25 bp, Homo sapien
tctccactagtttgtgaaactgcca

SEQ ID NO: 840725 - DNA, 25 bp, Homo sapien
ctccagagagccatctccactagtt

SEQ ID NO: 840726 - DNA, 25 bp, Homo sapien
gagagccatctccactagtttgtga

SEQ ID NO: 840727 - DNA, 25 bp, Homo sapien
tgcagggtccggcagggtcccctgt

SEQ ID NO: 840728 - DNA, 25 bp, Homo sapien
tcctgtgctatggacacctgcatgt

SEQ ID NO: 840729 - DNA, 25 bp, Homo sapien
cacaaagagatatgtctaaggacac

SEQ ID NO: 840730 - DNA, 25 bp, Homo sapien
ccaagatgagcagcggattttccaa

SEQ ID NO: 840731 - DNA, 25 bp, Homo sapien
ccaagagtgatctggcagttgtaag

SEQ ID NO: 840732 - DNA, 25 bp, Homo sapien
gaacagtgaagggatagcctagaag

SEQ ID NO: 840733 - DNA, 25 bp, Homo sapien
tgagtggtgaggttggtggatgtgc

SEQ ID NO: 840734 - DNA, 25 bp, Homo sapien
ggatagcctagaaggaaggagctga

SEQ ID NO: 840735 - DNA, 25 bp, Homo sapien
cagtgaagggatagcctagaaggaa

SEQ ID NO: 840736 - DNA, 25 bp, Homo sapien
tgtatgatgacagtgaccgtccagc

SEQ ID NO: 840737 - DNA, 25 bp, Homo sapien
caatcacgtctgatgagcttggcag

SEQ ID NO: 840738 - DNA, 25 bp, Homo sapien
tcttataacccagacacgtgatgtg

SEQ ID NO: 840739 - DNA, 25 bp, Homo sapien
ttttgccacatcacccagagaacat

SEQ ID NO: 840740 - DNA, 25 bp, Homo sapien
taatcagaggctctaagcccgagtc

SEQ ID NO: 840741 - DNA, 25 bp, Homo sapien
tattaggaaatggttagagtgcagc

SEQ ID NO: 840742 - DNA, 25 bp, Homo sapien
taatagcggcgtcttacctcagacc

SEQ ID NO: 840743 - DNA, 25 bp, Homo sapien
agacctgttgggagctgccgtgaac

SEQ ID NO: 840744 - DNA, 25 bp, Homo sapien
tacgatgacatctaatgtgcagaag

SEQ ID NO: 840745 - DNA, 25 bp, Homo sapien
ttctgcctcgtttgtcacctagatt

SEQ ID NO: 840746 - DNA, 25 bp, Homo sapien
gcctcgtttgtcacctagattctct

SEQ ID NO: 840747 - DNA, 25 bp, Homo sapien
cacctagattctctttacgatgaca

SEQ ID NO: 840748 - DNA, 25 bp, Homo sapien
tgtgcactgggaattgatttcccag

SEQ ID NO: 840749 - DNA, 25 bp, Homo sapien
gtgcactgggaattgatttcccagt

SEQ ID NO: 840750 - DNA, 25 bp, Homo sapien
taaattggagcagatagcagcctgg

SEQ ID NO: 840751 - DNA, 25 bp, Homo sapien
tttgtgttgtgcactggctccagcg

SEQ ID NO: 840752 - DNA, 25 bp, Homo sapien
caggactgtcccctaaattggagca

SEQ ID NO: 840753 - DNA, 25 bp, Homo sapien
tggcgcccgtctttgaagtcaggtg

SEQ ID NO: 840754 - DNA, 25 bp, Homo sapien
gagaacgtattggaagcccctccta

SEQ ID NO: 840755 - DNA, 25 bp, Homo sapien
tgtgacagaggaagtttcttatcaa

SEQ ID NO: 840756 - DNA, 25 bp, Homo sapien
aggaagtttcttatcaagtcctcag

SEQ ID NO: 840757 - DNA, 25 bp, Homo sapien
tcgaattccatcatcgtctctcctt

SEQ ID NO: 840758 - DNA, 25 bp, Homo sapien
tggtgcaactcgaatcaatggctgg

SEQ ID NO: 840759 - DNA, 25 bp, Homo sapien
gaaggtagaacatggctcagaagaa

SEQ ID NO: 840760 - DNA, 25 bp, Homo sapien
ggcctgcgatttctctggtactgga

SEQ ID NO: 840761 - DNA, 25 bp, Homo sapien
tacagaagcagtatctgaagggcag

SEQ ID NO: 840762 - DNA, 25 bp, Homo sapien
tcaagctggagaccgaaggtgctaa

SEQ ID NO: 840763 - DNA, 25 bp, Homo sapien
caagtgaggtggtgaatgtacagca

SEQ ID NO: 840764 - DNA, 25 bp, Homo sapien
ggatctgggatcctccttggaaaag

SEQ ID NO: 840765 - DNA, 25 bp, Homo sapien
tgttcatcaaacagggtcaagtgag

SEQ ID NO: 840766 - DNA, 25 bp, Homo sapien
gccctcagtggttccttgtgtttcc

SEQ ID NO: 840767 - DNA, 25 bp, Homo sapien
tctgtcccaaggaaagcaaggccac

SEQ ID NO: 840768 - DNA, 25 bp, Homo sapien
ttccccagaggcatacggaagctcc

SEQ ID NO: 840769 - DNA, 25 bp, Homo sapien
tacggaagctcctgagttctggttc

SEQ ID NO: 840770 - DNA, 25 bp, Homo sapien
tggggctccaggtatagtggttcct

SEQ ID NO: 840771 - DNA, 25 bp, Homo sapien
gggctccaggtatagtggttcctac

SEQ ID NO: 840772 - DNA, 25 bp, Homo sapien
actgccaggtggggctccaggtata

SEQ ID NO: 840773 - DNA, 25 bp, Homo sapien
ggtggggctccaggtatagtggttc

SEQ ID NO: 840774 - DNA, 25 bp, Homo sapien
tgtagctcgcattcatttcggccgt

SEQ ID NO: 840775 - DNA, 25 bp, Homo sapien
tgtacttgtatctggcatccctcac

SEQ ID NO: 840776 - DNA, 25 bp, Homo sapien
gcagccctggattggtgactcatct

SEQ ID NO: 840777 - DNA, 25 bp, Homo sapien
gattggtgactcatctgtagctcgc

SEQ ID NO: 840778 - DNA, 25 bp, Homo sapien
cgtaggctttgttgcgagtggactc

SEQ ID NO: 840779 - DNA, 25 bp, Homo sapien
tggctgagaccttgtattccaggta

SEQ ID NO: 840780 - DNA, 25 bp, Homo sapien
ggactcttgcatcatatgtggctgt

SEQ ID NO: 840781 - DNA, 25 bp, Homo sapien
ggagaattgattcccagccttttcg

SEQ ID NO: 840782 - DNA, 25 bp, Homo sapien
cctgttactagggaccgggtatgtg

SEQ ID NO: 840783 - DNA, 25 bp, Homo sapien
tcagaactatagtaaacggctggtt

SEQ ID NO: 840784 - DNA, 25 bp, Homo sapien
tggacactcccggtgagttgagaga

SEQ ID NO: 840785 - DNA, 25 bp, Homo sapien
ggaacttggcattgaattcagaact

SEQ ID NO: 840786 - DNA, 25 bp, Homo sapien
ctttctttcggttttgttcagatat

SEQ ID NO: 840787 - DNA, 25 bp, Homo sapien
gctttctttcggttttgttcagata

SEQ ID NO: 840788 - DNA, 25 bp, Homo sapien
ctcctttattctccgcgagcctccg

SEQ ID NO: 840789 - DNA, 25 bp, Homo sapien
ttctccgcgagcctccgattttggg

SEQ ID NO: 840790 - DNA, 25 bp, Homo sapien
ccaccccacgctcctttattctccg

SEQ ID NO: 840791 - DNA, 25 bp, Homo sapien
cccacgctcctttattctccgcgag

SEQ ID NO: 840792 - DNA, 25 bp, Homo sapien
gcccctctgcagaccggctcggctg

SEQ ID NO: 840793 - DNA, 25 bp, Homo sapien
ccagcgtggggctctctttcgggtc

SEQ ID NO: 840794 - DNA, 25 bp, Homo sapien
cggctgtgagatgggcgagccactt

SEQ ID NO: 840795 - DNA, 25 bp, Homo sapien
cacacacaaagttctgggggcccct

SEQ ID NO: 840796 - DNA, 25 bp, Homo sapien
cagccatctagggtgcgggtatgct

SEQ ID NO: 840797 - DNA, 25 bp, Homo sapien
acagaagacaagagtcagccatcta

SEQ ID NO: 840798 - DNA, 25 bp, Homo sapien
agagtgtgagcaacaggcaggaaat

SEQ ID NO: 840799 - DNA, 25 bp, Homo sapien
ggtgcgggtatgctgtggacaacag

SEQ ID NO: 840800 - DNA, 25 bp, Homo sapien
gaggcagttactgaacactggtcag

SEQ ID NO: 840801 - DNA, 25 bp, Homo sapien
caggggcagtcctataaagcagggc

SEQ ID NO: 840802 - DNA, 25 bp, Homo sapien
caatccagttatgaacacagggtac

SEQ ID NO: 840803 - DNA, 25 bp, Homo sapien
gctccaagacgctgccaatccagtt

SEQ ID NO: 840804 - DNA, 25 bp, Homo sapien
caccaaaaagagggttatctctatc

SEQ ID NO: 840805 - DNA, 25 bp, Homo sapien
aaaaagagggttatctctatcctgt

SEQ ID NO: 840806 - DNA, 25 bp, Homo sapien
ccaaaaagagggttatctctatcct

SEQ ID NO: 840807 - DNA, 25 bp, Homo sapien
acaccaaaaagagggttatctctat

SEQ ID NO: 840808 - DNA, 25 bp, Homo sapien
gcacatcctccagagataaaccaca

SEQ ID NO: 840809 - DNA, 25 bp, Homo sapien
aggcagtccaggcagtatatgtctc

SEQ ID NO: 840810 - DNA, 25 bp, Homo sapien
aactagctcacatcagccaggcagt

SEQ ID NO: 840811 - DNA, 25 bp, Homo sapien
gccttctatttaaacatccaactca

SEQ ID NO: 840812 - DNA, 25 bp, Homo sapien
taaacatccaactcaaccagacaaa

SEQ ID NO: 840813 - DNA, 25 bp, Homo sapien
tacaggatacagtgatttgaggcca

SEQ ID NO: 840814 - DNA, 25 bp, Homo sapien
gctccgattccatagttagggctca

SEQ ID NO: 840815 - DNA, 25 bp, Homo sapien
cctagccgttgggtcagatatctca

SEQ ID NO: 840816 - DNA, 25 bp, Homo sapien
tggcattgacctaggactccgtgtg

SEQ ID NO: 840817 - DNA, 25 bp, Homo sapien
tgctccaggtagttatggctcttcc

SEQ ID NO: 840818 - DNA, 25 bp, Homo sapien
tatgtgaggatcaatgcagggccaa

SEQ ID NO: 840819 - DNA, 25 bp, Homo sapien
tgaccaatgcaagcagagccacagg

SEQ ID NO: 840820 - DNA, 25 bp, Homo sapien
cagggccaatggctaacactgtggc

SEQ ID NO: 840821 - DNA, 25 bp, Homo sapien
tgcaggggaactgccaccaccttct

SEQ ID NO: 840822 - DNA, 25 bp, Homo sapien
aggggaactgccaccaccttcttct

SEQ ID NO: 840823 - DNA, 25 bp, Homo sapien
gagggcaaaggaggagcacatctta

SEQ ID NO: 840824 - DNA, 25 bp, Homo sapien
gcagagggcaaaggaggagcacatc

SEQ ID NO: 840825 - DNA, 25 bp, Homo sapien
gacactgttttcatcccaaagctct

SEQ ID NO: 840826 - DNA, 25 bp, Homo sapien
ctgttttcatcccaaagctctgcca

SEQ ID NO: 840827 - DNA, 25 bp, Homo sapien
ctgacactgttttcatcccaaagct

SEQ ID NO: 840828 - DNA, 25 bp, Homo sapien
cactgttttcatcccaaagctctgc

SEQ ID NO: 840829 - DNA, 25 bp, Homo sapien
cccagagtggtggtcttccagatga

SEQ ID NO: 840830 - DNA, 25 bp, Homo sapien
gatctcgccgcccttatgggaaccg

SEQ ID NO: 840831 - DNA, 25 bp, Homo sapien
gagtgtctccctataaagaggaagg

SEQ ID NO: 840832 - DNA, 25 bp, Homo sapien
gaggagggcacaacaaagggtttca

SEQ ID NO: 840833 - DNA, 25 bp, Homo sapien
gagagccactgacagggccaccgtc

SEQ ID NO: 840834 - DNA, 25 bp, Homo sapien
tttcaggagggccaagagagccact

SEQ ID NO: 840835 - DNA, 25 bp, Homo sapien
ccatggggccattcacttccaattt

SEQ ID NO: 840836 - DNA, 25 bp, Homo sapien
tttagaaaccccaaggcttccatca

SEQ ID NO: 840837 - DNA, 25 bp, Homo sapien
cctgaccttgtaccagggcctcctc

SEQ ID NO: 840838 - DNA, 25 bp, Homo sapien
ttcctgaccttgtaccagggcctcc

SEQ ID NO: 840839 - DNA, 25 bp, Homo sapien
tcctgaccttgtaccagggcctcct

SEQ ID NO: 840840 - DNA, 25 bp, Homo sapien
gcttcctgaccttgtaccagggcct

SEQ ID NO: 840841 - DNA, 25 bp, Homo sapien
cagaattgctgatttattcttgcag

SEQ ID NO: 840842 - DNA, 25 bp, Homo sapien
agaattgctgatttattcttgcagt

SEQ ID NO: 840843 - DNA, 25 bp, Homo sapien
ggatcctcatagcttagatcccacg

SEQ ID NO: 840844 - DNA, 25 bp, Homo sapien
tttatcccttgcctacctctcatac

SEQ ID NO: 840845 - DNA, 25 bp, Homo sapien
ttgcctacctctcatacttccctcc

SEQ ID NO: 840846 - DNA, 25 bp, Homo sapien
cccttgcctacctctcatacttccc

SEQ ID NO: 840847 - DNA, 25 bp, Homo sapien
cttccttgccgcttcatcagccctg

SEQ ID NO: 840848 - DNA, 25 bp, Homo sapien
ctgttactccaaatcctttcagaca

SEQ ID NO: 840849 - DNA, 25 bp, Homo sapien
ttgccgcttcatcagccctgttact

SEQ ID NO: 840850 - DNA, 25 bp, Homo sapien
cctgttactccaaatcctttcagac

SEQ ID NO: 840851 - DNA, 25 bp, Homo sapien
cccaatggtgccttctaaatatagt

SEQ ID NO: 840852 - DNA, 25 bp, Homo sapien
attccatcccaatggtgccttctaa

SEQ ID NO: 840853 - DNA, 25 bp, Homo sapien
cagatttctcatcttggctcccata

SEQ ID NO: 840854 - DNA, 25 bp, Homo sapien
ggctcccatattccatcccaatggt

SEQ ID NO: 840855 - DNA, 25 bp, Homo sapien
caagagcgccagtgggcatagaagt

SEQ ID NO: 840856 - DNA, 25 bp, Homo sapien
agtccagatcgggaaggcactcggt

SEQ ID NO: 840857 - DNA, 25 bp, Homo sapien
tttcctgagcggcagcacagactga

SEQ ID NO: 840858 - DNA, 25 bp, Homo sapien
gcatagaagtcacggagtccagatc

SEQ ID NO: 840859 - DNA, 25 bp, Homo sapien
ggcatgaagctaccgtgaggcccct

SEQ ID NO: 840860 - DNA, 25 bp, Homo sapien
gagtcaggcatgaagctaccgtgag

SEQ ID NO: 840861 - DNA, 25 bp, Homo sapien
cgtgaggcccctaaacgctgcttct

SEQ ID NO: 840862 - DNA, 25 bp, Homo sapien
ccctaaacgctgcttctgtatttct

SEQ ID NO: 840863 - DNA, 25 bp, Homo sapien
tcctctgccaagtcaattcttccct

SEQ ID NO: 840864 - DNA, 25 bp, Homo sapien
ttctgcttctcgaagtagagtctga

SEQ ID NO: 840865 - DNA, 25 bp, Homo sapien
tagagtctgactggctggcgatcca

SEQ ID NO: 840866 - DNA, 25 bp, Homo sapien
tctcgaagtagagtctgactggctg

SEQ ID NO: 840867 - DNA, 25 bp, Homo sapien
aaatgttacaaacactaatgttgtc

SEQ ID NO: 840868 - DNA, 25 bp, Homo sapien
tgttacaaacactaatgttgtcttt

SEQ ID NO: 840869 - DNA, 25 bp, Homo sapien
caaatgttacaaacactaatgttgt

SEQ ID NO: 840870 - DNA, 25 bp, Homo sapien
aatgttacaaacactaatgttgtct

SEQ ID NO: 840871 - DNA, 25 bp, Homo sapien
gggccaaactctgcactgagggctg

SEQ ID NO: 840872 - DNA, 25 bp, Homo sapien
gaggtttaggagggccccacagcgc

SEQ ID NO: 840873 - DNA, 25 bp, Homo sapien
agcgcgggccagggccaaactctgc

SEQ ID NO: 840874 - DNA, 25 bp, Homo sapien
gccaaactctgcactgagggctgag

SEQ ID NO: 840875 - DNA, 25 bp, Homo sapien
caccaggtgagaagcgaggggagtt

SEQ ID NO: 840876 - DNA, 25 bp, Homo sapien
gcaccaggtgagaagcgaggggagt

SEQ ID NO: 840877 - DNA, 25 bp, Homo sapien
caggtgagaagcgaggggagttaaa

SEQ ID NO: 840878 - DNA, 25 bp, Homo sapien
caggcaccaggtgagaagcgagggg

SEQ ID NO: 840879 - DNA, 25 bp, Homo sapien
caagagtgtcccctggttgctgtat

SEQ ID NO: 840880 - DNA, 25 bp, Homo sapien
tatttcaggacatggtgaacaagct

SEQ ID NO: 840881 - DNA, 25 bp, Homo sapien
ggttgctgtatttcaggacatggtg

SEQ ID NO: 840882 - DNA, 25 bp, Homo sapien
atctacaagagtgtcccctggttgc

SEQ ID NO: 840883 - DNA, 25 bp, Homo sapien
gagtgctgagttccgggtaccagga

SEQ ID NO: 840884 - DNA, 25 bp, Homo sapien
gaagacgtgactctcaaggatggtc

SEQ ID NO: 840885 - DNA, 25 bp, Homo sapien
gtccgaggaagacataatcaaaatg

SEQ ID NO: 840886 - DNA, 25 bp, Homo sapien
cagagagcagataccaagcatggtg

SEQ ID NO: 840887 - DNA, 25 bp, Homo sapien
tacttaacccctttcatgatcttca

SEQ ID NO: 840888 - DNA, 25 bp, Homo sapien
tctctcgctctgacaactcctgtgt

SEQ ID NO: 840889 - DNA, 25 bp, Homo sapien
taaggacctcatgattacatttagg

SEQ ID NO: 840890 - DNA, 25 bp, Homo sapien
aacctcactggtttacaggcagggt

SEQ ID NO: 840891 - DNA, 25 bp, Homo sapien
catatatgaatgtgttgtatctctc

SEQ ID NO: 840892 - DNA, 25 bp, Homo sapien
tgttgctcatgtataggagcacctt

SEQ ID NO: 840893 - DNA, 25 bp, Homo sapien
tgccagcgttgtaatcaatgatcct

SEQ ID NO: 840894 - DNA, 25 bp, Homo sapien
caatgatccttctggactttctaat

SEQ ID NO: 840895 - DNA, 25 bp, Homo sapien
ggtgcactgctttcaaaaacttcag

SEQ ID NO: 840896 - DNA, 25 bp, Homo sapien
tgaaagattcccttggcaaatagcg

SEQ ID NO: 840897 - DNA, 25 bp, Homo sapien
ccagcggtgccaggtaacccagtgt

SEQ ID NO: 840898 - DNA, 25 bp, Homo sapien
aaagaattcctacttggtgcactgc

SEQ ID NO: 840899 - DNA, 25 bp, Homo sapien
gccaaatattgccatcagtaactca

SEQ ID NO: 840900 - DNA, 25 bp, Homo sapien
gtaactcaagttcctgcacccaaat

SEQ ID NO: 840901 - DNA, 25 bp, Homo sapien
agtaactcaagttcctgcacccaaa

SEQ ID NO: 840902 - DNA, 25 bp, Homo sapien
ggaaactggccaaatattgccatca

SEQ ID NO: 840903 - DNA, 25 bp, Homo sapien
tcctcaaattcgtgtctatgttcat

SEQ ID NO: 840904 - DNA, 25 bp, Homo sapien
taacatcctcaaattcgtgtctatg

SEQ ID NO: 840905 - DNA, 25 bp, Homo sapien
catcctcaaattcgtgtctatgttc

SEQ ID NO: 840906 - DNA, 25 bp, Homo sapien
aacatcctcaaattcgtgtctatgt

SEQ ID NO: 840907 - DNA, 25 bp, Homo sapien
tttctcggcccgcaaccatatggga

SEQ ID NO: 840908 - DNA, 25 bp, Homo sapien
accaaaaatcaggaagcgtggtccg

SEQ ID NO: 840909 - DNA, 25 bp, Homo sapien
tctcggcccgcaaccatatgggaag

SEQ ID NO: 840910 - DNA, 25 bp, Homo sapien
caggaagcgtggtccgacagatttc

SEQ ID NO: 840911 - DNA, 25 bp, Homo sapien
gtctgaggcctaacttctccagtct

SEQ ID NO: 840912 - DNA, 25 bp, Homo sapien
ctccagtcttgagaatgctgatgtg

SEQ ID NO: 840913 - DNA, 25 bp, Homo sapien
tcttgagaatgctgatgtggagtac

SEQ ID NO: 840914 - DNA, 25 bp, Homo sapien
ctgaggcctaacttctccagtcttg

SEQ ID NO: 840915 - DNA, 25 bp, Homo sapien
cagaggtccatacagctttctgagc

SEQ ID NO: 840916 - DNA, 25 bp, Homo sapien
gaggtccatacagctttctgagctc

SEQ ID NO: 840917 - DNA, 25 bp, Homo sapien
cacagaggtccatacagctttctga

SEQ ID NO: 840918 - DNA, 25 bp, Homo sapien
ccacacagaggtccatacagctttc

SEQ ID NO: 840919 - DNA, 25 bp, Homo sapien
agtggtactctttcaggccagcaga

SEQ ID NO: 840920 - DNA, 25 bp, Homo sapien
gcaaccccagggtcttctctagaag

SEQ ID NO: 840921 - DNA, 25 bp, Homo sapien
tgtctgtactgcaggactccctctt

SEQ ID NO: 840922 - DNA, 25 bp, Homo sapien
ggcatttcttctatatcagttcaac

SEQ ID NO: 840923 - DNA, 25 bp, Homo sapien
tacgtcggcaacacaggagaacttt

SEQ ID NO: 840924 - DNA, 25 bp, Homo sapien
gaagaacttgaccaaaactgtgggc

SEQ ID NO: 840925 - DNA, 25 bp, Homo sapien
cccagaggtctacgaaaagctgcaa

SEQ ID NO: 840926 - DNA, 25 bp, Homo sapien
gagcccattggaatgtacgtcggca

SEQ ID NO: 840927 - DNA, 25 bp, Homo sapien
gagccaagatcaaaactaaagtgat

SEQ ID NO: 840928 - DNA, 25 bp, Homo sapien
agccaagatcaaaactaaagtgatg

SEQ ID NO: 840929 - DNA, 25 bp, Homo sapien
caaaatggagcggcatagctgatgg

SEQ ID NO: 840930 - DNA, 25 bp, Homo sapien
tggagcggcatagctgatggatgcc

SEQ ID NO: 840931 - DNA, 25 bp, Homo sapien
cctatcctcagccacatgttcaagc

SEQ ID NO: 840932 - DNA, 25 bp, Homo sapien
tgtattcagatgtctcatatcttct

SEQ ID NO: 840933 - DNA, 25 bp, Homo sapien
aagcccagtgtattcagatgtctca

SEQ ID NO: 840934 - DNA, 25 bp, Homo sapien
catgtccaacaggtgagtctttcag

SEQ ID NO: 840935 - DNA, 25 bp, Homo sapien
ccggcaaatgggattatttccagtt

SEQ ID NO: 840936 - DNA, 25 bp, Homo sapien
aaatgggattatttccagtttccag

SEQ ID NO: 840937 - DNA, 25 bp, Homo sapien
ggattatttccagtttccaggccat

SEQ ID NO: 840938 - DNA, 25 bp, Homo sapien
cccggcaaatgggattatttccagt

SEQ ID NO: 840939 - DNA, 25 bp, Homo sapien
agctctctcctggactgtccactgt

SEQ ID NO: 840940 - DNA, 25 bp, Homo sapien
tcctcatcgctgctttactggacgc

SEQ ID NO: 840941 - DNA, 25 bp, Homo sapien
aggttcctgaaccacccactagtgg

SEQ ID NO: 840942 - DNA, 25 bp, Homo sapien
acgcctgactactgtccagctgaca

SEQ ID NO: 840943 - DNA, 25 bp, Homo sapien
agccagtgacacagtcataggccat

SEQ ID NO: 840944 - DNA, 25 bp, Homo sapien
ccctgcttggctcatggagtgtctt

SEQ ID NO: 840945 - DNA, 25 bp, Homo sapien
ccacagggtgccatggagaaagcag

SEQ ID NO: 840946 - DNA, 25 bp, Homo sapien
ctgcttggctcatggagtgtctttc

SEQ ID NO: 840947 - DNA, 25 bp, Homo sapien
gggctggatggtccacagggtgcca

SEQ ID NO: 840948 - DNA, 25 bp, Homo sapien
tcatcttatctattccttgaacgtt

SEQ ID NO: 840949 - DNA, 25 bp, Homo sapien
gttttataatgagcgcatgtgactt

SEQ ID NO: 840950 - DNA, 25 bp, Homo sapien
tccttgaacgttcagtgttttataa

SEQ ID NO: 840951 - DNA, 25 bp, Homo sapien
cagtgttttataatgagcgcatgtg

SEQ ID NO: 840952 - DNA, 25 bp, Homo sapien
gaatctcgtgagaaaactggtccca

SEQ ID NO: 840953 - DNA, 25 bp, Homo sapien
cattccatgcagttctgaaggagct

SEQ ID NO: 840954 - DNA, 25 bp, Homo sapien
tgaggaaccaccctcgcattccatg

SEQ ID NO: 840955 - DNA, 25 bp, Homo sapien
tgtcctaggcacacatagctttcgt

SEQ ID NO: 840956 - DNA, 25 bp, Homo sapien
aaacatccgacgaccaagatagtac

SEQ ID NO: 840957 - DNA, 25 bp, Homo sapien
caataaacatccgacgaccaagata

SEQ ID NO: 840958 - DNA, 25 bp, Homo sapien
ttgatcatgtctggctcagaaataa

SEQ ID NO: 840959 - DNA, 25 bp, Homo sapien
gcttgatcatgtctggctcagaaat

SEQ ID NO: 840960 - DNA, 25 bp, Homo sapien
cagagaagcagttaaacttctgcaa

SEQ ID NO: 840961 - DNA, 25 bp, Homo sapien
tctggagttgggcatgatgctctgg

SEQ ID NO: 840962 - DNA, 25 bp, Homo sapien
ccatcctgaagggatggaggtagca

SEQ ID NO: 840963 - DNA, 25 bp, Homo sapien
ttctgcaattccttcggccatcctg

SEQ ID NO: 840964 - DNA, 25 bp, Homo sapien
cttggtggtccgtgcactttgactt

SEQ ID NO: 840965 - DNA, 25 bp, Homo sapien
gatggagcaacaagctacagctgca

SEQ ID NO: 840966 - DNA, 25 bp, Homo sapien
gactttgagcgaggagatagcaatg

SEQ ID NO: 840967 - DNA, 25 bp, Homo sapien
tagcaatgcagtgtttgggaaagag

SEQ ID NO: 840968 - DNA, 25 bp, Homo sapien
cattgagtatgtctgcccctagcag

SEQ ID NO: 840969 - DNA, 25 bp, Homo sapien
gcaagtgccgtctcatggcttaggg

SEQ ID NO: 840970 - DNA, 25 bp, Homo sapien
tctcaagtgctatgacaggctcctg

SEQ ID NO: 840971 - DNA, 25 bp, Homo sapien
tatggagacaccagttggcaagtgc

SEQ ID NO: 840972 - DNA, 25 bp, Homo sapien
aacatccgagtcctgatgtaccagg

SEQ ID NO: 840973 - DNA, 25 bp, Homo sapien
cgagtcctgatgtaccaggacgact

SEQ ID NO: 840974 - DNA, 25 bp, Homo sapien
ctgatgtaccaggacgactgagctt

SEQ ID NO: 840975 - DNA, 25 bp, Homo sapien
tctaaatagaaacatccgagtcctg

SEQ ID NO: 840976 - DNA, 25 bp, Homo sapien
tagccctgaattgagctttccttgc

SEQ ID NO: 840977 - DNA, 25 bp, Homo sapien
caaggagtttgtggtttcacagtga

SEQ ID NO: 840978 - DNA, 25 bp, Homo sapien
ttcttccttcgataggaggctgctg

SEQ ID NO: 840979 - DNA, 25 bp, Homo sapien
ccaattagctctgcaatgagccaac

SEQ ID NO: 840980 - DNA, 25 bp, Homo sapien
ccagctgaacagagcgaggtgcttc

SEQ ID NO: 840981 - DNA, 25 bp, Homo sapien
tgattctcgactggcctggtaaagc

SEQ ID NO: 840982 - DNA, 25 bp, Homo sapien
tggagacgtgaaagacctggcactg

SEQ ID NO: 840983 - DNA, 25 bp, Homo sapien
tgaggacagccatcgtgcaacttgt

SEQ ID NO: 840984 - DNA, 25 bp, Homo sapien
tgtgctaggagaactgcttccggga

SEQ ID NO: 840985 - DNA, 25 bp, Homo sapien
cagaagcgtgtgctaggagaactgc

SEQ ID NO: 840986 - DNA, 25 bp, Homo sapien
tcgtctggacccttgtatgggtgga

SEQ ID NO: 840987 - DNA, 25 bp, Homo sapien
aaaggccttcagaagcgtgtgctag

SEQ ID NO: 840988 - DNA, 25 bp, Homo sapien
gggaagtaacaagcagagggtcagg

SEQ ID NO: 840989 - DNA, 25 bp, Homo sapien
tgggaagtaacaagcagagggtcag

SEQ ID NO: 840990 - DNA, 25 bp, Homo sapien
ttgggaagtaacaagcagagggtca

SEQ ID NO: 840991 - DNA, 25 bp, Homo sapien
tttgtcacgtaaaaacagaacgctg

SEQ ID NO: 840992 - DNA, 25 bp, Homo sapien
tcggctaccgacttgaactccaaac

SEQ ID NO: 840993 - DNA, 25 bp, Homo sapien
gacatcagggcacctctgacctctt

SEQ ID NO: 840994 - DNA, 25 bp, Homo sapien
ctcgttcagcttttcaggactgaaa

SEQ ID NO: 840995 - DNA, 25 bp, Homo sapien
ggccttccagtaaacttcaactcgc

SEQ ID NO: 840996 - DNA, 25 bp, Homo sapien
tccagtaaacttcaactcgccaggt

SEQ ID NO: 840997 - DNA, 25 bp, Homo sapien
cttccagtaaacttcaactcgccag

SEQ ID NO: 840998 - DNA, 25 bp, Homo sapien
gccttccagtaaacttcaactcgcc

SEQ ID NO: 840999 - DNA, 25 bp, Homo sapien
cagcatttaacacctctggctgctc

SEQ ID NO: 841000 - DNA, 25 bp, Homo sapien
gacatacattggtttcacgtttcag

SEQ ID NO: 841001 - DNA, 25 bp, Homo sapien
gctgtgcactttttcgtcctcgtgt

SEQ ID NO: 841002 - DNA, 25 bp, Homo sapien
taacacatatgctacacgtctctgt

SEQ ID NO: 841003 - DNA, 25 bp, Homo sapien
tgattccgcgggtgcgggaaaatta

SEQ ID NO: 841004 - DNA, 25 bp, Homo sapien
ccactggtgccattgattccgcggg

SEQ ID NO: 841005 - DNA, 25 bp, Homo sapien
agcaactacttccttgttctggatg

SEQ ID NO: 841006 - DNA, 25 bp, Homo sapien
tactgtcttcctcagaggcaccttc

SEQ ID NO: 841007 - DNA, 25 bp, Homo sapien
ggctctcagcagaatctttccaggg

SEQ ID NO: 841008 - DNA, 25 bp, Homo sapien
gcatcctgtctacaccatggcttag

SEQ ID NO: 841009 - DNA, 25 bp, Homo sapien
tgtacctagtgtgtgcagttaacca

SEQ ID NO: 841010 - DNA, 25 bp, Homo sapien
ctttccagggaactcgtgacatgcg

SEQ ID NO: 841011 - DNA, 25 bp, Homo sapien
tccgcataaacgaagacaacgccat

SEQ ID NO: 841012 - DNA, 25 bp, Homo sapien
atgatatgatgctcattttaaagcc

SEQ ID NO: 841013 - DNA, 25 bp, Homo sapien
tgaggcaacctaatatccgcataaa

SEQ ID NO: 841014 - DNA, 25 bp, Homo sapien
tcaagcattgttgactgaggcaacc

SEQ ID NO: 841015 - DNA, 25 bp, Homo sapien
tctctcagtagccaaccaggaagtt

SEQ ID NO: 841016 - DNA, 25 bp, Homo sapien
taaatctagtgctaacctgggtccc

SEQ ID NO: 841017 - DNA, 25 bp, Homo sapien
agtaacatgtcgtctccaagtcagg

SEQ ID NO: 841018 - DNA, 25 bp, Homo sapien
tattgatgactacagccacacttgg

SEQ ID NO: 841019 - DNA, 25 bp, Homo sapien
ttttaattagtagatcaggtgtcgg

SEQ ID NO: 841020 - DNA, 25 bp, Homo sapien
tgtcggtggaacacgactgtgtctc

SEQ ID NO: 841021 - DNA, 25 bp, Homo sapien
gaatttaaacagtccatcatgatag

SEQ ID NO: 841022 - DNA, 25 bp, Homo sapien
tgtgtctcaggataatggtctctcg

SEQ ID NO: 841023 - DNA, 25 bp, Homo sapien
gctgtgaggcacatttagatgctct

SEQ ID NO: 841024 - DNA, 25 bp, Homo sapien
tagatgctcttttagatttaaccag

SEQ ID NO: 841025 - DNA, 25 bp, Homo sapien
gaggtggctgctggcgttgccaagc

SEQ ID NO: 841026 - DNA, 25 bp, Homo sapien
taaccagcggcaagtcagagtgaca

SEQ ID NO: 841027 - DNA, 25 bp, Homo sapien
taacgaccaagaagggctgagagct

SEQ ID NO: 841028 - DNA, 25 bp, Homo sapien
gaatctctctgaacgtgggtcctca

SEQ ID NO: 841029 - DNA, 25 bp, Homo sapien
tgttgatccacacacgaagagggac

SEQ ID NO: 841030 - DNA, 25 bp, Homo sapien
gaccttgttggagaatacttgcccc

SEQ ID NO: 841031 - DNA, 25 bp, Homo sapien
tggtaaccattcaggggaaatcacc

SEQ ID NO: 841032 - DNA, 25 bp, Homo sapien
gttgtccctacacaggtgatgccga

SEQ ID NO: 841033 - DNA, 25 bp, Homo sapien
gcagctgtctggcaaccagtggtaa

SEQ ID NO: 841034 - DNA, 25 bp, Homo sapien
cctacacaggtgatgccgagtgtga

SEQ ID NO: 841035 - DNA, 25 bp, Homo sapien
ttctgcgatactctgcttgctgtct

SEQ ID NO: 841036 - DNA, 25 bp, Homo sapien
gattgtaattttctgcgatactctg

SEQ ID NO: 841037 - DNA, 25 bp, Homo sapien
gttgctgcctgacgtgattgtaatt

SEQ ID NO: 841038 - DNA, 25 bp, Homo sapien
gcttttgactagaatcctttgttgc

SEQ ID NO: 841039 - DNA, 25 bp, Homo sapien
taattagggcaccatgccgggagta

SEQ ID NO: 841040 - DNA, 25 bp, Homo sapien
gataacaaaggtgtaattagggcac

SEQ ID NO: 841041 - DNA, 25 bp, Homo sapien
ctgataatggataacaaaggtgtaa

SEQ ID NO: 841042 - DNA, 25 bp, Homo sapien
catgccgggagtacacctaaattgg

SEQ ID NO: 841043 - DNA, 25 bp, Homo sapien
tgcgtccccagattccgcatagcgt

SEQ ID NO: 841044 - DNA, 25 bp, Homo sapien
tccgcatagcgttttaaatgagcca

SEQ ID NO: 841045 - DNA, 25 bp, Homo sapien
ctctggatgtcaaatgcgtccccag

SEQ ID NO: 841046 - DNA, 25 bp, Homo sapien
ccaggagaagttcgcaggcttggct

SEQ ID NO: 841047 - DNA, 25 bp, Homo sapien
ctggcttgcccagccctgcagatgt

SEQ ID NO: 841048 - DNA, 25 bp, Homo sapien
ttgcccagccctgcagatgtgtctg

SEQ ID NO: 841049 - DNA, 25 bp, Homo sapien
atgtgtctggaagaggagcttctgc

SEQ ID NO: 841050 - DNA, 25 bp, Homo sapien
agccctgcagatgtgtctggaagag

SEQ ID NO: 841051 - DNA, 25 bp, Homo sapien
catctgtggtgtaattgcagtagca

SEQ ID NO: 841052 - DNA, 25 bp, Homo sapien
accacatctgtggtgtaattgcagt

SEQ ID NO: 841053 - DNA, 25 bp, Homo sapien
gacgctggcaaccacatctgtggtg

SEQ ID NO: 841054 - DNA, 25 bp, Homo sapien
ggtgccaaaggcgacgctggcaacc

SEQ ID NO: 841055 - DNA, 25 bp, Homo sapien
ttcgaagaaacgcttgcagtgtttc

SEQ ID NO: 841056 - DNA, 25 bp, Homo sapien
aattcgaagaaacgcttgcagtgtt

SEQ ID NO: 841057 - DNA, 25 bp, Homo sapien
cctcaggggcctgccaggagtccac

SEQ ID NO: 841058 - DNA, 25 bp, Homo sapien
gaagaaacgcttgcagtgtttcaca

SEQ ID NO: 841059 - DNA, 25 bp, Homo sapien
ggagtcatcgcagcgccccgggctg

SEQ ID NO: 841060 - DNA, 25 bp, Homo sapien
ctggagtcatcgcagcgccccgggc

SEQ ID NO: 841061 - DNA, 25 bp, Homo sapien
tgctggagtcatcgcagcgccccgg

SEQ ID NO: 841062 - DNA, 25 bp, Homo sapien
ttgctggagtcatcgcagcgccccg

SEQ ID NO: 841063 - DNA, 25 bp, Homo sapien
gggccacttattaccaatgccaggg

SEQ ID NO: 841064 - DNA, 25 bp, Homo sapien
cttattaccaatgccagggctacag

SEQ ID NO: 841065 - DNA, 25 bp, Homo sapien
gcggtggggccacttattaccaatg

SEQ ID NO: 841066 - DNA, 25 bp, Homo sapien
cacttattaccaatgccagggctac

SEQ ID NO: 841067 - DNA, 25 bp, Homo sapien
aatgcgcaggcccattttcaagagc

SEQ ID NO: 841068 - DNA, 25 bp, Homo sapien
aagagccagagtccgaaccaatgtg

SEQ ID NO: 841069 - DNA, 25 bp, Homo sapien
ggagaacatctccagacacacatgc

SEQ ID NO: 841070 - DNA, 25 bp, Homo sapien
agagtccgaaccaatgtgacacagc

SEQ ID NO: 841071 - DNA, 25 bp, Homo sapien
tgctgacaagggtactggctgttgc

SEQ ID NO: 841072 - DNA, 25 bp, Homo sapien
tgctgtgggtgcctcccttgccggc

SEQ ID NO: 841073 - DNA, 25 bp, Homo sapien
tcccagcatgacctcctgaattgct

SEQ ID NO: 841074 - DNA, 25 bp, Homo sapien
ttccagtggataattgttcccagca

SEQ ID NO: 841075 - DNA, 25 bp, Homo sapien
tggcattgaaaagggggtgataata

SEQ ID NO: 841076 - DNA, 25 bp, Homo sapien
gggtgataataaaccagggccatta

SEQ ID NO: 841077 - DNA, 25 bp, Homo sapien
ggtgataataaaccagggccattag

SEQ ID NO: 841078 - DNA, 25 bp, Homo sapien
gataataaaccagggccattagacg

SEQ ID NO: 841079 - DNA, 25 bp, Homo sapien
aaagccattcagttcgtctcggttc

SEQ ID NO: 841080 - DNA, 25 bp, Homo sapien
caatcacattcctaatgagtttgtt

SEQ ID NO: 841081 - DNA, 25 bp, Homo sapien
tattgggcaaaatccgggccagtgg

SEQ ID NO: 841082 - DNA, 25 bp, Homo sapien
tcgtctcggttcttattgggcaaaa

SEQ ID NO: 841083 - DNA, 25 bp, Homo sapien
ctggaagctgtaagtggtgggttgc

SEQ ID NO: 841084 - DNA, 25 bp, Homo sapien
ccctggaagctgtaagtggtgggtt

SEQ ID NO: 841085 - DNA, 25 bp, Homo sapien
gctgaaggacggcacggtgtgatgt

SEQ ID NO: 841086 - DNA, 25 bp, Homo sapien
aaggacggcacggtgtgatgtgcgg

SEQ ID NO: 841087 - DNA, 25 bp, Homo sapien
ggttgatgcttgcactagggagaca

SEQ ID NO: 841088 - DNA, 25 bp, Homo sapien
gatgcttgcactagggagacagttt

SEQ ID NO: 841089 - DNA, 25 bp, Homo sapien
gtccgtgtccgaggatgtacacatt

SEQ ID NO: 841090 - DNA, 25 bp, Homo sapien
ttctacccgtccgtgtccgaggatg

SEQ ID NO: 841091 - DNA, 25 bp, Homo sapien
ggtcaatgggcgctggtgtggtccc

SEQ ID NO: 841092 - DNA, 25 bp, Homo sapien
caatgggcgctggtgtggtcccact

SEQ ID NO: 841093 - DNA, 25 bp, Homo sapien
cctgctgctcggtcaatgggcgctg

SEQ ID NO: 841094 - DNA, 25 bp, Homo sapien
tgctcggtcaatgggcgctggtgtg

SEQ ID NO: 841095 - DNA, 25 bp, Homo sapien
gacttgcagaatgtcgggcatccag

SEQ ID NO: 841096 - DNA, 25 bp, Homo sapien
gttcggcttgcacccagtagaggag

SEQ ID NO: 841097 - DNA, 25 bp, Homo sapien
tgtcaaagtcttgcacgcccatggg

SEQ ID NO: 841098 - DNA, 25 bp, Homo sapien
gatgatttcatagccagcgatgagg

SEQ ID NO: 841099 - DNA, 25 bp, Homo sapien
tatcccatgggtaactggatccaac

SEQ ID NO: 841100 - DNA, 25 bp, Homo sapien
tcccatgggtaactggatccaactt

SEQ ID NO: 841101 - DNA, 25 bp, Homo sapien
atcccatgggtaactggatccaact

SEQ ID NO: 841102 - DNA, 25 bp, Homo sapien
catggactaccccagacagtgaagg

SEQ ID NO: 841103 - DNA, 25 bp, Homo sapien
tcatttcgcttgctaacccggagag

SEQ ID NO: 841104 - DNA, 25 bp, Homo sapien
taataagtctcagatgacacgaggc

SEQ ID NO: 841105 - DNA, 25 bp, Homo sapien
gacacgaggctggaggaattgctaa

SEQ ID NO: 841106 - DNA, 25 bp, Homo sapien
tcaggaaaatatctaatgtgtgaac

SEQ ID NO: 841107 - DNA, 25 bp, Homo sapien
caggaaaatatctaatgtgtgaaca

SEQ ID NO: 841108 - DNA, 25 bp, Homo sapien
ttcaggaaaatatctaatgtgtgaa

SEQ ID NO: 841109 - DNA, 25 bp, Homo sapien
ggaaaatatctaatgtgtgaacatc

SEQ ID NO: 841110 - DNA, 25 bp, Homo sapien
acactggttacacagctggcttgag

SEQ ID NO: 841111 - DNA, 25 bp, Homo sapien
ttgagacccctagggaagatgtgcc

SEQ ID NO: 841112 - DNA, 25 bp, Homo sapien
gaacaacttggacagggcttgagcc

SEQ ID NO: 841113 - DNA, 25 bp, Homo sapien
taaactccctgagacaatctgggct

SEQ ID NO: 841114 - DNA, 25 bp, Homo sapien
ccagaaatcattgagatctgtccaa

SEQ ID NO: 841115 - DNA, 25 bp, Homo sapien
atgaccagaaatcattgagatctgt

SEQ ID NO: 841116 - DNA, 25 bp, Homo sapien
gaaatcattgagatctgtccaaagt

SEQ ID NO: 841117 - DNA, 25 bp, Homo sapien
gaccagaaatcattgagatctgtcc

SEQ ID NO: 841118 - DNA, 25 bp, Homo sapien
ggcggcatcctcaggccacaggtca

SEQ ID NO: 841119 - DNA, 25 bp, Homo sapien
gcggcatcctcaggccacaggtcag

SEQ ID NO: 841120 - DNA, 25 bp, Homo sapien
agggcggcatcctcaggccacaggt

SEQ ID NO: 841121 - DNA, 25 bp, Homo sapien
cgcagggcggcatcctcaggccaca

SEQ ID NO: 841122 - DNA, 25 bp, Homo sapien
ctggaggagaaaggggcccagcagg

SEQ ID NO: 841123 - DNA, 25 bp, Homo sapien
aggagaaaggggcccagcaggggtg

SEQ ID NO: 841124 - DNA, 25 bp, Homo sapien
tggaggagaaaggggcccagcaggg

SEQ ID NO: 841125 - DNA, 25 bp, Homo sapien
tgggagccctccgaatacgtcttgc

SEQ ID NO: 841126 - DNA, 25 bp, Homo sapien
ggatttggggatccgttcacaggcc

SEQ ID NO: 841127 - DNA, 25 bp, Homo sapien
catctaccccacgtcagaagccccg

SEQ ID NO: 841128 - DNA, 25 bp, Homo sapien
ccacgtcagaagccccgcagggaag

SEQ ID NO: 841129 - DNA, 25 bp, Homo sapien
cattagggctgtaaggcgttctctg

SEQ ID NO: 841130 - DNA, 25 bp, Homo sapien
gtaaggcgttctctgttttgcctct

SEQ ID NO: 841131 - DNA, 25 bp, Homo sapien
gattcaacattagggctgtaaggcg

SEQ ID NO: 841132 - DNA, 25 bp, Homo sapien
cacgctgcagtgacgctgttctttg

SEQ ID NO: 841133 - DNA, 25 bp, Homo sapien
tgataccattttggagcttccactc

SEQ ID NO: 841134 - DNA, 25 bp, Homo sapien
cagatgataccattttggagcttcc

SEQ ID NO: 841135 - DNA, 25 bp, Homo sapien
tgaaagcgactttggtcaacagagt

SEQ ID NO: 841136 - DNA, 25 bp, Homo sapien
cactggtgtgaaagcgactttggtc

SEQ ID NO: 841137 - DNA, 25 bp, Homo sapien
tattgaagacttgaccccacaggat

SEQ ID NO: 841138 - DNA, 25 bp, Homo sapien
ttgaggacatggaaacacccctggc

SEQ ID NO: 841139 - DNA, 25 bp, Homo sapien
gaaccaatgaagatgcgggcactgt

SEQ ID NO: 841140 - DNA, 25 bp, Homo sapien
gggcggaacccaatcagctacagtt

SEQ ID NO: 841141 - DNA, 25 bp, Homo sapien
tggctccggtggtggtaagaaaaca

SEQ ID NO: 841142 - DNA, 25 bp, Homo sapien
aacagaattcctagtggtgtgccag

SEQ ID NO: 841143 - DNA, 25 bp, Homo sapien
cgttagggatttagtggcagcagac

SEQ ID NO: 841144 - DNA, 25 bp, Homo sapien
tgggaacttctcatcaccgtgacag

SEQ ID NO: 841145 - DNA, 25 bp, Homo sapien
gtaaccaagttggagcaccagcagg

SEQ ID NO: 841146 - DNA, 25 bp, Homo sapien
tttagatgcccgcaatgagcaggat

SEQ ID NO: 841147 - DNA, 25 bp, Homo sapien
agtctttggagaatgccaggccagg

SEQ ID NO: 841148 - DNA, 25 bp, Homo sapien
cagacatggacaacagggaggtgct

SEQ ID NO: 841149 - DNA, 25 bp, Homo sapien
agaccaggccctgccatggggccat

SEQ ID NO: 841150 - DNA, 25 bp, Homo sapien
ctggagaccaggccctgccatgggg

SEQ ID NO: 841151 - DNA, 25 bp, Homo sapien
ggagaccaggccctgccatggggcc

SEQ ID NO: 841152 - DNA, 25 bp, Homo sapien
gagaccaggccctgccatggggcca

SEQ ID NO: 841153 - DNA, 25 bp, Homo sapien
ctacagattttcaagtggctggctg

SEQ ID NO: 841154 - DNA, 25 bp, Homo sapien
gactacagattttcaagtggctggc

SEQ ID NO: 841155 - DNA, 25 bp, Homo sapien
ctggactacagattttcaagtggct

SEQ ID NO: 841156 - DNA, 25 bp, Homo sapien
ggactacagattttcaagtggctgg

SEQ ID NO: 841157 - DNA, 25 bp, Homo sapien
cctgagcaagagtgttcctgctccc

SEQ ID NO: 841158 - DNA, 25 bp, Homo sapien
gctcccgccacacgggatgcctgct

SEQ ID NO: 841159 - DNA, 25 bp, Homo sapien
ccttgtcctcgactgtgccttttgc

SEQ ID NO: 841160 - DNA, 25 bp, Homo sapien
aatggcccatcgcacagcaccctga

SEQ ID NO: 841161 - DNA, 25 bp, Homo sapien
gctgacttcttctcaaagagcagtc

SEQ ID NO: 841162 - DNA, 25 bp, Homo sapien
cttcttctcaaagagcagtcgctca

SEQ ID NO: 841163 - DNA, 25 bp, Homo sapien
gagctcagtgcccacgtgttgttga

SEQ ID NO: 841164 - DNA, 25 bp, Homo sapien
gctcagtgcccacgtgttgttgatt

SEQ ID NO: 841165 - DNA, 25 bp, Homo sapien
tctgggcgtggccaagtcaaagctg

SEQ ID NO: 841166 - DNA, 25 bp, Homo sapien
agtagtcatgctggaatgaatctgc

SEQ ID NO: 841167 - DNA, 25 bp, Homo sapien
atccctgaactccacactcctgagg

SEQ ID NO: 841168 - DNA, 25 bp, Homo sapien
ggaaacaggtgctcgaggctggctg

SEQ ID NO: 841169 - DNA, 25 bp, Homo sapien
tttttgcaggatcgtaggcccaggc

SEQ ID NO: 841170 - DNA, 25 bp, Homo sapien
ttcacaatcatggactgggcaacca

SEQ ID NO: 841171 - DNA, 25 bp, Homo sapien
ctgcgggctccaggacaagaggtct

SEQ ID NO: 841172 - DNA, 25 bp, Homo sapien
acaggtgactctgccacaggaggga

SEQ ID NO: 841173 - DNA, 25 bp, Homo sapien
gggtggagacgggtgatgcacagtc

SEQ ID NO: 841174 - DNA, 25 bp, Homo sapien
gctgtgtacagagcattgttctggg

SEQ ID NO: 841175 - DNA, 25 bp, Homo sapien
gctgtctgctgtgtacagagcattg

SEQ ID NO: 841176 - DNA, 25 bp, Homo sapien
gcctgctgtctgctgtgtacagagc

SEQ ID NO: 841177 - DNA, 25 bp, Homo sapien
catccctcatcttcgtgtgcatctt

SEQ ID NO: 841178 - DNA, 25 bp, Homo sapien
ggctggtccacccagcagttgctgg

SEQ ID NO: 841179 - DNA, 25 bp, Homo sapien
gcacacacctccatgtcttagtcga

SEQ ID NO: 841180 - DNA, 25 bp, Homo sapien
gaaccagcgagacaacaaaactcaa

SEQ ID NO: 841181 - DNA, 25 bp, Homo sapien
gaatagcagggacagaacggtcctg

SEQ ID NO: 841182 - DNA, 25 bp, Homo sapien
cgaggctgcagaactcaggggccat

SEQ ID NO: 841183 - DNA, 25 bp, Homo sapien
ctcgaggctgcagaactcaggggcc

SEQ ID NO: 841184 - DNA, 25 bp, Homo sapien
tcgaggctgcagaactcaggggcca

SEQ ID NO: 841185 - DNA, 25 bp, Homo sapien
tggcgggtacatcctcagcgtctct

SEQ ID NO: 841186 - DNA, 25 bp, Homo sapien
ctgaaagctggcgggtacatcctca

SEQ ID NO: 841187 - DNA, 25 bp, Homo sapien
gaaagctggcgggtacatcctcagc

SEQ ID NO: 841188 - DNA, 25 bp, Homo sapien
aagctggcgggtacatcctcagcgt

SEQ ID NO: 841189 - DNA, 25 bp, Homo sapien
catggagtggcagatatgtgtccaa

SEQ ID NO: 841190 - DNA, 25 bp, Homo sapien
gaccggctggttggtgtgtacatta

SEQ ID NO: 841191 - DNA, 25 bp, Homo sapien
tgctctcaagatacccacaggttgg

SEQ ID NO: 841192 - DNA, 25 bp, Homo sapien
tttgggagagtttgaacgaagcaca

SEQ ID NO: 841193 - DNA, 25 bp, Homo sapien
gcttggagctgatagcaaacaccag

SEQ ID NO: 841194 - DNA, 25 bp, Homo sapien
aatgcaattatatgtgcttggagct

SEQ ID NO: 841195 - DNA, 25 bp, Homo sapien
tgtctgtacccgcagttccaaaggg

SEQ ID NO: 841196 - DNA, 25 bp, Homo sapien
tccaaaggggtcagatgaagctgtt

SEQ ID NO: 841197 - DNA, 25 bp, Homo sapien
gagataccctcccaacgtagcaaag

SEQ ID NO: 841198 - DNA, 25 bp, Homo sapien
tcaaggcttgtcctcgagataccct

SEQ ID NO: 841199 - DNA, 25 bp, Homo sapien
tccctaatgaatcccgtacacgggc

SEQ ID NO: 841200 - DNA, 25 bp, Homo sapien
ccttaacacaggacatgagaacatc

SEQ ID NO: 841201 - DNA, 25 bp, Homo sapien
gattcaacttccattatctcctaag

SEQ ID NO: 841202 - DNA, 25 bp, Homo sapien
aggcttgagaaagccggaaaccaga

SEQ ID NO: 841203 - DNA, 25 bp, Homo sapien
ttccctgggcggtccacagaatcct

SEQ ID NO: 841204 - DNA, 25 bp, Homo sapien
agggatttcgtctgccctcccagat

SEQ ID NO: 841205 - DNA, 25 bp, Homo sapien
tgacttggtctgtctatgtcattga

SEQ ID NO: 841206 - DNA, 25 bp, Homo sapien
tgactagccctgctgcctggcatct

SEQ ID NO: 841207 - DNA, 25 bp, Homo sapien
ttaaaattgcccttgctcaccctct

SEQ ID NO: 841208 - DNA, 25 bp, Homo sapien
gtcttcctcttgcacatttctttgg

SEQ ID NO: 841209 - DNA, 25 bp, Homo sapien
catgtcggggtgcaaactgctttgg

SEQ ID NO: 841210 - DNA, 25 bp, Homo sapien
catttgtcaagcacaaagggcccct

SEQ ID NO: 841211 - DNA, 25 bp, Homo sapien
ccgaggctaggctcacttggtcctt

SEQ ID NO: 841212 - DNA, 25 bp, Homo sapien
acttggtccttgatgaaaatgtact

SEQ ID NO: 841213 - DNA, 25 bp, Homo sapien
tgtgaaggggatcaggggcaggcag

SEQ ID NO: 841214 - DNA, 25 bp, Homo sapien
agagcttggggcgtgctgggcaggc

SEQ ID NO: 841215 - DNA, 25 bp, Homo sapien
accaggtcgggggtggatacagaga

SEQ ID NO: 841216 - DNA, 25 bp, Homo sapien
tggggacagaggaccccctgctcag

SEQ ID NO: 841217 - DNA, 25 bp, Homo sapien
catctctagcacagcgcctgcgggg

SEQ ID NO: 841218 - DNA, 25 bp, Homo sapien
ggttgaaggtctccgggcttggcca

SEQ ID NO: 841219 - DNA, 25 bp, Homo sapien
tcagggttgaaggtctccgggcttg

SEQ ID NO: 841220 - DNA, 25 bp, Homo sapien
cccacggccatctctagcacagcgc

SEQ ID NO: 841221 - DNA, 25 bp, Homo sapien
tttgcctgcagcgtgtgtcccatga

SEQ ID NO: 841222 - DNA, 25 bp, Homo sapien
tgtaagccctgtggctgcggcacgt

SEQ ID NO: 841223 - DNA, 25 bp, Homo sapien
tacaatcctgtatcccatgtcctgg

SEQ ID NO: 841224 - DNA, 25 bp, Homo sapien
tgtgggccgcctgctcagatgtttc

SEQ ID NO: 841225 - DNA, 25 bp, Homo sapien
ccttggcagggtaccgggcacctca

SEQ ID NO: 841226 - DNA, 25 bp, Homo sapien
taggatgacccagccgccacctgct

SEQ ID NO: 841227 - DNA, 25 bp, Homo sapien
acctcccctcccataggatgaccca

SEQ ID NO: 841228 - DNA, 25 bp, Homo sapien
cttggcagggtaccgggcacctcag

SEQ ID NO: 841229 - DNA, 25 bp, Homo sapien
ctgcaggtccgtgtggtcagggctg

SEQ ID NO: 841230 - DNA, 25 bp, Homo sapien
ggatgtctccaaggctctgggagct

SEQ ID NO: 841231 - DNA, 25 bp, Homo sapien
tgcaggtccgtgtggtcagggctgg

SEQ ID NO: 841232 - DNA, 25 bp, Homo sapien
gagctgatggctgctcattcctgag

SEQ ID NO: 841233 - DNA, 25 bp, Homo sapien
tgtcaacttgacctcaagcagccct

SEQ ID NO: 841234 - DNA, 25 bp, Homo sapien
caggtacgtgaagggccggtgctgc

SEQ ID NO: 841235 - DNA, 25 bp, Homo sapien
ggaaccggaacttgtgcagcacgtg

SEQ ID NO: 841236 - DNA, 25 bp, Homo sapien
tcagggcaggcttggaaccggaact

SEQ ID NO: 841237 - DNA, 25 bp, Homo sapien
ctttcagtgactccagccgtccctg

SEQ ID NO: 841238 - DNA, 25 bp, Homo sapien
tatttgtcaaagagatagtagcatc

SEQ ID NO: 841239 - DNA, 25 bp, Homo sapien
agagagcaaagccccaaacctatct

SEQ ID NO: 841240 - DNA, 25 bp, Homo sapien
agaaggccaagtccgttgtccaagg

SEQ ID NO: 841241 - DNA, 25 bp, Homo sapien
gatacgatcttgatatagacaccat

SEQ ID NO: 841242 - DNA, 25 bp, Homo sapien
cgatcttgatatagacaccattttt

SEQ ID NO: 841243 - DNA, 25 bp, Homo sapien
gacaccattttttggacctagggca

SEQ ID NO: 841244 - DNA, 25 bp, Homo sapien
tcagcgggatacgatcttgatatag

SEQ ID NO: 841245 - DNA, 25 bp, Homo sapien
taaagaacctcttatccttgcatgc

SEQ ID NO: 841246 - DNA, 25 bp, Homo sapien
tgttatgtaaagaacctcttatcct

SEQ ID NO: 841247 - DNA, 25 bp, Homo sapien
ccaggcactctttcaatcacttcag

SEQ ID NO: 841248 - DNA, 25 bp, Homo sapien
gcatttaggaaatgttatgtaaaga

SEQ ID NO: 841249 - DNA, 25 bp, Homo sapien
gctgatcgtgagactgaccttgcaa

SEQ ID NO: 841250 - DNA, 25 bp, Homo sapien
tctaaaggtgggtcgtcagcatctg

SEQ ID NO: 841251 - DNA, 25 bp, Homo sapien
ggtcttttgatcgaggccagcctcc

SEQ ID NO: 841252 - DNA, 25 bp, Homo sapien
cacagggaggtgatacggctcttca

SEQ ID NO: 841253 - DNA, 25 bp, Homo sapien
ggcagctggggtgtcctcttcctgc

SEQ ID NO: 841254 - DNA, 25 bp, Homo sapien
tgggcagctggggtgtcctcttcct

SEQ ID NO: 841255 - DNA, 25 bp, Homo sapien
agtgctgggcagctggggtgtcctc

SEQ ID NO: 841256 - DNA, 25 bp, Homo sapien
tgctgggcagctggggtgtcctctt

SEQ ID NO: 841257 - DNA, 25 bp, Homo sapien
cctacaccttgaggcagcagtcact

SEQ ID NO: 841258 - DNA, 25 bp, Homo sapien
cagccctacaccttgaggcagcagt

SEQ ID NO: 841259 - DNA, 25 bp, Homo sapien
acagccctacaccttgaggcagcag

SEQ ID NO: 841260 - DNA, 25 bp, Homo sapien
gccctacaccttgaggcagcagtca

SEQ ID NO: 841261 - DNA, 25 bp, Homo sapien
tcacacagtagaaggactggagtcc

SEQ ID NO: 841262 - DNA, 25 bp, Homo sapien
gaggaagcctctaccactgtgtctg

SEQ ID NO: 841263 - DNA, 25 bp, Homo sapien
tgaccccagcacatgaggaagcctc

SEQ ID NO: 841264 - DNA, 25 bp, Homo sapien
tgaacagtgggatttaagcagaggt

SEQ ID NO: 841265 - DNA, 25 bp, Homo sapien
ttgctccggaaaagtccactgagct

SEQ ID NO: 841266 - DNA, 25 bp, Homo sapien
ggcggccagagggatccggtgggag

SEQ ID NO: 841267 - DNA, 25 bp, Homo sapien
cagagggatccggtgggagatgctc

SEQ ID NO: 841268 - DNA, 25 bp, Homo sapien
tcagttgctccggaaaagtccactg

SEQ ID NO: 841269 - DNA, 25 bp, Homo sapien
tgcagtgattcggtttctcagagtc

SEQ ID NO: 841270 - DNA, 25 bp, Homo sapien
tcacattgtcagaacaggtggctgc

SEQ ID NO: 841271 - DNA, 25 bp, Homo sapien
ggtgacctggaggagtagcttcccc

SEQ ID NO: 841272 - DNA, 25 bp, Homo sapien
tctggcattagttggtctgtgtcac

SEQ ID NO: 841273 - DNA, 25 bp, Homo sapien
cctgggcgacgctgagcggctttaa

SEQ ID NO: 841274 - DNA, 25 bp, Homo sapien
agccgtctacgaagcccgggcttgg

SEQ ID NO: 841275 - DNA, 25 bp, Homo sapien
cctctgactgaaggcgcgctgagca

SEQ ID NO: 841276 - DNA, 25 bp, Homo sapien
tgtccctgtttctgtgagccgtcta

SEQ ID NO: 841277 - DNA, 25 bp, Homo sapien
ggtcaaaggtcacacgcgttttcaa

SEQ ID NO: 841278 - DNA, 25 bp, Homo sapien
tcctcaaagggctctaacaactcgc

SEQ ID NO: 841279 - DNA, 25 bp, Homo sapien
cacacggagctctaacgcatgcttg

SEQ ID NO: 841280 - DNA, 25 bp, Homo sapien
aacaactcgcattgctctcagcgtg

SEQ ID NO: 841281 - DNA, 25 bp, Homo sapien
gagagggccaatgacacttccaggt

SEQ ID NO: 841282 - DNA, 25 bp, Homo sapien
tctttctcaaaataacccagcgagg

SEQ ID NO: 841283 - DNA, 25 bp, Homo sapien
tttgcaggcgcaacccactgtggat

SEQ ID NO: 841284 - DNA, 25 bp, Homo sapien
tcctacagatgcatccaaggctcag

SEQ ID NO: 841285 - DNA, 25 bp, Homo sapien
gaaattagtcagagggtacaaagta

SEQ ID NO: 841286 - DNA, 25 bp, Homo sapien
aatggcagtctaagcccagaaaggc

SEQ ID NO: 841287 - DNA, 25 bp, Homo sapien
gccttcagaatggaaagtatatgca

SEQ ID NO: 841288 - DNA, 25 bp, Homo sapien
gaattatgtggacagcagcggctca

SEQ ID NO: 841289 - DNA, 25 bp, Homo sapien
ccctttcctattgatgggatctttt

SEQ ID NO: 841290 - DNA, 25 bp, Homo sapien
cccctttcctattgatgggatcttt

SEQ ID NO: 841291 - DNA, 25 bp, Homo sapien
tcccctttcctattgatgggatctt

SEQ ID NO: 841292 - DNA, 25 bp, Homo sapien
tagccactgtgcagaagcgaaatcc

SEQ ID NO: 841293 - DNA, 25 bp, Homo sapien
tatatagatcacacacgcactgcat

SEQ ID NO: 841294 - DNA, 25 bp, Homo sapien
aaatcttgccattgctcgtgaagcc

SEQ ID NO: 841295 - DNA, 25 bp, Homo sapien
caggaatagtggtcttgtgacccca

SEQ ID NO: 841296 - DNA, 25 bp, Homo sapien
ttgtcttagctgtgttggagtagaa

SEQ ID NO: 841297 - DNA, 25 bp, Homo sapien
ctgtgttggagtagaagaacatcat

SEQ ID NO: 841298 - DNA, 25 bp, Homo sapien
ttagctgtgttggagtagaagaaca

SEQ ID NO: 841299 - DNA, 25 bp, Homo sapien
tcttagctgtgttggagtagaagaa

SEQ ID NO: 841300 - DNA, 25 bp, Homo sapien
ccatggtgtgttacctatgaatgca

SEQ ID NO: 841301 - DNA, 25 bp, Homo sapien
tagataacaacactagtcacccagg

SEQ ID NO: 841302 - DNA, 25 bp, Homo sapien
taagggaatgctgtagagccagtcc

SEQ ID NO: 841303 - DNA, 25 bp, Homo sapien
taagtacagactcttcagtatgcag

SEQ ID NO: 841304 - DNA, 25 bp, Homo sapien
gtgagcatcacttaacttggcatct

SEQ ID NO: 841305 - DNA, 25 bp, Homo sapien
gaaatgagaggtcccattttctctt

SEQ ID NO: 841306 - DNA, 25 bp, Homo sapien
tgcaattgcttctcgtctccctgat

SEQ ID NO: 841307 - DNA, 25 bp, Homo sapien
tctcttgtactcaatccaatcaggc

SEQ ID NO: 841308 - DNA, 25 bp, Homo sapien
ctgattcagtcaccacctcagacat

SEQ ID NO: 841309 - DNA, 25 bp, Homo sapien
cagggcagctgctgattcagtcacc

SEQ ID NO: 841310 - DNA, 25 bp, Homo sapien
gcagctgctgattcagtcaccacct

SEQ ID NO: 841311 - DNA, 25 bp, Homo sapien
tgctgattcagtcaccacctcagac

SEQ ID NO: 841312 - DNA, 25 bp, Homo sapien
gcgctggagtctactccctgaattt

SEQ ID NO: 841313 - DNA, 25 bp, Homo sapien
tccaaatgccaagtagtcagcgctg

SEQ ID NO: 841314 - DNA, 25 bp, Homo sapien
ttttccaaccatccaaatgccaagt

SEQ ID NO: 841315 - DNA, 25 bp, Homo sapien
gccaagtagtcagcgctggagtcta

SEQ ID NO: 841316 - DNA, 25 bp, Homo sapien
ggtgactgggtgaacgcagtccctt

SEQ ID NO: 841317 - DNA, 25 bp, Homo sapien
tgggtgaacgcagtcccttctgttt

SEQ ID NO: 841318 - DNA, 25 bp, Homo sapien
actgggtgaacgcagtcccttctgt

SEQ ID NO: 841319 - DNA, 25 bp, Homo sapien
tgactgggtgaacgcagtcccttct

SEQ ID NO: 841320 - DNA, 25 bp, Homo sapien
tcagtgatgtatgggaccactggta

SEQ ID NO: 841321 - DNA, 25 bp, Homo sapien
tgtatgggaccactggtatccttga

SEQ ID NO: 841322 - DNA, 25 bp, Homo sapien
tgggaccactggtatccttgaaaca

SEQ ID NO: 841323 - DNA, 25 bp, Homo sapien
tatccttgaaacaggggctttctgg

SEQ ID NO: 841324 - DNA, 25 bp, Homo sapien
ctcgcgccgcggcttaaactttaca

SEQ ID NO: 841325 - DNA, 25 bp, Homo sapien
tgcggcggcccgaagggaacgcttc

SEQ ID NO: 841326 - DNA, 25 bp, Homo sapien
aactttacaaagagtgcagttgcca

SEQ ID NO: 841327 - DNA, 25 bp, Homo sapien
cagatggagtgggttgcggcggccc

SEQ ID NO: 841328 - DNA, 25 bp, Homo sapien
ggcctcggctctcgctccgaaataa

SEQ ID NO: 841329 - DNA, 25 bp, Homo sapien
gcccttgagcactccgcaggaactt

SEQ ID NO: 841330 - DNA, 25 bp, Homo sapien
aggcgacccgggcagcagcaaactt

SEQ ID NO: 841331 - DNA, 25 bp, Homo sapien
gattctctcagcgtcgcgaggcgac

SEQ ID NO: 841332 - DNA, 25 bp, Homo sapien
ccttgctgctcgctgggaattcggg

SEQ ID NO: 841333 - DNA, 25 bp, Homo sapien
taacggtggctccatcgacgctctg

SEQ ID NO: 841334 - DNA, 25 bp, Homo sapien
aagtttggattccacggcacattcc

SEQ ID NO: 841335 - DNA, 25 bp, Homo sapien
tcggcgtgtcagctcagctggactc

SEQ ID NO: 841336 - DNA, 25 bp, Homo sapien
atttcaaggttggtccctcccagcg

SEQ ID NO: 841337 - DNA, 25 bp, Homo sapien
tgttatttataagcacgccggctct

SEQ ID NO: 841338 - DNA, 25 bp, Homo sapien
cccagcggacgacagtgatgaattc

SEQ ID NO: 841339 - DNA, 25 bp, Homo sapien
tgtggtatccctcttcggagcgaga

SEQ ID NO: 841340 - DNA, 25 bp, Homo sapien
ggacatcccacaacaggctgctttg

SEQ ID NO: 841341 - DNA, 25 bp, Homo sapien
aaattacctatggagctgtgagggc

SEQ ID NO: 841342 - DNA, 25 bp, Homo sapien
agacaaattgcatcatatagccggg

SEQ ID NO: 841343 - DNA, 25 bp, Homo sapien
ttagatcagcgactctttgcctggg

SEQ ID NO: 841344 - DNA, 25 bp, Homo sapien
ccctgccaacttagggcaacccaca

SEQ ID NO: 841345 - DNA, 25 bp, Homo sapien
agagaggcgttgtgccctgccaact

SEQ ID NO: 841346 - DNA, 25 bp, Homo sapien
gaaagagaggcgttgtgccctgcca

SEQ ID NO: 841347 - DNA, 25 bp, Homo sapien
cctgccaacttagggcaacccacat

SEQ ID NO: 841348 - DNA, 25 bp, Homo sapien
tccacccgtacttggcatttccaca

SEQ ID NO: 841349 - DNA, 25 bp, Homo sapien
ctcatcccccttccacccgtacttg

SEQ ID NO: 841350 - DNA, 25 bp, Homo sapien
acttggcatttccacaccacctcat

SEQ ID NO: 841351 - DNA, 25 bp, Homo sapien
cccgcctatctgctcatcccccttc

SEQ ID NO: 841352 - DNA, 25 bp, Homo sapien
taaaggttctgggtcagcagttggt

SEQ ID NO: 841353 - DNA, 25 bp, Homo sapien
gctaaaggttctgggtcagcagttg

SEQ ID NO: 841354 - DNA, 25 bp, Homo sapien
tgtgctaaaggttctgggtcagcag

SEQ ID NO: 841355 - DNA, 25 bp, Homo sapien
tgctaaaggttctgggtcagcagtt

SEQ ID NO: 841356 - DNA, 25 bp, Homo sapien
tcaagctagtaagacactctctgag

SEQ ID NO: 841357 - DNA, 25 bp, Homo sapien
tagtaagacactctctgagacccac

SEQ ID NO: 841358 - DNA, 25 bp, Homo sapien
caagctagtaagacactctctgaga

SEQ ID NO: 841359 - DNA, 25 bp, Homo sapien
agctagtaagacactctctgagacc

SEQ ID NO: 841360 - DNA, 25 bp, Homo sapien
gcgtggatcggtttcaataaatccc

SEQ ID NO: 841361 - DNA, 25 bp, Homo sapien
cctgctgcttgaatggttgtagaaa

SEQ ID NO: 841362 - DNA, 25 bp, Homo sapien
ctgagcgtggatcggtttcaataaa

SEQ ID NO: 841363 - DNA, 25 bp, Homo sapien
tccctgctgcttgaatggttgtaga

SEQ ID NO: 841364 - DNA, 25 bp, Homo sapien
tggactagaagttcaggcagtaaac

SEQ ID NO: 841365 - DNA, 25 bp, Homo sapien
caaggagaaagtcctggactgctca

SEQ ID NO: 841366 - DNA, 25 bp, Homo sapien
gactagaagttcaggcagtaaactc

SEQ ID NO: 841367 - DNA, 25 bp, Homo sapien
gctcatagtccgcaacctggactag

SEQ ID NO: 841368 - DNA, 25 bp, Homo sapien
ctacagggaaatcaggttcgtgaaa

SEQ ID NO: 841369 - DNA, 25 bp, Homo sapien
gggtcctccccagtcagtgttagca

SEQ ID NO: 841370 - DNA, 25 bp, Homo sapien
aaatcaggttcgtgaaagagaccgg

SEQ ID NO: 841371 - DNA, 25 bp, Homo sapien
ttttgtaacatcagagggtcctccc

SEQ ID NO: 841372 - DNA, 25 bp, Homo sapien
tgtgtcttagaggtagtggccccaa

SEQ ID NO: 841373 - DNA, 25 bp, Homo sapien
tgtagggatctagagcaccaacgga

SEQ ID NO: 841374 - DNA, 25 bp, Homo sapien
aagttgcttgcaggagataacggag

SEQ ID NO: 841375 - DNA, 25 bp, Homo sapien
aatcagcactgctgggtcacgcagg

SEQ ID NO: 841376 - DNA, 25 bp, Homo sapien
ttggctcctcgtcttgcccagctca

SEQ ID NO: 841377 - DNA, 25 bp, Homo sapien
gaacattgcccatatcccaaggcct

SEQ ID NO: 841378 - DNA, 25 bp, Homo sapien
gaactgtctctgaggcgggcatgca

SEQ ID NO: 841379 - DNA, 25 bp, Homo sapien
tatggacaaccagtcatgctcctcg

SEQ ID NO: 841380 - DNA, 25 bp, Homo sapien
tctgcgatgacagtcatagaatcct

SEQ ID NO: 841381 - DNA, 25 bp, Homo sapien
gcgatgacagtcatagaatcctgga

SEQ ID NO: 841382 - DNA, 25 bp, Homo sapien
tgctctctgcgatgacagtcataga

SEQ ID NO: 841383 - DNA, 25 bp, Homo sapien
gctgctgctctctgcgatgacagtc

SEQ ID NO: 841384 - DNA, 25 bp, Homo sapien
tgttatctcccccacaaggtaagta

SEQ ID NO: 841385 - DNA, 25 bp, Homo sapien
aattatgcagttgaggtcccacgtt

SEQ ID NO: 841386 - DNA, 25 bp, Homo sapien
tgtgatcctgttatctcccccacaa

SEQ ID NO: 841387 - DNA, 25 bp, Homo sapien
atgcagttgaggtcccacgtttggg

SEQ ID NO: 841388 - DNA, 25 bp, Homo sapien
gccaagttgtcgttgtcatagggtg

SEQ ID NO: 841389 - DNA, 25 bp, Homo sapien
tgccaagttgtcgttgtcatagggt

SEQ ID NO: 841390 - DNA, 25 bp, Homo sapien
tatgccaagttgtcgttgtcatagg

SEQ ID NO: 841391 - DNA, 25 bp, Homo sapien
ctatgccaagttgtcgttgtcatag

SEQ ID NO: 841392 - DNA, 25 bp, Homo sapien
tgttgtcaccaaccaaggaacgcca

SEQ ID NO: 841393 - DNA, 25 bp, Homo sapien
aataactgccatccttataagggag

SEQ ID NO: 841394 - DNA, 25 bp, Homo sapien
cctagtccttcaggcagagcatggc

SEQ ID NO: 841395 - DNA, 25 bp, Homo sapien
gattgccagtaactaccagaggctg

SEQ ID NO: 841396 - DNA, 25 bp, Homo sapien
ctagaacctgccaggtgttctccat

SEQ ID NO: 841397 - DNA, 25 bp, Homo sapien
aaaagcatttgctaggagaacagag

SEQ ID NO: 841398 - DNA, 25 bp, Homo sapien
ctgagtctgacccatttgtccaggg

SEQ ID NO: 841399 - DNA, 25 bp, Homo sapien
ttcagtgtgatgagacgagggtgga

SEQ ID NO: 841400 - DNA, 25 bp, Homo sapien
tctgacccatttgtccagggcaggg

SEQ ID NO: 841401 - DNA, 25 bp, Homo sapien
gagtctgacccatttgtccagggca

SEQ ID NO: 841402 - DNA, 25 bp, Homo sapien
ctgaaaacaccagggaaagcttttg

SEQ ID NO: 841403 - DNA, 25 bp, Homo sapien
ccagatggcctgcatttttgctcca

SEQ ID NO: 841404 - DNA, 25 bp, Homo sapien
taaaggggatggtctcctgccttgc

SEQ ID NO: 841405 - DNA, 25 bp, Homo sapien
ccagggaaagcttttgtccagatgg

SEQ ID NO: 841406 - DNA, 25 bp, Homo sapien
caaccaatgagaccggagactgatc

SEQ ID NO: 841407 - DNA, 25 bp, Homo sapien
caataggtaacgtcagaaggatcac

SEQ ID NO: 841408 - DNA, 25 bp, Homo sapien
ctttaatcagcagtgtggcagcagg

SEQ ID NO: 841409 - DNA, 25 bp, Homo sapien
ggactgggctgatgaccggctttaa

SEQ ID NO: 841410 - DNA, 25 bp, Homo sapien
tttcccacaagcgagatggagtctc

SEQ ID NO: 841411 - DNA, 25 bp, Homo sapien
gcgactggagtctgcccttggcatg

SEQ ID NO: 841412 - DNA, 25 bp, Homo sapien
tgagatccagtcacaaagagcaggg

SEQ ID NO: 841413 - DNA, 25 bp, Homo sapien
tcgctttgtggaaggcaggatcgca

SEQ ID NO: 841414 - DNA, 25 bp, Homo sapien
caaggtgctcactacaatgctggac

SEQ ID NO: 841415 - DNA, 25 bp, Homo sapien
gctcactacaatgctggacctcatc

SEQ ID NO: 841416 - DNA, 25 bp, Homo sapien
tgcaaggtgctcactacaatgctgg

SEQ ID NO: 841417 - DNA, 25 bp, Homo sapien
catctgcaaggtgctcactacaatg

SEQ ID NO: 841418 - DNA, 25 bp, Homo sapien
gtcccgaatacaccaaagtgggcat

SEQ ID NO: 841419 - DNA, 25 bp, Homo sapien
gaatagctaagagtcccgaatacac

SEQ ID NO: 841420 - DNA, 25 bp, Homo sapien
cctgatagcgggtgctttgggaata

SEQ ID NO: 841421 - DNA, 25 bp, Homo sapien
ctttatctggcctgatagcgggtgc

SEQ ID NO: 841422 - DNA, 25 bp, Homo sapien
gtgatgagggacaccagctttgacc

SEQ ID NO: 841423 - DNA, 25 bp, Homo sapien
gggggcgctagttcatggagttgtc

SEQ ID NO: 841424 - DNA, 25 bp, Homo sapien
agctttgacccttatatgggggcgc

SEQ ID NO: 841425 - DNA, 25 bp, Homo sapien
tggtgatgagggacaccagctttga

SEQ ID NO: 841426 - DNA, 25 bp, Homo sapien
catctgcatggcaagctcggtgtgc

SEQ ID NO: 841427 - DNA, 25 bp, Homo sapien
gcagacgcccttagcaactggtaag

SEQ ID NO: 841428 - DNA, 25 bp, Homo sapien
tctacaggcgtgtggtactcagaag

SEQ ID NO: 841429 - DNA, 25 bp, Homo sapien
ggttaactcataggacaggtgccag

SEQ ID NO: 841430 - DNA, 25 bp, Homo sapien
aatccctgtatgtcccttcctagtg

SEQ ID NO: 841431 - DNA, 25 bp, Homo sapien
cctttctaaggagacagagttcagc

SEQ ID NO: 841432 - DNA, 25 bp, Homo sapien
gtgatgcaaatccctccacagggtt

SEQ ID NO: 841433 - DNA, 25 bp, Homo sapien
tcctagtgaggctgatgctttctgg

SEQ ID NO: 841434 - DNA, 25 bp, Homo sapien
tcttcttctgccgacgcaaccatag

SEQ ID NO: 841435 - DNA, 25 bp, Homo sapien
caaccatagagagtcgtagaagtcc

SEQ ID NO: 841436 - DNA, 25 bp, Homo sapien
ggagtgtttggttcatcagtgttca

SEQ ID NO: 841437 - DNA, 25 bp, Homo sapien
agtgttcatgaagccacagtctttg

SEQ ID NO: 841438 - DNA, 25 bp, Homo sapien
ctgtatcattacacgcgtctccatc

SEQ ID NO: 841439 - DNA, 25 bp, Homo sapien
gtatcattacacgcgtctccatcaa

SEQ ID NO: 841440 - DNA, 25 bp, Homo sapien
tgtatcattacacgcgtctccatca

SEQ ID NO: 841441 - DNA, 25 bp, Homo sapien
atcattacacgcgtctccatcaaca

SEQ ID NO: 841442 - DNA, 25 bp, Homo sapien
gagtcctttgttgaagtgaagcctc

SEQ ID NO: 841443 - DNA, 25 bp, Homo sapien
cactctgtcacgtttcttcatcttt

SEQ ID NO: 841444 - DNA, 25 bp, Homo sapien
cgtcttttgacattagttgtctagc

SEQ ID NO: 841445 - DNA, 25 bp, Homo sapien
ttgtcatcgtgatgtacgtcttttg

SEQ ID NO: 841446 - DNA, 25 bp, Homo sapien
gcaaatgtcttaccacaagcatacg

SEQ ID NO: 841447 - DNA, 25 bp, Homo sapien
aaatactttgcggataacataggca

SEQ ID NO: 841448 - DNA, 25 bp, Homo sapien
caagcatacggttgagactccataa

SEQ ID NO: 841449 - DNA, 25 bp, Homo sapien
gcctttggaacgcttttctttgctg

SEQ ID NO: 841450 - DNA, 25 bp, Homo sapien
tgagggatacctaatttgcattcgg

SEQ ID NO: 841451 - DNA, 25 bp, Homo sapien
gatttccaatcagtgtattgctcat

SEQ ID NO: 841452 - DNA, 25 bp, Homo sapien
gggtgtgtttatgaacttgttaatg

SEQ ID NO: 841453 - DNA, 25 bp, Homo sapien
ctcttgctttatactctgatatggg

SEQ ID NO: 841454 - DNA, 25 bp, Homo sapien
tactgcatacacgttccttcctggg

SEQ ID NO: 841455 - DNA, 25 bp, Homo sapien
taagacctcgtaagacagacagatc

SEQ ID NO: 841456 - DNA, 25 bp, Homo sapien
cagacttgctgagttcgaacctaca

SEQ ID NO: 841457 - DNA, 25 bp, Homo sapien
caaagagtggcccataagtgtctgg

SEQ ID NO: 841458 - DNA, 25 bp, Homo sapien
gcacgcctcaggtgagcgagctaaa

SEQ ID NO: 841459 - DNA, 25 bp, Homo sapien
gattttgattgctcgacactctgct

SEQ ID NO: 841460 - DNA, 25 bp, Homo sapien
tgcttctggcagttgggtccctcat

SEQ ID NO: 841461 - DNA, 25 bp, Homo sapien
gtcaggctgctgctagtgagactag

SEQ ID NO: 841462 - DNA, 25 bp, Homo sapien
tttccataataaagagttagtcact

SEQ ID NO: 841463 - DNA, 25 bp, Homo sapien
cactagtgatcttttactgggttgt

SEQ ID NO: 841464 - DNA, 25 bp, Homo sapien
tattacttattctacagccattttc

SEQ ID NO: 841465 - DNA, 25 bp, Homo sapien
tacttattctacagccattttccct

SEQ ID NO: 841466 - DNA, 25 bp, Homo sapien
gaccccacttaactttccacatcag

SEQ ID NO: 841467 - DNA, 25 bp, Homo sapien
acatcagatgagatcgcgtgctttc

SEQ ID NO: 841468 - DNA, 25 bp, Homo sapien
gcctgaccccacttaactttccaca

SEQ ID NO: 841469 - DNA, 25 bp, Homo sapien
catcagatgagatcgcgtgctttca

SEQ ID NO: 841470 - DNA, 25 bp, Homo sapien
tggcttgtctcttgaatgacaccat

SEQ ID NO: 841471 - DNA, 25 bp, Homo sapien
ctggcttgtctcttgaatgacacca

SEQ ID NO: 841472 - DNA, 25 bp, Homo sapien
ggccccgatccatgcggcagaggct

SEQ ID NO: 841473 - DNA, 25 bp, Homo sapien
tcagaaaagggcttgtcgttcggac

SEQ ID NO: 841474 - DNA, 25 bp, Homo sapien
gatccatgcggcagaggcttttgtg

SEQ ID NO: 841475 - DNA, 25 bp, Homo sapien
atcagaaaagggcttgtcgttcgga

SEQ ID NO: 841476 - DNA, 25 bp, Homo sapien
atgcgtggggccgaagacctgctgg

SEQ ID NO: 841477 - DNA, 25 bp, Homo sapien
tctcgggtgcgcaagcggtgatgcg

SEQ ID NO: 841478 - DNA, 25 bp, Homo sapien
gagagcggcgaccactgcggatctc

SEQ ID NO: 841479 - DNA, 25 bp, Homo sapien
cactgcggatctcgggtgcgcaagc

SEQ ID NO: 841480 - DNA, 25 bp, Homo sapien
gccttcgccggcctagcggaaagcc

SEQ ID NO: 841481 - DNA, 25 bp, Homo sapien
cagccttcgccggcctagcggaaag

SEQ ID NO: 841482 - DNA, 25 bp, Homo sapien
cgccggcctagcggaaagccctcac

SEQ ID NO: 841483 - DNA, 25 bp, Homo sapien
cttcgccggcctagcggaaagccct

SEQ ID NO: 841484 - DNA, 25 bp, Homo sapien
tcagggtacaaagcgccaggtgagg

SEQ ID NO: 841485 - DNA, 25 bp, Homo sapien
gagctgcctcagggtacaaagcgcc

SEQ ID NO: 841486 - DNA, 25 bp, Homo sapien
agctgcctcagggtacaaagcgcca

SEQ ID NO: 841487 - DNA, 25 bp, Homo sapien
tgcctcagggtacaaagcgccaggt

SEQ ID NO: 841488 - DNA, 25 bp, Homo sapien
cctgcctcgctgcttggtgggaagt

SEQ ID NO: 841489 - DNA, 25 bp, Homo sapien
cagcaggtaatgttttcgctttctt

SEQ ID NO: 841490 - DNA, 25 bp, Homo sapien
aggtaatgttttcgctttcttctgg

SEQ ID NO: 841491 - DNA, 25 bp, Homo sapien
ggtttgcttttcagccccccagtgc

SEQ ID NO: 841492 - DNA, 25 bp, Homo sapien
tggaggtcccactagtgtcaatttc

SEQ ID NO: 841493 - DNA, 25 bp, Homo sapien
ctgccattggaggtcccactagtgt

SEQ ID NO: 841494 - DNA, 25 bp, Homo sapien
cattggaggtcccactagtgtcaat

SEQ ID NO: 841495 - DNA, 25 bp, Homo sapien
gaggtcccactagtgtcaatttcac

SEQ ID NO: 841496 - DNA, 25 bp, Homo sapien
ggttctactgccattctctggtggg

SEQ ID NO: 841497 - DNA, 25 bp, Homo sapien
gggtccagtggacggtcaacaccat

SEQ ID NO: 841498 - DNA, 25 bp, Homo sapien
gggtgctcttggaataaagaggttc

SEQ ID NO: 841499 - DNA, 25 bp, Homo sapien
tcaacaccatcagataaaagcagtg

SEQ ID NO: 841500 - DNA, 25 bp, Homo sapien
tcaatatcaagggaacgcacggtaa

SEQ ID NO: 841501 - DNA, 25 bp, Homo sapien
tcaaagttctcatctgctgccctgg

SEQ ID NO: 841502 - DNA, 25 bp, Homo sapien
ttgaaatgctgcaccacacacgtct

SEQ ID NO: 841503 - DNA, 25 bp, Homo sapien
gtgtagactccagacttgaaatgct

SEQ ID NO: 841504 - DNA, 25 bp, Homo sapien
cataggcgatgatggctgcgtgggc

SEQ ID NO: 841505 - DNA, 25 bp, Homo sapien
caatcagcataatgaccacatttgc

SEQ ID NO: 841506 - DNA, 25 bp, Homo sapien
tcatgaatccagtgagggatggact

SEQ ID NO: 841507 - DNA, 25 bp, Homo sapien
atggactcgaacgtggaccgccggg

SEQ ID NO: 841508 - DNA, 25 bp, Homo sapien
aggaagggaaaggatctgaagtttg

SEQ ID NO: 841509 - DNA, 25 bp, Homo sapien
ctggaggaagggaaaggatctgaag

SEQ ID NO: 841510 - DNA, 25 bp, Homo sapien
tggaggaagggaaaggatctgaagt

SEQ ID NO: 841511 - DNA, 25 bp, Homo sapien
tgctcctccaccacaactagatcaa

SEQ ID NO: 841512 - DNA, 25 bp, Homo sapien
tgctgatgtccacgggtccacccgc

SEQ ID NO: 841513 - DNA, 25 bp, Homo sapien
caccacaactagatcaacagtgctg

SEQ ID NO: 841514 - DNA, 25 bp, Homo sapien
tgatgtccacgggtccacccgccaa

SEQ ID NO: 841515 - DNA, 25 bp, Homo sapien
gtacttctcagccagtgtgcaggca

SEQ ID NO: 841516 - DNA, 25 bp, Homo sapien
ctgttgcgcgcgatcagctccttgg

SEQ ID NO: 841517 - DNA, 25 bp, Homo sapien
tccccatataggtgcaggctgttgc

SEQ ID NO: 841518 - DNA, 25 bp, Homo sapien
tgtgcaggcatcctcgaacaggacg

SEQ ID NO: 841519 - DNA, 25 bp, Homo sapien
tagcaagtgcagtgggtcttttcac

SEQ ID NO: 841520 - DNA, 25 bp, Homo sapien
ttagcaagtgcagtgggtcttttca

SEQ ID NO: 841521 - DNA, 25 bp, Homo sapien
tctaaagcgccactggggcaacact

SEQ ID NO: 841522 - DNA, 25 bp, Homo sapien
tacctttggtttcagaggcggcctc

SEQ ID NO: 841523 - DNA, 25 bp, Homo sapien
cctctttggtgggtgcaactggctt

SEQ ID NO: 841524 - DNA, 25 bp, Homo sapien
ggcaacactacggtatcctggctac

SEQ ID NO: 841525 - DNA, 25 bp, Homo sapien
tggcccatccagactgggaggatta

SEQ ID NO: 841526 - DNA, 25 bp, Homo sapien
ggcccatccagactgggaggattag

SEQ ID NO: 841527 - DNA, 25 bp, Homo sapien
ctccaggagtcaagagtcagtgaaa

SEQ ID NO: 841528 - DNA, 25 bp, Homo sapien
gccttctccaggagtcaagagtcag

SEQ ID NO: 841529 - DNA, 25 bp, Homo sapien
gggagaagagtacacttcgtcctcc

SEQ ID NO: 841530 - DNA, 25 bp, Homo sapien
gaagagtacacttcgtcctccctct

SEQ ID NO: 841531 - DNA, 25 bp, Homo sapien
ttcactaccctcttcttcaagcaag

SEQ ID NO: 841532 - DNA, 25 bp, Homo sapien
tccagaatgttccaaacagcctctt

SEQ ID NO: 841533 - DNA, 25 bp, Homo sapien
gaaacaaaattcagtagaaagcagc

SEQ ID NO: 841534 - DNA, 25 bp, Homo sapien
aatgttccaaacagcctcttctctc

SEQ ID NO: 841535 - DNA, 25 bp, Homo sapien
tctcattgcaggctttcgttccatt

SEQ ID NO: 841536 - DNA, 25 bp, Homo sapien
ttctcattgcaggctttcgttccat

SEQ ID NO: 841537 - DNA, 25 bp, Homo sapien
tcattgcaggctttcgttccattct

SEQ ID NO: 841538 - DNA, 25 bp, Homo sapien
attgcaggctttcgttccattctcc

SEQ ID NO: 841539 - DNA, 25 bp, Homo sapien
atttggcaagatggtacttctggta

SEQ ID NO: 841540 - DNA, 25 bp, Homo sapien
catttggcaagatggtacttctggt

SEQ ID NO: 841541 - DNA, 25 bp, Homo sapien
ttggcaagatggtacttctggtatt

SEQ ID NO: 841542 - DNA, 25 bp, Homo sapien
tttggcaagatggtacttctggtat

SEQ ID NO: 841543 - DNA, 25 bp, Homo sapien
tctggcagatgatttgggttctaga

SEQ ID NO: 841544 - DNA, 25 bp, Homo sapien
aaaatgacttctgatctggcagatg

SEQ ID NO: 841545 - DNA, 25 bp, Homo sapien
ctagaaagaaattgtgccaggcatg

SEQ ID NO: 841546 - DNA, 25 bp, Homo sapien
gtgggagaaacctgtgagctcagga

SEQ ID NO: 841547 - DNA, 25 bp, Homo sapien
cggcctaatgcaaattcttaactgg

SEQ ID NO: 841548 - DNA, 25 bp, Homo sapien
aagggcagacactccagcaaaaatg

SEQ ID NO: 841549 - DNA, 25 bp, Homo sapien
gacctcaggtaacccggcctaatgc

SEQ ID NO: 841550 - DNA, 25 bp, Homo sapien
gagggactcacatgactcctctggg

SEQ ID NO: 841551 - DNA, 25 bp, Homo sapien
tgtccaaggatacgtagtgcccaag

SEQ ID NO: 841552 - DNA, 25 bp, Homo sapien
gcatcatatgcttgagcaaagggaa

SEQ ID NO: 841553 - DNA, 25 bp, Homo sapien
ggtttgagtctcataccatcaccct

SEQ ID NO: 841554 - DNA, 25 bp, Homo sapien
cctctccttctatcacgggccaggt

SEQ ID NO: 841555 - DNA, 25 bp, Homo sapien
gggttcataatggagaccactttcc

SEQ ID NO: 841556 - DNA, 25 bp, Homo sapien
tcctggggttcataatggagaccac

SEQ ID NO: 841557 - DNA, 25 bp, Homo sapien
cctggggttcataatggagaccact

SEQ ID NO: 841558 - DNA, 25 bp, Homo sapien
ttcataatggagaccactttcccca

SEQ ID NO: 841559 - DNA, 25 bp, Homo sapien
cgccccgggaccatacagggagatt

SEQ ID NO: 841560 - DNA, 25 bp, Homo sapien
ccaggcaagcaactccgtggaaggg

SEQ ID NO: 841561 - DNA, 25 bp, Homo sapien
agggagatttcagcgcccacatcag

SEQ ID NO: 841562 - DNA, 25 bp, Homo sapien
ccaaggcctgcgaagggtccagtgt

SEQ ID NO: 841563 - DNA, 25 bp, Homo sapien
ggaccctcatcgtggtgaagccaga

SEQ ID NO: 841564 - DNA, 25 bp, Homo sapien
gagcggaccctcatcgtggtgaagc

SEQ ID NO: 841565 - DNA, 25 bp, Homo sapien
accctggagcggaccctcatcgtgg

SEQ ID NO: 841566 - DNA, 25 bp, Homo sapien
ccctcatcgtggtgaagccagatgg

SEQ ID NO: 841567 - DNA, 25 bp, Homo sapien
tattgtagtggagtaatgggtttgc

SEQ ID NO: 841568 - DNA, 25 bp, Homo sapien
cctggtttgtccatctactgctttg

SEQ ID NO: 841569 - DNA, 25 bp, Homo sapien
caggtagacagacgtgattcaaaac

SEQ ID NO: 841570 - DNA, 25 bp, Homo sapien
ccctgagattagctaaagttaagtt

SEQ ID NO: 841571 - DNA, 25 bp, Homo sapien
atgttttacgatctagcctttccag

SEQ ID NO: 841572 - DNA, 25 bp, Homo sapien
ttaagccttgtgtggcagatagatc

SEQ ID NO: 841573 - DNA, 25 bp, Homo sapien
gaagttggctcccaagggctgacat

SEQ ID NO: 841574 - DNA, 25 bp, Homo sapien
catcaatgcagagttggaagttggc

SEQ ID NO: 841575 - DNA, 25 bp, Homo sapien
gccctctgccccagacatgggatgt

SEQ ID NO: 841576 - DNA, 25 bp, Homo sapien
gggacctaagctggccaatagccct

SEQ ID NO: 841577 - DNA, 25 bp, Homo sapien
tagtgtaggtgtgttgcgtcatctg

SEQ ID NO: 841578 - DNA, 25 bp, Homo sapien
actcattttgaggaccccaggttca

SEQ ID NO: 841579 - DNA, 25 bp, Homo sapien
tttaagtctggaggcgacacaccag

SEQ ID NO: 841580 - DNA, 25 bp, Homo sapien
gggaatttgcattgcagcctgttca

SEQ ID NO: 841581 - DNA, 25 bp, Homo sapien
cctttcaggaaatgcccacgtgcct

SEQ ID NO: 841582 - DNA, 25 bp, Homo sapien
cagaatgccggatcacatctaactt

SEQ ID NO: 841583 - DNA, 25 bp, Homo sapien
tattccattcattaagctagccaac

SEQ ID NO: 841584 - DNA, 25 bp, Homo sapien
gaggaaaccctgtgtatcagttaga

SEQ ID NO: 841585 - DNA, 25 bp, Homo sapien
ggattattagccagtttaggctcag

SEQ ID NO: 841586 - DNA, 25 bp, Homo sapien
gaacaaactgatctagctctgaatg

SEQ ID NO: 841587 - DNA, 25 bp, Homo sapien
tagacatttgtactaggctgggcgg

SEQ ID NO: 841588 - DNA, 25 bp, Homo sapien
tccttagacatttgtactaggctgg

SEQ ID NO: 841589 - DNA, 25 bp, Homo sapien
acatggcaaaactacgtacctacaa

SEQ ID NO: 841590 - DNA, 25 bp, Homo sapien
catggcaaaactacgtacctacaaa

SEQ ID NO: 841591 - DNA, 25 bp, Homo sapien
gaggctgcaactcccggaacaacag

SEQ ID NO: 841592 - DNA, 25 bp, Homo sapien
ccacaacatcaggagcaggagcggc

SEQ ID NO: 841593 - DNA, 25 bp, Homo sapien
agccacaacatcaggagcaggagcg

SEQ ID NO: 841594 - DNA, 25 bp, Homo sapien
atggcggaggctgcaactcccggaa

SEQ ID NO: 841595 - DNA, 25 bp, Homo sapien
taaaggttcaagcatgtaagagttt

SEQ ID NO: 841596 - DNA, 25 bp, Homo sapien
aaggttcaagcatgtaagagttttc

SEQ ID NO: 841597 - DNA, 25 bp, Homo sapien
ggttcaagcatgtaagagttttcta

SEQ ID NO: 841598 - DNA, 25 bp, Homo sapien
ttctaaatatagcttcttggtattt

SEQ ID NO: 841599 - DNA, 25 bp, Homo sapien
tgcttgttgccgtattgtctccagc

SEQ ID NO: 841600 - DNA, 25 bp, Homo sapien
tgcctgcttgttgccgtattgtctc

SEQ ID NO: 841601 - DNA, 25 bp, Homo sapien
cctgcttgttgccgtattgtctcca

SEQ ID NO: 841602 - DNA, 25 bp, Homo sapien
gcttgttgccgtattgtctccagca

SEQ ID NO: 841603 - DNA, 25 bp, Homo sapien
ccacttttgtacaattgatcacagc

SEQ ID NO: 841604 - DNA, 25 bp, Homo sapien
gtcttccttcaaaaacactgcctct

SEQ ID NO: 841605 - DNA, 25 bp, Homo sapien
tgtaatgcaagccagctgcgagtga

SEQ ID NO: 841606 - DNA, 25 bp, Homo sapien
catccccagaaccactgactattgg

SEQ ID NO: 841607 - DNA, 25 bp, Homo sapien
catgcccaacttttaaccctgaggc

SEQ ID NO: 841608 - DNA, 25 bp, Homo sapien
ccatgcccaacttttaaccctgagg

SEQ ID NO: 841609 - DNA, 25 bp, Homo sapien
tgagtttgcccaaggcctagccgaa

SEQ ID NO: 841610 - DNA, 25 bp, Homo sapien
aaaacacaattttaggcaggtgcag

SEQ ID NO: 841611 - DNA, 25 bp, Homo sapien
gaggtctagctagtcctcagcatgg

SEQ ID NO: 841612 - DNA, 25 bp, Homo sapien
gcaacatttgccatcccaggaggtt

SEQ ID NO: 841613 - DNA, 25 bp, Homo sapien
cgcatggctctgactttccgggact

SEQ ID NO: 841614 - DNA, 25 bp, Homo sapien
tgagcatccttagccgttggccctg

SEQ ID NO: 841615 - DNA, 25 bp, Homo sapien
gaacgtggataattgtggtgccctc

SEQ ID NO: 841616 - DNA, 25 bp, Homo sapien
gccctgggtctcctcgttcataaga

SEQ ID NO: 841617 - DNA, 25 bp, Homo sapien
tgcccttggaggtttcgtcttttca

SEQ ID NO: 841618 - DNA, 25 bp, Homo sapien
caaacggctcatgccgtgagtgggt

SEQ ID NO: 841619 - DNA, 25 bp, Homo sapien
caggtctccccacgggcacgttgtg

SEQ ID NO: 841620 - DNA, 25 bp, Homo sapien
gaaaggcactggtgtttctctccaa

SEQ ID NO: 841621 - DNA, 25 bp, Homo sapien
tgacagtcgctcttggaccctctag

SEQ ID NO: 841622 - DNA, 25 bp, Homo sapien
cattgcagacaagctcaggtacccg

SEQ ID NO: 841623 - DNA, 25 bp, Homo sapien
gaccgcctagcattgaagagtaagc

SEQ ID NO: 841624 - DNA, 25 bp, Homo sapien
tagtctgtagagcaggtgaccgcct

SEQ ID NO: 841625 - DNA, 25 bp, Homo sapien
tccaagatttctcctcatgggatag

SEQ ID NO: 841626 - DNA, 25 bp, Homo sapien
tgtctcctgccgtgcctgcgcaatg

SEQ ID NO: 841627 - DNA, 25 bp, Homo sapien
tgcatccggccccttgtggggaaaa

SEQ ID NO: 841628 - DNA, 25 bp, Homo sapien
ggtggaacatgcaatactgctttgt

SEQ ID NO: 841629 - DNA, 25 bp, Homo sapien
tgagactgagattccctgatgaggc

SEQ ID NO: 841630 - DNA, 25 bp, Homo sapien
gacttcctagtcctggtgcaagagc

SEQ ID NO: 841631 - DNA, 25 bp, Homo sapien
tttcagcctgcaagagcctcgtgga

SEQ ID NO: 841632 - DNA, 25 bp, Homo sapien
ggttactgccgaagactgctggtga

SEQ ID NO: 841633 - DNA, 25 bp, Homo sapien
gatcctctcacattccacaaagcag

SEQ ID NO: 841634 - DNA, 25 bp, Homo sapien
tgtgagttttcagcaagccatcctt

SEQ ID NO: 841635 - DNA, 25 bp, Homo sapien
gactcgtaggacagttgcggcatcc

SEQ ID NO: 841636 - DNA, 25 bp, Homo sapien
aaactcttgggctggcaaccacatg

SEQ ID NO: 841637 - DNA, 25 bp, Homo sapien
gctgtacttcctgagaactataggg

SEQ ID NO: 841638 - DNA, 25 bp, Homo sapien
tacaggattgattgtgacccaggca

SEQ ID NO: 841639 - DNA, 25 bp, Homo sapien
tctttgagtccttcggtgcatcctg

SEQ ID NO: 841640 - DNA, 25 bp, Homo sapien
acagccctggtgctctcgatgacgg

SEQ ID NO: 841641 - DNA, 25 bp, Homo sapien
tcacttaagtatcatgtcatttaag

SEQ ID NO: 841642 - DNA, 25 bp, Homo sapien
tgatctttgacctccaagttcatac

SEQ ID NO: 841643 - DNA, 25 bp, Homo sapien
gctttttgtgatctttgacctccaa

SEQ ID NO: 841644 - DNA, 25 bp, Homo sapien
ttgtgatctttgacctccaagttca

SEQ ID NO: 841645 - DNA, 25 bp, Homo sapien
caacttataggacttagtttctgaa

SEQ ID NO: 841646 - DNA, 25 bp, Homo sapien
cataatcagctatagatgttagaat

SEQ ID NO: 841647 - DNA, 25 bp, Homo sapien
atggactgggttgataaacataatc

SEQ ID NO: 841648 - DNA, 25 bp, Homo sapien
aaaatatatgaactcttgtgtactc

SEQ ID NO: 841649 - DNA, 25 bp, Homo sapien
tgaataatcaattcagttgactcac

SEQ ID NO: 841650 - DNA, 25 bp, Homo sapien
aataaagagttggatgcgtaactga

SEQ ID NO: 841651 - DNA, 25 bp, Homo sapien
aaagagttggatgcgtaactgactg

SEQ ID NO: 841652 - DNA, 25 bp, Homo sapien
taatcaattcagttgactcactgcc

SEQ ID NO: 841653 - DNA, 25 bp, Homo sapien
tcctccaaatgccacaggtccacag

SEQ ID NO: 841654 - DNA, 25 bp, Homo sapien
cccttgggacctgatcttgtttatt

SEQ ID NO: 841655 - DNA, 25 bp, Homo sapien
ggcatagcccgcttctcttggtcct

SEQ ID NO: 841656 - DNA, 25 bp, Homo sapien
tttgctggattccaaaaatggcagc

SEQ ID NO: 841657 - DNA, 25 bp, Homo sapien
ccggccaggattggcctattctgaa

SEQ ID NO: 841658 - DNA, 25 bp, Homo sapien
gaattacacaatgtgtgatctcttg

SEQ ID NO: 841659 - DNA, 25 bp, Homo sapien
cacaatgtgtgatctcttgtcagtg

SEQ ID NO: 841660 - DNA, 25 bp, Homo sapien
cgcccggccaggattggcctattct

SEQ ID NO: 841661 - DNA, 25 bp, Homo sapien
cctgaacactggctatcagcctcat

SEQ ID NO: 841662 - DNA, 25 bp, Homo sapien
tctctgcccacacgcattgttgctt

SEQ ID NO: 841663 - DNA, 25 bp, Homo sapien
gccctgaacactggctatcagcctc

SEQ ID NO: 841664 - DNA, 25 bp, Homo sapien
gcccacacgcattgttgcttgttac

SEQ ID NO: 841665 - DNA, 25 bp, Homo sapien
gcgggacggaaactcagattccaaa

SEQ ID NO: 841666 - DNA, 25 bp, Homo sapien
ttgttcctggcgttccgcacagtct

SEQ ID NO: 841667 - DNA, 25 bp, Homo sapien
gattccaaaagatcccaggtgggac

SEQ ID NO: 841668 - DNA, 25 bp, Homo sapien
ccaggtgggacacatgggatgcctc

SEQ ID NO: 841669 - DNA, 25 bp, Homo sapien
aataaaagaaattaaccacacacag

SEQ ID NO: 841670 - DNA, 25 bp, Homo sapien
acacacctgtagtcccagctactcg

SEQ ID NO: 841671 - DNA, 25 bp, Homo sapien
taaaagaaattaaccacacacagtg

SEQ ID NO: 841672 - DNA, 25 bp, Homo sapien
aaagaaattaaccacacacagtgac

SEQ ID NO: 841673 - DNA, 25 bp, Homo sapien
tgcggtagtgcaatctcgacccact

SEQ ID NO: 841674 - DNA, 25 bp, Homo sapien
ctggagtgcggtagtgcaatctcga

SEQ ID NO: 841675 - DNA, 25 bp, Homo sapien
gagtgcggtagtgcaatctcgaccc

SEQ ID NO: 841676 - DNA, 25 bp, Homo sapien
gcggtagtgcaatctcgacccactg

SEQ ID NO: 841677 - DNA, 25 bp, Homo sapien
tgcatcgccggtctcatgactgtca

SEQ ID NO: 841678 - DNA, 25 bp, Homo sapien
ggcagcgggtctatgaagtcacttc

SEQ ID NO: 841679 - DNA, 25 bp, Homo sapien
cagcctgtgttccttgacggtgtcc

SEQ ID NO: 841680 - DNA, 25 bp, Homo sapien
ctattcaatgttcccggcccggtca

SEQ ID NO: 841681 - DNA, 25 bp, Homo sapien
taaagccagctctgttgcctgtgcg

SEQ ID NO: 841682 - DNA, 25 bp, Homo sapien
tgcgtgctggtagacgatcctggac

SEQ ID NO: 841683 - DNA, 25 bp, Homo sapien
gagccgcaggcccattgaatgcatt

SEQ ID NO: 841684 - DNA, 25 bp, Homo sapien
tccatccagtgtcggagcaagagac

SEQ ID NO: 841685 - DNA, 25 bp, Homo sapien
gcaaagtgcaccacaacccaggact

SEQ ID NO: 841686 - DNA, 25 bp, Homo sapien
ggtacgatcccactacagattagca

SEQ ID NO: 841687 - DNA, 25 bp, Homo sapien
tgcagacactggattggcaaagtgc

SEQ ID NO: 841688 - DNA, 25 bp, Homo sapien
acagatggattctgactatgttgcc

SEQ ID NO: 841689 - DNA, 25 bp, Homo sapien
gaacagtcctttgaccctgcatgga

SEQ ID NO: 841690 - DNA, 25 bp, Homo sapien
aggagattgggcacagcgacagaac

SEQ ID NO: 841691 - DNA, 25 bp, Homo sapien
caagcttcagccgtgggtagagtag

SEQ ID NO: 841692 - DNA, 25 bp, Homo sapien
tattcagcaaggatagaagaggtct

SEQ ID NO: 841693 - DNA, 25 bp, Homo sapien
taatagttcagtacaggagagacag

SEQ ID NO: 841694 - DNA, 25 bp, Homo sapien
gaccttccagctacgttgaaagaaa

SEQ ID NO: 841695 - DNA, 25 bp, Homo sapien
gccttgtatagctagtgaccttcca

SEQ ID NO: 841696 - DNA, 25 bp, Homo sapien
catttttgcaggctaggtcactaca

SEQ ID NO: 841697 - DNA, 25 bp, Homo sapien
caggtgcagggaaccgaggcaccga

SEQ ID NO: 841698 - DNA, 25 bp, Homo sapien
ggtgaagccgaagcccggccctgac

SEQ ID NO: 841699 - DNA, 25 bp, Homo sapien
agacggcaccaactgcggaacggga

SEQ ID NO: 841700 - DNA, 25 bp, Homo sapien
gcccaggggccagtatgagatcgct

SEQ ID NO: 841701 - DNA, 25 bp, Homo sapien
cagagcctggcatcgcgagggcact

SEQ ID NO: 841702 - DNA, 25 bp, Homo sapien
acctcaggtgcgacaggcaaaccct

SEQ ID NO: 841703 - DNA, 25 bp, Homo sapien
tgtctgagctcgaagcacctcaggt

SEQ ID NO: 841704 - DNA, 25 bp, Homo sapien
cgagggcactcggagggcctcagga

SEQ ID NO: 841705 - DNA, 25 bp, Homo sapien
cgtcactcggacatgcagcttggaa

SEQ ID NO: 841706 - DNA, 25 bp, Homo sapien
cacaggttcccggttctcaaaagag

SEQ ID NO: 841707 - DNA, 25 bp, Homo sapien
tggcgtatgctttgtacacctgggc

SEQ ID NO: 841708 - DNA, 25 bp, Homo sapien
tgaggtctcggtggctttcagaagc

SEQ ID NO: 841709 - DNA, 25 bp, Homo sapien
tagggaggagcagcctttctagaaa

SEQ ID NO: 841710 - DNA, 25 bp, Homo sapien
tagaaacgactggtctgcgagattt

SEQ ID NO: 841711 - DNA, 25 bp, Homo sapien
gagcagcctttctagaaacgactgg

SEQ ID NO: 841712 - DNA, 25 bp, Homo sapien
gcctttctagaaacgactggtctgc

SEQ ID NO: 841713 - DNA, 25 bp, Homo sapien
tgtcagaaagaggaaccgtgagaca

SEQ ID NO: 841714 - DNA, 25 bp, Homo sapien
cagaaagaggaaccgtgagacagga

SEQ ID NO: 841715 - DNA, 25 bp, Homo sapien
aaagaggaaccgtgagacaggagaa

SEQ ID NO: 841716 - DNA, 25 bp, Homo sapien
gaggaaccgtgagacaggagaaacc

SEQ ID NO: 841717 - DNA, 25 bp, Homo sapien
tggcaaaactcccaggactcggctg

SEQ ID NO: 841718 - DNA, 25 bp, Homo sapien
tccatatgcacctgagcgagcaggc

SEQ ID NO: 841719 - DNA, 25 bp, Homo sapien
agctaagccacttgatgcctggcaa

SEQ ID NO: 841720 - DNA, 25 bp, Homo sapien
ttctcaaattcctccacaatctcag

SEQ ID NO: 841721 - DNA, 25 bp, Homo sapien
tcctttctcctgaccgaagtgagcg

SEQ ID NO: 841722 - DNA, 25 bp, Homo sapien
tgagcgtgtgtgtccccttgacagc

SEQ ID NO: 841723 - DNA, 25 bp, Homo sapien
tgctgacctgtctctccgtgatggc

SEQ ID NO: 841724 - DNA, 25 bp, Homo sapien
ccagtctccagagtgatatatccaa

SEQ ID NO: 841725 - DNA, 25 bp, Homo sapien
gattctgagcttcgtaacgcaggtc

SEQ ID NO: 841726 - DNA, 25 bp, Homo sapien
tcacattccggaagttgacctggaa

SEQ ID NO: 841727 - DNA, 25 bp, Homo sapien
gaacttgacggctttcacattccgg

SEQ ID NO: 841728 - DNA, 25 bp, Homo sapien
gacctggaagtgttctagattctga

SEQ ID NO: 841729 - DNA, 25 bp, Homo sapien
tttccaccaagacttctctggtgac

SEQ ID NO: 841730 - DNA, 25 bp, Homo sapien
ttcatacgtttccaccaagacttct

SEQ ID NO: 841731 - DNA, 25 bp, Homo sapien
atacgtttccaccaagacttctctg

SEQ ID NO: 841732 - DNA, 25 bp, Homo sapien
cgtttccaccaagacttctctggtg

SEQ ID NO: 841733 - DNA, 25 bp, Homo sapien
tcaagtccacgggaattcctgcctg

SEQ ID NO: 841734 - DNA, 25 bp, Homo sapien
cttttcaagtccacgggaattcctg

SEQ ID NO: 841735 - DNA, 25 bp, Homo sapien
tttcaagtccacgggaattcctgcc

SEQ ID NO: 841736 - DNA, 25 bp, Homo sapien
caagtccacgggaattcctgcctgc

SEQ ID NO: 841737 - DNA, 25 bp, Homo sapien
gcggcttgctgcttcgctctccttc

SEQ ID NO: 841738 - DNA, 25 bp, Homo sapien
cggcttgctgcttcgctctccttcc

SEQ ID NO: 841739 - DNA, 25 bp, Homo sapien
tgctaaactacaggcaatgctggca

SEQ ID NO: 841740 - DNA, 25 bp, Homo sapien
tgacaaagcacttaagaggccgggc

SEQ ID NO: 841741 - DNA, 25 bp, Homo sapien
gcagaactgggtcatggtcaccctt

SEQ ID NO: 841742 - DNA, 25 bp, Homo sapien
cagagcatgagccactgacaaagca

SEQ ID NO: 841743 - DNA, 25 bp, Homo sapien
gacaatctaagatctcctgcatggg

SEQ ID NO: 841744 - DNA, 25 bp, Homo sapien
tgggtattcttcttccctatccgcc

SEQ ID NO: 841745 - DNA, 25 bp, Homo sapien
tgtcccaaccaccagaaagtccaga

SEQ ID NO: 841746 - DNA, 25 bp, Homo sapien
taacaatgctgggtcacgattactg

SEQ ID NO: 841747 - DNA, 25 bp, Homo sapien
cctgtaaatccaggccatagacccc

SEQ ID NO: 841748 - DNA, 25 bp, Homo sapien
gaagggactgtcctagtccagactg

SEQ ID NO: 841749 - DNA, 25 bp, Homo sapien
taagggaagctgctaccggtgtgaa

SEQ ID NO: 841750 - DNA, 25 bp, Homo sapien
gaccccatcccttatggcggcagac

SEQ ID NO: 841751 - DNA, 25 bp, Homo sapien
gctcatgagtgagtcgcccctagag

SEQ ID NO: 841752 - DNA, 25 bp, Homo sapien
aatgctcatgagtgagtcgccccta

SEQ ID NO: 841753 - DNA, 25 bp, Homo sapien
tcatgagtgagtcgcccctagagca

SEQ ID NO: 841754 - DNA, 25 bp, Homo sapien
atcacaatgctcatgagtgagtcgc

SEQ ID NO: 841755 - DNA, 25 bp, Homo sapien
gaaggtctgcatggacaaagttatc

SEQ ID NO: 841756 - DNA, 25 bp, Homo sapien
aggccgttggcaccctgaaccagga

SEQ ID NO: 841757 - DNA, 25 bp, Homo sapien
tgcccggaaattcctcaggtcaggg

SEQ ID NO: 841758 - DNA, 25 bp, Homo sapien
tgtcacagatgtccgcctgctgcag

SEQ ID NO: 841759 - DNA, 25 bp, Homo sapien
caggggcagccattatctggtcaag

SEQ ID NO: 841760 - DNA, 25 bp, Homo sapien
ccactcagaactggcctgatttgca

SEQ ID NO: 841761 - DNA, 25 bp, Homo sapien
aactactaacacgaaacagcacttg

SEQ ID NO: 841762 - DNA, 25 bp, Homo sapien
gaaggaccagaaactactaacacga

SEQ ID NO: 841763 - DNA, 25 bp, Homo sapien
gcctgccaccttgcagcaggtagca

SEQ ID NO: 841764 - DNA, 25 bp, Homo sapien
cagcctgccaccttgcagcaggtag

SEQ ID NO: 841765 - DNA, 25 bp, Homo sapien
ctgccaccttgcagcaggtagcaca

SEQ ID NO: 841766 - DNA, 25 bp, Homo sapien
gccaccttgcagcaggtagcacaca

SEQ ID NO: 841767 - DNA, 25 bp, Homo sapien
ctcgggctgtgaccttttccctttg

SEQ ID NO: 841768 - DNA, 25 bp, Homo sapien
caagcgtctttctcatctcagcagc

SEQ ID NO: 841769 - DNA, 25 bp, Homo sapien
ttctggcatcttgcttttggctctt

SEQ ID NO: 841770 - DNA, 25 bp, Homo sapien
ggatgcggtgcccaagcgtctttct

SEQ ID NO: 841771 - DNA, 25 bp, Homo sapien
tgcactcgctggcccgggcatgatg

SEQ ID NO: 841772 - DNA, 25 bp, Homo sapien
catctcggttttgaacccctccacg

SEQ ID NO: 841773 - DNA, 25 bp, Homo sapien
gggcatgatgcaggatcagctcagc

SEQ ID NO: 841774 - DNA, 25 bp, Homo sapien
ctggcccgggcatgatgcaggatca

SEQ ID NO: 841775 - DNA, 25 bp, Homo sapien
cagcaacttaaagacactagagaga

SEQ ID NO: 841776 - DNA, 25 bp, Homo sapien
catcagcaacttaaagacactagag

SEQ ID NO: 841777 - DNA, 25 bp, Homo sapien
tagagagaaggctggacacatgaag

SEQ ID NO: 841778 - DNA, 25 bp, Homo sapien
cttaaagacactagagagaaggctg

SEQ ID NO: 841779 - DNA, 25 bp, Homo sapien
ttccaccaggaaagagctaagcatg

SEQ ID NO: 841780 - DNA, 25 bp, Homo sapien
tctaatggactacagcagccaggca

SEQ ID NO: 841781 - DNA, 25 bp, Homo sapien
gagactaggctccatgacaaggcga

SEQ ID NO: 841782 - DNA, 25 bp, Homo sapien
taagatgaaccatgaggccagctcc

SEQ ID NO: 841783 - DNA, 25 bp, Homo sapien
ccgtgctggaaactgtgtggggagc

SEQ ID NO: 841784 - DNA, 25 bp, Homo sapien
ccaccgtgctggaaactgtgtgggg

SEQ ID NO: 841785 - DNA, 25 bp, Homo sapien
tgctcagagtgagccacggaggcgg

SEQ ID NO: 841786 - DNA, 25 bp, Homo sapien
tcagagtgagccacggaggcgggag

SEQ ID NO: 841787 - DNA, 25 bp, Homo sapien
gcagcaaacactcaaggcccctcac

SEQ ID NO: 841788 - DNA, 25 bp, Homo sapien
gcagcagcaaacactcaaggcccct

SEQ ID NO: 841789 - DNA, 25 bp, Homo sapien
gcagcagcagcaaacactcaaggcc

SEQ ID NO: 841790 - DNA, 25 bp, Homo sapien
agcagcagcaaacactcaaggcccc

SEQ ID NO: 841791 - DNA, 25 bp, Homo sapien
cctctgggaatgctttcattctgaa

SEQ ID NO: 841792 - DNA, 25 bp, Homo sapien
acctctgggaatgctttcattctga

SEQ ID NO: 841793 - DNA, 25 bp, Homo sapien
gtcggggtcaggtggatccagaagc

SEQ ID NO: 841794 - DNA, 25 bp, Homo sapien
gctggaaggttgtcggggtcaggtg

SEQ ID NO: 841795 - DNA, 25 bp, Homo sapien
caggtaattcttcgaaacctacagt

SEQ ID NO: 841796 - DNA, 25 bp, Homo sapien
ctggaacagaaaaacagaacagttc

SEQ ID NO: 841797 - DNA, 25 bp, Homo sapien
aggaggaagggcctcgctgcctcca

SEQ ID NO: 841798 - DNA, 25 bp, Homo sapien
gctgcctccaggatgtccagtttgg

SEQ ID NO: 841799 - DNA, 25 bp, Homo sapien
aggcaaagttgctctcaagctttac

SEQ ID NO: 841800 - DNA, 25 bp, Homo sapien
caacaccatgatggcaaacacaatg

SEQ ID NO: 841801 - DNA, 25 bp, Homo sapien
tccagctcttgacaagggcccacag

SEQ ID NO: 841802 - DNA, 25 bp, Homo sapien
acatttgaaattggtgtcccaattt

SEQ ID NO: 841803 - DNA, 25 bp, Homo sapien
tacatttgaaattggtgtcccaatt

SEQ ID NO: 841804 - DNA, 25 bp, Homo sapien
taaatttattcgtcctcctccacat

SEQ ID NO: 841805 - DNA, 25 bp, Homo sapien
gaagccatggtgtgccttccaccac

SEQ ID NO: 841806 - DNA, 25 bp, Homo sapien
tccctaattggcccaaagcttttga

SEQ ID NO: 841807 - DNA, 25 bp, Homo sapien
caatggaatggataggccccttccc

SEQ ID NO: 841808 - DNA, 25 bp, Homo sapien
tctatgaaggtgcagggataaactg

SEQ ID NO: 841809 - DNA, 25 bp, Homo sapien
cctggtggtctctaagacgagcaac

SEQ ID NO: 841810 - DNA, 25 bp, Homo sapien
gcttgactccattcgctgcctggtg

SEQ ID NO: 841811 - DNA, 25 bp, Homo sapien
ctcggagagcgcaagggcttgactc

SEQ ID NO: 841812 - DNA, 25 bp, Homo sapien
aatctctgtccacctaaaccatact

SEQ ID NO: 841813 - DNA, 25 bp, Homo sapien
gaatctctgtccacctaaaccatac

SEQ ID NO: 841814 - DNA, 25 bp, Homo sapien
cgcccctgcctacttcgcttccccg

SEQ ID NO: 841815 - DNA, 25 bp, Homo sapien
cgcctcgcccctgcctacttcgctt

SEQ ID NO: 841816 - DNA, 25 bp, Homo sapien
ccctgcctacttcgcttccccggcg

SEQ ID NO: 841817 - DNA, 25 bp, Homo sapien
ctcgcccctgcctacttcgcttccc

SEQ ID NO: 841818 - DNA, 25 bp, Homo sapien
cgcttctgaaaaggcggcctccaac

SEQ ID NO: 841819 - DNA, 25 bp, Homo sapien
gcagtccgtgcgcagccgcttctga

SEQ ID NO: 841820 - DNA, 25 bp, Homo sapien
ggcctccaacgcgagcgaaagacgc

SEQ ID NO: 841821 - DNA, 25 bp, Homo sapien
acgccagccgagtcagagcggacat

SEQ ID NO: 841822 - DNA, 25 bp, Homo sapien
ctgcacacggtgtcccatctgccca

SEQ ID NO: 841823 - DNA, 25 bp, Homo sapien
accatgacggccctgcacacggtgt

SEQ ID NO: 841824 - DNA, 25 bp, Homo sapien
tctgcccagcgaagtctctccctct

SEQ ID NO: 841825 - DNA, 25 bp, Homo sapien
ggtgtcccatctgcccagcgaagtc

SEQ ID NO: 841826 - DNA, 25 bp, Homo sapien
acagactctaccctaaattccgcag

SEQ ID NO: 841827 - DNA, 25 bp, Homo sapien
tgacgtctccgattaaaggctgccg

SEQ ID NO: 841828 - DNA, 25 bp, Homo sapien
ttaaaaagcggccacgtgacgtctc

SEQ ID NO: 841829 - DNA, 25 bp, Homo sapien
ggcgctctctctgggcgacagcctc

SEQ ID NO: 841830 - DNA, 25 bp, Homo sapien
gattcttcatccatgtgggacttca

SEQ ID NO: 841831 - DNA, 25 bp, Homo sapien
tcttcatccatgtgggacttcaggc

SEQ ID NO: 841832 - DNA, 25 bp, Homo sapien
tgggacttcaggcaagtcactcctt

SEQ ID NO: 841833 - DNA, 25 bp, Homo sapien
gtgggacttcaggcaagtcactcct

SEQ ID NO: 841834 - DNA, 25 bp, Homo sapien
ctcagggaagatcggcattccccca

SEQ ID NO: 841835 - DNA, 25 bp, Homo sapien
ccatctcctcatgcaggaccaaggg

SEQ ID NO: 841836 - DNA, 25 bp, Homo sapien
cccccatctcctcatgcaggaccaa

SEQ ID NO: 841837 - DNA, 25 bp, Homo sapien
agggaagatcggcattcccccatct

SEQ ID NO: 841838 - DNA, 25 bp, Homo sapien
aataaaccatgcaggatcattcaat

SEQ ID NO: 841839 - DNA, 25 bp, Homo sapien
ccatgcaggatcattcaatatagta

SEQ ID NO: 841840 - DNA, 25 bp, Homo sapien
taaaccatgcaggatcattcaatat

SEQ ID NO: 841841 - DNA, 25 bp, Homo sapien
gtaaataaaccatgcaggatcattc

SEQ ID NO: 841842 - DNA, 25 bp, Homo sapien
gtagcatactgtttccgtaatgtcc

SEQ ID NO: 841843 - DNA, 25 bp, Homo sapien
tccgtaatgtcctcatataccaatt

SEQ ID NO: 841844 - DNA, 25 bp, Homo sapien
caaatatcgccactttacaacttga

SEQ ID NO: 841845 - DNA, 25 bp, Homo sapien
ttacaacttgaatgacgtagcatac

SEQ ID NO: 841846 - DNA, 25 bp, Homo sapien
aattatgaataaggtgatttttagt

SEQ ID NO: 841847 - DNA, 25 bp, Homo sapien
gctctatttaaggtattaataacta

SEQ ID NO: 841848 - DNA, 25 bp, Homo sapien
tggaatgctctatttaaggtattaa

SEQ ID NO: 841849 - DNA, 25 bp, Homo sapien
taaggtattaataactaattatgaa

SEQ ID NO: 841850 - DNA, 25 bp, Homo sapien
tatgtagcacagaaattcgtacctg

SEQ ID NO: 841851 - DNA, 25 bp, Homo sapien
tagcaggtcactaacttactcagaa

SEQ ID NO: 841852 - DNA, 25 bp, Homo sapien
ggcagacagcgtgctacattctcaa

SEQ ID NO: 841853 - DNA, 25 bp, Homo sapien
cattctcaaagcgttaagtcatcca

SEQ ID NO: 841854 - DNA, 25 bp, Homo sapien
tgaagaactcgctctggaacacctg

SEQ ID NO: 841855 - DNA, 25 bp, Homo sapien
tccagaaccacatgagtccgctgaa

SEQ ID NO: 841856 - DNA, 25 bp, Homo sapien
tataccggggctcaatgtgcacacc

SEQ ID NO: 841857 - DNA, 25 bp, Homo sapien
gggaactgtctataccggggctcaa

SEQ ID NO: 841858 - DNA, 25 bp, Homo sapien
agggatacctaattcttcatctgtc

SEQ ID NO: 841859 - DNA, 25 bp, Homo sapien
aaggatcaggatacggaaagtgacc

SEQ ID NO: 841860 - DNA, 25 bp, Homo sapien
gggaaggatcaggatacggaaagtg

SEQ ID NO: 841861 - DNA, 25 bp, Homo sapien
gggatacctaattcttcatctgtcc

SEQ ID NO: 841862 - DNA, 25 bp, Homo sapien
acagagtgaggctgagtctacacct

SEQ ID NO: 841863 - DNA, 25 bp, Homo sapien
gaaatcagatacatggccaggcgtg

SEQ ID NO: 841864 - DNA, 25 bp, Homo sapien
tatagtaatactcccatatgctgga

SEQ ID NO: 841865 - DNA, 25 bp, Homo sapien
ccactgtaggcctgtgcttggcaca

SEQ ID NO: 841866 - DNA, 25 bp, Homo sapien
gatacaggacatggttaactcaact

SEQ ID NO: 841867 - DNA, 25 bp, Homo sapien
ttcctctctcaagggtttacagtcc

SEQ ID NO: 841868 - DNA, 25 bp, Homo sapien
tattgagcactgatcatgtgacagc

SEQ ID NO: 841869 - DNA, 25 bp, Homo sapien
catgtgacagccttgtagacaagag

SEQ ID NO: 841870 - DNA, 25 bp, Homo sapien
tagacaagagaagcaaaatcaccct

SEQ ID NO: 841871 - DNA, 25 bp, Homo sapien
ttatattcactaattcaaatccata

SEQ ID NO: 841872 - DNA, 25 bp, Homo sapien
agctttaagtacttttatattcact

SEQ ID NO: 841873 - DNA, 25 bp, Homo sapien
cactaattcaaatccataattcatt

SEQ ID NO: 841874 - DNA, 25 bp, Homo sapien
gctttaagtacttttatattcacta

SEQ ID NO: 841875 - DNA, 25 bp, Homo sapien
gtcgataatccttgaaattctcacc

SEQ ID NO: 841876 - DNA, 25 bp, Homo sapien
gcaatatgaagtcgataatccttga

SEQ ID NO: 841877 - DNA, 25 bp, Homo sapien
aactttaatgtgcaatatgaagtcg

SEQ ID NO: 841878 - DNA, 25 bp, Homo sapien
tgtgcaatatgaagtcgataatcct

SEQ ID NO: 841879 - DNA, 25 bp, Homo sapien
caagagggacaggactgctgaagct

SEQ ID NO: 841880 - DNA, 25 bp, Homo sapien
gggagggtgcaactgttccacttgc

SEQ ID NO: 841881 - DNA, 25 bp, Homo sapien
ggtgcaactgttccacttgcttcag

SEQ ID NO: 841882 - DNA, 25 bp, Homo sapien
ccttgcaagagggacaggactgctg

SEQ ID NO: 841883 - DNA, 25 bp, Homo sapien
cacaaaaccggagaagtgtccccag

SEQ ID NO: 841884 - DNA, 25 bp, Homo sapien
tactgttgtcatcaccaatctggga

SEQ ID NO: 841885 - DNA, 25 bp, Homo sapien
catgctccacttgtccctactgttg

SEQ ID NO: 841886 - DNA, 25 bp, Homo sapien
tccatgacagtgagttcatagccag

SEQ ID NO: 841887 - DNA, 25 bp, Homo sapien
tggttgttgtgttaggcatgctcca

SEQ ID NO: 841888 - DNA, 25 bp, Homo sapien
cattgaaaaggttctcgtggagtct

SEQ ID NO: 841889 - DNA, 25 bp, Homo sapien
tttcctcaacatggcaattgctgcc

SEQ ID NO: 841890 - DNA, 25 bp, Homo sapien
ggccatgccacatatatagactcag

SEQ ID NO: 841891 - DNA, 25 bp, Homo sapien
tgaggacatgactcctgtaagggag

SEQ ID NO: 841892 - DNA, 25 bp, Homo sapien
gtcatcctgtcccaaagcgctgtgg

SEQ ID NO: 841893 - DNA, 25 bp, Homo sapien
tgatgcccatcggtagttgagcccc

SEQ ID NO: 841894 - DNA, 25 bp, Homo sapien
tgcacatgaagctggactgcgttag

SEQ ID NO: 841895 - DNA, 25 bp, Homo sapien
gaaagtccatgtattgtctccagca

SEQ ID NO: 841896 - DNA, 25 bp, Homo sapien
caggcattcatagaaagaccaccca

SEQ ID NO: 841897 - DNA, 25 bp, Homo sapien
caggagctctagaacatgacgatga

SEQ ID NO: 841898 - DNA, 25 bp, Homo sapien
gtaggcttggcatgacagtacatcc

SEQ ID NO: 841899 - DNA, 25 bp, Homo sapien
cattgttagtgctaggaataccagc

SEQ ID NO: 841900 - DNA, 25 bp, Homo sapien
ctgtccccactgtacatccacccgc

SEQ ID NO: 841901 - DNA, 25 bp, Homo sapien
tccccactgtacatccacccgccag

SEQ ID NO: 841902 - DNA, 25 bp, Homo sapien
acatccacccgccagctgcttgcaa

SEQ ID NO: 841903 - DNA, 25 bp, Homo sapien
actgtacatccacccgccagctgct

SEQ ID NO: 841904 - DNA, 25 bp, Homo sapien
cttgtattcaccaggcggagtgcga

SEQ ID NO: 841905 - DNA, 25 bp, Homo sapien
ttgtattcaccaggcggagtgcgag

SEQ ID NO: 841906 - DNA, 25 bp, Homo sapien
gtattcaccaggcggagtgcgagct

SEQ ID NO: 841907 - DNA, 25 bp, Homo sapien
ttcaccaggcggagtgcgagctgct

SEQ ID NO: 841908 - DNA, 25 bp, Homo sapien
tgcgtcactgatcatcttgtaaggg

SEQ ID NO: 841909 - DNA, 25 bp, Homo sapien
tcaaggacctagacttttgccactg

SEQ ID NO: 841910 - DNA, 25 bp, Homo sapien
ttttcatcgttagagtcaaggacct

SEQ ID NO: 841911 - DNA, 25 bp, Homo sapien
tatagacagtatgtggctgcgtcac

SEQ ID NO: 841912 - DNA, 25 bp, Homo sapien
ggaggtagaacatgtgcagcctggg

SEQ ID NO: 841913 - DNA, 25 bp, Homo sapien
ggtagaacatgtgcagcctgggtcc

SEQ ID NO: 841914 - DNA, 25 bp, Homo sapien
tagaacatgtgcagcctgggtccgg

SEQ ID NO: 841915 - DNA, 25 bp, Homo sapien
ctgaggaggtagaacatgtgcagcc

SEQ ID NO: 841916 - DNA, 25 bp, Homo sapien
acaagaggatgtgtttcatgtcctg

SEQ ID NO: 841917 - DNA, 25 bp, Homo sapien
gcttgaacaagaggatgtgtttcat

SEQ ID NO: 841918 - DNA, 25 bp, Homo sapien
aacaagaggatgtgtttcatgtcct

SEQ ID NO: 841919 - DNA, 25 bp, Homo sapien
ctgggcttgaacaagaggatgtgtt

SEQ ID NO: 841920 - DNA, 25 bp, Homo sapien
ttcaagtttccgcaggtagagagac

SEQ ID NO: 841921 - DNA, 25 bp, Homo sapien
gattggcttcaagtttccgcaggta

SEQ ID NO: 841922 - DNA, 25 bp, Homo sapien
ggcttcaagtttccgcaggtagaga

SEQ ID NO: 841923 - DNA, 25 bp, Homo sapien
ccctttaccaagattggcttcaagt

SEQ ID NO: 841924 - DNA, 25 bp, Homo sapien
gagcatacaagtctgcccagtccca

SEQ ID NO: 841925 - DNA, 25 bp, Homo sapien
gaccttttgatggtcaggcatgatg

SEQ ID NO: 841926 - DNA, 25 bp, Homo sapien
gggcagtttcaatcaccaagcatcg

SEQ ID NO: 841927 - DNA, 25 bp, Homo sapien
gaggagagaccctgaattctgacct

SEQ ID NO: 841928 - DNA, 25 bp, Homo sapien
gcatcagaaccctccttgaatcggg

SEQ ID NO: 841929 - DNA, 25 bp, Homo sapien
tgctggcccgctcattgccaaaaat

SEQ ID NO: 841930 - DNA, 25 bp, Homo sapien
tgaatcgggctggtttccaaacaga

SEQ ID NO: 841931 - DNA, 25 bp, Homo sapien
tgccaaaaattcaccgcagtgcatc

SEQ ID NO: 841932 - DNA, 25 bp, Homo sapien
tgacatgttttattcagagactgac

SEQ ID NO: 841933 - DNA, 25 bp, Homo sapien
actggtgtggttcagattctgacat

SEQ ID NO: 841934 - DNA, 25 bp, Homo sapien
tatttgcatatcaattctaagtgga

SEQ ID NO: 841935 - DNA, 25 bp, Homo sapien
ttcactgttaggcttccttggctct

SEQ ID NO: 841936 - DNA, 25 bp, Homo sapien
taaatcagcctgtaaatggttgtca

SEQ ID NO: 841937 - DNA, 25 bp, Homo sapien
ctggcctgccttgagactttaaatc

SEQ ID NO: 841938 - DNA, 25 bp, Homo sapien
tcagtcagtgccctttctaaaactt

SEQ ID NO: 841939 - DNA, 25 bp, Homo sapien
aggacctagatggaacatgctaatt

SEQ ID NO: 841940 - DNA, 25 bp, Homo sapien
ggcagtgaagacaagttcaagtgct

SEQ ID NO: 841941 - DNA, 25 bp, Homo sapien
taaaaataatgcaaaggcagccggg

SEQ ID NO: 841942 - DNA, 25 bp, Homo sapien
tagatattcataaagcgtaaaagaa

SEQ ID NO: 841943 - DNA, 25 bp, Homo sapien
tgctagaagtatggaaaagggatag

SEQ ID NO: 841944 - DNA, 25 bp, Homo sapien
tgctgttaaagtcttacttttcttg

SEQ ID NO: 841945 - DNA, 25 bp, Homo sapien
aaattaagcattatgattttgtacc

SEQ ID NO: 841946 - DNA, 25 bp, Homo sapien
attttgtaccacagatcaggtagtc

SEQ ID NO: 841947 - DNA, 25 bp, Homo sapien
aaatttctctttgctgtatgccagt

SEQ ID NO: 841948 - DNA, 25 bp, Homo sapien
taccacagatcaggtagtctgattc

SEQ ID NO: 841949 - DNA, 25 bp, Homo sapien
tatattaaacagctgtttagtcacc

SEQ ID NO: 841950 - DNA, 25 bp, Homo sapien
ttaggttccactaccagtcccattc

SEQ ID NO: 841951 - DNA, 25 bp, Homo sapien
tagtcacctacaatgaacaaatact

SEQ ID NO: 841952 - DNA, 25 bp, Homo sapien
taaacagctgtttagtcacctacaa

SEQ ID NO: 841953 - DNA, 25 bp, Homo sapien
caaaactaagtggtactggcatgca

SEQ ID NO: 841954 - DNA, 25 bp, Homo sapien
gggtaccaggaccactccatgaagt

SEQ ID NO: 841955 - DNA, 25 bp, Homo sapien
gcaaaagaatgaagtggtacccttc

SEQ ID NO: 841956 - DNA, 25 bp, Homo sapien
aaggaatcccgtatagccaaagcag

SEQ ID NO: 841957 - DNA, 25 bp, Homo sapien
tcctcatatttatgagagaggccaa

SEQ ID NO: 841958 - DNA, 25 bp, Homo sapien
gtaagactcattcttcacccttgag

SEQ ID NO: 841959 - DNA, 25 bp, Homo sapien
gaaccacagtcatgtctaagcacta

SEQ ID NO: 841960 - DNA, 25 bp, Homo sapien
tcccacagatgtggcacggagcaac

SEQ ID NO: 841961 - DNA, 25 bp, Homo sapien
tagaggcatccatgtcatacaggaa

SEQ ID NO: 841962 - DNA, 25 bp, Homo sapien
gatgagccattgtaccaggcctggt

SEQ ID NO: 841963 - DNA, 25 bp, Homo sapien
agggatgagccattgtaccaggcct

SEQ ID NO: 841964 - DNA, 25 bp, Homo sapien
caggcctggtttttcattgcatttc

SEQ ID NO: 841965 - DNA, 25 bp, Homo sapien
gtaccaggcctggtttttcattgca

SEQ ID NO: 841966 - DNA, 25 bp, Homo sapien
gggtggcaattcaaggagaattgct

SEQ ID NO: 841967 - DNA, 25 bp, Homo sapien
tgggtggcaattcaaggagaattgc

SEQ ID NO: 841968 - DNA, 25 bp, Homo sapien
ggtggcaattcaaggagaattgctt

SEQ ID NO: 841969 - DNA, 25 bp, Homo sapien
cagaaagccataggaaaattatctt

SEQ ID NO: 841970 - DNA, 25 bp, Homo sapien
agcagaaagccataggaaaattatc

SEQ ID NO: 841971 - DNA, 25 bp, Homo sapien
gccaagagataagaagatcaactgt

SEQ ID NO: 841972 - DNA, 25 bp, Homo sapien
aatcctcaagatcccagtgcagaat

SEQ ID NO: 841973 - DNA, 25 bp, Homo sapien
ttaggcaagggccatgcctatcttc

SEQ ID NO: 841974 - DNA, 25 bp, Homo sapien
taggcaagggccatgcctatcttct

SEQ ID NO: 841975 - DNA, 25 bp, Homo sapien
gcatgccattcttaggcaagggcca

SEQ ID NO: 841976 - DNA, 25 bp, Homo sapien
gaatttgcatgccattcttaggcaa

SEQ ID NO: 841977 - DNA, 25 bp, Homo sapien
gagtacaatggcgtgctcaccaaaa

SEQ ID NO: 841978 - DNA, 25 bp, Homo sapien
gtacaatggcgtgctcaccaaaacc

SEQ ID NO: 841979 - DNA, 25 bp, Homo sapien
acaatggcgtgctcaccaaaacctt

SEQ ID NO: 841980 - DNA, 25 bp, Homo sapien
ggagtacaatggcgtgctcaccaaa

SEQ ID NO: 841981 - DNA, 25 bp, Homo sapien
cctgacagcacgtttgggacaaatg

SEQ ID NO: 841982 - DNA, 25 bp, Homo sapien
tctgtaacatcggataaagcgtcgt

SEQ ID NO: 841983 - DNA, 25 bp, Homo sapien
taatgtagctgcagttcctgacagc

SEQ ID NO: 841984 - DNA, 25 bp, Homo sapien
ggttttcaaagtacgccagagctct

SEQ ID NO: 841985 - DNA, 25 bp, Homo sapien
catatagagggaactcaatgcccag

SEQ ID NO: 841986 - DNA, 25 bp, Homo sapien
tagagggaactcaatgcccagtaac

SEQ ID NO: 841987 - DNA, 25 bp, Homo sapien
gaactcaatgcccagtaacttcttt

SEQ ID NO: 841988 - DNA, 25 bp, Homo sapien
ctatgcatatagagggaactcaatg

SEQ ID NO: 841989 - DNA, 25 bp, Homo sapien
gcgggccggtacctgaggtggccca

SEQ ID NO: 841990 - DNA, 25 bp, Homo sapien
cgggccggtacctgaggtggcccag

SEQ ID NO: 841991 - DNA, 25 bp, Homo sapien
acacgcgggtgacgccgttgccgcg

SEQ ID NO: 841992 - DNA, 25 bp, Homo sapien
caccggggtgacgtcacgaccgtga

SEQ ID NO: 841993 - DNA, 25 bp, Homo sapien
cgttgccgcggcgacttctcgtcgt

SEQ ID NO: 841994 - DNA, 25 bp, Homo sapien
cgtcacgaccgtgacacgcgggtga

SEQ ID NO: 841995 - DNA, 25 bp, Homo sapien
cacagagacgttcattgcagtggaa

SEQ ID NO: 841996 - DNA, 25 bp, Homo sapien
tagcaagtagtattggcttccccgc

SEQ ID NO: 841997 - DNA, 25 bp, Homo sapien
tgaaaagaaaacacgcgtcgcactg

SEQ ID NO: 841998 - DNA, 25 bp, Homo sapien
gaaagtaggaaaccggagccatgga

SEQ ID NO: 841999 - DNA, 25 bp, Homo sapien
tcatgaaaggcacaaagtacataaa

SEQ ID NO: 842000 - DNA, 25 bp, Homo sapien
gtacaggccctacggcatggaaagt

SEQ ID NO: 842001 - DNA, 25 bp, Homo sapien
gcttcagatgtctagaatgctatgt

SEQ ID NO: 842002 - DNA, 25 bp, Homo sapien
tgttttcatgcgtattttgcagaga

SEQ ID NO: 842003 - DNA, 25 bp, Homo sapien
taaggtgtggagtgctgacgctaaa

SEQ ID NO: 842004 - DNA, 25 bp, Homo sapien
tcctcacaatgatagtttggcaggt

SEQ ID NO: 842005 - DNA, 25 bp, Homo sapien
gactgatactgacaaataaggctag

SEQ ID NO: 842006 - DNA, 25 bp, Homo sapien
gatactgtaggactttagaatggcc

SEQ ID NO: 842007 - DNA, 25 bp, Homo sapien
aaatttctttattgtgtccattttg

SEQ ID NO: 842008 - DNA, 25 bp, Homo sapien
tcttgaagcataaggcttttaaatt

SEQ ID NO: 842009 - DNA, 25 bp, Homo sapien
atttctttattgtgtccattttgcc

SEQ ID NO: 842010 - DNA, 25 bp, Homo sapien
tattgtgtccattttgcctttaact

SEQ ID NO: 842011 - DNA, 25 bp, Homo sapien
ctgctgctgtgaggcaaatggccct

SEQ ID NO: 842012 - DNA, 25 bp, Homo sapien
tgagagataagaggtccacctttgc

SEQ ID NO: 842013 - DNA, 25 bp, Homo sapien
tgtagctggttcacaggcagttcaa

SEQ ID NO: 842014 - DNA, 25 bp, Homo sapien
ctctcggtaaacaagcagctctgct

SEQ ID NO: 842015 - DNA, 25 bp, Homo sapien
tgcagatgcactgttattcttggcc

SEQ ID NO: 842016 - DNA, 25 bp, Homo sapien
tccctaagactgtgtgaatgagcat

SEQ ID NO: 842017 - DNA, 25 bp, Homo sapien
tgccatgtgctcgacacgtgatagt

SEQ ID NO: 842018 - DNA, 25 bp, Homo sapien
gcaagatctcagaaacgtgcttaga

SEQ ID NO: 842019 - DNA, 25 bp, Homo sapien
tctaatccggttacattgtggctgg

SEQ ID NO: 842020 - DNA, 25 bp, Homo sapien
gaagcttcgtggaaaggagaaacca

SEQ ID NO: 842021 - DNA, 25 bp, Homo sapien
gaaatagtgttggtccctcaagagg

SEQ ID NO: 842022 - DNA, 25 bp, Homo sapien
gagggagactttcttcctcagtggc

SEQ ID NO: 842023 - DNA, 25 bp, Homo sapien
cagtgcccggctatttggtgaagtc

SEQ ID NO: 842024 - DNA, 25 bp, Homo sapien
tagagcccaggtagttcaaaaggta

SEQ ID NO: 842025 - DNA, 25 bp, Homo sapien
gctgaactcatgcagacgctccgat

SEQ ID NO: 842026 - DNA, 25 bp, Homo sapien
actgtttagtgaactgcccttggcc

SEQ ID NO: 842027 - DNA, 25 bp, Homo sapien
cttgaaacaggcattaaaacttcct

SEQ ID NO: 842028 - DNA, 25 bp, Homo sapien
gtcataacttagtgtaacctcaaac

SEQ ID NO: 842029 - DNA, 25 bp, Homo sapien
ttctgtaaaaacaagatttctccat

SEQ ID NO: 842030 - DNA, 25 bp, Homo sapien
gtgcactaccatagcagactaattt

SEQ ID NO: 842031 - DNA, 25 bp, Homo sapien
tctactcctctcacaaaatgttact

SEQ ID NO: 842032 - DNA, 25 bp, Homo sapien
tgaagttatattctactcctctcac

SEQ ID NO: 842033 - DNA, 25 bp, Homo sapien
tattctactcctctcacaaaatgtt

SEQ ID NO: 842034 - DNA, 25 bp, Homo sapien
gcacttggccagtttacatcattgc

SEQ ID NO: 842035 - DNA, 25 bp, Homo sapien
attgcgcctcaaataaacctcattg

SEQ ID NO: 842036 - DNA, 25 bp, Homo sapien
ttagcaataattgcgcctcaaataa

SEQ ID NO: 842037 - DNA, 25 bp, Homo sapien
attagcaataattgcgcctcaaata

SEQ ID NO: 842038 - DNA, 25 bp, Homo sapien
aataattgcgcctcaaataaacctc

SEQ ID NO: 842039 - DNA, 25 bp, Homo sapien
gaacacatgctgtctgggagaaaag

SEQ ID NO: 842040 - DNA, 25 bp, Homo sapien
ccagaagagcagaagtttagggtca

SEQ ID NO: 842041 - DNA, 25 bp, Homo sapien
caagaggtatgtcagagcactttcc

SEQ ID NO: 842042 - DNA, 25 bp, Homo sapien
tgtgtttggaatatgcagagccctc

SEQ ID NO: 842043 - DNA, 25 bp, Homo sapien
tcaggtagctggtacatcttatatc

SEQ ID NO: 842044 - DNA, 25 bp, Homo sapien
taatccttggatttcgtttggctta

SEQ ID NO: 842045 - DNA, 25 bp, Homo sapien
tccatcatatgtcttcaagtggcta

SEQ ID NO: 842046 - DNA, 25 bp, Homo sapien
tgctttgtctgtggataaattcaag

SEQ ID NO: 842047 - DNA, 25 bp, Homo sapien
tggtcaccagcaggtcggttgctcc

SEQ ID NO: 842048 - DNA, 25 bp, Homo sapien
gggcgcgcacccagaaatgttcttc

SEQ ID NO: 842049 - DNA, 25 bp, Homo sapien
aaaatctccgttctctggtcaccag

SEQ ID NO: 842050 - DNA, 25 bp, Homo sapien
gaaactaaatgccaagtgtcctcgg

SEQ ID NO: 842051 - DNA, 25 bp, Homo sapien
cgcacccggaacaaagcggcgggcg

SEQ ID NO: 842052 - DNA, 25 bp, Homo sapien
acaccatgggcatgatccgccgcag

SEQ ID NO: 842053 - DNA, 25 bp, Homo sapien
tcgccgcacccggaacaaagcggcg

SEQ ID NO: 842054 - DNA, 25 bp, Homo sapien
ctacaccatgggcatgatccgccgc

SEQ ID NO: 842055 - DNA, 25 bp, Homo sapien
tcgtaccagtggtccgagcagatgg

SEQ ID NO: 842056 - DNA, 25 bp, Homo sapien
agtgtagagcagtaaccttccggca

SEQ ID NO: 842057 - DNA, 25 bp, Homo sapien
cccatgttggtggagttgtactgcc

SEQ ID NO: 842058 - DNA, 25 bp, Homo sapien
ctttccgaatgagggcggcgatctc

SEQ ID NO: 842059 - DNA, 25 bp, Homo sapien
gcagcgccacgccttgcgcccggcg

SEQ ID NO: 842060 - DNA, 25 bp, Homo sapien
ctccgcagcgccacgccttgcgccc

SEQ ID NO: 842061 - DNA, 25 bp, Homo sapien
cgggctctccgcagcgccacgcctt

SEQ ID NO: 842062 - DNA, 25 bp, Homo sapien
gccacgccttgcgcccggcgcttac

SEQ ID NO: 842063 - DNA, 25 bp, Homo sapien
ctgacacatgactcctaaagggctt

SEQ ID NO: 842064 - DNA, 25 bp, Homo sapien
taagagcacaaacaacgttccagat

SEQ ID NO: 842065 - DNA, 25 bp, Homo sapien
cattatcctggataagaaccctgga

SEQ ID NO: 842066 - DNA, 25 bp, Homo sapien
gaaccctggaccatgaggttccact

SEQ ID NO: 842067 - DNA, 25 bp, Homo sapien
tatagcgctcagcaaacgtttctgg

SEQ ID NO: 842068 - DNA, 25 bp, Homo sapien
tgatgtttatatgaccagtgcctac

SEQ ID NO: 842069 - DNA, 25 bp, Homo sapien
cagtgcctacaccatatctggtata

SEQ ID NO: 842070 - DNA, 25 bp, Homo sapien
aattgtgatatgatgctgctggtca

SEQ ID NO: 842071 - DNA, 25 bp, Homo sapien
gcacagaagtcactacagtcaacca

SEQ ID NO: 842072 - DNA, 25 bp, Homo sapien
tagaccttgttgatattcgatgcac

SEQ ID NO: 842073 - DNA, 25 bp, Homo sapien
tattcgatgcacagaagtcactaca

SEQ ID NO: 842074 - DNA, 25 bp, Homo sapien
tgttgatattcgatgcacagaagtc

SEQ ID NO: 842075 - DNA, 25 bp, Homo sapien
cagctcctgttgaaatattggtgcc

SEQ ID NO: 842076 - DNA, 25 bp, Homo sapien
gatcctgcagtcctatccatcatgg

SEQ ID NO: 842077 - DNA, 25 bp, Homo sapien
tcagagagccccatagctagttcct

SEQ ID NO: 842078 - DNA, 25 bp, Homo sapien
tattaccaattcagctacccaaggg

SEQ ID NO: 842079 - DNA, 25 bp, Homo sapien
taaccaggatgaggttaagagaccc

SEQ ID NO: 842080 - DNA, 25 bp, Homo sapien
ggacagaccccgtatcgctctattg

SEQ ID NO: 842081 - DNA, 25 bp, Homo sapien
gatgtagacagtttacattttgtct

SEQ ID NO: 842082 - DNA, 25 bp, Homo sapien
tattgtgttaacctagatgtagaca

SEQ ID NO: 842083 - DNA, 25 bp, Homo sapien
acatgccgtcagtctccaagtgagg

SEQ ID NO: 842084 - DNA, 25 bp, Homo sapien
ggctgaaaacagaggatccttcacc

SEQ ID NO: 842085 - DNA, 25 bp, Homo sapien
taaaggccttactagctgcccagga

SEQ ID NO: 842086 - DNA, 25 bp, Homo sapien
tgtgctcgaaatacaggctgaaaac

SEQ ID NO: 842087 - DNA, 25 bp, Homo sapien
ttctagagctccacaggaggcccac

SEQ ID NO: 842088 - DNA, 25 bp, Homo sapien
tatattcttgcacctggagaggagt

SEQ ID NO: 842089 - DNA, 25 bp, Homo sapien
gccctagaaagaatcccggctttgc

SEQ ID NO: 842090 - DNA, 25 bp, Homo sapien
tcaatgagcgagagagtagaaagca

SEQ ID NO: 842091 - DNA, 25 bp, Homo sapien
agaggaaataactgtgagcttgtac

SEQ ID NO: 842092 - DNA, 25 bp, Homo sapien
cgtcaacctactccaaagaggaaat

SEQ ID NO: 842093 - DNA, 25 bp, Homo sapien
ttctcacaacccgtcaacctactcc

SEQ ID NO: 842094 - DNA, 25 bp, Homo sapien
aggaaataactgtgagcttgtactc

SEQ ID NO: 842095 - DNA, 25 bp, Homo sapien
tataatgttatttgggtaggatacc

SEQ ID NO: 842096 - DNA, 25 bp, Homo sapien
cactggtggtagcaagttcaggcag

SEQ ID NO: 842097 - DNA, 25 bp, Homo sapien
tcagaggtgtctatgaattcttcag

SEQ ID NO: 842098 - DNA, 25 bp, Homo sapien
tcccaaggtggcgtatgtgggcact

SEQ ID NO: 842099 - DNA, 25 bp, Homo sapien
ttgatttagtctgttatcgaagctc

SEQ ID NO: 842100 - DNA, 25 bp, Homo sapien
ttgaattattcagttatgggatgtc

SEQ ID NO: 842101 - DNA, 25 bp, Homo sapien
tctgcttgatttagtctgttatcga

SEQ ID NO: 842102 - DNA, 25 bp, Homo sapien
agtctgttatcgaagctctcaattg

SEQ ID NO: 842103 - DNA, 25 bp, Homo sapien
tgactcagacccaccataaggaaaa

SEQ ID NO: 842104 - DNA, 25 bp, Homo sapien
gaaaacggtgcagaacatatgcccc

SEQ ID NO: 842105 - DNA, 25 bp, Homo sapien
cacaagctcagtgtaccagagatca

SEQ ID NO: 842106 - DNA, 25 bp, Homo sapien
gtgttaatcccacatccgaccagtt

SEQ ID NO: 842107 - DNA, 25 bp, Homo sapien
cggggaatcctaggggagctggcca

SEQ ID NO: 842108 - DNA, 25 bp, Homo sapien
ctctgcagttcctgtggggaaacgg

SEQ ID NO: 842109 - DNA, 25 bp, Homo sapien
tgttttgttctaggcttctctgcag

SEQ ID NO: 842110 - DNA, 25 bp, Homo sapien
gcctccaaatcagagatggcttctt

SEQ ID NO: 842111 - DNA, 25 bp, Homo sapien
gagttggcacaaaacacaatgctgg

SEQ ID NO: 842112 - DNA, 25 bp, Homo sapien
aatgctggcccctattaagtctata

SEQ ID NO: 842113 - DNA, 25 bp, Homo sapien
cagggttgcaagtttctcatgtgag

SEQ ID NO: 842114 - DNA, 25 bp, Homo sapien
tgcaggccaatctttcagtcttgac

SEQ ID NO: 842115 - DNA, 25 bp, Homo sapien
tgagcctctccttagttagccagcc

SEQ ID NO: 842116 - DNA, 25 bp, Homo sapien
gagacagtcagcctacatggagcct

SEQ ID NO: 842117 - DNA, 25 bp, Homo sapien
ggttgtgaacccgaactcactgtca

SEQ ID NO: 842118 - DNA, 25 bp, Homo sapien
tcagaatcgactggtctacaccaac

SEQ ID NO: 842119 - DNA, 25 bp, Homo sapien
ccaagctccgtgctctgggaattga

SEQ ID NO: 842120 - DNA, 25 bp, Homo sapien
tggtccaaggacaatagatcatagt

SEQ ID NO: 842121 - DNA, 25 bp, Homo sapien
tcactgcgtgtaaacttggtccaag

SEQ ID NO: 842122 - DNA, 25 bp, Homo sapien
acaatagatcatagtgaggagaggg

SEQ ID NO: 842123 - DNA, 25 bp, Homo sapien
ccatacgaccaacttgtttttcact

SEQ ID NO: 842124 - DNA, 25 bp, Homo sapien
tctgctgatcttggtcactccctgc

SEQ ID NO: 842125 - DNA, 25 bp, Homo sapien
cctctctctatagctacttggtgct

SEQ ID NO: 842126 - DNA, 25 bp, Homo sapien
gacggtccttatctaacctctggtg

SEQ ID NO: 842127 - DNA, 25 bp, Homo sapien
ttctttcccagtagggctctgcctc

SEQ ID NO: 842128 - DNA, 25 bp, Homo sapien
agcccacgtggggtctccaagtggc

SEQ ID NO: 842129 - DNA, 25 bp, Homo sapien
ctttccacggtgacaatgtctggag

SEQ ID NO: 842130 - DNA, 25 bp, Homo sapien
tccacggtgacaatgtctggagtgt

SEQ ID NO: 842131 - DNA, 25 bp, Homo sapien
cacgtggggtctccaagtggcacat

SEQ ID NO: 842132 - DNA, 25 bp, Homo sapien
actgttggatgaggcaggctttctc

SEQ ID NO: 842133 - DNA, 25 bp, Homo sapien
tgttggatgaggcaggctttctctt

SEQ ID NO: 842134 - DNA, 25 bp, Homo sapien
tttgcctgggggattgcaagcatcc

SEQ ID NO: 842135 - DNA, 25 bp, Homo sapien
gccctcgctatttgctttgcctggg

SEQ ID NO: 842136 - DNA, 25 bp, Homo sapien
ttcaggccctcgctatttgctttgc

SEQ ID NO: 842137 - DNA, 25 bp, Homo sapien
cctgggggattgcaagcatcctgcc

SEQ ID NO: 842138 - DNA, 25 bp, Homo sapien
gttgaaaaaggagtctaccagccag

SEQ ID NO: 842139 - DNA, 25 bp, Homo sapien
aaaggagtctaccagccagtctcca

SEQ ID NO: 842140 - DNA, 25 bp, Homo sapien
attcacattcacacctccaacccca

SEQ ID NO: 842141 - DNA, 25 bp, Homo sapien
acttgttgaaaaaggagtctaccag

SEQ ID NO: 842142 - DNA, 25 bp, Homo sapien
tcctgacggatggtcttcgtgatat

SEQ ID NO: 842143 - DNA, 25 bp, Homo sapien
tatttgatgtacgtacatcgctcaa

SEQ ID NO: 842144 - DNA, 25 bp, Homo sapien
ttgctgaggagtagtggtatttgat

SEQ ID NO: 842145 - DNA, 25 bp, Homo sapien
agggcatgccactcatcctgacgga

SEQ ID NO: 842146 - DNA, 25 bp, Homo sapien
ctggtgggcctaatcgacgaaaaag

SEQ ID NO: 842147 - DNA, 25 bp, Homo sapien
tgggcctaatcgacgaaaaagataa

SEQ ID NO: 842148 - DNA, 25 bp, Homo sapien
taatcgacgaaaaagataactaagc

SEQ ID NO: 842149 - DNA, 25 bp, Homo sapien
gcctaatcgacgaaaaagataacta

SEQ ID NO: 842150 - DNA, 25 bp, Homo sapien
tcagcgacatcttcccatcccctgt

SEQ ID NO: 842151 - DNA, 25 bp, Homo sapien
tctgatatagcccaccctggctgcc

SEQ ID NO: 842152 - DNA, 25 bp, Homo sapien
ttgtgccacactgggaaaggcccag

SEQ ID NO: 842153 - DNA, 25 bp, Homo sapien
cccttgttgtgccacactgggaaag

SEQ ID NO: 842154 - DNA, 25 bp, Homo sapien
cccagttccttcctgggacggatgc

SEQ ID NO: 842155 - DNA, 25 bp, Homo sapien
ttccttcctgggacggatgcactca

SEQ ID NO: 842156 - DNA, 25 bp, Homo sapien
cagttccttcctgggacggatgcac

SEQ ID NO: 842157 - DNA, 25 bp, Homo sapien
ccagctccatgccatcccagttcct

SEQ ID NO: 842158 - DNA, 25 bp, Homo sapien
ccgatgagtgagctcgtgtctgtgt

SEQ ID NO: 842159 - DNA, 25 bp, Homo sapien
ccacagggccgatgagtgagctcgt

SEQ ID NO: 842160 - DNA, 25 bp, Homo sapien
agccacagggccgatgagtgagctc

SEQ ID NO: 842161 - DNA, 25 bp, Homo sapien
aacagccacagggccgatgagtgag

SEQ ID NO: 842162 - DNA, 25 bp, Homo sapien
ggcgaggacccccaatgctgtagat

SEQ ID NO: 842163 - DNA, 25 bp, Homo sapien
ggctccttggcactgacgttctctg

SEQ ID NO: 842164 - DNA, 25 bp, Homo sapien
tgccccaggtgtgcaaggatccact

SEQ ID NO: 842165 - DNA, 25 bp, Homo sapien
gctggtgaaggcgaggacccccaat

SEQ ID NO: 842166 - DNA, 25 bp, Homo sapien
attcatcttctcataacaaggatgg

SEQ ID NO: 842167 - DNA, 25 bp, Homo sapien
caagccctttggtccacagcattca

SEQ ID NO: 842168 - DNA, 25 bp, Homo sapien
tagtttcatcccaagccctttggtc

SEQ ID NO: 842169 - DNA, 25 bp, Homo sapien
ctttggtccacagcattcatcttct

SEQ ID NO: 842170 - DNA, 25 bp, Homo sapien
tcagcacctggaactgggacagttc

SEQ ID NO: 842171 - DNA, 25 bp, Homo sapien
atattaagctcccttttcagcacct

SEQ ID NO: 842172 - DNA, 25 bp, Homo sapien
aagctcccttttcagcacctggaac

SEQ ID NO: 842173 - DNA, 25 bp, Homo sapien
ttaagctcccttttcagcacctgga

SEQ ID NO: 842174 - DNA, 25 bp, Homo sapien
acaggttgcacagagtcaaacagaa

SEQ ID NO: 842175 - DNA, 25 bp, Homo sapien
cacaggttgcacagagtcaaacaga

SEQ ID NO: 842176 - DNA, 25 bp, Homo sapien
cctgcacaggttgcacagagtcaaa

SEQ ID NO: 842177 - DNA, 25 bp, Homo sapien
tgcacaggttgcacagagtcaaaca

SEQ ID NO: 842178 - DNA, 25 bp, Homo sapien
aagacaaacagccacatacaaggcc

SEQ ID NO: 842179 - DNA, 25 bp, Homo sapien
aaacagccacatacaaggccaattc

SEQ ID NO: 842180 - DNA, 25 bp, Homo sapien
caaacagccacatacaaggccaatt

SEQ ID NO: 842181 - DNA, 25 bp, Homo sapien
gacaaacagccacatacaaggccaa

SEQ ID NO: 842182 - DNA, 25 bp, Homo sapien
gcagacagcaaacccccaacactca

SEQ ID NO: 842183 - DNA, 25 bp, Homo sapien
ttctctctatgtccaacattcttgc

SEQ ID NO: 842184 - DNA, 25 bp, Homo sapien
cgcagctcttatcctattgttgggc

SEQ ID NO: 842185 - DNA, 25 bp, Homo sapien
gcagctcttatcctattgttgggcc

SEQ ID NO: 842186 - DNA, 25 bp, Homo sapien
caacattcttgcagcatcctccttt

SEQ ID NO: 842187 - DNA, 25 bp, Homo sapien
gggaggggtgaaggatggagcaggg

SEQ ID NO: 842188 - DNA, 25 bp, Homo sapien
gaggggtgaaggatggagcagggag

SEQ ID NO: 842189 - DNA, 25 bp, Homo sapien
aggggtgaaggatggagcagggagg

SEQ ID NO: 842190 - DNA, 25 bp, Homo sapien
gggtgaaggatggagcagggaggtc

SEQ ID NO: 842191 - DNA, 25 bp, Homo sapien
ggacttcatacaagcctacacaggg

SEQ ID NO: 842192 - DNA, 25 bp, Homo sapien
gaagtctgaacgttcatcatgggag

SEQ ID NO: 842193 - DNA, 25 bp, Homo sapien
ggcaaacatcgatcttgtatcaggg

SEQ ID NO: 842194 - DNA, 25 bp, Homo sapien
taagactggatgatcccagcaccaa

SEQ ID NO: 842195 - DNA, 25 bp, Homo sapien
tatgtttctgttagctctgccaagc

SEQ ID NO: 842196 - DNA, 25 bp, Homo sapien
cagtagctgtatttgagacctcacc

SEQ ID NO: 842197 - DNA, 25 bp, Homo sapien
tgtgcagcactagaagctccaagag

SEQ ID NO: 842198 - DNA, 25 bp, Homo sapien
tagtcggcctggagctacctacttg

SEQ ID NO: 842199 - DNA, 25 bp, Homo sapien
acttacaggattcagaggatgggca

SEQ ID NO: 842200 - DNA, 25 bp, Homo sapien
taagccgatggaaaacgcaagagaa

SEQ ID NO: 842201 - DNA, 25 bp, Homo sapien
ggattgaaaccagagacttacagga

SEQ ID NO: 842202 - DNA, 25 bp, Homo sapien
gaaaaggatgtttcccctgctccat

SEQ ID NO: 842203 - DNA, 25 bp, Homo sapien
cctgaacccatttaagtagctgctg

SEQ ID NO: 842204 - DNA, 25 bp, Homo sapien
taaatatgcactgagctgcttgcct

SEQ ID NO: 842205 - DNA, 25 bp, Homo sapien
ggtggctcttatccaaaggttgtcc

SEQ ID NO: 842206 - DNA, 25 bp, Homo sapien
gaacatcacttagggcttggtggct

SEQ ID NO: 842207 - DNA, 25 bp, Homo sapien
tgtggtgcctccattactaatctcc

SEQ ID NO: 842208 - DNA, 25 bp, Homo sapien
cctgcctgctggtaaaagtagggtg

SEQ ID NO: 842209 - DNA, 25 bp, Homo sapien
gggcatgactgctggatccccaagg

SEQ ID NO: 842210 - DNA, 25 bp, Homo sapien
tccattactaatctcctgcttcctg

SEQ ID NO: 842211 - DNA, 25 bp, Homo sapien
gactttgtgcctagttcaagaagaa

SEQ ID NO: 842212 - DNA, 25 bp, Homo sapien
tgacctcgcatggactccgagaaag

SEQ ID NO: 842213 - DNA, 25 bp, Homo sapien
atagagcagagctgaccgcgctcca

SEQ ID NO: 842214 - DNA, 25 bp, Homo sapien
gggatttaaagctagccaacacaca

SEQ ID NO: 842215 - DNA, 25 bp, Homo sapien
ctctgaaaggccatttcccacccat

SEQ ID NO: 842216 - DNA, 25 bp, Homo sapien
tcaacatcttgaaaatataactctc

SEQ ID NO: 842217 - DNA, 25 bp, Homo sapien
gctattaggaggacagcttggactg

SEQ ID NO: 842218 - DNA, 25 bp, Homo sapien
aaagctgcgaactgtggaatcccca

SEQ ID NO: 842219 - DNA, 25 bp, Homo sapien
cctacagattttttgtgtcaacatc

SEQ ID NO: 842220 - DNA, 25 bp, Homo sapien
gtctcccactctattcatacataag

SEQ ID NO: 842221 - DNA, 25 bp, Homo sapien
atgtctcccactctattcatacata

SEQ ID NO: 842222 - DNA, 25 bp, Homo sapien
tcccactctattcatacataagctt

SEQ ID NO: 842223 - DNA, 25 bp, Homo sapien
tctcccactctattcatacataagc

SEQ ID NO: 842224 - DNA, 25 bp, Homo sapien
gctccattgacacagggttttccag

SEQ ID NO: 842225 - DNA, 25 bp, Homo sapien
agacttccttaagccaaaagcctgc

SEQ ID NO: 842226 - DNA, 25 bp, Homo sapien
gaacccaccgggaatgctccattga

SEQ ID NO: 842227 - DNA, 25 bp, Homo sapien
tagggagtatgcagaactgaaccca

SEQ ID NO: 842228 - DNA, 25 bp, Homo sapien
tgcttgatgtcagtccataactggg

SEQ ID NO: 842229 - DNA, 25 bp, Homo sapien
ctctgcagacatggcttggttttcc

SEQ ID NO: 842230 - DNA, 25 bp, Homo sapien
ttttccagcctgatgcttgatgtca

SEQ ID NO: 842231 - DNA, 25 bp, Homo sapien
gcttggtagccactcctgcatctct

SEQ ID NO: 842232 - DNA, 25 bp, Homo sapien
agactgtctgtacccacctgagtgt

SEQ ID NO: 842233 - DNA, 25 bp, Homo sapien
gctccccaaagctgtagactgtctg

SEQ ID NO: 842234 - DNA, 25 bp, Homo sapien
caaagctgtagactgtctgtaccca

SEQ ID NO: 842235 - DNA, 25 bp, Homo sapien
tctgtacccacctgagtgtctgggc

SEQ ID NO: 842236 - DNA, 25 bp, Homo sapien
gcctacagatataattcccagcact

SEQ ID NO: 842237 - DNA, 25 bp, Homo sapien
aggaaagaggttgtgcctacagata

SEQ ID NO: 842238 - DNA, 25 bp, Homo sapien
tgtgcctacagatataattcccagc

SEQ ID NO: 842239 - DNA, 25 bp, Homo sapien
gaggttgtgcctacagatataattc

SEQ ID NO: 842240 - DNA, 25 bp, Homo sapien
gagaggctggacatcagtgcccttt

SEQ ID NO: 842241 - DNA, 25 bp, Homo sapien
catccttcccctacagggttcaaag

SEQ ID NO: 842242 - DNA, 25 bp, Homo sapien
tattgccaactatcttataggagag

SEQ ID NO: 842243 - DNA, 25 bp, Homo sapien
gagcaccccctctggatgctgaagg

SEQ ID NO: 842244 - DNA, 25 bp, Homo sapien
tgtcattgattaagtgataatgaat

SEQ ID NO: 842245 - DNA, 25 bp, Homo sapien
gtcattgattaagtgataatgaatt

SEQ ID NO: 842246 - DNA, 25 bp, Homo sapien
acgaggagcctctgaatcttcacaa

SEQ ID NO: 842247 - DNA, 25 bp, Homo sapien
ggagcctctgaatcttcacaaatca

SEQ ID NO: 842248 - DNA, 25 bp, Homo sapien
ccattgtagcacgaggagcctctga

SEQ ID NO: 842249 - DNA, 25 bp, Homo sapien
catgaacacatccattgtagcacga

SEQ ID NO: 842250 - DNA, 25 bp, Homo sapien
gctgacaaataagctgagagccagt

SEQ ID NO: 842251 - DNA, 25 bp, Homo sapien
cagacttgtgaccaactggccttca

SEQ ID NO: 842252 - DNA, 25 bp, Homo sapien
tgttacagccagagagcacgttaga

SEQ ID NO: 842253 - DNA, 25 bp, Homo sapien
tatgctcttaggacacagccaggcc

SEQ ID NO: 842254 - DNA, 25 bp, Homo sapien
gggtcaaatggtacagaaatccaat

SEQ ID NO: 842255 - DNA, 25 bp, Homo sapien
tgggtcaaatggtacagaaatccaa

SEQ ID NO: 842256 - DNA, 25 bp, Homo sapien
tatctaagccatttcacctatttgg

SEQ ID NO: 842257 - DNA, 25 bp, Homo sapien
ttagatgactgttgaccctcctttc

SEQ ID NO: 842258 - DNA, 25 bp, Homo sapien
tacaatatagatagtatcagttatc

SEQ ID NO: 842259 - DNA, 25 bp, Homo sapien
taaaaatgcatatgttctgtcattg

SEQ ID NO: 842260 - DNA, 25 bp, Homo sapien
taccttgcaccacccaggaaagtgg

SEQ ID NO: 842261 - DNA, 25 bp, Homo sapien
tgctgcggtactcagaaggatctgg

SEQ ID NO: 842262 - DNA, 25 bp, Homo sapien
catttcagagtaaggtgctgcggta

SEQ ID NO: 842263 - DNA, 25 bp, Homo sapien
tcctctgcagttgggaagtaccttg

SEQ ID NO: 842264 - DNA, 25 bp, Homo sapien
tggaaaaccaggcacaacaggaacg

SEQ ID NO: 842265 - DNA, 25 bp, Homo sapien
ttagctcgagattggaaaaccaggc

SEQ ID NO: 842266 - DNA, 25 bp, Homo sapien
caggcacaacaggaacgatctaaat

SEQ ID NO: 842267 - DNA, 25 bp, Homo sapien
cgatctaaatttaagtccccatttg

SEQ ID NO: 842268 - DNA, 25 bp, Homo sapien
ctcaacttcttcgtctgaacaatgg

SEQ ID NO: 842269 - DNA, 25 bp, Homo sapien
acttcttcgtctgaacaatggatgc

SEQ ID NO: 842270 - DNA, 25 bp, Homo sapien
tcactgcgtcatttccattcagctc

SEQ ID NO: 842271 - DNA, 25 bp, Homo sapien
caggagttgtttgggtgctcactgc

SEQ ID NO: 842272 - DNA, 25 bp, Homo sapien
tctgtagggtgagccctgtccgggc

SEQ ID NO: 842273 - DNA, 25 bp, Homo sapien
ggctgtcaatgtgaagccagctcct

SEQ ID NO: 842274 - DNA, 25 bp, Homo sapien
ggtgagccctgtccgggcagcagga

SEQ ID NO: 842275 - DNA, 25 bp, Homo sapien
caggactctggctgtcaatgtgaag

SEQ ID NO: 842276 - DNA, 25 bp, Homo sapien
tggcgctcctctcatgagcacgcag

SEQ ID NO: 842277 - DNA, 25 bp, Homo sapien
tgagcacgcagctcgtcaggtttgg

SEQ ID NO: 842278 - DNA, 25 bp, Homo sapien
ctctcatgagcacgcagctcgtcag

SEQ ID NO: 842279 - DNA, 25 bp, Homo sapien
ctgagcatggcgctcctctcatgag

SEQ ID NO: 842280 - DNA, 25 bp, Homo sapien
tccaccaaaacctggttgcacgtgt

SEQ ID NO: 842281 - DNA, 25 bp, Homo sapien
taaagtaggaatcattgatcctaaa

SEQ ID NO: 842282 - DNA, 25 bp, Homo sapien
gaatcattgatcctaaagctctctc

SEQ ID NO: 842283 - DNA, 25 bp, Homo sapien
aacctggttgcacgtgttgtacagc

SEQ ID NO: 842284 - DNA, 25 bp, Homo sapien
ctggagacgagagtgtgcaagagaa

SEQ ID NO: 842285 - DNA, 25 bp, Homo sapien
aaggcagctcaggatagaccttgcc

SEQ ID NO: 842286 - DNA, 25 bp, Homo sapien
cgagagtgtgcaagagaagagaagg

SEQ ID NO: 842287 - DNA, 25 bp, Homo sapien
cagctcaggatagaccttgcctggg

SEQ ID NO: 842288 - DNA, 25 bp, Homo sapien
caactgtgcaacagggagttgggca

SEQ ID NO: 842289 - DNA, 25 bp, Homo sapien
ggctggtgatgtagaactgagaacc

SEQ ID NO: 842290 - DNA, 25 bp, Homo sapien
ccatagatgatggtggtcacagcag

SEQ ID NO: 842291 - DNA, 25 bp, Homo sapien
atcaagatgatgcagcaactccaag

SEQ ID NO: 842292 - DNA, 25 bp, Homo sapien
cacagccacaaaaacgcatccctcc

SEQ ID NO: 842293 - DNA, 25 bp, Homo sapien
gccacaaaaacgcatccctcctctc

SEQ ID NO: 842294 - DNA, 25 bp, Homo sapien
acagccacaaaaacgcatccctcct

SEQ ID NO: 842295 - DNA, 25 bp, Homo sapien
cagccacaaaaacgcatccctcctc

SEQ ID NO: 842296 - DNA, 25 bp, Homo sapien
cctcagtgcctctgaaatgccggat

SEQ ID NO: 842297 - DNA, 25 bp, Homo sapien
gccggattctggtatatatgtgctc

SEQ ID NO: 842298 - DNA, 25 bp, Homo sapien
tcagaggtcccgtgacccctcagtg

SEQ ID NO: 842299 - DNA, 25 bp, Homo sapien
tatatatgtgctccggcagagtctg

SEQ ID NO: 842300 - DNA, 25 bp, Homo sapien
tttttaggaaggctaatctctgtcc

SEQ ID NO: 842301 - DNA, 25 bp, Homo sapien
gtgcccctcaatcacacccattagt

SEQ ID NO: 842302 - DNA, 25 bp, Homo sapien
tctctgtccttatggggagagtcag

SEQ ID NO: 842303 - DNA, 25 bp, Homo sapien
gagaacggggagtgcccctcaatca

SEQ ID NO: 842304 - DNA, 25 bp, Homo sapien
cagagaaggagcagtcataaaggta

SEQ ID NO: 842305 - DNA, 25 bp, Homo sapien
caagattagacattgacctatggcc

SEQ ID NO: 842306 - DNA, 25 bp, Homo sapien
tctgattagagctgatgacttggcc

SEQ ID NO: 842307 - DNA, 25 bp, Homo sapien
gccattagggtgattgaggtctcag

SEQ ID NO: 842308 - DNA, 25 bp, Homo sapien
caataggaactggccacaacagcca

SEQ ID NO: 842309 - DNA, 25 bp, Homo sapien
tgcaataggaactggccacaacagc

SEQ ID NO: 842310 - DNA, 25 bp, Homo sapien
gcaataggaactggccacaacagcc

SEQ ID NO: 842311 - DNA, 25 bp, Homo sapien
aataggaactggccacaacagccat

SEQ ID NO: 842312 - DNA, 25 bp, Homo sapien
ctctgggactctgcctagggtagct

SEQ ID NO: 842313 - DNA, 25 bp, Homo sapien
gggactctgcctagggtagctggcc

SEQ ID NO: 842314 - DNA, 25 bp, Homo sapien
gatctttgcatgctcaaatacagac

SEQ ID NO: 842315 - DNA, 25 bp, Homo sapien
ttctctgggactctgcctagggtag

SEQ ID NO: 842316 - DNA, 25 bp, Homo sapien
agcgtcatttccagagcgccctctg

SEQ ID NO: 842317 - DNA, 25 bp, Homo sapien
aaagcagcgtcatttccagagcgcc

SEQ ID NO: 842318 - DNA, 25 bp, Homo sapien
agcagcgtcatttccagagcgccct

SEQ ID NO: 842319 - DNA, 25 bp, Homo sapien
ctaaagcagcgtcatttccagagcg

SEQ ID NO: 842320 - DNA, 25 bp, Homo sapien
cttgaagatggggtgagaatttgct

SEQ ID NO: 842321 - DNA, 25 bp, Homo sapien
ttctttcatgaaccacatgaatgtc

SEQ ID NO: 842322 - DNA, 25 bp, Homo sapien
tttcatgaaccacatgaatgtcctc

SEQ ID NO: 842323 - DNA, 25 bp, Homo sapien
gaagatggggtgagaatttgcttta

SEQ ID NO: 842324 - DNA, 25 bp, Homo sapien
tgtctggcatgtggcgatactccca

SEQ ID NO: 842325 - DNA, 25 bp, Homo sapien
catgatagcggtcctggcatgcctt

SEQ ID NO: 842326 - DNA, 25 bp, Homo sapien
agtggactccctggtcatgatagcg

SEQ ID NO: 842327 - DNA, 25 bp, Homo sapien
taagcctctcctggatgaggtcaac

SEQ ID NO: 842328 - DNA, 25 bp, Homo sapien
tctttgttcagactcagatgtaagg

SEQ ID NO: 842329 - DNA, 25 bp, Homo sapien
tttgttcagactcagatgtaaggga

SEQ ID NO: 842330 - DNA, 25 bp, Homo sapien
tgttcagactcagatgtaagggagc

SEQ ID NO: 842331 - DNA, 25 bp, Homo sapien
gttcagactcagatgtaagggagca

SEQ ID NO: 842332 - DNA, 25 bp, Homo sapien
aaaagttgtgttgaaaaagtcattg

SEQ ID NO: 842333 - DNA, 25 bp, Homo sapien
aaaagtcattgtggctataaggtag

SEQ ID NO: 842334 - DNA, 25 bp, Homo sapien
ggacagaaggaatgacccactggga

SEQ ID NO: 842335 - DNA, 25 bp, Homo sapien
cccaagagtgaaagtggcagaatgt

SEQ ID NO: 842336 - DNA, 25 bp, Homo sapien
tctgagccgcatgactgagagtctt

SEQ ID NO: 842337 - DNA, 25 bp, Homo sapien
tccttgcctaggtggagaccaatgt

SEQ ID NO: 842338 - DNA, 25 bp, Homo sapien
tcagtggtcaaacagcagatgtcct

SEQ ID NO: 842339 - DNA, 25 bp, Homo sapien
ttcagaatgcagacaacatcgggct

SEQ ID NO: 842340 - DNA, 25 bp, Homo sapien
ggagtggccgacaggatgaccacca

SEQ ID NO: 842341 - DNA, 25 bp, Homo sapien
atgaaagctcaaagggtgtgcggct

SEQ ID NO: 842342 - DNA, 25 bp, Homo sapien
gaggaatctgcaggagttctgggtt

SEQ ID NO: 842343 - DNA, 25 bp, Homo sapien
taagtggacgaaggcaggtttcagt

SEQ ID NO: 842344 - DNA, 25 bp, Homo sapien
ggaagaagtgatgaatttgctggca

SEQ ID NO: 842345 - DNA, 25 bp, Homo sapien
ctcttgaacctaacgtgagtagtgg

SEQ ID NO: 842346 - DNA, 25 bp, Homo sapien
gagtttgtttctgccagcttaaaga

SEQ ID NO: 842347 - DNA, 25 bp, Homo sapien
catgtttccgctggctggagtttag

SEQ ID NO: 842348 - DNA, 25 bp, Homo sapien
tgcagatgtcccagtgaaaatacca

SEQ ID NO: 842349 - DNA, 25 bp, Homo sapien
actggtgtctgaggcttcaaacctt

SEQ ID NO: 842350 - DNA, 25 bp, Homo sapien
tggtgtctgaggcttcaaaccttgg

SEQ ID NO: 842351 - DNA, 25 bp, Homo sapien
cacactggtgtctgaggcttcaaac

SEQ ID NO: 842352 - DNA, 25 bp, Homo sapien
gatactttctaattgggatgactgg

SEQ ID NO: 842353 - DNA, 25 bp, Homo sapien
gggagacggcgtattttcccactga

SEQ ID NO: 842354 - DNA, 25 bp, Homo sapien
ttgatactttctaattgggatgact

SEQ ID NO: 842355 - DNA, 25 bp, Homo sapien
atactttctaattgggatgactggg

SEQ ID NO: 842356 - DNA, 25 bp, Homo sapien
aaagcacttcaactggcctgtgccg

SEQ ID NO: 842357 - DNA, 25 bp, Homo sapien
gactccagtgttacccaagtcaggg

SEQ ID NO: 842358 - DNA, 25 bp, Homo sapien
aaggccaggaatccagtcagacagc

SEQ ID NO: 842359 - DNA, 25 bp, Homo sapien
gccgtgctttgagataaaggcaagg

SEQ ID NO: 842360 - DNA, 25 bp, Homo sapien
caaatgtgtttgagagaataagcca

SEQ ID NO: 842361 - DNA, 25 bp, Homo sapien
tctctgtacttttgaacctccgtct

SEQ ID NO: 842362 - DNA, 25 bp, Homo sapien
tgaaatgaagagagtatatagaaac

SEQ ID NO: 842363 - DNA, 25 bp, Homo sapien
taagccaggggcaagagcatcttga

SEQ ID NO: 842364 - DNA, 25 bp, Homo sapien
agatttgcagttgctgtcagcactc

SEQ ID NO: 842365 - DNA, 25 bp, Homo sapien
gatttgcagttgctgtcagcactca

SEQ ID NO: 842366 - DNA, 25 bp, Homo sapien
cagatttgcagttgctgtcagcact

SEQ ID NO: 842367 - DNA, 25 bp, Homo sapien
gcaaagtgctcggaatagaaacaca

SEQ ID NO: 842368 - DNA, 25 bp, Homo sapien
tgaagtccatgaaggcatgccaagt

SEQ ID NO: 842369 - DNA, 25 bp, Homo sapien
aacacatgcccctttttacactggg

SEQ ID NO: 842370 - DNA, 25 bp, Homo sapien
catgccaagtcaaagcaaagtgctc

SEQ ID NO: 842371 - DNA, 25 bp, Homo sapien
gcgatgctgagaggctcattacgca

SEQ ID NO: 842372 - DNA, 25 bp, Homo sapien
cagctgcgatgctgagaggctcatt

SEQ ID NO: 842373 - DNA, 25 bp, Homo sapien
taggctggcagctgcgatgctgaga

SEQ ID NO: 842374 - DNA, 25 bp, Homo sapien
atgctgagaggctcattacgcagac

SEQ ID NO: 842375 - DNA, 25 bp, Homo sapien
ccctgacttgtgaaggcgtctgttc

SEQ ID NO: 842376 - DNA, 25 bp, Homo sapien
gacacagtctcaagggaagtagcca

SEQ ID NO: 842377 - DNA, 25 bp, Homo sapien
tacatctgcattagcaaagcagtgc

SEQ ID NO: 842378 - DNA, 25 bp, Homo sapien
gaagtagccaaagtgataacaaaag

SEQ ID NO: 842379 - DNA, 25 bp, Homo sapien
ggattattacaacccattaccctga

SEQ ID NO: 842380 - DNA, 25 bp, Homo sapien
ccagaggatgtaggtggattattac

SEQ ID NO: 842381 - DNA, 25 bp, Homo sapien
tctaggtctcgggtgacaggtacca

SEQ ID NO: 842382 - DNA, 25 bp, Homo sapien
ctctgaggctgcgatttctaggtct

SEQ ID NO: 842383 - DNA, 25 bp, Homo sapien
aagatgctggattccttaggttcag

SEQ ID NO: 842384 - DNA, 25 bp, Homo sapien
agaatcaaaagatgctggattcctt

SEQ ID NO: 842385 - DNA, 25 bp, Homo sapien
tggattccttaggttcagcagcttg

SEQ ID NO: 842386 - DNA, 25 bp, Homo sapien
tccttaggttcagcagcttgtcaac

SEQ ID NO: 842387 - DNA, 25 bp, Homo sapien
taaaattcatggttggcggaccaac

SEQ ID NO: 842388 - DNA, 25 bp, Homo sapien
tggcgcatagaagggctcaggtaaa

SEQ ID NO: 842389 - DNA, 25 bp, Homo sapien
actgaggtagagcacaatcaactgt

SEQ ID NO: 842390 - DNA, 25 bp, Homo sapien
gcggaccaacgcttttcataacatg

SEQ ID NO: 842391 - DNA, 25 bp, Homo sapien
gagcatgaatgactagcagcccaca

SEQ ID NO: 842392 - DNA, 25 bp, Homo sapien
tctatgaataggacggactcactgg

SEQ ID NO: 842393 - DNA, 25 bp, Homo sapien
tgcttgaagcgtctcacatgactgg

SEQ ID NO: 842394 - DNA, 25 bp, Homo sapien
gaaaaagagtcagggccttccgtgc

SEQ ID NO: 842395 - DNA, 25 bp, Homo sapien
tccacatataagcaaggatgttttc

SEQ ID NO: 842396 - DNA, 25 bp, Homo sapien
cacatataagcaaggatgttttcca

SEQ ID NO: 842397 - DNA, 25 bp, Homo sapien
ctccatccacatataagcaaggatg

SEQ ID NO: 842398 - DNA, 25 bp, Homo sapien
ccatccacatataagcaaggatgtt

SEQ ID NO: 842399 - DNA, 25 bp, Homo sapien
tgtcctcctttcaccaaccgcagcc

SEQ ID NO: 842400 - DNA, 25 bp, Homo sapien
ctgtcctcctttcaccaaccgcagc

SEQ ID NO: 842401 - DNA, 25 bp, Homo sapien
agggcccggagagcaataacaccag

SEQ ID NO: 842402 - DNA, 25 bp, Homo sapien
ccggagagcaataacaccaggcaag

SEQ ID NO: 842403 - DNA, 25 bp, Homo sapien
cacatggagggcccggagagcaata

SEQ ID NO: 842404 - DNA, 25 bp, Homo sapien
atggagggcccggagagcaataaca

SEQ ID NO: 842405 - DNA, 25 bp, Homo sapien
tagtgcctgtagtgctgcactgcag

SEQ ID NO: 842406 - DNA, 25 bp, Homo sapien
cagagccatggtcctctgacggcca

SEQ ID NO: 842407 - DNA, 25 bp, Homo sapien
tcaataccgctggattcatggcccc

SEQ ID NO: 842408 - DNA, 25 bp, Homo sapien
ggaaattctcccttctgcatgatag

SEQ ID NO: 842409 - DNA, 25 bp, Homo sapien
gctttgctcattggaaggcctgtac

SEQ ID NO: 842410 - DNA, 25 bp, Homo sapien
ttgctcattggaaggcctgtactgt

SEQ ID NO: 842411 - DNA, 25 bp, Homo sapien
tttgctcattggaaggcctgtactg

SEQ ID NO: 842412 - DNA, 25 bp, Homo sapien
ggctttgctcattggaaggcctgta

SEQ ID NO: 842413 - DNA, 25 bp, Homo sapien
tcagtagacaatggtccccacttga

SEQ ID NO: 842414 - DNA, 25 bp, Homo sapien
cacttgacatgtgatcccatctgga

SEQ ID NO: 842415 - DNA, 25 bp, Homo sapien
agactctggagtgaccgaggcctga

SEQ ID NO: 842416 - DNA, 25 bp, Homo sapien
caccaccacaagagactctggagtg

SEQ ID NO: 842417 - DNA, 25 bp, Homo sapien
tgatcacaataggagcttgtgaggc

SEQ ID NO: 842418 - DNA, 25 bp, Homo sapien
tgtcagatggaactgctgaaaccat

SEQ ID NO: 842419 - DNA, 25 bp, Homo sapien
gctgaaaccatcgtttgatcacaat

SEQ ID NO: 842420 - DNA, 25 bp, Homo sapien
atatgtgtcagatggaactgctgaa

SEQ ID NO: 842421 - DNA, 25 bp, Homo sapien
tgtcctgacattgaccatcagacac

SEQ ID NO: 842422 - DNA, 25 bp, Homo sapien
cttgtcctgacattgaccatcagac

SEQ ID NO: 842423 - DNA, 25 bp, Homo sapien
cttcttgtcctgacattgaccatca

SEQ ID NO: 842424 - DNA, 25 bp, Homo sapien
gtcctgacattgaccatcagacact

SEQ ID NO: 842425 - DNA, 25 bp, Homo sapien
caccagctccgggcacactttcctc

SEQ ID NO: 842426 - DNA, 25 bp, Homo sapien
ccaccagctccgggcacactttcct

SEQ ID NO: 842427 - DNA, 25 bp, Homo sapien
ccccaccagctccgggcacactttc

SEQ ID NO: 842428 - DNA, 25 bp, Homo sapien
agcccccaccagctccgggcacact

SEQ ID NO: 842429 - DNA, 25 bp, Homo sapien
caggcccttctctgttccacgcctg

SEQ ID NO: 842430 - DNA, 25 bp, Homo sapien
gcctggctaacccatcagctccagg

SEQ ID NO: 842431 - DNA, 25 bp, Homo sapien
ccatggctcagttggccactcagca

SEQ ID NO: 842432 - DNA, 25 bp, Homo sapien
ttccacgcctggctaacccatcagc

SEQ ID NO: 842433 - DNA, 25 bp, Homo sapien
atgaagccagccgtcattctgcgca

SEQ ID NO: 842434 - DNA, 25 bp, Homo sapien
ctgccacgtactgcataaggcctcg

SEQ ID NO: 842435 - DNA, 25 bp, Homo sapien
gaggatgatggccaccgccatgccc

SEQ ID NO: 842436 - DNA, 25 bp, Homo sapien
cagcacgccgatgatccagccaaag

SEQ ID NO: 842437 - DNA, 25 bp, Homo sapien
gtaaacaggaccctgtccactgcca

SEQ ID NO: 842438 - DNA, 25 bp, Homo sapien
cccacaagccgagcccgtagcctta

SEQ ID NO: 842439 - DNA, 25 bp, Homo sapien
tgccacccacaagccgagcccgtag

SEQ ID NO: 842440 - DNA, 25 bp, Homo sapien
attgtggtaaacaggaccctgtcca

SEQ ID NO: 842441 - DNA, 25 bp, Homo sapien
ctattcccacatagttgtgcagttc

SEQ ID NO: 842442 - DNA, 25 bp, Homo sapien
tctccttatgtagaatccctttaga

SEQ ID NO: 842443 - DNA, 25 bp, Homo sapien
tagttgtgcagttctccttatgtag

SEQ ID NO: 842444 - DNA, 25 bp, Homo sapien
tagaatccctttagagggacactgg

SEQ ID NO: 842445 - DNA, 25 bp, Homo sapien
ggacatacccagtggtcaacttcag

SEQ ID NO: 842446 - DNA, 25 bp, Homo sapien
tggtcaacttcagcttgggactgaa

SEQ ID NO: 842447 - DNA, 25 bp, Homo sapien
ccacccatctacctttgtctgaggg

SEQ ID NO: 842448 - DNA, 25 bp, Homo sapien
gatggtgatggacatacccagtggt

SEQ ID NO: 842449 - DNA, 25 bp, Homo sapien
gtttgaccagtgatgtgttccctgt

SEQ ID NO: 842450 - DNA, 25 bp, Homo sapien
tcacatctgttggtcaaccactgtc

SEQ ID NO: 842451 - DNA, 25 bp, Homo sapien
cctgtctcttgcagcataaagtatg

SEQ ID NO: 842452 - DNA, 25 bp, Homo sapien
ctcttgcagcataaagtatggagaa

SEQ ID NO: 842453 - DNA, 25 bp, Homo sapien
tgtctcttgcagcataaagtatgga

SEQ ID NO: 842454 - DNA, 25 bp, Homo sapien
tgccctgtctcttgcagcataaagt

SEQ ID NO: 842455 - DNA, 25 bp, Homo sapien
gaccctcagtactaaaagcttggat

SEQ ID NO: 842456 - DNA, 25 bp, Homo sapien
ttcccagtaataatcgaggccccat

SEQ ID NO: 842457 - DNA, 25 bp, Homo sapien
tttcccagtaataatcgaggcccca

SEQ ID NO: 842458 - DNA, 25 bp, Homo sapien
ctgggaccctcagtactaaaagctt

SEQ ID NO: 842459 - DNA, 25 bp, Homo sapien
aataagaaggcgacctgatctgtgg

SEQ ID NO: 842460 - DNA, 25 bp, Homo sapien
caggacaaataagaaggcgacctga

SEQ ID NO: 842461 - DNA, 25 bp, Homo sapien
aagaaggcgacctgatctgtggatg

SEQ ID NO: 842462 - DNA, 25 bp, Homo sapien
gacaaataagaaggcgacctgatct

SEQ ID NO: 842463 - DNA, 25 bp, Homo sapien
ttccttcatattggaagagaggaga

SEQ ID NO: 842464 - DNA, 25 bp, Homo sapien
gcaatttcatctcttgaactcttgt

SEQ ID NO: 842465 - DNA, 25 bp, Homo sapien
agaaaagtgcccagcgcaggccatc

SEQ ID NO: 842466 - DNA, 25 bp, Homo sapien
tcttgtctccaaatttaccttcttc

SEQ ID NO: 842467 - DNA, 25 bp, Homo sapien
tgacgtgcagtgtggtgtcctgaac

SEQ ID NO: 842468 - DNA, 25 bp, Homo sapien
cagactcgagaatgacgtgcagtgt

SEQ ID NO: 842469 - DNA, 25 bp, Homo sapien
ctatgcagactcgagaatgacgtgc

SEQ ID NO: 842470 - DNA, 25 bp, Homo sapien
agaatgacgtgcagtgtggtgtcct

SEQ ID NO: 842471 - DNA, 25 bp, Homo sapien
attaccacccgtgcccttggttctg

SEQ ID NO: 842472 - DNA, 25 bp, Homo sapien
cattaccacccgtgcccttggttct

SEQ ID NO: 842473 - DNA, 25 bp, Homo sapien
tcattaccacccgtgcccttggttc

SEQ ID NO: 842474 - DNA, 25 bp, Homo sapien
gattcatctggataaggctgctccc

SEQ ID NO: 842475 - DNA, 25 bp, Homo sapien
gcactgtggctttcctgaaggcttg

SEQ ID NO: 842476 - DNA, 25 bp, Homo sapien
tgctctggcgaacatgtggcactgt

SEQ ID NO: 842477 - DNA, 25 bp, Homo sapien
gaaggcttggcaggcgagtgatggg

SEQ ID NO: 842478 - DNA, 25 bp, Homo sapien
ggaggaatcagtcccttctcgacaa

SEQ ID NO: 842479 - DNA, 25 bp, Homo sapien
gtcatcatcacattccaggtcttta

SEQ ID NO: 842480 - DNA, 25 bp, Homo sapien
ttctcgacaaccactccagaggtag

SEQ ID NO: 842481 - DNA, 25 bp, Homo sapien
cacagaaagggctattggaggaatc

SEQ ID NO: 842482 - DNA, 25 bp, Homo sapien
ctgagacatgagacaagattgtgtc

SEQ ID NO: 842483 - DNA, 25 bp, Homo sapien
aacacctgtggttcatgggcctgtc

SEQ ID NO: 842484 - DNA, 25 bp, Homo sapien
gggacattggcctttattctcttaa

SEQ ID NO: 842485 - DNA, 25 bp, Homo sapien
gacgctatctgtaagttgagccttg

SEQ ID NO: 842486 - DNA, 25 bp, Homo sapien
tcactttagcagaaaggacccaagg

SEQ ID NO: 842487 - DNA, 25 bp, Homo sapien
caaggccaagaagtcaaagttacca

SEQ ID NO: 842488 - DNA, 25 bp, Homo sapien
taaggacagggaccatacaagttac

SEQ ID NO: 842489 - DNA, 25 bp, Homo sapien
gcaaaataacaaccggagtcaccca

SEQ ID NO: 842490 - DNA, 25 bp, Homo sapien
gatggacattgaaagcccttcgagg

SEQ ID NO: 842491 - DNA, 25 bp, Homo sapien
aagacttggcatactgcttctgaaa

SEQ ID NO: 842492 - DNA, 25 bp, Homo sapien
ggctgaccacatggagacgtgagca

SEQ ID NO: 842493 - DNA, 25 bp, Homo sapien
tctgtaaggccttaaaagctggagt

SEQ ID NO: 842494 - DNA, 25 bp, Homo sapien
tcattatccaatgtggccccaagga

SEQ ID NO: 842495 - DNA, 25 bp, Homo sapien
caggtcagggactaaaccagtggac

SEQ ID NO: 842496 - DNA, 25 bp, Homo sapien
tctgccttgggaatgggtctctacc

SEQ ID NO: 842497 - DNA, 25 bp, Homo sapien
ccttctgaagggacacgagttttct

SEQ ID NO: 842498 - DNA, 25 bp, Homo sapien
tatcagccctgaatggtgggtcccc

SEQ ID NO: 842499 - DNA, 25 bp, Homo sapien
tggagtagaggactgtaaggttccc

SEQ ID NO: 842500 - DNA, 25 bp, Homo sapien
tgggtccccgatctgtaaaatcagg

SEQ ID NO: 842501 - DNA, 25 bp, Homo sapien
ggtttcccacaggagtagagtcttg

SEQ ID NO: 842502 - DNA, 25 bp, Homo sapien
tggtggtaagcaatgccaggtcttg

SEQ ID NO: 842503 - DNA, 25 bp, Homo sapien
tgaacttctatctttgggtcaagct

SEQ ID NO: 842504 - DNA, 25 bp, Homo sapien
tgggcgccctagtatgcagaacagc

SEQ ID NO: 842505 - DNA, 25 bp, Homo sapien
taagcagtgccaggcataaccctgg

SEQ ID NO: 842506 - DNA, 25 bp, Homo sapien
cattctcgggtctggatttagggta

SEQ ID NO: 842507 - DNA, 25 bp, Homo sapien
tcatcagggagtccgtacaggtagc

SEQ ID NO: 842508 - DNA, 25 bp, Homo sapien
ggtcctcgggacaggttgaacagaa

SEQ ID NO: 842509 - DNA, 25 bp, Homo sapien
gacagctcaaagttgatcccggcca

SEQ ID NO: 842510 - DNA, 25 bp, Homo sapien
ggttgtctgagcatccaccgaagcg

SEQ ID NO: 842511 - DNA, 25 bp, Homo sapien
gaaggaagtccgaacaggaagagca

SEQ ID NO: 842512 - DNA, 25 bp, Homo sapien
ggaaaccgcccaaagtacacatgca

SEQ ID NO: 842513 - DNA, 25 bp, Homo sapien
tttcactgggtgtaaggcagctgga

SEQ ID NO: 842514 - DNA, 25 bp, Homo sapien
tgtcacaggagaggcaagcattgct

SEQ ID NO: 842515 - DNA, 25 bp, Homo sapien
cataatccaggtgaagagagagtcc

SEQ ID NO: 842516 - DNA, 25 bp, Homo sapien
tggcatggaaggcaaccctgctggt

SEQ ID NO: 842517 - DNA, 25 bp, Homo sapien
tattctgaatttgacccaggtgggc

SEQ ID NO: 842518 - DNA, 25 bp, Homo sapien
tcaagtatggagaagacacagtgcc

SEQ ID NO: 842519 - DNA, 25 bp, Homo sapien
tctgggttatccttcagcagcgagg

SEQ ID NO: 842520 - DNA, 25 bp, Homo sapien
tcatgaccatttggattgggcccgc

SEQ ID NO: 842521 - DNA, 25 bp, Homo sapien
taactcaggattttagggccgtcca

SEQ ID NO: 842522 - DNA, 25 bp, Homo sapien
tacttactcgttgaggccttgggaa

SEQ ID NO: 842523 - DNA, 25 bp, Homo sapien
caattaggtagggactctagctgct

SEQ ID NO: 842524 - DNA, 25 bp, Homo sapien
tagtggctaccagcataggctttgg

SEQ ID NO: 842525 - DNA, 25 bp, Homo sapien
gaagagtctacgaaggacctcagga

SEQ ID NO: 842526 - DNA, 25 bp, Homo sapien
cagccagaaactgtaccctttcctg

SEQ ID NO: 842527 - DNA, 25 bp, Homo sapien
gaaattctgcaaggccagaggccac

SEQ ID NO: 842528 - DNA, 25 bp, Homo sapien
tggaaattctgcaaggccagaggcc

SEQ ID NO: 842529 - DNA, 25 bp, Homo sapien
cacagcagccagaaactgtaccctt

SEQ ID NO: 842530 - DNA, 25 bp, Homo sapien
agagcaatgatgtttcctggtggac

SEQ ID NO: 842531 - DNA, 25 bp, Homo sapien
tatacccttgcagtggagagcctga

SEQ ID NO: 842532 - DNA, 25 bp, Homo sapien
gggagtcagcacctggtctactacg

SEQ ID NO: 842533 - DNA, 25 bp, Homo sapien
cgacaccattgggaagctcttgagg

SEQ ID NO: 842534 - DNA, 25 bp, Homo sapien
ttgaggtactcaagagagggctgcc

SEQ ID NO: 842535 - DNA, 25 bp, Homo sapien
agggctgccggcgtgaggagcagca

SEQ ID NO: 842536 - DNA, 25 bp, Homo sapien
cggcgtgaggagcagcaatgtccac

SEQ ID NO: 842537 - DNA, 25 bp, Homo sapien
ggtctggagactgcaattgaggtac

SEQ ID NO: 842538 - DNA, 25 bp, Homo sapien
tcccggactttctactgctctgcag

SEQ ID NO: 842539 - DNA, 25 bp, Homo sapien
tgctctgcaggaggatccgatgact

SEQ ID NO: 842540 - DNA, 25 bp, Homo sapien
aggaggatccgatgactgtgaccga

SEQ ID NO: 842541 - DNA, 25 bp, Homo sapien
tggtcgcacctggaagtgcctggtc

SEQ ID NO: 842542 - DNA, 25 bp, Homo sapien
ctggcgcagggctgtcgcttcacgc

SEQ ID NO: 842543 - DNA, 25 bp, Homo sapien
gactcatccagaagcgccttgggag

SEQ ID NO: 842544 - DNA, 25 bp, Homo sapien
gggctgtcgcttcacgcgccgcaga

SEQ ID NO: 842545 - DNA, 25 bp, Homo sapien
cacatcaagccgcaggtgtgggcca

SEQ ID NO: 842546 - DNA, 25 bp, Homo sapien
ggctgagcctgcttgtcagtgagat

SEQ ID NO: 842547 - DNA, 25 bp, Homo sapien
tggctgagcctgcttgtcagtgaga

SEQ ID NO: 842548 - DNA, 25 bp, Homo sapien
aacagtgactccctgaatgaaggca

SEQ ID NO: 842549 - DNA, 25 bp, Homo sapien
gcgttaagggtagctcagatttaca

SEQ ID NO: 842550 - DNA, 25 bp, Homo sapien
cacatccatgtgaaagcgttaaggg

SEQ ID NO: 842551 - DNA, 25 bp, Homo sapien
gcaatccacatttgttggttgaaga

SEQ ID NO: 842552 - DNA, 25 bp, Homo sapien
tcttcagttgttccaatgttatttc

SEQ ID NO: 842553 - DNA, 25 bp, Homo sapien
taagttaatatttgtgaactgtgtg

SEQ ID NO: 842554 - DNA, 25 bp, Homo sapien
aatatttgtgaactgtgtgaggtag

SEQ ID NO: 842555 - DNA, 25 bp, Homo sapien
gttctttttcccatatgcctctctt

SEQ ID NO: 842556 - DNA, 25 bp, Homo sapien
tcctggaagcaggatatgagacttc

SEQ ID NO: 842557 - DNA, 25 bp, Homo sapien
ccagcacttggtatgttagttttaa

SEQ ID NO: 842558 - DNA, 25 bp, Homo sapien
tgccattataaacaaaggtgcattc

SEQ ID NO: 842559 - DNA, 25 bp, Homo sapien
tattgatgactagtagcccattgca

SEQ ID NO: 842560 - DNA, 25 bp, Homo sapien
ccggctcgttcaagggaaaccgctg

SEQ ID NO: 842561 - DNA, 25 bp, Homo sapien
ctcgttcaagggaaaccgctgccgc

SEQ ID NO: 842562 - DNA, 25 bp, Homo sapien
cagattccccggctcgttcaaggga

SEQ ID NO: 842563 - DNA, 25 bp, Homo sapien
tccagattccccggctcgttcaagg

SEQ ID NO: 842564 - DNA, 25 bp, Homo sapien
gcgcgctcagtcccagcgacccgca

SEQ ID NO: 842565 - DNA, 25 bp, Homo sapien
cgctcagtcccagcgacccgcactg

SEQ ID NO: 842566 - DNA, 25 bp, Homo sapien
gcgctcagtcccagcgacccgcact

SEQ ID NO: 842567 - DNA, 25 bp, Homo sapien
ctcgcgcgctcagtcccagcgaccc

SEQ ID NO: 842568 - DNA, 25 bp, Homo sapien
gatgcttgggtccccgcggctctcg

SEQ ID NO: 842569 - DNA, 25 bp, Homo sapien
gcccagcgcgactccagaggctccg

SEQ ID NO: 842570 - DNA, 25 bp, Homo sapien
cccagcgcgactccagaggctccgc

SEQ ID NO: 842571 - DNA, 25 bp, Homo sapien
tgatgcttgggtccccgcggctctc

SEQ ID NO: 842572 - DNA, 25 bp, Homo sapien
gctgtgttccccaaaaatggtgatg

SEQ ID NO: 842573 - DNA, 25 bp, Homo sapien
gccctatccccattgagatggtatt

SEQ ID NO: 842574 - DNA, 25 bp, Homo sapien
gaacctaacctggtctagggctgag

SEQ ID NO: 842575 - DNA, 25 bp, Homo sapien
tgaggaggaaatcactaaagtaacg

SEQ ID NO: 842576 - DNA, 25 bp, Homo sapien
catgattccaaaggcccaactaatt

SEQ ID NO: 842577 - DNA, 25 bp, Homo sapien
cgtcaggctgacacatgattccaaa

SEQ ID NO: 842578 - DNA, 25 bp, Homo sapien
taattcttgaactcctctccatctg

SEQ ID NO: 842579 - DNA, 25 bp, Homo sapien
gtgaatcccatacaccgtcaggctg

SEQ ID NO: 842580 - DNA, 25 bp, Homo sapien
taaagtagatccctctaggttgtgg

SEQ ID NO: 842581 - DNA, 25 bp, Homo sapien
tttttatgactatctgttagtgagg

SEQ ID NO: 842582 - DNA, 25 bp, Homo sapien
tagtgaggtatatagaccaagaaaa

SEQ ID NO: 842583 - DNA, 25 bp, Homo sapien
gaatggtgggtgatgtttattttta

SEQ ID NO: 842584 - DNA, 25 bp, Homo sapien
ttcttccagtgatttcgaagcgttt

SEQ ID NO: 842585 - DNA, 25 bp, Homo sapien
cagtgatttcgaagcgttttaaaga

SEQ ID NO: 842586 - DNA, 25 bp, Homo sapien
tccagtgatttcgaagcgttttaaa

SEQ ID NO: 842587 - DNA, 25 bp, Homo sapien
cttccagtgatttcgaagcgtttta

SEQ ID NO: 842588 - DNA, 25 bp, Homo sapien
tgctcttgtcaactgctgcaacctg

SEQ ID NO: 842589 - DNA, 25 bp, Homo sapien
taaaagcagttgaagaggaatgagc

SEQ ID NO: 842590 - DNA, 25 bp, Homo sapien
ttctccagttgagagcagtccctgc

SEQ ID NO: 842591 - DNA, 25 bp, Homo sapien
gataaaccgaacaacctggaacata

SEQ ID NO: 842592 - DNA, 25 bp, Homo sapien
caaggtccccagtgatgcaggaata

SEQ ID NO: 842593 - DNA, 25 bp, Homo sapien
tggaaaaggcttccgacacggcttg

SEQ ID NO: 842594 - DNA, 25 bp, Homo sapien
aaaatcatgcggagacagaccagag

SEQ ID NO: 842595 - DNA, 25 bp, Homo sapien
tccgacacggcttgctgcttttaac

SEQ ID NO: 842596 - DNA, 25 bp, Homo sapien
acactgcccctactcctgctggaag

SEQ ID NO: 842597 - DNA, 25 bp, Homo sapien
cctcaacttgacctctcccactcta

SEQ ID NO: 842598 - DNA, 25 bp, Homo sapien
tactacaaaatcctccctcaacttg

SEQ ID NO: 842599 - DNA, 25 bp, Homo sapien
ctgccccaacacttcgatactattt

SEQ ID NO: 842600 - DNA, 25 bp, Homo sapien
ttcttgacaggctgctctccttagg

SEQ ID NO: 842601 - DNA, 25 bp, Homo sapien
ctgagcttcttgacaggctgctctc

SEQ ID NO: 842602 - DNA, 25 bp, Homo sapien
gacaggctgctctccttaggaggtt

SEQ ID NO: 842603 - DNA, 25 bp, Homo sapien
tgagcttcttgacaggctgctctcc

SEQ ID NO: 842604 - DNA, 25 bp, Homo sapien
cccagcgtgattcatcctgatagtg

SEQ ID NO: 842605 - DNA, 25 bp, Homo sapien
agttctactcagagttggctcccag

SEQ ID NO: 842606 - DNA, 25 bp, Homo sapien
ggctcccagcgtgattcatcctgat

SEQ ID NO: 842607 - DNA, 25 bp, Homo sapien
cctggagttctactcagagttggct

SEQ ID NO: 842608 - DNA, 25 bp, Homo sapien
tgacttttagaggtaacacttgctc

SEQ ID NO: 842609 - DNA, 25 bp, Homo sapien
gaacagctagataacaatcgctaaa

SEQ ID NO: 842610 - DNA, 25 bp, Homo sapien
ggcgtcagaactgctcttcaccaga

SEQ ID NO: 842611 - DNA, 25 bp, Homo sapien
taacagtgtacatgatatggatcag

SEQ ID NO: 842612 - DNA, 25 bp, Homo sapien
gattccacacctatggtagtaagat

SEQ ID NO: 842613 - DNA, 25 bp, Homo sapien
tatcagattccacacctatggtagt

SEQ ID NO: 842614 - DNA, 25 bp, Homo sapien
cctatggtagtaagattattcctcc

SEQ ID NO: 842615 - DNA, 25 bp, Homo sapien
tctggcctatcagattccacaccta

SEQ ID NO: 842616 - DNA, 25 bp, Homo sapien
tctaaatctgctatctccctgacag

SEQ ID NO: 842617 - DNA, 25 bp, Homo sapien
atctgctatctccctgacagttcat

SEQ ID NO: 842618 - DNA, 25 bp, Homo sapien
aatctgctatctccctgacagttca

SEQ ID NO: 842619 - DNA, 25 bp, Homo sapien
taaatctgctatctccctgacagtt

SEQ ID NO: 842620 - DNA, 25 bp, Homo sapien
tcttcacttgtgcattgggaggaat

SEQ ID NO: 842621 - DNA, 25 bp, Homo sapien
cttcacttgtgcattgggaggaatg

SEQ ID NO: 842622 - DNA, 25 bp, Homo sapien
cttcttcacttgtgcattgggagga

SEQ ID NO: 842623 - DNA, 25 bp, Homo sapien
ttcttcacttgtgcattgggaggaa

SEQ ID NO: 842624 - DNA, 25 bp, Homo sapien
gatggcctaaggatttacgtcctag

SEQ ID NO: 842625 - DNA, 25 bp, Homo sapien
tgtcctgtgtcataacaaagccata

SEQ ID NO: 842626 - DNA, 25 bp, Homo sapien
tacgtcctagcagtacagcagtcgc

SEQ ID NO: 842627 - DNA, 25 bp, Homo sapien
tagctgcctgatagtctgtgatttc

SEQ ID NO: 842628 - DNA, 25 bp, Homo sapien
gaattgttctcgacattagggacat

SEQ ID NO: 842629 - DNA, 25 bp, Homo sapien
aagccaaaaagaattgttctcgaca

SEQ ID NO: 842630 - DNA, 25 bp, Homo sapien
ggtaaatgctaccacgtgtgtctaa

SEQ ID NO: 842631 - DNA, 25 bp, Homo sapien
ctacaggtaaatgctaccacgtgtg

SEQ ID NO: 842632 - DNA, 25 bp, Homo sapien
catttctgggggcttaacccaacat

SEQ ID NO: 842633 - DNA, 25 bp, Homo sapien
taaagcactgagctagtggtactgc

SEQ ID NO: 842634 - DNA, 25 bp, Homo sapien
cccaacattaaagcactgagctagt

SEQ ID NO: 842635 - DNA, 25 bp, Homo sapien
ctagtggtactgcaaacaattctcc

SEQ ID NO: 842636 - DNA, 25 bp, Homo sapien
cacgtatagttatgcacaggccaag

SEQ ID NO: 842637 - DNA, 25 bp, Homo sapien
caccaatggcatagtctcaaagtca

SEQ ID NO: 842638 - DNA, 25 bp, Homo sapien
aaaacacagtctaggaatccaggga

SEQ ID NO: 842639 - DNA, 25 bp, Homo sapien
gagaggcttgcacaaattttcacaa

SEQ ID NO: 842640 - DNA, 25 bp, Homo sapien
taacaatagtcacatccatgccaga

SEQ ID NO: 842641 - DNA, 25 bp, Homo sapien
cttaacaatagtcacatccatgcca

SEQ ID NO: 842642 - DNA, 25 bp, Homo sapien
ttaacaatagtcacatccatgccag

SEQ ID NO: 842643 - DNA, 25 bp, Homo sapien
caaagactgacgaggatatggaaca

SEQ ID NO: 842644 - DNA, 25 bp, Homo sapien
ttatccagcaaaagcactcctaggc

SEQ ID NO: 842645 - DNA, 25 bp, Homo sapien
ggtacagccactttgaacggcagtt

SEQ ID NO: 842646 - DNA, 25 bp, Homo sapien
tatttatgtccacccgagaacctgc

SEQ ID NO: 842647 - DNA, 25 bp, Homo sapien
tgcaacaatgatcacatccgtgttt

SEQ ID NO: 842648 - DNA, 25 bp, Homo sapien
gcaacaatgatcacatccgtgtttt

SEQ ID NO: 842649 - DNA, 25 bp, Homo sapien
ctgcaacaatgatcacatccgtgtt

SEQ ID NO: 842650 - DNA, 25 bp, Homo sapien
ttcgtcgaagaacaccagtaacaac

SEQ ID NO: 842651 - DNA, 25 bp, Homo sapien
catctgttcgtcgaagaacaccagt

SEQ ID NO: 842652 - DNA, 25 bp, Homo sapien
tctgttcgtcgaagaacaccagtaa

SEQ ID NO: 842653 - DNA, 25 bp, Homo sapien
ctcatctgttcgtcgaagaacacca

SEQ ID NO: 842654 - DNA, 25 bp, Homo sapien
aatccaatgggaatcttactgaagg

SEQ ID NO: 842655 - DNA, 25 bp, Homo sapien
gggtatgactcaaactactggtctc

SEQ ID NO: 842656 - DNA, 25 bp, Homo sapien
cactttcggcaaagagggtatgact

SEQ ID NO: 842657 - DNA, 25 bp, Homo sapien
ttccactttcggcaaagagggtatg

SEQ ID NO: 842658 - DNA, 25 bp, Homo sapien
tataagagtcccacaaccaagttgg

SEQ ID NO: 842659 - DNA, 25 bp, Homo sapien
ggctgaactctgatctaggtcctcc

SEQ ID NO: 842660 - DNA, 25 bp, Homo sapien
ccctacctgacctggagacttatta

SEQ ID NO: 842661 - DNA, 25 bp, Homo sapien
gacttcccaatgaactgaaaggctg

SEQ ID NO: 842662 - DNA, 25 bp, Homo sapien
tgtcaaagctcaaattcaagattcc

SEQ ID NO: 842663 - DNA, 25 bp, Homo sapien
cgttaaccatcaggcaactgatctc

SEQ ID NO: 842664 - DNA, 25 bp, Homo sapien
tgatctctcagctatctctccattt

SEQ ID NO: 842665 - DNA, 25 bp, Homo sapien
atgtgtcacaaagcttacgttaacc

SEQ ID NO: 842666 - DNA, 25 bp, Homo sapien
ggcaagtgtggcatcagtaatatgt

SEQ ID NO: 842667 - DNA, 25 bp, Homo sapien
caatggcaagtgtggcatcagtaat

SEQ ID NO: 842668 - DNA, 25 bp, Homo sapien
tcacaatggcaagtgtggcatcagt

SEQ ID NO: 842669 - DNA, 25 bp, Homo sapien
ctttcacaatggcaagtgtggcatc

SEQ ID NO: 842670 - DNA, 25 bp, Homo sapien
gcaagacatcaagtggaactgtctc

SEQ ID NO: 842671 - DNA, 25 bp, Homo sapien
atctgcaagacatcaagtggaactg

SEQ ID NO: 842672 - DNA, 25 bp, Homo sapien
tgcaagacatcaagtggaactgtct

SEQ ID NO: 842673 - DNA, 25 bp, Homo sapien
ttgatctgcaagacatcaagtggaa

SEQ ID NO: 842674 - DNA, 25 bp, Homo sapien
tatagtctattgagtgtgcaacagc

SEQ ID NO: 842675 - DNA, 25 bp, Homo sapien
ctcacaaatgttgcaggttcggttc

SEQ ID NO: 842676 - DNA, 25 bp, Homo sapien
tagacgaattacttgtggaccaaag

SEQ ID NO: 842677 - DNA, 25 bp, Homo sapien
gtgtcttgcctccatgctgatagct

SEQ ID NO: 842678 - DNA, 25 bp, Homo sapien
tgtgtcatcaatacacagagcctgt

SEQ ID NO: 842679 - DNA, 25 bp, Homo sapien
cagcacaactcgtcataatcaaagg

SEQ ID NO: 842680 - DNA, 25 bp, Homo sapien
cagagcagagactgttgtaccacgt

SEQ ID NO: 842681 - DNA, 25 bp, Homo sapien
cagagcctgtggtaaatttgatact

SEQ ID NO: 842682 - DNA, 25 bp, Homo sapien
tcgaaggccggtcattgcaaataca

SEQ ID NO: 842683 - DNA, 25 bp, Homo sapien
ctgaaagatccccatcgaaggccgg

SEQ ID NO: 842684 - DNA, 25 bp, Homo sapien
agatccccatcgaaggccggtcatt

SEQ ID NO: 842685 - DNA, 25 bp, Homo sapien
catcgaaggccggtcattgcaaata

SEQ ID NO: 842686 - DNA, 25 bp, Homo sapien
ccaaatttattcccagaagatcact

SEQ ID NO: 842687 - DNA, 25 bp, Homo sapien
caaatttattcccagaagatcactg

SEQ ID NO: 842688 - DNA, 25 bp, Homo sapien
aattcaacctccaggcccaccaaat

SEQ ID NO: 842689 - DNA, 25 bp, Homo sapien
tccattattcacacataattcaacc

SEQ ID NO: 842690 - DNA, 25 bp, Homo sapien
tgatttttagaggcccaagatacca

SEQ ID NO: 842691 - DNA, 25 bp, Homo sapien
tttttagaggcccaagataccagta

SEQ ID NO: 842692 - DNA, 25 bp, Homo sapien
ttttagaggcccaagataccagtac

SEQ ID NO: 842693 - DNA, 25 bp, Homo sapien
cttaagagtgctgaaaaagtgggct

SEQ ID NO: 842694 - DNA, 25 bp, Homo sapien
taatcataattaagggccatgtcac

SEQ ID NO: 842695 - DNA, 25 bp, Homo sapien
aatggtaatttcacccaacccatgg

SEQ ID NO: 842696 - DNA, 25 bp, Homo sapien
tagggatattcctggccatctgtac

SEQ ID NO: 842697 - DNA, 25 bp, Homo sapien
gaggctgccaaattcgatggatact

SEQ ID NO: 842698 - DNA, 25 bp, Homo sapien
cattaagttcctgtactcttacatc

SEQ ID NO: 842699 - DNA, 25 bp, Homo sapien
cttgtcattaagttcctgtactctt

SEQ ID NO: 842700 - DNA, 25 bp, Homo sapien
tctacaatatgtcctaaaaagcccc

SEQ ID NO: 842701 - DNA, 25 bp, Homo sapien
aaaaagccccagttctggatcagcc

SEQ ID NO: 842702 - DNA, 25 bp, Homo sapien
tgtgcccagtaggacgcaagccttc

SEQ ID NO: 842703 - DNA, 25 bp, Homo sapien
taggtcccgtgtatgagatagaggc

SEQ ID NO: 842704 - DNA, 25 bp, Homo sapien
taggacgcaagccttcgtaatattc

SEQ ID NO: 842705 - DNA, 25 bp, Homo sapien
ctctctgtaggtcccgtgtatgaga

SEQ ID NO: 842706 - DNA, 25 bp, Homo sapien
agacctccgggctcacctcttggga

SEQ ID NO: 842707 - DNA, 25 bp, Homo sapien
tattccgtgttgtgatggacagttc

SEQ ID NO: 842708 - DNA, 25 bp, Homo sapien
tgtcgggtcaagctgattattccgt

SEQ ID NO: 842709 - DNA, 25 bp, Homo sapien
cctccgggctcacctcttgggaaag

SEQ ID NO: 842710 - DNA, 25 bp, Homo sapien
gtaacattcagactctggtttttgt

SEQ ID NO: 842711 - DNA, 25 bp, Homo sapien
ggtaacattcagactctggtttttg

SEQ ID NO: 842712 - DNA, 25 bp, Homo sapien
gctttgatggttcatagtttgaagc

SEQ ID NO: 842713 - DNA, 25 bp, Homo sapien
gatggttcatagtttgaagctatat

SEQ ID NO: 842714 - DNA, 25 bp, Homo sapien
gaacactaacgtcattactcttaaa

SEQ ID NO: 842715 - DNA, 25 bp, Homo sapien
gtcatcctcagctttgatggttcat

SEQ ID NO: 842716 - DNA, 25 bp, Homo sapien
gatggtgtcaggttcaatgcagata

SEQ ID NO: 842717 - DNA, 25 bp, Homo sapien
tgatggtgtcaggttcaatgcagat

SEQ ID NO: 842718 - DNA, 25 bp, Homo sapien
atggtgtcaggttcaatgcagatat

SEQ ID NO: 842719 - DNA, 25 bp, Homo sapien
ctccgggataagcaaagtgcactgg

SEQ ID NO: 842720 - DNA, 25 bp, Homo sapien
tccacgtgcagcttggggtttctca

SEQ ID NO: 842721 - DNA, 25 bp, Homo sapien
cgggataagcaaagtgcactggctg

SEQ ID NO: 842722 - DNA, 25 bp, Homo sapien
gagacactccgtgccctccacgtgc

SEQ ID NO: 842723 - DNA, 25 bp, Homo sapien
ttcaaaggctatatgaagagcctcc

SEQ ID NO: 842724 - DNA, 25 bp, Homo sapien
tgtttagcttgatatacccaaggtg

SEQ ID NO: 842725 - DNA, 25 bp, Homo sapien
tatgacatgctattgtatctgctgg

SEQ ID NO: 842726 - DNA, 25 bp, Homo sapien
atatcgaaactgtgacgccagtcac

SEQ ID NO: 842727 - DNA, 25 bp, Homo sapien
gagaatattcagaacagctcaaaca

SEQ ID NO: 842728 - DNA, 25 bp, Homo sapien
gagaagagaatattcagaacagctc

SEQ ID NO: 842729 - DNA, 25 bp, Homo sapien
gggagaagagaatattcagaacagc

SEQ ID NO: 842730 - DNA, 25 bp, Homo sapien
aagagaatattcagaacagctcaaa

SEQ ID NO: 842731 - DNA, 25 bp, Homo sapien
cttcctaggatcacagaagaactgc

SEQ ID NO: 842732 - DNA, 25 bp, Homo sapien
ttcctaggatcacagaagaactgca

SEQ ID NO: 842733 - DNA, 25 bp, Homo sapien
ccacaggcatcgcttcatactcctc

SEQ ID NO: 842734 - DNA, 25 bp, Homo sapien
tccacaggcatcgcttcatactcct

SEQ ID NO: 842735 - DNA, 25 bp, Homo sapien
gcacctgtggaggagcctagacata

SEQ ID NO: 842736 - DNA, 25 bp, Homo sapien
agttttcaacatgtaccccaggtgg

SEQ ID NO: 842737 - DNA, 25 bp, Homo sapien
taaaacatgcgctaatggaagccga

SEQ ID NO: 842738 - DNA, 25 bp, Homo sapien
cctggaattcctagcacggtcaaag

SEQ ID NO: 842739 - DNA, 25 bp, Homo sapien
tgaatgaagggtgtcaaattgttgt

SEQ ID NO: 842740 - DNA, 25 bp, Homo sapien
gaagggtgtcaaattgttgtgatat

SEQ ID NO: 842741 - DNA, 25 bp, Homo sapien
aatgaatgaagggtgtcaaattgtt

SEQ ID NO: 842742 - DNA, 25 bp, Homo sapien
aatgaagggtgtcaaattgttgtga

SEQ ID NO: 842743 - DNA, 25 bp, Homo sapien
gataggattcttggctgaaaagtgg

SEQ ID NO: 842744 - DNA, 25 bp, Homo sapien
aagatgtcgggcataatagattaca

SEQ ID NO: 842745 - DNA, 25 bp, Homo sapien
tacgataatattggttctggactga

SEQ ID NO: 842746 - DNA, 25 bp, Homo sapien
tcatccaagaattaataccgttttc

SEQ ID NO: 842747 - DNA, 25 bp, Homo sapien
gcttacatctatacagaaacaagga

SEQ ID NO: 842748 - DNA, 25 bp, Homo sapien
tacagctgaggttgaaccccatctc

SEQ ID NO: 842749 - DNA, 25 bp, Homo sapien
tccatcgaatttatgtgcttacatc

SEQ ID NO: 842750 - DNA, 25 bp, Homo sapien
tgttaacgtaattctattccatcga

SEQ ID NO: 842751 - DNA, 25 bp, Homo sapien
tagagtgtaagaacctcagggccac

SEQ ID NO: 842752 - DNA, 25 bp, Homo sapien
ggtggccgacttcccaatgcagatt

SEQ ID NO: 842753 - DNA, 25 bp, Homo sapien
ccatgcaggctttatagggaaggac

SEQ ID NO: 842754 - DNA, 25 bp, Homo sapien
aaatggtgctaatgactggctggca

SEQ ID NO: 842755 - DNA, 25 bp, Homo sapien
tctaaggccagtcagcgaatgtggg

SEQ ID NO: 842756 - DNA, 25 bp, Homo sapien
tgatgatggagacaaaagccttgct

SEQ ID NO: 842757 - DNA, 25 bp, Homo sapien
gtaatttggtggtggctgagacccc

SEQ ID NO: 842758 - DNA, 25 bp, Homo sapien
taaatgagccagagatgatccacaa

SEQ ID NO: 842759 - DNA, 25 bp, Homo sapien
cagactaatgtacacagcagggaga

SEQ ID NO: 842760 - DNA, 25 bp, Homo sapien
gataagattcttagggttcactgct

SEQ ID NO: 842761 - DNA, 25 bp, Homo sapien
ggtggttcacacatctcatctcaag

SEQ ID NO: 842762 - DNA, 25 bp, Homo sapien
ggaatagccgtcagtgcatccatgt

SEQ ID NO: 842763 - DNA, 25 bp, Homo sapien
gaagcgggagctgtatgacgtctac

SEQ ID NO: 842764 - DNA, 25 bp, Homo sapien
tcaacgagcagaggtagtggcagct

SEQ ID NO: 842765 - DNA, 25 bp, Homo sapien
tgacgtctacgtggataaccagaat

SEQ ID NO: 842766 - DNA, 25 bp, Homo sapien
ccgctgctgaagatcaacagtgctg

SEQ ID NO: 842767 - DNA, 25 bp, Homo sapien
cagcaaacaataaacctagaaaatg

SEQ ID NO: 842768 - DNA, 25 bp, Homo sapien
caagtatagagtttaatgtagtcaa

SEQ ID NO: 842769 - DNA, 25 bp, Homo sapien
ctttagaatcgtggttcaagtatag

SEQ ID NO: 842770 - DNA, 25 bp, Homo sapien
aaggacagaatcctcatattagttc

SEQ ID NO: 842771 - DNA, 25 bp, Homo sapien
cagtgtcacggctcttggacagttt

SEQ ID NO: 842772 - DNA, 25 bp, Homo sapien
tgcattcttgtaggtaagttcacca

SEQ ID NO: 842773 - DNA, 25 bp, Homo sapien
taacttatcatccagcactctgagc

SEQ ID NO: 842774 - DNA, 25 bp, Homo sapien
gcatgcatttcggtgtggtggtttc

SEQ ID NO: 842775 - DNA, 25 bp, Homo sapien
aattgtcgcacaaaggcatctctga

SEQ ID NO: 842776 - DNA, 25 bp, Homo sapien
tctctgattctgatcgtggatgaat

SEQ ID NO: 842777 - DNA, 25 bp, Homo sapien
tctgatcgtggatgaattattgcca

SEQ ID NO: 842778 - DNA, 25 bp, Homo sapien
cagggtcagttgcactgggcatctg

SEQ ID NO: 842779 - DNA, 25 bp, Homo sapien
ccttcttgtcatgtaggtgtttttc

SEQ ID NO: 842780 - DNA, 25 bp, Homo sapien
tgaattcatgcatctttttatggct

SEQ ID NO: 842781 - DNA, 25 bp, Homo sapien
ttttgcagcttggtggttaaagagg

SEQ ID NO: 842782 - DNA, 25 bp, Homo sapien
gattttgagtcatagctagaaaggt

SEQ ID NO: 842783 - DNA, 25 bp, Homo sapien
gccaaggtgcctggcataggaagag

SEQ ID NO: 842784 - DNA, 25 bp, Homo sapien
tcatcatgcaggtaacctaattaca

SEQ ID NO: 842785 - DNA, 25 bp, Homo sapien
tatatcctcttttatagtctatact

SEQ ID NO: 842786 - DNA, 25 bp, Homo sapien
gcagcaaaacgattagttactttac

SEQ ID NO: 842787 - DNA, 25 bp, Homo sapien
attatgtgcatcttcccatgtaatg

SEQ ID NO: 842788 - DNA, 25 bp, Homo sapien
ttatgtgcatcttcccatgtaatgt

SEQ ID NO: 842789 - DNA, 25 bp, Homo sapien
catgtaatgtgggtaactgttggca

SEQ ID NO: 842790 - DNA, 25 bp, Homo sapien
ttcccatgtaatgtgggtaactgtt

SEQ ID NO: 842791 - DNA, 25 bp, Homo sapien
tgtgactgtcaatgtctccagggca

SEQ ID NO: 842792 - DNA, 25 bp, Homo sapien
ggaatctggtatggcagctgatgat

SEQ ID NO: 842793 - DNA, 25 bp, Homo sapien
tggagtgtggagtgcctgttcgtgc

SEQ ID NO: 842794 - DNA, 25 bp, Homo sapien
ctgttcgtgcgggaaaatattggct

SEQ ID NO: 842795 - DNA, 25 bp, Homo sapien
gcacacaggtgtatggacgcaagga

SEQ ID NO: 842796 - DNA, 25 bp, Homo sapien
gacgcaaggatgaacgttccggccg

SEQ ID NO: 842797 - DNA, 25 bp, Homo sapien
ccacggaaccctaggtgagaaggca

SEQ ID NO: 842798 - DNA, 25 bp, Homo sapien
cagtggtgttcgcacttcagtgaca

SEQ ID NO: 842799 - DNA, 25 bp, Homo sapien
gatgagtatattgcaaacacctggg

SEQ ID NO: 842800 - DNA, 25 bp, Homo sapien
ctgaaccctggatgaactgtgtacc

SEQ ID NO: 842801 - DNA, 25 bp, Homo sapien
tactgggtccttttgcgaacaggca

SEQ ID NO: 842802 - DNA, 25 bp, Homo sapien
taaacatcccgtggagtagcaccca

SEQ ID NO: 842803 - DNA, 25 bp, Homo sapien
ccaggagtaagatgtgcaagaagcg

SEQ ID NO: 842804 - DNA, 25 bp, Homo sapien
gaagaacatgctggcctaattgtcc

SEQ ID NO: 842805 - DNA, 25 bp, Homo sapien
gagggaagttctccccttgcagaca

SEQ ID NO: 842806 - DNA, 25 bp, Homo sapien
gactaacagtggctctctgggtctc

SEQ ID NO: 842807 - DNA, 25 bp, Homo sapien
tgtcagagattcagtatcctacagg

SEQ ID NO: 842808 - DNA, 25 bp, Homo sapien
aaaggagaactcataggttaccagt

SEQ ID NO: 842809 - DNA, 25 bp, Homo sapien
atcagcaagccagatgatagatttc

SEQ ID NO: 842810 - DNA, 25 bp, Homo sapien
tctcagcctaggagtgtcttgttta

SEQ ID NO: 842811 - DNA, 25 bp, Homo sapien
tttttccgaagatgtgtcgagctca

SEQ ID NO: 842812 - DNA, 25 bp, Homo sapien
tcgagctcatgcacgttgctaaggg

SEQ ID NO: 842813 - DNA, 25 bp, Homo sapien
ggtggtgtaccctttgcctctgaat

SEQ ID NO: 842814 - DNA, 25 bp, Homo sapien
gctctatcagaagggaacgctgtga

SEQ ID NO: 842815 - DNA, 25 bp, Homo sapien
caggtgtgagcttcaaatgcttagg

SEQ ID NO: 842816 - DNA, 25 bp, Homo sapien
gtgtgagcttcaaatgcttagggcc

SEQ ID NO: 842817 - DNA, 25 bp, Homo sapien
agaaatcaccaaccggctcagcatg

SEQ ID NO: 842818 - DNA, 25 bp, Homo sapien
ttataggactctggagtgaagggat

SEQ ID NO: 842819 - DNA, 25 bp, Homo sapien
cttggcaggcagccctcccttgcct

SEQ ID NO: 842820 - DNA, 25 bp, Homo sapien
ccttgccttcctctggaccagcttc

SEQ ID NO: 842821 - DNA, 25 bp, Homo sapien
tggcaggcagccctcccttgccttc

SEQ ID NO: 842822 - DNA, 25 bp, Homo sapien
ttgccttcctctggaccagcttcct

SEQ ID NO: 842823 - DNA, 25 bp, Homo sapien
ttcatagcgggaagccatgttggtt

SEQ ID NO: 842824 - DNA, 25 bp, Homo sapien
catccagcctcttaatgcacttgta

SEQ ID NO: 842825 - DNA, 25 bp, Homo sapien
tgttggtttctcgtaaaacacatct

SEQ ID NO: 842826 - DNA, 25 bp, Homo sapien
ttctttttcatagcgggaagccatg

SEQ ID NO: 842827 - DNA, 25 bp, Homo sapien
taccacatgggggtgatgcccaagc

SEQ ID NO: 842828 - DNA, 25 bp, Homo sapien
tgcccaagcactgcgtgagcataaa

SEQ ID NO: 842829 - DNA, 25 bp, Homo sapien
ctgcccatgaggaatagtaacgtac

SEQ ID NO: 842830 - DNA, 25 bp, Homo sapien
aatgatcatgtggtcatcttctgcc

SEQ ID NO: 842831 - DNA, 25 bp, Homo sapien
gatgtccaggtgtaccatgctagag

SEQ ID NO: 842832 - DNA, 25 bp, Homo sapien
catgctagagttgtggatgtaatta

SEQ ID NO: 842833 - DNA, 25 bp, Homo sapien
aaaatgattgccagacttagtgttt

SEQ ID NO: 842834 - DNA, 25 bp, Homo sapien
gagttttggctcttcaaaatgattg

SEQ ID NO: 842835 - DNA, 25 bp, Homo sapien
aacttcttctatgactccagaggat

SEQ ID NO: 842836 - DNA, 25 bp, Homo sapien
acttcttctatgactccagaggatt

SEQ ID NO: 842837 - DNA, 25 bp, Homo sapien
tcattagccaggaagcgactatctc

SEQ ID NO: 842838 - DNA, 25 bp, Homo sapien
tttgtttattgatgttgcgtggccc

SEQ ID NO: 842839 - DNA, 25 bp, Homo sapien
gccaggaagcgactatctccttctt

SEQ ID NO: 842840 - DNA, 25 bp, Homo sapien
ttgggtttgtttattgatgttgcgt

SEQ ID NO: 842841 - DNA, 25 bp, Homo sapien
gagctcctgaggaacgtccggaaag

SEQ ID NO: 842842 - DNA, 25 bp, Homo sapien
cctgcagccactgcaattgttaatc

SEQ ID NO: 842843 - DNA, 25 bp, Homo sapien
gtgccatgcagcaccattggtgggc

SEQ ID NO: 842844 - DNA, 25 bp, Homo sapien
acccttgcggatatggtgccatgca

SEQ ID NO: 842845 - DNA, 25 bp, Homo sapien
ctctgttcggcatcaggttggatca

SEQ ID NO: 842846 - DNA, 25 bp, Homo sapien
cagggaaggccggagaactgtattt

SEQ ID NO: 842847 - DNA, 25 bp, Homo sapien
tctgttcggcatcaggttggatcat

SEQ ID NO: 842848 - DNA, 25 bp, Homo sapien
gttcggcatcaggttggatcatgtt

SEQ ID NO: 842849 - DNA, 25 bp, Homo sapien
tgcaatcgatgagccccacgctggg

SEQ ID NO: 842850 - DNA, 25 bp, Homo sapien
cggagtgcaatcgatgagccccacg

SEQ ID NO: 842851 - DNA, 25 bp, Homo sapien
gagtgcaatcgatgagccccacgct

SEQ ID NO: 842852 - DNA, 25 bp, Homo sapien
agtgcaatcgatgagccccacgctg

SEQ ID NO: 842853 - DNA, 25 bp, Homo sapien
cagtgtcaccatgatgggtatatcc

SEQ ID NO: 842854 - DNA, 25 bp, Homo sapien
cccagtgtcaccatgatgggtatat

SEQ ID NO: 842855 - DNA, 25 bp, Homo sapien
accatgatgggtatatccctggggt

SEQ ID NO: 842856 - DNA, 25 bp, Homo sapien
caccatgatgggtatatccctgggg

SEQ ID NO: 842857 - DNA, 25 bp, Homo sapien
aagaccttgcactctttcctcccac

SEQ ID NO: 842858 - DNA, 25 bp, Homo sapien
gagttcttaaggggaagattactca

SEQ ID NO: 842859 - DNA, 25 bp, Homo sapien
atgagttcttaaggggaagattact

SEQ ID NO: 842860 - DNA, 25 bp, Homo sapien
tgcaaaatgagttcttaaggggaag

SEQ ID NO: 842861 - DNA, 25 bp, Homo sapien
caaaatgagttcttaaggggaagat

SEQ ID NO: 842862 - DNA, 25 bp, Homo sapien
taaaaggttggctggtgcagaatga

SEQ ID NO: 842863 - DNA, 25 bp, Homo sapien
acagtaaaaggttggctggtgcaga

SEQ ID NO: 842864 - DNA, 25 bp, Homo sapien
aggttctacagtaaaaggttggctg

SEQ ID NO: 842865 - DNA, 25 bp, Homo sapien
tctacagtaaaaggttggctggtgc

SEQ ID NO: 842866 - DNA, 25 bp, Homo sapien
gaagacaaagccttactagctttag

SEQ ID NO: 842867 - DNA, 25 bp, Homo sapien
gctttaggatcttggctataaatgg

SEQ ID NO: 842868 - DNA, 25 bp, Homo sapien
taagttattgatcagtggcattagg

SEQ ID NO: 842869 - DNA, 25 bp, Homo sapien
caattattgtgtctgggacccttga

SEQ ID NO: 842870 - DNA, 25 bp, Homo sapien
ggaactgtgaagctgagacttgcca

SEQ ID NO: 842871 - DNA, 25 bp, Homo sapien
taggaacagcatcatataacctggg

SEQ ID NO: 842872 - DNA, 25 bp, Homo sapien
tccataggccaaaccaagggctgtt

SEQ ID NO: 842873 - DNA, 25 bp, Homo sapien
tttctatgtacaacgagtccctggg

SEQ ID NO: 842874 - DNA, 25 bp, Homo sapien
agcccagccacgcaggggatcactt

SEQ ID NO: 842875 - DNA, 25 bp, Homo sapien
tgacgatctaacccgagcagcccag

SEQ ID NO: 842876 - DNA, 25 bp, Homo sapien
caggggatcacttccggcgcacagg

SEQ ID NO: 842877 - DNA, 25 bp, Homo sapien
ctgacgatctaacccgagcagccca

SEQ ID NO: 842878 - DNA, 25 bp, Homo sapien
cttcgcgctggctatcccttcctcc

SEQ ID NO: 842879 - DNA, 25 bp, Homo sapien
aaacacctcccgacccacgcaggat

SEQ ID NO: 842880 - DNA, 25 bp, Homo sapien
ggatcacgcgcagccaaaacacacg

SEQ ID NO: 842881 - DNA, 25 bp, Homo sapien
aaaacacacgactccagcacttcct

SEQ ID NO: 842882 - DNA, 25 bp, Homo sapien
cctccgcacgactgatgaaagggcc

SEQ ID NO: 842883 - DNA, 25 bp, Homo sapien
ctggaaggaaatcacgcggtcctcc

SEQ ID NO: 842884 - DNA, 25 bp, Homo sapien
gcggtcctccgcacgactgatgaaa

SEQ ID NO: 842885 - DNA, 25 bp, Homo sapien
ggaaatcacgcggtcctccgcacga

SEQ ID NO: 842886 - DNA, 25 bp, Homo sapien
taaatattagcatcaccaagggact

SEQ ID NO: 842887 - DNA, 25 bp, Homo sapien
ctccgttaacaaagaccaagcagcg

SEQ ID NO: 842888 - DNA, 25 bp, Homo sapien
tatgcaagctcccttagagcagaga

SEQ ID NO: 842889 - DNA, 25 bp, Homo sapien
taatgcatagtaaggcctccataaa

SEQ ID NO: 842890 - DNA, 25 bp, Homo sapien
aatttttatgcactccaattttgtg

SEQ ID NO: 842891 - DNA, 25 bp, Homo sapien
ttttatgcactccaattttgtgacc

SEQ ID NO: 842892 - DNA, 25 bp, Homo sapien
tacaactcaccagtcctaaattcct

SEQ ID NO: 842893 - DNA, 25 bp, Homo sapien
ggcaaaagtacaactcaccagtcct

SEQ ID NO: 842894 - DNA, 25 bp, Homo sapien
ttcttttcttacagtctaatcttta

SEQ ID NO: 842895 - DNA, 25 bp, Homo sapien
ttttcttacagtctaatctttaggc

SEQ ID NO: 842896 - DNA, 25 bp, Homo sapien
cttacagtctaatctttaggctttt

SEQ ID NO: 842897 - DNA, 25 bp, Homo sapien
tttcttacagtctaatctttaggct

SEQ ID NO: 842898 - DNA, 25 bp, Homo sapien
gagagctagccattctatcagagaa

SEQ ID NO: 842899 - DNA, 25 bp, Homo sapien
tataaaccgctcatgcgagggatct

SEQ ID NO: 842900 - DNA, 25 bp, Homo sapien
tggtgaccactgagacttgagatgc

SEQ ID NO: 842901 - DNA, 25 bp, Homo sapien
gaggaacgtttagcaacacaggagg

SEQ ID NO: 842902 - DNA, 25 bp, Homo sapien
ctaagagttgctgccaagtattttc

SEQ ID NO: 842903 - DNA, 25 bp, Homo sapien
attttcaaaatccagctttcattag

SEQ ID NO: 842904 - DNA, 25 bp, Homo sapien
tattttcaaaatccagctttcatta

SEQ ID NO: 842905 - DNA, 25 bp, Homo sapien
agagttgctgccaagtattttcaaa

SEQ ID NO: 842906 - DNA, 25 bp, Homo sapien
aactggtagttgtttcggactcatg

SEQ ID NO: 842907 - DNA, 25 bp, Homo sapien
tggtagttgtttcggactcatgtct

SEQ ID NO: 842908 - DNA, 25 bp, Homo sapien
caaactggtagttgtttcggactca

SEQ ID NO: 842909 - DNA, 25 bp, Homo sapien
tagttgtttcggactcatgtcttac

SEQ ID NO: 842910 - DNA, 25 bp, Homo sapien
cacatctcattagttgctagagaaa

SEQ ID NO: 842911 - DNA, 25 bp, Homo sapien
ccctgatcgccacatctcattagtt

SEQ ID NO: 842912 - DNA, 25 bp, Homo sapien
gacagggtcctgacccactcgccca

SEQ ID NO: 842913 - DNA, 25 bp, Homo sapien
tgacccactcgcccaagtaagtgca

SEQ ID NO: 842914 - DNA, 25 bp, Homo sapien
atattgatatgccacgtctctgagg

SEQ ID NO: 842915 - DNA, 25 bp, Homo sapien
tgatatgccacgtctctgaggcctg

SEQ ID NO: 842916 - DNA, 25 bp, Homo sapien
tcacatattgatatgccacgtctct

SEQ ID NO: 842917 - DNA, 25 bp, Homo sapien
tactgatattctgtgccatgttgtc

SEQ ID NO: 842918 - DNA, 25 bp, Homo sapien
gctttataagagtcaggtcagggtg

SEQ ID NO: 842919 - DNA, 25 bp, Homo sapien
gaaacagagtgtccaaacagacttg

SEQ ID NO: 842920 - DNA, 25 bp, Homo sapien
cacttctcaaggttcaggattagga

SEQ ID NO: 842921 - DNA, 25 bp, Homo sapien
tgtcagctatttctcttacggaagt

SEQ ID NO: 842922 - DNA, 25 bp, Homo sapien
tgttgttgcttgtcgcctcacatta

SEQ ID NO: 842923 - DNA, 25 bp, Homo sapien
ctatgattgttgttgcttgtcgcct

SEQ ID NO: 842924 - DNA, 25 bp, Homo sapien
tgtattcaccatagtctattttccc

SEQ ID NO: 842925 - DNA, 25 bp, Homo sapien
tgcttgtcgcctcacattattttta

SEQ ID NO: 842926 - DNA, 25 bp, Homo sapien
ttctcaacaataagtactgggatgg

SEQ ID NO: 842927 - DNA, 25 bp, Homo sapien
gggataaatgtacaaactcttagca

SEQ ID NO: 842928 - DNA, 25 bp, Homo sapien
gacatcttctagtgagttgccttaa

SEQ ID NO: 842929 - DNA, 25 bp, Homo sapien
taaccctagttagttacagtgtagc

SEQ ID NO: 842930 - DNA, 25 bp, Homo sapien
ttatcttggcatacgcttcttcctg

SEQ ID NO: 842931 - DNA, 25 bp, Homo sapien
tcttggcatacgcttcttcctggtt

SEQ ID NO: 842932 - DNA, 25 bp, Homo sapien
tcttatcttggcatacgcttcttcc

SEQ ID NO: 842933 - DNA, 25 bp, Homo sapien
tatcttggcatacgcttcttcctgg

SEQ ID NO: 842934 - DNA, 25 bp, Homo sapien
gttccgaataaatctgcacactcac

SEQ ID NO: 842935 - DNA, 25 bp, Homo sapien
ggttccgaataaatctgcacactca

SEQ ID NO: 842936 - DNA, 25 bp, Homo sapien
attttagcaatttactcaagaagtg

SEQ ID NO: 842937 - DNA, 25 bp, Homo sapien
gagtccatatgtggccctgttagca

SEQ ID NO: 842938 - DNA, 25 bp, Homo sapien
gattccacgacactaggcagcacat

SEQ ID NO: 842939 - DNA, 25 bp, Homo sapien
taggcactggctgcttttcgaacaa

SEQ ID NO: 842940 - DNA, 25 bp, Homo sapien
ttgcaatggtcaggcagattccacg

SEQ ID NO: 842941 - DNA, 25 bp, Homo sapien
tctctttcgtctggtcactcagaaa

SEQ ID NO: 842942 - DNA, 25 bp, Homo sapien
tactccttctctttcgtctggtcac

SEQ ID NO: 842943 - DNA, 25 bp, Homo sapien
tccttctctttcgtctggtcactca

SEQ ID NO: 842944 - DNA, 25 bp, Homo sapien
tcgtctggtcactcagaaatataat

SEQ ID NO: 842945 - DNA, 25 bp, Homo sapien
tgatggccaaagaagaatcatcctt

SEQ ID NO: 842946 - DNA, 25 bp, Homo sapien
gatggccaaagaagaatcatccttt

SEQ ID NO: 842947 - DNA, 25 bp, Homo sapien
caaatgatggccaaagaagaatcat

SEQ ID NO: 842948 - DNA, 25 bp, Homo sapien
aatgatggccaaagaagaatcatcc

SEQ ID NO: 842949 - DNA, 25 bp, Homo sapien
ccttggaagccataaagattataca

SEQ ID NO: 842950 - DNA, 25 bp, Homo sapien
acatgacttggaaatgagactgtac

SEQ ID NO: 842951 - DNA, 25 bp, Homo sapien
tatacatgacttggaaatgagactg

SEQ ID NO: 842952 - DNA, 25 bp, Homo sapien
taattcttgtccttggaagccataa

SEQ ID NO: 842953 - DNA, 25 bp, Homo sapien
tgtacatagaaaccacccttagaag

SEQ ID NO: 842954 - DNA, 25 bp, Homo sapien
tgtatacaaaaaccaggagaccttc

SEQ ID NO: 842955 - DNA, 25 bp, Homo sapien
gccataacagatagtagctaccaag

SEQ ID NO: 842956 - DNA, 25 bp, Homo sapien
aaaggagagcgagaacgacagtcag

SEQ ID NO: 842957 - DNA, 25 bp, Homo sapien
ttcatcaatgctactaatgaaactg

SEQ ID NO: 842958 - DNA, 25 bp, Homo sapien
gttagacactaaccactgctcagca

SEQ ID NO: 842959 - DNA, 25 bp, Homo sapien
aaaagatatgaagaaggtaggttag

SEQ ID NO: 842960 - DNA, 25 bp, Homo sapien
tagtcttaaagatgtttaggttaga

SEQ ID NO: 842961 - DNA, 25 bp, Homo sapien
catcacctggagatgaacgatttca

SEQ ID NO: 842962 - DNA, 25 bp, Homo sapien
gagaaagatagaatagaaccacagc

SEQ ID NO: 842963 - DNA, 25 bp, Homo sapien
ctgacagaggttgttaagaggatcc

SEQ ID NO: 842964 - DNA, 25 bp, Homo sapien
ctaaggctctaagggaggcactgac

SEQ ID NO: 842965 - DNA, 25 bp, Homo sapien
ttaggcagccctgatctttgttctt

SEQ ID NO: 842966 - DNA, 25 bp, Homo sapien
agcaattaggcagccctgatctttg

SEQ ID NO: 842967 - DNA, 25 bp, Homo sapien
attaggcagccctgatctttgttct

SEQ ID NO: 842968 - DNA, 25 bp, Homo sapien
gtcagcaattaggcagccctgatct

SEQ ID NO: 842969 - DNA, 25 bp, Homo sapien
gcagaatgatcctcaagagtgccag

SEQ ID NO: 842970 - DNA, 25 bp, Homo sapien
tggcgattttcaggcagtagaggac

SEQ ID NO: 842971 - DNA, 25 bp, Homo sapien
cattgatcagagatgcggtactacc

SEQ ID NO: 842972 - DNA, 25 bp, Homo sapien
taccacaggataagagcagtgcacc

SEQ ID NO: 842973 - DNA, 25 bp, Homo sapien
caggtaccacagagtcccaagaaca

SEQ ID NO: 842974 - DNA, 25 bp, Homo sapien
ccagggacacaattaagggaggcag

SEQ ID NO: 842975 - DNA, 25 bp, Homo sapien
tcttgtgggcctcagtggttggatc

SEQ ID NO: 842976 - DNA, 25 bp, Homo sapien
gaaaatgggtcccttggatccaggc

SEQ ID NO: 842977 - DNA, 25 bp, Homo sapien
cagcagtgcatcaggcatcctagga

SEQ ID NO: 842978 - DNA, 25 bp, Homo sapien
tcaactcagcatctaatgagggcct

SEQ ID NO: 842979 - DNA, 25 bp, Homo sapien
cacaaggagcgcaataggagtgttc

SEQ ID NO: 842980 - DNA, 25 bp, Homo sapien
tcaggaggcgcacttgatccagttt

SEQ ID NO: 842981 - DNA, 25 bp, Homo sapien
aggcaataattaatagcttaccaac

SEQ ID NO: 842982 - DNA, 25 bp, Homo sapien
aggctctgaaattgaggcaataatt

SEQ ID NO: 842983 - DNA, 25 bp, Homo sapien
gaggcaataattaatagcttaccaa

SEQ ID NO: 842984 - DNA, 25 bp, Homo sapien
attgaggcaataattaatagcttac

SEQ ID NO: 842985 - DNA, 25 bp, Homo sapien
ttattactgtacctgaactgtatgg

SEQ ID NO: 842986 - DNA, 25 bp, Homo sapien
tgtacctgaactgtatggcctgcac

SEQ ID NO: 842987 - DNA, 25 bp, Homo sapien
tctcttattactgtacctgaactgt

SEQ ID NO: 842988 - DNA, 25 bp, Homo sapien
tactgtacctgaactgtatggcctg

SEQ ID NO: 842989 - DNA, 25 bp, Homo sapien
taataaacagattcataatgattcc

SEQ ID NO: 842990 - DNA, 25 bp, Homo sapien
gattcataatgattcctacaaaatt

SEQ ID NO: 842991 - DNA, 25 bp, Homo sapien
taatagcagagaaatagaataaccg

SEQ ID NO: 842992 - DNA, 25 bp, Homo sapien
cagagaaatagaataaccgaagcat

SEQ ID NO: 842993 - DNA, 25 bp, Homo sapien
tatggcttttgacccaagttttgca

SEQ ID NO: 842994 - DNA, 25 bp, Homo sapien
gaagaggagattctatggcttttga

SEQ ID NO: 842995 - DNA, 25 bp, Homo sapien
ttgacccaagttttgcaattgacca

SEQ ID NO: 842996 - DNA, 25 bp, Homo sapien
gagattctatggcttttgacccaag

SEQ ID NO: 842997 - DNA, 25 bp, Homo sapien
gacctttccgtatttgaagagacga

SEQ ID NO: 842998 - DNA, 25 bp, Homo sapien
tatttctcgtagtcacaagttcagg

SEQ ID NO: 842999 - DNA, 25 bp, Homo sapien
tggctaagcgtgatgtacaggcaag

SEQ ID NO: 843000 - DNA, 25 bp, Homo sapien
ggagatattccgcttcagcaggaga

SEQ ID NO: 843001 - DNA, 25 bp, Homo sapien
gcacttgcctttgaccttaagctgg

SEQ ID NO: 843002 - DNA, 25 bp, Homo sapien
tttcggtcagtccagtggctcccag

SEQ ID NO: 843003 - DNA, 25 bp, Homo sapien
cagaacaagcctagaaaccttaggg

SEQ ID NO: 843004 - DNA, 25 bp, Homo sapien
tactattacccagcaagtgtgagga

SEQ ID NO: 843005 - DNA, 25 bp, Homo sapien
ctgatgaacacgtactgctgctggc

SEQ ID NO: 843006 - DNA, 25 bp, Homo sapien
gggcatcagcaatcctagggcagcc

SEQ ID NO: 843007 - DNA, 25 bp, Homo sapien
gaatcaggaggtgccctgcttcagt

SEQ ID NO: 843008 - DNA, 25 bp, Homo sapien
ggtctctctgctgaatcaggaggtg

SEQ ID NO: 843009 - DNA, 25 bp, Homo sapien
tccaattaaaccgatgagaaattca

SEQ ID NO: 843010 - DNA, 25 bp, Homo sapien
gaaacaagcttaagtccaaaatgat

SEQ ID NO: 843011 - DNA, 25 bp, Homo sapien
gaggaccagttgaattttctgatcc

SEQ ID NO: 843012 - DNA, 25 bp, Homo sapien
ggcccaggataatgaggttatatga

SEQ ID NO: 843013 - DNA, 25 bp, Homo sapien
gaaggtggcaaaccataagctggcc

SEQ ID NO: 843014 - DNA, 25 bp, Homo sapien
taagatagcgaagccaacggctgct

SEQ ID NO: 843015 - DNA, 25 bp, Homo sapien
ttcaaagggataccgaatgctgctg

SEQ ID NO: 843016 - DNA, 25 bp, Homo sapien
caggtactgccagctttcaaaggga

SEQ ID NO: 843017 - DNA, 25 bp, Homo sapien
tgccatgagtgtctcccagatgaag

SEQ ID NO: 843018 - DNA, 25 bp, Homo sapien
agcgcagtgatgtgagccttggccc

SEQ ID NO: 843019 - DNA, 25 bp, Homo sapien
tgacaagtctgcttcaccctaggaa

SEQ ID NO: 843020 - DNA, 25 bp, Homo sapien
taggaatccccatgatcaatatgag

SEQ ID NO: 843021 - DNA, 25 bp, Homo sapien
atgggccccagcatctccgagcaca

SEQ ID NO: 843022 - DNA, 25 bp, Homo sapien
ggccccagcatctccgagcacacac

SEQ ID NO: 843023 - DNA, 25 bp, Homo sapien
tgggccccagcatctccgagcacac

SEQ ID NO: 843024 - DNA, 25 bp, Homo sapien
tcatgggccccagcatctccgagca

SEQ ID NO: 843025 - DNA, 25 bp, Homo sapien
caacacaccaggctaattttttgta

SEQ ID NO: 843026 - DNA, 25 bp, Homo sapien
gtgcccgccaacacaccaggctaat

SEQ ID NO: 843027 - DNA, 25 bp, Homo sapien
ttacaagttcatgatcctgggcaaa

SEQ ID NO: 843028 - DNA, 25 bp, Homo sapien
gctccatctgcattatttacaagtt

SEQ ID NO: 843029 - DNA, 25 bp, Homo sapien
tcaaaaaatttgggtctgctccatc

SEQ ID NO: 843030 - DNA, 25 bp, Homo sapien
gcacaagactcggagtcaaaaaatt

SEQ ID NO: 843031 - DNA, 25 bp, Homo sapien
gcagatcataaactttgatctgttg

SEQ ID NO: 843032 - DNA, 25 bp, Homo sapien
tcagttagcataatggtcctcctgg

SEQ ID NO: 843033 - DNA, 25 bp, Homo sapien
tatatccaccacctcacaattatct

SEQ ID NO: 843034 - DNA, 25 bp, Homo sapien
tgattccataccttgtcactaagaa

SEQ ID NO: 843035 - DNA, 25 bp, Homo sapien
taatgcttactcagccattttacct

SEQ ID NO: 843036 - DNA, 25 bp, Homo sapien
agaggccttgacctctgtctttaga

SEQ ID NO: 843037 - DNA, 25 bp, Homo sapien
gtaaaaagaggccttgacctctgtc

SEQ ID NO: 843038 - DNA, 25 bp, Homo sapien
tttagatttacagtctaatgcttac

SEQ ID NO: 843039 - DNA, 25 bp, Homo sapien
ttcaacgtgacaaatcacctccggg

SEQ ID NO: 843040 - DNA, 25 bp, Homo sapien
attcaacgtgacaaatcacctccgg

SEQ ID NO: 843041 - DNA, 25 bp, Homo sapien
tcaacgtgacaaatcacctccgggc

SEQ ID NO: 843042 - DNA, 25 bp, Homo sapien
ctagattggtggaattcaaacccac

SEQ ID NO: 843043 - DNA, 25 bp, Homo sapien
agattggtggaattcaaacccacga

SEQ ID NO: 843044 - DNA, 25 bp, Homo sapien
tagttaacagctaaacaccctaatc

SEQ ID NO: 843045 - DNA, 25 bp, Homo sapien
aacaccctaatcaactggcttcaat

SEQ ID NO: 843046 - DNA, 25 bp, Homo sapien
ttctgcatcagttgaatgcaaatca

SEQ ID NO: 843047 - DNA, 25 bp, Homo sapien
catcagttgaatgcaaatcaaccac

SEQ ID NO: 843048 - DNA, 25 bp, Homo sapien
actgccagactctattctgcatcag

SEQ ID NO: 843049 - DNA, 25 bp, Homo sapien
tgcaaatcaaccactttaactaagc

SEQ ID NO: 843050 - DNA, 25 bp, Homo sapien
aacattctccatgctacctactaca

SEQ ID NO: 843051 - DNA, 25 bp, Homo sapien
gagaattcaacattctccatgctac

SEQ ID NO: 843052 - DNA, 25 bp, Homo sapien
tacccctgagaattcaacattctcc

SEQ ID NO: 843053 - DNA, 25 bp, Homo sapien
tccatgctacctactacaccacgtc

SEQ ID NO: 843054 - DNA, 25 bp, Homo sapien
agccccttttgatctaacaggagag

SEQ ID NO: 843055 - DNA, 25 bp, Homo sapien
gagccccttttgatctaacaggaga

SEQ ID NO: 843056 - DNA, 25 bp, Homo sapien
gctagaaaacctccttgaattctgt

SEQ ID NO: 843057 - DNA, 25 bp, Homo sapien
aacagctagaaaacctccttgaatt

SEQ ID NO: 843058 - DNA, 25 bp, Homo sapien
cttgaattctgtggtctggtcctca

SEQ ID NO: 843059 - DNA, 25 bp, Homo sapien
ctgttcagtcaaacagctagaaaac

SEQ ID NO: 843060 - DNA, 25 bp, Homo sapien
gacttgcatcacctcagcatcggtg

SEQ ID NO: 843061 - DNA, 25 bp, Homo sapien
cccacactgactatacaggatctta

SEQ ID NO: 843062 - DNA, 25 bp, Homo sapien
tgactatacaggatcttaccatcac

SEQ ID NO: 843063 - DNA, 25 bp, Homo sapien
catcggtggggttctgacccaggac

SEQ ID NO: 843064 - DNA, 25 bp, Homo sapien
ggacaagctcttcacagttgatgca

SEQ ID NO: 843065 - DNA, 25 bp, Homo sapien
caaggacttgctagatttcagtgcc

SEQ ID NO: 843066 - DNA, 25 bp, Homo sapien
catttggcaccccatggacaagctc

SEQ ID NO: 843067 - DNA, 25 bp, Homo sapien
cataatcctcataggctctggtccc

SEQ ID NO: 843068 - DNA, 25 bp, Homo sapien
catatacatgcaagatccgatagct

SEQ ID NO: 843069 - DNA, 25 bp, Homo sapien
tagaactggctgaaccatatgagga

SEQ ID NO: 843070 - DNA, 25 bp, Homo sapien
caataggtaacccaaggaaagcagt

SEQ ID NO: 843071 - DNA, 25 bp, Homo sapien
gaattcacgtgaacctgaagagcat

SEQ ID NO: 843072 - DNA, 25 bp, Homo sapien
tacacccggagatatacttgcagat

SEQ ID NO: 843073 - DNA, 25 bp, Homo sapien
cagcaatactcttcgaaacagcaca

SEQ ID NO: 843074 - DNA, 25 bp, Homo sapien
tatactctggaggtatacacccgga

SEQ ID NO: 843075 - DNA, 25 bp, Homo sapien
tattggaagaactcagattactgga

SEQ ID NO: 843076 - DNA, 25 bp, Homo sapien
ctgggtgcttggaagcagcaacccc

SEQ ID NO: 843077 - DNA, 25 bp, Homo sapien
tgccaactccgaggtacccaaagaa

SEQ ID NO: 843078 - DNA, 25 bp, Homo sapien
ttaatgccaactccgaggtacccaa

SEQ ID NO: 843079 - DNA, 25 bp, Homo sapien
ccattaatgccaactccgaggtacc

SEQ ID NO: 843080 - DNA, 25 bp, Homo sapien
actcccattaatgccaactccgagg

SEQ ID NO: 843081 - DNA, 25 bp, Homo sapien
catccagacacatgtgctgctgttc

SEQ ID NO: 843082 - DNA, 25 bp, Homo sapien
atgaccatccagacacatgtgctgc

SEQ ID NO: 843083 - DNA, 25 bp, Homo sapien
ccagacacatgtgctgctgttcata

SEQ ID NO: 843084 - DNA, 25 bp, Homo sapien
gaccatccagacacatgtgctgctg

SEQ ID NO: 843085 - DNA, 25 bp, Homo sapien
gacgctatccggttatacttggctg

SEQ ID NO: 843086 - DNA, 25 bp, Homo sapien
tccggttatacttggctgcctgtgt

SEQ ID NO: 843087 - DNA, 25 bp, Homo sapien
taaattctgaggagttgatagcagt

SEQ ID NO: 843088 - DNA, 25 bp, Homo sapien
aaaaccagcagtgacgctatccggt

SEQ ID NO: 843089 - DNA, 25 bp, Homo sapien
tatgctggctctgacaaataggaga

SEQ ID NO: 843090 - DNA, 25 bp, Homo sapien
gaccctgcatcctgagtaacttaga

SEQ ID NO: 843091 - DNA, 25 bp, Homo sapien
gggttcagcccatgtcctaaataca

SEQ ID NO: 843092 - DNA, 25 bp, Homo sapien
gctttggtctcggtctaacagtaaa

SEQ ID NO: 843093 - DNA, 25 bp, Homo sapien
cactgtcactgcatacaagaggaag

SEQ ID NO: 843094 - DNA, 25 bp, Homo sapien
aagaaggtcgcaaataggatacggc

SEQ ID NO: 843095 - DNA, 25 bp, Homo sapien
ttcagtggcgctagagtaattcccc

SEQ ID NO: 843096 - DNA, 25 bp, Homo sapien
aggatacggcatacttcttgggagc

SEQ ID NO: 843097 - DNA, 25 bp, Homo sapien
ggataccttgagcaattgtcctcgg

SEQ ID NO: 843098 - DNA, 25 bp, Homo sapien
gtcctcacaggataccttgagcaat

SEQ ID NO: 843099 - DNA, 25 bp, Homo sapien
aaaacccatgacacaattatcaccc

SEQ ID NO: 843100 - DNA, 25 bp, Homo sapien
ttgtcctcggtcacaataaaaatga

SEQ ID NO: 843101 - DNA, 25 bp, Homo sapien
tgttatactcggctgcctgcgttta

SEQ ID NO: 843102 - DNA, 25 bp, Homo sapien
gttatactcggctgcctgcgtttac

SEQ ID NO: 843103 - DNA, 25 bp, Homo sapien
ctgttatactcggctgcctgcgttt

SEQ ID NO: 843104 - DNA, 25 bp, Homo sapien
ccaaaggcctgtatgaatttgtcat

SEQ ID NO: 843105 - DNA, 25 bp, Homo sapien
gaatttgtcattcctcagggtgaag

SEQ ID NO: 843106 - DNA, 25 bp, Homo sapien
atgaatttgtcattcctcagggtga

SEQ ID NO: 843107 - DNA, 25 bp, Homo sapien
tctccaaaggcctgtatgaatttgt

SEQ ID NO: 843108 - DNA, 25 bp, Homo sapien
gtatagtgctgtgagccatgagctc

SEQ ID NO: 843109 - DNA, 25 bp, Homo sapien
gtgtaaggtatagtgctgtgagcca

SEQ ID NO: 843110 - DNA, 25 bp, Homo sapien
cattctggtgtaaggtatagtgctg

SEQ ID NO: 843111 - DNA, 25 bp, Homo sapien
aatatgcttcattctggtgtaaggt

SEQ ID NO: 843112 - DNA, 25 bp, Homo sapien
cccacatatttagtcctgaggattt

SEQ ID NO: 843113 - DNA, 25 bp, Homo sapien
ccagggaagcctaagagacaaaatt

SEQ ID NO: 843114 - DNA, 25 bp, Homo sapien
tgagaaaatattcccctccggcttc

SEQ ID NO: 843115 - DNA, 25 bp, Homo sapien
gaggatttgctccttgtgaaatgga

SEQ ID NO: 843116 - DNA, 25 bp, Homo sapien
caggctatctctcgctcacctagtg

SEQ ID NO: 843117 - DNA, 25 bp, Homo sapien
cattcagagtgaaggatactgtcct

SEQ ID NO: 843118 - DNA, 25 bp, Homo sapien
tcacctagtgctgagctatgctcag

SEQ ID NO: 843119 - DNA, 25 bp, Homo sapien
catacagaagcttatgcaaaagtcc

SEQ ID NO: 843120 - DNA, 25 bp, Homo sapien
tacaccagcacctctatcatcttgg

SEQ ID NO: 843121 - DNA, 25 bp, Homo sapien
tgtctgcttccatgatcacaatgtg

SEQ ID NO: 843122 - DNA, 25 bp, Homo sapien
cttctctgcctattatgtctccatc

SEQ ID NO: 843123 - DNA, 25 bp, Homo sapien
tcatcttgggtggaactaaattgcc

SEQ ID NO: 843124 - DNA, 25 bp, Homo sapien
gccaaggagataaaattcagtggca

SEQ ID NO: 843125 - DNA, 25 bp, Homo sapien
agccagggaagccaaggagataaaa

SEQ ID NO: 843126 - DNA, 25 bp, Homo sapien
aagccaaggagataaaattcagtgg

SEQ ID NO: 843127 - DNA, 25 bp, Homo sapien
agggaagccaaggagataaaattca

SEQ ID NO: 843128 - DNA, 25 bp, Homo sapien
caagtaatgcgaactctgttgtccc

SEQ ID NO: 843129 - DNA, 25 bp, Homo sapien
gaaacatgacatagaccggccagat

SEQ ID NO: 843130 - DNA, 25 bp, Homo sapien
tacccaattgtaatcagctgcctgc

SEQ ID NO: 843131 - DNA, 25 bp, Homo sapien
tacaagaagagctggacaacacagg

SEQ ID NO: 843132 - DNA, 25 bp, Homo sapien
tctatgactttatcattccggaggg

SEQ ID NO: 843133 - DNA, 25 bp, Homo sapien
gaagggcctctatgactttatcatt

SEQ ID NO: 843134 - DNA, 25 bp, Homo sapien
ggcctctatgactttatcattccgg

SEQ ID NO: 843135 - DNA, 25 bp, Homo sapien
atcccgaagggcctctatgacttta

SEQ ID NO: 843136 - DNA, 25 bp, Homo sapien
ctaattcctgaatagttgacagcag

SEQ ID NO: 843137 - DNA, 25 bp, Homo sapien
caaaaaggcctagtctgttgacagg

SEQ ID NO: 843138 - DNA, 25 bp, Homo sapien
tggatgctagccatctccaggagac

SEQ ID NO: 843139 - DNA, 25 bp, Homo sapien
cagttagtatagagatgaggtccgc

SEQ ID NO: 843140 - DNA, 25 bp, Homo sapien
tgaggtccgcttctgtagtactgag

SEQ ID NO: 843141 - DNA, 25 bp, Homo sapien
aaagaccaaacctgagattgctggg

SEQ ID NO: 843142 - DNA, 25 bp, Homo sapien
caactctgtgttcaatggcaagtac

SEQ ID NO: 843143 - DNA, 25 bp, Homo sapien
ctgggttcaccctggaatagctcaa

SEQ ID NO: 843144 - DNA, 25 bp, Homo sapien
gcaagtacgtgaacatgccacagtt

SEQ ID NO: 843145 - DNA, 25 bp, Homo sapien
tatttccagaagtttcttcaggaca

SEQ ID NO: 843146 - DNA, 25 bp, Homo sapien
tccagaagtttcttcaggacataac

SEQ ID NO: 843147 - DNA, 25 bp, Homo sapien
tttatttccagaagtttcttcagga

SEQ ID NO: 843148 - DNA, 25 bp, Homo sapien
tttccagaagtttcttcaggacata

SEQ ID NO: 843149 - DNA, 25 bp, Homo sapien
tcccaacggcttcattaccacaagg

SEQ ID NO: 843150 - DNA, 25 bp, Homo sapien
tctcacagatttttgggagcagttc

SEQ ID NO: 843151 - DNA, 25 bp, Homo sapien
tattcatcataccataacctttagg

SEQ ID NO: 843152 - DNA, 25 bp, Homo sapien
cacagcccatactctgatgtttctg

SEQ ID NO: 843153 - DNA, 25 bp, Homo sapien
tattacacgcagaaaggaacagaga

SEQ ID NO: 843154 - DNA, 25 bp, Homo sapien
tatttgatggatccattgcaagccc

SEQ ID NO: 843155 - DNA, 25 bp, Homo sapien
aaaagatttatgctgcgctgagtgg

SEQ ID NO: 843156 - DNA, 25 bp, Homo sapien
cgtgctgtcgccaagagttctccat

SEQ ID NO: 843157 - DNA, 25 bp, Homo sapien
tgaagaaggaatagactgagagacc

SEQ ID NO: 843158 - DNA, 25 bp, Homo sapien
caggtagaggtcagattatggagct

SEQ ID NO: 843159 - DNA, 25 bp, Homo sapien
caggatttatttgacgaggaggaga

SEQ ID NO: 843160 - DNA, 25 bp, Homo sapien
ccaggctttggatcggaatgcaagt

SEQ ID NO: 843161 - DNA, 25 bp, Homo sapien
tactgattctgtggcgcgacaaaat

SEQ ID NO: 843162 - DNA, 25 bp, Homo sapien
gggataatggcagcttgtccctctg

SEQ ID NO: 843163 - DNA, 25 bp, Homo sapien
ctctgtgcccctactgattctgtgg

SEQ ID NO: 843164 - DNA, 25 bp, Homo sapien
tttgtgttgggataatggcagcttg

SEQ ID NO: 843165 - DNA, 25 bp, Homo sapien
agaaactctcgtgaccccagcctgg

SEQ ID NO: 843166 - DNA, 25 bp, Homo sapien
cagaaactctcgtgaccccagcctg

SEQ ID NO: 843167 - DNA, 25 bp, Homo sapien
gaaactctcgtgaccccagcctgga

SEQ ID NO: 843168 - DNA, 25 bp, Homo sapien
cactgtcctctgtgtttggtgcttt

SEQ ID NO: 843169 - DNA, 25 bp, Homo sapien
cctgggtattattctttgctcctgc

SEQ ID NO: 843170 - DNA, 25 bp, Homo sapien
gcttttttagcagacctcacttcac

SEQ ID NO: 843171 - DNA, 25 bp, Homo sapien
cttcctgatctgcttggcaagctgg

SEQ ID NO: 843172 - DNA, 25 bp, Homo sapien
tgctgcctgcctcagcctgctttac

SEQ ID NO: 843173 - DNA, 25 bp, Homo sapien
ggcttgctgcctgcctcagcctgct

SEQ ID NO: 843174 - DNA, 25 bp, Homo sapien
cttgctgcctgcctcagcctgcttt

SEQ ID NO: 843175 - DNA, 25 bp, Homo sapien
ctctggcttgctgcctgcctcagcc

SEQ ID NO: 843176 - DNA, 25 bp, Homo sapien
ggcaggcactgagcaacagtgattg

SEQ ID NO: 843177 - DNA, 25 bp, Homo sapien
catcagccggcttttcctgcatgga

SEQ ID NO: 843178 - DNA, 25 bp, Homo sapien
tgttcctgagtgctatccagcttac

SEQ ID NO: 843179 - DNA, 25 bp, Homo sapien
tccagcttacccacttccagaagtt

SEQ ID NO: 843180 - DNA, 25 bp, Homo sapien
agtcctggagtttgcagtggggttt

SEQ ID NO: 843181 - DNA, 25 bp, Homo sapien
tcctggagtttgcagtggggtttct

SEQ ID NO: 843182 - DNA, 25 bp, Homo sapien
tggagtttgcagtggggtttctgac

SEQ ID NO: 843183 - DNA, 25 bp, Homo sapien
tcagtcctggagtttgcagtggggt

SEQ ID NO: 843184 - DNA, 25 bp, Homo sapien
gccatgtacggtctctgtcatgttt

SEQ ID NO: 843185 - DNA, 25 bp, Homo sapien
cacactgtctctgggtatggcttga

SEQ ID NO: 843186 - DNA, 25 bp, Homo sapien
ctgctctccgggaattgccatgtcc

SEQ ID NO: 843187 - DNA, 25 bp, Homo sapien
tgctctccgggaattgccatgtcca

SEQ ID NO: 843188 - DNA, 25 bp, Homo sapien
ctttggcatcatagaatcaaagaat

SEQ ID NO: 843189 - DNA, 25 bp, Homo sapien
ttctttggcatcatagaatcaaaga

SEQ ID NO: 843190 - DNA, 25 bp, Homo sapien
gtgtttctttggcatcatagaatca

SEQ ID NO: 843191 - DNA, 25 bp, Homo sapien
ttggcatcatagaatcaaagaattt

SEQ ID NO: 843192 - DNA, 25 bp, Homo sapien
ctctgtctgaaggatggcttagcaa

SEQ ID NO: 843193 - DNA, 25 bp, Homo sapien
ctctctgtctgaaggatggcttagc

SEQ ID NO: 843194 - DNA, 25 bp, Homo sapien
tctctgtctgaaggatggcttagca

SEQ ID NO: 843195 - DNA, 25 bp, Homo sapien
tctgtctgaaggatggcttagcaat

SEQ ID NO: 843196 - DNA, 25 bp, Homo sapien
cacaccaggacacagactgtagaca

SEQ ID NO: 843197 - DNA, 25 bp, Homo sapien
caccaggacacagactgtagacagt

SEQ ID NO: 843198 - DNA, 25 bp, Homo sapien
tgtcccacaccaggacacagactgt

SEQ ID NO: 843199 - DNA, 25 bp, Homo sapien
ccaggacacagactgtagacagttt

SEQ ID NO: 843200 - DNA, 25 bp, Homo sapien
tgatgataaacaacacaagcagaag

SEQ ID NO: 843201 - DNA, 25 bp, Homo sapien
cagtgactctttggctaaaagcaca

SEQ ID NO: 843202 - DNA, 25 bp, Homo sapien
tagaacaatactgatgataaacaac

SEQ ID NO: 843203 - DNA, 25 bp, Homo sapien
agaagaacactgagcacaatctcca

SEQ ID NO: 843204 - DNA, 25 bp, Homo sapien
gggacccgttgtcctagcatgtgtg

SEQ ID NO: 843205 - DNA, 25 bp, Homo sapien
caggatctgggggacccgttgtcct

SEQ ID NO: 843206 - DNA, 25 bp, Homo sapien
cctagcatgtgtggtaccagttgtt

SEQ ID NO: 843207 - DNA, 25 bp, Homo sapien
cgttgtcctagcatgtgtggtacca

SEQ ID NO: 843208 - DNA, 25 bp, Homo sapien
gatgcaattaattcgttccaattca

SEQ ID NO: 843209 - DNA, 25 bp, Homo sapien
cagggatgcaattaattcgttccaa

SEQ ID NO: 843210 - DNA, 25 bp, Homo sapien
tggtcagggatgcaattaattcgtt

SEQ ID NO: 843211 - DNA, 25 bp, Homo sapien
cggctggtcagggatgcaattaatt

SEQ ID NO: 843212 - DNA, 25 bp, Homo sapien
cagggaacacttacagctccctggg

SEQ ID NO: 843213 - DNA, 25 bp, Homo sapien
ttggaatagtagcaccagggaacac

SEQ ID NO: 843214 - DNA, 25 bp, Homo sapien
gggattccagcaacagccacgttgg

SEQ ID NO: 843215 - DNA, 25 bp, Homo sapien
gacaaggttgccctctacatggtag

SEQ ID NO: 843216 - DNA, 25 bp, Homo sapien
cattgcttccaaacactggtgaaga

SEQ ID NO: 843217 - DNA, 25 bp, Homo sapien
ggcagatttttcaaccgggctgtga

SEQ ID NO: 843218 - DNA, 25 bp, Homo sapien
gtgagaagaacattgtcaacattgc

SEQ ID NO: 843219 - DNA, 25 bp, Homo sapien
cttaaagtggaaacgattagatgtc

SEQ ID NO: 843220 - DNA, 25 bp, Homo sapien
gcacttcaaacctgttattggtttg

SEQ ID NO: 843221 - DNA, 25 bp, Homo sapien
tctggtcactttgatgctaaatggc

SEQ ID NO: 843222 - DNA, 25 bp, Homo sapien
tctggagatttcaacttggtaggtc

SEQ ID NO: 843223 - DNA, 25 bp, Homo sapien
catttccactgaaggactgcacgtg

SEQ ID NO: 843224 - DNA, 25 bp, Homo sapien
cagtcgagtggagagctgcaagaac

SEQ ID NO: 843225 - DNA, 25 bp, Homo sapien
tacacgttagtgctaggcagtcgag

SEQ ID NO: 843226 - DNA, 25 bp, Homo sapien
caagaactggtcagcaaacagtagg

SEQ ID NO: 843227 - DNA, 25 bp, Homo sapien
tctctgttaaatatgggccaggtct

SEQ ID NO: 843228 - DNA, 25 bp, Homo sapien
tgcgcaccatacaaattagttccgt

SEQ ID NO: 843229 - DNA, 25 bp, Homo sapien
tcagaaacaccccaaaggacaatcc

SEQ ID NO: 843230 - DNA, 25 bp, Homo sapien
tgtctgcgcaccatacaaattagtt

SEQ ID NO: 843231 - DNA, 25 bp, Homo sapien
agaagaatgtctgcgcaccatacaa

SEQ ID NO: 843232 - DNA, 25 bp, Homo sapien
cccaatggtgcggtaagtgatggct

SEQ ID NO: 843233 - DNA, 25 bp, Homo sapien
aacacatagaagtcgagaatgcccc

SEQ ID NO: 843234 - DNA, 25 bp, Homo sapien
ggagtgtttcccaagaacacataga

SEQ ID NO: 843235 - DNA, 25 bp, Homo sapien
caacttgctctggagtgtttcccaa

SEQ ID NO: 843236 - DNA, 25 bp, Homo sapien
aataaaaatttttcgaagcattgct

SEQ ID NO: 843237 - DNA, 25 bp, Homo sapien
ataaaaatttttcgaagcattgctt

SEQ ID NO: 843238 - DNA, 25 bp, Homo sapien
taataaaaatttttcgaagcattgc

SEQ ID NO: 843239 - DNA, 25 bp, Homo sapien
taacgactgaggtgaaatccaagcg

SEQ ID NO: 843240 - DNA, 25 bp, Homo sapien
ccacgacttccctcatgttgtctaa

SEQ ID NO: 843241 - DNA, 25 bp, Homo sapien
taaggttccatattcgtaacgactg

SEQ ID NO: 843242 - DNA, 25 bp, Homo sapien
gctgtgctgcgcgatttctctccac

SEQ ID NO: 843243 - DNA, 25 bp, Homo sapien
ggagaactgttgaaaaccttgctta

SEQ ID NO: 843244 - DNA, 25 bp, Homo sapien
gagaactgttgaaaaccttgcttac

SEQ ID NO: 843245 - DNA, 25 bp, Homo sapien
caaagtccacaattagcacctagga

SEQ ID NO: 843246 - DNA, 25 bp, Homo sapien
attttcactgttattattcaggata

SEQ ID NO: 843247 - DNA, 25 bp, Homo sapien
tacaaagtccacaattagcacctag

SEQ ID NO: 843248 - DNA, 25 bp, Homo sapien
atacaaagtccacaattagcaccta

SEQ ID NO: 843249 - DNA, 25 bp, Homo sapien
aaaatccactgaatcataagtgaag

SEQ ID NO: 843250 - DNA, 25 bp, Homo sapien
ctgaatcataagtgaagtcccttct

SEQ ID NO: 843251 - DNA, 25 bp, Homo sapien
caagcttctgtccattattgtgtaa

SEQ ID NO: 843252 - DNA, 25 bp, Homo sapien
taactcgttgacaaattcagggaag

SEQ ID NO: 843253 - DNA, 25 bp, Homo sapien
tatctgaacccctgtcatatgggcc

SEQ ID NO: 843254 - DNA, 25 bp, Homo sapien
gtttacttgaggaagagttgttgga

SEQ ID NO: 843255 - DNA, 25 bp, Homo sapien
catatgggccatagggtttacttga

SEQ ID NO: 843256 - DNA, 25 bp, Homo sapien
ggagtcactccatctgaactattca

SEQ ID NO: 843257 - DNA, 25 bp, Homo sapien
gaaacacagtttgtccaggccagac

SEQ ID NO: 843258 - DNA, 25 bp, Homo sapien
tcaggaaacacagtttgtccaggcc

SEQ ID NO: 843259 - DNA, 25 bp, Homo sapien
cacagttgggattggtataatcagg

SEQ ID NO: 843260 - DNA, 25 bp, Homo sapien
gctcaaattcctttgtccaccaaac

SEQ ID NO: 843261 - DNA, 25 bp, Homo sapien
gaaccatcaacaaagttggagactt

SEQ ID NO: 843262 - DNA, 25 bp, Homo sapien
tatttaggttgtttgtggaacatcc

SEQ ID NO: 843263 - DNA, 25 bp, Homo sapien
tcctgagaccgaaccatcaacaaag

SEQ ID NO: 843264 - DNA, 25 bp, Homo sapien
taggttgtttgtggaacatcctgag

SEQ ID NO: 843265 - DNA, 25 bp, Homo sapien
tgtggcgaccgccatggagtagcca

SEQ ID NO: 843266 - DNA, 25 bp, Homo sapien
gcagaacaggtacccatccaggatt

SEQ ID NO: 843267 - DNA, 25 bp, Homo sapien
tgcactgcatccatacagagagtct

SEQ ID NO: 843268 - DNA, 25 bp, Homo sapien
tgtgaatgtcatactgcttgcccca

SEQ ID NO: 843269 - DNA, 25 bp, Homo sapien
tattagggaacacagtcttggcagc

SEQ ID NO: 843270 - DNA, 25 bp, Homo sapien
aaggttgaactcaagcacgccaggg

SEQ ID NO: 843271 - DNA, 25 bp, Homo sapien
taaccaatgtgctgcaaacttgcca

SEQ ID NO: 843272 - DNA, 25 bp, Homo sapien
tgccagagcccgcaaaggtagaacg

SEQ ID NO: 843273 - DNA, 25 bp, Homo sapien
tctagaaaacggataaaatgcaccc

SEQ ID NO: 843274 - DNA, 25 bp, Homo sapien
gtagccttggccattgtgatttcta

SEQ ID NO: 843275 - DNA, 25 bp, Homo sapien
tggccattgtgatttctagaaaacg

SEQ ID NO: 843276 - DNA, 25 bp, Homo sapien
aaatgcacccaactgcatccaccgc

SEQ ID NO: 843277 - DNA, 25 bp, Homo sapien
gagtcagctccaaaggaggcaggat

SEQ ID NO: 843278 - DNA, 25 bp, Homo sapien
tatagcggatgttaaggtagtgcct

SEQ ID NO: 843279 - DNA, 25 bp, Homo sapien
tataggtagggcaatagagtatagc

SEQ ID NO: 843280 - DNA, 25 bp, Homo sapien
cctggaggaattcaacagcagggag

SEQ ID NO: 843281 - DNA, 25 bp, Homo sapien
catccagaactggagtgatgaggag

SEQ ID NO: 843282 - DNA, 25 bp, Homo sapien
cataagaactgttggtgcacatccc

SEQ ID NO: 843283 - DNA, 25 bp, Homo sapien
tgttggtgcacatcccaagtgctgt

SEQ ID NO: 843284 - DNA, 25 bp, Homo sapien
cgggcccccataagaactgttggtg

SEQ ID NO: 843285 - DNA, 25 bp, Homo sapien
tctcgtagtcataccagacagcatc

SEQ ID NO: 843286 - DNA, 25 bp, Homo sapien
ctcgtagtcataccagacagcatca

SEQ ID NO: 843287 - DNA, 25 bp, Homo sapien
tcgtagtcataccagacagcatcag

SEQ ID NO: 843288 - DNA, 25 bp, Homo sapien
agtctcgtagtcataccagacagca

SEQ ID NO: 843289 - DNA, 25 bp, Homo sapien
catgtagatggatgtttctctctcc

SEQ ID NO: 843290 - DNA, 25 bp, Homo sapien
tctctccagaaaggtagcttgtcta

SEQ ID NO: 843291 - DNA, 25 bp, Homo sapien
gcagctacagtcttaaggagtagaa

SEQ ID NO: 843292 - DNA, 25 bp, Homo sapien
cccaggttctgctatgaaattacag

SEQ ID NO: 843293 - DNA, 25 bp, Homo sapien
tttttgcttcctccatctcacttgg

SEQ ID NO: 843294 - DNA, 25 bp, Homo sapien
gactttttgcttcctccatctcact

SEQ ID NO: 843295 - DNA, 25 bp, Homo sapien
gcttcctccatctcacttggctccc

SEQ ID NO: 843296 - DNA, 25 bp, Homo sapien
ctcgactttttgcttcctccatctc

SEQ ID NO: 843297 - DNA, 25 bp, Homo sapien
tgaagtccaattttgtctccaggaa

SEQ ID NO: 843298 - DNA, 25 bp, Homo sapien
ggtgaagtccaattttgtctccagg

SEQ ID NO: 843299 - DNA, 25 bp, Homo sapien
gaagtccaattttgtctccaggaag

SEQ ID NO: 843300 - DNA, 25 bp, Homo sapien
gtgaagtccaattttgtctccagga

SEQ ID NO: 843301 - DNA, 25 bp, Homo sapien
tccccattatcccagaaaagttctc

SEQ ID NO: 843302 - DNA, 25 bp, Homo sapien
tctagggcaatgataagaccaagag

SEQ ID NO: 843303 - DNA, 25 bp, Homo sapien
ccagaaaagttctccttttgcttct

SEQ ID NO: 843304 - DNA, 25 bp, Homo sapien
tctttgttctcatctagggcaatga

SEQ ID NO: 843305 - DNA, 25 bp, Homo sapien
aaaactcacataaaagatacacttt

SEQ ID NO: 843306 - DNA, 25 bp, Homo sapien
ttgagtgacagaaaactcacataaa

SEQ ID NO: 843307 - DNA, 25 bp, Homo sapien
taaaagatacactttattggccaca

SEQ ID NO: 843308 - DNA, 25 bp, Homo sapien
agatacactttattggccacagtat

SEQ ID NO: 843309 - DNA, 25 bp, Homo sapien
acattgctaggttcctccgtcccaa

SEQ ID NO: 843310 - DNA, 25 bp, Homo sapien
cattgctaggttcctccgtcccaag

SEQ ID NO: 843311 - DNA, 25 bp, Homo sapien
cttatctttatgctccattccactg

SEQ ID NO: 843312 - DNA, 25 bp, Homo sapien
tcatcccttatctttatgctccatt

SEQ ID NO: 843313 - DNA, 25 bp, Homo sapien
ccacgggcagtgcagttttcggcag

SEQ ID NO: 843314 - DNA, 25 bp, Homo sapien
acgggcagtgcagttttcggcagaa

SEQ ID NO: 843315 - DNA, 25 bp, Homo sapien
tataggtcgttgacaaaatagcaaa

SEQ ID NO: 843316 - DNA, 25 bp, Homo sapien
tatggtaagtgacatccaggcgaag

SEQ ID NO: 843317 - DNA, 25 bp, Homo sapien
gaacatcactgacagagtataggtc

SEQ ID NO: 843318 - DNA, 25 bp, Homo sapien
aagggactccagaagaattggatgc

SEQ ID NO: 843319 - DNA, 25 bp, Homo sapien
cactacctgatacatgtactgtgtt

SEQ ID NO: 843320 - DNA, 25 bp, Homo sapien
tacctgatacatgtactgtgtttac

SEQ ID NO: 843321 - DNA, 25 bp, Homo sapien
atcactacctgatacatgtactgtg

SEQ ID NO: 843322 - DNA, 25 bp, Homo sapien
ctaatcactacctgatacatgtact

SEQ ID NO: 843323 - DNA, 25 bp, Homo sapien
gactggaacttcataccgattcttg

SEQ ID NO: 843324 - DNA, 25 bp, Homo sapien
agggactggaacttcataccgattc

SEQ ID NO: 843325 - DNA, 25 bp, Homo sapien
ggattcttcttaatgagcacatcat

SEQ ID NO: 843326 - DNA, 25 bp, Homo sapien
cccaaatggattcttcttaatgagc

SEQ ID NO: 843327 - DNA, 25 bp, Homo sapien
tggagatgcggataaacatgtcact

SEQ ID NO: 843328 - DNA, 25 bp, Homo sapien
gatgcggataaacatgtcactgaag

SEQ ID NO: 843329 - DNA, 25 bp, Homo sapien
tctcctataggacctgtgctcagtt

SEQ ID NO: 843330 - DNA, 25 bp, Homo sapien
tcctataggacctgtgctcagtttc

SEQ ID NO: 843331 - DNA, 25 bp, Homo sapien
cagatcccaaatgctctgtccttac

SEQ ID NO: 843332 - DNA, 25 bp, Homo sapien
agagaagcagagacacagatcccaa

SEQ ID NO: 843333 - DNA, 25 bp, Homo sapien
gcctaaaagcagaatgtgatgacca

SEQ ID NO: 843334 - DNA, 25 bp, Homo sapien
agatgaagcccaaagcctgagcagt

SEQ ID NO: 843335 - DNA, 25 bp, Homo sapien
gtggacaccataggaattcttcttg

SEQ ID NO: 843336 - DNA, 25 bp, Homo sapien
ggacaccataggaattcttcttgta

SEQ ID NO: 843337 - DNA, 25 bp, Homo sapien
gggtggacaccataggaattcttct

SEQ ID NO: 843338 - DNA, 25 bp, Homo sapien
taggggtggacaccataggaattct

SEQ ID NO: 843339 - DNA, 25 bp, Homo sapien
ggcatgattggtatccccccaaaat

SEQ ID NO: 843340 - DNA, 25 bp, Homo sapien
aacacattgtaaattgactcaggca

SEQ ID NO: 843341 - DNA, 25 bp, Homo sapien
cattgtaaattgactcaggcatgat

SEQ ID NO: 843342 - DNA, 25 bp, Homo sapien
actcaggcatgattggtatcccccc

SEQ ID NO: 843343 - DNA, 25 bp, Homo sapien
aaatgccaagcctcacggacacctt

SEQ ID NO: 843344 - DNA, 25 bp, Homo sapien
aagaaaaatgccaagcctcacggac

SEQ ID NO: 843345 - DNA, 25 bp, Homo sapien
catgtcacgaatcacccctgaaatc

SEQ ID NO: 843346 - DNA, 25 bp, Homo sapien
tcacggacaccttccatgtcacgaa

SEQ ID NO: 843347 - DNA, 25 bp, Homo sapien
gtgacaagctctggagtcggcccca

SEQ ID NO: 843348 - DNA, 25 bp, Homo sapien
ctgggtgacaagctctggagtcggc

SEQ ID NO: 843349 - DNA, 25 bp, Homo sapien
cagaactccccctgtggtgcggtat

SEQ ID NO: 843350 - DNA, 25 bp, Homo sapien
aaagtccagaactccccctgtggtg

SEQ ID NO: 843351 - DNA, 25 bp, Homo sapien
catctcatcatacaagctggcgatc

SEQ ID NO: 843352 - DNA, 25 bp, Homo sapien
ccatctcatcatacaagctggcgat

SEQ ID NO: 843353 - DNA, 25 bp, Homo sapien
atctcatcatacaagctggcgatct

SEQ ID NO: 843354 - DNA, 25 bp, Homo sapien
tctcatcatacaagctggcgatctc

SEQ ID NO: 843355 - DNA, 25 bp, Homo sapien
tagtcgatgtctgagtactgcacat

SEQ ID NO: 843356 - DNA, 25 bp, Homo sapien
gtagtcgatgtctgagtactgcaca

SEQ ID NO: 843357 - DNA, 25 bp, Homo sapien
agtcgatgtctgagtactgcacatc

SEQ ID NO: 843358 - DNA, 25 bp, Homo sapien
tccacgccccgagtgaaggcaggat

SEQ ID NO: 843359 - DNA, 25 bp, Homo sapien
tctcattgccagaaatggctggatc

SEQ ID NO: 843360 - DNA, 25 bp, Homo sapien
tgtctcattgccagaaatggctgga

SEQ ID NO: 843361 - DNA, 25 bp, Homo sapien
tgatgaagacgtcatcctccacgcc

SEQ ID NO: 843362 - DNA, 25 bp, Homo sapien
ctgtcccagtctagagacccattca

SEQ ID NO: 843363 - DNA, 25 bp, Homo sapien
ccagtctagagacccattcacaaca

SEQ ID NO: 843364 - DNA, 25 bp, Homo sapien
agagacccattcacaacaacatcag

SEQ ID NO: 843365 - DNA, 25 bp, Homo sapien
tctagagacccattcacaacaacat

SEQ ID NO: 843366 - DNA, 25 bp, Homo sapien
cctcttccaccacttggcagttgaa

SEQ ID NO: 843367 - DNA, 25 bp, Homo sapien
gcagttgaattacggaaaaagtctg

SEQ ID NO: 843368 - DNA, 25 bp, Homo sapien
tctggattctgtggattgttgtata

SEQ ID NO: 843369 - DNA, 25 bp, Homo sapien
ggaaggccacataagctcgatatag

SEQ ID NO: 843370 - DNA, 25 bp, Homo sapien
agaaactgccccattcacgaagctt

SEQ ID NO: 843371 - DNA, 25 bp, Homo sapien
gccccattcacgaagcttgatggtt

SEQ ID NO: 843372 - DNA, 25 bp, Homo sapien
tcacgaagcttgatggttcattcat

SEQ ID NO: 843373 - DNA, 25 bp, Homo sapien
actgccccattcacgaagcttgatg

SEQ ID NO: 843374 - DNA, 25 bp, Homo sapien
agactaacttcagtcctgcctgtgt

SEQ ID NO: 843375 - DNA, 25 bp, Homo sapien
ctgggccctggatcttaagactaac

SEQ ID NO: 843376 - DNA, 25 bp, Homo sapien
ctccctgacttctcttcaagggact

SEQ ID NO: 843377 - DNA, 25 bp, Homo sapien
agagacatgagcacagcgcccccag

SEQ ID NO: 843378 - DNA, 25 bp, Homo sapien
tcgtatgtgggtctggtctgggacc

SEQ ID NO: 843379 - DNA, 25 bp, Homo sapien
gtatgtgggtctggtctgggaccac

SEQ ID NO: 843380 - DNA, 25 bp, Homo sapien
cgtatgtgggtctggtctgggacca

SEQ ID NO: 843381 - DNA, 25 bp, Homo sapien
tacaggttgtgcacgttgtagtgct

SEQ ID NO: 843382 - DNA, 25 bp, Homo sapien
ggtgaactgaggcaacagccaggga

SEQ ID NO: 843383 - DNA, 25 bp, Homo sapien
tgaactgaggcaacagccagggagt

SEQ ID NO: 843384 - DNA, 25 bp, Homo sapien
aggcaacagccagggagtaaaggcc

SEQ ID NO: 843385 - DNA, 25 bp, Homo sapien
actgaggcaacagccagggagtaaa

SEQ ID NO: 843386 - DNA, 25 bp, Homo sapien
aatgtggagcgggtgatgacgaccc

SEQ ID NO: 843387 - DNA, 25 bp, Homo sapien
gaagagggaaatgtggagcgggtga

SEQ ID NO: 843388 - DNA, 25 bp, Homo sapien
gagcgggtgatgacgacccctcgct

SEQ ID NO: 843389 - DNA, 25 bp, Homo sapien
gggtgatgacgacccctcgctgtcc

SEQ ID NO: 843390 - DNA, 25 bp, Homo sapien
atagacttcttcagctgatcccatg

SEQ ID NO: 843391 - DNA, 25 bp, Homo sapien
acttcttcagctgatcccatgcggc

SEQ ID NO: 843392 - DNA, 25 bp, Homo sapien
gatagacttcttcagctgatcccat

SEQ ID NO: 843393 - DNA, 25 bp, Homo sapien
ctgtgtcacaccaggctctcatgat

SEQ ID NO: 843394 - DNA, 25 bp, Homo sapien
ataggatatgccaaagaggctgaac

SEQ ID NO: 843395 - DNA, 25 bp, Homo sapien
atgccaaagaggctgaactccatca

SEQ ID NO: 843396 - DNA, 25 bp, Homo sapien
taggatatgccaaagaggctgaact

SEQ ID NO: 843397 - DNA, 25 bp, Homo sapien
ccaaagaggctgaactccatcatgc

SEQ ID NO: 843398 - DNA, 25 bp, Homo sapien
tggtgcttaggaggatcccaaggac

SEQ ID NO: 843399 - DNA, 25 bp, Homo sapien
gtgcttaggaggatcccaaggacac

SEQ ID NO: 843400 - DNA, 25 bp, Homo sapien
ggtgcttaggaggatcccaaggaca

SEQ ID NO: 843401 - DNA, 25 bp, Homo sapien
cttggtgcttaggaggatcccaagg

SEQ ID NO: 843402 - DNA, 25 bp, Homo sapien
aacaagaggaaataaaaggagcctg

SEQ ID NO: 843403 - DNA, 25 bp, Homo sapien
taaaaggagcctgctgatgatttct

SEQ ID NO: 843404 - DNA, 25 bp, Homo sapien
aggagcctgctgatgatttctgaaa

SEQ ID NO: 843405 - DNA, 25 bp, Homo sapien
aagaggaaataaaaggagcctgctg

SEQ ID NO: 843406 - DNA, 25 bp, Homo sapien
tgcatccagcgaacacacatctcgt

SEQ ID NO: 843407 - DNA, 25 bp, Homo sapien
catctcgtactcagcgtcttgaaag

SEQ ID NO: 843408 - DNA, 25 bp, Homo sapien
gtactcagcgtcttgaaagaaccca

SEQ ID NO: 843409 - DNA, 25 bp, Homo sapien
gaacacacatctcgtactcagcgtc

SEQ ID NO: 843410 - DNA, 25 bp, Homo sapien
agtgacataaaacagtggaggtaga

SEQ ID NO: 843411 - DNA, 25 bp, Homo sapien
gtgacataaaacagtggaggtagaa

SEQ ID NO: 843412 - DNA, 25 bp, Homo sapien
gacgccctccgtgtgggccttttgc

SEQ ID NO: 843413 - DNA, 25 bp, Homo sapien
tgacgccctccgtgtgggccttttg

SEQ ID NO: 843414 - DNA, 25 bp, Homo sapien
agtgacgccctccgtgtgggccttt

SEQ ID NO: 843415 - DNA, 25 bp, Homo sapien
atccaagtcggaaatacagctgccc

SEQ ID NO: 843416 - DNA, 25 bp, Homo sapien
agcccgacactctgaagaagctcct

SEQ ID NO: 843417 - DNA, 25 bp, Homo sapien
aatgaaggtgcccaacagagcccaa

SEQ ID NO: 843418 - DNA, 25 bp, Homo sapien
tcctcaagttcagatccaagtcgga

SEQ ID NO: 843419 - DNA, 25 bp, Homo sapien
actgactgtctatgtcccatgtcac

SEQ ID NO: 843420 - DNA, 25 bp, Homo sapien
gcaggaactgactgtctatgtccca

SEQ ID NO: 843421 - DNA, 25 bp, Homo sapien
tatgtcccatgtcacctggtctgac

SEQ ID NO: 843422 - DNA, 25 bp, Homo sapien
ccatgtcacctggtctgacacaaac

SEQ ID NO: 843423 - DNA, 25 bp, Homo sapien
tagtaatcgtaccaacgggctctag

SEQ ID NO: 843424 - DNA, 25 bp, Homo sapien
cgtgtagtaatcgtaccaacgggct

SEQ ID NO: 843425 - DNA, 25 bp, Homo sapien
taatcgtaccaacgggctctaggga

SEQ ID NO: 843426 - DNA, 25 bp, Homo sapien
gctctagggaaatatgcagtgacat

SEQ ID NO: 843427 - DNA, 25 bp, Homo sapien
tctcctcttgcattaatatccacac

SEQ ID NO: 843428 - DNA, 25 bp, Homo sapien
ggctggcaaggtcttccactctcct

SEQ ID NO: 843429 - DNA, 25 bp, Homo sapien
ccccacggacatgaagattaatgtg

SEQ ID NO: 843430 - DNA, 25 bp, Homo sapien
cagggcaggatgtagcccccacgga

SEQ ID NO: 843431 - DNA, 25 bp, Homo sapien
ctttgtttgcccatcatcccagaaa

SEQ ID NO: 843432 - DNA, 25 bp, Homo sapien
ctttgttttcatctagggcaataat

SEQ ID NO: 843433 - DNA, 25 bp, Homo sapien
tcatctagggcaataataagaccaa

SEQ ID NO: 843434 - DNA, 25 bp, Homo sapien
ccagaaaagttctccttttgcttct

SEQ ID NO: 843435 - DNA, 25 bp, Homo sapien
agaaaactcacataaaagatatact

SEQ ID NO: 843436 - DNA, 25 bp, Homo sapien
ataaaagatatactttcttggccac

SEQ ID NO: 843437 - DNA, 25 bp, Homo sapien
aaagatatactttcttggccacagt

SEQ ID NO: 843438 - DNA, 25 bp, Homo sapien
ttgagtgacagaaaactcacataaa

SEQ ID NO: 843439 - DNA, 25 bp, Homo sapien
cattgctaggttcctccatcccaag

SEQ ID NO: 843440 - DNA, 25 bp, Homo sapien
acattgctaggttcctccatcccaa

SEQ ID NO: 843441 - DNA, 25 bp, Homo sapien
tgtgtatgcttctcccaggaaaaga

SEQ ID NO: 843442 - DNA, 25 bp, Homo sapien
gtgtatgcttctcccaggaaaagat

SEQ ID NO: 843443 - DNA, 25 bp, Homo sapien
ccactgtgtatgcttctcccaggaa

SEQ ID NO: 843444 - DNA, 25 bp, Homo sapien
actgtgtatgcttctcccaggaaaa

SEQ ID NO: 843445 - DNA, 25 bp, Homo sapien
gctgtggccccatgggagttatact

SEQ ID NO: 843446 - DNA, 25 bp, Homo sapien
gactggaacttcataccgattgttg

SEQ ID NO: 843447 - DNA, 25 bp, Homo sapien
gggactggaacttcataccgattgt

SEQ ID NO: 843448 - DNA, 25 bp, Homo sapien
agggactggaacttcataccgattg

SEQ ID NO: 843449 - DNA, 25 bp, Homo sapien
tggaacttcataccgattgttgttg

SEQ ID NO: 843450 - DNA, 25 bp, Homo sapien
tctcctgtaggacgtgtgctcagtc

SEQ ID NO: 843451 - DNA, 25 bp, Homo sapien
tcctgtaggacgtgtgctcagtctc

SEQ ID NO: 843452 - DNA, 25 bp, Homo sapien
gagatgcggataaacatgtcattga

SEQ ID NO: 843453 - DNA, 25 bp, Homo sapien
tggagatgcggataaacatgtcatt

SEQ ID NO: 843454 - DNA, 25 bp, Homo sapien
ctaaaagcagaatgtgacgaccaag

SEQ ID NO: 843455 - DNA, 25 bp, Homo sapien
ggacaccataggaattcttcttgta

SEQ ID NO: 843456 - DNA, 25 bp, Homo sapien
gggtggacaccataggaattcttct

SEQ ID NO: 843457 - DNA, 25 bp, Homo sapien
gtggacaccataggaattcttcttg

SEQ ID NO: 843458 - DNA, 25 bp, Homo sapien
taggggtggacaccataggaattct

SEQ ID NO: 843459 - DNA, 25 bp, Homo sapien
agaactccccctgtggtacggtatg

SEQ ID NO: 843460 - DNA, 25 bp, Homo sapien
gtgacaagctctggagttggcccca

SEQ ID NO: 843461 - DNA, 25 bp, Homo sapien
ctgggtgacaagctctggagttggc

SEQ ID NO: 843462 - DNA, 25 bp, Homo sapien
agtccagaactccccctgtggtacg

SEQ ID NO: 843463 - DNA, 25 bp, Homo sapien
caaagaccagtaaggtaccatcaca

SEQ ID NO: 843464 - DNA, 25 bp, Homo sapien
cagctggaaccccaaagaccagtaa

SEQ ID NO: 843465 - DNA, 25 bp, Homo sapien
ggtaccatcacaggccggccaatca

SEQ ID NO: 843466 - DNA, 25 bp, Homo sapien
ctggtagccatagcgacacagctgg

SEQ ID NO: 843467 - DNA, 25 bp, Homo sapien
atcagagctggaaacccggcaaact

SEQ ID NO: 843468 - DNA, 25 bp, Homo sapien
tccacgccccgagtgaaggcaggat

SEQ ID NO: 843469 - DNA, 25 bp, Homo sapien
tgtctcattgccagaaatggctgga

SEQ ID NO: 843470 - DNA, 25 bp, Homo sapien
tgatgaagacgtcatcctccacgcc

SEQ ID NO: 843471 - DNA, 25 bp, Homo sapien
tctcattgccagaaatggctggatc

SEQ ID NO: 843472 - DNA, 25 bp, Homo sapien
tctagagacccattcacaacaacat

SEQ ID NO: 843473 - DNA, 25 bp, Homo sapien
ctgtcccagtctagagacccattca

SEQ ID NO: 843474 - DNA, 25 bp, Homo sapien
ccagtctagagacccattcacaaca

SEQ ID NO: 843475 - DNA, 25 bp, Homo sapien
agagacccattcacaacaacatcag

SEQ ID NO: 843476 - DNA, 25 bp, Homo sapien
tacacgtggtgaacttggccagcca

SEQ ID NO: 843477 - DNA, 25 bp, Homo sapien
tttcaccagaaacagagagctccag

SEQ ID NO: 843478 - DNA, 25 bp, Homo sapien
ggaacttccctaagtactgctcgga

SEQ ID NO: 843479 - DNA, 25 bp, Homo sapien
aagacagtgggtcacatcacggaga

SEQ ID NO: 843480 - DNA, 25 bp, Homo sapien
ggaaggccacataagctcgatatag

SEQ ID NO: 843481 - DNA, 25 bp, Homo sapien
gcagttgaattacggaaaaagtctg

SEQ ID NO: 843482 - DNA, 25 bp, Homo sapien
tctggattctgtggattgttgtata

SEQ ID NO: 843483 - DNA, 25 bp, Homo sapien
cctcttccaccacttggcagttgaa

SEQ ID NO: 843484 - DNA, 25 bp, Homo sapien
gccccattcacgaagcttgatggtt

SEQ ID NO: 843485 - DNA, 25 bp, Homo sapien
tcacgaagcttgatggttcattcat

SEQ ID NO: 843486 - DNA, 25 bp, Homo sapien
agaaactgccccattcacgaagctt

SEQ ID NO: 843487 - DNA, 25 bp, Homo sapien
actgccccattcacgaagcttgatg

SEQ ID NO: 843488 - DNA, 25 bp, Homo sapien
agctctgagctgcaacggcggctcc

SEQ ID NO: 843489 - DNA, 25 bp, Homo sapien
cctgcctgtgtcactctccgtcttc

SEQ ID NO: 843490 - DNA, 25 bp, Homo sapien
ctgcaacggcggctccagtgtttcc

SEQ ID NO: 843491 - DNA, 25 bp, Homo sapien
actctccgtcttcccagagacatga

SEQ ID NO: 843492 - DNA, 25 bp, Homo sapien
tctgggaccacccgtacaggttgtg

SEQ ID NO: 843493 - DNA, 25 bp, Homo sapien
gggaccacccgtacaggttgtgcac

SEQ ID NO: 843494 - DNA, 25 bp, Homo sapien
tcgtatgtgggtctggtctgggacc

SEQ ID NO: 843495 - DNA, 25 bp, Homo sapien
cgtatgtgggtctggtctgggacca

SEQ ID NO: 843496 - DNA, 25 bp, Homo sapien
aaaaggaggtgaactgagggcaccg

SEQ ID NO: 843497 - DNA, 25 bp, Homo sapien
aactgagggcaccgccaggaagcaa

SEQ ID NO: 843498 - DNA, 25 bp, Homo sapien
tgagggcaccgccaggaagcaaagg

SEQ ID NO: 843499 - DNA, 25 bp, Homo sapien
gtgaactgagggcaccgccaggaag

SEQ ID NO: 843500 - DNA, 25 bp, Homo sapien
gatagacttcttcagctgatcccac

SEQ ID NO: 843501 - DNA, 25 bp, Homo sapien
tagacttcttcagctgatcccacgc

SEQ ID NO: 843502 - DNA, 25 bp, Homo sapien
agacttcttcagctgatcccacgcg

SEQ ID NO: 843503 - DNA, 25 bp, Homo sapien
acttcttcagctgatcccacgcggc

SEQ ID NO: 843504 - DNA, 25 bp, Homo sapien
gcacaggccctgggaaggacccacg

SEQ ID NO: 843505 - DNA, 25 bp, Homo sapien
cggcacaggccctgggaaggaccca

SEQ ID NO: 843506 - DNA, 25 bp, Homo sapien
caggccctgggaaggacccacgcac

SEQ ID NO: 843507 - DNA, 25 bp, Homo sapien
acaggccctgggaaggacccacgca

SEQ ID NO: 843508 - DNA, 25 bp, Homo sapien
tgccgaagaggctgaactccatcat

SEQ ID NO: 843509 - DNA, 25 bp, Homo sapien
ccgaagaggctgaactccatcatgc

SEQ ID NO: 843510 - DNA, 25 bp, Homo sapien
ggatatgccgaagaggctgaactcc

SEQ ID NO: 843511 - DNA, 25 bp, Homo sapien
ataggatatgccgaagaggctgaac

SEQ ID NO: 843512 - DNA, 25 bp, Homo sapien
tggtgcttaggaggatcccaaggac

SEQ ID NO: 843513 - DNA, 25 bp, Homo sapien
cttggtgcttaggaggatcccaagg

SEQ ID NO: 843514 - DNA, 25 bp, Homo sapien
ggtgcttaggaggatcccaaggaca

SEQ ID NO: 843515 - DNA, 25 bp, Homo sapien
gtgcttaggaggatcccaaggacac

SEQ ID NO: 843516 - DNA, 25 bp, Homo sapien
cagcgaacacacatctcatattcag

SEQ ID NO: 843517 - DNA, 25 bp, Homo sapien
ccagctgcatccagcgaacacacat

SEQ ID NO: 843518 - DNA, 25 bp, Homo sapien
tgcatccagcgaacacacatctcat

SEQ ID NO: 843519 - DNA, 25 bp, Homo sapien
catccagcgaacacacatctcatat

SEQ ID NO: 843520 - DNA, 25 bp, Homo sapien
tgacgccctccgtgtgggccttatg

SEQ ID NO: 843521 - DNA, 25 bp, Homo sapien
agtgacgccctccgtgtgggcctta

SEQ ID NO: 843522 - DNA, 25 bp, Homo sapien
gtgacgccctccgtgtgggccttat

SEQ ID NO: 843523 - DNA, 25 bp, Homo sapien
atccaagtcggaaatacagctgccc

SEQ ID NO: 843524 - DNA, 25 bp, Homo sapien
tcctcaagttcagatccaagtcgga

SEQ ID NO: 843525 - DNA, 25 bp, Homo sapien
aatgaaggtgcccaacagagcccaa

SEQ ID NO: 843526 - DNA, 25 bp, Homo sapien
agcccgacactctgaagaagctcct

SEQ ID NO: 843527 - DNA, 25 bp, Homo sapien
actgactgtctatgtcccatgtcac

SEQ ID NO: 843528 - DNA, 25 bp, Homo sapien
tatgtcccatgtcacctggtctgac

SEQ ID NO: 843529 - DNA, 25 bp, Homo sapien
gcaggaactgactgtctatgtccca

SEQ ID NO: 843530 - DNA, 25 bp, Homo sapien
ccatgtcacctggtctgacacaaac

SEQ ID NO: 843531 - DNA, 25 bp, Homo sapien
agctgggatcctcccctcatcggag

SEQ ID NO: 843532 - DNA, 25 bp, Homo sapien
cccctcatcggaggcctccatactc

SEQ ID NO: 843533 - DNA, 25 bp, Homo sapien
gggatcctcccctcatcggaggcct

SEQ ID NO: 843534 - DNA, 25 bp, Homo sapien
ctcccctcatcggaggcctccatac

SEQ ID NO: 843535 - DNA, 25 bp, Homo sapien
tctgtctaccccaaaacaagtggct

SEQ ID NO: 843536 - DNA, 25 bp, Homo sapien
accataagatttgcgggctggacac

SEQ ID NO: 843537 - DNA, 25 bp, Homo sapien
cataaagcactttggtacccaggac

SEQ ID NO: 843538 - DNA, 25 bp, Homo sapien
cataaacaaggtgtggcagtggcac

SEQ ID NO: 843539 - DNA, 25 bp, Homo sapien
cgtgtagtaatcataccagcgggct

SEQ ID NO: 843540 - DNA, 25 bp, Homo sapien
cataccagcgggctctagggaaata

SEQ ID NO: 843541 - DNA, 25 bp, Homo sapien
tagggaaatatgcagtgacatttct

SEQ ID NO: 843542 - DNA, 25 bp, Homo sapien
gtaatcataccagcgggctctaggg

SEQ ID NO: 843543 - DNA, 25 bp, Homo sapien
ggctggcaaggtcttccactctcct

SEQ ID NO: 843544 - DNA, 25 bp, Homo sapien
cagggcaggatgtagcccccacgga

SEQ ID NO: 843545 - DNA, 25 bp, Homo sapien
ccccacggacatgaagattaatgtg

SEQ ID NO: 843546 - DNA, 25 bp, Homo sapien
tctcctcttgcattaatatccacac

SEQ ID NO: 843547 - DNA, 25 bp, Homo sapien
tccaaggcaattttgaagcccatga

SEQ ID NO: 843548 - DNA, 25 bp, Homo sapien
atccaaggcaattttgaagcccatg

SEQ ID NO: 843549 - DNA, 25 bp, Homo sapien
taatagagtcctttcccataggtat

SEQ ID NO: 843550 - DNA, 25 bp, Homo sapien
gctggccaagtaatagagtcctttc

SEQ ID NO: 843551 - DNA, 25 bp, Homo sapien
agaaaagctggccaagtaatagagt

SEQ ID NO: 843552 - DNA, 25 bp, Homo sapien
ggccaagtaatagagtcctttccca

SEQ ID NO: 843553 - DNA, 25 bp, Homo sapien
cccagtttcaaaggatttgtaccag

SEQ ID NO: 843554 - DNA, 25 bp, Homo sapien
gagggtgttatgaccatgccactca

SEQ ID NO: 843555 - DNA, 25 bp, Homo sapien
cagatttcaatgtagcccagtttca

SEQ ID NO: 843556 - DNA, 25 bp, Homo sapien
tgcccactccccagatttcaatgta

SEQ ID NO: 843557 - DNA, 25 bp, Homo sapien
aatgaagtaaaattatgtaggctga

SEQ ID NO: 843558 - DNA, 25 bp, Homo sapien
gaagtaaaattatgtaggctgatgt

SEQ ID NO: 843559 - DNA, 25 bp, Homo sapien
tgtcagtcacatcgatgcttaatac

SEQ ID NO: 843560 - DNA, 25 bp, Homo sapien
tctgtcagtcacatcgatgcttaat

SEQ ID NO: 843561 - DNA, 25 bp, Homo sapien
gatctcaatctcaccagtagccctt

SEQ ID NO: 843562 - DNA, 25 bp, Homo sapien
cgcctataaccaactagcagatgtt

SEQ ID NO: 843563 - DNA, 25 bp, Homo sapien
tgctgattagcttcaagacctggaa

SEQ ID NO: 843564 - DNA, 25 bp, Homo sapien
tatgctaaggatttctcaagaccct

SEQ ID NO: 843565 - DNA, 25 bp, Homo sapien
ctgtatctctccctcagcaattcat

SEQ ID NO: 843566 - DNA, 25 bp, Homo sapien
gctgtatctctccctcagcaattca

SEQ ID NO: 843567 - DNA, 25 bp, Homo sapien
tatcagtgtccctaattaactctag

SEQ ID NO: 843568 - DNA, 25 bp, Homo sapien
tccaaggaaaagtatatcagacatg

SEQ ID NO: 843569 - DNA, 25 bp, Homo sapien
catgtagaggaactgaggattgtcc

SEQ ID NO: 843570 - DNA, 25 bp, Homo sapien
tagctttacatccaacacctgtaga

SEQ ID NO: 843571 - DNA, 25 bp, Homo sapien
ggacttccaatacactgagcttcct

SEQ ID NO: 843572 - DNA, 25 bp, Homo sapien
tggtcaccacaattaagcagaagat

SEQ ID NO: 843573 - DNA, 25 bp, Homo sapien
gcagcaagaggatatctatggtcac

SEQ ID NO: 843574 - DNA, 25 bp, Homo sapien
tcagaaggacttccaatacactgag

SEQ ID NO: 843575 - DNA, 25 bp, Homo sapien
gggcactctggagtaaatgaagtat

SEQ ID NO: 843576 - DNA, 25 bp, Homo sapien
ctgggcactctggagtaaatgaagt

SEQ ID NO: 843577 - DNA, 25 bp, Homo sapien
tgggcactctggagtaaatgaagta

SEQ ID NO: 843578 - DNA, 25 bp, Homo sapien
gtgcagtctatcctttccgactggg

SEQ ID NO: 843579 - DNA, 25 bp, Homo sapien
aggtgtgcagtctatcctttccgac

SEQ ID NO: 843580 - DNA, 25 bp, Homo sapien
ggtcaggtgtgcagtctatcctttc

SEQ ID NO: 843581 - DNA, 25 bp, Homo sapien
tcctggtcaggtgtgcagtctatcc

SEQ ID NO: 843582 - DNA, 25 bp, Homo sapien
cttttcaataacaccctgtaggcca

SEQ ID NO: 843583 - DNA, 25 bp, Homo sapien
ttttcaataacaccctgtaggccac

SEQ ID NO: 843584 - DNA, 25 bp, Homo sapien
caccaaaagggaccttatttctctg

SEQ ID NO: 843585 - DNA, 25 bp, Homo sapien
gcttgtatttgtatggccattgctg

SEQ ID NO: 843586 - DNA, 25 bp, Homo sapien
gaagcacctagggacattggcatct

SEQ ID NO: 843587 - DNA, 25 bp, Homo sapien
ggaagaagcacctagggacattggc

SEQ ID NO: 843588 - DNA, 25 bp, Homo sapien
acaggcgaccagcagcacttatatt

SEQ ID NO: 843589 - DNA, 25 bp, Homo sapien
ggtggtggcgacatcatttccaaac

SEQ ID NO: 843590 - DNA, 25 bp, Homo sapien
accgattggatgtctgatattcagc

SEQ ID NO: 843591 - DNA, 25 bp, Homo sapien
tggtgatggcaaccttttcaactgg

SEQ ID NO: 843592 - DNA, 25 bp, Homo sapien
tccaaacagagatggtgatggcaac

SEQ ID NO: 843593 - DNA, 25 bp, Homo sapien
tattttcatgggaaacttcatagcg

SEQ ID NO: 843594 - DNA, 25 bp, Homo sapien
cacgtaatagctcaaattggaggca

SEQ ID NO: 843595 - DNA, 25 bp, Homo sapien
ttatcagtaacctccacgtaatagc

SEQ ID NO: 843596 - DNA, 25 bp, Homo sapien
catgggaaacttcatagcgtatgtt

SEQ ID NO: 843597 - DNA, 25 bp, Homo sapien
ccagcccatacacattggcactggg

SEQ ID NO: 843598 - DNA, 25 bp, Homo sapien
tcggaaagacagttgcaggtactgc

SEQ ID NO: 843599 - DNA, 25 bp, Homo sapien
cgggtgaagatgggccaagtcttcc

SEQ ID NO: 843600 - DNA, 25 bp, Homo sapien
ccaggtcatattgtggcggtactgc

SEQ ID NO: 843601 - DNA, 25 bp, Homo sapien
gagctccatacagattaatcatgcc

SEQ ID NO: 843602 - DNA, 25 bp, Homo sapien
tactgttcatcagaaatactccaaa

SEQ ID NO: 843603 - DNA, 25 bp, Homo sapien
aagaagaatgtatgagctccataca

SEQ ID NO: 843604 - DNA, 25 bp, Homo sapien
ggcattactgttcatcagaaatact

SEQ ID NO: 843605 - DNA, 25 bp, Homo sapien
acagaagataaaaagatgcttccta

SEQ ID NO: 843606 - DNA, 25 bp, Homo sapien
cagaagataaaaagatgcttcctac

SEQ ID NO: 843607 - DNA, 25 bp, Homo sapien
ctacagaagataaaaagatgcttcc

SEQ ID NO: 843608 - DNA, 25 bp, Homo sapien
tacagaagataaaaagatgcttcct

SEQ ID NO: 843609 - DNA, 25 bp, Homo sapien
tcctgaaccacttgttctggagtgt

SEQ ID NO: 843610 - DNA, 25 bp, Homo sapien
caagaatgcctccaatcgtgcgata

SEQ ID NO: 843611 - DNA, 25 bp, Homo sapien
tctggagtgtttcctaggaatacgt

SEQ ID NO: 843612 - DNA, 25 bp, Homo sapien
cgtgcgataagtgatcgcaggagct

SEQ ID NO: 843613 - DNA, 25 bp, Homo sapien
ggagggaagaatggccgtccaacaa

SEQ ID NO: 843614 - DNA, 25 bp, Homo sapien
tatggtatctcagctaaacgatttc

SEQ ID NO: 843615 - DNA, 25 bp, Homo sapien
gatgccaccatagtccctgcgacta

SEQ ID NO: 843616 - DNA, 25 bp, Homo sapien
tagtccctgcgactaagctggaacc

SEQ ID NO: 843617 - DNA, 25 bp, Homo sapien
tgtagtctatgtcagagtactggac

SEQ ID NO: 843618 - DNA, 25 bp, Homo sapien
tgtaactccttgacaaaatctggga

SEQ ID NO: 843619 - DNA, 25 bp, Homo sapien
ggagaccagagtaagcgacttcatc

SEQ ID NO: 843620 - DNA, 25 bp, Homo sapien
gacttcatcaacagtgaaatccttc

SEQ ID NO: 843621 - DNA, 25 bp, Homo sapien
ggctcgtagttagagtttttggaga

SEQ ID NO: 843622 - DNA, 25 bp, Homo sapien
ctctttaggcttccattattatagg

SEQ ID NO: 843623 - DNA, 25 bp, Homo sapien
attattatagggctcgtagttagag

SEQ ID NO: 843624 - DNA, 25 bp, Homo sapien
caaagccattgctccccaagatcca

SEQ ID NO: 843625 - DNA, 25 bp, Homo sapien
caccactcagtgcatactggattgg

SEQ ID NO: 843626 - DNA, 25 bp, Homo sapien
ctggattggtataatcgggaaagac

SEQ ID NO: 843627 - DNA, 25 bp, Homo sapien
aatttagcgacctgatctgtccacc

SEQ ID NO: 843628 - DNA, 25 bp, Homo sapien
gaaagactgtcggtcccggatatcc

SEQ ID NO: 843629 - DNA, 25 bp, Homo sapien
actcatctgaaaatttggcgttatc

SEQ ID NO: 843630 - DNA, 25 bp, Homo sapien
gaaaatttggcgttatctgtttcca

SEQ ID NO: 843631 - DNA, 25 bp, Homo sapien
atttgagtcaggaataataacttac

SEQ ID NO: 843632 - DNA, 25 bp, Homo sapien
catttatttgacatcaaggtcaaaa

SEQ ID NO: 843633 - DNA, 25 bp, Homo sapien
acactggttattagaagcttggagt

SEQ ID NO: 843634 - DNA, 25 bp, Homo sapien
gcttggagtaagctagatacttcat

SEQ ID NO: 843635 - DNA, 25 bp, Homo sapien
ttcaagttgttggattcacactggt

SEQ ID NO: 843636 - DNA, 25 bp, Homo sapien
gttcaagttgttggattcacactgg

SEQ ID NO: 843637 - DNA, 25 bp, Homo sapien
gcaaaaagtaagtgatccagaactc

SEQ ID NO: 843638 - DNA, 25 bp, Homo sapien
tgcaaaaagtaagtgatccagaact

SEQ ID NO: 843639 - DNA, 25 bp, Homo sapien
cttgccatggagtggccatacaagc

SEQ ID NO: 843640 - DNA, 25 bp, Homo sapien
ctgtggatgtcataatgaaggcccc

SEQ ID NO: 843641 - DNA, 25 bp, Homo sapien
catacaagctgtggatgtcataatg

SEQ ID NO: 843642 - DNA, 25 bp, Homo sapien
ggccatacaagctgtggatgtcata

SEQ ID NO: 843643 - DNA, 25 bp, Homo sapien
tatctggaattagggtgaaaaccaa

SEQ ID NO: 843644 - DNA, 25 bp, Homo sapien
atctggaattagggtgaaaaccaag

SEQ ID NO: 843645 - DNA, 25 bp, Homo sapien
cttacaataagagcagcaatggact

SEQ ID NO: 843646 - DNA, 25 bp, Homo sapien
ttacaataagagcagcaatggactt

SEQ ID NO: 843647 - DNA, 25 bp, Homo sapien
gaaaggaatacatccagtggagtgt

SEQ ID NO: 843648 - DNA, 25 bp, Homo sapien
ctggaaaggaatacatccagtggag

SEQ ID NO: 843649 - DNA, 25 bp, Homo sapien
aaggaatacatccagtggagtgtga

SEQ ID NO: 843650 - DNA, 25 bp, Homo sapien
aatacatccagtggagtgtgaggtg

SEQ ID NO: 843651 - DNA, 25 bp, Homo sapien
gaggtcatcccatgtggccgcattg

SEQ ID NO: 843652 - DNA, 25 bp, Homo sapien
cagatccagcaaaagtagaacggga

SEQ ID NO: 843653 - DNA, 25 bp, Homo sapien
tagaacgggataagatgaagctcct

SEQ ID NO: 843654 - DNA, 25 bp, Homo sapien
gagcagcaaatttgccagatccagc

SEQ ID NO: 843655 - DNA, 25 bp, Homo sapien
gttccctggttggaaataaggctca

SEQ ID NO: 843656 - DNA, 25 bp, Homo sapien
ttccctggttggaaataaggctcac

SEQ ID NO: 843657 - DNA, 25 bp, Homo sapien
ctggagaattagcacacatacaagc

SEQ ID NO: 843658 - DNA, 25 bp, Homo sapien
tggagaattagcacacatacaagca

SEQ ID NO: 843659 - DNA, 25 bp, Homo sapien
aatgctccaagctgcatccaccttc

SEQ ID NO: 843660 - DNA, 25 bp, Homo sapien
cattgttgttataaccacagatgtt

SEQ ID NO: 843661 - DNA, 25 bp, Homo sapien
attgtgattccttggtagtggataa

SEQ ID NO: 843662 - DNA, 25 bp, Homo sapien
gctccaagctgcatccaccttctgc

SEQ ID NO: 843663 - DNA, 25 bp, Homo sapien
cagcaaggtgtagcggatgttcaga

SEQ ID NO: 843664 - DNA, 25 bp, Homo sapien
aaaagggtatagagatagggcagca

SEQ ID NO: 843665 - DNA, 25 bp, Homo sapien
tccccgggtgtgagcatggtagaaa

SEQ ID NO: 843666 - DNA, 25 bp, Homo sapien
taatgtctggaggatttcagcagca

SEQ ID NO: 843667 - DNA, 25 bp, Homo sapien
aactgctcatgcacatcccacgtgg

SEQ ID NO: 843668 - DNA, 25 bp, Homo sapien
tcatataaaacaggcgtgatgagga

SEQ ID NO: 843669 - DNA, 25 bp, Homo sapien
taaaacaggcgtgatgaggagtcca

SEQ ID NO: 843670 - DNA, 25 bp, Homo sapien
cataagaactgctcatgcacatccc

SEQ ID NO: 843671 - DNA, 25 bp, Homo sapien
tggcatcaggtatgtatgctttcac

SEQ ID NO: 843672 - DNA, 25 bp, Homo sapien
accaggtggcatcaggtatgtatgc

SEQ ID NO: 843673 - DNA, 25 bp, Homo sapien
ctcatagtcataccaggtggcatca

SEQ ID NO: 843674 - DNA, 25 bp, Homo sapien
tgtctcatagtcataccaggtggca

SEQ ID NO: 843675 - DNA, 25 bp, Homo sapien
tcaccaactgtttcctccatgagat

SEQ ID NO: 843676 - DNA, 25 bp, Homo sapien
ttcaccaactgtttcctccatgaga

SEQ ID NO: 843677 - DNA, 25 bp, Homo sapien
attcaccaactgtttcctccatgag

SEQ ID NO: 843678 - DNA, 25 bp, Homo sapien
ccctcgcagatgaagtcctatcttg

SEQ ID NO: 843679 - DNA, 25 bp, Homo sapien
gatgaagtcctatcttgtcacctgg

SEQ ID NO: 843680 - DNA, 25 bp, Homo sapien
tatgtagccccctcgcagatgaagt

SEQ ID NO: 843681 - DNA, 25 bp, Homo sapien
gagtgggaaatatgtagccccctcg

SEQ ID NO: 843682 - DNA, 25 bp, Homo sapien
gatacaccgtcatcccagtacagct

SEQ ID NO: 843683 - DNA, 25 bp, Homo sapien
tagtccaaggcgatgatgagtccca

SEQ ID NO: 843684 - DNA, 25 bp, Homo sapien
ctttgcttctctcttatagtccaag

SEQ ID NO: 843685 - DNA, 25 bp, Homo sapien
tgatgagtcccagggaattcctccg

SEQ ID NO: 843686 - DNA, 25 bp, Homo sapien
atatacttcttttcagtcacagcat

SEQ ID NO: 843687 - DNA, 25 bp, Homo sapien
tcagtaggacgataaaattagctgg

SEQ ID NO: 843688 - DNA, 25 bp, Homo sapien
tttgtggaagcattgtagacaacgc

SEQ ID NO: 843689 - DNA, 25 bp, Homo sapien
cattcccaagattgtgatatctgtg

SEQ ID NO: 843690 - DNA, 25 bp, Homo sapien
ggtggcaacattattcagtaggacg

SEQ ID NO: 843691 - DNA, 25 bp, Homo sapien
tccttggagatcagtgatggttacc

SEQ ID NO: 843692 - DNA, 25 bp, Homo sapien
tcttgtcccagtaccagtccttgga

SEQ ID NO: 843693 - DNA, 25 bp, Homo sapien
cacctaatagagaattcttgtccca

SEQ ID NO: 843694 - DNA, 25 bp, Homo sapien
tcctcagaggctgttggatcatcag

SEQ ID NO: 843695 - DNA, 25 bp, Homo sapien
gccatcgggagggaaaggtctgcag

SEQ ID NO: 843696 - DNA, 25 bp, Homo sapien
gtcatagtaacaggtgggcactcca

SEQ ID NO: 843697 - DNA, 25 bp, Homo sapien
gcatggttgctgtgtgatagatcac

SEQ ID NO: 843698 - DNA, 25 bp, Homo sapien
tatcactagcaacataattagggat

SEQ ID NO: 843699 - DNA, 25 bp, Homo sapien
ttcagggtcaccaactggttgggga

SEQ ID NO: 843700 - DNA, 25 bp, Homo sapien
cagtgctggagtttttgcgttgaat

SEQ ID NO: 843701 - DNA, 25 bp, Homo sapien
ctggattccaaaaggattgttctga

SEQ ID NO: 843702 - DNA, 25 bp, Homo sapien
ggtgttcagtggtactggaacctca

SEQ ID NO: 843703 - DNA, 25 bp, Homo sapien
cagaagcaaacgttacaagaagcta

SEQ ID NO: 843704 - DNA, 25 bp, Homo sapien
tcacttcattctattcagcagcagg

SEQ ID NO: 843705 - DNA, 25 bp, Homo sapien
taacattgtgaaaaggcttgaaggc

SEQ ID NO: 843706 - DNA, 25 bp, Homo sapien
caaatgcacacctatttccatagag

SEQ ID NO: 843707 - DNA, 25 bp, Homo sapien
cccaaagccatagatgtactgggac

SEQ ID NO: 843708 - DNA, 25 bp, Homo sapien
actgggacggcagacgcgtagaaat

SEQ ID NO: 843709 - DNA, 25 bp, Homo sapien
tcttctgaaagtcgtgtgctcagtt

SEQ ID NO: 843710 - DNA, 25 bp, Homo sapien
gcaggtggctcatcatgagcaaaca

SEQ ID NO: 843711 - DNA, 25 bp, Homo sapien
ctcctccagtgccatgtagtaaggg

SEQ ID NO: 843712 - DNA, 25 bp, Homo sapien
ctccagtgccatgtagtaagggtgg

SEQ ID NO: 843713 - DNA, 25 bp, Homo sapien
atgggcactaccatcctcctccagt

SEQ ID NO: 843714 - DNA, 25 bp, Homo sapien
agcaggagcactccatgggcactac

SEQ ID NO: 843715 - DNA, 25 bp, Homo sapien
agaaaaacaacacacatgaggcaca

SEQ ID NO: 843716 - DNA, 25 bp, Homo sapien
gaaaaacaacacacatgaggcacat

SEQ ID NO: 843717 - DNA, 25 bp, Homo sapien
ctctgtgtattgctgagttacaagt

SEQ ID NO: 843718 - DNA, 25 bp, Homo sapien
gtattgctgagttacaagttcaggg

SEQ ID NO: 843719 - DNA, 25 bp, Homo sapien
tcctgtggtgcggtatgtcagagca

SEQ ID NO: 843720 - DNA, 25 bp, Homo sapien
ggccccaaaacaatgtagaagtcca

SEQ ID NO: 843721 - DNA, 25 bp, Homo sapien
tatccatagcgactcagatggaatc

SEQ ID NO: 843722 - DNA, 25 bp, Homo sapien
gcatcattctggtatccatagcgac

SEQ ID NO: 843723 - DNA, 25 bp, Homo sapien
caaggcccagtatggaatcattgct

SEQ ID NO: 843724 - DNA, 25 bp, Homo sapien
ggaatcattgctggccgaccaatca

SEQ ID NO: 843725 - DNA, 25 bp, Homo sapien
catgtaatcgatgtctacatgctgg

SEQ ID NO: 843726 - DNA, 25 bp, Homo sapien
tccagcttccggttcatgtaatcga

SEQ ID NO: 843727 - DNA, 25 bp, Homo sapien
catttgctcaatcagaagactgagg

SEQ ID NO: 843728 - DNA, 25 bp, Homo sapien
ctgaggttttgaaagttggcactga

SEQ ID NO: 843729 - DNA, 25 bp, Homo sapien
gccatttgatgaacacgttattttc

SEQ ID NO: 843730 - DNA, 25 bp, Homo sapien
gatgaacacgttattttcctgtcct

SEQ ID NO: 843731 - DNA, 25 bp, Homo sapien
tgtctcattgccagaaatggctggg

SEQ ID NO: 843732 - DNA, 25 bp, Homo sapien
cctgtcctctaatgaatgggagata

SEQ ID NO: 843733 - DNA, 25 bp, Homo sapien
ttacattaggcagatctggccaaac

SEQ ID NO: 843734 - DNA, 25 bp, Homo sapien
tgagtttcatggtcaagggatccat

SEQ ID NO: 843735 - DNA, 25 bp, Homo sapien
atctacaattacattaggcagatct

SEQ ID NO: 843736 - DNA, 25 bp, Homo sapien
catggtcaagggatccatctacaat

SEQ ID NO: 843737 - DNA, 25 bp, Homo sapien
cacaatccatcaaacttcaagctct

SEQ ID NO: 843738 - DNA, 25 bp, Homo sapien
tgtgctattacgaaagaagtcagga

SEQ ID NO: 843739 - DNA, 25 bp, Homo sapien
tctcgagggtttgcatagagctctt

SEQ ID NO: 843740 - DNA, 25 bp, Homo sapien
caggaaaggcaacgtaggccctgta

SEQ ID NO: 843741 - DNA, 25 bp, Homo sapien
tagggtgggttatttagcatttcat

SEQ ID NO: 843742 - DNA, 25 bp, Homo sapien
tggcatatagggtgggttatttagc

SEQ ID NO: 843743 - DNA, 25 bp, Homo sapien
tgacagatccatccacaaaatttga

SEQ ID NO: 843744 - DNA, 25 bp, Homo sapien
gatccatccacaaaatttgatggct

SEQ ID NO: 843745 - DNA, 25 bp, Homo sapien
ctgaggggaaatgttgagttatttc

SEQ ID NO: 843746 - DNA, 25 bp, Homo sapien
tcaggcccttgtccctagattccaa

SEQ ID NO: 843747 - DNA, 25 bp, Homo sapien
gctgtccggcaggatctgctgactc

SEQ ID NO: 843748 - DNA, 25 bp, Homo sapien
gagctgtccggcaggatctgctgac

SEQ ID NO: 843749 - DNA, 25 bp, Homo sapien
tgtgcacgttgtagtgctccacggg

SEQ ID NO: 843750 - DNA, 25 bp, Homo sapien
aagctgccctcggactcctggactc

SEQ ID NO: 843751 - DNA, 25 bp, Homo sapien
aaaaagatgaataccaccgagtgtt

SEQ ID NO: 843752 - DNA, 25 bp, Homo sapien
tagatatcactttacccccattaga

SEQ ID NO: 843753 - DNA, 25 bp, Homo sapien
aataccaccgagtgttggcaaggat

SEQ ID NO: 843754 - DNA, 25 bp, Homo sapien
gaggtgagttgaagaaacaaactcc

SEQ ID NO: 843755 - DNA, 25 bp, Homo sapien
acagagaataactgcagcttggagc

SEQ ID NO: 843756 - DNA, 25 bp, Homo sapien
acaaactcctttacagagaataact

SEQ ID NO: 843757 - DNA, 25 bp, Homo sapien
ataaagaggtgagttgaagaaacaa

SEQ ID NO: 843758 - DNA, 25 bp, Homo sapien
tgtggagcgggtgatgatgacccct

SEQ ID NO: 843759 - DNA, 25 bp, Homo sapien
gggaaatgtggagcgggtgatgatg

SEQ ID NO: 843760 - DNA, 25 bp, Homo sapien
agggaaatgtggagcgggtgatgat

SEQ ID NO: 843761 - DNA, 25 bp, Homo sapien
aaatgtggagcgggtgatgatgacc

SEQ ID NO: 843762 - DNA, 25 bp, Homo sapien
ataaggtattccaaagagactgaac

SEQ ID NO: 843763 - DNA, 25 bp, Homo sapien
gaagatgcataatgagagcatgagg

SEQ ID NO: 843764 - DNA, 25 bp, Homo sapien
catgaggtgggaatttcatgaggcg

SEQ ID NO: 843765 - DNA, 25 bp, Homo sapien
tcatgaggcgctgactcactaaaat

SEQ ID NO: 843766 - DNA, 25 bp, Homo sapien
ctgagaagatgcataatgagagcat

SEQ ID NO: 843767 - DNA, 25 bp, Homo sapien
tgcatccagcgaacacacatctcat

SEQ ID NO: 843768 - DNA, 25 bp, Homo sapien
tccagcgaacacacatctcatattc

SEQ ID NO: 843769 - DNA, 25 bp, Homo sapien
cagcgaacacacatctcatattcag

SEQ ID NO: 843770 - DNA, 25 bp, Homo sapien
catccagcgaacacacatctcatat

SEQ ID NO: 843771 - DNA, 25 bp, Homo sapien
aactgtgctgccctcaacgtgagct

SEQ ID NO: 843772 - DNA, 25 bp, Homo sapien
caaaggttgaattccaggccacagg

SEQ ID NO: 843773 - DNA, 25 bp, Homo sapien
caacgtgagctttatgcatcagagt

SEQ ID NO: 843774 - DNA, 25 bp, Homo sapien
catcagagtatagagataaggaagc

SEQ ID NO: 843775 - DNA, 25 bp, Homo sapien
aacacagggctgattaagatagcag

SEQ ID NO: 843776 - DNA, 25 bp, Homo sapien
cagggcccaacatgaactgacggtc

SEQ ID NO: 843777 - DNA, 25 bp, Homo sapien
cccatgttgtcctgtcatccgtaaa

SEQ ID NO: 843778 - DNA, 25 bp, Homo sapien
tgacggtctatatcccatgttgtcc

SEQ ID NO: 843779 - DNA, 25 bp, Homo sapien
aacgggctctcggaaaataagcaga

SEQ ID NO: 843780 - DNA, 25 bp, Homo sapien
ccaacgggctctcggaaaataagca

SEQ ID NO: 843781 - DNA, 25 bp, Homo sapien
cgtgctatagtcataccaacgggct

SEQ ID NO: 843782 - DNA, 25 bp, Homo sapien
tagtcataccaacgggctctcggaa

SEQ ID NO: 843783 - DNA, 25 bp, Homo sapien
cagggcaggatgtagcctcctctga

SEQ ID NO: 843784 - DNA, 25 bp, Homo sapien
tagcctcctctgacatgaaggttga

SEQ ID NO: 843785 - DNA, 25 bp, Homo sapien
tctgacatgaaggttgatgtggtca

SEQ ID NO: 843786 - DNA, 25 bp, Homo sapien
caggatgtagcctcctctgacatga

SEQ ID NO: 843787 - DNA, 25 bp, Homo sapien
aaagcaacaatcaatcccataaaat

SEQ ID NO: 843788 - DNA, 25 bp, Homo sapien
agcaacaatcaatcccataaaattt

SEQ ID NO: 843789 - DNA, 25 bp, Homo sapien
ctggccttcagctgtcccattgtca

SEQ ID NO: 843790 - DNA, 25 bp, Homo sapien
cattgtcatccaaagcaacaatcaa

SEQ ID NO: 843791 - DNA, 25 bp, Homo sapien
tgctataaagtttgccaaaaaataa

SEQ ID NO: 843792 - DNA, 25 bp, Homo sapien
ctgagctgctataaagtttgccaaa

SEQ ID NO: 843793 - DNA, 25 bp, Homo sapien
aaataatttccattttcataggtat

SEQ ID NO: 843794 - DNA, 25 bp, Homo sapien
caaaaaataatttccattttcatag

SEQ ID NO: 843795 - DNA, 25 bp, Homo sapien
ccaacttttagtggattcgagtcac

SEQ ID NO: 843796 - DNA, 25 bp, Homo sapien
tattgtgtatggtctggatttgcag

SEQ ID NO: 843797 - DNA, 25 bp, Homo sapien
taggtattcacaccccagattctaa

SEQ ID NO: 843798 - DNA, 25 bp, Homo sapien
aattgccggttgtcataggtgaaac

SEQ ID NO: 843799 - DNA, 25 bp, Homo sapien
tcgaagattaccacagtttactgcc

SEQ ID NO: 843800 - DNA, 25 bp, Homo sapien
ctgccaattttcgtctacctataag

SEQ ID NO: 843801 - DNA, 25 bp, Homo sapien
ccacaggtgggatgtattcattcga

SEQ ID NO: 843802 - DNA, 25 bp, Homo sapien
tcaaccttttatcctataccacagg

SEQ ID NO: 843803 - DNA, 25 bp, Homo sapien
tatctttggtgctggtagtagtgac

SEQ ID NO: 843804 - DNA, 25 bp, Homo sapien
gctaatgaggtgtggcttaaggcca

SEQ ID NO: 843805 - DNA, 25 bp, Homo sapien
ccatggtgcctagattagaaagatt

SEQ ID NO: 843806 - DNA, 25 bp, Homo sapien
gtgaccgtagcatctattaccatgg

SEQ ID NO: 843807 - DNA, 25 bp, Homo sapien
cgttatctgaggtaactatcctgcc

SEQ ID NO: 843808 - DNA, 25 bp, Homo sapien
caatataagtaggtgcagtagcaga

SEQ ID NO: 843809 - DNA, 25 bp, Homo sapien
tatctgtggtagcactagttgcagt

SEQ ID NO: 843810 - DNA, 25 bp, Homo sapien
tggttgcaaaataagtacccacagc

SEQ ID NO: 843811 - DNA, 25 bp, Homo sapien
catggatccctgaactaaacttcga

SEQ ID NO: 843812 - DNA, 25 bp, Homo sapien
ggacagtgccactatatactaatga

SEQ ID NO: 843813 - DNA, 25 bp, Homo sapien
aaacttcgagaatattgccctaggg

SEQ ID NO: 843814 - DNA, 25 bp, Homo sapien
cagcatagagcatctggacagtgcc

SEQ ID NO: 843815 - DNA, 25 bp, Homo sapien
gtccattgaacactgttgagtccag

SEQ ID NO: 843816 - DNA, 25 bp, Homo sapien
gactctagcgccattctttgtgatt

SEQ ID NO: 843817 - DNA, 25 bp, Homo sapien
aggatgcaccactacttccctggct

SEQ ID NO: 843818 - DNA, 25 bp, Homo sapien
attctctgggcaagactctagcgcc

SEQ ID NO: 843819 - DNA, 25 bp, Homo sapien
taattgtcgtcttgttgggactgcc

SEQ ID NO: 843820 - DNA, 25 bp, Homo sapien
attgtcgtcttgttgggactgccct

SEQ ID NO: 843821 - DNA, 25 bp, Homo sapien
aattgtcgtcttgttgggactgccc

SEQ ID NO: 843822 - DNA, 25 bp, Homo sapien
ctaattgtcgtcttgttgggactgc

SEQ ID NO: 843823 - DNA, 25 bp, Homo sapien
tcagatgtttgcctcatcctccaga

SEQ ID NO: 843824 - DNA, 25 bp, Homo sapien
tttgcctcatcctccagatgtggga

SEQ ID NO: 843825 - DNA, 25 bp, Homo sapien
ttgcctcatcctccagatgtgggaa

SEQ ID NO: 843826 - DNA, 25 bp, Homo sapien
gatgtttgcctcatcctccagatgt

SEQ ID NO: 843827 - DNA, 25 bp, Homo sapien
cagccccagtctaaccccatcccac

SEQ ID NO: 843828 - DNA, 25 bp, Homo sapien
tcataaggccctcatcctcacactg

SEQ ID NO: 843829 - DNA, 25 bp, Homo sapien
ataaggccctcatcctcacactgct

SEQ ID NO: 843830 - DNA, 25 bp, Homo sapien
catcataaggccctcatcctcacac

SEQ ID NO: 843831 - DNA, 25 bp, Homo sapien
ctggtaagataaccacttcaactat

SEQ ID NO: 843832 - DNA, 25 bp, Homo sapien
tgacattatctacgtggcccacgag

SEQ ID NO: 843833 - DNA, 25 bp, Homo sapien
gaatggcatcactggtaagataacc

SEQ ID NO: 843834 - DNA, 25 bp, Homo sapien
tactatccccaaaataacatctcca

SEQ ID NO: 843835 - DNA, 25 bp, Homo sapien
gcccaaatcaggatagtggcagtga

SEQ ID NO: 843836 - DNA, 25 bp, Homo sapien
ccaaatcaggatagtggcagtgaag

SEQ ID NO: 843837 - DNA, 25 bp, Homo sapien
ctagcccaaatcaggatagtggcag

SEQ ID NO: 843838 - DNA, 25 bp, Homo sapien
tagcccaaatcaggatagtggcagt

SEQ ID NO: 843839 - DNA, 25 bp, Homo sapien
tattacagcaagtcagagcaatgct

SEQ ID NO: 843840 - DNA, 25 bp, Homo sapien
gaggataccaccacttgatatctga

SEQ ID NO: 843841 - DNA, 25 bp, Homo sapien
gagtctgtctaataaagaacacctg

SEQ ID NO: 843842 - DNA, 25 bp, Homo sapien
gaaagatccggtctcagcaggagtc

SEQ ID NO: 843843 - DNA, 25 bp, Homo sapien
caaagtgttgaaattcgactgggag

SEQ ID NO: 843844 - DNA, 25 bp, Homo sapien
gtaatccattatcttatgactctct

SEQ ID NO: 843845 - DNA, 25 bp, Homo sapien
gtggcccgtaggatttcttgtaatc

SEQ ID NO: 843846 - DNA, 25 bp, Homo sapien
acaaaagaaggccatgtcagttctc

SEQ ID NO: 843847 - DNA, 25 bp, Homo sapien
taaggactcatgtgaagactgctct

SEQ ID NO: 843848 - DNA, 25 bp, Homo sapien
tctgttcctggcgagatctgtctgc

SEQ ID NO: 843849 - DNA, 25 bp, Homo sapien
tctgtctgccacgaagggttttctc

SEQ ID NO: 843850 - DNA, 25 bp, Homo sapien
caaggacacttggactaaagattgg

SEQ ID NO: 843851 - DNA, 25 bp, Homo sapien
agaaatttgctatagcaggcctggt

SEQ ID NO: 843852 - DNA, 25 bp, Homo sapien
tagaaatttgctatagcaggcctgg

SEQ ID NO: 843853 - DNA, 25 bp, Homo sapien
gattaagctgagctcagtcgccacc

SEQ ID NO: 843854 - DNA, 25 bp, Homo sapien
ctggtactcagtgcctcatctctgg

SEQ ID NO: 843855 - DNA, 25 bp, Homo sapien
ttaaggtctatgaaggcaatgaaca

SEQ ID NO: 843856 - DNA, 25 bp, Homo sapien
gcagccaagattatttgccacccca

SEQ ID NO: 843857 - DNA, 25 bp, Homo sapien
acacgagggatgccttgccccacgg

SEQ ID NO: 843858 - DNA, 25 bp, Homo sapien
acgagggatgccttgccccacgggt

SEQ ID NO: 843859 - DNA, 25 bp, Homo sapien
ttgccccacgggtgccctttgcagt

SEQ ID NO: 843860 - DNA, 25 bp, Homo sapien
tgccttgccccacgggtgccctttg

SEQ ID NO: 843861 - DNA, 25 bp, Homo sapien
acagtggagacttcagcccatggca

SEQ ID NO: 843862 - DNA, 25 bp, Homo sapien
gaggtgggtttagactagcttctca

SEQ ID NO: 843863 - DNA, 25 bp, Homo sapien
gcttggcactggcacctcaagaggt

SEQ ID NO: 843864 - DNA, 25 bp, Homo sapien
tccttgtcgtctgggtgtgcttccc

SEQ ID NO: 843865 - DNA, 25 bp, Homo sapien
ggtgcagagatacgcagctgagtct

SEQ ID NO: 843866 - DNA, 25 bp, Homo sapien
ccacatgaaggtataagcgagagct

SEQ ID NO: 843867 - DNA, 25 bp, Homo sapien
gagtcttcttgctgcagtgcgacca

SEQ ID NO: 843868 - DNA, 25 bp, Homo sapien
cagatgctcacgtttcattgtcctt

SEQ ID NO: 843869 - DNA, 25 bp, Homo sapien
tgctgaaccgagtgctgaggctcag

SEQ ID NO: 843870 - DNA, 25 bp, Homo sapien
gaatgctgaaccgagtgctgaggct

SEQ ID NO: 843871 - DNA, 25 bp, Homo sapien
ggctcagctggatgcgttgccccca

SEQ ID NO: 843872 - DNA, 25 bp, Homo sapien
ctgaaccgagtgctgaggctcagct

SEQ ID NO: 843873 - DNA, 25 bp, Homo sapien
tcctcagggtgaggcagtgatagag

SEQ ID NO: 843874 - DNA, 25 bp, Homo sapien
tgtcctcagggtgaggcagtgatag

SEQ ID NO: 843875 - DNA, 25 bp, Homo sapien
ctcagggtgaggcagtgatagagcc

SEQ ID NO: 843876 - DNA, 25 bp, Homo sapien
cagggtgaggcagtgatagagccac

SEQ ID NO: 843877 - DNA, 25 bp, Homo sapien
taggattacagagatagaaggaaaa

SEQ ID NO: 843878 - DNA, 25 bp, Homo sapien
gagagcagccaacaagaagttgaaa

SEQ ID NO: 843879 - DNA, 25 bp, Homo sapien
caggtacaacagattccacggctga

SEQ ID NO: 843880 - DNA, 25 bp, Homo sapien
tgctgtgagtaacaattcaggtaca

SEQ ID NO: 843881 - DNA, 25 bp, Homo sapien
gaggggcattttgagctcccatggc

SEQ ID NO: 843882 - DNA, 25 bp, Homo sapien
aggggcattttgagctcccatggcc

SEQ ID NO: 843883 - DNA, 25 bp, Homo sapien
ggaaaggaggggcattttgagctcc

SEQ ID NO: 843884 - DNA, 25 bp, Homo sapien
aaggaggggcattttgagctcccat

SEQ ID NO: 843885 - DNA, 25 bp, Homo sapien
gagactaaaaattgcccagcatacg

SEQ ID NO: 843886 - DNA, 25 bp, Homo sapien
ggaatgaggcctttcctagctcagg

SEQ ID NO: 843887 - DNA, 25 bp, Homo sapien
aattgcccagcatacgagccaggta

SEQ ID NO: 843888 - DNA, 25 bp, Homo sapien
gagccaggtatccatggcaggatca

SEQ ID NO: 843889 - DNA, 25 bp, Homo sapien
gaaactcgactttctgccccaagat

SEQ ID NO: 843890 - DNA, 25 bp, Homo sapien
ccagctttgtggaccggatcttcag

SEQ ID NO: 843891 - DNA, 25 bp, Homo sapien
ggacacagcgcaagatcacttcctg

SEQ ID NO: 843892 - DNA, 25 bp, Homo sapien
gagtgaaatttgatccatcaggcct

SEQ ID NO: 843893 - DNA, 25 bp, Homo sapien
gctctgtgagggattttgcacaggc

SEQ ID NO: 843894 - DNA, 25 bp, Homo sapien
ctctgtgagggattttgcacaggct

SEQ ID NO: 843895 - DNA, 25 bp, Homo sapien
tctgtgagggattttgcacaggctg

SEQ ID NO: 843896 - DNA, 25 bp, Homo sapien
tgagctagcatcattagcccaaatg

SEQ ID NO: 843897 - DNA, 25 bp, Homo sapien
tattctggcgattctcatgctggtc

SEQ ID NO: 843898 - DNA, 25 bp, Homo sapien
caagaagttaatctggctgcttcag

SEQ ID NO: 843899 - DNA, 25 bp, Homo sapien
tctgcctctaggtgtctcttgactt

SEQ ID NO: 843900 - DNA, 25 bp, Homo sapien
gcaaatgaatagtctatatttatcc

SEQ ID NO: 843901 - DNA, 25 bp, Homo sapien
ggttcacatgcaacaaatctggcag

SEQ ID NO: 843902 - DNA, 25 bp, Homo sapien
aagcacctgcacagcaaggcaaatg

SEQ ID NO: 843903 - DNA, 25 bp, Homo sapien
gtctaggctctttgctagatcaaaa

SEQ ID NO: 843904 - DNA, 25 bp, Homo sapien
tttttaaagcatcccatttcctgat

SEQ ID NO: 843905 - DNA, 25 bp, Homo sapien
ttttttaaagcatcccatttcctga

SEQ ID NO: 843906 - DNA, 25 bp, Homo sapien
aaatacatattacatggaggccagc

SEQ ID NO: 843907 - DNA, 25 bp, Homo sapien
tatgaaatacatattacatggaggc

SEQ ID NO: 843908 - DNA, 25 bp, Homo sapien
atacatattacatggaggccagcaa

SEQ ID NO: 843909 - DNA, 25 bp, Homo sapien
tgaaatacatattacatggaggcca

SEQ ID NO: 843910 - DNA, 25 bp, Homo sapien
cagagtgaggcagaccaggcaaggc

SEQ ID NO: 843911 - DNA, 25 bp, Homo sapien
gattctggtctgcagtggtgagagg

SEQ ID NO: 843912 - DNA, 25 bp, Homo sapien
agaggactaggctgtggtttccact

SEQ ID NO: 843913 - DNA, 25 bp, Homo sapien
ggcagagtgaggcagaccaggcaag

SEQ ID NO: 843914 - DNA, 25 bp, Homo sapien
gaggcagaagaccacacagcagagg

SEQ ID NO: 843915 - DNA, 25 bp, Homo sapien
gaggaggcagaagaccacacagcag

SEQ ID NO: 843916 - DNA, 25 bp, Homo sapien
gcttggaggaggcagaagaccacac

SEQ ID NO: 843917 - DNA, 25 bp, Homo sapien
ttggaggaggcagaagaccacacag

SEQ ID NO: 843918 - DNA, 25 bp, Homo sapien
atcatgtcacctgggcccgggactc

SEQ ID NO: 843919 - DNA, 25 bp, Homo sapien
ggcttagggactccaataggatcat

SEQ ID NO: 843920 - DNA, 25 bp, Homo sapien
tagggactccaataggatcatgtca

SEQ ID NO: 843921 - DNA, 25 bp, Homo sapien
ttgtcatggtgaaaaggcttaggga

SEQ ID NO: 843922 - DNA, 25 bp, Homo sapien
gctccttattattgtagctaaacat

SEQ ID NO: 843923 - DNA, 25 bp, Homo sapien
agtatcatggcccagattttgttca

SEQ ID NO: 843924 - DNA, 25 bp, Homo sapien
ggacttgtcgtttcccatctgtgtg

SEQ ID NO: 843925 - DNA, 25 bp, Homo sapien
ggtattttggagtctgggaaacagc

SEQ ID NO: 843926 - DNA, 25 bp, Homo sapien
ctgtgtcttggctgctggcacagaa

SEQ ID NO: 843927 - DNA, 25 bp, Homo sapien
cagggctgtgtcttggctgctggca

SEQ ID NO: 843928 - DNA, 25 bp, Homo sapien
tttgcagggctgtgtcttggctgct

SEQ ID NO: 843929 - DNA, 25 bp, Homo sapien
gggctgtgtcttggctgctggcaca

SEQ ID NO: 843930 - DNA, 25 bp, Homo sapien
ttcctggctgagccgggaggtttgt

SEQ ID NO: 843931 - DNA, 25 bp, Homo sapien
tcctggctgagccgggaggtttgtg

SEQ ID NO: 843932 - DNA, 25 bp, Homo sapien
cgggaggtttgtgcacagggatgca

SEQ ID NO: 843933 - DNA, 25 bp, Homo sapien
gggaggtttgtgcacagggatgcag

SEQ ID NO: 843934 - DNA, 25 bp, Homo sapien
tggctgtactacagactgaaactcc

SEQ ID NO: 843935 - DNA, 25 bp, Homo sapien
gctggctgtactacagactgaaact

SEQ ID NO: 843936 - DNA, 25 bp, Homo sapien
ctggctgtactacagactgaaactc

SEQ ID NO: 843937 - DNA, 25 bp, Homo sapien
gaagccctgctctagctgataaaca

SEQ ID NO: 843938 - DNA, 25 bp, Homo sapien
tgtgcataagatggaggacttctcc

SEQ ID NO: 843939 - DNA, 25 bp, Homo sapien
tagtggctttgttgtgaagccctgc

SEQ ID NO: 843940 - DNA, 25 bp, Homo sapien
acaattctgtgagacttttgtgtgc

SEQ ID NO: 843941 - DNA, 25 bp, Homo sapien
tgtgattcccactaagaccctggaa

SEQ ID NO: 843942 - DNA, 25 bp, Homo sapien
caggtcctaagttgtgtatgcagag

SEQ ID NO: 843943 - DNA, 25 bp, Homo sapien
caaactctggaaggctgtagacacg

SEQ ID NO: 843944 - DNA, 25 bp, Homo sapien
caaggctgaaatagaccctagcaag

SEQ ID NO: 843945 - DNA, 25 bp, Homo sapien
gaactttccaactaggaaccagctg

SEQ ID NO: 843946 - DNA, 25 bp, Homo sapien
agccctgccatttctaagatgttag

SEQ ID NO: 843947 - DNA, 25 bp, Homo sapien
caacaaatactccttgagcaacagc

SEQ ID NO: 843948 - DNA, 25 bp, Homo sapien
gagcaagcagaaaatcaccaacatt

SEQ ID NO: 843949 - DNA, 25 bp, Homo sapien
tcttgtgatgtcactgctcctgata

SEQ ID NO: 843950 - DNA, 25 bp, Homo sapien
ttcttgtgatgtcactgctcctgat

SEQ ID NO: 843951 - DNA, 25 bp, Homo sapien
aagggacaaaattcaggcagagccc

SEQ ID NO: 843952 - DNA, 25 bp, Homo sapien
acaaaattcaggcagagcccaggaa

SEQ ID NO: 843953 - DNA, 25 bp, Homo sapien
gcagagcccaggaagagggttgttc

SEQ ID NO: 843954 - DNA, 25 bp, Homo sapien
tgtaggaggaaagggacaaaattca

SEQ ID NO: 843955 - DNA, 25 bp, Homo sapien
tgtagacaaacatgagctccggtgg

SEQ ID NO: 843956 - DNA, 25 bp, Homo sapien
ggtgagaagcgacttggcacacttt

SEQ ID NO: 843957 - DNA, 25 bp, Homo sapien
gctccggtggcttcttagctttctg

SEQ ID NO: 843958 - DNA, 25 bp, Homo sapien
ttgtaccaatacatagccctgtgcc

SEQ ID NO: 843959 - DNA, 25 bp, Homo sapien
tggcaggccccgaaggtttctgcac

SEQ ID NO: 843960 - DNA, 25 bp, Homo sapien
ctggcaggccccgaaggtttctgca

SEQ ID NO: 843961 - DNA, 25 bp, Homo sapien
tcctggcaggccccgaaggtttctg

SEQ ID NO: 843962 - DNA, 25 bp, Homo sapien
ggcaggccccgaaggtttctgcaca

SEQ ID NO: 843963 - DNA, 25 bp, Homo sapien
gcaggtgctatgatgttctgaagct

SEQ ID NO: 843964 - DNA, 25 bp, Homo sapien
tcacactcaggcaaaaggaaaccca

SEQ ID NO: 843965 - DNA, 25 bp, Homo sapien
taaactagatctgaatatgtttctc

SEQ ID NO: 843966 - DNA, 25 bp, Homo sapien
gttgccacatggatgaattagcagg

SEQ ID NO: 843967 - DNA, 25 bp, Homo sapien
ttcccagtgctcagtgttgcttgac

SEQ ID NO: 843968 - DNA, 25 bp, Homo sapien
agtgctcagtgttgcttgactctgc

SEQ ID NO: 843969 - DNA, 25 bp, Homo sapien
cagtgttgcttgactctgcatgaca

SEQ ID NO: 843970 - DNA, 25 bp, Homo sapien
ttgcttgactctgcatgacaacaac

SEQ ID NO: 843971 - DNA, 25 bp, Homo sapien
tgtggggctggactgaggttaggct

SEQ ID NO: 843972 - DNA, 25 bp, Homo sapien
tggggctggactgaggttaggctgc

SEQ ID NO: 843973 - DNA, 25 bp, Homo sapien
atgtggggctggactgaggttaggc

SEQ ID NO: 843974 - DNA, 25 bp, Homo sapien
catgtggggctggactgaggttagg

SEQ ID NO: 843975 - DNA, 25 bp, Homo sapien
gcagcacccaacagagcagcctgga

SEQ ID NO: 843976 - DNA, 25 bp, Homo sapien
gcaggcagcactgtgtctgtgctca

SEQ ID NO: 843977 - DNA, 25 bp, Homo sapien
ggagacaaagcagcacccaacagag

SEQ ID NO: 843978 - DNA, 25 bp, Homo sapien
agcctggagcccatggcacaaaggg

SEQ ID NO: 843979 - DNA, 25 bp, Homo sapien
gcgcaaagataaagggccgagtccc

SEQ ID NO: 843980 - DNA, 25 bp, Homo sapien
ttggtaccaggatacactcctatgc

SEQ ID NO: 843981 - DNA, 25 bp, Homo sapien
agaactggcgccctgagaatcgacc

SEQ ID NO: 843982 - DNA, 25 bp, Homo sapien
cattcatctcagagcgagagttaga

SEQ ID NO: 843983 - DNA, 25 bp, Homo sapien
ccagggaggtttgtgcacagaatgt

SEQ ID NO: 843984 - DNA, 25 bp, Homo sapien
gatatgtcagggctgaggttgctcc

SEQ ID NO: 843985 - DNA, 25 bp, Homo sapien
atatgtcagggctgaggttgctcca

SEQ ID NO: 843986 - DNA, 25 bp, Homo sapien
gttgctccacattgggccagggagg

SEQ ID NO: 843987 - DNA, 25 bp, Homo sapien
cttgttcacccattgaaagactcag

SEQ ID NO: 843988 - DNA, 25 bp, Homo sapien
cacccaattcttcgggtacagtcct

SEQ ID NO: 843989 - DNA, 25 bp, Homo sapien
tcacccaattcttcgggtacagtcc

SEQ ID NO: 843990 - DNA, 25 bp, Homo sapien
gttcacccattgaaagactcaggct

SEQ ID NO: 843991 - DNA, 25 bp, Homo sapien
ctgggtctgtgcatcggtgataggg

SEQ ID NO: 843992 - DNA, 25 bp, Homo sapien
gtctgtgcatcggtgataggggaac

SEQ ID NO: 843993 - DNA, 25 bp, Homo sapien
cttctgggtctgtgcatcggtgata

SEQ ID NO: 843994 - DNA, 25 bp, Homo sapien
tctgtgcatcggtgataggggaaca

SEQ ID NO: 843995 - DNA, 25 bp, Homo sapien
ctgcagccacaatggaaacaggctg

SEQ ID NO: 843996 - DNA, 25 bp, Homo sapien
acaaagctgatgctgcagccacaat

SEQ ID NO: 843997 - DNA, 25 bp, Homo sapien
aagaacaaagctgatgctgcagcca

SEQ ID NO: 843998 - DNA, 25 bp, Homo sapien
agagaagaacaaagctgatgctgca

SEQ ID NO: 843999 - DNA, 25 bp, Homo sapien
tttgtcagtggtaccctcagaagct

SEQ ID NO: 844000 - DNA, 25 bp, Homo sapien
ctcagaagctgagtaataaatcagc

SEQ ID NO: 844001 - DNA, 25 bp, Homo sapien
gaagctgagtaataaatcagcctca

SEQ ID NO: 844002 - DNA, 25 bp, Homo sapien
ctcctttgtcagtggtaccctcaga

SEQ ID NO: 844003 - DNA, 25 bp, Homo sapien
cagcctgagcgagaactcccgtttg

SEQ ID NO: 844004 - DNA, 25 bp, Homo sapien
ctccagcctgagcgagaactcccgt

SEQ ID NO: 844005 - DNA, 25 bp, Homo sapien
ccagcctgagcgagaactcccgttt

SEQ ID NO: 844006 - DNA, 25 bp, Homo sapien
agcctgagcgagaactcccgtttgt

SEQ ID NO: 844007 - DNA, 25 bp, Homo sapien
tgcagagaggagacggccatgcagc

SEQ ID NO: 844008 - DNA, 25 bp, Homo sapien
aggaggcagagcctccctgccttta

SEQ ID NO: 844009 - DNA, 25 bp, Homo sapien
gaggagacggccatgcagcgctgtg

SEQ ID NO: 844010 - DNA, 25 bp, Homo sapien
cctgcctttatgtgcagagaggaga

SEQ ID NO: 844011 - DNA, 25 bp, Homo sapien
tgccatccccattgatgccccagcc

SEQ ID NO: 844012 - DNA, 25 bp, Homo sapien
catgttctctaggatgtgtcaacag

SEQ ID NO: 844013 - DNA, 25 bp, Homo sapien
ctgtctgctgggcatgttctctagg

SEQ ID NO: 844014 - DNA, 25 bp, Homo sapien
tccgccaacacaaagcaccaaaagg

SEQ ID NO: 844015 - DNA, 25 bp, Homo sapien
ccccaggagacatatggctgcccag

SEQ ID NO: 844016 - DNA, 25 bp, Homo sapien
tgcccccaggagacatatggctgcc

SEQ ID NO: 844017 - DNA, 25 bp, Homo sapien
caggagacatatggctgcccagcag

SEQ ID NO: 844018 - DNA, 25 bp, Homo sapien
cccagcagaggagccttgtgcccat

SEQ ID NO: 844019 - DNA, 25 bp, Homo sapien
acctctgtgcagagaaccgatcacg

SEQ ID NO: 844020 - DNA, 25 bp, Homo sapien
catccttgccttggaagtaaattgg

SEQ ID NO: 844021 - DNA, 25 bp, Homo sapien
gggaagccccgatttgtctgctgca

SEQ ID NO: 844022 - DNA, 25 bp, Homo sapien
ctttgctaccttgtgtctcagggac

SEQ ID NO: 844023 - DNA, 25 bp, Homo sapien
tatttgtcagcattcaggttctaga

SEQ ID NO: 844024 - DNA, 25 bp, Homo sapien
ccatttcctagggaaccaagctgac

SEQ ID NO: 844025 - DNA, 25 bp, Homo sapien
catttttaaacgcaggttgcatggt

SEQ ID NO: 844026 - DNA, 25 bp, Homo sapien
gtcattgcactatgtacatacattt

SEQ ID NO: 844027 - DNA, 25 bp, Homo sapien
caggaccaacttcagggttcttaca

SEQ ID NO: 844028 - DNA, 25 bp, Homo sapien
gagacaagcggctgtttggtgtttt

SEQ ID NO: 844029 - DNA, 25 bp, Homo sapien
gagaagaacgttcgtggtgcacaga

SEQ ID NO: 844030 - DNA, 25 bp, Homo sapien
gagactggcctcaacgtgatgccag

SEQ ID NO: 844031 - DNA, 25 bp, Homo sapien
actgccccttgcacgctttggcagg

SEQ ID NO: 844032 - DNA, 25 bp, Homo sapien
ggcctttgcgagtttctctccctgc

SEQ ID NO: 844033 - DNA, 25 bp, Homo sapien
ttctggagcttcctgcgggaactgg

SEQ ID NO: 844034 - DNA, 25 bp, Homo sapien
gcatgtctctcacggtcacttcctg

SEQ ID NO: 844035 - DNA, 25 bp, Homo sapien
agcctgcagcccatgctagcctcgg

SEQ ID NO: 844036 - DNA, 25 bp, Homo sapien
gcccatgctagcctcgggtctgaga

SEQ ID NO: 844037 - DNA, 25 bp, Homo sapien
ccatgctagcctcgggtctgagatg

SEQ ID NO: 844038 - DNA, 25 bp, Homo sapien
tgcagcccatgctagcctcgggtct

SEQ ID NO: 844039 - DNA, 25 bp, Homo sapien
gtaccaatacatagcgttatgcccc

SEQ ID NO: 844040 - DNA, 25 bp, Homo sapien
ttgtaccaatacatagcgttatgcc

SEQ ID NO: 844041 - DNA, 25 bp, Homo sapien
cttgtaccaatacatagcgttatgc

SEQ ID NO: 844042 - DNA, 25 bp, Homo sapien
tgtaccaatacatagcgttatgccc

SEQ ID NO: 844043 - DNA, 25 bp, Homo sapien
tgtaggtgaaggaataagtgagagc

SEQ ID NO: 844044 - DNA, 25 bp, Homo sapien
cattcaggtgagaagcgacttggca

SEQ ID NO: 844045 - DNA, 25 bp, Homo sapien
tacagggccgagtcttctggctgca

SEQ ID NO: 844046 - DNA, 25 bp, Homo sapien
caggaaagcggtgactctgcaaggc

SEQ ID NO: 844047 - DNA, 25 bp, Homo sapien
tggcttcaaccacttctaaaaccat

SEQ ID NO: 844048 - DNA, 25 bp, Homo sapien
ctggcttcaaccacttctaaaacca

SEQ ID NO: 844049 - DNA, 25 bp, Homo sapien
agcacaagagcatgaccagggtctg

SEQ ID NO: 844050 - DNA, 25 bp, Homo sapien
acaagagcatgaccagggtctgggt

SEQ ID NO: 844051 - DNA, 25 bp, Homo sapien
cacaagagcatgaccagggtctggg

SEQ ID NO: 844052 - DNA, 25 bp, Homo sapien
gcacaagagcatgaccagggtctgg

SEQ ID NO: 844053 - DNA, 25 bp, Homo sapien
actgcaggatggaggggtcctctgg

SEQ ID NO: 844054 - DNA, 25 bp, Homo sapien
agcccgaggctcatggcaggaactg

SEQ ID NO: 844055 - DNA, 25 bp, Homo sapien
cccgaggctcatggcaggaactgca

SEQ ID NO: 844056 - DNA, 25 bp, Homo sapien
ggagcccgaggctcatggcaggaac

SEQ ID NO: 844057 - DNA, 25 bp, Homo sapien
gacaaagctgatgctactgctccag

SEQ ID NO: 844058 - DNA, 25 bp, Homo sapien
aaggacaaagctgatgctactgctc

SEQ ID NO: 844059 - DNA, 25 bp, Homo sapien
ttgaaatccacacaaggggccccgc

SEQ ID NO: 844060 - DNA, 25 bp, Homo sapien
gggatgggccttgaaatccacacaa

SEQ ID NO: 844061 - DNA, 25 bp, Homo sapien
tcctttggcagttgtaccctcacca

SEQ ID NO: 844062 - DNA, 25 bp, Homo sapien
ctgagtaatgaatcagcctcagccc

SEQ ID NO: 844063 - DNA, 25 bp, Homo sapien
tcatatcctgggcacacagcagtgt

SEQ ID NO: 844064 - DNA, 25 bp, Homo sapien
tgagtgacaccagcattcactggac

SEQ ID NO: 844065 - DNA, 25 bp, Homo sapien
tgctaggaccaagggcatcgctgaa

SEQ ID NO: 844066 - DNA, 25 bp, Homo sapien
agggcatcgctgaatctgtgctgcg

SEQ ID NO: 844067 - DNA, 25 bp, Homo sapien
ggctccaaagttttcggtgctagga

SEQ ID NO: 844068 - DNA, 25 bp, Homo sapien
acagccgtgcagcactgtggagtaa

SEQ ID NO: 844069 - DNA, 25 bp, Homo sapien
ccaggcttgagagtgcagaatgtca

SEQ ID NO: 844070 - DNA, 25 bp, Homo sapien
taaatgcagctcttcaaacgttcac

SEQ ID NO: 844071 - DNA, 25 bp, Homo sapien
tgaggacagtcccaatgtaggttcc

SEQ ID NO: 844072 - DNA, 25 bp, Homo sapien
tgctgcgctccaagctgcgaaatac

SEQ ID NO: 844073 - DNA, 25 bp, Homo sapien
agtgtctgcatagaactgttcatca

SEQ ID NO: 844074 - DNA, 25 bp, Homo sapien
tcatgcctcagcaacagcgtgtttt

SEQ ID NO: 844075 - DNA, 25 bp, Homo sapien
acattgaaggtgaggtgcggtaact

SEQ ID NO: 844076 - DNA, 25 bp, Homo sapien
atagaactgttcatcatagctgtgg

SEQ ID NO: 844077 - DNA, 25 bp, Homo sapien
tcatttgtcaatttcatttgatggc

SEQ ID NO: 844078 - DNA, 25 bp, Homo sapien
gtcaatttcatttgatggctgagaa

SEQ ID NO: 844079 - DNA, 25 bp, Homo sapien
tttgtcaatttcatttgatggctga

SEQ ID NO: 844080 - DNA, 25 bp, Homo sapien
tcaatttcatttgatggctgagaag

SEQ ID NO: 844081 - DNA, 25 bp, Homo sapien
gaggtgctgtgccattgaggtcaca

SEQ ID NO: 844082 - DNA, 25 bp, Homo sapien
tctagcatggctcctccctttcatg

SEQ ID NO: 844083 - DNA, 25 bp, Homo sapien
cctgcactggcttctttaaaggagt

SEQ ID NO: 844084 - DNA, 25 bp, Homo sapien
tgaggtcacagcctgtaatcattcc

SEQ ID NO: 844085 - DNA, 25 bp, Homo sapien
ctgtgtgaccaggtattttggagtc

SEQ ID NO: 844086 - DNA, 25 bp, Homo sapien
gtgtgaccaggtattttggagtctg

SEQ ID NO: 844087 - DNA, 25 bp, Homo sapien
tgtgtgaccaggtattttggagtct

SEQ ID NO: 844088 - DNA, 25 bp, Homo sapien
atctgtgtgaccaggtattttggag

SEQ ID NO: 844089 - DNA, 25 bp, Homo sapien
gttactgtagataaacattgtcttc

SEQ ID NO: 844090 - DNA, 25 bp, Homo sapien
tgttactgtagataaacattgtctt

SEQ ID NO: 844091 - DNA, 25 bp, Homo sapien
ttcctggctgagccgggaggtttgt

SEQ ID NO: 844092 - DNA, 25 bp, Homo sapien
tcctggctgagccgggaggtttgtg

SEQ ID NO: 844093 - DNA, 25 bp, Homo sapien
cgggaggtttgtgcacagggatgca

SEQ ID NO: 844094 - DNA, 25 bp, Homo sapien
gggaggtttgtgcacagggatgcag

SEQ ID NO: 844095 - DNA, 25 bp, Homo sapien
tgcagcccatgctagcctcgggtct

SEQ ID NO: 844096 - DNA, 25 bp, Homo sapien
gcccatgctagcctcgggtctgaga

SEQ ID NO: 844097 - DNA, 25 bp, Homo sapien
ccatgctagcctcgggtctgagatg

SEQ ID NO: 844098 - DNA, 25 bp, Homo sapien
agcctgcagcccatgctagcctcgg

SEQ ID NO: 844099 - DNA, 25 bp, Homo sapien
aagggacaaaattcaggcagagccc

SEQ ID NO: 844100 - DNA, 25 bp, Homo sapien
gggaaagggacaaaattcaggcaga

SEQ ID NO: 844101 - DNA, 25 bp, Homo sapien
gaaagggacaaaattcaggcagagc

SEQ ID NO: 844102 - DNA, 25 bp, Homo sapien
gcagagcccaggaggaggcttgttg

SEQ ID NO: 844103 - DNA, 25 bp, Homo sapien
tttcaacccgttcttcaagactgta

SEQ ID NO: 844104 - DNA, 25 bp, Homo sapien
ttcttcaagactgtagacaaacatg

SEQ ID NO: 844105 - DNA, 25 bp, Homo sapien
gtaccaatacatagcgttatgaccc

SEQ ID NO: 844106 - DNA, 25 bp, Homo sapien
cttgtaccaatacatagcgttatga

SEQ ID NO: 844107 - DNA, 25 bp, Homo sapien
ttcaggtgagaagcgacttggcaca

SEQ ID NO: 844108 - DNA, 25 bp, Homo sapien
gcattcaggtgagaagcgacttggc

SEQ ID NO: 844109 - DNA, 25 bp, Homo sapien
taggtgaaggaataagtgagagctg

SEQ ID NO: 844110 - DNA, 25 bp, Homo sapien
tgtgtaggtgaaggaataagtgaga

SEQ ID NO: 844111 - DNA, 25 bp, Homo sapien
agagatacagggccgagtcttctgg

SEQ ID NO: 844112 - DNA, 25 bp, Homo sapien
cagagatacagggccgagtcttctg

SEQ ID NO: 844113 - DNA, 25 bp, Homo sapien
atgagcataggatgtaacgttgcca

SEQ ID NO: 844114 - DNA, 25 bp, Homo sapien
ctggagggcccctaaggtttctgca

SEQ ID NO: 844115 - DNA, 25 bp, Homo sapien
tatgagcataggatgtaacgttgcc

SEQ ID NO: 844116 - DNA, 25 bp, Homo sapien
aatatgagcataggatgtaacgttg

SEQ ID NO: 844117 - DNA, 25 bp, Homo sapien
gagtcacacgctaaagaaaacccac

SEQ ID NO: 844118 - DNA, 25 bp, Homo sapien
aagactagatctgaatgtgtttatc

SEQ ID NO: 844119 - DNA, 25 bp, Homo sapien
gactagatctgaatgtgtttatcat

SEQ ID NO: 844120 - DNA, 25 bp, Homo sapien
gggcagagtcacacgctaaagaaaa

SEQ ID NO: 844121 - DNA, 25 bp, Homo sapien
acaagagcatgaccagggtctgggt

SEQ ID NO: 844122 - DNA, 25 bp, Homo sapien
cacaagagcatgaccagggtctggg

SEQ ID NO: 844123 - DNA, 25 bp, Homo sapien
agcacaagagcatgaccagggtctg

SEQ ID NO: 844124 - DNA, 25 bp, Homo sapien
gcacaagagcatgaccagggtctgg

SEQ ID NO: 844125 - DNA, 25 bp, Homo sapien
ctgatgctacagctccagtggaaag

SEQ ID NO: 844126 - DNA, 25 bp, Homo sapien
ttgaaatccacacaaggggccccgc

SEQ ID NO: 844127 - DNA, 25 bp, Homo sapien
ggccttgaaatccacacaaggggcc

SEQ ID NO: 844128 - DNA, 25 bp, Homo sapien
gatgctacagctccagtggaaaggg

SEQ ID NO: 844129 - DNA, 25 bp, Homo sapien
tcctttggcagttgtaccctcacca

SEQ ID NO: 844130 - DNA, 25 bp, Homo sapien
tcatatcctgggcacacagcagtgt

SEQ ID NO: 844131 - DNA, 25 bp, Homo sapien
ctgagtaatgaatcagcctcagccc

SEQ ID NO: 844132 - DNA, 25 bp, Homo sapien
tgagtgacaccagcattcactggac

SEQ ID NO: 844133 - DNA, 25 bp, Homo sapien
gaggagacagccgtgcagcactgtg

SEQ ID NO: 844134 - DNA, 25 bp, Homo sapien
cccttgcctttctgtgcagagagga

SEQ ID NO: 844135 - DNA, 25 bp, Homo sapien
gcagagaggagacagccgtgcagca

SEQ ID NO: 844136 - DNA, 25 bp, Homo sapien
ttcccttgcctttctgtgcagagag

SEQ ID NO: 844137 - DNA, 25 bp, Homo sapien
caaagttttcggtgctaggaccaag

SEQ ID NO: 844138 - DNA, 25 bp, Homo sapien
ggctccaaagttttcggtgctagga

SEQ ID NO: 844139 - DNA, 25 bp, Homo sapien
tgctaggaccaagggcatcgctgaa

SEQ ID NO: 844140 - DNA, 25 bp, Homo sapien
agggcatcgctgaatctgtgctgcg

SEQ ID NO: 844141 - DNA, 25 bp, Homo sapien
tgaggacagtcccaatgtaggttcc

SEQ ID NO: 844142 - DNA, 25 bp, Homo sapien
taaatgcagctcttcaaacgttcac

SEQ ID NO: 844143 - DNA, 25 bp, Homo sapien
tgctgcgctccaagctgcgaaatac

SEQ ID NO: 844144 - DNA, 25 bp, Homo sapien
ccaggcttgagagtgcagaatgtca

SEQ ID NO: 844145 - DNA, 25 bp, Homo sapien
cagccgctcctctgtctgctgagca

SEQ ID NO: 844146 - DNA, 25 bp, Homo sapien
tccgagttcaccttctcatcccaca

SEQ ID NO: 844147 - DNA, 25 bp, Homo sapien
ccacagccgctcctctgtctgctga

SEQ ID NO: 844148 - DNA, 25 bp, Homo sapien
gctgcatctccgagttcaccttctc

SEQ ID NO: 844149 - DNA, 25 bp, Homo sapien
tgggagctttaccagatcaggatca

SEQ ID NO: 844150 - DNA, 25 bp, Homo sapien
ggatgggagctttaccagatcagga

SEQ ID NO: 844151 - DNA, 25 bp, Homo sapien
cccagaagaggagcctggtgcccat

SEQ ID NO: 844152 - DNA, 25 bp, Homo sapien
acccagaagaggagcctggtgccca

SEQ ID NO: 844153 - DNA, 25 bp, Homo sapien
tgcccccaggagacagaaggccacc

SEQ ID NO: 844154 - DNA, 25 bp, Homo sapien
ccaggagacagaaggccacccagaa

SEQ ID NO: 844155 - DNA, 25 bp, Homo sapien
tctggtgcactgttgccttggaagt

SEQ ID NO: 844156 - DNA, 25 bp, Homo sapien
cactgttgccttggaagtaaattaa

SEQ ID NO: 844157 - DNA, 25 bp, Homo sapien
gtggagacggatcccccagtcctct

SEQ ID NO: 844158 - DNA, 25 bp, Homo sapien
tctgtgaccttgttactgggggact

SEQ ID NO: 844159 - DNA, 25 bp, Homo sapien
ggagaagcaaagagaagcctctgtt

SEQ ID NO: 844160 - DNA, 25 bp, Homo sapien
cccaaaggacaagctgaggtccaaa

SEQ ID NO: 844161 - DNA, 25 bp, Homo sapien
ctacccaaaggacaagctgaggtcc

SEQ ID NO: 844162 - DNA, 25 bp, Homo sapien
aggacaagctgaggtccaaatctac

SEQ ID NO: 844163 - DNA, 25 bp, Homo sapien
aaggacaagctgaggtccaaatcta

SEQ ID NO: 844164 - DNA, 25 bp, Homo sapien
ctgaggactccaatagcccggtggg

SEQ ID NO: 844165 - DNA, 25 bp, Homo sapien
ttccaatgtaacagaagaggcttca

SEQ ID NO: 844166 - DNA, 25 bp, Homo sapien
gaagcttcagaccttgcagatgccc

SEQ ID NO: 844167 - DNA, 25 bp, Homo sapien
catgcccgaagcttctctatgtggg

SEQ ID NO: 844168 - DNA, 25 bp, Homo sapien
tcaccacaggaaaggataaggattg

SEQ ID NO: 844169 - DNA, 25 bp, Homo sapien
taacagtggattgtattctggaata

SEQ ID NO: 844170 - DNA, 25 bp, Homo sapien
tagagcagcaattaccagaggttgg

SEQ ID NO: 844171 - DNA, 25 bp, Homo sapien
tctggaatattgctaacagagtaca

SEQ ID NO: 844172 - DNA, 25 bp, Homo sapien
agtctcactgacattttctccctta

SEQ ID NO: 844173 - DNA, 25 bp, Homo sapien
cagttacagtctcactgacattttc

SEQ ID NO: 844174 - DNA, 25 bp, Homo sapien
cccatagctgcagttacagtctcac

SEQ ID NO: 844175 - DNA, 25 bp, Homo sapien
gctgcagttacagtctcactgacat

SEQ ID NO: 844176 - DNA, 25 bp, Homo sapien
agtccggggcattctgactgggctc

SEQ ID NO: 844177 - DNA, 25 bp, Homo sapien
ctagtccggggcattctgactgggc

SEQ ID NO: 844178 - DNA, 25 bp, Homo sapien
ggggcattctgactgggctcaggca

SEQ ID NO: 844179 - DNA, 25 bp, Homo sapien
tccggggcattctgactgggctcag

SEQ ID NO: 844180 - DNA, 25 bp, Homo sapien
aggcagaaagtgaggacaaggcttc

SEQ ID NO: 844181 - DNA, 25 bp, Homo sapien
ggcagaaagtgaggacaaggcttca

SEQ ID NO: 844182 - DNA, 25 bp, Homo sapien
caggcagaaagtgaggacaaggctt

SEQ ID NO: 844183 - DNA, 25 bp, Homo sapien
ggtcatgctgccaatactacctgaa

SEQ ID NO: 844184 - DNA, 25 bp, Homo sapien
tggtgctagtagactccagggttga

SEQ ID NO: 844185 - DNA, 25 bp, Homo sapien
ggatgcacagactgggagcccattg

SEQ ID NO: 844186 - DNA, 25 bp, Homo sapien
tgagaagagcttcaaaaaaggcatc

SEQ ID NO: 844187 - DNA, 25 bp, Homo sapien
catccctttagagttgagccccaca

SEQ ID NO: 844188 - DNA, 25 bp, Homo sapien
tctgtggcagggtggatctacttca

SEQ ID NO: 844189 - DNA, 25 bp, Homo sapien
actgtgatgcttcattgagaaccca

SEQ ID NO: 844190 - DNA, 25 bp, Homo sapien
tacttcataaacatagtggacactg

SEQ ID NO: 844191 - DNA, 25 bp, Homo sapien
cccaggaaacaaagcagcgtccagc

SEQ ID NO: 844192 - DNA, 25 bp, Homo sapien
tcccaggaaacaaagcagcgtccag

SEQ ID NO: 844193 - DNA, 25 bp, Homo sapien
cctagctccgtgtttgactcagtaa

SEQ ID NO: 844194 - DNA, 25 bp, Homo sapien
gctgacttggagttcgtaggtacca

SEQ ID NO: 844195 - DNA, 25 bp, Homo sapien
ttatggacgtggtgagctgagaatc

SEQ ID NO: 844196 - DNA, 25 bp, Homo sapien
taggtaccaggacacacagttatgc

SEQ ID NO: 844197 - DNA, 25 bp, Homo sapien
caggagcctgattctcatggcagat

SEQ ID NO: 844198 - DNA, 25 bp, Homo sapien
aacagggctgtcaaggaagtcatcc

SEQ ID NO: 844199 - DNA, 25 bp, Homo sapien
gcagatgctacaagacagagaggtc

SEQ ID NO: 844200 - DNA, 25 bp, Homo sapien
cttcttgtcgagagaggccatgccc

SEQ ID NO: 844201 - DNA, 25 bp, Homo sapien
aaatctacacatgggccctgcccag

SEQ ID NO: 844202 - DNA, 25 bp, Homo sapien
gaaatctacacatgggccctgccca

SEQ ID NO: 844203 - DNA, 25 bp, Homo sapien
tgaaatctacacatgggccctgccc

SEQ ID NO: 844204 - DNA, 25 bp, Homo sapien
ttgaaatctacacatgggccctgcc

SEQ ID NO: 844205 - DNA, 25 bp, Homo sapien
tgggtgatcccagcaatcactggac

SEQ ID NO: 844206 - DNA, 25 bp, Homo sapien
gaataatggatgagccttagcccca

SEQ ID NO: 844207 - DNA, 25 bp, Homo sapien
tacatctcagtgtcatgcgccgtcc

SEQ ID NO: 844208 - DNA, 25 bp, Homo sapien
tctggagacactataaccatcaggg

SEQ ID NO: 844209 - DNA, 25 bp, Homo sapien
cccctgcatttatgtacagagagga

SEQ ID NO: 844210 - DNA, 25 bp, Homo sapien
cagagcctcccctgcatttatgtac

SEQ ID NO: 844211 - DNA, 25 bp, Homo sapien
ccggcacccattgggcttccaagat

SEQ ID NO: 844212 - DNA, 25 bp, Homo sapien
gcacccattgggcttccaagattcc

SEQ ID NO: 844213 - DNA, 25 bp, Homo sapien
ggagctttaccagatcagggtcact

SEQ ID NO: 844214 - DNA, 25 bp, Homo sapien
gcagaggagcctggtgcccatgaca

SEQ ID NO: 844215 - DNA, 25 bp, Homo sapien
gatgggagctttaccagatcagggt

SEQ ID NO: 844216 - DNA, 25 bp, Homo sapien
cccatgacagagtcagggcaggatg

SEQ ID NO: 844217 - DNA, 25 bp, Homo sapien
ctgtgaccttgttactgggggtctg

SEQ ID NO: 844218 - DNA, 25 bp, Homo sapien
tgaccttgttactgggggtctggga

SEQ ID NO: 844219 - DNA, 25 bp, Homo sapien
tctgtgaccttgttactgggggtct

SEQ ID NO: 844220 - DNA, 25 bp, Homo sapien
tctctgtgaccttgttactgggggt

SEQ ID NO: 844221 - DNA, 25 bp, Homo sapien
gatcgttgggcagccctgagtcatc

SEQ ID NO: 844222 - DNA, 25 bp, Homo sapien
tcaggcctgactgcaaagaaccgat

SEQ ID NO: 844223 - DNA, 25 bp, Homo sapien
tctgccgcacccgtgccttggaagt

SEQ ID NO: 844224 - DNA, 25 bp, Homo sapien
cacccgtgccttggaagtaaattag

SEQ ID NO: 844225 - DNA, 25 bp, Homo sapien
cagggccttctgactggtctcaggc

SEQ ID NO: 844226 - DNA, 25 bp, Homo sapien
cccaggagacaaagggtcacacaga

SEQ ID NO: 844227 - DNA, 25 bp, Homo sapien
tcacacagaagagtttggggttcat

SEQ ID NO: 844228 - DNA, 25 bp, Homo sapien
acaaagggtcacacagaagagtttg

SEQ ID NO: 844229 - DNA, 25 bp, Homo sapien
tgctcccaggagacaaagggtcaca

SEQ ID NO: 844230 - DNA, 25 bp, Homo sapien
cttggcatctgggtgatcccagcat

SEQ ID NO: 844231 - DNA, 25 bp, Homo sapien
tgggtgatcccagcatcaatagagc

SEQ ID NO: 844232 - DNA, 25 bp, Homo sapien
tacaatgtgatatcttggcatctgg

SEQ ID NO: 844233 - DNA, 25 bp, Homo sapien
tctgtacaatgtgatatcttggcat

SEQ ID NO: 844234 - DNA, 25 bp, Homo sapien
tgctgtgaccactgcctgaatagtg

SEQ ID NO: 844235 - DNA, 25 bp, Homo sapien
ggataagcttcagcccccgtcttgg

SEQ ID NO: 844236 - DNA, 25 bp, Homo sapien
cacagtggtacagataggtctggct

SEQ ID NO: 844237 - DNA, 25 bp, Homo sapien
cccgtcttgggtcctgtcgatatca

SEQ ID NO: 844238 - DNA, 25 bp, Homo sapien
gagaatcaaagtgcacgctcaccta

SEQ ID NO: 844239 - DNA, 25 bp, Homo sapien
gacacaactgaggatcgatggctga

SEQ ID NO: 844240 - DNA, 25 bp, Homo sapien
gagacgtgcttcttgctgagataca

SEQ ID NO: 844241 - DNA, 25 bp, Homo sapien
tgctaaaagagtcaggagaaccatg

SEQ ID NO: 844242 - DNA, 25 bp, Homo sapien
cccacctagtgctgtcgtgctccat

SEQ ID NO: 844243 - DNA, 25 bp, Homo sapien
ctcccacctagtgctgtcgtgctcc

SEQ ID NO: 844244 - DNA, 25 bp, Homo sapien
tcccaggagataaagcagttcccag

SEQ ID NO: 844245 - DNA, 25 bp, Homo sapien
aggagataaagcagttcccagcaga

SEQ ID NO: 844246 - DNA, 25 bp, Homo sapien
ctgctcccaggagataaagcagttc

SEQ ID NO: 844247 - DNA, 25 bp, Homo sapien
gctcccaggagataaagcagttccc

SEQ ID NO: 844248 - DNA, 25 bp, Homo sapien
aaagcagatggaggatgagcacagc

SEQ ID NO: 844249 - DNA, 25 bp, Homo sapien
ggacacaggggtgggaaatctgaga

SEQ ID NO: 844250 - DNA, 25 bp, Homo sapien
tccccagtgtaaagtggaggacaca

SEQ ID NO: 844251 - DNA, 25 bp, Homo sapien
cctggaggtcctccccagtgtaaag

SEQ ID NO: 844252 - DNA, 25 bp, Homo sapien
ctcagagcaacagtcatggaactgg

SEQ ID NO: 844253 - DNA, 25 bp, Homo sapien
ggaactggcgccctgagaatcgatt

SEQ ID NO: 844254 - DNA, 25 bp, Homo sapien
ggcactcacattcatctcagagcaa

SEQ ID NO: 844255 - DNA, 25 bp, Homo sapien
gagactgctgtacacggaagcagag

SEQ ID NO: 844256 - DNA, 25 bp, Homo sapien
tctgagcatatcctcctggccttgt

SEQ ID NO: 844257 - DNA, 25 bp, Homo sapien
tatcactatagtgtacagcatccga

SEQ ID NO: 844258 - DNA, 25 bp, Homo sapien
ttgtttccgccagccttgttcagag

SEQ ID NO: 844259 - DNA, 25 bp, Homo sapien
taattttgccgtgaacctcctgaag

SEQ ID NO: 844260 - DNA, 25 bp, Homo sapien
cattctgaagttcctaagctccctt

SEQ ID NO: 844261 - DNA, 25 bp, Homo sapien
cattgacctgtgatgtcaccacact

SEQ ID NO: 844262 - DNA, 25 bp, Homo sapien
ggctggtgtctctgtagtaagcatt

SEQ ID NO: 844263 - DNA, 25 bp, Homo sapien
tcttcctgataggagcattgacctg

SEQ ID NO: 844264 - DNA, 25 bp, Homo sapien
ctgctcccaggagacaaaaggccac

SEQ ID NO: 844265 - DNA, 25 bp, Homo sapien
gccacacagcagaggagcctgaagc

SEQ ID NO: 844266 - DNA, 25 bp, Homo sapien
cacagcagaggagcctgaagcccat

SEQ ID NO: 844267 - DNA, 25 bp, Homo sapien
caggagacaaaaggccacacagcag

SEQ ID NO: 844268 - DNA, 25 bp, Homo sapien
tgttgtgcggagaatcgttcaagaa

SEQ ID NO: 844269 - DNA, 25 bp, Homo sapien
tcagagtgcaagtcagggaactgtt

SEQ ID NO: 844270 - DNA, 25 bp, Homo sapien
tccagagagctcaggtttagttcag

SEQ ID NO: 844271 - DNA, 25 bp, Homo sapien
agcgtcactcgctgtccagttgctg

SEQ ID NO: 844272 - DNA, 25 bp, Homo sapien
tgttattgcacagaaggctgatgct

SEQ ID NO: 844273 - DNA, 25 bp, Homo sapien
acagaaggctgatgctcatgcaggg

SEQ ID NO: 844274 - DNA, 25 bp, Homo sapien
gggcaggaatgttattgcacagaag

SEQ ID NO: 844275 - DNA, 25 bp, Homo sapien
caggaatgttattgcacagaaggct

SEQ ID NO: 844276 - DNA, 25 bp, Homo sapien
taaaccagatcacatacagaagcac

SEQ ID NO: 844277 - DNA, 25 bp, Homo sapien
gtaaaccagatcacatacagaagca

SEQ ID NO: 844278 - DNA, 25 bp, Homo sapien
agtaaaccagatcacatacagaagc

SEQ ID NO: 844279 - DNA, 25 bp, Homo sapien
gggttacagttggtcaaggagctat

SEQ ID NO: 844280 - DNA, 25 bp, Homo sapien
attctgggttacagttggtcaagga

SEQ ID NO: 844281 - DNA, 25 bp, Homo sapien
cagttggtcaaggagctattcgagt

SEQ ID NO: 844282 - DNA, 25 bp, Homo sapien
ttggtcaaggagctattcgagtgaa

SEQ ID NO: 844283 - DNA, 25 bp, Homo sapien
ctcttgtgtgatggacaattgcact

SEQ ID NO: 844284 - DNA, 25 bp, Homo sapien
gcagcaacattccaagcaggcactg

SEQ ID NO: 844285 - DNA, 25 bp, Homo sapien
tggacaattgcactgaagccatatc

SEQ ID NO: 844286 - DNA, 25 bp, Homo sapien
gctgaaatcagaggtgggcggagag

SEQ ID NO: 844287 - DNA, 25 bp, Homo sapien
ctgatcctgggagaccaagagccac

SEQ ID NO: 844288 - DNA, 25 bp, Homo sapien
acacagcaaagaagccaatcctcat

SEQ ID NO: 844289 - DNA, 25 bp, Homo sapien
agccacacagcaaagaagccaatcc

SEQ ID NO: 844290 - DNA, 25 bp, Homo sapien
caagagccacacagcaaagaagcca

SEQ ID NO: 844291 - DNA, 25 bp, Homo sapien
tatgccagcatacagggataccctc

SEQ ID NO: 844292 - DNA, 25 bp, Homo sapien
cattacacctgatgggaatgtcacc

SEQ ID NO: 844293 - DNA, 25 bp, Homo sapien
gataccctcggttaaatgacatcca

SEQ ID NO: 844294 - DNA, 25 bp, Homo sapien
caggttcaaggtcatgaccgcttga

SEQ ID NO: 844295 - DNA, 25 bp, Homo sapien
acatagaagaagagcctcgtgccca

SEQ ID NO: 844296 - DNA, 25 bp, Homo sapien
taatagagaacaacagatgctgatg

SEQ ID NO: 844297 - DNA, 25 bp, Homo sapien
gtaatagagaacaacagatgctgat

SEQ ID NO: 844298 - DNA, 25 bp, Homo sapien
tgtaatagagaacaacagatgctga

SEQ ID NO: 844299 - DNA, 25 bp, Homo sapien
ctgtaatagagaacaacagatgctg

SEQ ID NO: 844300 - DNA, 25 bp, Homo sapien
ttccaagtctggtgacacgccaagg

SEQ ID NO: 844301 - DNA, 25 bp, Homo sapien
ttgggctctgggtgatttcagcatc

SEQ ID NO: 844302 - DNA, 25 bp, Homo sapien
gtgacacgccaaggtcacctgcctt

SEQ ID NO: 844303 - DNA, 25 bp, Homo sapien
ttgttgtggttccaagtctggtgac

SEQ ID NO: 844304 - DNA, 25 bp, Homo sapien
tatgagtaatggatcagcctcagcc

SEQ ID NO: 844305 - DNA, 25 bp, Homo sapien
tgagtaatggatcagcctcagccca

SEQ ID NO: 844306 - DNA, 25 bp, Homo sapien
agtaatggatcagcctcagcccatg

SEQ ID NO: 844307 - DNA, 25 bp, Homo sapien
catatgagtaatggatcagcctcag

SEQ ID NO: 844308 - DNA, 25 bp, Homo sapien
actgtagccatctgagacttctcct

SEQ ID NO: 844309 - DNA, 25 bp, Homo sapien
gggaggtcctctgtgtttgatctag

SEQ ID NO: 844310 - DNA, 25 bp, Homo sapien
tgtttgatctagagacactgtagcc

SEQ ID NO: 844311 - DNA, 25 bp, Homo sapien
ttctcctttgttagtgtcttgaaca

SEQ ID NO: 844312 - DNA, 25 bp, Homo sapien
tgctggcgcagaaatatacagatgt

SEQ ID NO: 844313 - DNA, 25 bp, Homo sapien
gaggcagctgtgcagcactgtggac

SEQ ID NO: 844314 - DNA, 25 bp, Homo sapien
ggaggcagctgtgcagcactgtgga

SEQ ID NO: 844315 - DNA, 25 bp, Homo sapien
tcattctaactgccctttatgtgca

SEQ ID NO: 844316 - DNA, 25 bp, Homo sapien
ttctaactgccctttatgtgcagag

SEQ ID NO: 844317 - DNA, 25 bp, Homo sapien
atccttgtcaagacaggaatggagc

SEQ ID NO: 844318 - DNA, 25 bp, Homo sapien
ccatgacagaatccttgtcaagaca

SEQ ID NO: 844319 - DNA, 25 bp, Homo sapien
gacagaatccttgtcaagacaggaa

SEQ ID NO: 844320 - DNA, 25 bp, Homo sapien
gaatccttgtcaagacaggaatgga

SEQ ID NO: 844321 - DNA, 25 bp, Homo sapien
agagggccatccagcagagaagcct

SEQ ID NO: 844322 - DNA, 25 bp, Homo sapien
acagagggccatccagcagagaagc

SEQ ID NO: 844323 - DNA, 25 bp, Homo sapien
agtaaagggtagcatggccagaaat

SEQ ID NO: 844324 - DNA, 25 bp, Homo sapien
tgaaattgaaccagaagctccgggc

SEQ ID NO: 844325 - DNA, 25 bp, Homo sapien
cttaggcaactgtgaatcatctact

SEQ ID NO: 844326 - DNA, 25 bp, Homo sapien
ctgaaattgaaccagaagctccggg

SEQ ID NO: 844327 - DNA, 25 bp, Homo sapien
atctactacactctcatcctgaaat

SEQ ID NO: 844328 - DNA, 25 bp, Homo sapien
aagtctctgcaacgctgtggctaag

SEQ ID NO: 844329 - DNA, 25 bp, Homo sapien
agagagccctggagttttgtgcaca

SEQ ID NO: 844330 - DNA, 25 bp, Homo sapien
gagctgagtagagcggagagagccc

SEQ ID NO: 844331 - DNA, 25 bp, Homo sapien
cctggagttttgtgcacaggagaga

SEQ ID NO: 844332 - DNA, 25 bp, Homo sapien
taccaggatataaagggacacacag

SEQ ID NO: 844333 - DNA, 25 bp, Homo sapien
tcgctaccaggatataaagggacac

SEQ ID NO: 844334 - DNA, 25 bp, Homo sapien
ggatataaagggacacacagagggt

SEQ ID NO: 844335 - DNA, 25 bp, Homo sapien
ccaggatataaagggacacacagag

SEQ ID NO: 844336 - DNA, 25 bp, Homo sapien
gcatctcagagttactgattgtccc

SEQ ID NO: 844337 - DNA, 25 bp, Homo sapien
gaaattggttcgcatctcagagtta

SEQ ID NO: 844338 - DNA, 25 bp, Homo sapien
attgtggcctgaaattggttcgcat

SEQ ID NO: 844339 - DNA, 25 bp, Homo sapien
gagttactgattgtcccatctctgt

SEQ ID NO: 844340 - DNA, 25 bp, Homo sapien
ttccagtccctgcacaaaggtctgt

SEQ ID NO: 844341 - DNA, 25 bp, Homo sapien
gagggtccagctgcagaagtaattc

SEQ ID NO: 844342 - DNA, 25 bp, Homo sapien
tccctgcacaaaggtctgtctgtac

SEQ ID NO: 844343 - DNA, 25 bp, Homo sapien
tcagcaattccagtccctgcacaaa

SEQ ID NO: 844344 - DNA, 25 bp, Homo sapien
ccttggacactcctgagtcatctac

SEQ ID NO: 844345 - DNA, 25 bp, Homo sapien
gcccaagtccctgggttccatgggc

SEQ ID NO: 844346 - DNA, 25 bp, Homo sapien
tcctcagagtggagaatgatacatc

SEQ ID NO: 844347 - DNA, 25 bp, Homo sapien
aatgatacatcaggcatctgtgctg

SEQ ID NO: 844348 - DNA, 25 bp, Homo sapien
gcacacaactgtccactacagcaag

SEQ ID NO: 844349 - DNA, 25 bp, Homo sapien
gaggcgaatggggacttgcacacaa

SEQ ID NO: 844350 - DNA, 25 bp, Homo sapien
agggcactgccagatcgaggcgaat

SEQ ID NO: 844351 - DNA, 25 bp, Homo sapien
tggaagggcactgccagatcgaggc

SEQ ID NO: 844352 - DNA, 25 bp, Homo sapien
cacctaagtcccataagtgactgta

SEQ ID NO: 844353 - DNA, 25 bp, Homo sapien
acctaagtcccataagtgactgtac

SEQ ID NO: 844354 - DNA, 25 bp, Homo sapien
cctaagtcccataagtgactgtact

SEQ ID NO: 844355 - DNA, 25 bp, Homo sapien
taagtcccataagtgactgtacttc

SEQ ID NO: 844356 - DNA, 25 bp, Homo sapien
acagcagacaaagggccacatagaa

SEQ ID NO: 844357 - DNA, 25 bp, Homo sapien
tgtaatagagaacaacagacactga

SEQ ID NO: 844358 - DNA, 25 bp, Homo sapien
gtaatagagaacaacagacactgat

SEQ ID NO: 844359 - DNA, 25 bp, Homo sapien
taatagagaacaacagacactgatg

SEQ ID NO: 844360 - DNA, 25 bp, Homo sapien
ctgtaatagagaacaacagacactg

SEQ ID NO: 844361 - DNA, 25 bp, Homo sapien
cttgggctctgggtgattccagcat

SEQ ID NO: 844362 - DNA, 25 bp, Homo sapien
tcttgggctctgggtgattccagca

SEQ ID NO: 844363 - DNA, 25 bp, Homo sapien
gctgctgagtaatagatcagcctca

SEQ ID NO: 844364 - DNA, 25 bp, Homo sapien
agcagctgctgagtaatagatcagc

SEQ ID NO: 844365 - DNA, 25 bp, Homo sapien
cgataccagaacatatagctgtggc

SEQ ID NO: 844366 - DNA, 25 bp, Homo sapien
cagaacatatagctgtggctccaag

SEQ ID NO: 844367 - DNA, 25 bp, Homo sapien
tttctaactgccgtttccgtgcaga

SEQ ID NO: 844368 - DNA, 25 bp, Homo sapien
ggtgcacaggcaacctcagtttttc

SEQ ID NO: 844369 - DNA, 25 bp, Homo sapien
tgggtgcacaggcaacctcagtttt

SEQ ID NO: 844370 - DNA, 25 bp, Homo sapien
taactgccgtttccgtgcagagagg

SEQ ID NO: 844371 - DNA, 25 bp, Homo sapien
cacagtgacatcattgcctccacaa

SEQ ID NO: 844372 - DNA, 25 bp, Homo sapien
aatcagggtcactgtgagcaaaagc

SEQ ID NO: 844373 - DNA, 25 bp, Homo sapien
cagtgacatcattgcctccacaaat

SEQ ID NO: 844374 - DNA, 25 bp, Homo sapien
aaggatgggagctttgcccaatcag

SEQ ID NO: 844375 - DNA, 25 bp, Homo sapien
tgctcccaggagacagagggccgcc

SEQ ID NO: 844376 - DNA, 25 bp, Homo sapien
cccagcagaggagcctggtgcccat

SEQ ID NO: 844377 - DNA, 25 bp, Homo sapien
caggagacagagggccgcccagcag

SEQ ID NO: 844378 - DNA, 25 bp, Homo sapien
cgcccagcagaggagcctggtgccc

SEQ ID NO: 844379 - DNA, 25 bp, Homo sapien
tgtgaatcatccactacaccgttat

SEQ ID NO: 844380 - DNA, 25 bp, Homo sapien
tagcatggccagatataggattgca

SEQ ID NO: 844381 - DNA, 25 bp, Homo sapien
tacaccgttattctgaaactgaatc

SEQ ID NO: 844382 - DNA, 25 bp, Homo sapien
ccagtaaagggtagcatggccagat

SEQ ID NO: 844383 - DNA, 25 bp, Homo sapien
taatagagttagaactagactgcag

SEQ ID NO: 844384 - DNA, 25 bp, Homo sapien
tggagtaatagagttagaactagac

SEQ ID NO: 844385 - DNA, 25 bp, Homo sapien
aggcatctggagtaatagagttaga

SEQ ID NO: 844386 - DNA, 25 bp, Homo sapien
catctggagtaatagagttagaact

SEQ ID NO: 844387 - DNA, 25 bp, Homo sapien
gctaccaggatacaaagggacacac

SEQ ID NO: 844388 - DNA, 25 bp, Homo sapien
acacacagagggtccaggagtccat

SEQ ID NO: 844389 - DNA, 25 bp, Homo sapien
ggatacaaagggacacacagagggt

SEQ ID NO: 844390 - DNA, 25 bp, Homo sapien
tcgctaccaggatacaaagggacac

SEQ ID NO: 844391 - DNA, 25 bp, Homo sapien
gtcacctcatgcttgggtgactgga

SEQ ID NO: 844392 - DNA, 25 bp, Homo sapien
atgcttgggtgactggataatgcca

SEQ ID NO: 844393 - DNA, 25 bp, Homo sapien
cctcatgcttgggtgactggataat

SEQ ID NO: 844394 - DNA, 25 bp, Homo sapien
cttgggtgactggataatgccagca

SEQ ID NO: 844395 - DNA, 25 bp, Homo sapien
gaatcgctctgtgggcatacctgca

SEQ ID NO: 844396 - DNA, 25 bp, Homo sapien
gatcagctccggaagtaactcagca

SEQ ID NO: 844397 - DNA, 25 bp, Homo sapien
gaatgatccatcaggcctctcagct

SEQ ID NO: 844398 - DNA, 25 bp, Homo sapien
taagcgacttgcacagacatacacg

SEQ ID NO: 844399 - DNA, 25 bp, Homo sapien
aaaggcctgtcggatcaccagatcc

SEQ ID NO: 844400 - DNA, 25 bp, Homo sapien
ggaaaggcctgtcggatcaccagat

SEQ ID NO: 844401 - DNA, 25 bp, Homo sapien
ggcctgtcggatcaccagatcctga

SEQ ID NO: 844402 - DNA, 25 bp, Homo sapien
ctgggaaaggcctgtcggatcacca

SEQ ID NO: 844403 - DNA, 25 bp, Homo sapien
tacatgtggacgatggtggccaacc

SEQ ID NO: 844404 - DNA, 25 bp, Homo sapien
gaaccacttcacgttgctgactgcc

SEQ ID NO: 844405 - DNA, 25 bp, Homo sapien
tgagactgcagtaggcagaaccact

SEQ ID NO: 844406 - DNA, 25 bp, Homo sapien
ctgccttctacatgtggacgatggt

SEQ ID NO: 844407 - DNA, 25 bp, Homo sapien
ggcagatgctgcatgacggaggggt

SEQ ID NO: 844408 - DNA, 25 bp, Homo sapien
cagatgctgcatgacggaggggtct

SEQ ID NO: 844409 - DNA, 25 bp, Homo sapien
gcagatgctgcatgacggaggggtc

SEQ ID NO: 844410 - DNA, 25 bp, Homo sapien
gatgctgcatgacggaggggtcttc

SEQ ID NO: 844411 - DNA, 25 bp, Homo sapien
acaaggctgcacagcacaggaggcc

SEQ ID NO: 844412 - DNA, 25 bp, Homo sapien
tgcacagcacaggaggccgatgctc

SEQ ID NO: 844413 - DNA, 25 bp, Homo sapien
cacagcacaggaggccgatgctcat

SEQ ID NO: 844414 - DNA, 25 bp, Homo sapien
gctgcacagcacaggaggccgatgc

SEQ ID NO: 844415 - DNA, 25 bp, Homo sapien
cagcctgagcgggaaatcctctgtg

SEQ ID NO: 844416 - DNA, 25 bp, Homo sapien
catggttcatatcctgggcacactg

SEQ ID NO: 844417 - DNA, 25 bp, Homo sapien
tgagtgacaccagcattcactggac

SEQ ID NO: 844418 - DNA, 25 bp, Homo sapien
ccaactgagtaatgaatcagcctca

SEQ ID NO: 844419 - DNA, 25 bp, Homo sapien
ggagacggccttgtagcgctgtgga

SEQ ID NO: 844420 - DNA, 25 bp, Homo sapien
cctgcctttatgtgcagagaggaga

SEQ ID NO: 844421 - DNA, 25 bp, Homo sapien
ggagggcagaacctccctgccttta

SEQ ID NO: 844422 - DNA, 25 bp, Homo sapien
tgcagagaggagacggccttgtagc

SEQ ID NO: 844423 - DNA, 25 bp, Homo sapien
ggttccaaggttcctggcgcagaga

SEQ ID NO: 844424 - DNA, 25 bp, Homo sapien
ctgggaccagtccaggcctggctga

SEQ ID NO: 844425 - DNA, 25 bp, Homo sapien
gcctggctgagatgcctgcagaggc

SEQ ID NO: 844426 - DNA, 25 bp, Homo sapien
caggcctggctgagatgcctgcaga

SEQ ID NO: 844427 - DNA, 25 bp, Homo sapien
cagtccaggcctggctgagatgcct

SEQ ID NO: 844428 - DNA, 25 bp, Homo sapien
ttagtagccagtgtctggaacatcc

SEQ ID NO: 844429 - DNA, 25 bp, Homo sapien
tctggaacatccacatacaaattgt

SEQ ID NO: 844430 - DNA, 25 bp, Homo sapien
gaacatccacatacaaattgtgtcc

SEQ ID NO: 844431 - DNA, 25 bp, Homo sapien
cagtgtctggaacatccacatacaa

SEQ ID NO: 844432 - DNA, 25 bp, Homo sapien
ttttaccaggtcagtgtcactatga

SEQ ID NO: 844433 - DNA, 25 bp, Homo sapien
gtccttgtctccacagggcggttcc

SEQ ID NO: 844434 - DNA, 25 bp, Homo sapien
ccttgtctccacagggcggttccca

SEQ ID NO: 844435 - DNA, 25 bp, Homo sapien
gggttttaccaggtcagtgtcacta

SEQ ID NO: 844436 - DNA, 25 bp, Homo sapien
gaaacccaggaccacccagcagagg

SEQ ID NO: 844437 - DNA, 25 bp, Homo sapien
ctaggaaacccaggaccacccagca

SEQ ID NO: 844438 - DNA, 25 bp, Homo sapien
cccagcagaggagcctggtgcccat

SEQ ID NO: 844439 - DNA, 25 bp, Homo sapien
cacccagcagaggagcctggtgccc

SEQ ID NO: 844440 - DNA, 25 bp, Homo sapien
gaataaggaaaatatttgtagtcat

SEQ ID NO: 844441 - DNA, 25 bp, Homo sapien
ctgtggaaatagaatttggcaacag

SEQ ID NO: 844442 - DNA, 25 bp, Homo sapien
tggaaatagaatttggcaacagaat

SEQ ID NO: 844443 - DNA, 25 bp, Homo sapien
tagaatttggcaacagaataaggaa

SEQ ID NO: 844444 - DNA, 25 bp, Homo sapien
tcggtaccaataaagggttacatga

SEQ ID NO: 844445 - DNA, 25 bp, Homo sapien
ccgccctgatttgtctcgttgagca

SEQ ID NO: 844446 - DNA, 25 bp, Homo sapien
tctcgttgagcatcactctgggagt

SEQ ID NO: 844447 - DNA, 25 bp, Homo sapien
catcactctgggagtaagtcagaac

SEQ ID NO: 844448 - DNA, 25 bp, Homo sapien
gaaaagtaaggagcaaagagaggcc

SEQ ID NO: 844449 - DNA, 25 bp, Homo sapien
aagagaggcctctgttaagggtttg

SEQ ID NO: 844450 - DNA, 25 bp, Homo sapien
tttttcccatgaaaagtaaggagca

SEQ ID NO: 844451 - DNA, 25 bp, Homo sapien
cccatgaaaagtaaggagcaaagag

SEQ ID NO: 844452 - DNA, 25 bp, Homo sapien
tttctacccaaaggacagctgaggt

SEQ ID NO: 844453 - DNA, 25 bp, Homo sapien
atgaatctgcggtctctttctaccc

SEQ ID NO: 844454 - DNA, 25 bp, Homo sapien
tcaggaatgaatctgcggtctcttt

SEQ ID NO: 844455 - DNA, 25 bp, Homo sapien
gaatgaatctgcggtctctttctac

SEQ ID NO: 844456 - DNA, 25 bp, Homo sapien
tcatgttgttgcagcaccggttaca

SEQ ID NO: 844457 - DNA, 25 bp, Homo sapien
gcaccggttacaattgtggactgtg

SEQ ID NO: 844458 - DNA, 25 bp, Homo sapien
tccactgttaggagtaggtgtctca

SEQ ID NO: 844459 - DNA, 25 bp, Homo sapien
gagcttgtccactgttaggagtagg

SEQ ID NO: 844460 - DNA, 25 bp, Homo sapien
gagagtggccatactccgtcttgga

SEQ ID NO: 844461 - DNA, 25 bp, Homo sapien
taaccaagagacagatagagccatt

SEQ ID NO: 844462 - DNA, 25 bp, Homo sapien
aaggagaatactgagggcctctgac

SEQ ID NO: 844463 - DNA, 25 bp, Homo sapien
gggattctcagggagctccggacac

SEQ ID NO: 844464 - DNA, 25 bp, Homo sapien
ctcttatcacatagctccagttata

SEQ ID NO: 844465 - DNA, 25 bp, Homo sapien
cacatagctccagttatagtctaac

SEQ ID NO: 844466 - DNA, 25 bp, Homo sapien
tatcacatagctccagttatagtct

SEQ ID NO: 844467 - DNA, 25 bp, Homo sapien
ttatcacatagctccagttatagtc

SEQ ID NO: 844468 - DNA, 25 bp, Homo sapien
tgctcagtggatgatcctggagtct

SEQ ID NO: 844469 - DNA, 25 bp, Homo sapien
cagtgctcagtggatgatcctggag

SEQ ID NO: 844470 - DNA, 25 bp, Homo sapien
tcctggggaagagccgagtgaattc

SEQ ID NO: 844471 - DNA, 25 bp, Homo sapien
agccttccttatgtccagtgctcag

SEQ ID NO: 844472 - DNA, 25 bp, Homo sapien
tgctcccaggagacaaagcagcacc

SEQ ID NO: 844473 - DNA, 25 bp, Homo sapien
agcacccagcagaggagcccagggc

SEQ ID NO: 844474 - DNA, 25 bp, Homo sapien
caaagcagcacccagcagaggagcc

SEQ ID NO: 844475 - DNA, 25 bp, Homo sapien
aggagacaaagcagcacccagcaga

SEQ ID NO: 844476 - DNA, 25 bp, Homo sapien
aggacacagtgttgtgcccagactg

SEQ ID NO: 844477 - DNA, 25 bp, Homo sapien
tgtgcccagactgagaagagcatct

SEQ ID NO: 844478 - DNA, 25 bp, Homo sapien
ttgtgcccagactgagaagagcatc

SEQ ID NO: 844479 - DNA, 25 bp, Homo sapien
gtgcccagactgagaagagcatctc

SEQ ID NO: 844480 - DNA, 25 bp, Homo sapien
tcagctcagagctataattagggaa

SEQ ID NO: 844481 - DNA, 25 bp, Homo sapien
gctcagagctataattagggaactg

SEQ ID NO: 844482 - DNA, 25 bp, Homo sapien
cagctccaaggcgttcacattcagc

SEQ ID NO: 844483 - DNA, 25 bp, Homo sapien
ggcgttcacattcagctcagagcta

SEQ ID NO: 844484 - DNA, 25 bp, Homo sapien
agtttatgtatagaatgtcagagac

SEQ ID NO: 844485 - DNA, 25 bp, Homo sapien
aagtttatgtatagaatgtcagaga

SEQ ID NO: 844486 - DNA, 25 bp, Homo sapien
ctaaggcaggaagtttatgtataga

SEQ ID NO: 844487 - DNA, 25 bp, Homo sapien
aggcaggaagtttatgtatagaatg

SEQ ID NO: 844488 - DNA, 25 bp, Homo sapien
ttcgcccatgttgtctctgctcctg

SEQ ID NO: 844489 - DNA, 25 bp, Homo sapien
tgaagtccagtcataaacattcgcc

SEQ ID NO: 844490 - DNA, 25 bp, Homo sapien
gctgcaaccttcaacctgaagtcca

SEQ ID NO: 844491 - DNA, 25 bp, Homo sapien
ctgctgcaaccttcaacctgaagtc

SEQ ID NO: 844492 - DNA, 25 bp, Homo sapien
tcagggaaaattcggcgaattgtgg

SEQ ID NO: 844493 - DNA, 25 bp, Homo sapien
cgcaccattgagaaatctggtggcc

SEQ ID NO: 844494 - DNA, 25 bp, Homo sapien
ggtaaaaggccgcaccattgagaaa

SEQ ID NO: 844495 - DNA, 25 bp, Homo sapien
gaggtttttcagcttgtgcgttggg

SEQ ID NO: 844496 - DNA, 25 bp, Homo sapien
taggcatctccatgttgcttcgcat

SEQ ID NO: 844497 - DNA, 25 bp, Homo sapien
tcttaggcatctccatgttgcttcg

SEQ ID NO: 844498 - DNA, 25 bp, Homo sapien
cagtcttaggcatctccatgttgct

SEQ ID NO: 844499 - DNA, 25 bp, Homo sapien
gacagtcttaggcatctccatgttg

SEQ ID NO: 844500 - DNA, 25 bp, Homo sapien
ctggaaccgctgtttgtactgatga

SEQ ID NO: 844501 - DNA, 25 bp, Homo sapien
aatcaggaacaaaacatccacaatt

SEQ ID NO: 844502 - DNA, 25 bp, Homo sapien
aaccgctgtttgtactgatgataaa

SEQ ID NO: 844503 - DNA, 25 bp, Homo sapien
ggaaccgctgtttgtactgatgata

SEQ ID NO: 844504 - DNA, 25 bp, Homo sapien
ccaggacggaggggtcttctgtatc

SEQ ID NO: 844505 - DNA, 25 bp, Homo sapien
tccaggacggaggggtcttctgtat

SEQ ID NO: 844506 - DNA, 25 bp, Homo sapien
tgcaaggggccctgtccgggaccca

SEQ ID NO: 844507 - DNA, 25 bp, Homo sapien
gttatggttcatatcctgggtacac

SEQ ID NO: 844508 - DNA, 25 bp, Homo sapien
ggagatggtcttgtagcgctgtgga

SEQ ID NO: 844509 - DNA, 25 bp, Homo sapien
gaggagatggtcttgtagcgctgtg

SEQ ID NO: 844510 - DNA, 25 bp, Homo sapien
agagaggagatggtcttgtagcgct

SEQ ID NO: 844511 - DNA, 25 bp, Homo sapien
tgcctttatgtgcagagaggagatg

SEQ ID NO: 844512 - DNA, 25 bp, Homo sapien
gaggctcatactgtccgggccactt

SEQ ID NO: 844513 - DNA, 25 bp, Homo sapien
cccagcagaggagcctggtgcccat

SEQ ID NO: 844514 - DNA, 25 bp, Homo sapien
ctaggaaacccaggaccacccagca

SEQ ID NO: 844515 - DNA, 25 bp, Homo sapien
gaaacccaggaccacccagcagagg

SEQ ID NO: 844516 - DNA, 25 bp, Homo sapien
cacccagcagaggagcctggtgccc

SEQ ID NO: 844517 - DNA, 25 bp, Homo sapien
ccctctgtgtgacttcgtaccttgg

SEQ ID NO: 844518 - DNA, 25 bp, Homo sapien
tcccctctgtgtgacttcgtacctt

SEQ ID NO: 844519 - DNA, 25 bp, Homo sapien
ctgtgtgacttcgtaccttggggac

SEQ ID NO: 844520 - DNA, 25 bp, Homo sapien
gtgtgacttcgtaccttggggactg

SEQ ID NO: 844521 - DNA, 25 bp, Homo sapien
tctgtggagaattgatcactgagca

SEQ ID NO: 844522 - DNA, 25 bp, Homo sapien
tgatcactgagcagccctgatttat

SEQ ID NO: 844523 - DNA, 25 bp, Homo sapien
ctgtggagaattgatcactgagcag

SEQ ID NO: 844524 - DNA, 25 bp, Homo sapien
gagcagccctgatttatcttgttga

SEQ ID NO: 844525 - DNA, 25 bp, Homo sapien
ttcaggtggagaaagatcctcagac

SEQ ID NO: 844526 - DNA, 25 bp, Homo sapien
acagccgagtcgcccttgctctgtg

SEQ ID NO: 844527 - DNA, 25 bp, Homo sapien
gctctgtgcgctggatcttcaggtg

SEQ ID NO: 844528 - DNA, 25 bp, Homo sapien
gagtcgcccttgctctgtgcgctgg

SEQ ID NO: 844529 - DNA, 25 bp, Homo sapien
aggaaagtggcagcagttagacaaa

SEQ ID NO: 844530 - DNA, 25 bp, Homo sapien
ggaaagtggcagcagttagacaaag

SEQ ID NO: 844531 - DNA, 25 bp, Homo sapien
ctttgctcctcttgcatgttcattc

SEQ ID NO: 844532 - DNA, 25 bp, Homo sapien
gacaactatagactgtgttttcttc

SEQ ID NO: 844533 - DNA, 25 bp, Homo sapien
tcttgcagcgccgttgacaactata

SEQ ID NO: 844534 - DNA, 25 bp, Homo sapien
tgctcctcttgcatgttcattctca

SEQ ID NO: 844535 - DNA, 25 bp, Homo sapien
gaacccagtgagttctgagccttga

SEQ ID NO: 844536 - DNA, 25 bp, Homo sapien
tgcagccttccttaagtctagcgca

SEQ ID NO: 844537 - DNA, 25 bp, Homo sapien
actacggaccctggactcaacctgt

SEQ ID NO: 844538 - DNA, 25 bp, Homo sapien
ggaagaacccagtgagttctgagcc

SEQ ID NO: 844539 - DNA, 25 bp, Homo sapien
cagagataggagagcatctcagagt

SEQ ID NO: 844540 - DNA, 25 bp, Homo sapien
gcatctcagagtcacttgctgtcct

SEQ ID NO: 844541 - DNA, 25 bp, Homo sapien
ggactttgggtgactccagcgtcca

SEQ ID NO: 844542 - DNA, 25 bp, Homo sapien
gtgtgtgggactttgggtgactcca

SEQ ID NO: 844543 - DNA, 25 bp, Homo sapien
ggcacagagatacagggccgagtcc

SEQ ID NO: 844544 - DNA, 25 bp, Homo sapien
agtttatatacagaatgtcagtgat

SEQ ID NO: 844545 - DNA, 25 bp, Homo sapien
cagctcagagctatagttagggaac

SEQ ID NO: 844546 - DNA, 25 bp, Homo sapien
cagcaacaaggcgttcacattcagc

SEQ ID NO: 844547 - DNA, 25 bp, Homo sapien
aggcatctccatgtcacttcgcgtc

SEQ ID NO: 844548 - DNA, 25 bp, Homo sapien
tgtcacttcgcgtcctgcctttgtt

SEQ ID NO: 844549 - DNA, 25 bp, Homo sapien
atgtcacttcgcgtcctgcctttgt

SEQ ID NO: 844550 - DNA, 25 bp, Homo sapien
ggcagtctcaggcatctccatgtca

SEQ ID NO: 844551 - DNA, 25 bp, Homo sapien
taaatgcaccagtgaacagctgaga

SEQ ID NO: 844552 - DNA, 25 bp, Homo sapien
tgaaggtgaccacactgcgttgccc

SEQ ID NO: 844553 - DNA, 25 bp, Homo sapien
caaaggtggcctgatgcgtaagaga

SEQ ID NO: 844554 - DNA, 25 bp, Homo sapien
tagagtcttagggacactcctcatg

SEQ ID NO: 844555 - DNA, 25 bp, Homo sapien
tgatgctacagctccagtggaaagg

SEQ ID NO: 844556 - DNA, 25 bp, Homo sapien
gatgctacagctccagtggaaaggg

SEQ ID NO: 844557 - DNA, 25 bp, Homo sapien
ctgatgctacagctccagtggaaag

SEQ ID NO: 844558 - DNA, 25 bp, Homo sapien
tattcatggttcatatcctgggcac

SEQ ID NO: 844559 - DNA, 25 bp, Homo sapien
acatgtattcatggttcatatcctg

SEQ ID NO: 844560 - DNA, 25 bp, Homo sapien
ggttcatatcctgggcacacagcag

SEQ ID NO: 844561 - DNA, 25 bp, Homo sapien
tcatggttcatatcctgggcacaca

SEQ ID NO: 844562 - DNA, 25 bp, Homo sapien
ccactctgggttccaaggttcctgg

SEQ ID NO: 844563 - DNA, 25 bp, Homo sapien
aaggttcctggtgcagagatctctg

SEQ ID NO: 844564 - DNA, 25 bp, Homo sapien
tgcacagggcatccttgagtcttgg

SEQ ID NO: 844565 - DNA, 25 bp, Homo sapien
acagggcatccttgagtcttgggtg

SEQ ID NO: 844566 - DNA, 25 bp, Homo sapien
gagacaggagtctagatggatctga

SEQ ID NO: 844567 - DNA, 25 bp, Homo sapien
gaggctccccttatagctgcagtag

SEQ ID NO: 844568 - DNA, 25 bp, Homo sapien
cacaacccgaaaggagacctcggag

SEQ ID NO: 844569 - DNA, 25 bp, Homo sapien
gagggaatggcctttgaaatctctt

SEQ ID NO: 844570 - DNA, 25 bp, Homo sapien
gagggatgtccttgtctccacaggg

SEQ ID NO: 844571 - DNA, 25 bp, Homo sapien
gggatgtccttgtctccacagggca

SEQ ID NO: 844572 - DNA, 25 bp, Homo sapien
gttcccacagtgacatcacttcctc

SEQ ID NO: 844573 - DNA, 25 bp, Homo sapien
agggatgtccttgtctccacagggc

SEQ ID NO: 844574 - DNA, 25 bp, Homo sapien
gatgagggctttaccagatcagtgt

SEQ ID NO: 844575 - DNA, 25 bp, Homo sapien
tgagggctttaccagatcagtgtca

SEQ ID NO: 844576 - DNA, 25 bp, Homo sapien
caggatgagggctttaccagatcag

SEQ ID NO: 844577 - DNA, 25 bp, Homo sapien
aggacaggatgagggctttaccaga

SEQ ID NO: 844578 - DNA, 25 bp, Homo sapien
caggaccacccagcataggagactg

SEQ ID NO: 844579 - DNA, 25 bp, Homo sapien
gaccacccagcataggagactggtg

SEQ ID NO: 844580 - DNA, 25 bp, Homo sapien
acccagcataggagactggtgccca

SEQ ID NO: 844581 - DNA, 25 bp, Homo sapien
gaaacccaggaccacccagcatagg

SEQ ID NO: 844582 - DNA, 25 bp, Homo sapien
tgtgcgctggatcgtcagagtggag

SEQ ID NO: 844583 - DNA, 25 bp, Homo sapien
cccgaaattggatcacacctgagag

SEQ ID NO: 844584 - DNA, 25 bp, Homo sapien
gatacatgacccgaaattggatcac

SEQ ID NO: 844585 - DNA, 25 bp, Homo sapien
aaagggatacatgacccgaaattgg

SEQ ID NO: 844586 - DNA, 25 bp, Homo sapien
acaggaaggaggcgactatgccaca

SEQ ID NO: 844587 - DNA, 25 bp, Homo sapien
caggaaggaggcgactatgccacac

SEQ ID NO: 844588 - DNA, 25 bp, Homo sapien
gaaggaggcgactatgccacactgt

SEQ ID NO: 844589 - DNA, 25 bp, Homo sapien
aggacagccgatgtccaaatctact

SEQ ID NO: 844590 - DNA, 25 bp, Homo sapien
caggaatgaatctgtggtctctttc

SEQ ID NO: 844591 - DNA, 25 bp, Homo sapien
tcaggaatgaatctgtggtctcttt

SEQ ID NO: 844592 - DNA, 25 bp, Homo sapien
ggaatgaatctgtggtctctttcta

SEQ ID NO: 844593 - DNA, 25 bp, Homo sapien
gaatgaatctgtggtctctttctac

SEQ ID NO: 844594 - DNA, 25 bp, Homo sapien
tgcagaaacttccaaggtgacaggg

SEQ ID NO: 844595 - DNA, 25 bp, Homo sapien
gattgcttttatcacgtaaggacca

SEQ ID NO: 844596 - DNA, 25 bp, Homo sapien
tccctgtttcgagcagtgagctggc

SEQ ID NO: 844597 - DNA, 25 bp, Homo sapien
cctatagaagatgcatgtctgccct

SEQ ID NO: 844598 - DNA, 25 bp, Homo sapien
accgttctcccacctagtgctgtgg

SEQ ID NO: 844599 - DNA, 25 bp, Homo sapien
caggacactggactctctacctgtc

SEQ ID NO: 844600 - DNA, 25 bp, Homo sapien
ccttaggtctagtgctccaggacac

SEQ ID NO: 844601 - DNA, 25 bp, Homo sapien
acaggaagcactgcatctgattcag

SEQ ID NO: 844602 - DNA, 25 bp, Homo sapien
gggaaaagcagatggaggatgagca

SEQ ID NO: 844603 - DNA, 25 bp, Homo sapien
gaaaagcagatggaggatgagcaca

SEQ ID NO: 844604 - DNA, 25 bp, Homo sapien
tgagcacagggacagcctggaggtc

SEQ ID NO: 844605 - DNA, 25 bp, Homo sapien
aaagcagatggaggatgagcacagg

SEQ ID NO: 844606 - DNA, 25 bp, Homo sapien
gtcatgcccagacttaggagagcat

SEQ ID NO: 844607 - DNA, 25 bp, Homo sapien
cagtgtcatgcccagacttaggaga

SEQ ID NO: 844608 - DNA, 25 bp, Homo sapien
acacagtgtcatgcccagacttagg

SEQ ID NO: 844609 - DNA, 25 bp, Homo sapien
aggacacagtgtcatgcccagactt

SEQ ID NO: 844610 - DNA, 25 bp, Homo sapien
gagctctgccctcagtaggacacaa

SEQ ID NO: 844611 - DNA, 25 bp, Homo sapien
agctctgccctcagtaggacacaag

SEQ ID NO: 844612 - DNA, 25 bp, Homo sapien
ccacaccactgaggagtctggtggt

SEQ ID NO: 844613 - DNA, 25 bp, Homo sapien
ctgccccaagtaggcaaaaggccac

SEQ ID NO: 844614 - DNA, 25 bp, Homo sapien
ccaagtaggcaaaaggccacaccac

SEQ ID NO: 844615 - DNA, 25 bp, Homo sapien
gccacaccactgaggagtctggtgg

SEQ ID NO: 844616 - DNA, 25 bp, Homo sapien
gagaccatatcaggcagaaccagct

SEQ ID NO: 844617 - DNA, 25 bp, Homo sapien
tcagctcaacgcaggtctcttgctt

SEQ ID NO: 844618 - DNA, 25 bp, Homo sapien
ctttccatgcctagggtgagaccat

SEQ ID NO: 844619 - DNA, 25 bp, Homo sapien
tagggtgagaccatatcaggcagaa

SEQ ID NO: 844620 - DNA, 25 bp, Homo sapien
agagaaaaggccgcacagcacagga

SEQ ID NO: 844621 - DNA, 25 bp, Homo sapien
gagaaaaggccgcacagcacaggag

SEQ ID NO: 844622 - DNA, 25 bp, Homo sapien
caggagagaaaaggccgcacagcac

SEQ ID NO: 844623 - DNA, 25 bp, Homo sapien
ggagagaaaaggccgcacagcacag

SEQ ID NO: 844624 - DNA, 25 bp, Homo sapien
cttgaaatccacgcaagggccctgc

SEQ ID NO: 844625 - DNA, 25 bp, Homo sapien
ttgaaatccacgcaagggccctgcc

SEQ ID NO: 844626 - DNA, 25 bp, Homo sapien
gaaatccacgcaagggccctgccca

SEQ ID NO: 844627 - DNA, 25 bp, Homo sapien
tgaaatccacgcaagggccctgccc

SEQ ID NO: 844628 - DNA, 25 bp, Homo sapien
tgtagccattggggacttctttgtc

SEQ ID NO: 844629 - DNA, 25 bp, Homo sapien
acttctttgtcagtagtaccagcag

SEQ ID NO: 844630 - DNA, 25 bp, Homo sapien
gggacttctttgtcagtagtaccag

SEQ ID NO: 844631 - DNA, 25 bp, Homo sapien
gccattggggacttctttgtcagta

SEQ ID NO: 844632 - DNA, 25 bp, Homo sapien
gaggggctgatcatactgagatctg

SEQ ID NO: 844633 - DNA, 25 bp, Homo sapien
cttcccgcagaggggctgatcatac

SEQ ID NO: 844634 - DNA, 25 bp, Homo sapien
gggctgatcatactgagatctgaag

SEQ ID NO: 844635 - DNA, 25 bp, Homo sapien
cgcagaggggctgatcatactgaga

SEQ ID NO: 844636 - DNA, 25 bp, Homo sapien
tcaaggaacaacctttaaggatgga

SEQ ID NO: 844637 - DNA, 25 bp, Homo sapien
cagaagtggtttcaaggaacaacct

SEQ ID NO: 844638 - DNA, 25 bp, Homo sapien
tctgatctgtctagatttgttgtgg

SEQ ID NO: 844639 - DNA, 25 bp, Homo sapien
gatctctgatctgtctagatttgtt

SEQ ID NO: 844640 - DNA, 25 bp, Homo sapien
gggatgtccttgtctccacagggca

SEQ ID NO: 844641 - DNA, 25 bp, Homo sapien
gagggatgtccttgtctccacaggg

SEQ ID NO: 844642 - DNA, 25 bp, Homo sapien
gttcccacagtgacatcacttcctc

SEQ ID NO: 844643 - DNA, 25 bp, Homo sapien
agggatgtccttgtctccacagggc

SEQ ID NO: 844644 - DNA, 25 bp, Homo sapien
gactggtacccatgacagtgtcaga

SEQ ID NO: 844645 - DNA, 25 bp, Homo sapien
tacccatgacagtgtcagaccagga

SEQ ID NO: 844646 - DNA, 25 bp, Homo sapien
catgacagtgtcagaccaggatggg

SEQ ID NO: 844647 - DNA, 25 bp, Homo sapien
gagactggtacccatgacagtgtca

SEQ ID NO: 844648 - DNA, 25 bp, Homo sapien
cccgctgctctgtgcgctgaatcgt

SEQ ID NO: 844649 - DNA, 25 bp, Homo sapien
gataccaataaagggttgcatgact

SEQ ID NO: 844650 - DNA, 25 bp, Homo sapien
ccgctgctctgtgcgctgaatcgtc

SEQ ID NO: 844651 - DNA, 25 bp, Homo sapien
gcctgttgataccaataaagggttg

SEQ ID NO: 844652 - DNA, 25 bp, Homo sapien
tcaggaatgaatctgtggtctcttt

SEQ ID NO: 844653 - DNA, 25 bp, Homo sapien
tctgtggtctctttccacccaaagg

SEQ ID NO: 844654 - DNA, 25 bp, Homo sapien
caaaggacaaccgaggtccaaatct

SEQ ID NO: 844655 - DNA, 25 bp, Homo sapien
tggtctctttccacccaaaggacaa

SEQ ID NO: 844656 - DNA, 25 bp, Homo sapien
gagccttggtgattctgccccagag

SEQ ID NO: 844657 - DNA, 25 bp, Homo sapien
cttggtgattctgccccagagcagg

SEQ ID NO: 844658 - DNA, 25 bp, Homo sapien
gatgagccttggtgattctgcccca

SEQ ID NO: 844659 - DNA, 25 bp, Homo sapien
gaggatgagccttggtgattctgcc

SEQ ID NO: 844660 - DNA, 25 bp, Homo sapien
cacgctgatgcaaaatagtatcata

SEQ ID NO: 844661 - DNA, 25 bp, Homo sapien
tcccgtgacagctgaactggaccat

SEQ ID NO: 844662 - DNA, 25 bp, Homo sapien
cacctgaagttagatgcccctggga

SEQ ID NO: 844663 - DNA, 25 bp, Homo sapien
tcctctccaaggatttgctcctgca

SEQ ID NO: 844664 - DNA, 25 bp, Homo sapien
tcagttatagccaaactttttctcc

SEQ ID NO: 844665 - DNA, 25 bp, Homo sapien
tcctgtgcccgggactcaccttctc

SEQ ID NO: 844666 - DNA, 25 bp, Homo sapien
ctgtcctgtgcccgggactcacctt

SEQ ID NO: 844667 - DNA, 25 bp, Homo sapien
tgtcctgtgcccgggactcaccttc

SEQ ID NO: 844668 - DNA, 25 bp, Homo sapien
gtcctgtgcccgggactcaccttct

SEQ ID NO: 844669 - DNA, 25 bp, Homo sapien
cttcccttgaaggagtgaaacctgg

SEQ ID NO: 844670 - DNA, 25 bp, Homo sapien
actggtgacctgagaattgatcagg

SEQ ID NO: 844671 - DNA, 25 bp, Homo sapien
gggaactggtgacctgagaattgat

SEQ ID NO: 844672 - DNA, 25 bp, Homo sapien
aaagcagatgtataatgagcactgg

SEQ ID NO: 844673 - DNA, 25 bp, Homo sapien
gggcagacggccaaaccattgagga

SEQ ID NO: 844674 - DNA, 25 bp, Homo sapien
tcagggggcagacggccaaaccatt

SEQ ID NO: 844675 - DNA, 25 bp, Homo sapien
cagacggccaaaccattgaggagtc

SEQ ID NO: 844676 - DNA, 25 bp, Homo sapien
cggccaaaccattgaggagtctggt

SEQ ID NO: 844677 - DNA, 25 bp, Homo sapien
gaatagccccctgattggaaaagga

SEQ ID NO: 844678 - DNA, 25 bp, Homo sapien
tgagagctcgtttccagttatacat

SEQ ID NO: 844679 - DNA, 25 bp, Homo sapien
aactcagtgagagctcgtttccagt

SEQ ID NO: 844680 - DNA, 25 bp, Homo sapien
cagcctttgaatagccccctgattg

SEQ ID NO: 844681 - DNA, 25 bp, Homo sapien
ggccttgacatccacgcaaggggct

SEQ ID NO: 844682 - DNA, 25 bp, Homo sapien
gccttgacatccacgcaaggggctc

SEQ ID NO: 844683 - DNA, 25 bp, Homo sapien
gcaactgagtaatgaatgcgcctca

SEQ ID NO: 844684 - DNA, 25 bp, Homo sapien
cagcaactgagtaatgaatgcgcct

SEQ ID NO: 844685 - DNA, 25 bp, Homo sapien
agcaactgagtaatgaatgcgcctc

SEQ ID NO: 844686 - DNA, 25 bp, Homo sapien
cagcctgagcgggaaatcctctgtg

SEQ ID NO: 844687 - DNA, 25 bp, Homo sapien
ccagcctgagcgggaaatcctctgt

SEQ ID NO: 844688 - DNA, 25 bp, Homo sapien
catccttgagtcttgggtgggagga

SEQ ID NO: 844689 - DNA, 25 bp, Homo sapien
gtgagactcatactgtcctggccac

SEQ ID NO: 844690 - DNA, 25 bp, Homo sapien
agagtgagactcatactgtcctggc

SEQ ID NO: 844691 - DNA, 25 bp, Homo sapien
gagtgagactcatactgtcctggcc

SEQ ID NO: 844692 - DNA, 25 bp, Homo sapien
ctaggaccacttccaggcctggctg

SEQ ID NO: 844693 - DNA, 25 bp, Homo sapien
gcctggctgagactgcctgaagtgg

SEQ ID NO: 844694 - DNA, 25 bp, Homo sapien
caggcctggctgagactgcctgaag

SEQ ID NO: 844695 - DNA, 25 bp, Homo sapien
tggctgagactgcctgaagtggcac

SEQ ID NO: 844696 - DNA, 25 bp, Homo sapien
cccagcagaggagcctggtgcccat

SEQ ID NO: 844697 - DNA, 25 bp, Homo sapien
ctaggaaacccaggaccacccagca

SEQ ID NO: 844698 - DNA, 25 bp, Homo sapien
gaaacccaggaccacccagcagagg

SEQ ID NO: 844699 - DNA, 25 bp, Homo sapien
cacccagcagaggagcctggtgccc

SEQ ID NO: 844700 - DNA, 25 bp, Homo sapien
gaataaggaaaatatttgtagtcat

SEQ ID NO: 844701 - DNA, 25 bp, Homo sapien
tggaaatagaatttggcaacagaat

SEQ ID NO: 844702 - DNA, 25 bp, Homo sapien
tagaatttggcaacagaataaggaa

SEQ ID NO: 844703 - DNA, 25 bp, Homo sapien
ctgtggaaatagaatttggcaacag

SEQ ID NO: 844704 - DNA, 25 bp, Homo sapien
aaagggatacatgacccgaaattgg

SEQ ID NO: 844705 - DNA, 25 bp, Homo sapien
cccgaaattggatcacacctgagag

SEQ ID NO: 844706 - DNA, 25 bp, Homo sapien
tgcgctggatcttcagagtggagac

SEQ ID NO: 844707 - DNA, 25 bp, Homo sapien
ctggatcttcagagtggagacggat

SEQ ID NO: 844708 - DNA, 25 bp, Homo sapien
gaacagctgaagtccagatgtaatt

SEQ ID NO: 844709 - DNA, 25 bp, Homo sapien
acagctgaagtccagatgtaattct

SEQ ID NO: 844710 - DNA, 25 bp, Homo sapien
aacagctgaagtccagatgtaattc

SEQ ID NO: 844711 - DNA, 25 bp, Homo sapien
gaatgaatctgtggtctctttctac

SEQ ID NO: 844712 - DNA, 25 bp, Homo sapien
caggaatgaatctgtggtctctttc

SEQ ID NO: 844713 - DNA, 25 bp, Homo sapien
tcaggaatgaatctgtggtctcttt

SEQ ID NO: 844714 - DNA, 25 bp, Homo sapien
ggaatgaatctgtggtctctttcta

SEQ ID NO: 844715 - DNA, 25 bp, Homo sapien
tatattttctgtcccaggcaacatt

SEQ ID NO: 844716 - DNA, 25 bp, Homo sapien
ttctgtcccaggcaacattctcttc

SEQ ID NO: 844717 - DNA, 25 bp, Homo sapien
ttttctgtcccaggcaacattctct

SEQ ID NO: 844718 - DNA, 25 bp, Homo sapien
tattttctgtcccaggcaacattct

SEQ ID NO: 844719 - DNA, 25 bp, Homo sapien
cctgattcagggcttggtcttcctg

SEQ ID NO: 844720 - DNA, 25 bp, Homo sapien
cctgggtcccatggcacagtgggcc

SEQ ID NO: 844721 - DNA, 25 bp, Homo sapien
tgttccgaggagacaaagcagtgcc

SEQ ID NO: 844722 - DNA, 25 bp, Homo sapien
aagagccgagtgagttctgggcctt

SEQ ID NO: 844723 - DNA, 25 bp, Homo sapien
acacactggtgtgcccagagatagg

SEQ ID NO: 844724 - DNA, 25 bp, Homo sapien
ggcacagagatacagggccgagtcc

SEQ ID NO: 844725 - DNA, 25 bp, Homo sapien
cagctcagagctataattagggaac

SEQ ID NO: 844726 - DNA, 25 bp, Homo sapien
caaggcgttcacattcagctcagag

SEQ ID NO: 844727 - DNA, 25 bp, Homo sapien
agtttatatacagaatgtcagtgat

SEQ ID NO: 844728 - DNA, 25 bp, Homo sapien
gtttatatacagaatgtcagtgatt

SEQ ID NO: 844729 - DNA, 25 bp, Homo sapien
caccactgaggagtctggtggccat

SEQ ID NO: 844730 - DNA, 25 bp, Homo sapien
ggccacaccactgaggagtctggtg

SEQ ID NO: 844731 - DNA, 25 bp, Homo sapien
ccacaccactgaggagtctggtggc

SEQ ID NO: 844732 - DNA, 25 bp, Homo sapien
aggcaaaaggccacaccactgagga

SEQ ID NO: 844733 - DNA, 25 bp, Homo sapien
agggtcagggcaggatgggagcttt

SEQ ID NO: 844734 - DNA, 25 bp, Homo sapien
caggatgggagctttaccagatcag

SEQ ID NO: 844735 - DNA, 25 bp, Homo sapien
ggcaggatgggagctttaccagatc

SEQ ID NO: 844736 - DNA, 25 bp, Homo sapien
tcagggcaggatgggagctttacca

SEQ ID NO: 844737 - DNA, 25 bp, Homo sapien
cacagggccatccagcagaggaggc

SEQ ID NO: 844738 - DNA, 25 bp, Homo sapien
agacacagggccatccagcagagga

SEQ ID NO: 844739 - DNA, 25 bp, Homo sapien
ggagacacagggccatccagcagag

SEQ ID NO: 844740 - DNA, 25 bp, Homo sapien
ccaggagacacagggccatccagca

SEQ ID NO: 844741 - DNA, 25 bp, Homo sapien
acaggaggaaaacaattgtagtcat

SEQ ID NO: 844742 - DNA, 25 bp, Homo sapien
ggagatacaagttgggaacaggagg

SEQ ID NO: 844743 - DNA, 25 bp, Homo sapien
ctgtggagatacaagttgggaacag

SEQ ID NO: 844744 - DNA, 25 bp, Homo sapien
gatacaagttgggaacaggaggaaa

SEQ ID NO: 844745 - DNA, 25 bp, Homo sapien
tttgtgatcttgtgtctggggttct

SEQ ID NO: 844746 - DNA, 25 bp, Homo sapien
tgggagactccagtatctgcgtgat

SEQ ID NO: 844747 - DNA, 25 bp, Homo sapien
tctgggagactccagtatctgcgtg

SEQ ID NO: 844748 - DNA, 25 bp, Homo sapien
tctttgtgatcttgtgtctggggtt

SEQ ID NO: 844749 - DNA, 25 bp, Homo sapien
aaggcggttgtgttcagaaattgga

SEQ ID NO: 844750 - DNA, 25 bp, Homo sapien
ccaataaaggcggttgtgttcagaa

SEQ ID NO: 844751 - DNA, 25 bp, Homo sapien
taaaggcggttgtgttcagaaattg

SEQ ID NO: 844752 - DNA, 25 bp, Homo sapien
ctgtcggtaccaataaaggcggttg

SEQ ID NO: 844753 - DNA, 25 bp, Homo sapien
gatctccaaggtggagaaagatccc

SEQ ID NO: 844754 - DNA, 25 bp, Homo sapien
gcgctggatctccaaggtggagaaa

SEQ ID NO: 844755 - DNA, 25 bp, Homo sapien
tgctctgtgcgctggatctccaagg

SEQ ID NO: 844756 - DNA, 25 bp, Homo sapien
ggtggagaaagatcccttaggcctc

SEQ ID NO: 844757 - DNA, 25 bp, Homo sapien
gctggaaggagaagtaagtgcctga

SEQ ID NO: 844758 - DNA, 25 bp, Homo sapien
gagctggaaggagaagtaagtgcct

SEQ ID NO: 844759 - DNA, 25 bp, Homo sapien
agctggaaggagaagtaagtgcctg

SEQ ID NO: 844760 - DNA, 25 bp, Homo sapien
actcaaattttgcacaggttggtga

SEQ ID NO: 844761 - DNA, 25 bp, Homo sapien
aaattttgcacaggttggtgaggga

SEQ ID NO: 844762 - DNA, 25 bp, Homo sapien
tcaaactcaaattttgcacaggttg

SEQ ID NO: 844763 - DNA, 25 bp, Homo sapien
ctcaaactcaaattttgcacaggtt

SEQ ID NO: 844764 - DNA, 25 bp, Homo sapien
tcaggcaggtcaggactaagcatct

SEQ ID NO: 844765 - DNA, 25 bp, Homo sapien
cataggcaccctgtactccaggact

SEQ ID NO: 844766 - DNA, 25 bp, Homo sapien
ctgtgatgtcactgttctgatgtca

SEQ ID NO: 844767 - DNA, 25 bp, Homo sapien
caggagacaaagcatgacatggcag

SEQ ID NO: 844768 - DNA, 25 bp, Homo sapien
tgtctagggataggatagcatttca

SEQ ID NO: 844769 - DNA, 25 bp, Homo sapien
cagtgtcgtgtctagggataggata

SEQ ID NO: 844770 - DNA, 25 bp, Homo sapien
gatgtcttggggactggatgactcc

SEQ ID NO: 844771 - DNA, 25 bp, Homo sapien
ctggtaccagtagacagtgtcgtgt

SEQ ID NO: 844772 - DNA, 25 bp, Homo sapien
tgagctgagaatcgatcagggatgc

SEQ ID NO: 844773 - DNA, 25 bp, Homo sapien
cagaatgatagtcactgaactgttg

SEQ ID NO: 844774 - DNA, 25 bp, Homo sapien
tcctttatcgctctgcatcttttca

SEQ ID NO: 844775 - DNA, 25 bp, Homo sapien
ttgggtacagaaagccagtaattct

SEQ ID NO: 844776 - DNA, 25 bp, Homo sapien
cacaggagacaaagggccacataga

SEQ ID NO: 844777 - DNA, 25 bp, Homo sapien
ctgtccacaggagacaaagggccac

SEQ ID NO: 844778 - DNA, 25 bp, Homo sapien
tccacaggagacaaagggccacata

SEQ ID NO: 844779 - DNA, 25 bp, Homo sapien
tgtccacaggagacaaagggccaca

SEQ ID NO: 844780 - DNA, 25 bp, Homo sapien
atcccaagaaaaagacttgtattga

SEQ ID NO: 844781 - DNA, 25 bp, Homo sapien
aatagaaaacaacagaccctgatgt

SEQ ID NO: 844782 - DNA, 25 bp, Homo sapien
aaaagacttgtattgaggccttggg

SEQ ID NO: 844783 - DNA, 25 bp, Homo sapien
ccctgatgttgtaatcccaagaaaa

SEQ ID NO: 844784 - DNA, 25 bp, Homo sapien
tttgatctagagacactatagccat

SEQ ID NO: 844785 - DNA, 25 bp, Homo sapien
acatatagcggtggttctcagtctg

SEQ ID NO: 844786 - DNA, 25 bp, Homo sapien
ccagtacatatagcggtggttctca

SEQ ID NO: 844787 - DNA, 25 bp, Homo sapien
cgataccagtacatatagcggtggt

SEQ ID NO: 844788 - DNA, 25 bp, Homo sapien
tgatggcacagaagtacacagatgt

SEQ ID NO: 844789 - DNA, 25 bp, Homo sapien
agagaggaggcagccatgcagcact

SEQ ID NO: 844790 - DNA, 25 bp, Homo sapien
gaggaggcagccatgcagcactgtg

SEQ ID NO: 844791 - DNA, 25 bp, Homo sapien
gcagagaggaggcagccatgcagca

SEQ ID NO: 844792 - DNA, 25 bp, Homo sapien
agaggaggcagccatgcagcactgt

SEQ ID NO: 844793 - DNA, 25 bp, Homo sapien
caggatggaagctttgccagatcag

SEQ ID NO: 844794 - DNA, 25 bp, Homo sapien
agcagaggaagtgggatgttgctgt

SEQ ID NO: 844795 - DNA, 25 bp, Homo sapien
gccagatcagggtcactgtgagcag

SEQ ID NO: 844796 - DNA, 25 bp, Homo sapien
agggtcagggcaggatggaagcttt

SEQ ID NO: 844797 - DNA, 25 bp, Homo sapien
cccagcagaggagcctggtacccat

SEQ ID NO: 844798 - DNA, 25 bp, Homo sapien
accaggagacagaaggccacccagc

SEQ ID NO: 844799 - DNA, 25 bp, Homo sapien
cttccaccaggagacagaaggccac

SEQ ID NO: 844800 - DNA, 25 bp, Homo sapien
acccagcagaggagcctggtaccca

SEQ ID NO: 844801 - DNA, 25 bp, Homo sapien
taccagtaaagggtattgtggccag

SEQ ID NO: 844802 - DNA, 25 bp, Homo sapien
gatccttaggcaactgtgaatcgtc

SEQ ID NO: 844803 - DNA, 25 bp, Homo sapien
ctcatatcgaatcagaagctccggg

SEQ ID NO: 844804 - DNA, 25 bp, Homo sapien
tatatctgggagactgaaccactcc

SEQ ID NO: 844805 - DNA, 25 bp, Homo sapien
tattcccagccatcattcaagacat

SEQ ID NO: 844806 - DNA, 25 bp, Homo sapien
ctctacaatggaggaagcgtcggtt

SEQ ID NO: 844807 - DNA, 25 bp, Homo sapien
cagccatcattcaagacatctgcaa

SEQ ID NO: 844808 - DNA, 25 bp, Homo sapien
tggaggaagcgtcggttactaattc

SEQ ID NO: 844809 - DNA, 25 bp, Homo sapien
gtggatatggtcgtggcatcactgt

SEQ ID NO: 844810 - DNA, 25 bp, Homo sapien
gatatggtcgtggcatcactgtgat

SEQ ID NO: 844811 - DNA, 25 bp, Homo sapien
tggatatggtcgtggcatcactgtg

SEQ ID NO: 844812 - DNA, 25 bp, Homo sapien
ggatatggtcgtggcatcactgtga

SEQ ID NO: 844813 - DNA, 25 bp, Homo sapien
cagagtgagagcagatgtggaatat

SEQ ID NO: 844814 - DNA, 25 bp, Homo sapien
ggcagagtgagagcagatgtggaat

SEQ ID NO: 844815 - DNA, 25 bp, Homo sapien
gcagagtgagagcagatgtggaata

SEQ ID NO: 844816 - DNA, 25 bp, Homo sapien
ctaccaggatgcaaagggacacaca

SEQ ID NO: 844817 - DNA, 25 bp, Homo sapien
gctaccaggatgcaaagggacacac

SEQ ID NO: 844818 - DNA, 25 bp, Homo sapien
tggtctgtctgtaccagaaaaggga

SEQ ID NO: 844819 - DNA, 25 bp, Homo sapien
ggagttgtggcctgaaattggttta

SEQ ID NO: 844820 - DNA, 25 bp, Homo sapien
taccagaaaagggagttgtggcctg

SEQ ID NO: 844821 - DNA, 25 bp, Homo sapien
cagaaaagggagttgtggcctgaaa

SEQ ID NO: 844822 - DNA, 25 bp, Homo sapien
aggaaaggggtgattctgcagcgct

SEQ ID NO: 844823 - DNA, 25 bp, Homo sapien
tctgcacaggaaaggggtgattctg

SEQ ID NO: 844824 - DNA, 25 bp, Homo sapien
cacaggaaaggggtgattctgcagc

SEQ ID NO: 844825 - DNA, 25 bp, Homo sapien
gaaaggggtgattctgcagcgctgt

SEQ ID NO: 844826 - DNA, 25 bp, Homo sapien
gctaccaggatgcaaagggacacac

SEQ ID NO: 844827 - DNA, 25 bp, Homo sapien
ctaccaggatgcaaagggacacaca

SEQ ID NO: 844828 - DNA, 25 bp, Homo sapien
atggtctgtctgtaccagaaaaggt

SEQ ID NO: 844829 - DNA, 25 bp, Homo sapien
ccagaaaaggtagtcgtgtcctgaa

SEQ ID NO: 844830 - DNA, 25 bp, Homo sapien
tctgtaccagaaaaggtagtcgtgt

SEQ ID NO: 844831 - DNA, 25 bp, Homo sapien
aggtagtcgtgtcctgaaattggtt

SEQ ID NO: 844832 - DNA, 25 bp, Homo sapien
caatctagaaaacgtgtgagggaaa

SEQ ID NO: 844833 - DNA, 25 bp, Homo sapien
ccaccattctcatgggatggcaaat

SEQ ID NO: 844834 - DNA, 25 bp, Homo sapien
gagggcctcacagttcagaaaatgc

SEQ ID NO: 844835 - DNA, 25 bp, Homo sapien
gaaatctccagtgtcagtagccaag

SEQ ID NO: 844836 - DNA, 25 bp, Homo sapien
ccttgtgggcacgaatacaggagct

SEQ ID NO: 844837 - DNA, 25 bp, Homo sapien
ccttcacctagatgaggcccttgtg

SEQ ID NO: 844838 - DNA, 25 bp, Homo sapien
gagctgaggattctagacctctcac

SEQ ID NO: 844839 - DNA, 25 bp, Homo sapien
tctctgtccctgctcaaaggacctt

SEQ ID NO: 844840 - DNA, 25 bp, Homo sapien
ttctcccaggagacaaagaaccaca

SEQ ID NO: 844841 - DNA, 25 bp, Homo sapien
agaaccacacagcagaggagcctgg

SEQ ID NO: 844842 - DNA, 25 bp, Homo sapien
tctcccaggagacaaagaaccacac

SEQ ID NO: 844843 - DNA, 25 bp, Homo sapien
accacacagcagaggagcctggtgg

SEQ ID NO: 844844 - DNA, 25 bp, Homo sapien
tctctgctgagaatcgatccttcgg

SEQ ID NO: 844845 - DNA, 25 bp, Homo sapien
ccttgcctaggacatgtggaacacg

SEQ ID NO: 844846 - DNA, 25 bp, Homo sapien
gaatcatctagaggagcccggttgc

SEQ ID NO: 844847 - DNA, 25 bp, Homo sapien
gcccggttgcggaagtaagccagca

SEQ ID NO: 844848 - DNA, 25 bp, Homo sapien
accatggcaggacccaggtaaatca

SEQ ID NO: 844849 - DNA, 25 bp, Homo sapien
gggacactaaactgagaagcctgga

SEQ ID NO: 844850 - DNA, 25 bp, Homo sapien
agacaaagggacactaaactgagaa

SEQ ID NO: 844851 - DNA, 25 bp, Homo sapien
gagaagcctggaaaccatggcagga

SEQ ID NO: 844852 - DNA, 25 bp, Homo sapien
agagacaaaaacagaatacatgaca

SEQ ID NO: 844853 - DNA, 25 bp, Homo sapien
ggaagagacaaaaacagaatacatg

SEQ ID NO: 844854 - DNA, 25 bp, Homo sapien
ctgtgggaagagacaaaaacagaat

SEQ ID NO: 844855 - DNA, 25 bp, Homo sapien
tgtgggaagagacaaaaacagaata

SEQ ID NO: 844856 - DNA, 25 bp, Homo sapien
ccttctctattacgctgtggctggg

SEQ ID NO: 844857 - DNA, 25 bp, Homo sapien
ttgttgggcataccggactcatcct

SEQ ID NO: 844858 - DNA, 25 bp, Homo sapien
tgcaccttcagagtagaatacgtcc

SEQ ID NO: 844859 - DNA, 25 bp, Homo sapien
tccagaaattgggtcacatctcaga

SEQ ID NO: 844860 - DNA, 25 bp, Homo sapien
aggagaaggctatggttttgcacag

SEQ ID NO: 844861 - DNA, 25 bp, Homo sapien
cagctgtgagttgagaggagaaggc

SEQ ID NO: 844862 - DNA, 25 bp, Homo sapien
tggttttgcacagcaagggcacgac

SEQ ID NO: 844863 - DNA, 25 bp, Homo sapien
cagcaagggcacgactgtgaagcac

SEQ ID NO: 844864 - DNA, 25 bp, Homo sapien
gttatgggcaccatgaagcactgaa

SEQ ID NO: 844865 - DNA, 25 bp, Homo sapien
gacaatgagagttatgggcaccatg

SEQ ID NO: 844866 - DNA, 25 bp, Homo sapien
tcacggcaccctgctgagtccactg

SEQ ID NO: 844867 - DNA, 25 bp, Homo sapien
tcaggacaatgagagttatgggcac

SEQ ID NO: 844868 - DNA, 25 bp, Homo sapien
aataccaccccatacaggaatgaag

SEQ ID NO: 844869 - DNA, 25 bp, Homo sapien
agacaaagggccatccagtggagaa

SEQ ID NO: 844870 - DNA, 25 bp, Homo sapien
gagacaaagggccatccagtggaga

SEQ ID NO: 844871 - DNA, 25 bp, Homo sapien
ggacccatggcaggaataccacccc

SEQ ID NO: 844872 - DNA, 25 bp, Homo sapien
caaagtctgagaacaactcagggtc

SEQ ID NO: 844873 - DNA, 25 bp, Homo sapien
gtcatagtagtggaacagcagcttt

SEQ ID NO: 844874 - DNA, 25 bp, Homo sapien
cctggtgagcggatgtcaagaaagc

SEQ ID NO: 844875 - DNA, 25 bp, Homo sapien
gaagtgttcggcctcctggattgga

SEQ ID NO: 844876 - DNA, 25 bp, Homo sapien
gcaggaagcactgcagctctgtgtc

SEQ ID NO: 844877 - DNA, 25 bp, Homo sapien
gagcaggaagcactgcagctctgtg

SEQ ID NO: 844878 - DNA, 25 bp, Homo sapien
agcaggaagcactgcagctctgtgt

SEQ ID NO: 844879 - DNA, 25 bp, Homo sapien
tcctattgttgtaagaggtggtgag

SEQ ID NO: 844880 - DNA, 25 bp, Homo sapien
ttcctattgttgtaagaggtggtga

SEQ ID NO: 844881 - DNA, 25 bp, Homo sapien
gaggtggtgagggagaagtcctaga

SEQ ID NO: 844882 - DNA, 25 bp, Homo sapien
gagggagaagtcctagagaaagcac

SEQ ID NO: 844883 - DNA, 25 bp, Homo sapien
ttattggtttgtgctcaacttctgt

SEQ ID NO: 844884 - DNA, 25 bp, Homo sapien
cagatattgacagccaccaacccac

SEQ ID NO: 844885 - DNA, 25 bp, Homo sapien
tgatgcaggtgaatattgggctcat

SEQ ID NO: 844886 - DNA, 25 bp, Homo sapien
caaaggattgtgatgcaggtgaata

SEQ ID NO: 844887 - DNA, 25 bp, Homo sapien
gacaaaggattgtgatgcaggtgaa

SEQ ID NO: 844888 - DNA, 25 bp, Homo sapien
attgtgatgcaggtgaatattgggc

SEQ ID NO: 844889 - DNA, 25 bp, Homo sapien
ttttggagtctgggcgacttcttca

SEQ ID NO: 844890 - DNA, 25 bp, Homo sapien
atgttttggagtctgggcgacttct

SEQ ID NO: 844891 - DNA, 25 bp, Homo sapien
gttttggagtctgggcgacttcttc

SEQ ID NO: 844892 - DNA, 25 bp, Homo sapien
tgttttggagtctgggcgacttctt

SEQ ID NO: 844893 - DNA, 25 bp, Homo sapien
tgtccttttattggggcacaatata

SEQ ID NO: 844894 - DNA, 25 bp, Homo sapien
ctaactgtgtccttttattggggca

SEQ ID NO: 844895 - DNA, 25 bp, Homo sapien
tattggggcacaatataattttgct

SEQ ID NO: 844896 - DNA, 25 bp, Homo sapien
tataattttgctttctgtccttccc

SEQ ID NO: 844897 - DNA, 25 bp, Homo sapien
gaaggaaatcaagaacttgaactcg

SEQ ID NO: 844898 - DNA, 25 bp, Homo sapien
caaagacattttcattctggaagga

SEQ ID NO: 844899 - DNA, 25 bp, Homo sapien
caagaacttgaactcgtttttcagg

SEQ ID NO: 844900 - DNA, 25 bp, Homo sapien
cattttcattctggaaggaaatcaa

SEQ ID NO: 844901 - DNA, 25 bp, Homo sapien
gattggctgctggcacaaaaataca

SEQ ID NO: 844902 - DNA, 25 bp, Homo sapien
gaggcacttagctgaaaatctttcc

SEQ ID NO: 844903 - DNA, 25 bp, Homo sapien
tgaatcctcaagcttcgtagcctgg

SEQ ID NO: 844904 - DNA, 25 bp, Homo sapien
gcctggatctcaaggctacagggtg

SEQ ID NO: 844905 - DNA, 25 bp, Homo sapien
gtcacccagcagaggagccagatat

SEQ ID NO: 844906 - DNA, 25 bp, Homo sapien
ctgccgccaagagacacagggtcac

SEQ ID NO: 844907 - DNA, 25 bp, Homo sapien
tgccgccaagagacacagggtcacc

SEQ ID NO: 844908 - DNA, 25 bp, Homo sapien
cagggtcacccagcagaggagccag

SEQ ID NO: 844909 - DNA, 25 bp, Homo sapien
catgtgaccagaagatggatcgcac

SEQ ID NO: 844910 - DNA, 25 bp, Homo sapien
agaatcacctcctgtcccatgttgg

SEQ ID NO: 844911 - DNA, 25 bp, Homo sapien
gcctcagattctgtcggtaccagtg

SEQ ID NO: 844912 - DNA, 25 bp, Homo sapien
tgcaatgttttggtactggaaggaa

SEQ ID NO: 844913 - DNA, 25 bp, Homo sapien
tcagcgtggaagacgttccgttagg

SEQ ID NO: 844914 - DNA, 25 bp, Homo sapien
acggctgagtccctcggctctgcgg

SEQ ID NO: 844915 - DNA, 25 bp, Homo sapien
gctctgcgggatggatcttcagcgt

SEQ ID NO: 844916 - DNA, 25 bp, Homo sapien
tgtgaatcgttccttgggcatccct

SEQ ID NO: 844917 - DNA, 25 bp, Homo sapien
agccagagggtttgcaccctggagg

SEQ ID NO: 844918 - DNA, 25 bp, Homo sapien
cagagggtttgcaccctggagggaa

SEQ ID NO: 844919 - DNA, 25 bp, Homo sapien
gaccgcacagcagagtactctggtg

SEQ ID NO: 844920 - DNA, 25 bp, Homo sapien
caaaggcacttgctgcagcacgtcg

SEQ ID NO: 844921 - DNA, 25 bp, Homo sapien
cagggcaaaggcacttgctgcagca

SEQ ID NO: 844922 - DNA, 25 bp, Homo sapien
ggtgtccatagcagagttggccatg

SEQ ID NO: 844923 - DNA, 25 bp, Homo sapien
gaaaatcgttcctttggcattcctg

SEQ ID NO: 844924 - DNA, 25 bp, Homo sapien
acatgactgtgtcctttcattgggc

SEQ ID NO: 844925 - DNA, 25 bp, Homo sapien
tgggagctgccgataccagtaaaca

SEQ ID NO: 844926 - DNA, 25 bp, Homo sapien
ggttctgcatgacgccggcatttga

SEQ ID NO: 844927 - DNA, 25 bp, Homo sapien
gcacagaaataagctgccgaatctc

SEQ ID NO: 844928 - DNA, 25 bp, Homo sapien
cacagaaataagctgccgaatctcc

SEQ ID NO: 844929 - DNA, 25 bp, Homo sapien
tgtggactgagaggatgtggctctg

SEQ ID NO: 844930 - DNA, 25 bp, Homo sapien
aaggcaggtctggaggatgtttgtg

SEQ ID NO: 844931 - DNA, 25 bp, Homo sapien
tgtttgtggactgagaggatgtggc

SEQ ID NO: 844932 - DNA, 25 bp, Homo sapien
ggatgtttgtggactgagaggatgt

SEQ ID NO: 844933 - DNA, 25 bp, Homo sapien
cactgtacaggtaacgcgtttccct

SEQ ID NO: 844934 - DNA, 25 bp, Homo sapien
tcactgtacaggtaacgcgtttccc

SEQ ID NO: 844935 - DNA, 25 bp, Homo sapien
gagataatcaagacaggcttcctaa

SEQ ID NO: 844936 - DNA, 25 bp, Homo sapien
gacagagagcagagtcattcgcacc

SEQ ID NO: 844937 - DNA, 25 bp, Homo sapien
ctcccataactctgcattgcatctg

SEQ ID NO: 844938 - DNA, 25 bp, Homo sapien
tcctggcctaatgtgcagagtttgt

SEQ ID NO: 844939 - DNA, 25 bp, Homo sapien
caaagggggccttcttggagctcca

SEQ ID NO: 844940 - DNA, 25 bp, Homo sapien
agtgcaaagggggccttcttggagc

SEQ ID NO: 844941 - DNA, 25 bp, Homo sapien
aagggggccttcttggagctccaag

SEQ ID NO: 844942 - DNA, 25 bp, Homo sapien
tgcaaagggggccttcttggagctc

SEQ ID NO: 844943 - DNA, 25 bp, Homo sapien
cacagcagagcacctggttgctcat

SEQ ID NO: 844944 - DNA, 25 bp, Homo sapien
ccacacagcagagcacctggttgct

SEQ ID NO: 844945 - DNA, 25 bp, Homo sapien
acaaaggaccacacagcagagcacc

SEQ ID NO: 844946 - DNA, 25 bp, Homo sapien
tgctcccaggaaacaaaggaccaca

SEQ ID NO: 844947 - DNA, 25 bp, Homo sapien
gttcacaactcagggtcacattctg

SEQ ID NO: 844948 - DNA, 25 bp, Homo sapien
tgttcacaactcagggtcacattct

SEQ ID NO: 844949 - DNA, 25 bp, Homo sapien
gaaagtcatttactatctgtgagta

SEQ ID NO: 844950 - DNA, 25 bp, Homo sapien
tcggtaccagtacatggcatcgtgg

SEQ ID NO: 844951 - DNA, 25 bp, Homo sapien
gagagacgctgtacccttcagctat

SEQ ID NO: 844952 - DNA, 25 bp, Homo sapien
tagtagatcaatctcagcccttgcc

SEQ ID NO: 844953 - DNA, 25 bp, Homo sapien
agctgtcgggttcttttgggccgat

SEQ ID NO: 844954 - DNA, 25 bp, Homo sapien
tcgggttcttttgggccgatgtcac

SEQ ID NO: 844955 - DNA, 25 bp, Homo sapien
gatagaaagctgtcgggttcttttg

SEQ ID NO: 844956 - DNA, 25 bp, Homo sapien
cacagagatagaaagctgtcgggtt

SEQ ID NO: 844957 - DNA, 25 bp, Homo sapien
agcaggactgggcacatttatgcac

SEQ ID NO: 844958 - DNA, 25 bp, Homo sapien
gcacagagaggcgacatccgtgctt

SEQ ID NO: 844959 - DNA, 25 bp, Homo sapien
gaggcgacatccgtgcttcactgtg

SEQ ID NO: 844960 - DNA, 25 bp, Homo sapien
gactgggcacatttatgcacagaga

SEQ ID NO: 844961 - DNA, 25 bp, Homo sapien
agggtttgtcttctacatctctctt

SEQ ID NO: 844962 - DNA, 25 bp, Homo sapien
tacatctctctttccacaggctttt

SEQ ID NO: 844963 - DNA, 25 bp, Homo sapien
gtttgtcttctacatctctctttcc

SEQ ID NO: 844964 - DNA, 25 bp, Homo sapien
tctacatctctctttccacaggctt

SEQ ID NO: 844965 - DNA, 25 bp, Homo sapien
tgaaacttcatagctacagtgttct

SEQ ID NO: 844966 - DNA, 25 bp, Homo sapien
ggaatggagattatgatgaaacttc

SEQ ID NO: 844967 - DNA, 25 bp, Homo sapien
tacaacctggttgtgggaatggaga

SEQ ID NO: 844968 - DNA, 25 bp, Homo sapien
tcacttcagatgatatctctcttac

SEQ ID NO: 844969 - DNA, 25 bp, Homo sapien
tacagagagaaatgctcagcgggtc

SEQ ID NO: 844970 - DNA, 25 bp, Homo sapien
catcccaggtaacgaaccaacaggg

SEQ ID NO: 844971 - DNA, 25 bp, Homo sapien
tgctgtgagacagctcatctaatca

SEQ ID NO: 844972 - DNA, 25 bp, Homo sapien
tcatctaatcacatcaaaaggctgt

SEQ ID NO: 844973 - DNA, 25 bp, Homo sapien
agcctagttgaccacacccgggtct

SEQ ID NO: 844974 - DNA, 25 bp, Homo sapien
gtcaacgaccatgccaaaactttag

SEQ ID NO: 844975 - DNA, 25 bp, Homo sapien
gaatgctcacagttagggtggtcaa

SEQ ID NO: 844976 - DNA, 25 bp, Homo sapien
ctgggctgtaaggagcctagttgac

SEQ ID NO: 844977 - DNA, 25 bp, Homo sapien
tgactgatcacagaatcccaaggat

SEQ ID NO: 844978 - DNA, 25 bp, Homo sapien
actgatcacagaatcccaaggatgc

SEQ ID NO: 844979 - DNA, 25 bp, Homo sapien
ggagggatgactgatcacagaatcc

SEQ ID NO: 844980 - DNA, 25 bp, Homo sapien
ggatgactgatcacagaatcccaag

SEQ ID NO: 844981 - DNA, 25 bp, Homo sapien
ctggccccagaagcagcagaagcag

SEQ ID NO: 844982 - DNA, 25 bp, Homo sapien
cccagaagcagcagaagcagcagca

SEQ ID NO: 844983 - DNA, 25 bp, Homo sapien
ccagaagcagcagaagcagcagcat

SEQ ID NO: 844984 - DNA, 25 bp, Homo sapien
gccccagaagcagcagaagcagcag

SEQ ID NO: 844985 - DNA, 25 bp, Homo sapien
gcccacccaagctcccaggtagaag

SEQ ID NO: 844986 - DNA, 25 bp, Homo sapien
cacccaagctcccaggtagaaggag

SEQ ID NO: 844987 - DNA, 25 bp, Homo sapien
ctcccaggtagaaggaggcttatac

SEQ ID NO: 844988 - DNA, 25 bp, Homo sapien
aagctcccaggtagaaggaggctta

SEQ ID NO: 844989 - DNA, 25 bp, Homo sapien
catttacacctctagagagcagggc

SEQ ID NO: 844990 - DNA, 25 bp, Homo sapien
tagagagcagggcctctccctctcc

SEQ ID NO: 844991 - DNA, 25 bp, Homo sapien
atttacacctctagagagcagggcc

SEQ ID NO: 844992 - DNA, 25 bp, Homo sapien
agagcagggcctctccctctccctt

SEQ ID NO: 844993 - DNA, 25 bp, Homo sapien
gctcggatgttgagagacgacagca

SEQ ID NO: 844994 - DNA, 25 bp, Homo sapien
ctcggatgttgagagacgacagcac

SEQ ID NO: 844995 - DNA, 25 bp, Homo sapien
aaggtcaggcttgcatggttgatga

SEQ ID NO: 844996 - DNA, 25 bp, Homo sapien
agagtggacaaggtcaggcttgcat

SEQ ID NO: 844997 - DNA, 25 bp, Homo sapien
agcatgagactctgtttcgggaact

SEQ ID NO: 844998 - DNA, 25 bp, Homo sapien
actctgtttcgggaactgacgatac

SEQ ID NO: 844999 - DNA, 25 bp, Homo sapien
tttccattctccacgcttcccctct

SEQ ID NO: 845000 - DNA, 25 bp, Homo sapien
tccattctccacgcttcccctctca

SEQ ID NO: 845001 - DNA, 25 bp, Homo sapien
ttttccattctccacgcttcccctc

SEQ ID NO: 845002 - DNA, 25 bp, Homo sapien
ttccattctccacgcttcccctctc

SEQ ID NO: 845003 - DNA, 25 bp, Homo sapien
ctgttcattcatcaaccgaaacacc

SEQ ID NO: 845004 - DNA, 25 bp, Homo sapien
gaactttccaactctgtagacaagc

SEQ ID NO: 845005 - DNA, 25 bp, Homo sapien
gcagaactttccaactctgtagaca

SEQ ID NO: 845006 - DNA, 25 bp, Homo sapien
tggcagaactttccaactctgtaga

SEQ ID NO: 845007 - DNA, 25 bp, Homo sapien
ctttccaactctgtagacaagccat

SEQ ID NO: 845008 - DNA, 25 bp, Homo sapien
gtgacgtgatcactttccatagcct

SEQ ID NO: 845009 - DNA, 25 bp, Homo sapien
aacctccttgtgacgtgatcacttt

SEQ ID NO: 845010 - DNA, 25 bp, Homo sapien
ctccttgtgacgtgatcactttcca

SEQ ID NO: 845011 - DNA, 25 bp, Homo sapien
actttccatagcctttgtagatgct

SEQ ID NO: 845012 - DNA, 25 bp, Homo sapien
tgcagccaccggagagagtcttgga

SEQ ID NO: 845013 - DNA, 25 bp, Homo sapien
ctgcagccaccggagagagtcttgg

SEQ ID NO: 845014 - DNA, 25 bp, Homo sapien
gcagccaccggagagagtcttggaa

SEQ ID NO: 845015 - DNA, 25 bp, Homo sapien
tagaaaaagcgcaggagggagcttg

SEQ ID NO: 845016 - DNA, 25 bp, Homo sapien
ctgtagaaaaagcgcaggagggagc

SEQ ID NO: 845017 - DNA, 25 bp, Homo sapien
gaaaaagcgcaggagggagcttgat

SEQ ID NO: 845018 - DNA, 25 bp, Homo sapien
gtagaaaaagcgcaggagggagctt

SEQ ID NO: 845019 - DNA, 25 bp, Homo sapien
tatgtgcttttataggaacacaatc

SEQ ID NO: 845020 - DNA, 25 bp, Homo sapien
tgtgcttttataggaacacaatcca

SEQ ID NO: 845021 - DNA, 25 bp, Homo sapien
actatgtgcttttataggaacacaa

SEQ ID NO: 845022 - DNA, 25 bp, Homo sapien
gtgcttttataggaacacaatccat

SEQ ID NO: 845023 - DNA, 25 bp, Homo sapien
gctaaaaatcgctcattgattattt

SEQ ID NO: 845024 - DNA, 25 bp, Homo sapien
taaaaatcgctcattgattatttct

SEQ ID NO: 845025 - DNA, 25 bp, Homo sapien
tgggctaaaaatcgctcattgatta

SEQ ID NO: 845026 - DNA, 25 bp, Homo sapien
ggctaaaaatcgctcattgattatt

SEQ ID NO: 845027 - DNA, 25 bp, Homo sapien
ggtacaggatgagtttttggagcat

SEQ ID NO: 845028 - DNA, 25 bp, Homo sapien
ggagacacagggtcacatagcagag

SEQ ID NO: 845029 - DNA, 25 bp, Homo sapien
cactccagagtcacatcccatccag

SEQ ID NO: 845030 - DNA, 25 bp, Homo sapien
aaattccgtttccactccagagtca

SEQ ID NO: 845031 - DNA, 25 bp, Homo sapien
cattgtgtctcaaattccgtttcca

SEQ ID NO: 845032 - DNA, 25 bp, Homo sapien
ctcaaattccgtttccactccagag

SEQ ID NO: 845033 - DNA, 25 bp, Homo sapien
cattgacagttacctttttctcatt

SEQ ID NO: 845034 - DNA, 25 bp, Homo sapien
tccattgacagttacctttttctca

SEQ ID NO: 845035 - DNA, 25 bp, Homo sapien
tgacagttacctttttctcattgat

SEQ ID NO: 845036 - DNA, 25 bp, Homo sapien
ttccattgacagttacctttttctc

SEQ ID NO: 845037 - DNA, 25 bp, Homo sapien
acagggctgcacagccgaggagcct

SEQ ID NO: 845038 - DNA, 25 bp, Homo sapien
ggagacacagggctgcacagccgag

SEQ ID NO: 845039 - DNA, 25 bp, Homo sapien
cacagccgaggagcctggtgcccat

SEQ ID NO: 845040 - DNA, 25 bp, Homo sapien
agacacagggctgcacagccgagga

SEQ ID NO: 845041 - DNA, 25 bp, Homo sapien
aaaacaaagcttggatctgctggtt

SEQ ID NO: 845042 - DNA, 25 bp, Homo sapien
aacaaagcttggatctgctggttgg

SEQ ID NO: 845043 - DNA, 25 bp, Homo sapien
caaagcttggatctgctggttggca

SEQ ID NO: 845044 - DNA, 25 bp, Homo sapien
acaaagcttggatctgctggttggc

SEQ ID NO: 845045 - DNA, 25 bp, Homo sapien
atgagaatcgcttcttgtgcatctc

SEQ ID NO: 845046 - DNA, 25 bp, Homo sapien
tgagatgagaatcgcttcttgtgca

SEQ ID NO: 845047 - DNA, 25 bp, Homo sapien
cattgagatgagaatcgcttcttgt

SEQ ID NO: 845048 - DNA, 25 bp, Homo sapien
agatgagaatcgcttcttgtgcatc

SEQ ID NO: 845049 - DNA, 25 bp, Homo sapien
actgtggcttaagctggctccagtt

SEQ ID NO: 845050 - DNA, 25 bp, Homo sapien
ctgtggcttaagctggctccagtta

SEQ ID NO: 845051 - DNA, 25 bp, Homo sapien
ggcttagaaagagccagcctggtat

SEQ ID NO: 845052 - DNA, 25 bp, Homo sapien
cagtgtagggaaatgatggcaactg

SEQ ID NO: 845053 - DNA, 25 bp, Homo sapien
atacatacatgcctcctgctgagtg

SEQ ID NO: 845054 - DNA, 25 bp, Homo sapien
ctctgtgagaaggttaatggctgga

SEQ ID NO: 845055 - DNA, 25 bp, Homo sapien
ttcccaggagataaaaggccccaca

SEQ ID NO: 845056 - DNA, 25 bp, Homo sapien
gataaaaggccccacagaagaagag

SEQ ID NO: 845057 - DNA, 25 bp, Homo sapien
tgttcccaggagataaaaggcccca

SEQ ID NO: 845058 - DNA, 25 bp, Homo sapien
caggagataaaaggccccacagaag

SEQ ID NO: 845059 - DNA, 25 bp, Homo sapien
cagaaactggtaaatatcctcgtgc

SEQ ID NO: 845060 - DNA, 25 bp, Homo sapien
aatatcctcgtgctgcaatctctga

SEQ ID NO: 845061 - DNA, 25 bp, Homo sapien
ctcgtgctgcaatctctgaggatag

SEQ ID NO: 845062 - DNA, 25 bp, Homo sapien
aagacagaaactggtaaatatcctc

SEQ ID NO: 845063 - DNA, 25 bp, Homo sapien
tttagcctgtgcctgtcgagagaca

SEQ ID NO: 845064 - DNA, 25 bp, Homo sapien
tctagggacagggagaatttagcct

SEQ ID NO: 845065 - DNA, 25 bp, Homo sapien
gatggcagactctagggacagggag

SEQ ID NO: 845066 - DNA, 25 bp, Homo sapien
tgcctgtcgagagacactgtatcca

SEQ ID NO: 845067 - DNA, 25 bp, Homo sapien
tctgtgtagagagcaggtggccaag

SEQ ID NO: 845068 - DNA, 25 bp, Homo sapien
ctgtgtagagagcaggtggccaaga

SEQ ID NO: 845069 - DNA, 25 bp, Homo sapien
tatggggctgtataagcccatctag

SEQ ID NO: 845070 - DNA, 25 bp, Homo sapien
tttatggggctgtataagcccatct

SEQ ID NO: 845071 - DNA, 25 bp, Homo sapien
tggggctgtataagcccatctagac

SEQ ID NO: 845072 - DNA, 25 bp, Homo sapien
tgtttatggggctgtataagcccat

SEQ ID NO: 845073 - DNA, 25 bp, Homo sapien
tttatgtagatacttgtgcttactt

SEQ ID NO: 845074 - DNA, 25 bp, Homo sapien
ttgtgacttttactagggtttgctg

SEQ ID NO: 845075 - DNA, 25 bp, Homo sapien
tgacttttactagggtttgctgaag

SEQ ID NO: 845076 - DNA, 25 bp, Homo sapien
tagatacttgtgcttactttgtgac

SEQ ID NO: 845077 - DNA, 25 bp, Homo sapien
gaaatctgggtgtaagacagatgct

SEQ ID NO: 845078 - DNA, 25 bp, Homo sapien
aaatctgggtgtaagacagatgctt

SEQ ID NO: 845079 - DNA, 25 bp, Homo sapien
tactacatagatgggtgtgttcttt

SEQ ID NO: 845080 - DNA, 25 bp, Homo sapien
catgaatctccccactattttacta

SEQ ID NO: 845081 - DNA, 25 bp, Homo sapien
ccccactattttactacatagatgg

SEQ ID NO: 845082 - DNA, 25 bp, Homo sapien
taggctcagtaggcttatcaccact

SEQ ID NO: 845083 - DNA, 25 bp, Homo sapien
gatgtctcccagtagtggggaagca

SEQ ID NO: 845084 - DNA, 25 bp, Homo sapien
tagagaggatgtctcccagtagtgg

SEQ ID NO: 845085 - DNA, 25 bp, Homo sapien
cagttggggctagagaggatgtctc

SEQ ID NO: 845086 - DNA, 25 bp, Homo sapien
tagtcatggcacagttggggctaga

SEQ ID NO: 845087 - DNA, 25 bp, Homo sapien
aaataaaagcccatgtagcagagga

SEQ ID NO: 845088 - DNA, 25 bp, Homo sapien
aaaataaaagcccatgtagcagagg

SEQ ID NO: 845089 - DNA, 25 bp, Homo sapien
tggtagatgtcagcttccatgaggc

SEQ ID NO: 845090 - DNA, 25 bp, Homo sapien
tggggtctggtagatgtcagcttcc

SEQ ID NO: 845091 - DNA, 25 bp, Homo sapien
gtatcttggggtctggtagatgtca

SEQ ID NO: 845092 - DNA, 25 bp, Homo sapien
tcttggggtctggtagatgtcagct

SEQ ID NO: 845093 - DNA, 25 bp, Homo sapien
cattcctggatcttgttgataccag

SEQ ID NO: 845094 - DNA, 25 bp, Homo sapien
aaatgctccgtccttattctggaga

SEQ ID NO: 845095 - DNA, 25 bp, Homo sapien
gtcaggggaaaatgctccgtcctta

SEQ ID NO: 845096 - DNA, 25 bp, Homo sapien
tcttgttgataccagtacattttgt

SEQ ID NO: 845097 - DNA, 25 bp, Homo sapien
gaccctttctgtgcggagtgtcggt

SEQ ID NO: 845098 - DNA, 25 bp, Homo sapien
tctgtgcggagtgtcggtatccatg

SEQ ID NO: 845099 - DNA, 25 bp, Homo sapien
cggagtgtcggtatccatgtagcac

SEQ ID NO: 845100 - DNA, 25 bp, Homo sapien
ttagaggcgaccctttctgtgcgga

SEQ ID NO: 845101 - DNA, 25 bp, Homo sapien
aagtacatgcaagggaggaataacc

SEQ ID NO: 845102 - DNA, 25 bp, Homo sapien
gcaatcaggtgtcttagagtctagg

SEQ ID NO: 845103 - DNA, 25 bp, Homo sapien
tgttaactgaataatgagtcggctc

SEQ ID NO: 845104 - DNA, 25 bp, Homo sapien
gagtcggctctaattccaaccctga

SEQ ID NO: 845105 - DNA, 25 bp, Homo sapien
ttaggagacaaatgatcacacagca

SEQ ID NO: 845106 - DNA, 25 bp, Homo sapien
taggagacaaatgatcacacagcag

SEQ ID NO: 845107 - DNA, 25 bp, Homo sapien
cttaggagacaaatgatcacacagc

SEQ ID NO: 845108 - DNA, 25 bp, Homo sapien
gaaaaatggatgatcaaatagagac

SEQ ID NO: 845109 - DNA, 25 bp, Homo sapien
ggaaaaatggatgatcaaatagaga

SEQ ID NO: 845110 - DNA, 25 bp, Homo sapien
aaaaatggatgatcaaatagagaca

SEQ ID NO: 845111 - DNA, 25 bp, Homo sapien
tttcctgtcccaatgattctgtgtc

SEQ ID NO: 845112 - DNA, 25 bp, Homo sapien
attgtgtaactacagcatccttgag

SEQ ID NO: 845113 - DNA, 25 bp, Homo sapien
ttgggaattgtgtaactacagcatc

SEQ ID NO: 845114 - DNA, 25 bp, Homo sapien
cctttcctgtcccaatgattctgtg

SEQ ID NO: 845115 - DNA, 25 bp, Homo sapien
atgaactgctggcatagagatacac

SEQ ID NO: 845116 - DNA, 25 bp, Homo sapien
gtcaggggaaaagatgctatagtat

SEQ ID NO: 845117 - DNA, 25 bp, Homo sapien
tagagatacacagatgtctggttgg

SEQ ID NO: 845118 - DNA, 25 bp, Homo sapien
ttggtgctggcagacttcagggtca

SEQ ID NO: 845119 - DNA, 25 bp, Homo sapien
tcatcaccagaaagctgttacagga

SEQ ID NO: 845120 - DNA, 25 bp, Homo sapien
gtcttagtatcatcccttcagggtt

SEQ ID NO: 845121 - DNA, 25 bp, Homo sapien
aggattcttgaatctcaagcaagaa

SEQ ID NO: 845122 - DNA, 25 bp, Homo sapien
ttccagggtttcctcactacagtcc

SEQ ID NO: 845123 - DNA, 25 bp, Homo sapien
tgaacggttcaggtggccgcatgat

SEQ ID NO: 845124 - DNA, 25 bp, Homo sapien
cactgaacggttcaggtggccgcat

SEQ ID NO: 845125 - DNA, 25 bp, Homo sapien
aacggttcaggtggccgcatgatgg

SEQ ID NO: 845126 - DNA, 25 bp, Homo sapien
actgaacggttcaggtggccgcatg

SEQ ID NO: 845127 - DNA, 25 bp, Homo sapien
gaggcaggaatagaaccctgaacac

SEQ ID NO: 845128 - DNA, 25 bp, Homo sapien
acaggatgccattgtgaaaagcgaa

SEQ ID NO: 845129 - DNA, 25 bp, Homo sapien
tgaggcaggaatagaaccctgaaca

SEQ ID NO: 845130 - DNA, 25 bp, Homo sapien
aggcaggaatagaaccctgaacaca

SEQ ID NO: 845131 - DNA, 25 bp, Homo sapien
tggttgtgaaggatcttttccagcg

SEQ ID NO: 845132 - DNA, 25 bp, Homo sapien
gtgaaggatcttttccagcggtccc

SEQ ID NO: 845133 - DNA, 25 bp, Homo sapien
ggttgtgaaggatcttttccagcgg

SEQ ID NO: 845134 - DNA, 25 bp, Homo sapien
ttgtgaaggatcttttccagcggtc

SEQ ID NO: 845135 - DNA, 25 bp, Homo sapien
gggaagaggaggcactcggagacaa

SEQ ID NO: 845136 - DNA, 25 bp, Homo sapien
gaagaggaggcactcggagacaaca

SEQ ID NO: 845137 - DNA, 25 bp, Homo sapien
tgctctcaattttgttcacacatgt

SEQ ID NO: 845138 - DNA, 25 bp, Homo sapien
agaggaggcactcggagacaacaga

SEQ ID NO: 845139 - DNA, 25 bp, Homo sapien
tcttgagtcctgacgaaaggtgata

SEQ ID NO: 845140 - DNA, 25 bp, Homo sapien
aaagcttcagtatgatgaaggccat

SEQ ID NO: 845141 - DNA, 25 bp, Homo sapien
aaggccattcagaactcttgagtcc

SEQ ID NO: 845142 - DNA, 25 bp, Homo sapien
ttatggtctcttgtgttcagggtaa

SEQ ID NO: 845143 - DNA, 25 bp, Homo sapien
aattattcccaagatgagtagtctc

SEQ ID NO: 845144 - DNA, 25 bp, Homo sapien
ttattcccaagatgagtagtctccc

SEQ ID NO: 845145 - DNA, 25 bp, Homo sapien
ttcccaagatgagtagtctccctga

SEQ ID NO: 845146 - DNA, 25 bp, Homo sapien
tattcccaagatgagtagtctccct

SEQ ID NO: 845147 - DNA, 25 bp, Homo sapien
atgactgggtgctgcttagcagggt

SEQ ID NO: 845148 - DNA, 25 bp, Homo sapien
cctcggtggcagcactttcatgact

SEQ ID NO: 845149 - DNA, 25 bp, Homo sapien
tttcatgactgggtgctgcttagca

SEQ ID NO: 845150 - DNA, 25 bp, Homo sapien
tcatgactgggtgctgcttagcagg

SEQ ID NO: 845151 - DNA, 25 bp, Homo sapien
cagtgaatccttgctggtctgcagc

SEQ ID NO: 845152 - DNA, 25 bp, Homo sapien
tctccaagttactggtggaaggtat

SEQ ID NO: 845153 - DNA, 25 bp, Homo sapien
ttactggtggaaggtatcttgagtt

SEQ ID NO: 845154 - DNA, 25 bp, Homo sapien
tcttgagttatcagcagtgaatcct

SEQ ID NO: 845155 - DNA, 25 bp, Homo sapien
tttagaccaacttagttctagaaga

SEQ ID NO: 845156 - DNA, 25 bp, Homo sapien
atatattctaacagttttgttctcc

SEQ ID NO: 845157 - DNA, 25 bp, Homo sapien
ggccacacacagacgagtgtcccag

SEQ ID NO: 845158 - DNA, 25 bp, Homo sapien
cagagccttaccaagatatgcactt

SEQ ID NO: 845159 - DNA, 25 bp, Homo sapien
tggtgattatcccatgtgcgttctg

SEQ ID NO: 845160 - DNA, 25 bp, Homo sapien
atggtgattatcccatgtgcgttct

SEQ ID NO: 845161 - DNA, 25 bp, Homo sapien
gatgcagaaaagtgactacatagcc

SEQ ID NO: 845162 - DNA, 25 bp, Homo sapien
aagaaggatgcagaaaagtgactac

SEQ ID NO: 845163 - DNA, 25 bp, Homo sapien
tgcagaaaagtgactacatagccca

SEQ ID NO: 845164 - DNA, 25 bp, Homo sapien
aggatgcagaaaagtgactacatag

SEQ ID NO: 845165 - DNA, 25 bp, Homo sapien
tagaatgactatgctgactcagggc

SEQ ID NO: 845166 - DNA, 25 bp, Homo sapien
gatgtggctgcactgataggctgct

SEQ ID NO: 845167 - DNA, 25 bp, Homo sapien
gattaaatttatccccagccctgga

SEQ ID NO: 845168 - DNA, 25 bp, Homo sapien
ggtttgtcatatccgctcagagagg

SEQ ID NO: 845169 - DNA, 25 bp, Homo sapien
tacttagtaaaccttgacatcccaa

SEQ ID NO: 845170 - DNA, 25 bp, Homo sapien
catatcctagctgtgaattcgggta

SEQ ID NO: 845171 - DNA, 25 bp, Homo sapien
ttggatttcccaacattccgtggtg

SEQ ID NO: 845172 - DNA, 25 bp, Homo sapien
tcagaatttactcgcgtccacatag

SEQ ID NO: 845173 - DNA, 25 bp, Homo sapien
cttcctgcagtaacctcagagcctt

SEQ ID NO: 845174 - DNA, 25 bp, Homo sapien
tgcttttggtacgtgctttgctttc

SEQ ID NO: 845175 - DNA, 25 bp, Homo sapien
agagccttaccagccagctctgctt

SEQ ID NO: 845176 - DNA, 25 bp, Homo sapien
aagatggtatctggagcatctttct

SEQ ID NO: 845177 - DNA, 25 bp, Homo sapien
ggctccaggtggtttctgtaacgtc

SEQ ID NO: 845178 - DNA, 25 bp, Homo sapien
gctccaggtggtttctgtaacgtct

SEQ ID NO: 845179 - DNA, 25 bp, Homo sapien
caggtggtttctgtaacgtctccac

SEQ ID NO: 845180 - DNA, 25 bp, Homo sapien
tccaggtggtttctgtaacgtctcc

SEQ ID NO: 845181 - DNA, 25 bp, Homo sapien
tcctagaaggcaaaggaccacatag

SEQ ID NO: 845182 - DNA, 25 bp, Homo sapien
ggcaaaggaccacatagccaaggag

SEQ ID NO: 845183 - DNA, 25 bp, Homo sapien
agaaggcaaaggaccacatagccaa

SEQ ID NO: 845184 - DNA, 25 bp, Homo sapien
ctagaaggcaaaggaccacatagcc

SEQ ID NO: 845185 - DNA, 25 bp, Homo sapien
gaaggggacagagttagaggcagcg

SEQ ID NO: 845186 - DNA, 25 bp, Homo sapien
aaggaaggggacagagttagaggca

SEQ ID NO: 845187 - DNA, 25 bp, Homo sapien
ctgtaaaggaaggggacagagttag

SEQ ID NO: 845188 - DNA, 25 bp, Homo sapien
tgtaaaggaaggggacagagttaga

SEQ ID NO: 845189 - DNA, 25 bp, Homo sapien
gtatcttgggttctgggtcacttgg

SEQ ID NO: 845190 - DNA, 25 bp, Homo sapien
cttgggttctgggtcacttgggctt

SEQ ID NO: 845191 - DNA, 25 bp, Homo sapien
ggttctgggtcacttgggcttccag

SEQ ID NO: 845192 - DNA, 25 bp, Homo sapien
gtgatgaggtatcttgggttctggg

SEQ ID NO: 845193 - DNA, 25 bp, Homo sapien
catggttcatattctgagaacaagt

SEQ ID NO: 845194 - DNA, 25 bp, Homo sapien
cattgaatagtagatctgccttaag

SEQ ID NO: 845195 - DNA, 25 bp, Homo sapien
aatagtagatctgccttaagcccag

SEQ ID NO: 845196 - DNA, 25 bp, Homo sapien
attcattgaatagtagatctgcctt

SEQ ID NO: 845197 - DNA, 25 bp, Homo sapien
caggaacatctcccttatcagtcac

SEQ ID NO: 845198 - DNA, 25 bp, Homo sapien
tcaggaacatctcccttatcagtca

SEQ ID NO: 845199 - DNA, 25 bp, Homo sapien
ttcaggaacatctcccttatcagtc

SEQ ID NO: 845200 - DNA, 25 bp, Homo sapien
cctcttctcttttcgagagactttg

SEQ ID NO: 845201 - DNA, 25 bp, Homo sapien
ttggggctgggcgactccaggatca

SEQ ID NO: 845202 - DNA, 25 bp, Homo sapien
gactccaggatcagggggaaattcc

SEQ ID NO: 845203 - DNA, 25 bp, Homo sapien
tctcttttcgagagactttgtaccc

SEQ ID NO: 845204 - DNA, 25 bp, Homo sapien
ttatcctgttggtcggtgaggggtc

SEQ ID NO: 845205 - DNA, 25 bp, Homo sapien
tgttcttgcagctaccctctgtttt

SEQ ID NO: 845206 - DNA, 25 bp, Homo sapien
cttgttcttgcagctaccctctgtt

SEQ ID NO: 845207 - DNA, 25 bp, Homo sapien
tgttggtcggtgaggggtctcctga

SEQ ID NO: 845208 - DNA, 25 bp, Homo sapien
tgagcttgtcctgcccaactttgaa

SEQ ID NO: 845209 - DNA, 25 bp, Homo sapien
tacagcaggtagaggatggacccct

SEQ ID NO: 845210 - DNA, 25 bp, Homo sapien
ggttccacagagtggctgcattgca

SEQ ID NO: 845211 - DNA, 25 bp, Homo sapien
ccaactttgaaacctcattggtaca

SEQ ID NO: 845212 - DNA, 25 bp, Homo sapien
gggatatgcaaaggtcacatcatgg

SEQ ID NO: 845213 - DNA, 25 bp, Homo sapien
gggctgagagacttgcaaactaaca

SEQ ID NO: 845214 - DNA, 25 bp, Homo sapien
cttggaaggtggctaaagtgatcca

SEQ ID NO: 845215 - DNA, 25 bp, Homo sapien
gaagatcagtcttgcatctctggct

SEQ ID NO: 845216 - DNA, 25 bp, Homo sapien
gaccattgtagataaagacccagga

SEQ ID NO: 845217 - DNA, 25 bp, Homo sapien
tccagtcaatgattcaaggcaatcg

SEQ ID NO: 845218 - DNA, 25 bp, Homo sapien
cacacagcggagaaataatccagtc

SEQ ID NO: 845219 - DNA, 25 bp, Homo sapien
tttgcaccagcagtttatccacagt

SEQ ID NO: 845220 - DNA, 25 bp, Homo sapien
aagtcaatggctggtgagttcatgg

SEQ ID NO: 845221 - DNA, 25 bp, Homo sapien
caaaaagctatagaacagagaagtc

SEQ ID NO: 845222 - DNA, 25 bp, Homo sapien
tgtctcggtgttggtgttagctctg

SEQ ID NO: 845223 - DNA, 25 bp, Homo sapien
cccatgacatgcctattccaaagag

SEQ ID NO: 845224 - DNA, 25 bp, Homo sapien
gggccctcaagagttccataagtct

SEQ ID NO: 845225 - DNA, 25 bp, Homo sapien
tcctaagtgcttctgcggtggcagt

SEQ ID NO: 845226 - DNA, 25 bp, Homo sapien
gacttttacagactagggccctcaa

SEQ ID NO: 845227 - DNA, 25 bp, Homo sapien
taacggctggcagtgtctatgaagg

SEQ ID NO: 845228 - DNA, 25 bp, Homo sapien
taatgtagaatgcagccttccctag

SEQ ID NO: 845229 - DNA, 25 bp, Homo sapien
taaaattgccccgagacacaggtaa

SEQ ID NO: 845230 - DNA, 25 bp, Homo sapien
gatccctgaagaccgtaatgtagaa

SEQ ID NO: 845231 - DNA, 25 bp, Homo sapien
tctcacaggcgcaccgtgatctggg

SEQ ID NO: 845232 - DNA, 25 bp, Homo sapien
gaagaaagaataggtcttctcccag

SEQ ID NO: 845233 - DNA, 25 bp, Homo sapien
tgaagaaagaataggtcttctccca

SEQ ID NO: 845234 - DNA, 25 bp, Homo sapien
agtgggttgatggtctgtgatgtca

SEQ ID NO: 845235 - DNA, 25 bp, Homo sapien
gggttgatggtctgtgatgtcattg

SEQ ID NO: 845236 - DNA, 25 bp, Homo sapien
aggccacacgacagaggagcctgat

SEQ ID NO: 845237 - DNA, 25 bp, Homo sapien
cacgacagaggagcctgattcccat

SEQ ID NO: 845238 - DNA, 25 bp, Homo sapien
gccacacgacagaggagcctgattc

SEQ ID NO: 845239 - DNA, 25 bp, Homo sapien
aaacaaaaggccacacgacagagga

SEQ ID NO: 845240 - DNA, 25 bp, Homo sapien
tattttcatggtccatatcctggac

SEQ ID NO: 845241 - DNA, 25 bp, Homo sapien
tgagaaatagatcagccgtagcccc

SEQ ID NO: 845242 - DNA, 25 bp, Homo sapien
tcttgtcgataccagaacatatttt

SEQ ID NO: 845243 - DNA, 25 bp, Homo sapien
tgactagatatctcgagctctgggt

SEQ ID NO: 845244 - DNA, 25 bp, Homo sapien
gaatcagggagaagcgctccttctt

SEQ ID NO: 845245 - DNA, 25 bp, Homo sapien
ttggtgctggcggactccagaatca

SEQ ID NO: 845246 - DNA, 25 bp, Homo sapien
tgctggcggactccagaatcaggga

SEQ ID NO: 845247 - DNA, 25 bp, Homo sapien
tcttctctctagagacactgtaccc

SEQ ID NO: 845248 - DNA, 25 bp, Homo sapien
atgcagctgtgctgcgctgtgcata

SEQ ID NO: 845249 - DNA, 25 bp, Homo sapien
caagcaccgctagcatgtattctcg

SEQ ID NO: 845250 - DNA, 25 bp, Homo sapien
catcctcgtcattgtgtgagcagca

SEQ ID NO: 845251 - DNA, 25 bp, Homo sapien
tattctcggcgcaaaagggaaagga

SEQ ID NO: 845252 - DNA, 25 bp, Homo sapien
gtggacgaccccagagacgttgctg

SEQ ID NO: 845253 - DNA, 25 bp, Homo sapien
ggtacctgttcccatctcttgcagt

SEQ ID NO: 845254 - DNA, 25 bp, Homo sapien
cttgcagttgatcttctgagtctgg

SEQ ID NO: 845255 - DNA, 25 bp, Homo sapien
ttgatcttctgagtctgggcaatac

SEQ ID NO: 845256 - DNA, 25 bp, Homo sapien
tgttcccatctcttgcagttgatct

SEQ ID NO: 845257 - DNA, 25 bp, Homo sapien
ggactcaattgaggtgatgacccct

SEQ ID NO: 845258 - DNA, 25 bp, Homo sapien
ggcatagcactctttctaccaggga

SEQ ID NO: 845259 - DNA, 25 bp, Homo sapien
ctgtgttggaaatggtcccacatag

SEQ ID NO: 845260 - DNA, 25 bp, Homo sapien
ggagcaggtggtaaccatgccagaa

SEQ ID NO: 845261 - DNA, 25 bp, Homo sapien
caccaacaacttgtgctgtgtactt

SEQ ID NO: 845262 - DNA, 25 bp, Homo sapien
accaacaacttgtgctgtgtacttg

SEQ ID NO: 845263 - DNA, 25 bp, Homo sapien
caacaacttgtgctgtgtacttgga

SEQ ID NO: 845264 - DNA, 25 bp, Homo sapien
aacaacttgtgctgtgtacttggaa

SEQ ID NO: 845265 - DNA, 25 bp, Homo sapien
gactcagcatcttcaagtgatggcc

SEQ ID NO: 845266 - DNA, 25 bp, Homo sapien
ctctcccctgagaaaaggcactaag

SEQ ID NO: 845267 - DNA, 25 bp, Homo sapien
atggcctctcccctgagaaaaggca

SEQ ID NO: 845268 - DNA, 25 bp, Homo sapien
gtgatggcctctcccctgagaaaag

SEQ ID NO: 845269 - DNA, 25 bp, Homo sapien
gagagatattcatgaggaccgacaa

SEQ ID NO: 845270 - DNA, 25 bp, Homo sapien
cagagagatattcatgaggaccgac

SEQ ID NO: 845271 - DNA, 25 bp, Homo sapien
agagatattcatgaggaccgacaag

SEQ ID NO: 845272 - DNA, 25 bp, Homo sapien
agagagatattcatgaggaccgaca

SEQ ID NO: 845273 - DNA, 25 bp, Homo sapien
gatgggaaacttgtcaatgacaaat

SEQ ID NO: 845274 - DNA, 25 bp, Homo sapien
gaatgttaggtttgggcggctgatg

SEQ ID NO: 845275 - DNA, 25 bp, Homo sapien
taccagaacatcatggtgacttggc

SEQ ID NO: 845276 - DNA, 25 bp, Homo sapien
acgttgacagatatccctgcttggc

SEQ ID NO: 845277 - DNA, 25 bp, Homo sapien
gagaggagctgggtaggagagagct

SEQ ID NO: 845278 - DNA, 25 bp, Homo sapien
cagatctttgatctgtgccccgcac

SEQ ID NO: 845279 - DNA, 25 bp, Homo sapien
gaggttcttgctcagatctttgatc

SEQ ID NO: 845280 - DNA, 25 bp, Homo sapien
ccttcaggctcgtgtgagaggagct

SEQ ID NO: 845281 - DNA, 25 bp, Homo sapien
catgcccacccacaaacacagaaac

SEQ ID NO: 845282 - DNA, 25 bp, Homo sapien
gaaacagctgtgtctgcccaaaagc

SEQ ID NO: 845283 - DNA, 25 bp, Homo sapien
acagctgtgtctgcccaaaagctgt

SEQ ID NO: 845284 - DNA, 25 bp, Homo sapien
cagaaacagctgtgtctgcccaaaa

SEQ ID NO: 845285 - DNA, 25 bp, Homo sapien
aggaaggtgcttcataatccaaggc

SEQ ID NO: 845286 - DNA, 25 bp, Homo sapien
ttaaagaggcaattttgtaatatag

SEQ ID NO: 845287 - DNA, 25 bp, Homo sapien
aatccaaggcttcactgtaggtaaa

SEQ ID NO: 845288 - DNA, 25 bp, Homo sapien
cataatccaaggcttcactgtaggt

SEQ ID NO: 845289 - DNA, 25 bp, Homo sapien
taggttctttttatgcagcctcact

SEQ ID NO: 845290 - DNA, 25 bp, Homo sapien
ggttctttttatgcagcctcactgt

SEQ ID NO: 845291 - DNA, 25 bp, Homo sapien
tctttttatgcagcctcactgttgt

SEQ ID NO: 845292 - DNA, 25 bp, Homo sapien
tgtcataggttctttttatgcagcc

SEQ ID NO: 845293 - DNA, 25 bp, Homo sapien
gatggaaaaccaatggcgcactcct

SEQ ID NO: 845294 - DNA, 25 bp, Homo sapien
tctggaggatggaaaaccaatggcg

SEQ ID NO: 845295 - DNA, 25 bp, Homo sapien
gaggatggaaaaccaatggcgcact

SEQ ID NO: 845296 - DNA, 25 bp, Homo sapien
tggaaaaccaatggcgcactcctcc

SEQ ID NO: 845297 - DNA, 25 bp, Homo sapien
cagagagcgagaccggctgtttcct

SEQ ID NO: 845298 - DNA, 25 bp, Homo sapien
agcagagagcgagaccggctgtttc

SEQ ID NO: 845299 - DNA, 25 bp, Homo sapien
gagagcgagaccggctgtttcctgc

SEQ ID NO: 845300 - DNA, 25 bp, Homo sapien
agcgagaccggctgtttcctgcaag

SEQ ID NO: 845301 - DNA, 25 bp, Homo sapien
agagtgtgcctgactggtggtggag

SEQ ID NO: 845302 - DNA, 25 bp, Homo sapien
ggtggtggaggactcgtctttatac

SEQ ID NO: 845303 - DNA, 25 bp, Homo sapien
tgaggtgagggtcaccactcctccc

SEQ ID NO: 845304 - DNA, 25 bp, Homo sapien
tatacctcacgaggatccagagagg

SEQ ID NO: 845305 - DNA, 25 bp, Homo sapien
tgccacaaaggtaaggatcaggagt

SEQ ID NO: 845306 - DNA, 25 bp, Homo sapien
gagcagctgccacaaaggtaaggat

SEQ ID NO: 845307 - DNA, 25 bp, Homo sapien
aaaggtaaggatcaggagtggattc

SEQ ID NO: 845308 - DNA, 25 bp, Homo sapien
acaaaggtaaggatcaggagtggat

SEQ ID NO: 845309 - DNA, 25 bp, Homo sapien
tagctaggtaccctgcggaggatcc

SEQ ID NO: 845310 - DNA, 25 bp, Homo sapien
ccaggctgaagtcgcaaggaatgtc

SEQ ID NO: 845311 - DNA, 25 bp, Homo sapien
caggattcttttgccaagctaggaa

SEQ ID NO: 845312 - DNA, 25 bp, Homo sapien
tccttaacaagcacagtgaggctag

SEQ ID NO: 845313 - DNA, 25 bp, Homo sapien
ctgctgataccacccactgttcgtt

SEQ ID NO: 845314 - DNA, 25 bp, Homo sapien
ggtagccagaattcagggacacctg

SEQ ID NO: 845315 - DNA, 25 bp, Homo sapien
gaattctcctcacagttgtagcccc

SEQ ID NO: 845316 - DNA, 25 bp, Homo sapien
gccaccacagaagtggtagccagaa

SEQ ID NO: 845317 - DNA, 25 bp, Homo sapien
cccaggcagactggccgggagcttt

SEQ ID NO: 845318 - DNA, 25 bp, Homo sapien
ctctcccaggcagactggccgggag

SEQ ID NO: 845319 - DNA, 25 bp, Homo sapien
gagctttgcagtcgggggccccaca

SEQ ID NO: 845320 - DNA, 25 bp, Homo sapien
actggccgggagctttgcagtcggg

SEQ ID NO: 845321 - DNA, 25 bp, Homo sapien
ttatgaccacaacccttgctgtttc

SEQ ID NO: 845322 - DNA, 25 bp, Homo sapien
tttatgaccacaacccttgctgttt

SEQ ID NO: 845323 - DNA, 25 bp, Homo sapien
ttttatgaccacaacccttgctgtt

SEQ ID NO: 845324 - DNA, 25 bp, Homo sapien
gtgttcactctctgctctggagagt

SEQ ID NO: 845325 - DNA, 25 bp, Homo sapien
caagggtagccatagcattagcatc

SEQ ID NO: 845326 - DNA, 25 bp, Homo sapien
ggaagagtcaaagggatcccaccag

SEQ ID NO: 845327 - DNA, 25 bp, Homo sapien
tgtgccttaacaagcctgcagggcg

SEQ ID NO: 845328 - DNA, 25 bp, Homo sapien
tagcactgtgggcacaaggagctcc

SEQ ID NO: 845329 - DNA, 25 bp, Homo sapien
ggttcctcaagctctctgctcatgg

SEQ ID NO: 845330 - DNA, 25 bp, Homo sapien
ccccaggttcctcaagctctctgct

SEQ ID NO: 845331 - DNA, 25 bp, Homo sapien
ggcaggcatggtgaagaccttctcc

SEQ ID NO: 845332 - DNA, 25 bp, Homo sapien
gccagggcacctatcccaccttccc

SEQ ID NO: 845333 - DNA, 25 bp, Homo sapien
gacttcgatgttgtgctctcccagt

SEQ ID NO: 845334 - DNA, 25 bp, Homo sapien
tcccctccaggacttcgatgttgtg

SEQ ID NO: 845335 - DNA, 25 bp, Homo sapien
cgatgttgtgctctcccagtctcac

SEQ ID NO: 845336 - DNA, 25 bp, Homo sapien
ccaggacttcgatgttgtgctctcc

SEQ ID NO: 845337 - DNA, 25 bp, Homo sapien
gacacgcgggcgttgattactgcac

SEQ ID NO: 845338 - DNA, 25 bp, Homo sapien
cagagatgaggcacttcgtgccagt

SEQ ID NO: 845339 - DNA, 25 bp, Homo sapien
gccagagctcgcagtgttgccccag

SEQ ID NO: 845340 - DNA, 25 bp, Homo sapien
tgaggagagcttgattaacatgatg

SEQ ID NO: 845341 - DNA, 25 bp, Homo sapien
acaataatcttggatggaaaactga

SEQ ID NO: 845342 - DNA, 25 bp, Homo sapien
gacaataatcttggatggaaaactg

SEQ ID NO: 845343 - DNA, 25 bp, Homo sapien
gcttcacacttagcctggctcagca

SEQ ID NO: 845344 - DNA, 25 bp, Homo sapien
ctggctcagcacaggagcgtccagg

SEQ ID NO: 845345 - DNA, 25 bp, Homo sapien
ttcacacttagcctggctcagcaca

SEQ ID NO: 845346 - DNA, 25 bp, Homo sapien
agcacaggagcgtccaggcactgca

SEQ ID NO: 845347 - DNA, 25 bp, Homo sapien
ggaagcccacacagaacatgttgct

SEQ ID NO: 845348 - DNA, 25 bp, Homo sapien
gctggtaatctttccagggtaggag

SEQ ID NO: 845349 - DNA, 25 bp, Homo sapien
cacacagaacatgttgctggtaatc

SEQ ID NO: 845350 - DNA, 25 bp, Homo sapien
catgttgctggtaatctttccaggg

SEQ ID NO: 845351 - DNA, 25 bp, Homo sapien
gaggaggaatatagctacatttact

SEQ ID NO: 845352 - DNA, 25 bp, Homo sapien
ccaccaccttttgagttcaaatcct

SEQ ID NO: 845353 - DNA, 25 bp, Homo sapien
tggaggaggaatatagctacattta

SEQ ID NO: 845354 - DNA, 25 bp, Homo sapien
ggaggaatatagctacatttactct

SEQ ID NO: 845355 - DNA, 25 bp, Homo sapien
caggagacaactccttggagctgtc

SEQ ID NO: 845356 - DNA, 25 bp, Homo sapien
agctgttggcagctatggtgttctt

SEQ ID NO: 845357 - DNA, 25 bp, Homo sapien
tgttggcagctatggtgttcttaat

SEQ ID NO: 845358 - DNA, 25 bp, Homo sapien
ttagctgttggcagctatggtgttc

SEQ ID NO: 845359 - DNA, 25 bp, Homo sapien
gctgttggcagctatggtgttctta

SEQ ID NO: 845360 - DNA, 25 bp, Homo sapien
ggtatagagactgaagagatactgg

SEQ ID NO: 845361 - DNA, 25 bp, Homo sapien
tcactttattggtatagagactgaa

SEQ ID NO: 845362 - DNA, 25 bp, Homo sapien
ttggtatagagactgaagagatact

SEQ ID NO: 845363 - DNA, 25 bp, Homo sapien
gggtcactttattggtatagagact

SEQ ID NO: 845364 - DNA, 25 bp, Homo sapien
tggccccaatcagatgtcagagttt

SEQ ID NO: 845365 - DNA, 25 bp, Homo sapien
ggctgacagcctgaaccaggatgac

SEQ ID NO: 845366 - DNA, 25 bp, Homo sapien
gacagcctgaaccaggatgacatgg

SEQ ID NO: 845367 - DNA, 25 bp, Homo sapien
tgaaccaggatgacatggccccaat

SEQ ID NO: 845368 - DNA, 25 bp, Homo sapien
ctcataggtgataaggaaatttgcc

SEQ ID NO: 845369 - DNA, 25 bp, Homo sapien
gtgactcataggtgataaggaaatt

SEQ ID NO: 845370 - DNA, 25 bp, Homo sapien
tgtgactcataggtgataaggaaat

SEQ ID NO: 845371 - DNA, 25 bp, Homo sapien
gactcataggtgataaggaaatttg

SEQ ID NO: 845372 - DNA, 25 bp, Homo sapien
cactaaatgatgttgtcatcgtcgt

SEQ ID NO: 845373 - DNA, 25 bp, Homo sapien
atgatgttgtcatcgtcgtcgaaag

SEQ ID NO: 845374 - DNA, 25 bp, Homo sapien
ctaaatgatgttgtcatcgtcgtcg

SEQ ID NO: 845375 - DNA, 25 bp, Homo sapien
aaatgatgttgtcatcgtcgtcgaa

SEQ ID NO: 845376 - DNA, 25 bp, Homo sapien
tgcagaagtggtacccagaattcag

SEQ ID NO: 845377 - DNA, 25 bp, Homo sapien
cccaacctcagtagttccctgggct

SEQ ID NO: 845378 - DNA, 25 bp, Homo sapien
acctcagtagttccctgggctgaag

SEQ ID NO: 845379 - DNA, 25 bp, Homo sapien
caacctcagtagttccctgggctga

SEQ ID NO: 845380 - DNA, 25 bp, Homo sapien
cttacccaacctcagtagttccctg

SEQ ID NO: 845381 - DNA, 25 bp, Homo sapien
gaaaattcctgataattgccctggg

SEQ ID NO: 845382 - DNA, 25 bp, Homo sapien
aaaattcctgataattgccctggga

SEQ ID NO: 845383 - DNA, 25 bp, Homo sapien
aaattcctgataattgccctgggat

SEQ ID NO: 845384 - DNA, 25 bp, Homo sapien
tcattcccctccagaacttcgatgt

SEQ ID NO: 845385 - DNA, 25 bp, Homo sapien
tcgatgttgtgctctcccagtctca

SEQ ID NO: 845386 - DNA, 25 bp, Homo sapien
gctgcattgatgaactgctcattcc

SEQ ID NO: 845387 - DNA, 25 bp, Homo sapien
cctccagaacttcgatgttgtgctc

SEQ ID NO: 845388 - DNA, 25 bp, Homo sapien
agcaggcatggagagcttgatcagc

SEQ ID NO: 845389 - DNA, 25 bp, Homo sapien
caggcatggagagcttgatcagcag

SEQ ID NO: 845390 - DNA, 25 bp, Homo sapien
cagcaggatgtcattgtccagagtc

SEQ ID NO: 845391 - DNA, 25 bp, Homo sapien
gcatggagagcttgatcagcaggat

SEQ ID NO: 845392 - DNA, 25 bp, Homo sapien
gctggaggggcggtgggtagagaga

SEQ ID NO: 845393 - DNA, 25 bp, Homo sapien
gggcggtgggtagagagatggtgga

SEQ ID NO: 845394 - DNA, 25 bp, Homo sapien
gtagagagatggtggacatgtgggc

SEQ ID NO: 845395 - DNA, 25 bp, Homo sapien
atgaggaacttggtgccagcagctg

SEQ ID NO: 845396 - DNA, 25 bp, Homo sapien
agaagtgtagatcaggccagagaag

SEQ ID NO: 845397 - DNA, 25 bp, Homo sapien
gtagaagtgtagatcaggccagaga

SEQ ID NO: 845398 - DNA, 25 bp, Homo sapien
aagtagaagtgtagatcaggccaga

SEQ ID NO: 845399 - DNA, 25 bp, Homo sapien
gagaacaaagaaagtagaagtgtag

SEQ ID NO: 845400 - DNA, 25 bp, Homo sapien
gcaggaatccttgcctccctcaagg

SEQ ID NO: 845401 - DNA, 25 bp, Homo sapien
ctggcaggaatccttgcctccctca

SEQ ID NO: 845402 - DNA, 25 bp, Homo sapien
ggcaggaatccttgcctccctcaag

SEQ ID NO: 845403 - DNA, 25 bp, Homo sapien
aggaatccttgcctccctcaaggaa

SEQ ID NO: 845404 - DNA, 25 bp, Homo sapien
gttgtagaccttggtgtagactcca

SEQ ID NO: 845405 - DNA, 25 bp, Homo sapien
acatagttgtagaccttggtgtaga

SEQ ID NO: 845406 - DNA, 25 bp, Homo sapien
caggagacaactccttggagctgtc

SEQ ID NO: 845407 - DNA, 25 bp, Homo sapien
tagttgtagaccttggtgtagactc

SEQ ID NO: 845408 - DNA, 25 bp, Homo sapien
gctgttggcagctatggtgtcctta

SEQ ID NO: 845409 - DNA, 25 bp, Homo sapien
tgttggcagctatggtgtccttaat

SEQ ID NO: 845410 - DNA, 25 bp, Homo sapien
agctgttggcagctatggtgtcctt

SEQ ID NO: 845411 - DNA, 25 bp, Homo sapien
ttagctgttggcagctatggtgtcc

SEQ ID NO: 845412 - DNA, 25 bp, Homo sapien
cactttattggtatagagactgcag

SEQ ID NO: 845413 - DNA, 25 bp, Homo sapien
actttattggtatagagactgcaga

SEQ ID NO: 845414 - DNA, 25 bp, Homo sapien
ctttattggtatagagactgcagag

SEQ ID NO: 845415 - DNA, 25 bp, Homo sapien
tttattggtatagagactgcagagg

SEQ ID NO: 845416 - DNA, 25 bp, Homo sapien
gccacatttccagaccgtctgggcc

SEQ ID NO: 845417 - DNA, 25 bp, Homo sapien
ttgccacatttccagaccgtctggg

SEQ ID NO: 845418 - DNA, 25 bp, Homo sapien
tgccacatttccagaccgtctgggc

SEQ ID NO: 845419 - DNA, 25 bp, Homo sapien
cttgccacatttccagaccgtctgg

SEQ ID NO: 845420 - DNA, 25 bp, Homo sapien
gcttcccatgttcttgcatcagctc

SEQ ID NO: 845421 - DNA, 25 bp, Homo sapien
ggagagcggctctttcctgcaagga

SEQ ID NO: 845422 - DNA, 25 bp, Homo sapien
gtctttatagctctggaggatccag

SEQ ID NO: 845423 - DNA, 25 bp, Homo sapien
agagtgcgcctgtctggtggtggaa

SEQ ID NO: 845424 - DNA, 25 bp, Homo sapien
caaaggcaaggatcaggagtggatt

SEQ ID NO: 845425 - DNA, 25 bp, Homo sapien
tcccacaaaggcaaggatcaggagt

SEQ ID NO: 845426 - DNA, 25 bp, Homo sapien
cacaaaggcaaggatcaggagtgga

SEQ ID NO: 845427 - DNA, 25 bp, Homo sapien
aggcaaggatcaggagtggattcat

SEQ ID NO: 845428 - DNA, 25 bp, Homo sapien
cagctcaaatatgggtgaatgacag

SEQ ID NO: 845429 - DNA, 25 bp, Homo sapien
cctggaaatgttacaaatcacctga

SEQ ID NO: 845430 - DNA, 25 bp, Homo sapien
ccaataggacagcaattcttaatct

SEQ ID NO: 845431 - DNA, 25 bp, Homo sapien
agggcatatgtctgccagtaacggg

SEQ ID NO: 845432 - DNA, 25 bp, Homo sapien
gtgtagcccccaacaatcttgtcat

SEQ ID NO: 845433 - DNA, 25 bp, Homo sapien
aggtgtagcccccaacaatcttgtc

SEQ ID NO: 845434 - DNA, 25 bp, Homo sapien
cagaattctcctcacaggtgtagcc

SEQ ID NO: 845435 - DNA, 25 bp, Homo sapien
gggacagaattctcctcacaggtgt

SEQ ID NO: 845436 - DNA, 25 bp, Homo sapien
cacagaagtgggagccagaattcaa

SEQ ID NO: 845437 - DNA, 25 bp, Homo sapien
gccaccacagaagtgggagccagaa

SEQ ID NO: 845438 - DNA, 25 bp, Homo sapien
caccacagaagtgggagccagaatt

SEQ ID NO: 845439 - DNA, 25 bp, Homo sapien
tgacaccacccactgttcgctgatg

SEQ ID NO: 845440 - DNA, 25 bp, Homo sapien
tttatgaccacaacccttgctgttt

SEQ ID NO: 845441 - DNA, 25 bp, Homo sapien
ttatgaccacaacccttgctgtttc

SEQ ID NO: 845442 - DNA, 25 bp, Homo sapien
gtgttcactctctgctctggagagt

SEQ ID NO: 845443 - DNA, 25 bp, Homo sapien
ttttatgaccacaacccttgctgtt

SEQ ID NO: 845444 - DNA, 25 bp, Homo sapien
cccagcctctttcacacaatcttta

SEQ ID NO: 845445 - DNA, 25 bp, Homo sapien
gcctctttcacacaatctttacagt

SEQ ID NO: 845446 - DNA, 25 bp, Homo sapien
cagcctctttcacacaatctttaca

SEQ ID NO: 845447 - DNA, 25 bp, Homo sapien
cttcccagcctctttcacacaatct

SEQ ID NO: 845448 - DNA, 25 bp, Homo sapien
gttcagagtaatcctgttgtatttg

SEQ ID NO: 845449 - DNA, 25 bp, Homo sapien
ctgagctcagggtattgccccagcc

SEQ ID NO: 845450 - DNA, 25 bp, Homo sapien
cttgctggtaatctttaaagggtag

SEQ ID NO: 845451 - DNA, 25 bp, Homo sapien
gcaggaatccttgcctccctcaagg

SEQ ID NO: 845452 - DNA, 25 bp, Homo sapien
ctggcaggaatccttgcctccctca

SEQ ID NO: 845453 - DNA, 25 bp, Homo sapien
aggaatccttgcctccctcaaggaa

SEQ ID NO: 845454 - DNA, 25 bp, Homo sapien
ggcaggaatccttgcctccctcaag

SEQ ID NO: 845455 - DNA, 25 bp, Homo sapien
tgggtatcagtgggaacatcagcat

SEQ ID NO: 845456 - DNA, 25 bp, Homo sapien
ctgggtatcagtgggaacatcagca

SEQ ID NO: 845457 - DNA, 25 bp, Homo sapien
atgaagaagggacaagttttatgga

SEQ ID NO: 845458 - DNA, 25 bp, Homo sapien
catgaagaagggacaagttttatgg

SEQ ID NO: 845459 - DNA, 25 bp, Homo sapien
ggaggaggaatatagctacagttac

SEQ ID NO: 845460 - DNA, 25 bp, Homo sapien
gatggaggaggaatatagctacagt

SEQ ID NO: 845461 - DNA, 25 bp, Homo sapien
acatagttgtagaccttggtgtaga

SEQ ID NO: 845462 - DNA, 25 bp, Homo sapien
gttgtagaccttggtgtagactcca

SEQ ID NO: 845463 - DNA, 25 bp, Homo sapien
catagttgtagaccttggtgtagac

SEQ ID NO: 845464 - DNA, 25 bp, Homo sapien
tagttgtagaccttggtgtagactc

SEQ ID NO: 845465 - DNA, 25 bp, Homo sapien
ttattggtatagagactgcagagtg

SEQ ID NO: 845466 - DNA, 25 bp, Homo sapien
acagggttattttattggtatagag

SEQ ID NO: 845467 - DNA, 25 bp, Homo sapien
ttttattggtatagagactgcagag

SEQ ID NO: 845468 - DNA, 25 bp, Homo sapien
tattttattggtatagagactgcag

SEQ ID NO: 845469 - DNA, 25 bp, Homo sapien
acctctctgctcacgaataactggc

SEQ ID NO: 845470 - DNA, 25 bp, Homo sapien
gccatgtagatgacacacctctctg

SEQ ID NO: 845471 - DNA, 25 bp, Homo sapien
aataactggctaagcctgaggtggc

SEQ ID NO: 845472 - DNA, 25 bp, Homo sapien
gggtttttcctgtgttgccgctgaa

SEQ ID NO: 845473 - DNA, 25 bp, Homo sapien
ccttcctatggtcttgcatcagtat

SEQ ID NO: 845474 - DNA, 25 bp, Homo sapien
ccccttcctatggtcttgcatcagt

SEQ ID NO: 845475 - DNA, 25 bp, Homo sapien
gagaccggctgtttcctggaaggat

SEQ ID NO: 845476 - DNA, 25 bp, Homo sapien
cccttcctatggtcttgcatcagta

SEQ ID NO: 845477 - DNA, 25 bp, Homo sapien
ctcccacagaggcaaggatcgggag

SEQ ID NO: 845478 - DNA, 25 bp, Homo sapien
cacagaggcaaggatcgggagtgga

SEQ ID NO: 845479 - DNA, 25 bp, Homo sapien
agaggcaaggatcgggagtggattc

SEQ ID NO: 845480 - DNA, 25 bp, Homo sapien
ccacagaggcaaggatcgggagtgg

SEQ ID NO: 845481 - DNA, 25 bp, Homo sapien
aagtggtagccagaattcagggaca

SEQ ID NO: 845482 - DNA, 25 bp, Homo sapien
cagttgtagcccccaacaatcttgt

SEQ ID NO: 845483 - DNA, 25 bp, Homo sapien
agaattctcctcacagttgtagccc

SEQ ID NO: 845484 - DNA, 25 bp, Homo sapien
tcatcatcatcaaaggagacaccaa

SEQ ID NO: 845485 - DNA, 25 bp, Homo sapien
tattccctgttgagggagccaacac

SEQ ID NO: 845486 - DNA, 25 bp, Homo sapien
ttgtagcagtgagctgctgacacca

SEQ ID NO: 845487 - DNA, 25 bp, Homo sapien
tgtagcagtgagctgctgacaccac

SEQ ID NO: 845488 - DNA, 25 bp, Homo sapien
tagcagtgagctgctgacaccaccc

SEQ ID NO: 845489 - DNA, 25 bp, Homo sapien
gcagtgagctgctgacaccacccac

SEQ ID NO: 845490 - DNA, 25 bp, Homo sapien
taggacttcgatgttgtgctctccc

SEQ ID NO: 845491 - DNA, 25 bp, Homo sapien
tcttgaccgcatagatgaactgttc

SEQ ID NO: 845492 - DNA, 25 bp, Homo sapien
tggacacatgggcattgatgatggc

SEQ ID NO: 845493 - DNA, 25 bp, Homo sapien
tgttcattcccctctaggacttcga

SEQ ID NO: 845494 - DNA, 25 bp, Homo sapien
gccagaactcagagtgttgccccag

SEQ ID NO: 845495 - DNA, 25 bp, Homo sapien
aactcagagtgttgccccagccaga

SEQ ID NO: 845496 - DNA, 25 bp, Homo sapien
cgccagaactcagagtgttgcccca

SEQ ID NO: 845497 - DNA, 25 bp, Homo sapien
agaactcagagtgttgccccagcca

SEQ ID NO: 845498 - DNA, 25 bp, Homo sapien
gcttcgttctggaaattgtgaggat

SEQ ID NO: 845499 - DNA, 25 bp, Homo sapien
ttaagcggtgtgcttcgttctggaa

SEQ ID NO: 845500 - DNA, 25 bp, Homo sapien
attaagcggtgtgcttcgttctgga

SEQ ID NO: 845501 - DNA, 25 bp, Homo sapien
tcgttctggaaattgtgaggatgga

SEQ ID NO: 845502 - DNA, 25 bp, Homo sapien
tgtgaggatcaggaagagaacaaag

SEQ ID NO: 845503 - DNA, 25 bp, Homo sapien
ctgtgaggatcaggaagagaacaaa

SEQ ID NO: 845504 - DNA, 25 bp, Homo sapien
ggttaggccagagaaagagacaata

SEQ ID NO: 845505 - DNA, 25 bp, Homo sapien
agaaagaaatgtgggttaggccaga

SEQ ID NO: 845506 - DNA, 25 bp, Homo sapien
ctggcaggaatccttgcctccctca

SEQ ID NO: 845507 - DNA, 25 bp, Homo sapien
tggtaatctttccagggtaggaggc

SEQ ID NO: 845508 - DNA, 25 bp, Homo sapien
aggaatccttgcctccctcaaggaa

SEQ ID NO: 845509 - DNA, 25 bp, Homo sapien
gcaggaatccttgcctccctcaagg

SEQ ID NO: 845510 - DNA, 25 bp, Homo sapien
acatagttgtagaccttggtgtaga

SEQ ID NO: 845511 - DNA, 25 bp, Homo sapien
gttgtagaccttggtgtagactcca

SEQ ID NO: 845512 - DNA, 25 bp, Homo sapien
catagttgtagaccttggtgtagac

SEQ ID NO: 845513 - DNA, 25 bp, Homo sapien
tagttgtagaccttggtgtagactc

SEQ ID NO: 845514 - DNA, 25 bp, Homo sapien
tgtttctgctggcaacgcttctcag

SEQ ID NO: 845515 - DNA, 25 bp, Homo sapien
agctgtctgcaaggccatagggatc

SEQ ID NO: 845516 - DNA, 25 bp, Homo sapien
gaagtaatcccatggttatctgtga

SEQ ID NO: 845517 - DNA, 25 bp, Homo sapien
tctcttggcttgaggtaaccagctg

SEQ ID NO: 845518 - DNA, 25 bp, Homo sapien
ccagtgtctgcagagtcagaattga

SEQ ID NO: 845519 - DNA, 25 bp, Homo sapien
gtctgcagagtcagaattgagctaa

SEQ ID NO: 845520 - DNA, 25 bp, Homo sapien
gtgtctgcagagtcagaattgagct

SEQ ID NO: 845521 - DNA, 25 bp, Homo sapien
tgccagtgtctgcagagtcagaatt

SEQ ID NO: 845522 - DNA, 25 bp, Homo sapien
tgccacagttccagacccatccagg

SEQ ID NO: 845523 - DNA, 25 bp, Homo sapien
ccacagttccagacccatccaggcc

SEQ ID NO: 845524 - DNA, 25 bp, Homo sapien
cttgccacagttccagacccatcca

SEQ ID NO: 845525 - DNA, 25 bp, Homo sapien
acagttccagacccatccaggccat

SEQ ID NO: 845526 - DNA, 25 bp, Homo sapien
gtggtagagtgtgcctgattgctgg

SEQ ID NO: 845527 - DNA, 25 bp, Homo sapien
ggtagagtgtgcctgattgctggtg

SEQ ID NO: 845528 - DNA, 25 bp, Homo sapien
tagagtgtgcctgattgctggtgga

SEQ ID NO: 845529 - DNA, 25 bp, Homo sapien
ggtggtagagtgtgcctgattgctg

SEQ ID NO: 845530 - DNA, 25 bp, Homo sapien
caacaaaggtaaggatcagaagtag

SEQ ID NO: 845531 - DNA, 25 bp, Homo sapien
aacaaaggtaaggatcagaagtaga

SEQ ID NO: 845532 - DNA, 25 bp, Homo sapien
gcaacaaaggtaaggatcagaagta

SEQ ID NO: 845533 - DNA, 25 bp, Homo sapien
ggctgcacaccagacaattgaagtg

SEQ ID NO: 845534 - DNA, 25 bp, Homo sapien
cttttgcagaacaaaggtatacgtt

SEQ ID NO: 845535 - DNA, 25 bp, Homo sapien
gaataacagcggtgggagtgaaatc

SEQ ID NO: 845536 - DNA, 25 bp, Homo sapien
tagtggtgctattgtggtgctgtca

SEQ ID NO: 845537 - DNA, 25 bp, Homo sapien
gatgtagcccccaacgatcttgtca

SEQ ID NO: 845538 - DNA, 25 bp, Homo sapien
tcatcatcatcaaagggggcagcaa

SEQ ID NO: 845539 - DNA, 25 bp, Homo sapien
cagaattctcctcacagatgtagcc

SEQ ID NO: 845540 - DNA, 25 bp, Homo sapien
ggacagaattctcctcacagatgta

SEQ ID NO: 845541 - DNA, 25 bp, Homo sapien
agccaccgcagaagtggtagccaga

SEQ ID NO: 845542 - DNA, 25 bp, Homo sapien
accgcagaagtggtagccagaattc

SEQ ID NO: 845543 - DNA, 25 bp, Homo sapien
tgacaccacccactgttcgctgatg

SEQ ID NO: 845544 - DNA, 25 bp, Homo sapien
caccgcagaagtggtagccagaatt

SEQ ID NO: 845545 - DNA, 25 bp, Homo sapien
ttatgaccacaacccttgctgtttc

SEQ ID NO: 845546 - DNA, 25 bp, Homo sapien
gtgttcactctctgctctggagagt

SEQ ID NO: 845547 - DNA, 25 bp, Homo sapien
ttttatgaccacaacccttgctgtt

SEQ ID NO: 845548 - DNA, 25 bp, Homo sapien
tttatgaccacaacccttgctgttt

SEQ ID NO: 845549 - DNA, 25 bp, Homo sapien
ccacctttccatgggtccttaagct

SEQ ID NO: 845550 - DNA, 25 bp, Homo sapien
atggtgaagaccttctcccacagcc

SEQ ID NO: 845551 - DNA, 25 bp, Homo sapien
agggcaggcatggtgaagaccttct

SEQ ID NO: 845552 - DNA, 25 bp, Homo sapien
caggcatggtgaagaccttctccca

SEQ ID NO: 845553 - DNA, 25 bp, Homo sapien
gacacgcgggaattgatgacggcag

SEQ ID NO: 845554 - DNA, 25 bp, Homo sapien
agaactcagagtgttgccccagccg

SEQ ID NO: 845555 - DNA, 25 bp, Homo sapien
gcaggatgtcattgtccagagtccg

SEQ ID NO: 845556 - DNA, 25 bp, Homo sapien
tccagagtccggctgttgtatttgg

SEQ ID NO: 845557 - DNA, 25 bp, Homo sapien
ataagtcctggcaagggactctggc

SEQ ID NO: 845558 - DNA, 25 bp, Homo sapien
agagacaatagtctaggatggaaca

SEQ ID NO: 845559 - DNA, 25 bp, Homo sapien
aagagacaatagtctaggatggaac

SEQ ID NO: 845560 - DNA, 25 bp, Homo sapien
aacataagtcctggcaagggactct

SEQ ID NO: 845561 - DNA, 25 bp, Homo sapien
tggtaatctttccagggtaggaggc

SEQ ID NO: 845562 - DNA, 25 bp, Homo sapien
aagggacaagttgtatgaagagaga

SEQ ID NO: 845563 - DNA, 25 bp, Homo sapien
ggaggaatacacctacatttgctct

SEQ ID NO: 845564 - DNA, 25 bp, Homo sapien
tggaggaggaatacacctacatttg

SEQ ID NO: 845565 - DNA, 25 bp, Homo sapien
ggacaagttgtatgaagagagagat

SEQ ID NO: 845566 - DNA, 25 bp, Homo sapien
gttgtagaccttggtgtagactcca

SEQ ID NO: 845567 - DNA, 25 bp, Homo sapien
catagttgtagaccttggtgtagac

SEQ ID NO: 845568 - DNA, 25 bp, Homo sapien
acatagttgtagaccttggtgtaga

SEQ ID NO: 845569 - DNA, 25 bp, Homo sapien
tagttgtagaccttggtgtagactc

SEQ ID NO: 845570 - DNA, 25 bp, Homo sapien
tattggtatagagactgcagaggga

SEQ ID NO: 845571 - DNA, 25 bp, Homo sapien
ttggtatagagactgcagagggacc

SEQ ID NO: 845572 - DNA, 25 bp, Homo sapien
attggtatagagactgcagagggac

SEQ ID NO: 845573 - DNA, 25 bp, Homo sapien
ttattggtatagagactgcagaggg

SEQ ID NO: 845574 - DNA, 25 bp, Homo sapien
ggagcaagcttgagagtctgggcat

SEQ ID NO: 845575 - DNA, 25 bp, Homo sapien
ccctgccagccatgcaaggagcaag

SEQ ID NO: 845576 - DNA, 25 bp, Homo sapien
tgacaaggagcaatgcccctgccag

SEQ ID NO: 845577 - DNA, 25 bp, Homo sapien
ggtgacaaggagcaatgcccctgcc

SEQ ID NO: 845578 - DNA, 25 bp, Homo sapien
caacatgacgatggccccaaagcat

SEQ ID NO: 845579 - DNA, 25 bp, Homo sapien
ttcaacatgctcatcagtgatgctc

SEQ ID NO: 845580 - DNA, 25 bp, Homo sapien
aagcattcaacatgctcatcagtga

SEQ ID NO: 845581 - DNA, 25 bp, Homo sapien
catgtgtgcaactggggccaacatg

SEQ ID NO: 845582 - DNA, 25 bp, Homo sapien
gacggacgcatctattgcacctgag

SEQ ID NO: 845583 - DNA, 25 bp, Homo sapien
tacccgcttgaggagcacacagttg

SEQ ID NO: 845584 - DNA, 25 bp, Homo sapien
cacacagttgattgccaggacggac

SEQ ID NO: 845585 - DNA, 25 bp, Homo sapien
caggctttgcttaatcactggagat

SEQ ID NO: 845586 - DNA, 25 bp, Homo sapien
ggatgttttgagctccttagagctg

SEQ ID NO: 845587 - DNA, 25 bp, Homo sapien
ggcatgtccttatagagaagccaca

SEQ ID NO: 845588 - DNA, 25 bp, Homo sapien
gctggatgtctttgtaaggctgttt

SEQ ID NO: 845589 - DNA, 25 bp, Homo sapien
ccctctccaagctgttgtcacgttg

SEQ ID NO: 845590 - DNA, 25 bp, Homo sapien
gtgggtgacatcaccccccattatg

SEQ ID NO: 845591 - DNA, 25 bp, Homo sapien
ccccattatgcaagttggtggtggg

SEQ ID NO: 845592 - DNA, 25 bp, Homo sapien
caatgttacagctttgtacaaaaac

SEQ ID NO: 845593 - DNA, 25 bp, Homo sapien
ctgtccccacaatgttacagctttg

SEQ ID NO: 845594 - DNA, 25 bp, Homo sapien
tgggagttgggaccgccagagaggt

SEQ ID NO: 845595 - DNA, 25 bp, Homo sapien
cagtcttggtctgacatgtgatcag

SEQ ID NO: 845596 - DNA, 25 bp, Homo sapien
tgggaccgccagagaggtttttgta

SEQ ID NO: 845597 - DNA, 25 bp, Homo sapien
ggtttcccgtagagttgaatcattg

SEQ ID NO: 845598 - DNA, 25 bp, Homo sapien
gacaggggtcaaggtgaaaatcaca

SEQ ID NO: 845599 - DNA, 25 bp, Homo sapien
aaatcacattgaaggcatagagagg

SEQ ID NO: 845600 - DNA, 25 bp, Homo sapien
gtgaaaatcacattgaaggcataga

SEQ ID NO: 845601 - DNA, 25 bp, Homo sapien
gaaaatcacattgaaggcatagaga

SEQ ID NO: 845602 - DNA, 25 bp, Homo sapien
gcaaaagaacctgaaaaatgtctta

SEQ ID NO: 845603 - DNA, 25 bp, Homo sapien
ctgcaaaagaacctgaaaaatgtct

SEQ ID NO: 845604 - DNA, 25 bp, Homo sapien
tgcaaaagaacctgaaaaatgtctt

SEQ ID NO: 845605 - DNA, 25 bp, Homo sapien
cactgtggacccacttttccctgtg

SEQ ID NO: 845606 - DNA, 25 bp, Homo sapien
gtggattcgccctcacagggagcct

SEQ ID NO: 845607 - DNA, 25 bp, Homo sapien
gcctgggtggattcgccctcacagg

SEQ ID NO: 845608 - DNA, 25 bp, Homo sapien
ccctgaactcaatcccgggacatga

SEQ ID NO: 845609 - DNA, 25 bp, Homo sapien
gacatgacgtctccctcagtctggc

SEQ ID NO: 845610 - DNA, 25 bp, Homo sapien
tacaacagtgagccaacttccctct

SEQ ID NO: 845611 - DNA, 25 bp, Homo sapien
aacagtgagccaacttccctctcca

SEQ ID NO: 845612 - DNA, 25 bp, Homo sapien
cagtgagccaacttccctctccaaa

SEQ ID NO: 845613 - DNA, 25 bp, Homo sapien
ctacaacagtgagccaacttccctc

SEQ ID NO: 845614 - DNA, 25 bp, Homo sapien
agactggaaggaaaaccgcgacctg

SEQ ID NO: 845615 - DNA, 25 bp, Homo sapien
aaggaaaaccgcgacctgctgcctt

SEQ ID NO: 845616 - DNA, 25 bp, Homo sapien
ctggaaggaaaaccgcgacctgctg

SEQ ID NO: 845617 - DNA, 25 bp, Homo sapien
aggaaaaccgcgacctgctgccttc

SEQ ID NO: 845618 - DNA, 25 bp, Homo sapien
gacagagagctgggttccactgcca

SEQ ID NO: 845619 - DNA, 25 bp, Homo sapien
agagagctgggttccactgccaaaa

SEQ ID NO: 845620 - DNA, 25 bp, Homo sapien
agctgggttccactgccaaaaaaca

SEQ ID NO: 845621 - DNA, 25 bp, Homo sapien
gagagctgggttccactgccaaaaa

SEQ ID NO: 845622 - DNA, 25 bp, Homo sapien
cagaggagctggtgtgggcccttcc

SEQ ID NO: 845623 - DNA, 25 bp, Homo sapien
tccagaagctgcttacacacagaac

SEQ ID NO: 845624 - DNA, 25 bp, Homo sapien
tatgatacactatcccgaaagaagt

SEQ ID NO: 845625 - DNA, 25 bp, Homo sapien
tacacagtgcatcatgagtgtggca

SEQ ID NO: 845626 - DNA, 25 bp, Homo sapien
ctaggatggagagtcgagtcccatc

SEQ ID NO: 845627 - DNA, 25 bp, Homo sapien
cgagtcccatcaccaaaatgctggg

SEQ ID NO: 845628 - DNA, 25 bp, Homo sapien
agagtcgagtcccatcaccaaaatg

SEQ ID NO: 845629 - DNA, 25 bp, Homo sapien
taggatggagagtcgagtcccatca

SEQ ID NO: 845630 - DNA, 25 bp, Homo sapien
gattttactcaatctgcctcaccag

SEQ ID NO: 845631 - DNA, 25 bp, Homo sapien
tgccttcaagggacaatggccatac

SEQ ID NO: 845632 - DNA, 25 bp, Homo sapien
gggtaagagattttactcaatctgc

SEQ ID NO: 845633 - DNA, 25 bp, Homo sapien
ggcacagctcttaccccatggggta

SEQ ID NO: 845634 - DNA, 25 bp, Homo sapien
caagtcttagctccctgacagcagg

SEQ ID NO: 845635 - DNA, 25 bp, Homo sapien
ggaaaaaggcctaagcatactgtgc

SEQ ID NO: 845636 - DNA, 25 bp, Homo sapien
tagataaaacccacccggcgatctc

SEQ ID NO: 845637 - DNA, 25 bp, Homo sapien
cataaggcgcaagaggaagaggctt

SEQ ID NO: 845638 - DNA, 25 bp, Homo sapien
tgagcctggtcccgttcccaaagtg

SEQ ID NO: 845639 - DNA, 25 bp, Homo sapien
cagtgagcctggtcccgttcccaaa

SEQ ID NO: 845640 - DNA, 25 bp, Homo sapien
agtgagcctggtcccgttcccaaag

SEQ ID NO: 845641 - DNA, 25 bp, Homo sapien
gagcaacaagctggaagagctccag

SEQ ID NO: 845642 - DNA, 25 bp, Homo sapien
tgatcattgcagtcaaacccaggca

SEQ ID NO: 845643 - DNA, 25 bp, Homo sapien
gagctagtcaccaaaaggagtcaac

SEQ ID NO: 845644 - DNA, 25 bp, Homo sapien
ccctgaagactaagcaaggagctct

SEQ ID NO: 845645 - DNA, 25 bp, Homo sapien
gggcctttaccctattgttctagca

SEQ ID NO: 845646 - DNA, 25 bp, Homo sapien
gcctttaccctattgttctagcata

SEQ ID NO: 845647 - DNA, 25 bp, Homo sapien
ccgctccaccgcctgtctgcttcct

SEQ ID NO: 845648 - DNA, 25 bp, Homo sapien
ctttaccctattgttctagcataga

SEQ ID NO: 845649 - DNA, 25 bp, Homo sapien
ggaatccgtccacagttaagctttg

SEQ ID NO: 845650 - DNA, 25 bp, Homo sapien
tcaatatctgatgggatggtccaca

SEQ ID NO: 845651 - DNA, 25 bp, Homo sapien
tccaagggccatttcagtagaaagc

SEQ ID NO: 845652 - DNA, 25 bp, Homo sapien
gcagagctctggaccttttcacatg

SEQ ID NO: 845653 - DNA, 25 bp, Homo sapien
tatttgtctcgtggggtagtgacac

SEQ ID NO: 845654 - DNA, 25 bp, Homo sapien
ttcttgcatgtaaccctctttaaag

SEQ ID NO: 845655 - DNA, 25 bp, Homo sapien
tattttcttgcatgtaaccctcttt

SEQ ID NO: 845656 - DNA, 25 bp, Homo sapien
catgtaaccctctttaaagagccaa

SEQ ID NO: 845657 - DNA, 25 bp, Homo sapien
ccttgcttggtgcatggctatgtaa

SEQ ID NO: 845658 - DNA, 25 bp, Homo sapien
actatgtcattctaggccctcattg

SEQ ID NO: 845659 - DNA, 25 bp, Homo sapien
ctgtcccatggatgcacattgccta

SEQ ID NO: 845660 - DNA, 25 bp, Homo sapien
ctgaggcttgtctgatcatctatcc

SEQ ID NO: 845661 - DNA, 25 bp, Homo sapien
cacagcgacctcgggtgggaacacc

SEQ ID NO: 845662 - DNA, 25 bp, Homo sapien
acagcgacctcgggtgggaacacct

SEQ ID NO: 845663 - DNA, 25 bp, Homo sapien
cagcgacctcgggtgggaacacctt

SEQ ID NO: 845664 - DNA, 25 bp, Homo sapien
ctggagtcattgagggcgggctgct

SEQ ID NO: 845665 - DNA, 25 bp, Homo sapien
agtatctggagtcattgagggcggg

SEQ ID NO: 845666 - DNA, 25 bp, Homo sapien
tatctggagtcattgagggcgggct

SEQ ID NO: 845667 - DNA, 25 bp, Homo sapien
gctgctcaggcagtatctggagtca

SEQ ID NO: 845668 - DNA, 25 bp, Homo sapien
tgggtccactcgtcattctccgaga

SEQ ID NO: 845669 - DNA, 25 bp, Homo sapien
tagaactggacttgacagcggaagt

SEQ ID NO: 845670 - DNA, 25 bp, Homo sapien
tctgggtgacgggtttggccctatc

SEQ ID NO: 845671 - DNA, 25 bp, Homo sapien
cctcggcgctgacgatctgggtgac

SEQ ID NO: 845672 - DNA, 25 bp, Homo sapien
tctcctccaggcatctccccaggcc

SEQ ID NO: 845673 - DNA, 25 bp, Homo sapien
tcacctaatctcctccaggcatctc

SEQ ID NO: 845674 - DNA, 25 bp, Homo sapien
ctccaggcatctccccaggccccac

SEQ ID NO: 845675 - DNA, 25 bp, Homo sapien
tcctccaggcatctccccaggcccc

SEQ ID NO: 845676 - DNA, 25 bp, Homo sapien
aattctccttcatggtgtgcgctgg

SEQ ID NO: 845677 - DNA, 25 bp, Homo sapien
tttgcagttggcacagactcccagg

SEQ ID NO: 845678 - DNA, 25 bp, Homo sapien
tctgggagaagaatgaaccacaggt

SEQ ID NO: 845679 - DNA, 25 bp, Homo sapien
tgagagttacacaggccacatagaa

SEQ ID NO: 845680 - DNA, 25 bp, Homo sapien
acaggtgggtacctgtgcacaggta

SEQ ID NO: 845681 - DNA, 25 bp, Homo sapien
tgggtacctgtgcacaggtagctct

SEQ ID NO: 845682 - DNA, 25 bp, Homo sapien
catgccttggttctaggtcaagaac

SEQ ID NO: 845683 - DNA, 25 bp, Homo sapien
agttcttcatgccttggttctaggt

SEQ ID NO: 845684 - DNA, 25 bp, Homo sapien
aacacaagggcgctgaccagcacag

SEQ ID NO: 845685 - DNA, 25 bp, Homo sapien
cagacaggaccccttgctggtagga

SEQ ID NO: 845686 - DNA, 25 bp, Homo sapien
gccatcaacacaagggcgctgacca

SEQ ID NO: 845687 - DNA, 25 bp, Homo sapien
catggccatcaacacaagggcgctg

SEQ ID NO: 845688 - DNA, 25 bp, Homo sapien
ccacacaaatagtaaggctcatcac

SEQ ID NO: 845689 - DNA, 25 bp, Homo sapien
gtagtagggcccattgaccacacaa

SEQ ID NO: 845690 - DNA, 25 bp, Homo sapien
caaatagtaaggctcatcacaacat

SEQ ID NO: 845691 - DNA, 25 bp, Homo sapien
ttgtgaggattgagagaaagtagta

SEQ ID NO: 845692 - DNA, 25 bp, Homo sapien
cctgggttagggagatttcagccgt

SEQ ID NO: 845693 - DNA, 25 bp, Homo sapien
aaccatgacgggttagaagctccta

SEQ ID NO: 845694 - DNA, 25 bp, Homo sapien
gaagctcctaactccacttccaggg

SEQ ID NO: 845695 - DNA, 25 bp, Homo sapien
gtgcatgcacatagggggatatcta

SEQ ID NO: 845696 - DNA, 25 bp, Homo sapien
tattggtttagtcacttaggcatgc

SEQ ID NO: 845697 - DNA, 25 bp, Homo sapien
ttttattggtttagtcacttaggca

SEQ ID NO: 845698 - DNA, 25 bp, Homo sapien
ggtttagtcacttaggcatgctaag

SEQ ID NO: 845699 - DNA, 25 bp, Homo sapien
catttttattggtttagtcacttag

SEQ ID NO: 845700 - DNA, 25 bp, Homo sapien
tggtagctgcattccctgagctggg

SEQ ID NO: 845701 - DNA, 25 bp, Homo sapien
gggaccctgcaagaccacagctggg

SEQ ID NO: 845702 - DNA, 25 bp, Homo sapien
tgctgagtgataatcccactttgct

SEQ ID NO: 845703 - DNA, 25 bp, Homo sapien
tccttggaacatgcatcaccctgag

SEQ ID NO: 845704 - DNA, 25 bp, Homo sapien
cttagcacagacagagggcacaccc

SEQ ID NO: 845705 - DNA, 25 bp, Homo sapien
ttagcacagacagagggcacaccct

SEQ ID NO: 845706 - DNA, 25 bp, Homo sapien
acagacagagggcacacccttcctc

SEQ ID NO: 845707 - DNA, 25 bp, Homo sapien
agcacagacagagggcacacccttc

SEQ ID NO: 845708 - DNA, 25 bp, Homo sapien
cagaattccttctccttccccacct

SEQ ID NO: 845709 - DNA, 25 bp, Homo sapien
ccctggcccgaagaactgctcattg

SEQ ID NO: 845710 - DNA, 25 bp, Homo sapien
tgtccctggcccgaagaactgctca

SEQ ID NO: 845711 - DNA, 25 bp, Homo sapien
agccgtgtccctggcccgaagaact

SEQ ID NO: 845712 - DNA, 25 bp, Homo sapien
tgagccgtgtccctggcccgaagaa

SEQ ID NO: 845713 - DNA, 25 bp, Homo sapien
gggccctggattgcccagtgtccac

SEQ ID NO: 845714 - DNA, 25 bp, Homo sapien
tcgaggagggccctggattgcccag

SEQ ID NO: 845715 - DNA, 25 bp, Homo sapien
aggagggccctggattgcccagtgt

SEQ ID NO: 845716 - DNA, 25 bp, Homo sapien
agggccctggattgcccagtgtcca

SEQ ID NO: 845717 - DNA, 25 bp, Homo sapien
gtacggtcagcctagagccttctcc

SEQ ID NO: 845718 - DNA, 25 bp, Homo sapien
agtacggtcagcctagagccttctc

SEQ ID NO: 845719 - DNA, 25 bp, Homo sapien
acggtcagcctagagccttctccaa

SEQ ID NO: 845720 - DNA, 25 bp, Homo sapien
ccagtacggtcagcctagagccttc

SEQ ID NO: 845721 - DNA, 25 bp, Homo sapien
gcccatcccgccctctcggagctct

SEQ ID NO: 845722 - DNA, 25 bp, Homo sapien
ctctgcccatcccgccctctcggag

SEQ ID NO: 845723 - DNA, 25 bp, Homo sapien
cctctcggagctctccggagcccca

SEQ ID NO: 845724 - DNA, 25 bp, Homo sapien
gagctctccggagccccaaccgcct

SEQ ID NO: 845725 - DNA, 25 bp, Homo sapien
agaaccaggagtcctccgcccagac

SEQ ID NO: 845726 - DNA, 25 bp, Homo sapien
aggcccaggacaaaaaccggtgctg

SEQ ID NO: 845727 - DNA, 25 bp, Homo sapien
tcgggtccttcccaccgctgagagc

SEQ ID NO: 845728 - DNA, 25 bp, Homo sapien
tgctgtcccagactcagctcgggtc

SEQ ID NO: 845729 - DNA, 25 bp, Homo sapien
acagccccgagacgcggcacagaaa

SEQ ID NO: 845730 - DNA, 25 bp, Homo sapien
agacgcggcacagaaactggccctg

SEQ ID NO: 845731 - DNA, 25 bp, Homo sapien
cccgagacgcggcacagaaactggc

SEQ ID NO: 845732 - DNA, 25 bp, Homo sapien
gagacgcggcacagaaactggccct

SEQ ID NO: 845733 - DNA, 25 bp, Homo sapien
agcactgagagccgggtcccggcgc

SEQ ID NO: 845734 - DNA, 25 bp, Homo sapien
cactgagagccgggtcccggcgccg

SEQ ID NO: 845735 - DNA, 25 bp, Homo sapien
ccagcactgagagccgggtcccggc

SEQ ID NO: 845736 - DNA, 25 bp, Homo sapien
ctgagagccgggtcccggcgccgaa

SEQ ID NO: 845737 - DNA, 25 bp, Homo sapien
cgagccccgcacaaaaacccgagcg

SEQ ID NO: 845738 - DNA, 25 bp, Homo sapien
cccgcacaaaaacccgagcgcagtc

SEQ ID NO: 845739 - DNA, 25 bp, Homo sapien
gcacaaaaacccgagcgcagtctcg

SEQ ID NO: 845740 - DNA, 25 bp, Homo sapien
agccccgcacaaaaacccgagcgca

SEQ ID NO: 845741 - DNA, 25 bp, Homo sapien
gcgtgcctggcccgaagtactgggt

SEQ ID NO: 845742 - DNA, 25 bp, Homo sapien
aggagccgcgtgcctggcccgaagt

SEQ ID NO: 845743 - DNA, 25 bp, Homo sapien
cgtgcctggcccgaagtactgggtc

SEQ ID NO: 845744 - DNA, 25 bp, Homo sapien
agccgcgtgcctggcccgaagtact

SEQ ID NO: 845745 - DNA, 25 bp, Homo sapien
ccgcgccccagcagcccgcgctcac

SEQ ID NO: 845746 - DNA, 25 bp, Homo sapien
cgcccgcgccccagcagcccgcgct

SEQ ID NO: 845747 - DNA, 25 bp, Homo sapien
cgcgcccgcgccccagcagcccgcg

SEQ ID NO: 845748 - DNA, 25 bp, Homo sapien
accagacccaagccgcccgcgcccg

SEQ ID NO: 845749 - DNA, 25 bp, Homo sapien
ccgaaagtcaggacgttggccccag

SEQ ID NO: 845750 - DNA, 25 bp, Homo sapien
agcacggtcagcctgctgccggccc

SEQ ID NO: 845751 - DNA, 25 bp, Homo sapien
gcctgctgccggccccgaaagtcag

SEQ ID NO: 845752 - DNA, 25 bp, Homo sapien
ctgccggccccgaaagtcaggacgt

SEQ ID NO: 845753 - DNA, 25 bp, Homo sapien
ggccggaccgggtgccgcgaagcag

SEQ ID NO: 845754 - DNA, 25 bp, Homo sapien
cacagggccggaccgggtgccgcga

SEQ ID NO: 845755 - DNA, 25 bp, Homo sapien
gggccggaccgggtgccgcgaagca

SEQ ID NO: 845756 - DNA, 25 bp, Homo sapien
cagcacagggccggaccgggtgccg

SEQ ID NO: 845757 - DNA, 25 bp, Homo sapien
tgtgaccgtgagcctggtgcccggc

SEQ ID NO: 845758 - DNA, 25 bp, Homo sapien
ctgtgaccgtgagcctggtgcccgg

SEQ ID NO: 845759 - DNA, 25 bp, Homo sapien
aggtggggagacgcccgaatctcac

SEQ ID NO: 845760 - DNA, 25 bp, Homo sapien
aaggtggggagacgcccgaatctca

SEQ ID NO: 845761 - DNA, 25 bp, Homo sapien
agcggggaggtgaccttgcagagct

SEQ ID NO: 845762 - DNA, 25 bp, Homo sapien
gagcggggaggtgaccttgcagagc

SEQ ID NO: 845763 - DNA, 25 bp, Homo sapien
tcagctttccggactctgagcacct

SEQ ID NO: 845764 - DNA, 25 bp, Homo sapien
ctctgctcagctttccggactctga

SEQ ID NO: 845765 - DNA, 25 bp, Homo sapien
ctgctcagctttccggactctgagc

SEQ ID NO: 845766 - DNA, 25 bp, Homo sapien
aagattaaaagtggcctcgccctct

SEQ ID NO: 845767 - DNA, 25 bp, Homo sapien
ccaggatttcccttcgtcctctcca

SEQ ID NO: 845768 - DNA, 25 bp, Homo sapien
atcctctcctccatcgttcaccttc

SEQ ID NO: 845769 - DNA, 25 bp, Homo sapien
tctcccagagtcctaacaaatcctc

SEQ ID NO: 845770 - DNA, 25 bp, Homo sapien
ttcgtcctctccagtctcgcctctc

SEQ ID NO: 845771 - DNA, 25 bp, Homo sapien
cagcccgtgggtaagcatgaatgcc

SEQ ID NO: 845772 - DNA, 25 bp, Homo sapien
tttgtggcgaatgaactccctgaac

SEQ ID NO: 845773 - DNA, 25 bp, Homo sapien
taccccagtggctgaggttatgtgc

SEQ ID NO: 845774 - DNA, 25 bp, Homo sapien
tcagggcagttgtcaccaggtaatg

SEQ ID NO: 845775 - DNA, 25 bp, Homo sapien
accattgaattacatcaataatctg

SEQ ID NO: 845776 - DNA, 25 bp, Homo sapien
caataatctgtacacggtacatgtt

SEQ ID NO: 845777 - DNA, 25 bp, Homo sapien
cattgaattacatcaataatctgta

SEQ ID NO: 845778 - DNA, 25 bp, Homo sapien
ataatctgtacacggtacatgttga

SEQ ID NO: 845779 - DNA, 25 bp, Homo sapien
acacttcagatcctgcccatccttt

SEQ ID NO: 845780 - DNA, 25 bp, Homo sapien
tttccacacttcagatcctgcccat

SEQ ID NO: 845781 - DNA, 25 bp, Homo sapien
ccacacttcagatcctgcccatcct

SEQ ID NO: 845782 - DNA, 25 bp, Homo sapien
catttccacacttcagatcctgccc

SEQ ID NO: 845783 - DNA, 25 bp, Homo sapien
caagctgacggtgtgtgtgttctaa

SEQ ID NO: 845784 - DNA, 25 bp, Homo sapien
ctaagatttaacacgagccccggca

SEQ ID NO: 845785 - DNA, 25 bp, Homo sapien
tattgatgcaacaggcgtggcgaac

SEQ ID NO: 845786 - DNA, 25 bp, Homo sapien
gggagtctaccagccctccagaatg

SEQ ID NO: 845787 - DNA, 25 bp, Homo sapien
agaaggccgggaaaggaccataatg

SEQ ID NO: 845788 - DNA, 25 bp, Homo sapien
gagagaaggccgggaaaggaccata

SEQ ID NO: 845789 - DNA, 25 bp, Homo sapien
tgagagctgtctggtcctggtaggg

SEQ ID NO: 845790 - DNA, 25 bp, Homo sapien
cacagcgacctcgggtgggaacacg

SEQ ID NO: 845791 - DNA, 25 bp, Homo sapien
cagcgacctcgggtgggaacacgtt

SEQ ID NO: 845792 - DNA, 25 bp, Homo sapien
acagcgacctcgggtgggaacacgt

SEQ ID NO: 845793 - DNA, 25 bp, Homo sapien
cccactgtgcacctccttcccattc

SEQ ID NO: 845794 - DNA, 25 bp, Homo sapien
cactgtgcacctccttcccattcac

SEQ ID NO: 845795 - DNA, 25 bp, Homo sapien
gcacctccttcccattcacccacca

SEQ ID NO: 845796 - DNA, 25 bp, Homo sapien
ctgtgcacctccttcccattcaccc

SEQ ID NO: 845797 - DNA, 25 bp, Homo sapien
tatctggagtcattgagggcgggct

SEQ ID NO: 845798 - DNA, 25 bp, Homo sapien
tctggagtcattgagggcgggctgc

SEQ ID NO: 845799 - DNA, 25 bp, Homo sapien
agtatctggagtcattgagggcggg

SEQ ID NO: 845800 - DNA, 25 bp, Homo sapien
ctggagtcattgagggcgggctgct

SEQ ID NO: 845801 - DNA, 25 bp, Homo sapien
tgggtccactcgtcattctccgaga

SEQ ID NO: 845802 - DNA, 25 bp, Homo sapien
tagaactggacttgacagcggaagt

SEQ ID NO: 845803 - DNA, 25 bp, Homo sapien
cctcggcgctgacgatctgggtgac

SEQ ID NO: 845804 - DNA, 25 bp, Homo sapien
tctgggtgacgggtttggccctatc

SEQ ID NO: 845805 - DNA, 25 bp, Homo sapien
caggcatctccccaggccccactca

SEQ ID NO: 845806 - DNA, 25 bp, Homo sapien
tcacctaatctcctccaggcatctc

SEQ ID NO: 845807 - DNA, 25 bp, Homo sapien
ctccaggcatctccccaggccccac

SEQ ID NO: 845808 - DNA, 25 bp, Homo sapien
aggcatctccccaggccccactcac

SEQ ID NO: 845809 - DNA, 25 bp, Homo sapien
gctccagtgccagcgaagtggtcac

SEQ ID NO: 845810 - DNA, 25 bp, Homo sapien
gctttgctgaccctgtgaaccttga

SEQ ID NO: 845811 - DNA, 25 bp, Homo sapien
gagaatgggatgcacaccactcaga

SEQ ID NO: 845812 - DNA, 25 bp, Homo sapien
tcagggagacttgaaagcttagctc

SEQ ID NO: 845813 - DNA, 25 bp, Homo sapien
tgtgtccgtggattctccatgccct

SEQ ID NO: 845814 - DNA, 25 bp, Homo sapien
tccatgccctggttcgagagcagag

SEQ ID NO: 845815 - DNA, 25 bp, Homo sapien
tcacgcccctgtgtccgtggattct

SEQ ID NO: 845816 - DNA, 25 bp, Homo sapien
cagagacggcgaaagatagagagaa

SEQ ID NO: 845817 - DNA, 25 bp, Homo sapien
gcactgaccagcacggcatacaagg

SEQ ID NO: 845818 - DNA, 25 bp, Homo sapien
acgagggcactgaccagcacggcat

SEQ ID NO: 845819 - DNA, 25 bp, Homo sapien
gccatcagcacgagggcactgacca

SEQ ID NO: 845820 - DNA, 25 bp, Homo sapien
cagacaggaccccttgctggtaaga

SEQ ID NO: 845821 - DNA, 25 bp, Homo sapien
gaggcctaatttgagtagggctcgc

SEQ ID NO: 845822 - DNA, 25 bp, Homo sapien
tctgagattcctttatgcccatgtg

SEQ ID NO: 845823 - DNA, 25 bp, Homo sapien
tagggctcgctggttgtctccatcc

SEQ ID NO: 845824 - DNA, 25 bp, Homo sapien
gatatattaggctgtgctctggctc

SEQ ID NO: 845825 - DNA, 25 bp, Homo sapien
tagcctctggaatcctttctcttga

SEQ ID NO: 845826 - DNA, 25 bp, Homo sapien
agcctctggaatcctttctcttgac

SEQ ID NO: 845827 - DNA, 25 bp, Homo sapien
ctagcctctggaatcctttctcttg

SEQ ID NO: 845828 - DNA, 25 bp, Homo sapien
gaatcacttttaggaacacagattg

SEQ ID NO: 845829 - DNA, 25 bp, Homo sapien
gcaggtacaggagaatcctgggtga

SEQ ID NO: 845830 - DNA, 25 bp, Homo sapien
ggaacacagattgggagcaggtaca

SEQ ID NO: 845831 - DNA, 25 bp, Homo sapien
tcatgtaagtaggagatgagaagca

SEQ ID NO: 845832 - DNA, 25 bp, Homo sapien
cattgtaacccataggtctgcccgc

SEQ ID NO: 845833 - DNA, 25 bp, Homo sapien
tcacttcagatgtccaagggaatgc

SEQ ID NO: 845834 - DNA, 25 bp, Homo sapien
gaggacttccatcaggatgaacagg

SEQ ID NO: 845835 - DNA, 25 bp, Homo sapien
gacccagaatgcctgggtatggaaa

SEQ ID NO: 845836 - DNA, 25 bp, Homo sapien
tcctacctttgcgaggagccacaag

SEQ ID NO: 845837 - DNA, 25 bp, Homo sapien
ttgcgaggagccacaaggatatgcc

SEQ ID NO: 845838 - DNA, 25 bp, Homo sapien
gccacaaggatatgcctgctgcctc

SEQ ID NO: 845839 - DNA, 25 bp, Homo sapien
tcctgtcctacctttgcgaggagcc

SEQ ID NO: 845840 - DNA, 25 bp, Homo sapien
gagaggatgcccagaattggcccag

SEQ ID NO: 845841 - DNA, 25 bp, Homo sapien
ggagaggatgcccagaattggccca

SEQ ID NO: 845842 - DNA, 25 bp, Homo sapien
cagtctctagccagtatgacatgta

SEQ ID NO: 845843 - DNA, 25 bp, Homo sapien
tctctagccagtatgacatgtaggg

SEQ ID NO: 845844 - DNA, 25 bp, Homo sapien
agtctctagccagtatgacatgtag

SEQ ID NO: 845845 - DNA, 25 bp, Homo sapien
gtctctagccagtatgacatgtagg

SEQ ID NO: 845846 - DNA, 25 bp, Homo sapien
tgatatctgctgatcctcggtgtgt

SEQ ID NO: 845847 - DNA, 25 bp, Homo sapien
ggtacactgtgccttacacatttca

SEQ ID NO: 845848 - DNA, 25 bp, Homo sapien
tttcaaacacgatgtctcttcaggc

SEQ ID NO: 845849 - DNA, 25 bp, Homo sapien
ttgttttgatccacggcgggtacac

SEQ ID NO: 845850 - DNA, 25 bp, Homo sapien
catgggcatcaaatatgggtgggta

SEQ ID NO: 845851 - DNA, 25 bp, Homo sapien
tacaagttccttcatcgtaagtgga

SEQ ID NO: 845852 - DNA, 25 bp, Homo sapien
aattccagggtgcttataaaagcgc

SEQ ID NO: 845853 - DNA, 25 bp, Homo sapien
taaaagcgcttgtcaaagcattgtg

SEQ ID NO: 845854 - DNA, 25 bp, Homo sapien
cttggaagttttcatatgggctctg

SEQ ID NO: 845855 - DNA, 25 bp, Homo sapien
gcggctggagcgaacgcagcccggc

SEQ ID NO: 845856 - DNA, 25 bp, Homo sapien
gctggagcgaacgcagcccggcccg

SEQ ID NO: 845857 - DNA, 25 bp, Homo sapien
ccgcggctggagcgaacgcagcccg

SEQ ID NO: 845858 - DNA, 25 bp, Homo sapien
ctgctgtagagccgcggctggagcg

SEQ ID NO: 845859 - DNA, 25 bp, Homo sapien
cgagatcgccgtcgccaagctgggt

SEQ ID NO: 845860 - DNA, 25 bp, Homo sapien
tcccgttggccgcagtctctgcagg

SEQ ID NO: 845861 - DNA, 25 bp, Homo sapien
ggctcctggagctcgcacggtgcca

SEQ ID NO: 845862 - DNA, 25 bp, Homo sapien
ttcggcgccgagagtccctgggatt

SEQ ID NO: 845863 - DNA, 25 bp, Homo sapien
ccagtctggctgtgagttgctcttg

SEQ ID NO: 845864 - DNA, 25 bp, Homo sapien
ctacccccagtctggctgtgagttg

SEQ ID NO: 845865 - DNA, 25 bp, Homo sapien
agtctggctgtgagttgctcttggc

SEQ ID NO: 845866 - DNA, 25 bp, Homo sapien
acccccagtctggctgtgagttgct

SEQ ID NO: 845867 - DNA, 25 bp, Homo sapien
tctcttcgacgatgtcaagcaaagg

SEQ ID NO: 845868 - DNA, 25 bp, Homo sapien
tctctggctagtctttaagcttgtc

SEQ ID NO: 845869 - DNA, 25 bp, Homo sapien
tgtcccgctgctgacatcatgcatg

SEQ ID NO: 845870 - DNA, 25 bp, Homo sapien
tcatgcatgcttctcttcgacgatg

SEQ ID NO: 845871 - DNA, 25 bp, Homo sapien
tgaagacaaacaggcttggcacctc

SEQ ID NO: 845872 - DNA, 25 bp, Homo sapien
tgaattgggtggactataatccctt

SEQ ID NO: 845873 - DNA, 25 bp, Homo sapien
tctatctctcctcgtgtctgagtct

SEQ ID NO: 845874 - DNA, 25 bp, Homo sapien
tgcttgttgatctagagattggcgg

SEQ ID NO: 845875 - DNA, 25 bp, Homo sapien
gaaagatatttctattgtgtataag

SEQ ID NO: 845876 - DNA, 25 bp, Homo sapien
tatttctattgtgtataagctacta

SEQ ID NO: 845877 - DNA, 25 bp, Homo sapien
aagatatttctattgtgtataagct

SEQ ID NO: 845878 - DNA, 25 bp, Homo sapien
gatatttctattgtgtataagctac

SEQ ID NO: 845879 - DNA, 25 bp, Homo sapien
ggaactgaccatgccggcaccctga

SEQ ID NO: 845880 - DNA, 25 bp, Homo sapien
ccattcgaggacacaacaaagaaga

SEQ ID NO: 845881 - DNA, 25 bp, Homo sapien
ctttttctgccattcgaggacacaa

SEQ ID NO: 845882 - DNA, 25 bp, Homo sapien
tagaagagaggcttcgccaggaact

SEQ ID NO: 845883 - DNA, 25 bp, Homo sapien
tgcaaggggttattccagttctttc

SEQ ID NO: 845884 - DNA, 25 bp, Homo sapien
ctgcaaggggttattccagttcttt

SEQ ID NO: 845885 - DNA, 25 bp, Homo sapien
ttctgcaaggggttattccagttct

SEQ ID NO: 845886 - DNA, 25 bp, Homo sapien
tctgcaaggggttattccagttctt

SEQ ID NO: 845887 - DNA, 25 bp, Homo sapien
tgttcgtgcctactccctgtgtgac

SEQ ID NO: 845888 - DNA, 25 bp, Homo sapien
tgagccggtgcacatttgaccatct

SEQ ID NO: 845889 - DNA, 25 bp, Homo sapien
tccaaaagctgaccccgtgtctgtg

SEQ ID NO: 845890 - DNA, 25 bp, Homo sapien
ttgaccatcttggagtgttcgtgcc

SEQ ID NO: 845891 - DNA, 25 bp, Homo sapien
tttgcaagactcagggtgtacagct

SEQ ID NO: 845892 - DNA, 25 bp, Homo sapien
ttgcaagactcagggtgtacagcta

SEQ ID NO: 845893 - DNA, 25 bp, Homo sapien
caagactcagggtgtacagctaagc

SEQ ID NO: 845894 - DNA, 25 bp, Homo sapien
gcaagactcagggtgtacagctaag

SEQ ID NO: 845895 - DNA, 25 bp, Homo sapien
tgttccctaactgggcagccccttc

SEQ ID NO: 845896 - DNA, 25 bp, Homo sapien
tccctaactgggcagccccttcagt

SEQ ID NO: 845897 - DNA, 25 bp, Homo sapien
tctgttccctaactgggcagcccct

SEQ ID NO: 845898 - DNA, 25 bp, Homo sapien
actctgttccctaactgggcagccc

SEQ ID NO: 845899 - DNA, 25 bp, Homo sapien
gcagcacccataggctacacaccat

SEQ ID NO: 845900 - DNA, 25 bp, Homo sapien
gagcagcacccataggctacacacc

SEQ ID NO: 845901 - DNA, 25 bp, Homo sapien
agcagcacccataggctacacacca

SEQ ID NO: 845902 - DNA, 25 bp, Homo sapien
tctccggtggtgtccagcaatacct

SEQ ID NO: 845903 - DNA, 25 bp, Homo sapien
cagccaatctcagatgtctctccgg

SEQ ID NO: 845904 - DNA, 25 bp, Homo sapien
gtgggtaggtgagccagccaatctc

SEQ ID NO: 845905 - DNA, 25 bp, Homo sapien
gatgtctctccggtggtgtccagca

SEQ ID NO: 845906 - DNA, 25 bp, Homo sapien
catgacatgcctcaaaggtccgagt

SEQ ID NO: 845907 - DNA, 25 bp, Homo sapien
gagcatgcccgcacagagaagtgga

SEQ ID NO: 845908 - DNA, 25 bp, Homo sapien
tcctcagcctgacggtagtaaaggg

SEQ ID NO: 845909 - DNA, 25 bp, Homo sapien
tgcaaccaattgtcctgcccggtgc

SEQ ID NO: 845910 - DNA, 25 bp, Homo sapien
gggaaagctctcgtctgctgcaatt

SEQ ID NO: 845911 - DNA, 25 bp, Homo sapien
gagggaaagctctcgtctgctgcaa

SEQ ID NO: 845912 - DNA, 25 bp, Homo sapien
gaaagctctcgtctgctgcaattgt

SEQ ID NO: 845913 - DNA, 25 bp, Homo sapien
aggagggaaagctctcgtctgctgc

SEQ ID NO: 845914 - DNA, 25 bp, Homo sapien
gaggcccaaagctccgctctttgac

SEQ ID NO: 845915 - DNA, 25 bp, Homo sapien
tgacgttcagttgcagtccagcccg

SEQ ID NO: 845916 - DNA, 25 bp, Homo sapien
tccgctctttgacgttcagttgcag

SEQ ID NO: 845917 - DNA, 25 bp, Homo sapien
aaggccacgtagaagccgcgttggg

SEQ ID NO: 845918 - DNA, 25 bp, Homo sapien
aaggaagcaaaggatcggagcacgg

SEQ ID NO: 845919 - DNA, 25 bp, Homo sapien
caaaggatcggagcacggcagggca

SEQ ID NO: 845920 - DNA, 25 bp, Homo sapien
gcacggcagggcaggtgtaggagaa

SEQ ID NO: 845921 - DNA, 25 bp, Homo sapien
agcacggcagggcaggtgtaggaga

SEQ ID NO: 845922 - DNA, 25 bp, Homo sapien
atccacttgccctccccgttgcagt

SEQ ID NO: 845923 - DNA, 25 bp, Homo sapien
tctggctctgcatgagccacacagg

SEQ ID NO: 845924 - DNA, 25 bp, Homo sapien
gcccccgacagctaccatccacttg

SEQ ID NO: 845925 - DNA, 25 bp, Homo sapien
cttgccctccccgttgcagtgcagc

SEQ ID NO: 845926 - DNA, 25 bp, Homo sapien
gggaggtgtcgggcaagtgcaagac

SEQ ID NO: 845927 - DNA, 25 bp, Homo sapien
caagtgcaagacgagtgggctctca

SEQ ID NO: 845928 - DNA, 25 bp, Homo sapien
tgttcagagaggagcccaaaggctg

SEQ ID NO: 845929 - DNA, 25 bp, Homo sapien
tgggtgggaggtgtcgggcaagtgc

SEQ ID NO: 845930 - DNA, 25 bp, Homo sapien
agagtgggggcgtcacactcgctct

SEQ ID NO: 845931 - DNA, 25 bp, Homo sapien
agtgggggcgtcacactcgctctgt

SEQ ID NO: 845932 - DNA, 25 bp, Homo sapien
gaggagagtgggggcgtcacactcg

SEQ ID NO: 845933 - DNA, 25 bp, Homo sapien
ggagagtgggggcgtcacactcgct

SEQ ID NO: 845934 - DNA, 25 bp, Homo sapien
gcagaagacttatagagcccccgtg

SEQ ID NO: 845935 - DNA, 25 bp, Homo sapien
tcccagcagaagacttatagagccc

SEQ ID NO: 845936 - DNA, 25 bp, Homo sapien
cccagcagaagacttatagagcccc

SEQ ID NO: 845937 - DNA, 25 bp, Homo sapien
gaagacttatagagcccccgtgggc

SEQ ID NO: 845938 - DNA, 25 bp, Homo sapien
ggcctctggtgggtcggaactggcc

SEQ ID NO: 845939 - DNA, 25 bp, Homo sapien
gggcctctggtgggtcggaactggc

SEQ ID NO: 845940 - DNA, 25 bp, Homo sapien
cttgcacacgacattgaagagcagg

SEQ ID NO: 845941 - DNA, 25 bp, Homo sapien
caggcgccagtgtagcatgagtgct

SEQ ID NO: 845942 - DNA, 25 bp, Homo sapien
taacactcggctctcagtcaggcct

SEQ ID NO: 845943 - DNA, 25 bp, Homo sapien
ctcatccctgcagcggtgacaagtg

SEQ ID NO: 845944 - DNA, 25 bp, Homo sapien
gatcagccttgaggggagggcggca

SEQ ID NO: 845945 - DNA, 25 bp, Homo sapien
aagggggctcaaaggagcggaggca

SEQ ID NO: 845946 - DNA, 25 bp, Homo sapien
agatcaggagtagggaagggggctc

SEQ ID NO: 845947 - DNA, 25 bp, Homo sapien
ggcggcaggggtggaccaggctgga

SEQ ID NO: 845948 - DNA, 25 bp, Homo sapien
cggagctgatagtccaggatgttcc

SEQ ID NO: 845949 - DNA, 25 bp, Homo sapien
ctggtcatagtagcggagctgatag

SEQ ID NO: 845950 - DNA, 25 bp, Homo sapien
tgatgctgttggatgcccggctcac

SEQ ID NO: 845951 - DNA, 25 bp, Homo sapien
ttcccattggtctggtcgggctgcg

SEQ ID NO: 845952 - DNA, 25 bp, Homo sapien
tggtcagggtgaaggagtgggattc

SEQ ID NO: 845953 - DNA, 25 bp, Homo sapien
tgaaggagtgggattcgtcttctgc

SEQ ID NO: 845954 - DNA, 25 bp, Homo sapien
gtgaaggagtgggattcgtcttctg

SEQ ID NO: 845955 - DNA, 25 bp, Homo sapien
agggtgaaggagtgggattcgtctt

SEQ ID NO: 845956 - DNA, 25 bp, Homo sapien
tggaaaccatagatgtggccagggc

SEQ ID NO: 845957 - DNA, 25 bp, Homo sapien
gggcccgcacctggaaaccatagat

SEQ ID NO: 845958 - DNA, 25 bp, Homo sapien
tcagctgtgtcacggtggcagtgtt

SEQ ID NO: 845959 - DNA, 25 bp, Homo sapien
tctggaaatagactttgcccccgta

SEQ ID NO: 845960 - DNA, 25 bp, Homo sapien
aggtctctcacaggtgcttgttcat

SEQ ID NO: 845961 - DNA, 25 bp, Homo sapien
tgcttgttcatgtgcccaggcaccc

SEQ ID NO: 845962 - DNA, 25 bp, Homo sapien
agccgacagggtcacaggtgggcca

SEQ ID NO: 845963 - DNA, 25 bp, Homo sapien
acacacaacatgcacgcgcatgccc

SEQ ID NO: 845964 - DNA, 25 bp, Homo sapien
gtctttccggaagctgggaagacag

SEQ ID NO: 845965 - DNA, 25 bp, Homo sapien
gctggaagacgaccgccagcacggt

SEQ ID NO: 845966 - DNA, 25 bp, Homo sapien
gatggagccgatcaccaaggagagt

SEQ ID NO: 845967 - DNA, 25 bp, Homo sapien
gacgaccgccagcacggtgatggct

SEQ ID NO: 845968 - DNA, 25 bp, Homo sapien
tggctgacgggaggagcaccagtgt

SEQ ID NO: 845969 - DNA, 25 bp, Homo sapien
gactgctctttagtcggtctgtgga

SEQ ID NO: 845970 - DNA, 25 bp, Homo sapien
caaaacggtgactggggatgacgct

SEQ ID NO: 845971 - DNA, 25 bp, Homo sapien
tgtggagttaatggtgctgggcaga

SEQ ID NO: 845972 - DNA, 25 bp, Homo sapien
tgcagctgctccgtgtagccagtcc

SEQ ID NO: 845973 - DNA, 25 bp, Homo sapien
cgtgtagccagtcccacgccgcttc

SEQ ID NO: 845974 - DNA, 25 bp, Homo sapien
caatcttggggggatccagccttgc

SEQ ID NO: 845975 - DNA, 25 bp, Homo sapien
agccttgcctgccatgtgccccacc

SEQ ID NO: 845976 - DNA, 25 bp, Homo sapien
tgtgccccacccatgtgttccccag

SEQ ID NO: 845977 - DNA, 25 bp, Homo sapien
ccccaatcttggggggatccagcct

SEQ ID NO: 845978 - DNA, 25 bp, Homo sapien
tgttatgagcgtgttgtgaaaggca

SEQ ID NO: 845979 - DNA, 25 bp, Homo sapien
gcgcaccccagacatgcccacttac

SEQ ID NO: 845980 - DNA, 25 bp, Homo sapien
gagtatgttatgagcgtgttgtgaa

SEQ ID NO: 845981 - DNA, 25 bp, Homo sapien
ggtgtggagtatgttatgagcgtgt

SEQ ID NO: 845982 - DNA, 25 bp, Homo sapien
tgtcccaatgacctcctcaatcttg

SEQ ID NO: 845983 - DNA, 25 bp, Homo sapien
gcaagttctcggatggcctgacagg

SEQ ID NO: 845984 - DNA, 25 bp, Homo sapien
ggtcgatgtaatacttcaccccgag

SEQ ID NO: 845985 - DNA, 25 bp, Homo sapien
caatcttgatataagcaggatcgac

SEQ ID NO: 845986 - DNA, 25 bp, Homo sapien
ccatgaactccgtcagcaccatgag

SEQ ID NO: 845987 - DNA, 25 bp, Homo sapien
ccggcccaggaaggtcatctgcagg

SEQ ID NO: 845988 - DNA, 25 bp, Homo sapien
gggtcggctcttggtgaccacgccc

SEQ ID NO: 845989 - DNA, 25 bp, Homo sapien
ggccctggcgcacttctccaaaaga

SEQ ID NO: 845990 - DNA, 25 bp, Homo sapien
acagcgagcgatggacgaaggcaaa

SEQ ID NO: 845991 - DNA, 25 bp, Homo sapien
gactgtggccaagacgggccacctt

SEQ ID NO: 845992 - DNA, 25 bp, Homo sapien
tattcaccagcacgctgtgggcaga

SEQ ID NO: 845993 - DNA, 25 bp, Homo sapien
tgcacaccaagtggctattcaccag

SEQ ID NO: 845994 - DNA, 25 bp, Homo sapien
ctgaggggtaaagtcaaaagcaaat

SEQ ID NO: 845995 - DNA, 25 bp, Homo sapien
tcacttcccacatgagtatcccaaa

SEQ ID NO: 845996 - DNA, 25 bp, Homo sapien
gctgcccagcgaagcaaacaacttg

SEQ ID NO: 845997 - DNA, 25 bp, Homo sapien
taaggccgttctccataactcatca

SEQ ID NO: 845998 - DNA, 25 bp, Homo sapien
catgtgcaatgacctctggggctgc

SEQ ID NO: 845999 - DNA, 25 bp, Homo sapien
ccgccgggcacggtccttctgccaa

SEQ ID NO: 846000 - DNA, 25 bp, Homo sapien
tgcagggtatctggcttgcggatca

SEQ ID NO: 846001 - DNA, 25 bp, Homo sapien
cggaactcctgctctattgcattta

SEQ ID NO: 846002 - DNA, 25 bp, Homo sapien
gccaagtgtccaacataagtagatg

SEQ ID NO: 846003 - DNA, 25 bp, Homo sapien
gccaaacttggagaagttgtcctgg

SEQ ID NO: 846004 - DNA, 25 bp, Homo sapien
agcactccagtccaatggctgaaag

SEQ ID NO: 846005 - DNA, 25 bp, Homo sapien
gggtgagtccagacaaggaaagtcc

SEQ ID NO: 846006 - DNA, 25 bp, Homo sapien
tcctggtagcactccagtccaatgg

SEQ ID NO: 846007 - DNA, 25 bp, Homo sapien
gctgcctcaggtgttgctgaaggag

SEQ ID NO: 846008 - DNA, 25 bp, Homo sapien
tgctgcctcaggtgttgctgaagga

SEQ ID NO: 846009 - DNA, 25 bp, Homo sapien
ccacatgtcccttctcggaccagtg

SEQ ID NO: 846010 - DNA, 25 bp, Homo sapien
tccagggctgagtcacgggtatcgt

SEQ ID NO: 846011 - DNA, 25 bp, Homo sapien
gaccagggaatgcagccatcgggag

SEQ ID NO: 846012 - DNA, 25 bp, Homo sapien
ggctgttggagcccggctcacgtcc

SEQ ID NO: 846013 - DNA, 25 bp, Homo sapien
gagctgttccttaccatcatcgatg

SEQ ID NO: 846014 - DNA, 25 bp, Homo sapien
tactggaatcgctgagaagaatgcc

SEQ ID NO: 846015 - DNA, 25 bp, Homo sapien
ccaccacggtgatgctggagcggaa

SEQ ID NO: 846016 - DNA, 25 bp, Homo sapien
gaggctcatacaaaactagggaccg

SEQ ID NO: 846017 - DNA, 25 bp, Homo sapien
tcttcactttcccttagatgtttca

SEQ ID NO: 846018 - DNA, 25 bp, Homo sapien
ttcagcacctgatgcagaagcggaa

SEQ ID NO: 846019 - DNA, 25 bp, Homo sapien
cccttagatgtttcagcacctgatg

SEQ ID NO: 846020 - DNA, 25 bp, Homo sapien
tgtttcagcacctgatgcagaagcg

SEQ ID NO: 846021 - DNA, 25 bp, Homo sapien
cacttagcctacttgtaaagcttcc

SEQ ID NO: 846022 - DNA, 25 bp, Homo sapien
tcccagaaagccgatccgctgcaag

SEQ ID NO: 846023 - DNA, 25 bp, Homo sapien
gcagctgtctttattacagatcaat

SEQ ID NO: 846024 - DNA, 25 bp, Homo sapien
gatccgctgcaaggcacacttagcc

SEQ ID NO: 846025 - DNA, 25 bp, Homo sapien
accagaatggagcagggcaatgacc

SEQ ID NO: 846026 - DNA, 25 bp, Homo sapien
gagagatctgtctccacaagggctc

SEQ ID NO: 846027 - DNA, 25 bp, Homo sapien
caagggctccctcgttgtatggaca

SEQ ID NO: 846028 - DNA, 25 bp, Homo sapien
ggtggatggagcacaaccctcttca

SEQ ID NO: 846029 - DNA, 25 bp, Homo sapien
tcaggttggcctggaacgtaaagcc

SEQ ID NO: 846030 - DNA, 25 bp, Homo sapien
gagacctaatgcgtttctgctggct

SEQ ID NO: 846031 - DNA, 25 bp, Homo sapien
gcacacccatatttataggaccagg

SEQ ID NO: 846032 - DNA, 25 bp, Homo sapien
gatttgcctccggtaaggcaccata

SEQ ID NO: 846033 - DNA, 25 bp, Homo sapien
tcactagagcgttccaatggcgagg

SEQ ID NO: 846034 - DNA, 25 bp, Homo sapien
cagccatgggcctgaacttcattcc

SEQ ID NO: 846035 - DNA, 25 bp, Homo sapien
tccataggacctctgacttcacatg

SEQ ID NO: 846036 - DNA, 25 bp, Homo sapien
ggcacaagaatggagcacagccagc

SEQ ID NO: 846037 - DNA, 25 bp, Homo sapien
ccgtgcacctcctgccccattcctg

SEQ ID NO: 846038 - DNA, 25 bp, Homo sapien
agtgcccagcaggatccgtgcacct

SEQ ID NO: 846039 - DNA, 25 bp, Homo sapien
cattcctgtcctggcccttaaccct

SEQ ID NO: 846040 - DNA, 25 bp, Homo sapien
tgcccacccactgcctttggccgcc

SEQ ID NO: 846041 - DNA, 25 bp, Homo sapien
caagataggaaccaggaacactgcc

SEQ ID NO: 846042 - DNA, 25 bp, Homo sapien
gcctgggctcccgttcagaggcttc

SEQ ID NO: 846043 - DNA, 25 bp, Homo sapien
gcagagggcgttttctctgtctggc

SEQ ID NO: 846044 - DNA, 25 bp, Homo sapien
ctgggctcccgttcagaggcttcac

SEQ ID NO: 846045 - DNA, 25 bp, Homo sapien
ctggctcccatctttggggcctggg

SEQ ID NO: 846046 - DNA, 25 bp, Homo sapien
ggccacaaagtgctcttcgaactgt

SEQ ID NO: 846047 - DNA, 25 bp, Homo sapien
aaagtgctcttcgaactgttcttga

SEQ ID NO: 846048 - DNA, 25 bp, Homo sapien
cacaaagtgctcttcgaactgttct

SEQ ID NO: 846049 - DNA, 25 bp, Homo sapien
gaggccacaaagtgctcttcgaact

SEQ ID NO: 846050 - DNA, 25 bp, Homo sapien
cactggccagactaaagcagaagct

SEQ ID NO: 846051 - DNA, 25 bp, Homo sapien
tatttgggaatgtccgcctcaatgg

SEQ ID NO: 846052 - DNA, 25 bp, Homo sapien
gcttgtgaacagctgccgtcttgga

SEQ ID NO: 846053 - DNA, 25 bp, Homo sapien
gccctcctgagaaaaccatgacact

SEQ ID NO: 846054 - DNA, 25 bp, Homo sapien
cctttgggagttgtgacctggagcc

SEQ ID NO: 846055 - DNA, 25 bp, Homo sapien
tgatggcaactggtatctctgctgc

SEQ ID NO: 846056 - DNA, 25 bp, Homo sapien
ggagatgaaactccgaacctggaga

SEQ ID NO: 846057 - DNA, 25 bp, Homo sapien
taatctgctgtcctgaacaaaacca

SEQ ID NO: 846058 - DNA, 25 bp, Homo sapien
tgaggaggtaccacttttgggccag

SEQ ID NO: 846059 - DNA, 25 bp, Homo sapien
ggccaggaaccttcaccaaggttca

SEQ ID NO: 846060 - DNA, 25 bp, Homo sapien
tcagtgctggggtctcatttgagga

SEQ ID NO: 846061 - DNA, 25 bp, Homo sapien
gggtctcatttgaggaggtaccact

SEQ ID NO: 846062 - DNA, 25 bp, Homo sapien
tctacgtagtgcagcggaggtaccg

SEQ ID NO: 846063 - DNA, 25 bp, Homo sapien
tcagaggtgtggattcagctccacc

SEQ ID NO: 846064 - DNA, 25 bp, Homo sapien
ggcgctcaggcctccgactgcaaag

SEQ ID NO: 846065 - DNA, 25 bp, Homo sapien
gtcagaggcgtgtgcggtctcagag

SEQ ID NO: 846066 - DNA, 25 bp, Homo sapien
atgtgtgactatgaggcgctcagag

SEQ ID NO: 846067 - DNA, 25 bp, Homo sapien
gcattgtgcactgcctgcagatgtg

SEQ ID NO: 846068 - DNA, 25 bp, Homo sapien
tcagttcaaggacctcgaccgtgtg

SEQ ID NO: 846069 - DNA, 25 bp, Homo sapien
cgaccgtgtgcaaaaggcattgtgc

SEQ ID NO: 846070 - DNA, 25 bp, Homo sapien
ggtcaaggccatcagaaagtcccag

SEQ ID NO: 846071 - DNA, 25 bp, Homo sapien
ccaacaggcgagtgtcagagcatga

SEQ ID NO: 846072 - DNA, 25 bp, Homo sapien
catggttaccaagatctccagcagg

SEQ ID NO: 846073 - DNA, 25 bp, Homo sapien
tgaagaccagtgtgaggtgagaccc

SEQ ID NO: 846074 - DNA, 25 bp, Homo sapien
cattgtgccttgcaaaggcctttca

SEQ ID NO: 846075 - DNA, 25 bp, Homo sapien
agtgagctttgccaggcctgacata

SEQ ID NO: 846076 - DNA, 25 bp, Homo sapien
tcctgacttgcacagagtgagcttt

SEQ ID NO: 846077 - DNA, 25 bp, Homo sapien
tgcatctgcccctgtagcactgttt

SEQ ID NO: 846078 - DNA, 25 bp, Homo sapien
atttttgcatttgtgggccttgcca

SEQ ID NO: 846079 - DNA, 25 bp, Homo sapien
tttagcttgatctctaacatagctc

SEQ ID NO: 846080 - DNA, 25 bp, Homo sapien
tagcttgatctctaacatagctctt

SEQ ID NO: 846081 - DNA, 25 bp, Homo sapien
ggccttgccaaaagtgggcagatac

SEQ ID NO: 846082 - DNA, 25 bp, Homo sapien
tgcagaatcttagatccaagttcca

SEQ ID NO: 846083 - DNA, 25 bp, Homo sapien
cactacttcccttctactgcagaat

SEQ ID NO: 846084 - DNA, 25 bp, Homo sapien
cagaagaaggaccagttgcccaggc

SEQ ID NO: 846085 - DNA, 25 bp, Homo sapien
tgagctgcgtctgcactctcagact

SEQ ID NO: 846086 - DNA, 25 bp, Homo sapien
attttctcctggtccctcatcttca

SEQ ID NO: 846087 - DNA, 25 bp, Homo sapien
ttttctcattttctcctggtccctc

SEQ ID NO: 846088 - DNA, 25 bp, Homo sapien
ggtccctcatcttcatgcaagtttc

SEQ ID NO: 846089 - DNA, 25 bp, Homo sapien
ctcctggtccctcatcttcatgcaa

SEQ ID NO: 846090 - DNA, 25 bp, Homo sapien
catacctcaacaaggcggtggccat

SEQ ID NO: 846091 - DNA, 25 bp, Homo sapien
cgaatggtccagtgtgtgtgaagct

SEQ ID NO: 846092 - DNA, 25 bp, Homo sapien
tcttcatctacgtgaggccaggcaa

SEQ ID NO: 846093 - DNA, 25 bp, Homo sapien
ggtcatggcctttgatcgctacgtg

SEQ ID NO: 846094 - DNA, 25 bp, Homo sapien
agcactggattcctagaacaccagc

SEQ ID NO: 846095 - DNA, 25 bp, Homo sapien
cccaggactgtttttagcactggat

SEQ ID NO: 846096 - DNA, 25 bp, Homo sapien
tggattcctagaacaccagcagtat

SEQ ID NO: 846097 - DNA, 25 bp, Homo sapien
cactggattcctagaacaccagcag

SEQ ID NO: 846098 - DNA, 25 bp, Homo sapien
aacccgttgcactggccctgttgtc

SEQ ID NO: 846099 - DNA, 25 bp, Homo sapien
agggagtctgagaggaacctctttg

SEQ ID NO: 846100 - DNA, 25 bp, Homo sapien
ccattctggggtcgcgttgttgctc

SEQ ID NO: 846101 - DNA, 25 bp, Homo sapien
ccagatttgggactgtgcctgcagg

SEQ ID NO: 846102 - DNA, 25 bp, Homo sapien
gatctttctgaatccctttcagttc

SEQ ID NO: 846103 - DNA, 25 bp, Homo sapien
gttccaggtctcccactgggagttc

SEQ ID NO: 846104 - DNA, 25 bp, Homo sapien
agggtgggaaacttcgatctttctg

SEQ ID NO: 846105 - DNA, 25 bp, Homo sapien
gaaacttcgatctttctgaatccct

SEQ ID NO: 846106 - DNA, 25 bp, Homo sapien
ggtcagactcattggatcagttgaa

SEQ ID NO: 846107 - DNA, 25 bp, Homo sapien
gactcattggatcagttgaaagtct

SEQ ID NO: 846108 - DNA, 25 bp, Homo sapien
tgggtcagactcattggatcagttg

SEQ ID NO: 846109 - DNA, 25 bp, Homo sapien
atatgggtcagactcattggatcag

SEQ ID NO: 846110 - DNA, 25 bp, Homo sapien
agaaggcaatgtgtcccagagaagt

SEQ ID NO: 846111 - DNA, 25 bp, Homo sapien
gctggagaaaacagaaggcaatgtg

SEQ ID NO: 846112 - DNA, 25 bp, Homo sapien
aaacagaaggcaatgtgtcccagag

SEQ ID NO: 846113 - DNA, 25 bp, Homo sapien
gagaaaacagaaggcaatgtgtccc

SEQ ID NO: 846114 - DNA, 25 bp, Homo sapien
tgaacaggagctggagcaagcgcat

SEQ ID NO: 846115 - DNA, 25 bp, Homo sapien
tgttgtcctgagctttgttggcccc

SEQ ID NO: 846116 - DNA, 25 bp, Homo sapien
ttgttggcccccaactgcaggcaga

SEQ ID NO: 846117 - DNA, 25 bp, Homo sapien
actgcaggcagagaaccaggagcag

SEQ ID NO: 846118 - DNA, 25 bp, Homo sapien
cagggcctctggtcctttagccagt

SEQ ID NO: 846119 - DNA, 25 bp, Homo sapien
gctgccctaagctgccattggaatt

SEQ ID NO: 846120 - DNA, 25 bp, Homo sapien
gatatgtaatttccagactgggaga

SEQ ID NO: 846121 - DNA, 25 bp, Homo sapien
ctggcaggagatccatgggagctcc

SEQ ID NO: 846122 - DNA, 25 bp, Homo sapien
tgaccatgccatagagagtacctcc

SEQ ID NO: 846123 - DNA, 25 bp, Homo sapien
taagtggactgtcatctggcgggaa

SEQ ID NO: 846124 - DNA, 25 bp, Homo sapien
gaaaactccctagattgggtatcgc

SEQ ID NO: 846125 - DNA, 25 bp, Homo sapien
taggatgaccagcttagttcgagtg

SEQ ID NO: 846126 - DNA, 25 bp, Homo sapien
taaaaacccagcaaacatctcaatg

SEQ ID NO: 846127 - DNA, 25 bp, Homo sapien
tctcaatgcactggaggtatttgta

SEQ ID NO: 846128 - DNA, 25 bp, Homo sapien
ttgtaggagcatctttgaagatcct

SEQ ID NO: 846129 - DNA, 25 bp, Homo sapien
gtaggagcatctttgaagatcctcc

SEQ ID NO: 846130 - DNA, 25 bp, Homo sapien
gagagaatcagaacaccaggatcag

SEQ ID NO: 846131 - DNA, 25 bp, Homo sapien
acaactaggacactttaagattcct

SEQ ID NO: 846132 - DNA, 25 bp, Homo sapien
gattggattggtaacttcacacaga

SEQ ID NO: 846133 - DNA, 25 bp, Homo sapien
gatcagagaccaatctttgagtgag

SEQ ID NO: 846134 - DNA, 25 bp, Homo sapien
ctgacttgggaatgtcaaaattctt

SEQ ID NO: 846135 - DNA, 25 bp, Homo sapien
tggacgtactgacttgggaatgtca

SEQ ID NO: 846136 - DNA, 25 bp, Homo sapien
cgtcatttggacgtactgacttggg

SEQ ID NO: 846137 - DNA, 25 bp, Homo sapien
cagtgacttcgtcatttggacgtac

SEQ ID NO: 846138 - DNA, 25 bp, Homo sapien
tgctgcctgatagaaggtgtccttc

SEQ ID NO: 846139 - DNA, 25 bp, Homo sapien
cttggcagctagacaggagggataa

SEQ ID NO: 846140 - DNA, 25 bp, Homo sapien
caagagtccacttctggtgacccag

SEQ ID NO: 846141 - DNA, 25 bp, Homo sapien
gatgattacgagctccttgtcaggg

SEQ ID NO: 846142 - DNA, 25 bp, Homo sapien
tgtagtatcatttcaggagccaaag

SEQ ID NO: 846143 - DNA, 25 bp, Homo sapien
tctttggagaagactacctgtgcct

SEQ ID NO: 846144 - DNA, 25 bp, Homo sapien
tatcattgcacggatccagaggtcc

SEQ ID NO: 846145 - DNA, 25 bp, Homo sapien
caatgtcaggccttgttgtcagagc

SEQ ID NO: 846146 - DNA, 25 bp, Homo sapien
gcaccttgtagagggatgctgctaa

SEQ ID NO: 846147 - DNA, 25 bp, Homo sapien
tgttggtgtaaaagtcccagtagaa

SEQ ID NO: 846148 - DNA, 25 bp, Homo sapien
ggtttttggattgtcgtcacatagg

SEQ ID NO: 846149 - DNA, 25 bp, Homo sapien
cataggcaggcagtatacttatagt

SEQ ID NO: 846150 - DNA, 25 bp, Homo sapien
gctggtgggtagttccctccttgga

SEQ ID NO: 846151 - DNA, 25 bp, Homo sapien
gttccctccttggacaacttctgta

SEQ ID NO: 846152 - DNA, 25 bp, Homo sapien
tccctccttggacaacttctgtact

SEQ ID NO: 846153 - DNA, 25 bp, Homo sapien
ttccctccttggacaacttctgtac

SEQ ID NO: 846154 - DNA, 25 bp, Homo sapien
gtttttgatggggattacagcagca

SEQ ID NO: 846155 - DNA, 25 bp, Homo sapien
catcaacgacggctgcaatttgcac

SEQ ID NO: 846156 - DNA, 25 bp, Homo sapien
cagatgcctaattcccgaataacat

SEQ ID NO: 846157 - DNA, 25 bp, Homo sapien
taattcccgaataacatcaacgacg

SEQ ID NO: 846158 - DNA, 25 bp, Homo sapien
ttctttagaggaaatcacctgggtg

SEQ ID NO: 846159 - DNA, 25 bp, Homo sapien
atcacctgggtgtggcaaacagaca

SEQ ID NO: 846160 - DNA, 25 bp, Homo sapien
tctttagaggaaatcacctgggtgt

SEQ ID NO: 846161 - DNA, 25 bp, Homo sapien
tgggtgtggcaaacagacagggctt

SEQ ID NO: 846162 - DNA, 25 bp, Homo sapien
agcagattttggagatacaacagaa

SEQ ID NO: 846163 - DNA, 25 bp, Homo sapien
gcagattttggagatacaacagaac

SEQ ID NO: 846164 - DNA, 25 bp, Homo sapien
ccgtgaactttagggccactgcttt

SEQ ID NO: 846165 - DNA, 25 bp, Homo sapien
tctgccactcctgtgccgtgaactt

SEQ ID NO: 846166 - DNA, 25 bp, Homo sapien
cccgtacaatctcctcagtaaaggt

SEQ ID NO: 846167 - DNA, 25 bp, Homo sapien
caatgggcagtgagaacccgtacaa

SEQ ID NO: 846168 - DNA, 25 bp, Homo sapien
agacagggcttgaacagaatctgaa

SEQ ID NO: 846169 - DNA, 25 bp, Homo sapien
agctatgctggtccccagcctcagg

SEQ ID NO: 846170 - DNA, 25 bp, Homo sapien
aattcttcctgagctatgctggtcc

SEQ ID NO: 846171 - DNA, 25 bp, Homo sapien
ggagcagggcaacaagacagggctt

SEQ ID NO: 846172 - DNA, 25 bp, Homo sapien
tgtaaccatgagtgttagcaaaaat

SEQ ID NO: 846173 - DNA, 25 bp, Homo sapien
gttacctccacatatttatacctat

SEQ ID NO: 846174 - DNA, 25 bp, Homo sapien
tcctctggctttacagattcaggga

SEQ ID NO: 846175 - DNA, 25 bp, Homo sapien
ttatacctattgttatttgtaacca

SEQ ID NO: 846176 - DNA, 25 bp, Homo sapien
agtaactctgcaattttcccatctg

SEQ ID NO: 846177 - DNA, 25 bp, Homo sapien
gtgttaagtactatttgtatttctc

SEQ ID NO: 846178 - DNA, 25 bp, Homo sapien
tctactgtcaccatatttcgataaa

SEQ ID NO: 846179 - DNA, 25 bp, Homo sapien
gaggcatttctactgtcaccatatt

SEQ ID NO: 846180 - DNA, 25 bp, Homo sapien
gtcagagccgactttccagtgcagg

SEQ ID NO: 846181 - DNA, 25 bp, Homo sapien
cacgaatgtgtagtaaccggttgtc

SEQ ID NO: 846182 - DNA, 25 bp, Homo sapien
gaagtttatgttaccatccacccag

SEQ ID NO: 846183 - DNA, 25 bp, Homo sapien
gatgacagtgctctccacgaatgtg

SEQ ID NO: 846184 - DNA, 25 bp, Homo sapien
gaagcaattgatgtatcatttccaa

SEQ ID NO: 846185 - DNA, 25 bp, Homo sapien
ttatttcagaattcttagctctaca

SEQ ID NO: 846186 - DNA, 25 bp, Homo sapien
tgatgggcagactcttgataactcc

SEQ ID NO: 846187 - DNA, 25 bp, Homo sapien
taactcccagtattgatgtcatagg

SEQ ID NO: 846188 - DNA, 25 bp, Homo sapien
tgaaggaaataaacacggacagcca

SEQ ID NO: 846189 - DNA, 25 bp, Homo sapien
gaggagtcacaatccccaggttaaa

SEQ ID NO: 846190 - DNA, 25 bp, Homo sapien
cagaagccagggtatcaatccagta

SEQ ID NO: 846191 - DNA, 25 bp, Homo sapien
tctttggtgtctggaggaaaacatc

SEQ ID NO: 846192 - DNA, 25 bp, Homo sapien
gttcagtgtcaccttttcttctccc

SEQ ID NO: 846193 - DNA, 25 bp, Homo sapien
tcaccttttcttctcccttgggctg

SEQ ID NO: 846194 - DNA, 25 bp, Homo sapien
tcttctcccttgggctgcccctttc

SEQ ID NO: 846195 - DNA, 25 bp, Homo sapien
tctcccttgggctgcccctttcttg

SEQ ID NO: 846196 - DNA, 25 bp, Homo sapien
aatgagccactgatatatttgcagc

SEQ ID NO: 846197 - DNA, 25 bp, Homo sapien
tccaaatccacctccactcaagctt

SEQ ID NO: 846198 - DNA, 25 bp, Homo sapien
cactgatatatttgcagccaccggg

SEQ ID NO: 846199 - DNA, 25 bp, Homo sapien
tcaagctttcaatctgtgcctgggc

SEQ ID NO: 846200 - DNA, 25 bp, Homo sapien
ctttgtagaagtgaccgaatgactt

SEQ ID NO: 846201 - DNA, 25 bp, Homo sapien
tagtatgagctccagggttacttgg

SEQ ID NO: 846202 - DNA, 25 bp, Homo sapien
aacaggaaaagtggccctcaatatc

SEQ ID NO: 846203 - DNA, 25 bp, Homo sapien
tggtttttagtatgagctccagggt

SEQ ID NO: 846204 - DNA, 25 bp, Homo sapien
taatgtcttgggcaggttccaaatg

SEQ ID NO: 846205 - DNA, 25 bp, Homo sapien
gactcccaaggagcataggtgtcct

SEQ ID NO: 846206 - DNA, 25 bp, Homo sapien
catgccaaatctttgagtgactccc

SEQ ID NO: 846207 - DNA, 25 bp, Homo sapien
tcccatccaattgtaatgtcttggg

SEQ ID NO: 846208 - DNA, 25 bp, Homo sapien
gtttgtaataaatgatatctcccca

SEQ ID NO: 846209 - DNA, 25 bp, Homo sapien
tagttctcttaattgaggacagtag

SEQ ID NO: 846210 - DNA, 25 bp, Homo sapien
caggttctgcatctcctgtaagaga

SEQ ID NO: 846211 - DNA, 25 bp, Homo sapien
aatttctggcacacaatcgttgact

SEQ ID NO: 846212 - DNA, 25 bp, Homo sapien
cagtgatgcactctattccggagac

SEQ ID NO: 846213 - DNA, 25 bp, Homo sapien
catcaacataatgcggtcaccagtg

SEQ ID NO: 846214 - DNA, 25 bp, Homo sapien
tagatggccgtgatgaagccactcc

SEQ ID NO: 846215 - DNA, 25 bp, Homo sapien
tctgtagcaagagcctggaaaagct

SEQ ID NO: 846216 - DNA, 25 bp, Homo sapien
aaagaaatagagcaattgcattgaa

SEQ ID NO: 846217 - DNA, 25 bp, Homo sapien
caaagatgttggacgtggaaagaaa

SEQ ID NO: 846218 - DNA, 25 bp, Homo sapien
cagggttgcccaagatcagttgtac

SEQ ID NO: 846219 - DNA, 25 bp, Homo sapien
tgatcagaggaacgaagatccccat

SEQ ID NO: 846220 - DNA, 25 bp, Homo sapien
agagtctgcccttttaggtaaagag

SEQ ID NO: 846221 - DNA, 25 bp, Homo sapien
atcactttcaacatcccgcagggct

SEQ ID NO: 846222 - DNA, 25 bp, Homo sapien
caagccgggctttgcatttggttac

SEQ ID NO: 846223 - DNA, 25 bp, Homo sapien
ccagcagagtcgattattgtcttca

SEQ ID NO: 846224 - DNA, 25 bp, Homo sapien
ggttacagacttttgtccagcagag

SEQ ID NO: 846225 - DNA, 25 bp, Homo sapien
gatgactgaactactggatccatgg

SEQ ID NO: 846226 - DNA, 25 bp, Homo sapien
gactgaactactggatccatggcca

SEQ ID NO: 846227 - DNA, 25 bp, Homo sapien
ttggatgactgaactactggatcca

SEQ ID NO: 846228 - DNA, 25 bp, Homo sapien
tgactgaactactggatccatggcc

SEQ ID NO: 846229 - DNA, 25 bp, Homo sapien
tagatgtaatgggacccttctctgt

SEQ ID NO: 846230 - DNA, 25 bp, Homo sapien
tctgatgggaatctctgaggaagct

SEQ ID NO: 846231 - DNA, 25 bp, Homo sapien
cctaaatggctcagtaagaccgaga

SEQ ID NO: 846232 - DNA, 25 bp, Homo sapien
gagttatctgctccccacggtgaag

SEQ ID NO: 846233 - DNA, 25 bp, Homo sapien
tgaagtcatcagtatcctccaccat

SEQ ID NO: 846234 - DNA, 25 bp, Homo sapien
gttgaagtcatcagtatcctccacc

SEQ ID NO: 846235 - DNA, 25 bp, Homo sapien
ttacgttgaagtcatcagtatcctc

SEQ ID NO: 846236 - DNA, 25 bp, Homo sapien
catattacgttgaagtcatcagtat

SEQ ID NO: 846237 - DNA, 25 bp, Homo sapien
tctcaggccactcaagtattttcat

SEQ ID NO: 846238 - DNA, 25 bp, Homo sapien
ctcaggccactcaagtattttcatt

SEQ ID NO: 846239 - DNA, 25 bp, Homo sapien
tcaggccactcaagtattttcattt

SEQ ID NO: 846240 - DNA, 25 bp, Homo sapien
ggaattatgcctgcgggaatttccg

SEQ ID NO: 846241 - DNA, 25 bp, Homo sapien
agagaatacgttgtctagttctgtc

SEQ ID NO: 846242 - DNA, 25 bp, Homo sapien
tagttctgtccatggaattatgcct

SEQ ID NO: 846243 - DNA, 25 bp, Homo sapien
cctgcgggaatttccgtgatgttct

SEQ ID NO: 846244 - DNA, 25 bp, Homo sapien
ttattgaaggtgaaacttctacagt

SEQ ID NO: 846245 - DNA, 25 bp, Homo sapien
tattgaaggtgaaacttctacagtg

SEQ ID NO: 846246 - DNA, 25 bp, Homo sapien
tttattgaaggtgaaacttctacag

SEQ ID NO: 846247 - DNA, 25 bp, Homo sapien
ttttattgaaggtgaaacttctaca

SEQ ID NO: 846248 - DNA, 25 bp, Homo sapien
tgttttgcttgatttagacatgagc

SEQ ID NO: 846249 - DNA, 25 bp, Homo sapien
gagctctgcaactgtaagcaatgag

SEQ ID NO: 846250 - DNA, 25 bp, Homo sapien
ggcaaagacctggttatctgttata

SEQ ID NO: 846251 - DNA, 25 bp, Homo sapien
ccagtccgttggctgcttgcactta

SEQ ID NO: 846252 - DNA, 25 bp, Homo sapien
ttggtcattcctgagcatgggacga

SEQ ID NO: 846253 - DNA, 25 bp, Homo sapien
ccttggtcattcctgagcatgggac

SEQ ID NO: 846254 - DNA, 25 bp, Homo sapien
tggtcattcctgagcatgggacgag

SEQ ID NO: 846255 - DNA, 25 bp, Homo sapien
cttggtcattcctgagcatgggacg

SEQ ID NO: 846256 - DNA, 25 bp, Homo sapien
cagcaggagctccttttcccggaac

SEQ ID NO: 846257 - DNA, 25 bp, Homo sapien
gcagcaggagctccttttcccggaa

SEQ ID NO: 846258 - DNA, 25 bp, Homo sapien
ctgcaggctccggaagagcagtggc

SEQ ID NO: 846259 - DNA, 25 bp, Homo sapien
aggctccggaagagcagtggcagca

SEQ ID NO: 846260 - DNA, 25 bp, Homo sapien
gcacgtcatagaagagctccacggt

SEQ ID NO: 846261 - DNA, 25 bp, Homo sapien
acgtcatagaagagctccacggtgc

SEQ ID NO: 846262 - DNA, 25 bp, Homo sapien
gacagcacgtcatagaagagctcca

SEQ ID NO: 846263 - DNA, 25 bp, Homo sapien
gggacagcacgtcatagaagagctc

SEQ ID NO: 846264 - DNA, 25 bp, Homo sapien
cggcgccaggagttacacgagacct

SEQ ID NO: 846265 - DNA, 25 bp, Homo sapien
gttacacgagacctctgtcccggag

SEQ ID NO: 846266 - DNA, 25 bp, Homo sapien
caggagttacacgagacctctgtcc

SEQ ID NO: 846267 - DNA, 25 bp, Homo sapien
ttgggcggcgccaggagttacacga

SEQ ID NO: 846268 - DNA, 25 bp, Homo sapien
ttggagccagcgactctattccgtt

SEQ ID NO: 846269 - DNA, 25 bp, Homo sapien
tccctgaatgtttggagccgcccct

SEQ ID NO: 846270 - DNA, 25 bp, Homo sapien
caaaactgccatcgttgggctaaga

SEQ ID NO: 846271 - DNA, 25 bp, Homo sapien
actgcagtcgggatataaaggctcg

SEQ ID NO: 846272 - DNA, 25 bp, Homo sapien
acgattgccagtgtgcaagatggaa

SEQ ID NO: 846273 - DNA, 25 bp, Homo sapien
aagggaggcgctaagtgcagagcag

SEQ ID NO: 846274 - DNA, 25 bp, Homo sapien
ctgcgggcagaggtcaagaacgatt

SEQ ID NO: 846275 - DNA, 25 bp, Homo sapien
tggaaaagtgaaagagccgagggaa

SEQ ID NO: 846276 - DNA, 25 bp, Homo sapien
cagatattctgataccggcacagga

SEQ ID NO: 846277 - DNA, 25 bp, Homo sapien
ctttcatgatccctgttatgaggct

SEQ ID NO: 846278 - DNA, 25 bp, Homo sapien
tcatgatccctgttatgaggctggg

SEQ ID NO: 846279 - DNA, 25 bp, Homo sapien
gttgatgttccagatattctgatac

SEQ ID NO: 846280 - DNA, 25 bp, Homo sapien
cgacgtgggttttgggcagagggca

SEQ ID NO: 846281 - DNA, 25 bp, Homo sapien
gctctcttgggccactgagatcacc

SEQ ID NO: 846282 - DNA, 25 bp, Homo sapien
agtgccaatataaggacccgctggg

SEQ ID NO: 846283 - DNA, 25 bp, Homo sapien
ggctgccagtgccaatataaggacc

SEQ ID NO: 846284 - DNA, 25 bp, Homo sapien
tctcaggagctttaagtcatttgcc

SEQ ID NO: 846285 - DNA, 25 bp, Homo sapien
gtcatttgccatgtatagtcctttg

SEQ ID NO: 846286 - DNA, 25 bp, Homo sapien
gcatcacagacaagaaatccttggg

SEQ ID NO: 846287 - DNA, 25 bp, Homo sapien
gatgggaatctggagatggtgtctc

SEQ ID NO: 846288 - DNA, 25 bp, Homo sapien
gctcaaggctgatcctgaggtttcc

SEQ ID NO: 846289 - DNA, 25 bp, Homo sapien
tcccatgacctatttgcctgctctt

SEQ ID NO: 846290 - DNA, 25 bp, Homo sapien
ctggtggaggactagctcttccttg

SEQ ID NO: 846291 - DNA, 25 bp, Homo sapien
aatccctcaatctccgacttctgtg

SEQ ID NO: 846292 - DNA, 25 bp, Homo sapien
ctctggatgctccaagttcacggcg

SEQ ID NO: 846293 - DNA, 25 bp, Homo sapien
agttcacggcggtgaggaaacgcat

SEQ ID NO: 846294 - DNA, 25 bp, Homo sapien
atctctggatgctccaagttcacgg

SEQ ID NO: 846295 - DNA, 25 bp, Homo sapien
agacgcgcatccacagctcccggga

SEQ ID NO: 846296 - DNA, 25 bp, Homo sapien
gaaagtcatccaaggtcctcccaga

SEQ ID NO: 846297 - DNA, 25 bp, Homo sapien
atcatgaccctgaaaacgtgcctgg

SEQ ID NO: 846298 - DNA, 25 bp, Homo sapien
tcatgaccctgaaaacgtgcctggg

SEQ ID NO: 846299 - DNA, 25 bp, Homo sapien
ggtcctcccagaggattcccagagc

SEQ ID NO: 846300 - DNA, 25 bp, Homo sapien
gatgctctgcggctcggtgatgtct

SEQ ID NO: 846301 - DNA, 25 bp, Homo sapien
ccaggatgctctgcggctcggtgat

SEQ ID NO: 846302 - DNA, 25 bp, Homo sapien
cgccaggatgctctgcggctcggtg

SEQ ID NO: 846303 - DNA, 25 bp, Homo sapien
tctgcggctcggtgatgtcttcatt

SEQ ID NO: 846304 - DNA, 25 bp, Homo sapien
ccaaacgccaactgttctcagattc

SEQ ID NO: 846305 - DNA, 25 bp, Homo sapien
cccaaacgccaactgttctcagatt

SEQ ID NO: 846306 - DNA, 25 bp, Homo sapien
caaacgccaactgttctcagattct

SEQ ID NO: 846307 - DNA, 25 bp, Homo sapien
tagtttgtgccctgaatcacagaca

SEQ ID NO: 846308 - DNA, 25 bp, Homo sapien
tccttttgaggatccttagttccaa

SEQ ID NO: 846309 - DNA, 25 bp, Homo sapien
catggctcactggtcaatgttttga

SEQ ID NO: 846310 - DNA, 25 bp, Homo sapien
ggctcctatataaccctggcattag

SEQ ID NO: 846311 - DNA, 25 bp, Homo sapien
caagagctaggctgtaattccagtg

SEQ ID NO: 846312 - DNA, 25 bp, Homo sapien
tacagagcatgttggtagcagagcc

SEQ ID NO: 846313 - DNA, 25 bp, Homo sapien
gatggttcttaactttggctgccca

SEQ ID NO: 846314 - DNA, 25 bp, Homo sapien
tctctagaattcaagtccagggctc

SEQ ID NO: 846315 - DNA, 25 bp, Homo sapien
ccacccacaagtggagatctgtcct

SEQ ID NO: 846316 - DNA, 25 bp, Homo sapien
cacaagtggagatctgtccttgcca

SEQ ID NO: 846317 - DNA, 25 bp, Homo sapien
gatctgtccttgccaagaggaacta

SEQ ID NO: 846318 - DNA, 25 bp, Homo sapien
ggagatctgtccttgccaagaggaa

SEQ ID NO: 846319 - DNA, 25 bp, Homo sapien
ttggcgttgcgatcttttccagaag

SEQ ID NO: 846320 - DNA, 25 bp, Homo sapien
ttcttcacctttggcgttgcgatct

SEQ ID NO: 846321 - DNA, 25 bp, Homo sapien
tcagtggtctccttgagctggttct

SEQ ID NO: 846322 - DNA, 25 bp, Homo sapien
agtggtctccttgagctggttcttc

SEQ ID NO: 846323 - DNA, 25 bp, Homo sapien
aagcaaagaggtctaagaggctctg

SEQ ID NO: 846324 - DNA, 25 bp, Homo sapien
cagtacttttctgagttcacagaag

SEQ ID NO: 846325 - DNA, 25 bp, Homo sapien
tgaaacctttgagtcagtacttttc

SEQ ID NO: 846326 - DNA, 25 bp, Homo sapien
cagttacaatgcaaggaggaaggca

SEQ ID NO: 846327 - DNA, 25 bp, Homo sapien
agccaaataacatgtgggtttggcc

SEQ ID NO: 846328 - DNA, 25 bp, Homo sapien
caaataacatgtgggtttggccatc

SEQ ID NO: 846329 - DNA, 25 bp, Homo sapien
ccatccggtcagagccaaataacat

SEQ ID NO: 846330 - DNA, 25 bp, Homo sapien
ccacggtgatgggcagcccaaaggc

SEQ ID NO: 846331 - DNA, 25 bp, Homo sapien
tgagcccctccttctggtcaactga

SEQ ID NO: 846332 - DNA, 25 bp, Homo sapien
cagcaggagttggtcccacaaggtc

SEQ ID NO: 846333 - DNA, 25 bp, Homo sapien
caaaggcagctcagggttgaatctt

SEQ ID NO: 846334 - DNA, 25 bp, Homo sapien
tgaacagcactgactgcataacgct

SEQ ID NO: 846335 - DNA, 25 bp, Homo sapien
ggctggaggtatagggcccatccac

SEQ ID NO: 846336 - DNA, 25 bp, Homo sapien
gtctggcattcacggctggaggtat

SEQ ID NO: 846337 - DNA, 25 bp, Homo sapien
aggtatagggcccatccacttctct

SEQ ID NO: 846338 - DNA, 25 bp, Homo sapien
cattcacggctggaggtatagggcc

SEQ ID NO: 846339 - DNA, 25 bp, Homo sapien
gagccaagggttaagcagatggcct

SEQ ID NO: 846340 - DNA, 25 bp, Homo sapien
ctatcagatagagaaatccgagtcc

SEQ ID NO: 846341 - DNA, 25 bp, Homo sapien
aaatccgagtcccagtgccttatgg

SEQ ID NO: 846342 - DNA, 25 bp, Homo sapien
gatggcctgctttttttatacgaag

SEQ ID NO: 846343 - DNA, 25 bp, Homo sapien
gtggacgtcttcctggcatccttgg

SEQ ID NO: 846344 - DNA, 25 bp, Homo sapien
tgtgaggcatagaagtaaaggttgc

SEQ ID NO: 846345 - DNA, 25 bp, Homo sapien
taaaggttgccacatggctaatggt

SEQ ID NO: 846346 - DNA, 25 bp, Homo sapien
aggcacttgtgaggcatagaagtaa

SEQ ID NO: 846347 - DNA, 25 bp, Homo sapien
acccctagagtaggcaggatgtgac

SEQ ID NO: 846348 - DNA, 25 bp, Homo sapien
ttcacctacccctagagtaggcagg

SEQ ID NO: 846349 - DNA, 25 bp, Homo sapien
catggctggtctggctggaaatact

SEQ ID NO: 846350 - DNA, 25 bp, Homo sapien
tgaccccaggaatgagaatatacca

SEQ ID NO: 846351 - DNA, 25 bp, Homo sapien
agaacgggggactattctcacttct

SEQ ID NO: 846352 - DNA, 25 bp, Homo sapien
ctcacttcttccaccgcacaagctg

SEQ ID NO: 846353 - DNA, 25 bp, Homo sapien
tgtgtgagagaacgggggactattc

SEQ ID NO: 846354 - DNA, 25 bp, Homo sapien
tcacttcttccaccgcacaagctgc

SEQ ID NO: 846355 - DNA, 25 bp, Homo sapien
tcctccgggctatgtaaggctccgt

SEQ ID NO: 846356 - DNA, 25 bp, Homo sapien
gattagttgcaaagtccatctggct

SEQ ID NO: 846357 - DNA, 25 bp, Homo sapien
tgcacaatgggcacagctagaggca

SEQ ID NO: 846358 - DNA, 25 bp, Homo sapien
aatggactatgggaagagccagacc

SEQ ID NO: 846359 - DNA, 25 bp, Homo sapien
gccattacttcacagataagttggg

SEQ ID NO: 846360 - DNA, 25 bp, Homo sapien
gataagttgggtaaagatgatttta

SEQ ID NO: 846361 - DNA, 25 bp, Homo sapien
aaaaggagtacttaatttggagatg

SEQ ID NO: 846362 - DNA, 25 bp, Homo sapien
ggagatgttcttttgccattacttc

SEQ ID NO: 846363 - DNA, 25 bp, Homo sapien
tgctctgggcagcttagttttgtct

SEQ ID NO: 846364 - DNA, 25 bp, Homo sapien
tattcatcaggacatattgagatca

SEQ ID NO: 846365 - DNA, 25 bp, Homo sapien
tcataaaactggttccactcaccct

SEQ ID NO: 846366 - DNA, 25 bp, Homo sapien
catatagtgctgagacaagcatctt

SEQ ID NO: 846367 - DNA, 25 bp, Homo sapien
ttattattttgtgtatcagaataca

SEQ ID NO: 846368 - DNA, 25 bp, Homo sapien
ttttgatgtattttatctcagaata

SEQ ID NO: 846369 - DNA, 25 bp, Homo sapien
tttattattttgtgtatcagaatac

SEQ ID NO: 846370 - DNA, 25 bp, Homo sapien
atgtattttatctcagaataatgtc

SEQ ID NO: 846371 - DNA, 25 bp, Homo sapien
aaaacattatcccacttaagcctgg

SEQ ID NO: 846372 - DNA, 25 bp, Homo sapien
acagttgctttgagaggctttcccc

SEQ ID NO: 846373 - DNA, 25 bp, Homo sapien
cctccagagaagattaaagtcagcc

SEQ ID NO: 846374 - DNA, 25 bp, Homo sapien
catacagctagttgttaaccttgga

SEQ ID NO: 846375 - DNA, 25 bp, Homo sapien
ggtggtggtcatcagcatacatgtg

SEQ ID NO: 846376 - DNA, 25 bp, Homo sapien
gatcagattagtgactgccaagggt

SEQ ID NO: 846377 - DNA, 25 bp, Homo sapien
cctatagttatgcaagaggttacca

SEQ ID NO: 846378 - DNA, 25 bp, Homo sapien
caagtgtccttcaacaggcgaatgt

SEQ ID NO: 846379 - DNA, 25 bp, Homo sapien
caaaggagtctagttagaaagtagg

SEQ ID NO: 846380 - DNA, 25 bp, Homo sapien
gagctatcactacccacctatcaga

SEQ ID NO: 846381 - DNA, 25 bp, Homo sapien
tactgacgaccatgtacagatggca

SEQ ID NO: 846382 - DNA, 25 bp, Homo sapien
tatcacctttcactccgtatcattt

SEQ ID NO: 846383 - DNA, 25 bp, Homo sapien
gaatcaattgattggacccacatac

SEQ ID NO: 846384 - DNA, 25 bp, Homo sapien
tgtgtagaatcaattgattggaccc

SEQ ID NO: 846385 - DNA, 25 bp, Homo sapien
taacaatcatttgggctgcctgatt

SEQ ID NO: 846386 - DNA, 25 bp, Homo sapien
gacccacatacacgatctcatttga

SEQ ID NO: 846387 - DNA, 25 bp, Homo sapien
ttgccggaaggagagtacgatagac

SEQ ID NO: 846388 - DNA, 25 bp, Homo sapien
gacaagaactggatcccaactggag

SEQ ID NO: 846389 - DNA, 25 bp, Homo sapien
aggctagactggtggctggctgtgc

SEQ ID NO: 846390 - DNA, 25 bp, Homo sapien
tttgtagcttaagtctcttggttgc

SEQ ID NO: 846391 - DNA, 25 bp, Homo sapien
tagcaaggaattgcagattccctcc

SEQ ID NO: 846392 - DNA, 25 bp, Homo sapien
aaacagcctgtcagaagttgccagc

SEQ ID NO: 846393 - DNA, 25 bp, Homo sapien
aggtagcccagtggctgggaggcgg

SEQ ID NO: 846394 - DNA, 25 bp, Homo sapien
cagaagttgccagcgctctgtgtag

SEQ ID NO: 846395 - DNA, 25 bp, Homo sapien
gctgatcctaacttgttaaactcag

SEQ ID NO: 846396 - DNA, 25 bp, Homo sapien
gaaacaattgtacaggcaaaggccc

SEQ ID NO: 846397 - DNA, 25 bp, Homo sapien
tggccggaggccctgataactcctg

SEQ ID NO: 846398 - DNA, 25 bp, Homo sapien
tctaccctctgctgatcctaacttg

SEQ ID NO: 846399 - DNA, 25 bp, Homo sapien
tcctttcctccggtgttagcccatg

SEQ ID NO: 846400 - DNA, 25 bp, Homo sapien
tgcacacaggcgcaccaaagccaca

SEQ ID NO: 846401 - DNA, 25 bp, Homo sapien
cacaggcgcaccaaagccacaggga

SEQ ID NO: 846402 - DNA, 25 bp, Homo sapien
tttcctccggtgttagcccatgctc

SEQ ID NO: 846403 - DNA, 25 bp, Homo sapien
tgtgtcagataccaaagtaaccata

SEQ ID NO: 846404 - DNA, 25 bp, Homo sapien
tgtagagtcccctccagttccgaaa

SEQ ID NO: 846405 - DNA, 25 bp, Homo sapien
agtgtgtggaatagccaggaaacca

SEQ ID NO: 846406 - DNA, 25 bp, Homo sapien
ggaaaccagcccaggagctttgact

SEQ ID NO: 846407 - DNA, 25 bp, Homo sapien
cacagctattgtgtctacactagca

SEQ ID NO: 846408 - DNA, 25 bp, Homo sapien
gctattgtgtctacactagcaattg

SEQ ID NO: 846409 - DNA, 25 bp, Homo sapien
gacacacagctattgtgtctacact

SEQ ID NO: 846410 - DNA, 25 bp, Homo sapien
tgtctacactagcaattggtgtcat

SEQ ID NO: 846411 - DNA, 25 bp, Homo sapien
gaagaagccacccaatgtgagaaag

SEQ ID NO: 846412 - DNA, 25 bp, Homo sapien
gtctttatgcccagcaaagccagcc

SEQ ID NO: 846413 - DNA, 25 bp, Homo sapien
ccattccagaaaccggaccaggaga

SEQ ID NO: 846414 - DNA, 25 bp, Homo sapien
taagcaacgggggtgatgtccgtct

SEQ ID NO: 846415 - DNA, 25 bp, Homo sapien
cctgggctctcagtctgcattgatt

SEQ ID NO: 846416 - DNA, 25 bp, Homo sapien
tgggctctcagtctgcattgattgg

SEQ ID NO: 846417 - DNA, 25 bp, Homo sapien
gggctctcagtctgcattgattgga

SEQ ID NO: 846418 - DNA, 25 bp, Homo sapien
gccctgggctctcagtctgcattga

SEQ ID NO: 846419 - DNA, 25 bp, Homo sapien
tcctggacccctctggatggctagg

SEQ ID NO: 846420 - DNA, 25 bp, Homo sapien
tcttcatagactggcacttcaaagg

SEQ ID NO: 846421 - DNA, 25 bp, Homo sapien
tctgttccagtttggctctcctgga

SEQ ID NO: 846422 - DNA, 25 bp, Homo sapien
tgggattctagtcccaccacggcct

SEQ ID NO: 846423 - DNA, 25 bp, Homo sapien
tccccgaagccgaaggttgattgga

SEQ ID NO: 846424 - DNA, 25 bp, Homo sapien
catcagggtgaccaaagcagacatc

SEQ ID NO: 846425 - DNA, 25 bp, Homo sapien
agtcagaggctctaatgtggggact

SEQ ID NO: 846426 - DNA, 25 bp, Homo sapien
tggacacagcccgtggtccccgaag

SEQ ID NO: 846427 - DNA, 25 bp, Homo sapien
agcaatagccgccactcagaggtta

SEQ ID NO: 846428 - DNA, 25 bp, Homo sapien
ttctaacagctcgaacagcacctgg

SEQ ID NO: 846429 - DNA, 25 bp, Homo sapien
tagtaggcgctggaaaatgttagtc

SEQ ID NO: 846430 - DNA, 25 bp, Homo sapien
gaagggcttaccgtggcctgactct

SEQ ID NO: 846431 - DNA, 25 bp, Homo sapien
gactgactttgctcgtccaggaggc

SEQ ID NO: 846432 - DNA, 25 bp, Homo sapien
atctcaggaatcaggaccggcggct

SEQ ID NO: 846433 - DNA, 25 bp, Homo sapien
ttagagactcttcgcaagtgacccc

SEQ ID NO: 846434 - DNA, 25 bp, Homo sapien
ggaaacctggtgctcaatattggga

SEQ ID NO: 846435 - DNA, 25 bp, Homo sapien
ctcagacgcggacgcacactgcgcc

SEQ ID NO: 846436 - DNA, 25 bp, Homo sapien
ccgcttttcccgggctctccgctgc

SEQ ID NO: 846437 - DNA, 25 bp, Homo sapien
ttttcccgggctctccgctgcgcac

SEQ ID NO: 846438 - DNA, 25 bp, Homo sapien
ctcccctcagacgcggacgcacact

SEQ ID NO: 846439 - DNA, 25 bp, Homo sapien
tgtgctggaaggtggaccaagaccc

SEQ ID NO: 846440 - DNA, 25 bp, Homo sapien
aggtggaccaagaccccgcgctcgg

SEQ ID NO: 846441 - DNA, 25 bp, Homo sapien
gaaggtggaccaagaccccgcgctc

SEQ ID NO: 846442 - DNA, 25 bp, Homo sapien
tgctggaaggtggaccaagaccccg

SEQ ID NO: 846443 - DNA, 25 bp, Homo sapien
aagagaacccaagagcgggcaggac

SEQ ID NO: 846444 - DNA, 25 bp, Homo sapien
tagtttccctcataagggagccaga

SEQ ID NO: 846445 - DNA, 25 bp, Homo sapien
ttttcccacgagagacaaggccaag

SEQ ID NO: 846446 - DNA, 25 bp, Homo sapien
ggactgcaaagacctcccctttaga

SEQ ID NO: 846447 - DNA, 25 bp, Homo sapien
cttccattagtttaccagtagtatt

SEQ ID NO: 846448 - DNA, 25 bp, Homo sapien
gtagtattcgctccttaaatcgttc

SEQ ID NO: 846449 - DNA, 25 bp, Homo sapien
tagtttaccagtagtattcgctcct

SEQ ID NO: 846450 - DNA, 25 bp, Homo sapien
taccagtagtattcgctccttaaat

SEQ ID NO: 846451 - DNA, 25 bp, Homo sapien
tatgatcccattacagagcagcaca

SEQ ID NO: 846452 - DNA, 25 bp, Homo sapien
agcaccactcggttcttttttagag

SEQ ID NO: 846453 - DNA, 25 bp, Homo sapien
ctggatgagctccctcatttccaag

SEQ ID NO: 846454 - DNA, 25 bp, Homo sapien
taacaattcgctcaacaacagctgt

SEQ ID NO: 846455 - DNA, 25 bp, Homo sapien
cagctgtttggctagcaccactcgg

SEQ ID NO: 846456 - DNA, 25 bp, Homo sapien
tctggctgaaactgcccactttggc

SEQ ID NO: 846457 - DNA, 25 bp, Homo sapien
catcaaaagcttggggacccctctt

SEQ ID NO: 846458 - DNA, 25 bp, Homo sapien
gcatcaaaagcttggggacccctct

SEQ ID NO: 846459 - DNA, 25 bp, Homo sapien
aggcatcaaaagcttggggacccct

SEQ ID NO: 846460 - DNA, 25 bp, Homo sapien
agaaggcatcaaaagcttggggacc

SEQ ID NO: 846461 - DNA, 25 bp, Homo sapien
tgcttggtctccctcagtgcttcac

SEQ ID NO: 846462 - DNA, 25 bp, Homo sapien
cttgcttggtctccctcagtgcttc

SEQ ID NO: 846463 - DNA, 25 bp, Homo sapien
gaaagggtggtgagcaacatatcct

SEQ ID NO: 846464 - DNA, 25 bp, Homo sapien
aagggtggtgagcaacatatcctcc

SEQ ID NO: 846465 - DNA, 25 bp, Homo sapien
gaagtggtccggtccaaatacaaca

SEQ ID NO: 846466 - DNA, 25 bp, Homo sapien
tacaacaaaatctagtctccctcac

SEQ ID NO: 846467 - DNA, 25 bp, Homo sapien
aacaaaatctagtctccctcactct

SEQ ID NO: 846468 - DNA, 25 bp, Homo sapien
ccaacaccccatattactaaagctt

SEQ ID NO: 846469 - DNA, 25 bp, Homo sapien
ctcacacaccggaaaagggagactc

SEQ ID NO: 846470 - DNA, 25 bp, Homo sapien
tgtcgacaggcggagcttcttgtaa

SEQ ID NO: 846471 - DNA, 25 bp, Homo sapien
gactcaagtcgtagtcacagctcaa

SEQ ID NO: 846472 - DNA, 25 bp, Homo sapien
gtaaaggggacaggactcacacacc

SEQ ID NO: 846473 - DNA, 25 bp, Homo sapien
ctttattgtctagggagtgttccac

SEQ ID NO: 846474 - DNA, 25 bp, Homo sapien
gaccatctttattgtctagggagtg

SEQ ID NO: 846475 - DNA, 25 bp, Homo sapien
agacaggaccatctttattgtctag

SEQ ID NO: 846476 - DNA, 25 bp, Homo sapien
caggaccatctttattgtctaggga

SEQ ID NO: 846477 - DNA, 25 bp, Homo sapien
cagctggaagtgtgtttgataaaat

SEQ ID NO: 846478 - DNA, 25 bp, Homo sapien
ggtgactagagtactgtggtccaca

SEQ ID NO: 846479 - DNA, 25 bp, Homo sapien
cattgctcaacaccagtgctaggcc

SEQ ID NO: 846480 - DNA, 25 bp, Homo sapien
catggacgtcatagcccaaaagctt

SEQ ID NO: 846481 - DNA, 25 bp, Homo sapien
tctccagtgaagtgcacattgctca

SEQ ID NO: 846482 - DNA, 25 bp, Homo sapien
taggaatataagaggacacacttcc

SEQ ID NO: 846483 - DNA, 25 bp, Homo sapien
ttatgacacccattgcaactacctg

SEQ ID NO: 846484 - DNA, 25 bp, Homo sapien
tgatcatatctacctaggcgcttct

SEQ ID NO: 846485 - DNA, 25 bp, Homo sapien
taaacgagttgactctctagggaga

SEQ ID NO: 846486 - DNA, 25 bp, Homo sapien
ctagtaacctcatgaagtagatgca

SEQ ID NO: 846487 - DNA, 25 bp, Homo sapien
gagagtaacttgtgaaccctctgaa

SEQ ID NO: 846488 - DNA, 25 bp, Homo sapien
tgaagagtacgtttcctaacatagg

SEQ ID NO: 846489 - DNA, 25 bp, Homo sapien
ggataacccatagcttgtccttaca

SEQ ID NO: 846490 - DNA, 25 bp, Homo sapien
tacctaaagagcataataattgggc

SEQ ID NO: 846491 - DNA, 25 bp, Homo sapien
cactaagttgcgatacatgaagagc

SEQ ID NO: 846492 - DNA, 25 bp, Homo sapien
gcatttggtccatccatcagaaggt

SEQ ID NO: 846493 - DNA, 25 bp, Homo sapien
gaagagcactaccttaagcatttgg

SEQ ID NO: 846494 - DNA, 25 bp, Homo sapien
aggtgtaagatcactactgatcagc

SEQ ID NO: 846495 - DNA, 25 bp, Homo sapien
ttacaggtgtaagatcactactgat

SEQ ID NO: 846496 - DNA, 25 bp, Homo sapien
tttacaggtgtaagatcactactga

SEQ ID NO: 846497 - DNA, 25 bp, Homo sapien
tatttacaggtgtaagatcactact

SEQ ID NO: 846498 - DNA, 25 bp, Homo sapien
ttggaacagcttactcagacccttg

SEQ ID NO: 846499 - DNA, 25 bp, Homo sapien
gtaattacatacacaggtcctgggt

SEQ ID NO: 846500 - DNA, 25 bp, Homo sapien
taaaggctacggtggagggatcact

SEQ ID NO: 846501 - DNA, 25 bp, Homo sapien
cacgctatgaaggaggattctgtac

SEQ ID NO: 846502 - DNA, 25 bp, Homo sapien
cctccacaccatgcgagaggagtgc

SEQ ID NO: 846503 - DNA, 25 bp, Homo sapien
cagtttcccatccacaccatagatg

SEQ ID NO: 846504 - DNA, 25 bp, Homo sapien
tccgtgactcggtgtgcaggtaact

SEQ ID NO: 846505 - DNA, 25 bp, Homo sapien
agtgccacgatgcaggagtccgtga

SEQ ID NO: 846506 - DNA, 25 bp, Homo sapien
tggtttgttctgtaggcttgggcag

SEQ ID NO: 846507 - DNA, 25 bp, Homo sapien
gtttgttctgtaggcttgggcagtt

SEQ ID NO: 846508 - DNA, 25 bp, Homo sapien
ttggtttgttctgtaggcttgggca

SEQ ID NO: 846509 - DNA, 25 bp, Homo sapien
ttgttctgtaggcttgggcagttgg

SEQ ID NO: 846510 - DNA, 25 bp, Homo sapien
gaggtgcccaagggatccaatagca

SEQ ID NO: 846511 - DNA, 25 bp, Homo sapien
ggaggtgcccaagggatccaatagc

SEQ ID NO: 846512 - DNA, 25 bp, Homo sapien
aggtgcccaagggatccaatagcac

SEQ ID NO: 846513 - DNA, 25 bp, Homo sapien
gtgtcttttaatcctcgtcctgcag

SEQ ID NO: 846514 - DNA, 25 bp, Homo sapien
atgtgtcttttaatcctcgtcctgc

SEQ ID NO: 846515 - DNA, 25 bp, Homo sapien
gtcttttaatcctcgtcctgcagtc

SEQ ID NO: 846516 - DNA, 25 bp, Homo sapien
tgtgtcttttaatcctcgtcctgca

SEQ ID NO: 846517 - DNA, 25 bp, Homo sapien
gaacaattggctactggtcattcct

SEQ ID NO: 846518 - DNA, 25 bp, Homo sapien
gaagagaaaattcctgccgtcatgg

SEQ ID NO: 846519 - DNA, 25 bp, Homo sapien
taagtgctaccatgcatcaggcagt

SEQ ID NO: 846520 - DNA, 25 bp, Homo sapien
tccatgcaatgtcgagggagcctag

SEQ ID NO: 846521 - DNA, 25 bp, Homo sapien
catgcacatctatgcggttggagca

SEQ ID NO: 846522 - DNA, 25 bp, Homo sapien
cccattctgtgtaagacagggaaaa

SEQ ID NO: 846523 - DNA, 25 bp, Homo sapien
agctgttgcctccaacctatggctg

SEQ ID NO: 846524 - DNA, 25 bp, Homo sapien
gggatgcctcatacacaccgggcac

SEQ ID NO: 846525 - DNA, 25 bp, Homo sapien
ggcaacttttctttaccggcatcac

SEQ ID NO: 846526 - DNA, 25 bp, Homo sapien
tgggcagtctcatcttcggcaactt

SEQ ID NO: 846527 - DNA, 25 bp, Homo sapien
catatcatgtctgagcgcgtgggca

SEQ ID NO: 846528 - DNA, 25 bp, Homo sapien
tttgaggcaggcatagccgcatatc

SEQ ID NO: 846529 - DNA, 25 bp, Homo sapien
tcaggtctcccagtgtatacggaag

SEQ ID NO: 846530 - DNA, 25 bp, Homo sapien
gagataccgtaggtctgtttccaga

SEQ ID NO: 846531 - DNA, 25 bp, Homo sapien
gacagatgctcaaaggattgccaca

SEQ ID NO: 846532 - DNA, 25 bp, Homo sapien
gctgcacttcccaaactagactcgg

SEQ ID NO: 846533 - DNA, 25 bp, Homo sapien
cagcatgtcggccacgtgcatatca

SEQ ID NO: 846534 - DNA, 25 bp, Homo sapien
gtgcatatcacaagcccgctcagaa

SEQ ID NO: 846535 - DNA, 25 bp, Homo sapien
atgtaccaggaacctcgtttggtgt

SEQ ID NO: 846536 - DNA, 25 bp, Homo sapien
ttggtgttccgcatggcggcagtcc

SEQ ID NO: 846537 - DNA, 25 bp, Homo sapien
ggaggggcagaaccaataggcccaa

SEQ ID NO: 846538 - DNA, 25 bp, Homo sapien
ggcccaagtctgagaatctcgggct

SEQ ID NO: 846539 - DNA, 25 bp, Homo sapien
gcagaaccaataggcccaagtctga

SEQ ID NO: 846540 - DNA, 25 bp, Homo sapien
gtctgagaatctcgggcttcaggag

SEQ ID NO: 846541 - DNA, 25 bp, Homo sapien
cacagagtgctgcagtattcagaca

SEQ ID NO: 846542 - DNA, 25 bp, Homo sapien
cagacatctccttgcaccggtggaa

SEQ ID NO: 846543 - DNA, 25 bp, Homo sapien
gaacaggtagaggtggcggcacaga

SEQ ID NO: 846544 - DNA, 25 bp, Homo sapien
gtgccaggagcataaccttcccgat

SEQ ID NO: 846545 - DNA, 25 bp, Homo sapien
cacttggcgtggatgatggggaggt

SEQ ID NO: 846546 - DNA, 25 bp, Homo sapien
tccacttggcgtggatgatggggag

SEQ ID NO: 846547 - DNA, 25 bp, Homo sapien
ggcttccacttggcgtggatgatgg

SEQ ID NO: 846548 - DNA, 25 bp, Homo sapien
ttggcgtggatgatggggaggtgac

SEQ ID NO: 846549 - DNA, 25 bp, Homo sapien
taaagtgccatctacaaaagctgga

SEQ ID NO: 846550 - DNA, 25 bp, Homo sapien
gaaaccgtgcatcctgaagatcaaa

SEQ ID NO: 846551 - DNA, 25 bp, Homo sapien
ggaaacaagtctgggagattcccac

SEQ ID NO: 846552 - DNA, 25 bp, Homo sapien
tggcaataggtccaaccaaggctgg

SEQ ID NO: 846553 - DNA, 25 bp, Homo sapien
catactatgtcgacccaaaggcagg

SEQ ID NO: 846554 - DNA, 25 bp, Homo sapien
cactcgggctggagcttagcaagaa

SEQ ID NO: 846555 - DNA, 25 bp, Homo sapien
gcatttatttggcacccgatggcaa

SEQ ID NO: 846556 - DNA, 25 bp, Homo sapien
tgagcccaaacgagccaagagtgtc

SEQ ID NO: 846557 - DNA, 25 bp, Homo sapien
ctgggaaagtaactggtgcctctct

SEQ ID NO: 846558 - DNA, 25 bp, Homo sapien
ccatgtccagcgttcttctctagct

SEQ ID NO: 846559 - DNA, 25 bp, Homo sapien
cctggccagcttgttcccaactctg

SEQ ID NO: 846560 - DNA, 25 bp, Homo sapien
ccttctgtctgccagaggctgctaa

SEQ ID NO: 846561 - DNA, 25 bp, Homo sapien
ccagtgtagctccttaagcctctgc

SEQ ID NO: 846562 - DNA, 25 bp, Homo sapien
cccagtgtagctccttaagcctctg

SEQ ID NO: 846563 - DNA, 25 bp, Homo sapien
gtccttcccccagtgtagctcctta

SEQ ID NO: 846564 - DNA, 25 bp, Homo sapien
ttcccccagtgtagctccttaagcc

SEQ ID NO: 846565 - DNA, 25 bp, Homo sapien
caaagggcatatactggtactgggg

SEQ ID NO: 846566 - DNA, 25 bp, Homo sapien
tctcagagggcagtccgtagctggt

SEQ ID NO: 846567 - DNA, 25 bp, Homo sapien
ttgtggcgggggcctgcatccttcc

SEQ ID NO: 846568 - DNA, 25 bp, Homo sapien
tgcatccttccggagcctgtgctgg

SEQ ID NO: 846569 - DNA, 25 bp, Homo sapien
gatcatcttgcgacctaaaagcttg

SEQ ID NO: 846570 - DNA, 25 bp, Homo sapien
gacctaaaagcttgtacatctctgc

SEQ ID NO: 846571 - DNA, 25 bp, Homo sapien
ctgctcattttgacgttggtagatc

SEQ ID NO: 846572 - DNA, 25 bp, Homo sapien
tgttttctacacttgcccaattcct

SEQ ID NO: 846573 - DNA, 25 bp, Homo sapien
cttgatccagggtagcctttatcaa

SEQ ID NO: 846574 - DNA, 25 bp, Homo sapien
ggtagcctttatcaaggaggccagt

SEQ ID NO: 846575 - DNA, 25 bp, Homo sapien
cctttatcaaggaggccagtttttg

SEQ ID NO: 846576 - DNA, 25 bp, Homo sapien
cagggtagcctttatcaaggaggcc

SEQ ID NO: 846577 - DNA, 25 bp, Homo sapien
ttctctacacccattctccaacctg

SEQ ID NO: 846578 - DNA, 25 bp, Homo sapien
tctacacccattctccaacctgtac

SEQ ID NO: 846579 - DNA, 25 bp, Homo sapien
cttctctacacccattctccaacct

SEQ ID NO: 846580 - DNA, 25 bp, Homo sapien
cacccattctccaacctgtactcac

SEQ ID NO: 846581 - DNA, 25 bp, Homo sapien
gacagagagagaatgatcagtgtct

SEQ ID NO: 846582 - DNA, 25 bp, Homo sapien
acagagagagaatgatcagtgtctg

SEQ ID NO: 846583 - DNA, 25 bp, Homo sapien
agagagaatgatcagtgtctgcctt

SEQ ID NO: 846584 - DNA, 25 bp, Homo sapien
ttgctgtccacggtagaactggagc

SEQ ID NO: 846585 - DNA, 25 bp, Homo sapien
tttagaatagtgatcctcatccttg

SEQ ID NO: 846586 - DNA, 25 bp, Homo sapien
gtcctgctccctgtctgagaattgt

SEQ ID NO: 846587 - DNA, 25 bp, Homo sapien
tcttgggcatccctatgtcctgctc

SEQ ID NO: 846588 - DNA, 25 bp, Homo sapien
ggcttttggcactgacgtagtccat

SEQ ID NO: 846589 - DNA, 25 bp, Homo sapien
agaagcaccagaaagatcccgtctt

SEQ ID NO: 846590 - DNA, 25 bp, Homo sapien
tagtccatgctccagctgaccagag

SEQ ID NO: 846591 - DNA, 25 bp, Homo sapien
ccacctgtcccaggcggtggataca

SEQ ID NO: 846592 - DNA, 25 bp, Homo sapien
ccagaaacggctgtgggcaaaggtc

SEQ ID NO: 846593 - DNA, 25 bp, Homo sapien
ctccagaaacggctgtgggcaaagg

SEQ ID NO: 846594 - DNA, 25 bp, Homo sapien
tccagaaacggctgtgggcaaaggt

SEQ ID NO: 846595 - DNA, 25 bp, Homo sapien
ctaggtagaaactccagaaacggct

SEQ ID NO: 846596 - DNA, 25 bp, Homo sapien
cgcaatattcgcttcccataacaca

SEQ ID NO: 846597 - DNA, 25 bp, Homo sapien
cataacacaccctgcttaacattcg

SEQ ID NO: 846598 - DNA, 25 bp, Homo sapien
taacattcgcttccgataacacacc

SEQ ID NO: 846599 - DNA, 25 bp, Homo sapien
ctgatccctctctgcgcaatattcg

SEQ ID NO: 846600 - DNA, 25 bp, Homo sapien
ctagtgggaaggtgacccagaccag

SEQ ID NO: 846601 - DNA, 25 bp, Homo sapien
atctgcgcgtaggaccacttgtagg

SEQ ID NO: 846602 - DNA, 25 bp, Homo sapien
gatgaggactagtgggaaggtgacc

SEQ ID NO: 846603 - DNA, 25 bp, Homo sapien
ctgcatctgcgcgtaggaccacttg

SEQ ID NO: 846604 - DNA, 25 bp, Homo sapien
aagattatgtgcagggtcaaggtga

SEQ ID NO: 846605 - DNA, 25 bp, Homo sapien
aagggagatgaatgtccagaatatg

SEQ ID NO: 846606 - DNA, 25 bp, Homo sapien
ctaaaagcgttgaaagattatgtgc

SEQ ID NO: 846607 - DNA, 25 bp, Homo sapien
cgttgaaagattatgtgcagggtca

SEQ ID NO: 846608 - DNA, 25 bp, Homo sapien
caaccttggccacaaaggctttcat

SEQ ID NO: 846609 - DNA, 25 bp, Homo sapien
tcaggacaaccccacgaagtattgt

SEQ ID NO: 846610 - DNA, 25 bp, Homo sapien
gctttcattgtgaggtattccttca

SEQ ID NO: 846611 - DNA, 25 bp, Homo sapien
aggcccgcagtcagggcgacaacct

SEQ ID NO: 846612 - DNA, 25 bp, Homo sapien
gcacagatgctggcaatgtggacga

SEQ ID NO: 846613 - DNA, 25 bp, Homo sapien
ctcatataccccgcagaacacagac

SEQ ID NO: 846614 - DNA, 25 bp, Homo sapien
cacagatgctggcaatgtggacgaa

SEQ ID NO: 846615 - DNA, 25 bp, Homo sapien
catataccccgcagaacacagacat

SEQ ID NO: 846616 - DNA, 25 bp, Homo sapien
gaggggtggacatttggaggacagg

SEQ ID NO: 846617 - DNA, 25 bp, Homo sapien
ggtgaaagaggggtggacatttgga

SEQ ID NO: 846618 - DNA, 25 bp, Homo sapien
aagaggggtggacatttggaggaca

SEQ ID NO: 846619 - DNA, 25 bp, Homo sapien
caggtgaaagaggggtggacatttg

SEQ ID NO: 846620 - DNA, 25 bp, Homo sapien
aggccgacaccaggaggtcaagctg

SEQ ID NO: 846621 - DNA, 25 bp, Homo sapien
caggccgacaccaggaggtcaagct

SEQ ID NO: 846622 - DNA, 25 bp, Homo sapien
ggctgcaaagcagcatcccacgccc

SEQ ID NO: 846623 - DNA, 25 bp, Homo sapien
ctgcaaagcagcatcccacgcccac

SEQ ID NO: 846624 - DNA, 25 bp, Homo sapien
gggatagggaggaagtgcaacttgc

SEQ ID NO: 846625 - DNA, 25 bp, Homo sapien
accgggatagggaggaagtgcaact

SEQ ID NO: 846626 - DNA, 25 bp, Homo sapien
aggcaaccgggatagggaggaagtg

SEQ ID NO: 846627 - DNA, 25 bp, Homo sapien
gcaaccgggatagggaggaagtgca

SEQ ID NO: 846628 - DNA, 25 bp, Homo sapien
acagcacagcccaccgtcaggatat

SEQ ID NO: 846629 - DNA, 25 bp, Homo sapien
cacagcccaccgtcaggatatcaga

SEQ ID NO: 846630 - DNA, 25 bp, Homo sapien
cagcccaccgtcaggatatcagagt

SEQ ID NO: 846631 - DNA, 25 bp, Homo sapien
agcacagcccaccgtcaggatatca

SEQ ID NO: 846632 - DNA, 25 bp, Homo sapien
taatctgagagatcgctatttgcct

SEQ ID NO: 846633 - DNA, 25 bp, Homo sapien
caagtcattttagttccctggaaga

SEQ ID NO: 846634 - DNA, 25 bp, Homo sapien
gatacgactgctttctccgactaca

SEQ ID NO: 846635 - DNA, 25 bp, Homo sapien
gaatgatctatataatcctgccctg

SEQ ID NO: 846636 - DNA, 25 bp, Homo sapien
attccaattttacgaggaaaatgca

SEQ ID NO: 846637 - DNA, 25 bp, Homo sapien
ttccaattttacgaggaaaatgcaa

SEQ ID NO: 846638 - DNA, 25 bp, Homo sapien
cttctcttctacaggtgacagtcga

SEQ ID NO: 846639 - DNA, 25 bp, Homo sapien
cacagaagtgtggttgggggcagcc

SEQ ID NO: 846640 - DNA, 25 bp, Homo sapien
acactccccactgcttggacctaag

SEQ ID NO: 846641 - DNA, 25 bp, Homo sapien
actccccactgcttggacctaagga

SEQ ID NO: 846642 - DNA, 25 bp, Homo sapien
tccccactgcttggacctaaggagc

SEQ ID NO: 846643 - DNA, 25 bp, Homo sapien
gcactcgaaacacaaaggcgctgaa

SEQ ID NO: 846644 - DNA, 25 bp, Homo sapien
gaatcctctccagtagttccgaaca

SEQ ID NO: 846645 - DNA, 25 bp, Homo sapien
tgaacgtggctgcaaagaatcctct

SEQ ID NO: 846646 - DNA, 25 bp, Homo sapien
ggtgacctcgatgctaaatagcact

SEQ ID NO: 846647 - DNA, 25 bp, Homo sapien
tccttcaggtcaaaggggaaatcca

SEQ ID NO: 846648 - DNA, 25 bp, Homo sapien
caggtcaaaggggaaatccattcgg

SEQ ID NO: 846649 - DNA, 25 bp, Homo sapien
gaaatccattcggaaattggttctg

SEQ ID NO: 846650 - DNA, 25 bp, Homo sapien
tcggaaattggttctgaacagagca

SEQ ID NO: 846651 - DNA, 25 bp, Homo sapien
acacagagcaggtaaccccactgac

SEQ ID NO: 846652 - DNA, 25 bp, Homo sapien
ttgggtcccttccaatctacagcct

SEQ ID NO: 846653 - DNA, 25 bp, Homo sapien
tgggtcccttccaatctacagcctc

SEQ ID NO: 846654 - DNA, 25 bp, Homo sapien
gcttgggtcccttccaatctacagc

SEQ ID NO: 846655 - DNA, 25 bp, Homo sapien
agcttgggtcccttccaatctacag

SEQ ID NO: 846656 - DNA, 25 bp, Homo sapien
gacttggcgatgcagatacacaaat

SEQ ID NO: 846657 - DNA, 25 bp, Homo sapien
tgtgctttcggacaccgagcatgac

SEQ ID NO: 846658 - DNA, 25 bp, Homo sapien
ttcggacaccgagcatgacttggcg

SEQ ID NO: 846659 - DNA, 25 bp, Homo sapien
ctgagggccttgtgctttcggacac

SEQ ID NO: 846660 - DNA, 25 bp, Homo sapien
ctctccagccatgaattgacccatt

SEQ ID NO: 846661 - DNA, 25 bp, Homo sapien
tccagccatgaattgacccattcct

SEQ ID NO: 846662 - DNA, 25 bp, Homo sapien
gccatgaattgacccattcctggtg

SEQ ID NO: 846663 - DNA, 25 bp, Homo sapien
catgaattgacccattcctggtggg

SEQ ID NO: 846664 - DNA, 25 bp, Homo sapien
ggctctcaggatcacccgcgtgttt

SEQ ID NO: 846665 - DNA, 25 bp, Homo sapien
cacccatgtattgttgtcaaacaaa

SEQ ID NO: 846666 - DNA, 25 bp, Homo sapien
catgacgaagaagagaaagatgatg

SEQ ID NO: 846667 - DNA, 25 bp, Homo sapien
atgatgatgacaacgttgacccggg

SEQ ID NO: 846668 - DNA, 25 bp, Homo sapien
ggtatgggcatagtggtggccacga

SEQ ID NO: 846669 - DNA, 25 bp, Homo sapien
tgaagcctccgcagggtatgggcat

SEQ ID NO: 846670 - DNA, 25 bp, Homo sapien
caggcatgaagcctccgcagggtat

SEQ ID NO: 846671 - DNA, 25 bp, Homo sapien
agcacaaacacaggcatgaagcctc

SEQ ID NO: 846672 - DNA, 25 bp, Homo sapien
ctgcatagcccccaggtaggatctt

SEQ ID NO: 846673 - DNA, 25 bp, Homo sapien
aattactgcatagcccccaggtagg

SEQ ID NO: 846674 - DNA, 25 bp, Homo sapien
tagcccccaggtaggatcttgtaga

SEQ ID NO: 846675 - DNA, 25 bp, Homo sapien
caattactgcatagcccccaggtag

SEQ ID NO: 846676 - DNA, 25 bp, Homo sapien
ggaaacggcaccagtcagcgctgct

SEQ ID NO: 846677 - DNA, 25 bp, Homo sapien
aaacggcaccagtcagcgctgctgc

SEQ ID NO: 846678 - DNA, 25 bp, Homo sapien
tgtgggaaacggcaccagtcagcgc

SEQ ID NO: 846679 - DNA, 25 bp, Homo sapien
tgggaaacggcaccagtcagcgctg

SEQ ID NO: 846680 - DNA, 25 bp, Homo sapien
ccaaggtcaggcaagtagggtagct

SEQ ID NO: 846681 - DNA, 25 bp, Homo sapien
caagataacagccaccatcatgggc

SEQ ID NO: 846682 - DNA, 25 bp, Homo sapien
gatgtgagcaatctgacccgttaat

SEQ ID NO: 846683 - DNA, 25 bp, Homo sapien
tagggtagcttcttgacctggatga

SEQ ID NO: 846684 - DNA, 25 bp, Homo sapien
aaacaaacttcacatcacgtaccat

SEQ ID NO: 846685 - DNA, 25 bp, Homo sapien
cacgtaccatgatgtcctcaacaaa

SEQ ID NO: 846686 - DNA, 25 bp, Homo sapien
gagcagggttcgcaactccccatat

SEQ ID NO: 846687 - DNA, 25 bp, Homo sapien
ccccatatgtgtaagaagctgaaac

SEQ ID NO: 846688 - DNA, 25 bp, Homo sapien
caccgagcccagcaggatcattgaa

SEQ ID NO: 846689 - DNA, 25 bp, Homo sapien
aacttccgcgccatctcttgggctg

SEQ ID NO: 846690 - DNA, 25 bp, Homo sapien
atccacaaaggcgaaggactcgggc

SEQ ID NO: 846691 - DNA, 25 bp, Homo sapien
tcgtaaggcagctccgacaacttcc

SEQ ID NO: 846692 - DNA, 25 bp, Homo sapien
ggggacagaggggcagtagtagagg

SEQ ID NO: 846693 - DNA, 25 bp, Homo sapien
ggacagaggggcagtagtagagggg

SEQ ID NO: 846694 - DNA, 25 bp, Homo sapien
gggacagaggggcagtagtagaggg

SEQ ID NO: 846695 - DNA, 25 bp, Homo sapien
tgcaggctctggtgcttccggctgc

SEQ ID NO: 846696 - DNA, 25 bp, Homo sapien
tgcttccggctgctgtttgtggcca

SEQ ID NO: 846697 - DNA, 25 bp, Homo sapien
gctctggtgcttccggctgctgttt

SEQ ID NO: 846698 - DNA, 25 bp, Homo sapien
ttccggctgctgtttgtggccaggc

SEQ ID NO: 846699 - DNA, 25 bp, Homo sapien
ttcttctttgtggggcgagctctgc

SEQ ID NO: 846700 - DNA, 25 bp, Homo sapien
tcttctttgtggggcgagctctgcc

SEQ ID NO: 846701 - DNA, 25 bp, Homo sapien
cttctttgtggggcgagctctgccc

SEQ ID NO: 846702 - DNA, 25 bp, Homo sapien
ttctttgtggggcgagctctgccca

SEQ ID NO: 846703 - DNA, 25 bp, Homo sapien
ggtgacatgttatccactaaatctg

SEQ ID NO: 846704 - DNA, 25 bp, Homo sapien
catgttatccactaaatctgtggaa

SEQ ID NO: 846705 - DNA, 25 bp, Homo sapien
tcaggtgacatgttatccactaaat

SEQ ID NO: 846706 - DNA, 25 bp, Homo sapien
tcttcaggtgacatgttatccacta

SEQ ID NO: 846707 - DNA, 25 bp, Homo sapien
ttcctgctgtattggcatctgtctt

SEQ ID NO: 846708 - DNA, 25 bp, Homo sapien
tgtcttgagtgttatgtggtatcgg

SEQ ID NO: 846709 - DNA, 25 bp, Homo sapien
tattggcatctgtcttacctctgca

SEQ ID NO: 846710 - DNA, 25 bp, Homo sapien
tcttgagtgttatgtggtatcggct

SEQ ID NO: 846711 - DNA, 25 bp, Homo sapien
gggagactggtcaatacagcaggaa

SEQ ID NO: 846712 - DNA, 25 bp, Homo sapien
gctggaagggagactggtcaataca

SEQ ID NO: 846713 - DNA, 25 bp, Homo sapien
gaagggagactggtcaatacagcag

SEQ ID NO: 846714 - DNA, 25 bp, Homo sapien
tggtcaatacagcaggaatcaaaac

SEQ ID NO: 846715 - DNA, 25 bp, Homo sapien
ctggtcacgtaagcgaggtggaggc

SEQ ID NO: 846716 - DNA, 25 bp, Homo sapien
ccccatgctggtcacgtaagcgagg

SEQ ID NO: 846717 - DNA, 25 bp, Homo sapien
gtcacgtaagcgaggtggaggccaa

SEQ ID NO: 846718 - DNA, 25 bp, Homo sapien
ccatgctggtcacgtaagcgaggtg

SEQ ID NO: 846719 - DNA, 25 bp, Homo sapien
tgaagtcgtgttccggaagctggca

SEQ ID NO: 846720 - DNA, 25 bp, Homo sapien
agggcggagctgcaccccagacttg

SEQ ID NO: 846721 - DNA, 25 bp, Homo sapien
ccagacttggtgtgcccctcaatgg

SEQ ID NO: 846722 - DNA, 25 bp, Homo sapien
tgccccggtactctttcgagttgaa

SEQ ID NO: 846723 - DNA, 25 bp, Homo sapien
tcctcgtctgtggatcgcaggctgg

SEQ ID NO: 846724 - DNA, 25 bp, Homo sapien
cctcctcgtctgtggatcgcaggct

SEQ ID NO: 846725 - DNA, 25 bp, Homo sapien
ctggggccctgcaagatgtcggcca

SEQ ID NO: 846726 - DNA, 25 bp, Homo sapien
ggccctgcaagatgtcggccagctc

SEQ ID NO: 846727 - DNA, 25 bp, Homo sapien
gaggccacgacattggcatgacctc

SEQ ID NO: 846728 - DNA, 25 bp, Homo sapien
tgccccacacaagttcaccctcagg

SEQ ID NO: 846729 - DNA, 25 bp, Homo sapien
ttggcatgacctcgccacattcagg

SEQ ID NO: 846730 - DNA, 25 bp, Homo sapien
tccacggtctttatgaggaggtcgt

SEQ ID NO: 846731 - DNA, 25 bp, Homo sapien
taatggagtgcatagccaggcttcc

SEQ ID NO: 846732 - DNA, 25 bp, Homo sapien
tccacccctaggagaggcatctgaa

SEQ ID NO: 846733 - DNA, 25 bp, Homo sapien
ttatgtacacaagggcatgggctca

SEQ ID NO: 846734 - DNA, 25 bp, Homo sapien
gacccagtgacctagctgctctgag

SEQ ID NO: 846735 - DNA, 25 bp, Homo sapien
ccttcctgcccgctctcgtcttgcg

SEQ ID NO: 846736 - DNA, 25 bp, Homo sapien
cccgctctcgtcttgcgcctccggg

SEQ ID NO: 846737 - DNA, 25 bp, Homo sapien
tccgcccgcggtccctctgtccctc

SEQ ID NO: 846738 - DNA, 25 bp, Homo sapien
catcccgctcggctcgcttccttct

SEQ ID NO: 846739 - DNA, 25 bp, Homo sapien
ttcatgcacatacaccgaagatgga

SEQ ID NO: 846740 - DNA, 25 bp, Homo sapien
ccttcccgcggttttatagatgtag

SEQ ID NO: 846741 - DNA, 25 bp, Homo sapien
cctttgcgactggacagtatattcc

SEQ ID NO: 846742 - DNA, 25 bp, Homo sapien
aaatagggtatcagaccctgccacg

SEQ ID NO: 846743 - DNA, 25 bp, Homo sapien
ggccagtcccctgtcagcgttttct

SEQ ID NO: 846744 - DNA, 25 bp, Homo sapien
ctggccagtcccctgtcagcgtttt

SEQ ID NO: 846745 - DNA, 25 bp, Homo sapien
tctctgctcaaacaataggggtgtg

SEQ ID NO: 846746 - DNA, 25 bp, Homo sapien
agtcccctgtcagcgttttctctgc

SEQ ID NO: 846747 - DNA, 25 bp, Homo sapien
aaggcaagagcataatggccacgtg

SEQ ID NO: 846748 - DNA, 25 bp, Homo sapien
tgggaaggcaagagcataatggcca

SEQ ID NO: 846749 - DNA, 25 bp, Homo sapien
gcaagagcataatggccacgtggtc

SEQ ID NO: 846750 - DNA, 25 bp, Homo sapien
cagaagtttcaggtgggaaggcaag

SEQ ID NO: 846751 - DNA, 25 bp, Homo sapien
agttaattgaattatcagccccagt

SEQ ID NO: 846752 - DNA, 25 bp, Homo sapien
gccgtcagatgggaatccctcattc

SEQ ID NO: 846753 - DNA, 25 bp, Homo sapien
ttctctcaactgcaatgcaagaaga

SEQ ID NO: 846754 - DNA, 25 bp, Homo sapien
tgtcagagaaagtagatgccgtcag

SEQ ID NO: 846755 - DNA, 25 bp, Homo sapien
ctgaggtgctgtgtgtgcttgggac

SEQ ID NO: 846756 - DNA, 25 bp, Homo sapien
cctgaggtgctgtgtgtgcttggga

SEQ ID NO: 846757 - DNA, 25 bp, Homo sapien
gaggacaccctgaggtgctgtgtgt

SEQ ID NO: 846758 - DNA, 25 bp, Homo sapien
ggtgaggacaccctgaggtgctgtg

SEQ ID NO: 846759 - DNA, 25 bp, Homo sapien
ctggcatcctgcctggtcgctgctg

SEQ ID NO: 846760 - DNA, 25 bp, Homo sapien
tcgctgctgcttgtggcctggtcat

SEQ ID NO: 846761 - DNA, 25 bp, Homo sapien
tgactcatggttgcccagactctat

SEQ ID NO: 846762 - DNA, 25 bp, Homo sapien
cctgcctggtcgctgctgcttgtgg

SEQ ID NO: 846763 - DNA, 25 bp, Homo sapien
ttcaggtagttagactttgtaggtg

SEQ ID NO: 846764 - DNA, 25 bp, Homo sapien
caggtagttagactttgtaggtgaa

SEQ ID NO: 846765 - DNA, 25 bp, Homo sapien
cagatctccgtccaaacaagtgttt

SEQ ID NO: 846766 - DNA, 25 bp, Homo sapien
tttgtaggtgaaacagatctccgtc

SEQ ID NO: 846767 - DNA, 25 bp, Homo sapien
tctgagactgcgcttggtggagacc

SEQ ID NO: 846768 - DNA, 25 bp, Homo sapien
gaaactggtgtcagatctggttgcc

SEQ ID NO: 846769 - DNA, 25 bp, Homo sapien
gagtcatggcctttcgcccgctagt

SEQ ID NO: 846770 - DNA, 25 bp, Homo sapien
ctagtccagtatgcacccgtaggcg

SEQ ID NO: 846771 - DNA, 25 bp, Homo sapien
gagagcggcgcccagaccatacaag

SEQ ID NO: 846772 - DNA, 25 bp, Homo sapien
accatacaaggagcggcccggagag

SEQ ID NO: 846773 - DNA, 25 bp, Homo sapien
agaccatacaaggagcggcccggag

SEQ ID NO: 846774 - DNA, 25 bp, Homo sapien
gcgcccagaccatacaaggagcggc

SEQ ID NO: 846775 - DNA, 25 bp, Homo sapien
gggtccgcagactctgcgtcccggt

SEQ ID NO: 846776 - DNA, 25 bp, Homo sapien
gcagactctgcgtcccggtccggag

SEQ ID NO: 846777 - DNA, 25 bp, Homo sapien
tctgcgtcccggtccggagcagcct

SEQ ID NO: 846778 - DNA, 25 bp, Homo sapien
cctcggcgccgggtccgcagactct

SEQ ID NO: 846779 - DNA, 25 bp, Homo sapien
tgggtcgccgggttacgcagcgcgg

SEQ ID NO: 846780 - DNA, 25 bp, Homo sapien
gtgggtcgccgggttacgcagcgcg

SEQ ID NO: 846781 - DNA, 25 bp, Homo sapien
ggtgggtcgccgggttacgcagcgc

SEQ ID NO: 846782 - DNA, 25 bp, Homo sapien
cacagggccgaacttcttctgcggg

SEQ ID NO: 846783 - DNA, 25 bp, Homo sapien
acccggcccatctgtgcgcgctggg

SEQ ID NO: 846784 - DNA, 25 bp, Homo sapien
gagccgagaccgaaacggagatcgc

SEQ ID NO: 846785 - DNA, 25 bp, Homo sapien
gctttggggccaccacagggccgaa

SEQ ID NO: 846786 - DNA, 25 bp, Homo sapien
gggcggcgggaaggcacctcccaga

SEQ ID NO: 846787 - DNA, 25 bp, Homo sapien
aatgattcctcgatcgggggagggg

SEQ ID NO: 846788 - DNA, 25 bp, Homo sapien
ctctgcatcgtcgccatccccagca

SEQ ID NO: 846789 - DNA, 25 bp, Homo sapien
gaggcgcagggggaaatgattcctc

SEQ ID NO: 846790 - DNA, 25 bp, Homo sapien
tggtgggggcggtatgggggcctca

SEQ ID NO: 846791 - DNA, 25 bp, Homo sapien
tcagaggtcagagcacctattccat

SEQ ID NO: 846792 - DNA, 25 bp, Homo sapien
tattccatgcctctatccccccacc

SEQ ID NO: 846793 - DNA, 25 bp, Homo sapien
agcacctattccatgcctctatccc

SEQ ID NO: 846794 - DNA, 25 bp, Homo sapien
gtcagaggtcagagcacctattcca

SEQ ID NO: 846795 - DNA, 25 bp, Homo sapien
gtcgatctccaaatcaatactgctc

SEQ ID NO: 846796 - DNA, 25 bp, Homo sapien
tcattcttggtcatgtcatccagca

SEQ ID NO: 846797 - DNA, 25 bp, Homo sapien
ggtcatgtcatccagcagtgaggac

SEQ ID NO: 846798 - DNA, 25 bp, Homo sapien
acagagagtcgatctccaaatcaat

SEQ ID NO: 846799 - DNA, 25 bp, Homo sapien
gtactggacttggaactgaatggag

SEQ ID NO: 846800 - DNA, 25 bp, Homo sapien
tggtgggggcacatatccagatgac

SEQ ID NO: 846801 - DNA, 25 bp, Homo sapien
actggacttggaactgaatggagtg

SEQ ID NO: 846802 - DNA, 25 bp, Homo sapien
tggtactggacttggaactgaatgg

SEQ ID NO: 846803 - DNA, 25 bp, Homo sapien
tgggtgttagccaaagacacaggct

SEQ ID NO: 846804 - DNA, 25 bp, Homo sapien
gacatggagttggacctgaggcttg

SEQ ID NO: 846805 - DNA, 25 bp, Homo sapien
tctgggactggacatggagttggac

SEQ ID NO: 846806 - DNA, 25 bp, Homo sapien
gggctgggtgttagccaaagacaca

SEQ ID NO: 846807 - DNA, 25 bp, Homo sapien
ccacaggagtaaacttaggagtcac

SEQ ID NO: 846808 - DNA, 25 bp, Homo sapien
gtaaacttaggagtcactggagaaa

SEQ ID NO: 846809 - DNA, 25 bp, Homo sapien
ggagtaaacttaggagtcactggag

SEQ ID NO: 846810 - DNA, 25 bp, Homo sapien
agccacaggagtaaacttaggagtc

SEQ ID NO: 846811 - DNA, 25 bp, Homo sapien
cagcagaaagagcttcggggtgccc

SEQ ID NO: 846812 - DNA, 25 bp, Homo sapien
cagaaagagcttcggggtgccccaa

SEQ ID NO: 846813 - DNA, 25 bp, Homo sapien
atttggttgtgacccagatccacct

SEQ ID NO: 846814 - DNA, 25 bp, Homo sapien
gcagaaagagcttcggggtgcccca

SEQ ID NO: 846815 - DNA, 25 bp, Homo sapien
tgggcataggtgaagctgggaggtt

SEQ ID NO: 846816 - DNA, 25 bp, Homo sapien
ctggttttggttctgagccggtggg

SEQ ID NO: 846817 - DNA, 25 bp, Homo sapien
ttctccctctgctgggcataggtga

SEQ ID NO: 846818 - DNA, 25 bp, Homo sapien
gctgcttctcctgcactcggggctt

SEQ ID NO: 846819 - DNA, 25 bp, Homo sapien
aaattggacgatcttatttcctgaa

SEQ ID NO: 846820 - DNA, 25 bp, Homo sapien
tcagggtcatcttcgtcaccagaaa

SEQ ID NO: 846821 - DNA, 25 bp, Homo sapien
tcttcgtcaccagaaattggacgat

SEQ ID NO: 846822 - DNA, 25 bp, Homo sapien
gaaattggacgatcttatttcctga

SEQ ID NO: 846823 - DNA, 25 bp, Homo sapien
cgagtgtaggtagacatcaacacta

SEQ ID NO: 846824 - DNA, 25 bp, Homo sapien
catcaacactatcagtggactctgg

SEQ ID NO: 846825 - DNA, 25 bp, Homo sapien
ggtagacatcaacactatcagtgga

SEQ ID NO: 846826 - DNA, 25 bp, Homo sapien
ctatgctgtgtccgagtgtaggtag

SEQ ID NO: 846827 - DNA, 25 bp, Homo sapien
aagctcactggcccttggcatttct

SEQ ID NO: 846828 - DNA, 25 bp, Homo sapien
gctcactggcccttggcatttcttc

SEQ ID NO: 846829 - DNA, 25 bp, Homo sapien
aaagctcactggcccttggcatttc

SEQ ID NO: 846830 - DNA, 25 bp, Homo sapien
agctcactggcccttggcatttctt

SEQ ID NO: 846831 - DNA, 25 bp, Homo sapien
tcctctctggattcttacgtcctgc

SEQ ID NO: 846832 - DNA, 25 bp, Homo sapien
cctaatttgactccccgagttgact

SEQ ID NO: 846833 - DNA, 25 bp, Homo sapien
gccccgcttgcctctccaagtatag

SEQ ID NO: 846834 - DNA, 25 bp, Homo sapien
tagctctatcattttcctacaggaa

SEQ ID NO: 846835 - DNA, 25 bp, Homo sapien
tcccctcagccctggcttcactgcc

SEQ ID NO: 846836 - DNA, 25 bp, Homo sapien
cctcagccctggcttcactgcccct

SEQ ID NO: 846837 - DNA, 25 bp, Homo sapien
agccctggcttcactgcccctcacc

SEQ ID NO: 846838 - DNA, 25 bp, Homo sapien
cctctcccctcagccctggcttcac

SEQ ID NO: 846839 - DNA, 25 bp, Homo sapien
cataacacctggaacctccaaagcc

SEQ ID NO: 846840 - DNA, 25 bp, Homo sapien
catcactgagtgtgctacctgcaga

SEQ ID NO: 846841 - DNA, 25 bp, Homo sapien
tgcagatgccttcattcccataaca

SEQ ID NO: 846842 - DNA, 25 bp, Homo sapien
tcccataacacctggaacctccaaa

SEQ ID NO: 846843 - DNA, 25 bp, Homo sapien
agaactccgggaagggctgtctgac

SEQ ID NO: 846844 - DNA, 25 bp, Homo sapien
gggtggatgttaaggacagcgctgc

SEQ ID NO: 846845 - DNA, 25 bp, Homo sapien
cctgagaactccgggaagggctgtc

SEQ ID NO: 846846 - DNA, 25 bp, Homo sapien
gatgttaaggacagcgctgccagta

SEQ ID NO: 846847 - DNA, 25 bp, Homo sapien
gcacgcaatggcgtgcacacacgcg

SEQ ID NO: 846848 - DNA, 25 bp, Homo sapien
gcaggaattgcaggttaaacccact

SEQ ID NO: 846849 - DNA, 25 bp, Homo sapien
agagaccctgtccctcgagtgaggg

SEQ ID NO: 846850 - DNA, 25 bp, Homo sapien
gcgtgaggatacaacacaggcagga

SEQ ID NO: 846851 - DNA, 25 bp, Homo sapien
agcctacccggcttcttccgatgag

SEQ ID NO: 846852 - DNA, 25 bp, Homo sapien
cagatgctcaggcttgacccttaaa

SEQ ID NO: 846853 - DNA, 25 bp, Homo sapien
gatgaggcttagctcccagctcgtg

SEQ ID NO: 846854 - DNA, 25 bp, Homo sapien
tcctcacactctagagggctgctgc

SEQ ID NO: 846855 - DNA, 25 bp, Homo sapien
aggatgctccatgtcctgcattagc

SEQ ID NO: 846856 - DNA, 25 bp, Homo sapien
ggatgctccatgtcctgcattagct

SEQ ID NO: 846857 - DNA, 25 bp, Homo sapien
aaggccagagaagacagcagtaaat

SEQ ID NO: 846858 - DNA, 25 bp, Homo sapien
gccagagaagacagcagtaaataga

SEQ ID NO: 846859 - DNA, 25 bp, Homo sapien
ggccagagaagacagcagtaaatag

SEQ ID NO: 846860 - DNA, 25 bp, Homo sapien
ggaaggccagagaagacagcagtaa

SEQ ID NO: 846861 - DNA, 25 bp, Homo sapien
gtgaagcaggcgatgtggaacagct

SEQ ID NO: 846862 - DNA, 25 bp, Homo sapien
ctagagcgcggacggctggctgcgc

SEQ ID NO: 846863 - DNA, 25 bp, Homo sapien
aacagctgccctagagcgcggacgg

SEQ ID NO: 846864 - DNA, 25 bp, Homo sapien
ggttgatggcatcggccgcagagtt

SEQ ID NO: 846865 - DNA, 25 bp, Homo sapien
acagcaagcttccagggcccgactg

SEQ ID NO: 846866 - DNA, 25 bp, Homo sapien
agggaaccggcaccccacagcaagc

SEQ ID NO: 846867 - DNA, 25 bp, Homo sapien
ttccagggcccgactgcccagcaca

SEQ ID NO: 846868 - DNA, 25 bp, Homo sapien
gaggaggttggcagggaaccggcac

SEQ ID NO: 846869 - DNA, 25 bp, Homo sapien
tcagcatgcggtcagtgatgggctc

SEQ ID NO: 846870 - DNA, 25 bp, Homo sapien
tggtccacgatgaaggaggtgccct

SEQ ID NO: 846871 - DNA, 25 bp, Homo sapien
ttgcccgtggccctcagcatgcggt

SEQ ID NO: 846872 - DNA, 25 bp, Homo sapien
aagcagtgcgggtgataggccttgc

SEQ ID NO: 846873 - DNA, 25 bp, Homo sapien
agggcgaccactcgcacagtctcat

SEQ ID NO: 846874 - DNA, 25 bp, Homo sapien
tgggctcagagcagacggagcacct

SEQ ID NO: 846875 - DNA, 25 bp, Homo sapien
acacttgtaacacttcatgtggaag

SEQ ID NO: 846876 - DNA, 25 bp, Homo sapien
gtggaagttcttgtccagggcgacc

SEQ ID NO: 846877 - DNA, 25 bp, Homo sapien
cccaaggagtccagagggatggctg

SEQ ID NO: 846878 - DNA, 25 bp, Homo sapien
caaggagtccagagggatggctgac

SEQ ID NO: 846879 - DNA, 25 bp, Homo sapien
ctgcccaaggagtccagagggatgg

SEQ ID NO: 846880 - DNA, 25 bp, Homo sapien
tgcccaaggagtccagagggatggc

SEQ ID NO: 846881 - DNA, 25 bp, Homo sapien
cagccccatttcctgcagtggcagg

SEQ ID NO: 846882 - DNA, 25 bp, Homo sapien
ctaataaaatagaggttggctcacc

SEQ ID NO: 846883 - DNA, 25 bp, Homo sapien
cacctcccagttagtaagcagcatc

SEQ ID NO: 846884 - DNA, 25 bp, Homo sapien
tggtgtcatcgctttttccagccac

SEQ ID NO: 846885 - DNA, 25 bp, Homo sapien
gccattgtcatctgcctcaatcgac

SEQ ID NO: 846886 - DNA, 25 bp, Homo sapien
ttgtcatctgcctcaatcgacaggg

SEQ ID NO: 846887 - DNA, 25 bp, Homo sapien
cgacagagcacgtgaccgtccaggg

SEQ ID NO: 846888 - DNA, 25 bp, Homo sapien
cagtgtggcacttccgacagagcac

SEQ ID NO: 846889 - DNA, 25 bp, Homo sapien
aaagcagcagcactaaacctggtgc

SEQ ID NO: 846890 - DNA, 25 bp, Homo sapien
cctccgcaagcagagtacaaaggct

SEQ ID NO: 846891 - DNA, 25 bp, Homo sapien
tatagctacaacttggcagcatggg

SEQ ID NO: 846892 - DNA, 25 bp, Homo sapien
tgcatccctagaccatgttgggtcc

SEQ ID NO: 846893 - DNA, 25 bp, Homo sapien
gggctgcaggcactacaaaagagct

SEQ ID NO: 846894 - DNA, 25 bp, Homo sapien
tgtaaataaacaggaactgattttc

SEQ ID NO: 846895 - DNA, 25 bp, Homo sapien
aataaacaggaactgattttctgcc

SEQ ID NO: 846896 - DNA, 25 bp, Homo sapien
ctacaaaagagctgactactgagaa

SEQ ID NO: 846897 - DNA, 25 bp, Homo sapien
tataggcctgtcgacatagcaggac

SEQ ID NO: 846898 - DNA, 25 bp, Homo sapien
gatgggatcccatatcgaaccgtct

SEQ ID NO: 846899 - DNA, 25 bp, Homo sapien
gaaccgtctctgagtggctcgagtc

SEQ ID NO: 846900 - DNA, 25 bp, Homo sapien
ggctcgagtccatacgcatgaaacg

SEQ ID NO: 846901 - DNA, 25 bp, Homo sapien
tgtcagagtgcaagaataacagccg

SEQ ID NO: 846902 - DNA, 25 bp, Homo sapien
gaaactatcttttggagcgcaactc

SEQ ID NO: 846903 - DNA, 25 bp, Homo sapien
cggaactcaagcagccactatggaa

SEQ ID NO: 846904 - DNA, 25 bp, Homo sapien
caagtgctttattgggtagccagcc

SEQ ID NO: 846905 - DNA, 25 bp, Homo sapien
ctggagaaccaattcttaaaagctg

SEQ ID NO: 846906 - DNA, 25 bp, Homo sapien
tggagaaccaattcttaaaagctgt

SEQ ID NO: 846907 - DNA, 25 bp, Homo sapien
cttattacccaagctccagggagct

SEQ ID NO: 846908 - DNA, 25 bp, Homo sapien
tctggatcacatggctagtctgtgg

SEQ ID NO: 846909 - DNA, 25 bp, Homo sapien
gcattgtgtttaggaatagcagcca

SEQ ID NO: 846910 - DNA, 25 bp, Homo sapien
gagacaaccagtcaacacaaagagg

SEQ ID NO: 846911 - DNA, 25 bp, Homo sapien
agagtgaaatccctggagctcttca

SEQ ID NO: 846912 - DNA, 25 bp, Homo sapien
acacaaagaagagtgaaatccctgg

SEQ ID NO: 846913 - DNA, 25 bp, Homo sapien
agaagagtgaaatccctggagctct

SEQ ID NO: 846914 - DNA, 25 bp, Homo sapien
ggagctcttcactcctcagtcctga

SEQ ID NO: 846915 - DNA, 25 bp, Homo sapien
taatgtgccccgatgactgggcttg

SEQ ID NO: 846916 - DNA, 25 bp, Homo sapien
ccactgaaaacccaggtcacaccag

SEQ ID NO: 846917 - DNA, 25 bp, Homo sapien
tctccctgaagactcaactaatgtg

SEQ ID NO: 846918 - DNA, 25 bp, Homo sapien
ccagatgcttcactgcaggttgtac

SEQ ID NO: 846919 - DNA, 25 bp, Homo sapien
gaggctggtgctactttcagcagac

SEQ ID NO: 846920 - DNA, 25 bp, Homo sapien
tcttgcctcttcttgagattgaagc

SEQ ID NO: 846921 - DNA, 25 bp, Homo sapien
acatcccttttaatccagaggctgg

SEQ ID NO: 846922 - DNA, 25 bp, Homo sapien
gattgaagcttcatccaaacatccc

SEQ ID NO: 846923 - DNA, 25 bp, Homo sapien
tttagaggatgttaatactgcagag

SEQ ID NO: 846924 - DNA, 25 bp, Homo sapien
gtcctgaaaatgttagagtggtatt

SEQ ID NO: 846925 - DNA, 25 bp, Homo sapien
acagggagaattgccatatgtcctg

SEQ ID NO: 846926 - DNA, 25 bp, Homo sapien
tgatttagaggatgttaatactgca

SEQ ID NO: 846927 - DNA, 25 bp, Homo sapien
aatgcaatgcaggttcacagcttgt

SEQ ID NO: 846928 - DNA, 25 bp, Homo sapien
ggttcacagcttgtcaactaccttc

SEQ ID NO: 846929 - DNA, 25 bp, Homo sapien
ctagaatgcaatgcaggttcacagc

SEQ ID NO: 846930 - DNA, 25 bp, Homo sapien
gttcacagcttgtcaactaccttct

SEQ ID NO: 846931 - DNA, 25 bp, Homo sapien
aacagctccagaaacgagcccatct

SEQ ID NO: 846932 - DNA, 25 bp, Homo sapien
ttggatataatgcacaaccctgtgt

SEQ ID NO: 846933 - DNA, 25 bp, Homo sapien
acaaccctgtgtgaattcccgtttg

SEQ ID NO: 846934 - DNA, 25 bp, Homo sapien
cctgtgtgaattcccgtttgactcc

SEQ ID NO: 846935 - DNA, 25 bp, Homo sapien
aaggaaggtattgagataaaggctt

SEQ ID NO: 846936 - DNA, 25 bp, Homo sapien
ctttggtatgagatatgtgcggaat

SEQ ID NO: 846937 - DNA, 25 bp, Homo sapien
tatttgtactttggtatgagatatg

SEQ ID NO: 846938 - DNA, 25 bp, Homo sapien
aggtattgagataaaggcttgtatc

SEQ ID NO: 846939 - DNA, 25 bp, Homo sapien
ctgacaacagaaccagtaacttcaa

SEQ ID NO: 846940 - DNA, 25 bp, Homo sapien
taagcatgggttatgccgatcttct

SEQ ID NO: 846941 - DNA, 25 bp, Homo sapien
gaagttacaagaactcctagcctag

SEQ ID NO: 846942 - DNA, 25 bp, Homo sapien
cgatcttcttcccaaccctctgtag

SEQ ID NO: 846943 - DNA, 25 bp, Homo sapien
tgctcctggaaggtaaatgagtcca

SEQ ID NO: 846944 - DNA, 25 bp, Homo sapien
aaggccttacacataggaggcagag

SEQ ID NO: 846945 - DNA, 25 bp, Homo sapien
taggagtctacagaatccaaaggcc

SEQ ID NO: 846946 - DNA, 25 bp, Homo sapien
taagcaaacactcagtacggtgggt

SEQ ID NO: 846947 - DNA, 25 bp, Homo sapien
cctctgagcacgtgtctcccatatt

SEQ ID NO: 846948 - DNA, 25 bp, Homo sapien
gccaccagagcccaaaatgctcctc

SEQ ID NO: 846949 - DNA, 25 bp, Homo sapien
tcctctgagcacgtgtctcccatat

SEQ ID NO: 846950 - DNA, 25 bp, Homo sapien
ccaccagagcccaaaatgctcctct

SEQ ID NO: 846951 - DNA, 25 bp, Homo sapien
tcttccctggatcattatctctctg

SEQ ID NO: 846952 - DNA, 25 bp, Homo sapien
cctggatcattatctctctgattcc

SEQ ID NO: 846953 - DNA, 25 bp, Homo sapien
tccctggatcattatctctctgatt

SEQ ID NO: 846954 - DNA, 25 bp, Homo sapien
gtttcttccctggatcattatctct

SEQ ID NO: 846955 - DNA, 25 bp, Homo sapien
tcagggaggacggcggaaggtgtcg

SEQ ID NO: 846956 - DNA, 25 bp, Homo sapien
ggaggacggcggaaggtgtcggtgc

SEQ ID NO: 846957 - DNA, 25 bp, Homo sapien
cagggaggacggcggaaggtgtcgg

SEQ ID NO: 846958 - DNA, 25 bp, Homo sapien
aggacggcggaaggtgtcggtgctg

SEQ ID NO: 846959 - DNA, 25 bp, Homo sapien
caaatacaaccttttggcagaaggc

SEQ ID NO: 846960 - DNA, 25 bp, Homo sapien
acaaatacaaccttttggcagaagg

SEQ ID NO: 846961 - DNA, 25 bp, Homo sapien
gctccattcgagcatttagaagcaa

SEQ ID NO: 846962 - DNA, 25 bp, Homo sapien
caatgtctaacatctactggaggga

SEQ ID NO: 846963 - DNA, 25 bp, Homo sapien
tagcctgcaaggaagttgagtccaa

SEQ ID NO: 846964 - DNA, 25 bp, Homo sapien
ccagggagttctcatggtagggaaa

SEQ ID NO: 846965 - DNA, 25 bp, Homo sapien
atcctttggccggagcccagattca

SEQ ID NO: 846966 - DNA, 25 bp, Homo sapien
ggagcccagattcatgatgtcatca

SEQ ID NO: 846967 - DNA, 25 bp, Homo sapien
ttggccggagcccagattcatgatg

SEQ ID NO: 846968 - DNA, 25 bp, Homo sapien
ctcaaaatcctttggccggagccca

SEQ ID NO: 846969 - DNA, 25 bp, Homo sapien
aacgtgggcaaggagggcatcttct

SEQ ID NO: 846970 - DNA, 25 bp, Homo sapien
gcaaaagatggctatgaagatcaac

SEQ ID NO: 846971 - DNA, 25 bp, Homo sapien
atcaacgtgggcaaggagggcatct

SEQ ID NO: 846972 - DNA, 25 bp, Homo sapien
ggctatgaagatcaacgtgggcaag

SEQ ID NO: 846973 - DNA, 25 bp, Homo sapien
tgtcacttgtggacagcatccggca

SEQ ID NO: 846974 - DNA, 25 bp, Homo sapien
tcagcttgggcactaaccgagagtt

SEQ ID NO: 846975 - DNA, 25 bp, Homo sapien
gaactgcacgcgaaaaatctaagga

SEQ ID NO: 846976 - DNA, 25 bp, Homo sapien
tcagggagcccttgatcagcttggg

SEQ ID NO: 846977 - DNA, 25 bp, Homo sapien
tctgtaggaactcagggagaccttc

SEQ ID NO: 846978 - DNA, 25 bp, Homo sapien
cacagtgagactatgagcaagacag

SEQ ID NO: 846979 - DNA, 25 bp, Homo sapien
gaacaggaggaacagaatcgaccac

SEQ ID NO: 846980 - DNA, 25 bp, Homo sapien
tgaagcctgcactctataaactaga

SEQ ID NO: 846981 - DNA, 25 bp, Homo sapien
tgagggaaaaggtgagtgactttaa

SEQ ID NO: 846982 - DNA, 25 bp, Homo sapien
gacacctatgacaggaccatgcacc

SEQ ID NO: 846983 - DNA, 25 bp, Homo sapien
taagcggacacctatgacaggacca

SEQ ID NO: 846984 - DNA, 25 bp, Homo sapien
tatacttctctaagcggacacctat

SEQ ID NO: 846985 - DNA, 25 bp, Homo sapien
tatgacaggaccatgcacctgccag

SEQ ID NO: 846986 - DNA, 25 bp, Homo sapien
tgtccctccagctgccccaagcgca

SEQ ID NO: 846987 - DNA, 25 bp, Homo sapien
ctgtaggatatgtttgtccctccag

SEQ ID NO: 846988 - DNA, 25 bp, Homo sapien
cctccagctgccccaagcgcagaag

SEQ ID NO: 846989 - DNA, 25 bp, Homo sapien
gtccctccagctgccccaagcgcag

SEQ ID NO: 846990 - DNA, 25 bp, Homo sapien
ggacaagatgggtcccaaaacttca

SEQ ID NO: 846991 - DNA, 25 bp, Homo sapien
ctctctggtggacaagatgggtccc

SEQ ID NO: 846992 - DNA, 25 bp, Homo sapien
gtcccaaaacttcaagggctatctc

SEQ ID NO: 846993 - DNA, 25 bp, Homo sapien
aagggctatctctgttgggttgctc

SEQ ID NO: 846994 - DNA, 25 bp, Homo sapien
cagcagtgatgaagccattgcctgc

SEQ ID NO: 846995 - DNA, 25 bp, Homo sapien
caaggcaacaacattctccgtagca

SEQ ID NO: 846996 - DNA, 25 bp, Homo sapien
tgctattgctaccaggcgtaaaagg

SEQ ID NO: 846997 - DNA, 25 bp, Homo sapien
ccgaagatcctagaaccatgtggtc

SEQ ID NO: 846998 - DNA, 25 bp, Homo sapien
ggttgtatgggaaggccatcggatg

SEQ ID NO: 846999 - DNA, 25 bp, Homo sapien
gttgtatgggaaggccatcggatgc

SEQ ID NO: 847000 - DNA, 25 bp, Homo sapien
gggttgtatgggaaggccatcggat

SEQ ID NO: 847001 - DNA, 25 bp, Homo sapien
gaggaccataaggtggcagcattca

SEQ ID NO: 847002 - DNA, 25 bp, Homo sapien
tgaagctggagagccctacagagct

SEQ ID NO: 847003 - DNA, 25 bp, Homo sapien
tggtagccacccagacaacttgtgc

SEQ ID NO: 847004 - DNA, 25 bp, Homo sapien
cctacagagctgaagagcatccatg

SEQ ID NO: 847005 - DNA, 25 bp, Homo sapien
ccagtgacattccaaggttgtagat

SEQ ID NO: 847006 - DNA, 25 bp, Homo sapien
gagatgtgatgagcaaaatcatgca

SEQ ID NO: 847007 - DNA, 25 bp, Homo sapien
gctccgtatgctatcgccagtgaca

SEQ ID NO: 847008 - DNA, 25 bp, Homo sapien
cagtgggcattgtccaagtaatcat

SEQ ID NO: 847009 - DNA, 25 bp, Homo sapien
ggaacgacgactcttcagcacagct

SEQ ID NO: 847010 - DNA, 25 bp, Homo sapien
agagcctttatgtgtgcctgcacac

SEQ ID NO: 847011 - DNA, 25 bp, Homo sapien
gaacaccagtgacaggaaatatgag

SEQ ID NO: 847012 - DNA, 25 bp, Homo sapien
cacactgggctctcggaatcctgag

SEQ ID NO: 847013 - DNA, 25 bp, Homo sapien
gggtactaccaaattgtcctctgaa

SEQ ID NO: 847014 - DNA, 25 bp, Homo sapien
cacaacactaaatggccatcttttc

SEQ ID NO: 847015 - DNA, 25 bp, Homo sapien
tcctctgaaaagatgttggtccagt

SEQ ID NO: 847016 - DNA, 25 bp, Homo sapien
ggagtaccagtataccacaacacta

SEQ ID NO: 847017 - DNA, 25 bp, Homo sapien
gtcaaggtctggctttcaaaagact

SEQ ID NO: 847018 - DNA, 25 bp, Homo sapien
ttctccatatgaaaccacaacccag

SEQ ID NO: 847019 - DNA, 25 bp, Homo sapien
catctaccaatgctttagctctagg

SEQ ID NO: 847020 - DNA, 25 bp, Homo sapien
caaaagactggagtgaaaggacagc

SEQ ID NO: 847021 - DNA, 25 bp, Homo sapien
aggtcttgcaggaacgtataatgct

SEQ ID NO: 847022 - DNA, 25 bp, Homo sapien
gaatttcgcatatttagcaaggcaa

SEQ ID NO: 847023 - DNA, 25 bp, Homo sapien
tataatgcttgacgtgaatcttgaa

SEQ ID NO: 847024 - DNA, 25 bp, Homo sapien
gcttgacgtgaatcttgaatttcgc

SEQ ID NO: 847025 - DNA, 25 bp, Homo sapien
ccatgaatcctgagatgtaaatgat

SEQ ID NO: 847026 - DNA, 25 bp, Homo sapien
tgcctttgcccacaaatcgcttcaa

SEQ ID NO: 847027 - DNA, 25 bp, Homo sapien
tctccatccagatctctacttagat

SEQ ID NO: 847028 - DNA, 25 bp, Homo sapien
ttgcccacaaatcgcttcaaaatca

SEQ ID NO: 847029 - DNA, 25 bp, Homo sapien
aattaccctaatttgccttgtccag

SEQ ID NO: 847030 - DNA, 25 bp, Homo sapien
tcaggccgtatgaacactcctcttc

SEQ ID NO: 847031 - DNA, 25 bp, Homo sapien
tttcctgcatgctgccatggttagt

SEQ ID NO: 847032 - DNA, 25 bp, Homo sapien
aatgtctatgatttttctgggtctc

SEQ ID NO: 847033 - DNA, 25 bp, Homo sapien
ctagccacagtcctgtttttaatct

SEQ ID NO: 847034 - DNA, 25 bp, Homo sapien
tctttcctaggagtgctaaagagtg

SEQ ID NO: 847035 - DNA, 25 bp, Homo sapien
ttttaatctttcctaggagtgctaa

SEQ ID NO: 847036 - DNA, 25 bp, Homo sapien
ccctagccacagtcctgtttttaat

SEQ ID NO: 847037 - DNA, 25 bp, Homo sapien
ctaaagagcaacacgaagaaggccg

SEQ ID NO: 847038 - DNA, 25 bp, Homo sapien
gagcaacacgaagaaggccgtcagt

SEQ ID NO: 847039 - DNA, 25 bp, Homo sapien
acacgaagaaggccgtcagtgctgc

SEQ ID NO: 847040 - DNA, 25 bp, Homo sapien
aagaaggccgtcagtgctgcttgca

SEQ ID NO: 847041 - DNA, 25 bp, Homo sapien
gatggaagaactgtcggccgagacc

SEQ ID NO: 847042 - DNA, 25 bp, Homo sapien
caacaacaggagctgcgagaacacg

SEQ ID NO: 847043 - DNA, 25 bp, Homo sapien
agagtactcgaccttctgggcagag

SEQ ID NO: 847044 - DNA, 25 bp, Homo sapien
tagtagaagttgtgcaccgtcccaa

SEQ ID NO: 847045 - DNA, 25 bp, Homo sapien
tgctcagtgaaggatgcggagatta

SEQ ID NO: 847046 - DNA, 25 bp, Homo sapien
aaggatgcggagattagagggaaaa

SEQ ID NO: 847047 - DNA, 25 bp, Homo sapien
tgaaggatgcggagattagagggaa

SEQ ID NO: 847048 - DNA, 25 bp, Homo sapien
cttgctcagtgaaggatgcggagat

SEQ ID NO: 847049 - DNA, 25 bp, Homo sapien
cagaaatagtagttccctgggagtg

SEQ ID NO: 847050 - DNA, 25 bp, Homo sapien
tcatgatgagttgtatccgaggctg

SEQ ID NO: 847051 - DNA, 25 bp, Homo sapien
cagttccggtaaaatgcttcccaga

SEQ ID NO: 847052 - DNA, 25 bp, Homo sapien
tcaattatgtccaaggctgtgggtc

SEQ ID NO: 847053 - DNA, 25 bp, Homo sapien
atggaggtccatgttatctccagcc

SEQ ID NO: 847054 - DNA, 25 bp, Homo sapien
catggaggtccatgttatctccagc

SEQ ID NO: 847055 - DNA, 25 bp, Homo sapien
tgcctgattgatgggtcttactgac

SEQ ID NO: 847056 - DNA, 25 bp, Homo sapien
ggctgtgcctgattgatgggtctta

SEQ ID NO: 847057 - DNA, 25 bp, Homo sapien
tgattgatgggtcttactgactcac

SEQ ID NO: 847058 - DNA, 25 bp, Homo sapien
tgtgcctgattgatgggtcttactg

SEQ ID NO: 847059 - DNA, 25 bp, Homo sapien
cttgccctggtacttcattccagct

SEQ ID NO: 847060 - DNA, 25 bp, Homo sapien
ccttgccctggtacttcattccagc

SEQ ID NO: 847061 - DNA, 25 bp, Homo sapien
tcagccacactcctggaaagtggct

SEQ ID NO: 847062 - DNA, 25 bp, Homo sapien
tggcttgcctgggagatcaacatcg

SEQ ID NO: 847063 - DNA, 25 bp, Homo sapien
tggcagtactgagatagccttggtt

SEQ ID NO: 847064 - DNA, 25 bp, Homo sapien
gcaactttccgatgcagcatttgaa

SEQ ID NO: 847065 - DNA, 25 bp, Homo sapien
caagtgcatccgttttgcctcagct

SEQ ID NO: 847066 - DNA, 25 bp, Homo sapien
ccaggacttggaggttcagcttcca

SEQ ID NO: 847067 - DNA, 25 bp, Homo sapien
gaggcagctaccgatgccaggactt

SEQ ID NO: 847068 - DNA, 25 bp, Homo sapien
catggtgagaggcatccagtgatgt

SEQ ID NO: 847069 - DNA, 25 bp, Homo sapien
tggcgccccacatcagaatcacgaa

SEQ ID NO: 847070 - DNA, 25 bp, Homo sapien
gacaactccttgtgacacgagcatc

SEQ ID NO: 847071 - DNA, 25 bp, Homo sapien
cgaagcacacagtgttttgtgtgct

SEQ ID NO: 847072 - DNA, 25 bp, Homo sapien
ctgtggcaccctccagtcgcgggta

SEQ ID NO: 847073 - DNA, 25 bp, Homo sapien
ataaagaaatcgaaacactttccag

SEQ ID NO: 847074 - DNA, 25 bp, Homo sapien
gaaatcgaaacactttccagcttgc

SEQ ID NO: 847075 - DNA, 25 bp, Homo sapien
tcgaaacactttccagcttgctttg

SEQ ID NO: 847076 - DNA, 25 bp, Homo sapien
cgaaacactttccagcttgctttgc

SEQ ID NO: 847077 - DNA, 25 bp, Homo sapien
ctcttgtttttcaccgttcaagctc

SEQ ID NO: 847078 - DNA, 25 bp, Homo sapien
tgtttttcaccgttcaagctctccc

SEQ ID NO: 847079 - DNA, 25 bp, Homo sapien
cacacctgcccacggcatctccaca

SEQ ID NO: 847080 - DNA, 25 bp, Homo sapien
ttgtttttcaccgttcaagctctcc

SEQ ID NO: 847081 - DNA, 25 bp, Homo sapien
tgtgtgaccagtgggacagacagca

SEQ ID NO: 847082 - DNA, 25 bp, Homo sapien
tgtggaaatccccattctggctgct

SEQ ID NO: 847083 - DNA, 25 bp, Homo sapien
gaggagttgtctgtgtgccaagccc

SEQ ID NO: 847084 - DNA, 25 bp, Homo sapien
tgaccagacatagctcatcagaagc

SEQ ID NO: 847085 - DNA, 25 bp, Homo sapien
tacttgctgggatgggaacatgcca

SEQ ID NO: 847086 - DNA, 25 bp, Homo sapien
gacatcttagacctgtgggcacctg

SEQ ID NO: 847087 - DNA, 25 bp, Homo sapien
actttaccgggagactatgcgcaga

SEQ ID NO: 847088 - DNA, 25 bp, Homo sapien
tcaaagttgagaggatctgcccgaa

SEQ ID NO: 847089 - DNA, 25 bp, Homo sapien
caggcctctgagcaaaaacaaccaa

SEQ ID NO: 847090 - DNA, 25 bp, Homo sapien
gaaggtaagtaaatggagctaggtc

SEQ ID NO: 847091 - DNA, 25 bp, Homo sapien
ggagtaacttccatcaagagaaggt

SEQ ID NO: 847092 - DNA, 25 bp, Homo sapien
gagctaggtctctttcgctttatct

SEQ ID NO: 847093 - DNA, 25 bp, Homo sapien
gcagtggagcaaacacagattaaac

SEQ ID NO: 847094 - DNA, 25 bp, Homo sapien
tataggtgaccgatgtttattaaac

SEQ ID NO: 847095 - DNA, 25 bp, Homo sapien
gagggctcagctcagtatactatgt

SEQ ID NO: 847096 - DNA, 25 bp, Homo sapien
ttaaaccgggaggatgatgatggcc

SEQ ID NO: 847097 - DNA, 25 bp, Homo sapien
tacaagcatgggataggaaaactct

SEQ ID NO: 847098 - DNA, 25 bp, Homo sapien
cattagtaatgcttctttcccagga

SEQ ID NO: 847099 - DNA, 25 bp, Homo sapien
ccagaggaaaagacccaaggcgaat

SEQ ID NO: 847100 - DNA, 25 bp, Homo sapien
gcatgttgaccagttcaagctcacc

SEQ ID NO: 847101 - DNA, 25 bp, Homo sapien
ttcttaccactctttttagacacac

SEQ ID NO: 847102 - DNA, 25 bp, Homo sapien
aggaataaggacgagaagtccattc

SEQ ID NO: 847103 - DNA, 25 bp, Homo sapien
agtccattcttaccactctttttag

SEQ ID NO: 847104 - DNA, 25 bp, Homo sapien
accactctttttagacacactgaaa

SEQ ID NO: 847105 - DNA, 25 bp, Homo sapien
tctcctaccaccagatggaacacta

SEQ ID NO: 847106 - DNA, 25 bp, Homo sapien
ttgaagtcctccatatgttcctcca

SEQ ID NO: 847107 - DNA, 25 bp, Homo sapien
cctatgtgcacaaacttaaactaca

SEQ ID NO: 847108 - DNA, 25 bp, Homo sapien
cagattaagaaatagaatgttgcca

SEQ ID NO: 847109 - DNA, 25 bp, Homo sapien
caccaagccatgagcaatccacctc

SEQ ID NO: 847110 - DNA, 25 bp, Homo sapien
gcaccaagccatgagcaatccacct

SEQ ID NO: 847111 - DNA, 25 bp, Homo sapien
ccaagccatgagcaatccacctcca

SEQ ID NO: 847112 - DNA, 25 bp, Homo sapien
accaagccatgagcaatccacctcc

SEQ ID NO: 847113 - DNA, 25 bp, Homo sapien
cacgtgtagccttgcccacctgaac

SEQ ID NO: 847114 - DNA, 25 bp, Homo sapien
ttcccacgtgtagccttgcccacct

SEQ ID NO: 847115 - DNA, 25 bp, Homo sapien
ataattcccacgtgtagccttgccc

SEQ ID NO: 847116 - DNA, 25 bp, Homo sapien
taattcccacgtgtagccttgccca

SEQ ID NO: 847117 - DNA, 25 bp, Homo sapien
tgcttcttttggttaccaagaccac

SEQ ID NO: 847118 - DNA, 25 bp, Homo sapien
tcccatatggtacattaacccccaa

SEQ ID NO: 847119 - DNA, 25 bp, Homo sapien
ccagcttattagctttgaactctat

SEQ ID NO: 847120 - DNA, 25 bp, Homo sapien
cactaacctctggttgggtcacatt

SEQ ID NO: 847121 - DNA, 25 bp, Homo sapien
ttgggtctggaacccgaatgcgcac

SEQ ID NO: 847122 - DNA, 25 bp, Homo sapien
cacaacaagcggtggagaacacgca

SEQ ID NO: 847123 - DNA, 25 bp, Homo sapien
atgcgcacgtgacaaccaaccggag

SEQ ID NO: 847124 - DNA, 25 bp, Homo sapien
ggtcaccgcagtaacactggccaca

SEQ ID NO: 847125 - DNA, 25 bp, Homo sapien
aacgctgacccaatggtgcgggacc

SEQ ID NO: 847126 - DNA, 25 bp, Homo sapien
tgaacgctgacccaatggtgcggga

SEQ ID NO: 847127 - DNA, 25 bp, Homo sapien
gatgaacgctgacccaatggtgcgg

SEQ ID NO: 847128 - DNA, 25 bp, Homo sapien
cccctcggtgggtagatgtttctca

SEQ ID NO: 847129 - DNA, 25 bp, Homo sapien
tccaggtctcgggtgaaagtaagga

SEQ ID NO: 847130 - DNA, 25 bp, Homo sapien
tgggtagatgtttctcattgcaaat

SEQ ID NO: 847131 - DNA, 25 bp, Homo sapien
aatccaggtctcgggtgaaagtaag

SEQ ID NO: 847132 - DNA, 25 bp, Homo sapien
cagtagcattaaaggcggaatcaat

SEQ ID NO: 847133 - DNA, 25 bp, Homo sapien
tcagtagcattaaaggcggaatcaa

SEQ ID NO: 847134 - DNA, 25 bp, Homo sapien
ttcagtagcattaaaggcggaatca

SEQ ID NO: 847135 - DNA, 25 bp, Homo sapien
agtagcattaaaggcggaatcaatc

SEQ ID NO: 847136 - DNA, 25 bp, Homo sapien
tatatgcaggagacgtgttaatctt

SEQ ID NO: 847137 - DNA, 25 bp, Homo sapien
tctatatgcaggagacgtgttaatc

SEQ ID NO: 847138 - DNA, 25 bp, Homo sapien
ctatatgcaggagacgtgttaatct

SEQ ID NO: 847139 - DNA, 25 bp, Homo sapien
gcaggagacgtgttaatcttgtctg

SEQ ID NO: 847140 - DNA, 25 bp, Homo sapien
tgggaccttcggatgaggtctctga

SEQ ID NO: 847141 - DNA, 25 bp, Homo sapien
gctggaggaccctctttgcctgggt

SEQ ID NO: 847142 - DNA, 25 bp, Homo sapien
tgattctatttttttcggtctgtta

SEQ ID NO: 847143 - DNA, 25 bp, Homo sapien
atgttgggaccttcggatgaggtct

SEQ ID NO: 847144 - DNA, 25 bp, Homo sapien
tctgtgattgtaatactgctttcca

SEQ ID NO: 847145 - DNA, 25 bp, Homo sapien
caactctgtgattgtaatactgctt

SEQ ID NO: 847146 - DNA, 25 bp, Homo sapien
caaacaactctgtgattgtaatact

SEQ ID NO: 847147 - DNA, 25 bp, Homo sapien
ttgtaatactgctttccatgatcac

SEQ ID NO: 847148 - DNA, 25 bp, Homo sapien
actcagcattaattctgctctgctc

SEQ ID NO: 847149 - DNA, 25 bp, Homo sapien
tcagcattaattctgctctgctcat

SEQ ID NO: 847150 - DNA, 25 bp, Homo sapien
gactcagcattaattctgctctgct

SEQ ID NO: 847151 - DNA, 25 bp, Homo sapien
ctcagcattaattctgctctgctca

SEQ ID NO: 847152 - DNA, 25 bp, Homo sapien
tcactggtcagattgggctcgatgc

SEQ ID NO: 847153 - DNA, 25 bp, Homo sapien
gactaacagagagaggtcgcttcca

SEQ ID NO: 847154 - DNA, 25 bp, Homo sapien
cacagacatgtaggcagggatctct

SEQ ID NO: 847155 - DNA, 25 bp, Homo sapien
ttctctcgggttgctactggaagcc

SEQ ID NO: 847156 - DNA, 25 bp, Homo sapien
cagtactcatccagcaatatctggt

SEQ ID NO: 847157 - DNA, 25 bp, Homo sapien
gagacttctataatttgccttccag

SEQ ID NO: 847158 - DNA, 25 bp, Homo sapien
gacttctataatttgccttccaggt

SEQ ID NO: 847159 - DNA, 25 bp, Homo sapien
ccaggtatgtagagcccagtactca

SEQ ID NO: 847160 - DNA, 25 bp, Homo sapien
caagcagcaccggttaattacgagt

SEQ ID NO: 847161 - DNA, 25 bp, Homo sapien
tacgagtgggcctcggaaaagcttg

SEQ ID NO: 847162 - DNA, 25 bp, Homo sapien
ccccagaggcacgtgatcgattttg

SEQ ID NO: 847163 - DNA, 25 bp, Homo sapien
cacaattatatagaggagtccaccc

SEQ ID NO: 847164 - DNA, 25 bp, Homo sapien
ctaggaagagagaccatggagcttg

SEQ ID NO: 847165 - DNA, 25 bp, Homo sapien
cactgagatctgcacgtcggcaaca

SEQ ID NO: 847166 - DNA, 25 bp, Homo sapien
gtcggcaacaatcctctgaggcagg

SEQ ID NO: 847167 - DNA, 25 bp, Homo sapien
cggtcggcacggtcagaatgatgtt

SEQ ID NO: 847168 - DNA, 25 bp, Homo sapien
ggttctccagagtacgaagatttgc

SEQ ID NO: 847169 - DNA, 25 bp, Homo sapien
agcatgcacagagggtttgcttgga

SEQ ID NO: 847170 - DNA, 25 bp, Homo sapien
cacagagggtttgcttggagcaccc

SEQ ID NO: 847171 - DNA, 25 bp, Homo sapien
cagagggtttgcttggagcacccac

SEQ ID NO: 847172 - DNA, 25 bp, Homo sapien
tgcacagagggtttgcttggagcac

SEQ ID NO: 847173 - DNA, 25 bp, Homo sapien
gagggaagacagagttagggtcctc

SEQ ID NO: 847174 - DNA, 25 bp, Homo sapien
ctggaaaatgcagaaggagggaaga

SEQ ID NO: 847175 - DNA, 25 bp, Homo sapien
aagacagagttagggtcctccccat

SEQ ID NO: 847176 - DNA, 25 bp, Homo sapien
ggaaaatgcagaaggagggaagaca

SEQ ID NO: 847177 - DNA, 25 bp, Homo sapien
gcaatattggcacggcttcgaggaa

SEQ ID NO: 847178 - DNA, 25 bp, Homo sapien
cacattgggacccttgctcaggtag

SEQ ID NO: 847179 - DNA, 25 bp, Homo sapien
gtaaatacgtttccagtgcggtcca

SEQ ID NO: 847180 - DNA, 25 bp, Homo sapien
gaggaatgcccaagaccgtctcatg

SEQ ID NO: 847181 - DNA, 25 bp, Homo sapien
gactcttggattgcctacataatgg

SEQ ID NO: 847182 - DNA, 25 bp, Homo sapien
ggctctgaggcacggccaaggcata

SEQ ID NO: 847183 - DNA, 25 bp, Homo sapien
ttgcctacataatgggggctctgag

SEQ ID NO: 847184 - DNA, 25 bp, Homo sapien
tcagtgaggactcttggattgccta

SEQ ID NO: 847185 - DNA, 25 bp, Homo sapien
aatgaataagagagcctccagcagg

SEQ ID NO: 847186 - DNA, 25 bp, Homo sapien
cagggagggaactaggcattaaaca

SEQ ID NO: 847187 - DNA, 25 bp, Homo sapien
cattaaacaactggtcaaaggcaag

SEQ ID NO: 847188 - DNA, 25 bp, Homo sapien
ggaactgatccaggcattgcaggga

SEQ ID NO: 847189 - DNA, 25 bp, Homo sapien
ggatgaatggctcccaaccaaaggc

SEQ ID NO: 847190 - DNA, 25 bp, Homo sapien
gagacggatgaatggctcccaacca

SEQ ID NO: 847191 - DNA, 25 bp, Homo sapien
aagagacggatgaatggctcccaac

SEQ ID NO: 847192 - DNA, 25 bp, Homo sapien
acggatgaatggctcccaaccaaag

SEQ ID NO: 847193 - DNA, 25 bp, Homo sapien
ctgtgggcaagttggtctggttcct

SEQ ID NO: 847194 - DNA, 25 bp, Homo sapien
atctgtgtgaggaggtacaatttca

SEQ ID NO: 847195 - DNA, 25 bp, Homo sapien
tgcacttggtgggagaacatcttga

SEQ ID NO: 847196 - DNA, 25 bp, Homo sapien
caggcctcaaagaacggagccaggt

SEQ ID NO: 847197 - DNA, 25 bp, Homo sapien
gaggaggtacaatttcataatattt

SEQ ID NO: 847198 - DNA, 25 bp, Homo sapien
ctgccacctcgatgggcactcctta

SEQ ID NO: 847199 - DNA, 25 bp, Homo sapien
tgccacctcgatgggcactccttac

SEQ ID NO: 847200 - DNA, 25 bp, Homo sapien
gcaatgaactaagaggacaaggcca

SEQ ID NO: 847201 - DNA, 25 bp, Homo sapien
tagaggagtgaatccccacctctgc

SEQ ID NO: 847202 - DNA, 25 bp, Homo sapien
gcagaggtagaggagtgaatcccca

SEQ ID NO: 847203 - DNA, 25 bp, Homo sapien
gtcggtaataaggtatagggcaatg

SEQ ID NO: 847204 - DNA, 25 bp, Homo sapien
gctatgacctatgatggtgaatcca

SEQ ID NO: 847205 - DNA, 25 bp, Homo sapien
ctgaaagcagacgaacaagatgcag

SEQ ID NO: 847206 - DNA, 25 bp, Homo sapien
agcagacgaacaagatgcagaaaca

SEQ ID NO: 847207 - DNA, 25 bp, Homo sapien
ctgggctatgacctatgatggtgaa

SEQ ID NO: 847208 - DNA, 25 bp, Homo sapien
tacaactcgtaggtgaaagaaccag

SEQ ID NO: 847209 - DNA, 25 bp, Homo sapien
gatttgaacacagggaagctacttg

SEQ ID NO: 847210 - DNA, 25 bp, Homo sapien
caagagctatctgggtctcacggta

SEQ ID NO: 847211 - DNA, 25 bp, Homo sapien
gagagctaaccctacctagttctgg

SEQ ID NO: 847212 - DNA, 25 bp, Homo sapien
tagacaagcttttcaggtgcgcaag

SEQ ID NO: 847213 - DNA, 25 bp, Homo sapien
taaatacttcttactgggagcctag

SEQ ID NO: 847214 - DNA, 25 bp, Homo sapien
gagagggctcaatcttacaactgga

SEQ ID NO: 847215 - DNA, 25 bp, Homo sapien
tattgggccctctcaatctggagac

SEQ ID NO: 847216 - DNA, 25 bp, Homo sapien
gatagaaatgctattatggtcagta

SEQ ID NO: 847217 - DNA, 25 bp, Homo sapien
acttattctgtgaggcactctggga

SEQ ID NO: 847218 - DNA, 25 bp, Homo sapien
tgggagatagaaatgctattatggt

SEQ ID NO: 847219 - DNA, 25 bp, Homo sapien
cttattctgtgaggcactctgggag

SEQ ID NO: 847220 - DNA, 25 bp, Homo sapien
gaatggaacctaacaacataggaac

SEQ ID NO: 847221 - DNA, 25 bp, Homo sapien
gaacctaacaacataggaacggcat

SEQ ID NO: 847222 - DNA, 25 bp, Homo sapien
acaacataggaacggcataacggtt

SEQ ID NO: 847223 - DNA, 25 bp, Homo sapien
tgaggaatggaacctaacaacatag

SEQ ID NO: 847224 - DNA, 25 bp, Homo sapien
aagtacgttgagttcttaggcttca

SEQ ID NO: 847225 - DNA, 25 bp, Homo sapien
tatcagggaacaactgacctttggg

SEQ ID NO: 847226 - DNA, 25 bp, Homo sapien
ggctagaaatccaacgtgcggtgaa

SEQ ID NO: 847227 - DNA, 25 bp, Homo sapien
gataagacttgccagaatttggaat

SEQ ID NO: 847228 - DNA, 25 bp, Homo sapien
cccggagggatgctttggcctgcat

SEQ ID NO: 847229 - DNA, 25 bp, Homo sapien
cctaccaggtgagcgaccccgcctt

SEQ ID NO: 847230 - DNA, 25 bp, Homo sapien
gtgctgcgggctctcggggcgccta

SEQ ID NO: 847231 - DNA, 25 bp, Homo sapien
gccttcccggagggatgctttggcc

SEQ ID NO: 847232 - DNA, 25 bp, Homo sapien
tagggactgacggacaggctctgca

SEQ ID NO: 847233 - DNA, 25 bp, Homo sapien
tgacggacaggctctgcagtggcgc

SEQ ID NO: 847234 - DNA, 25 bp, Homo sapien
gactgacggacaggctctgcagtgg

SEQ ID NO: 847235 - DNA, 25 bp, Homo sapien
cctagggactgacggacaggctctg

SEQ ID NO: 847236 - DNA, 25 bp, Homo sapien
agttaccagtggaaaaaagcagccg

SEQ ID NO: 847237 - DNA, 25 bp, Homo sapien
ttaccagtggaaaaaagcagccgag

SEQ ID NO: 847238 - DNA, 25 bp, Homo sapien
taccagtggaaaaaagcagccgaga

SEQ ID NO: 847239 - DNA, 25 bp, Homo sapien
gttaccagtggaaaaaagcagccga

SEQ ID NO: 847240 - DNA, 25 bp, Homo sapien
cagggggaagcaaagactttcatgt

SEQ ID NO: 847241 - DNA, 25 bp, Homo sapien
ctgcagggggaagcaaagactttca

SEQ ID NO: 847242 - DNA, 25 bp, Homo sapien
tgcagggggaagcaaagactttcat

SEQ ID NO: 847243 - DNA, 25 bp, Homo sapien
gggggaagcaaagactttcatgtat

SEQ ID NO: 847244 - DNA, 25 bp, Homo sapien
ggtctctgtccccataggtgtcagt

SEQ ID NO: 847245 - DNA, 25 bp, Homo sapien
gcattgatacagtaaacccctaggg

SEQ ID NO: 847246 - DNA, 25 bp, Homo sapien
atgcgacaggtagccctcatgggac

SEQ ID NO: 847247 - DNA, 25 bp, Homo sapien
gggaacctggagagcaccttgtcag

SEQ ID NO: 847248 - DNA, 25 bp, Homo sapien
catggagtgggatcttgggcacctt

SEQ ID NO: 847249 - DNA, 25 bp, Homo sapien
ctgacatggagtgggatcttgggca

SEQ ID NO: 847250 - DNA, 25 bp, Homo sapien
atggagtgggatcttgggcaccttc

SEQ ID NO: 847251 - DNA, 25 bp, Homo sapien
gacatggagtgggatcttgggcacc

SEQ ID NO: 847252 - DNA, 25 bp, Homo sapien
taatgatgacttgcagttatgtttt

SEQ ID NO: 847253 - DNA, 25 bp, Homo sapien
gtgataatgatgacttgcagttatg

SEQ ID NO: 847254 - DNA, 25 bp, Homo sapien
tgatgacttgcagttatgtttttaa

SEQ ID NO: 847255 - DNA, 25 bp, Homo sapien
gaaaaataagacaatcatggaaata

SEQ ID NO: 847256 - DNA, 25 bp, Homo sapien
ctagatagccccacctgaaggtgat

SEQ ID NO: 847257 - DNA, 25 bp, Homo sapien
actagatagccccacctgaaggtga

SEQ ID NO: 847258 - DNA, 25 bp, Homo sapien
tccagtgttccacttaacagtgaaa

SEQ ID NO: 847259 - DNA, 25 bp, Homo sapien
caatcactctaggatatgctatacc

SEQ ID NO: 847260 - DNA, 25 bp, Homo sapien
tattacagacacgtttcttccagtg

SEQ ID NO: 847261 - DNA, 25 bp, Homo sapien
gaaagatatcttaatgtgatctggg

SEQ ID NO: 847262 - DNA, 25 bp, Homo sapien
ggtgcttgtaacttggaactccttg

SEQ ID NO: 847263 - DNA, 25 bp, Homo sapien
aataaataattctcaagacagtcat

SEQ ID NO: 847264 - DNA, 25 bp, Homo sapien
tggagtgcaatgcgtatttgcaggt

SEQ ID NO: 847265 - DNA, 25 bp, Homo sapien
gtcataaacctaagccactagtaca

SEQ ID NO: 847266 - DNA, 25 bp, Homo sapien
tactgtaaatgtcaagcaataggag

SEQ ID NO: 847267 - DNA, 25 bp, Homo sapien
caaatctggactctccgtagggtag

SEQ ID NO: 847268 - DNA, 25 bp, Homo sapien
tccaggataccatgctctaaataag

SEQ ID NO: 847269 - DNA, 25 bp, Homo sapien
aaatgtcttcagtggtcgtcttggc

SEQ ID NO: 847270 - DNA, 25 bp, Homo sapien
agcagttgagtgaggcatccagccc

SEQ ID NO: 847271 - DNA, 25 bp, Homo sapien
accgcattgagcaagaagggcccca

SEQ ID NO: 847272 - DNA, 25 bp, Homo sapien
gcaggcactcgtgggcagccaggac

SEQ ID NO: 847273 - DNA, 25 bp, Homo sapien
cattgagcaagaagggccccatctt

SEQ ID NO: 847274 - DNA, 25 bp, Homo sapien
tgtgttcaccccaactttgcctgtc

SEQ ID NO: 847275 - DNA, 25 bp, Homo sapien
gttcaccccaactttgcctgtctgg

SEQ ID NO: 847276 - DNA, 25 bp, Homo sapien
tttgtgttcaccccaactttgcctg

SEQ ID NO: 847277 - DNA, 25 bp, Homo sapien
tgttcaccccaactttgcctgtctg

SEQ ID NO: 847278 - DNA, 25 bp, Homo sapien
gattccattgatctccacggtgatg

SEQ ID NO: 847279 - DNA, 25 bp, Homo sapien
cattctcgtggttcagtatagcctg

SEQ ID NO: 847280 - DNA, 25 bp, Homo sapien
tcataggagtcactggcaactggat

SEQ ID NO: 847281 - DNA, 25 bp, Homo sapien
aggaatctgtaggaaggctgcacca

SEQ ID NO: 847282 - DNA, 25 bp, Homo sapien
tgttctgggcactctctcctgtttt

SEQ ID NO: 847283 - DNA, 25 bp, Homo sapien
ttctgggcactctctcctgttttca

SEQ ID NO: 847284 - DNA, 25 bp, Homo sapien
ctttaatgttctgggcactctctcc

SEQ ID NO: 847285 - DNA, 25 bp, Homo sapien
atctttaatgttctgggcactctct

SEQ ID NO: 847286 - DNA, 25 bp, Homo sapien
gctcagttcttccttcctatgtgag

SEQ ID NO: 847287 - DNA, 25 bp, Homo sapien
ctgacaaaagtcacagagaaggctc

SEQ ID NO: 847288 - DNA, 25 bp, Homo sapien
acagagaaggctcagttcttccttc

SEQ ID NO: 847289 - DNA, 25 bp, Homo sapien
caaaagtcacagagaaggctcagtt

SEQ ID NO: 847290 - DNA, 25 bp, Homo sapien
ggtagagcccggtactcacccagca

SEQ ID NO: 847291 - DNA, 25 bp, Homo sapien
cttccaggaggtagagcccggtact

SEQ ID NO: 847292 - DNA, 25 bp, Homo sapien
aggtagagcccggtactcacccagc

SEQ ID NO: 847293 - DNA, 25 bp, Homo sapien
ccaggaggtagagcccggtactcac

SEQ ID NO: 847294 - DNA, 25 bp, Homo sapien
gaatgacacagctctacggttttga

SEQ ID NO: 847295 - DNA, 25 bp, Homo sapien
ttgccatgagctggaactagacagt

SEQ ID NO: 847296 - DNA, 25 bp, Homo sapien
taggcacttcagtcactcacttaga

SEQ ID NO: 847297 - DNA, 25 bp, Homo sapien
ggcttctagtccattctgcagtgag

SEQ ID NO: 847298 - DNA, 25 bp, Homo sapien
tcttaggtttgatataagcaagctc

SEQ ID NO: 847299 - DNA, 25 bp, Homo sapien
tataagcaagctccagaaagaatgc

SEQ ID NO: 847300 - DNA, 25 bp, Homo sapien
ggtttgatataagcaagctccagaa

SEQ ID NO: 847301 - DNA, 25 bp, Homo sapien
ttctggccgccagatgggtggagat

SEQ ID NO: 847302 - DNA, 25 bp, Homo sapien
ttctgccaggcaaaatcctgggttc

SEQ ID NO: 847303 - DNA, 25 bp, Homo sapien
gacatgaattggtgagagaccaggc

SEQ ID NO: 847304 - DNA, 25 bp, Homo sapien
tcttctagcaggacctaagccagtc

SEQ ID NO: 847305 - DNA, 25 bp, Homo sapien
caggctgatcctggcaaaggtcttg

SEQ ID NO: 847306 - DNA, 25 bp, Homo sapien
agtcctgtccatccagcattggtga

SEQ ID NO: 847307 - DNA, 25 bp, Homo sapien
ggcacagctcccctgatagtgacag

SEQ ID NO: 847308 - DNA, 25 bp, Homo sapien
ccttggtaaggtcatcggtgtggca

SEQ ID NO: 847309 - DNA, 25 bp, Homo sapien
cccttgggcacgatgacgtagagga

SEQ ID NO: 847310 - DNA, 25 bp, Homo sapien
tttgtggttggcactgtcaggatga

SEQ ID NO: 847311 - DNA, 25 bp, Homo sapien
cctgaaggtttgtggttggcactgt

SEQ ID NO: 847312 - DNA, 25 bp, Homo sapien
gttggcactgtcaggatgatgttgt

SEQ ID NO: 847313 - DNA, 25 bp, Homo sapien
cggagcacaggctcggggtccttca

SEQ ID NO: 847314 - DNA, 25 bp, Homo sapien
caatcctctcaggacggcggaaagg

SEQ ID NO: 847315 - DNA, 25 bp, Homo sapien
atcctctcaggacggcggaaaggga

SEQ ID NO: 847316 - DNA, 25 bp, Homo sapien
cacaatcctctcaggacggcggaaa

SEQ ID NO: 847317 - DNA, 25 bp, Homo sapien
aatcctctcaggacggcggaaaggg

SEQ ID NO: 847318 - DNA, 25 bp, Homo sapien
catggtttccactgactaggaggat

SEQ ID NO: 847319 - DNA, 25 bp, Homo sapien
tggtttccactgactaggaggattc

SEQ ID NO: 847320 - DNA, 25 bp, Homo sapien
ttccactgactaggaggattccctg

SEQ ID NO: 847321 - DNA, 25 bp, Homo sapien
gtttccactgactaggaggattccc

SEQ ID NO: 847322 - DNA, 25 bp, Homo sapien
attgaggagggtccgcccaaactat

SEQ ID NO: 847323 - DNA, 25 bp, Homo sapien
gaggagggtccgcccaaactatctc

SEQ ID NO: 847324 - DNA, 25 bp, Homo sapien
gggtccgcccaaactatctccttca

SEQ ID NO: 847325 - DNA, 25 bp, Homo sapien
gagcattgaggagggtccgcccaaa

SEQ ID NO: 847326 - DNA, 25 bp, Homo sapien
tcatgcacgtagactgaccaaaggt

SEQ ID NO: 847327 - DNA, 25 bp, Homo sapien
cagggctgtccatacattccagtca

SEQ ID NO: 847328 - DNA, 25 bp, Homo sapien
gatccccaggactgtttcatgcacg

SEQ ID NO: 847329 - DNA, 25 bp, Homo sapien
ggtgggccttgattctcctctctcg

SEQ ID NO: 847330 - DNA, 25 bp, Homo sapien
ttctcccagaatttctgctcagtac

SEQ ID NO: 847331 - DNA, 25 bp, Homo sapien
tcatccccttctcccagaatttctg

SEQ ID NO: 847332 - DNA, 25 bp, Homo sapien
ccttctcccagaatttctgctcagt

SEQ ID NO: 847333 - DNA, 25 bp, Homo sapien
tccccttctcccagaatttctgctc

SEQ ID NO: 847334 - DNA, 25 bp, Homo sapien
aacacttattaggagaccaagaaca

SEQ ID NO: 847335 - DNA, 25 bp, Homo sapien
gatccaggtcgctacatgactgagg

SEQ ID NO: 847336 - DNA, 25 bp, Homo sapien
gtataacccaagaagcaccaccctg

SEQ ID NO: 847337 - DNA, 25 bp, Homo sapien
cagctgcaggaatgtctaacagagt

SEQ ID NO: 847338 - DNA, 25 bp, Homo sapien
cgaaaacatcgacattcaatgcagg

SEQ ID NO: 847339 - DNA, 25 bp, Homo sapien
gacaactcgaaaacatcgacattca

SEQ ID NO: 847340 - DNA, 25 bp, Homo sapien
aaggggaacaacattgacaactcga

SEQ ID NO: 847341 - DNA, 25 bp, Homo sapien
ccatagagctgtgggagacattgca

SEQ ID NO: 847342 - DNA, 25 bp, Homo sapien
cattgactgggactgtctcacattc

SEQ ID NO: 847343 - DNA, 25 bp, Homo sapien
ctcattgactgggactgtctcacat

SEQ ID NO: 847344 - DNA, 25 bp, Homo sapien
tgggactgtctcacattcactcttc

SEQ ID NO: 847345 - DNA, 25 bp, Homo sapien
gactgtctcacattcactcttcaga

SEQ ID NO: 847346 - DNA, 25 bp, Homo sapien
cagcaagctgtgtccgtaaccataa

SEQ ID NO: 847347 - DNA, 25 bp, Homo sapien
ttggtttatcaaggaggcgatgtcc

SEQ ID NO: 847348 - DNA, 25 bp, Homo sapien
taaccataagcaggttggcatgccg

SEQ ID NO: 847349 - DNA, 25 bp, Homo sapien
ttctagagaacactggccaaaggga

SEQ ID NO: 847350 - DNA, 25 bp, Homo sapien
cagatctcaagtgttttcctcagca

SEQ ID NO: 847351 - DNA, 25 bp, Homo sapien
ttgggcctgactgagatgagaaacc

SEQ ID NO: 847352 - DNA, 25 bp, Homo sapien
ctcagcatcaggacaggtttgggcc

SEQ ID NO: 847353 - DNA, 25 bp, Homo sapien
tgagattctaaaagctgcgaacctc

SEQ ID NO: 847354 - DNA, 25 bp, Homo sapien
tcaagtttgcaaaagtgacgtgaca

SEQ ID NO: 847355 - DNA, 25 bp, Homo sapien
agtgacgtgacatgtgcgttcttaa

SEQ ID NO: 847356 - DNA, 25 bp, Homo sapien
gaacagaatgaggtgtcaagtttgc

SEQ ID NO: 847357 - DNA, 25 bp, Homo sapien
cacatgatcacctcccctcaatcgt

SEQ ID NO: 847358 - DNA, 25 bp, Homo sapien
tcaaagaagggaaccagattcttct

SEQ ID NO: 847359 - DNA, 25 bp, Homo sapien
gtgagagagggtctggtactcagca

SEQ ID NO: 847360 - DNA, 25 bp, Homo sapien
ggcctcaaagaagggaaccagattc

SEQ ID NO: 847361 - DNA, 25 bp, Homo sapien
caggcctcaaagaagggaaccagat

SEQ ID NO: 847362 - DNA, 25 bp, Homo sapien
actctggtagggaggccaggctgtc

SEQ ID NO: 847363 - DNA, 25 bp, Homo sapien
gtagggaggccaggctgtcagccac

SEQ ID NO: 847364 - DNA, 25 bp, Homo sapien
ccactctggtagggaggccaggctg

SEQ ID NO: 847365 - DNA, 25 bp, Homo sapien
tggtagggaggccaggctgtcagcc

SEQ ID NO: 847366 - DNA, 25 bp, Homo sapien
tacttcctggcacggaggtacactt

SEQ ID NO: 847367 - DNA, 25 bp, Homo sapien
gagttgatggcgtgaccctgccttt

SEQ ID NO: 847368 - DNA, 25 bp, Homo sapien
gccaccatctagtggtcaggcttgg

SEQ ID NO: 847369 - DNA, 25 bp, Homo sapien
ttttttcttatgaccgtggccacca

SEQ ID NO: 847370 - DNA, 25 bp, Homo sapien
aaggactgaatgctaaccccaaggg

SEQ ID NO: 847371 - DNA, 25 bp, Homo sapien
tcagcacccaggatgtgcacgctag

SEQ ID NO: 847372 - DNA, 25 bp, Homo sapien
tgcacgctagactggacaccgttaa

SEQ ID NO: 847373 - DNA, 25 bp, Homo sapien
taacagtccactatgggaccaggag

SEQ ID NO: 847374 - DNA, 25 bp, Homo sapien
cgaatgggcatatagacttagtagc

SEQ ID NO: 847375 - DNA, 25 bp, Homo sapien
taatcctgttccagagtgaagccca

SEQ ID NO: 847376 - DNA, 25 bp, Homo sapien
gttttgtggtatgaacgaatgggca

SEQ ID NO: 847377 - DNA, 25 bp, Homo sapien
tagcagctgttaacatgactttgtc

SEQ ID NO: 847378 - DNA, 25 bp, Homo sapien
ctttgatgtgtagagcccctggcaa

SEQ ID NO: 847379 - DNA, 25 bp, Homo sapien
gtaaatagctcacgcaatgcctgga

SEQ ID NO: 847380 - DNA, 25 bp, Homo sapien
tacccaaggctggatgacccaaagg

SEQ ID NO: 847381 - DNA, 25 bp, Homo sapien
tctaaccgaagagtcaagatgggct

SEQ ID NO: 847382 - DNA, 25 bp, Homo sapien
tcattactggtcattagggaaatgt

SEQ ID NO: 847383 - DNA, 25 bp, Homo sapien
catttatgtggccaataaacatgaa

SEQ ID NO: 847384 - DNA, 25 bp, Homo sapien
gaagacaatgtgatgattcctcaaa

SEQ ID NO: 847385 - DNA, 25 bp, Homo sapien
gacaatgtgatgattcctcaaagat

SEQ ID NO: 847386 - DNA, 25 bp, Homo sapien
tggaagactatgttggcatgcaagc

SEQ ID NO: 847387 - DNA, 25 bp, Homo sapien
ggaaacactcgcagagaccaaatca

SEQ ID NO: 847388 - DNA, 25 bp, Homo sapien
aggagggccgcattcacgctgaaat

SEQ ID NO: 847389 - DNA, 25 bp, Homo sapien
tcatgcttgcatagggtagaaaaca

SEQ ID NO: 847390 - DNA, 25 bp, Homo sapien
gctggtgtggaacgccagacctcag

SEQ ID NO: 847391 - DNA, 25 bp, Homo sapien
caggctggtgtggaacgccagacct

SEQ ID NO: 847392 - DNA, 25 bp, Homo sapien
tggtgtggaacgccagacctcaggt

SEQ ID NO: 847393 - DNA, 25 bp, Homo sapien
gtgtggaacgccagacctcaggtga

SEQ ID NO: 847394 - DNA, 25 bp, Homo sapien
caaagattctatgcagaggacacag

SEQ ID NO: 847395 - DNA, 25 bp, Homo sapien
cagtaggagctttgacggtcccatt

SEQ ID NO: 847396 - DNA, 25 bp, Homo sapien
caagtagagagcatattgaccagtc

SEQ ID NO: 847397 - DNA, 25 bp, Homo sapien
ttaaaaccacggcaagagactgtgt

SEQ ID NO: 847398 - DNA, 25 bp, Homo sapien
agttccacatggcactttttcatcg

SEQ ID NO: 847399 - DNA, 25 bp, Homo sapien
ccgagatgaattgtagcaaagtgat

SEQ ID NO: 847400 - DNA, 25 bp, Homo sapien
gcagggatcacaacacaggcacctt

SEQ ID NO: 847401 - DNA, 25 bp, Homo sapien
gcaaaatcggaaagctaaaacagta

SEQ ID NO: 847402 - DNA, 25 bp, Homo sapien
ttagttcggtccactgtcattcggc

SEQ ID NO: 847403 - DNA, 25 bp, Homo sapien
tttataggattagttcggtccactg

SEQ ID NO: 847404 - DNA, 25 bp, Homo sapien
tcggtccactgtcattcggctaaaa

SEQ ID NO: 847405 - DNA, 25 bp, Homo sapien
cattcggctaaaatgccttgtatct

SEQ ID NO: 847406 - DNA, 25 bp, Homo sapien
gactactgattgttagtgacctgcg

SEQ ID NO: 847407 - DNA, 25 bp, Homo sapien
tcttggccgatatggctagtcacta

SEQ ID NO: 847408 - DNA, 25 bp, Homo sapien
tacaatgcttgtgagaccctctact

SEQ ID NO: 847409 - DNA, 25 bp, Homo sapien
aaagcattgccgaacatgattctgc

SEQ ID NO: 847410 - DNA, 25 bp, Homo sapien
ccaatacttagtacctcagctgttg

SEQ ID NO: 847411 - DNA, 25 bp, Homo sapien
aatacttagtacctcagctgttgcc

SEQ ID NO: 847412 - DNA, 25 bp, Homo sapien
ttttaccaatacttagtacctcagc

SEQ ID NO: 847413 - DNA, 25 bp, Homo sapien
ttaccaatacttagtacctcagctg

SEQ ID NO: 847414 - DNA, 25 bp, Homo sapien
ggagcaattagctgttcctcagatg

SEQ ID NO: 847415 - DNA, 25 bp, Homo sapien
gactctgggtcattactggcatcat

SEQ ID NO: 847416 - DNA, 25 bp, Homo sapien
cagtttggcctatgagaagttcacc

SEQ ID NO: 847417 - DNA, 25 bp, Homo sapien
tcatttcacactcgggagcagcaaa

SEQ ID NO: 847418 - DNA, 25 bp, Homo sapien
tctttgaggtcctgatgaggctgtt

SEQ ID NO: 847419 - DNA, 25 bp, Homo sapien
ccatctactgatggccagagtctcc

SEQ ID NO: 847420 - DNA, 25 bp, Homo sapien
cctgatgaggctgtttgtctttctg

SEQ ID NO: 847421 - DNA, 25 bp, Homo sapien
gaggtcctgatgaggctgtttgtct

SEQ ID NO: 847422 - DNA, 25 bp, Homo sapien
gtttttctataaccatcttgagccc

SEQ ID NO: 847423 - DNA, 25 bp, Homo sapien
taaccatcttgagcccttcaggagt

SEQ ID NO: 847424 - DNA, 25 bp, Homo sapien
cttaagtttttctataaccatcttg

SEQ ID NO: 847425 - DNA, 25 bp, Homo sapien
tctataaccatcttgagcccttcag

SEQ ID NO: 847426 - DNA, 25 bp, Homo sapien
ttatgcacagatgttacttgaagtt

SEQ ID NO: 847427 - DNA, 25 bp, Homo sapien
ctttatgcacagatgttacttgaag

SEQ ID NO: 847428 - DNA, 25 bp, Homo sapien
tttatgcacagatgttacttgaagt

SEQ ID NO: 847429 - DNA, 25 bp, Homo sapien
tctgcttgagcggaggacagctgat

SEQ ID NO: 847430 - DNA, 25 bp, Homo sapien
ttcacactcacctttaatccgcaga

SEQ ID NO: 847431 - DNA, 25 bp, Homo sapien
ctgcttgagcggaggacagctgata

SEQ ID NO: 847432 - DNA, 25 bp, Homo sapien
gcaccaaatttcatgcgcgtccatg

SEQ ID NO: 847433 - DNA, 25 bp, Homo sapien
accaaatttcatgcgcgtccatgtg

SEQ ID NO: 847434 - DNA, 25 bp, Homo sapien
caaatttcatgcgcgtccatgtgaa

SEQ ID NO: 847435 - DNA, 25 bp, Homo sapien
aaatttcatgcgcgtccatgtgaag

SEQ ID NO: 847436 - DNA, 25 bp, Homo sapien
ggtcccacacagatgggacgcggct

SEQ ID NO: 847437 - DNA, 25 bp, Homo sapien
tcccacacagatgggacgcggctta

SEQ ID NO: 847438 - DNA, 25 bp, Homo sapien
cccacacagatgggacgcggcttag

SEQ ID NO: 847439 - DNA, 25 bp, Homo sapien
ggggtcccacacagatgggacgcgg

SEQ ID NO: 847440 - DNA, 25 bp, Homo sapien
tgggaagttaatgaaaattacagtc

SEQ ID NO: 847441 - DNA, 25 bp, Homo sapien
gttgttctctgttgggcaggggcag

SEQ ID NO: 847442 - DNA, 25 bp, Homo sapien
tgttctctgttgggcaggggcaggt

SEQ ID NO: 847443 - DNA, 25 bp, Homo sapien
ggaagttaatgaaaattacagtcaa

SEQ ID NO: 847444 - DNA, 25 bp, Homo sapien
tggttacccatccatctgttttgca

SEQ ID NO: 847445 - DNA, 25 bp, Homo sapien
ggtctgctaagttggttacccatcc

SEQ ID NO: 847446 - DNA, 25 bp, Homo sapien
tttccttggtctgctaagttggtta

SEQ ID NO: 847447 - DNA, 25 bp, Homo sapien
gctaagttggttacccatccatctg

SEQ ID NO: 847448 - DNA, 25 bp, Homo sapien
aacgacagcagtctgcagtctgcat

SEQ ID NO: 847449 - DNA, 25 bp, Homo sapien
ttccccctgatggccgatcctctgc

SEQ ID NO: 847450 - DNA, 25 bp, Homo sapien
agaacgacagcagtctgcagtctgc

SEQ ID NO: 847451 - DNA, 25 bp, Homo sapien
agtctgcattcttccccctgatggc

SEQ ID NO: 847452 - DNA, 25 bp, Homo sapien
ttggtgatggccacaaaagggaaga

SEQ ID NO: 847453 - DNA, 25 bp, Homo sapien
ctttggtgatggccacaaaagggaa

SEQ ID NO: 847454 - DNA, 25 bp, Homo sapien
tggtgatggccacaaaagggaagag

SEQ ID NO: 847455 - DNA, 25 bp, Homo sapien
tttggtgatggccacaaaagggaag

SEQ ID NO: 847456 - DNA, 25 bp, Homo sapien
ttctgagaatgtgggaaagtgcatt

SEQ ID NO: 847457 - DNA, 25 bp, Homo sapien
gccttttgtggtacttgcttcgatc

SEQ ID NO: 847458 - DNA, 25 bp, Homo sapien
caaagagaggaagacctaatatttc

SEQ ID NO: 847459 - DNA, 25 bp, Homo sapien
aagggattgaactccactttggcca

SEQ ID NO: 847460 - DNA, 25 bp, Homo sapien
tgctgcacctgtgcaatgtaggtga

SEQ ID NO: 847461 - DNA, 25 bp, Homo sapien
gctgcacctgtgcaatgtaggtgac

SEQ ID NO: 847462 - DNA, 25 bp, Homo sapien
ccttcctacttgctaagatttggct

SEQ ID NO: 847463 - DNA, 25 bp, Homo sapien
ttcccttcctacttgctaagatttg

SEQ ID NO: 847464 - DNA, 25 bp, Homo sapien
tgcccctttcccttcctacttgcta

SEQ ID NO: 847465 - DNA, 25 bp, Homo sapien
cctttcccttcctacttgctaagat

SEQ ID NO: 847466 - DNA, 25 bp, Homo sapien
ttgaatgtctgtaataggtagccac

SEQ ID NO: 847467 - DNA, 25 bp, Homo sapien
cctactaggagagatatgaaaagac

SEQ ID NO: 847468 - DNA, 25 bp, Homo sapien
tgtagtactacatagagtgcctcaa

SEQ ID NO: 847469 - DNA, 25 bp, Homo sapien
tttgagatgcccaaggactagacct

SEQ ID NO: 847470 - DNA, 25 bp, Homo sapien
ctgtgggattaagtgaggagctggg

SEQ ID NO: 847471 - DNA, 25 bp, Homo sapien
tgactgtgggattaagtgaggagct

SEQ ID NO: 847472 - DNA, 25 bp, Homo sapien
ggcagtgaaatgagtagaacctcat

SEQ ID NO: 847473 - DNA, 25 bp, Homo sapien
ggtgactgtgggattaagtgaggag

SEQ ID NO: 847474 - DNA, 25 bp, Homo sapien
ttgatggaagttactccttggttgt

SEQ ID NO: 847475 - DNA, 25 bp, Homo sapien
cttgatggaagttactccttggttg

SEQ ID NO: 847476 - DNA, 25 bp, Homo sapien
tgatggaagttactccttggttgtt

SEQ ID NO: 847477 - DNA, 25 bp, Homo sapien
tcttgatggaagttactccttggtt

SEQ ID NO: 847478 - DNA, 25 bp, Homo sapien
gactggtgggatgcctgtttctaga

SEQ ID NO: 847479 - DNA, 25 bp, Homo sapien
catttgtcaccagactgtagattga

SEQ ID NO: 847480 - DNA, 25 bp, Homo sapien
tacgaatctgatgactatctatgaa

SEQ ID NO: 847481 - DNA, 25 bp, Homo sapien
actccagctgagaagaggttggtta

SEQ ID NO: 847482 - DNA, 25 bp, Homo sapien
attgcaggccatgctccgataggag

SEQ ID NO: 847483 - DNA, 25 bp, Homo sapien
agcagttgagtgaggcatccagccc

SEQ ID NO: 847484 - DNA, 25 bp, Homo sapien
aggaatctgtaggaaggctgcacca

SEQ ID NO: 847485 - DNA, 25 bp, Homo sapien
cattgagcaagaagggccccatctt

SEQ ID NO: 847486 - DNA, 25 bp, Homo sapien
atctttaatgttctgggcactctct

SEQ ID NO: 847487 - DNA, 25 bp, Homo sapien
tgttctgggcactctctcctgtttt

SEQ ID NO: 847488 - DNA, 25 bp, Homo sapien
ctttaatgttctgggcactctctcc

SEQ ID NO: 847489 - DNA, 25 bp, Homo sapien
ttctgggcactctctcctgttttca

SEQ ID NO: 847490 - DNA, 25 bp, Homo sapien
acagagaaggctcagttcttccttc

SEQ ID NO: 847491 - DNA, 25 bp, Homo sapien
ctgacaaaagtcacagagaaggctc

SEQ ID NO: 847492 - DNA, 25 bp, Homo sapien
gctcagttcttccttcctatgtgag

SEQ ID NO: 847493 - DNA, 25 bp, Homo sapien
caaaagtcacagagaaggctcagtt

SEQ ID NO: 847494 - DNA, 25 bp, Homo sapien
cttccaggaggtagagcccggtact

SEQ ID NO: 847495 - DNA, 25 bp, Homo sapien
ggtagagcccggtactcacccagca

SEQ ID NO: 847496 - DNA, 25 bp, Homo sapien
ccaggaggtagagcccggtactcac

SEQ ID NO: 847497 - DNA, 25 bp, Homo sapien
aggtagagcccggtactcacccagc

SEQ ID NO: 847498 - DNA, 25 bp, Homo sapien
ggcttctagtccattctgcagtgag

SEQ ID NO: 847499 - DNA, 25 bp, Homo sapien
gaatgacacagctctacggttttga

SEQ ID NO: 847500 - DNA, 25 bp, Homo sapien
taggcacttcagtcactcacttaga

SEQ ID NO: 847501 - DNA, 25 bp, Homo sapien
ttgccatgagctggaactagacagt

SEQ ID NO: 847502 - DNA, 25 bp, Homo sapien
tataagcaagctccagaaagaatgc

SEQ ID NO: 847503 - DNA, 25 bp, Homo sapien
ggtttgatataagcaagctccagaa

SEQ ID NO: 847504 - DNA, 25 bp, Homo sapien
tcttaggtttgatataagcaagctc

SEQ ID NO: 847505 - DNA, 25 bp, Homo sapien
ttctggccgccagatgggtggagat

SEQ ID NO: 847506 - DNA, 25 bp, Homo sapien
ttctgccaggcaaaatcctgggttc

SEQ ID NO: 847507 - DNA, 25 bp, Homo sapien
gacatgaattggtgagagaccaggc

SEQ ID NO: 847508 - DNA, 25 bp, Homo sapien
caggctgatcctggcaaaggtcttg

SEQ ID NO: 847509 - DNA, 25 bp, Homo sapien
tcttctagcaggacctaagccagtc

SEQ ID NO: 847510 - DNA, 25 bp, Homo sapien
agtcctgtccatccagcattggtga

SEQ ID NO: 847511 - DNA, 25 bp, Homo sapien
ggcacagctcccctgatagtgacag

SEQ ID NO: 847512 - DNA, 25 bp, Homo sapien
ccttggtaaggtcatcggtgtggca

SEQ ID NO: 847513 - DNA, 25 bp, Homo sapien
cccttgggcacgatgacgtagagga

SEQ ID NO: 847514 - DNA, 25 bp, Homo sapien
cggagcacaggctcggggtccttca

SEQ ID NO: 847515 - DNA, 25 bp, Homo sapien
aatcctctcaggacggcggaaaggg

SEQ ID NO: 847516 - DNA, 25 bp, Homo sapien
cctgaaggtttgtggttggcactgt

SEQ ID NO: 847517 - DNA, 25 bp, Homo sapien
gttggcactgtcaggatgatgttgt

SEQ ID NO: 847518 - DNA, 25 bp, Homo sapien
tggtttccactgactaggaggattc

SEQ ID NO: 847519 - DNA, 25 bp, Homo sapien
gtttccactgactaggaggattccc

SEQ ID NO: 847520 - DNA, 25 bp, Homo sapien
catggtttccactgactaggaggat

SEQ ID NO: 847521 - DNA, 25 bp, Homo sapien
ttccactgactaggaggattccctg

SEQ ID NO: 847522 - DNA, 25 bp, Homo sapien
ttatactttacatagtcattcttgc

SEQ ID NO: 847523 - DNA, 25 bp, Homo sapien
catagtcattcttgctgtaattcga

SEQ ID NO: 847524 - DNA, 25 bp, Homo sapien
gagaatttggttatactttacatag

SEQ ID NO: 847525 - DNA, 25 bp, Homo sapien
tcttgctgtaattcgacaccttcat

SEQ ID NO: 847526 - DNA, 25 bp, Homo sapien
attgaggagggtccgcccaaactat

SEQ ID NO: 847527 - DNA, 25 bp, Homo sapien
gaggagggtccgcccaaactatctc

SEQ ID NO: 847528 - DNA, 25 bp, Homo sapien
gggtccgcccaaactatctccttca

SEQ ID NO: 847529 - DNA, 25 bp, Homo sapien
gagcattgaggagggtccgcccaaa

SEQ ID NO: 847530 - DNA, 25 bp, Homo sapien
tcatgcacgtagactgaccaaaggt

SEQ ID NO: 847531 - DNA, 25 bp, Homo sapien
ggtgggccttgattctcctctctcg

SEQ ID NO: 847532 - DNA, 25 bp, Homo sapien
gatccccaggactgtttcatgcacg

SEQ ID NO: 847533 - DNA, 25 bp, Homo sapien
cagggctgtccatacattccagtca

SEQ ID NO: 847534 - DNA, 25 bp, Homo sapien
cagctgcaggaatgtctaacagagt

SEQ ID NO: 847535 - DNA, 25 bp, Homo sapien
gatccaggtcgctacatgactgagg

SEQ ID NO: 847536 - DNA, 25 bp, Homo sapien
gtataacccaagaagcaccaccctg

SEQ ID NO: 847537 - DNA, 25 bp, Homo sapien
aacacttattaggagaccaagaaca

SEQ ID NO: 847538 - DNA, 25 bp, Homo sapien
agacattgcaggagatctgaaaggg

SEQ ID NO: 847539 - DNA, 25 bp, Homo sapien
tgaaaacatcgacattcaatgcagg

SEQ ID NO: 847540 - DNA, 25 bp, Homo sapien
gggaacaacattgacaacttgaaaa

SEQ ID NO: 847541 - DNA, 25 bp, Homo sapien
ccatagagctgtgggagacattgca

SEQ ID NO: 847542 - DNA, 25 bp, Homo sapien
cattgactgggactgtctcacattc

SEQ ID NO: 847543 - DNA, 25 bp, Homo sapien
ctcattgactgggactgtctcacat

SEQ ID NO: 847544 - DNA, 25 bp, Homo sapien
tgggactgtctcacattcactcttc

SEQ ID NO: 847545 - DNA, 25 bp, Homo sapien
gactgtctcacattcactcttcaga

SEQ ID NO: 847546 - DNA, 25 bp, Homo sapien
gctcccacccgaaggcctgttggag

SEQ ID NO: 847547 - DNA, 25 bp, Homo sapien
ccactctggtagggaggccaggctg

SEQ ID NO: 847548 - DNA, 25 bp, Homo sapien
gtagggaggccaggctgtcagccac

SEQ ID NO: 847549 - DNA, 25 bp, Homo sapien
actctggtagggaggccaggctgtc

SEQ ID NO: 847550 - DNA, 25 bp, Homo sapien
tggtagggaggccaggctgtcagcc

SEQ ID NO: 847551 - DNA, 25 bp, Homo sapien
tacttcctggcacggaggtacactt

SEQ ID NO: 847552 - DNA, 25 bp, Homo sapien
gccaccatctagtggtcaggcttgg

SEQ ID NO: 847553 - DNA, 25 bp, Homo sapien
gagttgatggcgtgaccctgccttt

SEQ ID NO: 847554 - DNA, 25 bp, Homo sapien
ttttttcttatgaccgtggccacca

SEQ ID NO: 847555 - DNA, 25 bp, Homo sapien
cagcgtgtctcgcttgctatttgaa

SEQ ID NO: 847556 - DNA, 25 bp, Homo sapien
gggctctctccactattccagcgtg

SEQ ID NO: 847557 - DNA, 25 bp, Homo sapien
tcaaaaatagaagcctcaggatggc

SEQ ID NO: 847558 - DNA, 25 bp, Homo sapien
tatgggaacccgtggtctttagagc

SEQ ID NO: 847559 - DNA, 25 bp, Homo sapien
aagatgctaagaacacttcgagtgg

SEQ ID NO: 847560 - DNA, 25 bp, Homo sapien
gaactgatacctgaactctatgaca

SEQ ID NO: 847561 - DNA, 25 bp, Homo sapien
caaaatatcttgagttccaacaggt

SEQ ID NO: 847562 - DNA, 25 bp, Homo sapien
gaagttttactaccattagctgagg

SEQ ID NO: 847563 - DNA, 25 bp, Homo sapien
cctcaaccaaaatgtttatgcttac

SEQ ID NO: 847564 - DNA, 25 bp, Homo sapien
aacaatgacactaaagtatttgaat

SEQ ID NO: 847565 - DNA, 25 bp, Homo sapien
caatacatcatttttgctagctatg

SEQ ID NO: 847566 - DNA, 25 bp, Homo sapien
gctatgattacatgctgctattttg

SEQ ID NO: 847567 - DNA, 25 bp, Homo sapien
caatagtagtactttaccatgagga

SEQ ID NO: 847568 - DNA, 25 bp, Homo sapien
gctcccaaatggcaggtactttctg

SEQ ID NO: 847569 - DNA, 25 bp, Homo sapien
gttgttaggttccattcctcaggca

SEQ ID NO: 847570 - DNA, 25 bp, Homo sapien
cacacaaaagataccgagccagctt

SEQ ID NO: 847571 - DNA, 25 bp, Homo sapien
tacttgtgttattctgggtcctcca

SEQ ID NO: 847572 - DNA, 25 bp, Homo sapien
gacaggatcagatatgcgagagatt

SEQ ID NO: 847573 - DNA, 25 bp, Homo sapien
gctttttacttccactacaacacaa

SEQ ID NO: 847574 - DNA, 25 bp, Homo sapien
gatactctcaagttagtaaccttgc

SEQ ID NO: 847575 - DNA, 25 bp, Homo sapien
tatattacactgatgtaggtgcaat

SEQ ID NO: 847576 - DNA, 25 bp, Homo sapien
atattacactgatgtaggtgcaatt

SEQ ID NO: 847577 - DNA, 25 bp, Homo sapien
ttatattacactgatgtaggtgcaa

SEQ ID NO: 847578 - DNA, 25 bp, Homo sapien
tttatattacactgatgtaggtgca

SEQ ID NO: 847579 - DNA, 25 bp, Homo sapien
taaagtctgagatagtgcccaaagg

SEQ ID NO: 847580 - DNA, 25 bp, Homo sapien
tcacaggtttagagagaagacccct

SEQ ID NO: 847581 - DNA, 25 bp, Homo sapien
ttcttcctgaacagaccccgtaggc

SEQ ID NO: 847582 - DNA, 25 bp, Homo sapien
tatttccatgaatcgcttagtgaca

SEQ ID NO: 847583 - DNA, 25 bp, Homo sapien
tcatactcactaccaggttaccagg

SEQ ID NO: 847584 - DNA, 25 bp, Homo sapien
gatttaccctcacaaatgggagtag

SEQ ID NO: 847585 - DNA, 25 bp, Homo sapien
tagctctgctcagttgctgctcctc

SEQ ID NO: 847586 - DNA, 25 bp, Homo sapien
tggaggcaaggcaccagactggttc

SEQ ID NO: 847587 - DNA, 25 bp, Homo sapien
gctggtatagtattctaggctagca

SEQ ID NO: 847588 - DNA, 25 bp, Homo sapien
tgctgatctgggaaagactatttct

SEQ ID NO: 847589 - DNA, 25 bp, Homo sapien
catatcaccattgcagtaatgaagc

SEQ ID NO: 847590 - DNA, 25 bp, Homo sapien
ttcactttttggcatcccacagagc

SEQ ID NO: 847591 - DNA, 25 bp, Homo sapien
ttgtggactaacatatattctatcg

SEQ ID NO: 847592 - DNA, 25 bp, Homo sapien
ttctatcgtggagaaaagttccatg

SEQ ID NO: 847593 - DNA, 25 bp, Homo sapien
gctatttggtctagaatgtaattta

SEQ ID NO: 847594 - DNA, 25 bp, Homo sapien
atgtacattcagtagttattgaggg

SEQ ID NO: 847595 - DNA, 25 bp, Homo sapien
ccacttttgtgtgagattgtacagt

SEQ ID NO: 847596 - DNA, 25 bp, Homo sapien
tattcgtctttacatgcctggctta

SEQ ID NO: 847597 - DNA, 25 bp, Homo sapien
tcctctgggcccaattacgttgcca

SEQ ID NO: 847598 - DNA, 25 bp, Homo sapien
tgtacctgttgaccagtctatcccc

SEQ ID NO: 847599 - DNA, 25 bp, Homo sapien
caaatgaggtcatcacgattagctc

SEQ ID NO: 847600 - DNA, 25 bp, Homo sapien
tagcttatactaggctcccagtaag

SEQ ID NO: 847601 - DNA, 25 bp, Homo sapien
gtctccagattgagagggcccaata

SEQ ID NO: 847602 - DNA, 25 bp, Homo sapien
cctttgcacccttactgaggaagta

SEQ ID NO: 847603 - DNA, 25 bp, Homo sapien
tcagttattctttctagggtaccat

SEQ ID NO: 847604 - DNA, 25 bp, Homo sapien
ttattctttctagggtaccatgaaa

SEQ ID NO: 847605 - DNA, 25 bp, Homo sapien
tctttctagggtaccatgaaagtgt

SEQ ID NO: 847606 - DNA, 25 bp, Homo sapien
agttattctttctagggtaccatga

SEQ ID NO: 847607 - DNA, 25 bp, Homo sapien
ttcaaaaagggttgcctgcgctttc

SEQ ID NO: 847608 - DNA, 25 bp, Homo sapien
aaaagggttgcctgcgctttctcca

SEQ ID NO: 847609 - DNA, 25 bp, Homo sapien
caaaaagggttgcctgcgctttctc

SEQ ID NO: 847610 - DNA, 25 bp, Homo sapien
aaagggttgcctgcgctttctccat

SEQ ID NO: 847611 - DNA, 25 bp, Homo sapien
ggctgccaaagtggtcgcgtttttg

SEQ ID NO: 847612 - DNA, 25 bp, Homo sapien
caaagtggtcgcgtttttggcctgg

SEQ ID NO: 847613 - DNA, 25 bp, Homo sapien
gctgccaaagtggtcgcgtttttgg

SEQ ID NO: 847614 - DNA, 25 bp, Homo sapien
tgccaaagtggtcgcgtttttggcc

SEQ ID NO: 847615 - DNA, 25 bp, Homo sapien
gagaaggaggcactgggtcggggtc

SEQ ID NO: 847616 - DNA, 25 bp, Homo sapien
tgggagaaggaggcactgggtcggg

SEQ ID NO: 847617 - DNA, 25 bp, Homo sapien
ctgaggtgcgggtgggagaaggagg

SEQ ID NO: 847618 - DNA, 25 bp, Homo sapien
gggtgggagaaggaggcactgggtc

SEQ ID NO: 847619 - DNA, 25 bp, Homo sapien
gggtgagtctcgtccaaagctggtt

SEQ ID NO: 847620 - DNA, 25 bp, Homo sapien
cctggtgtggaaattgctggacgaa

SEQ ID NO: 847621 - DNA, 25 bp, Homo sapien
tgaaacaaatcgtcctgctgcactc

SEQ ID NO: 847622 - DNA, 25 bp, Homo sapien
tagaaactgacacaaagccgggcct

SEQ ID NO: 847623 - DNA, 25 bp, Homo sapien
tttaatgtcttttgggactgcaata

SEQ ID NO: 847624 - DNA, 25 bp, Homo sapien
cccctgataattataatggattctc

SEQ ID NO: 847625 - DNA, 25 bp, Homo sapien
gattacttgtaatatcactttgtta

SEQ ID NO: 847626 - DNA, 25 bp, Homo sapien
gactgcaataatgtcccctgataat

SEQ ID NO: 847627 - DNA, 25 bp, Homo sapien
taccatattttgtgatgcacctgca

SEQ ID NO: 847628 - DNA, 25 bp, Homo sapien
tgaacatacatctggtcagcctaaa

SEQ ID NO: 847629 - DNA, 25 bp, Homo sapien
tcagcctaaataatgtcagacagtt

SEQ ID NO: 847630 - DNA, 25 bp, Homo sapien
gttttaggtcgatgagattcttcca

SEQ ID NO: 847631 - DNA, 25 bp, Homo sapien
gcagtctccgcctaagactttccaa

SEQ ID NO: 847632 - DNA, 25 bp, Homo sapien
agtcctgtagtttcgagcccgctgc

SEQ ID NO: 847633 - DNA, 25 bp, Homo sapien
tcccgctcctagcaggttgctactg

SEQ ID NO: 847634 - DNA, 25 bp, Homo sapien
gactttccaagtcctgtagtttcga

SEQ ID NO: 847635 - DNA, 25 bp, Homo sapien
ctcccaggatcacagccagtccaca

SEQ ID NO: 847636 - DNA, 25 bp, Homo sapien
cagagctataaaacatgcgatgacg

SEQ ID NO: 847637 - DNA, 25 bp, Homo sapien
taaaacatgcgatgacgtgtaagaa

SEQ ID NO: 847638 - DNA, 25 bp, Homo sapien
tcttcagagctataaaacatgcgat

SEQ ID NO: 847639 - DNA, 25 bp, Homo sapien
catgcgatgacgtgtaagaaaggtc

SEQ ID NO: 847640 - DNA, 25 bp, Homo sapien
tccatagcgaccaattatcataaag

SEQ ID NO: 847641 - DNA, 25 bp, Homo sapien
tatccatagcgaccaattatcataa

SEQ ID NO: 847642 - DNA, 25 bp, Homo sapien
ttatccatagcgaccaattatcata

SEQ ID NO: 847643 - DNA, 25 bp, Homo sapien
catagcgaccaattatcataaaggc

SEQ ID NO: 847644 - DNA, 25 bp, Homo sapien
ggaaaatcataattttgtgtagatg

SEQ ID NO: 847645 - DNA, 25 bp, Homo sapien
atcataattttgtgtagatgaaacc

SEQ ID NO: 847646 - DNA, 25 bp, Homo sapien
tctgttattaaaaggaaaatcataa

SEQ ID NO: 847647 - DNA, 25 bp, Homo sapien
aaatcataattttgtgtagatgaaa

SEQ ID NO: 847648 - DNA, 25 bp, Homo sapien
gtccaattatctagacccagtttct

SEQ ID NO: 847649 - DNA, 25 bp, Homo sapien
caattatctagacccagtttctcaa

SEQ ID NO: 847650 - DNA, 25 bp, Homo sapien
cacacatctgagtccaattatctag

SEQ ID NO: 847651 - DNA, 25 bp, Homo sapien
ttcacacatctgagtccaattatct

SEQ ID NO: 847652 - DNA, 25 bp, Homo sapien
aaacagggatatctgagtgcaccag

SEQ ID NO: 847653 - DNA, 25 bp, Homo sapien
cagggatatctgagtgcaccagtca

SEQ ID NO: 847654 - DNA, 25 bp, Homo sapien
gatatctgagtgcaccagtcactgg

SEQ ID NO: 847655 - DNA, 25 bp, Homo sapien
ctgagtgcaccagtcactggataag

SEQ ID NO: 847656 - DNA, 25 bp, Homo sapien
gacaatgagacagttccccagcact

SEQ ID NO: 847657 - DNA, 25 bp, Homo sapien
aatgagacagttccccagcactgtc

SEQ ID NO: 847658 - DNA, 25 bp, Homo sapien
tgatcagaaggacaatgagacagtt

SEQ ID NO: 847659 - DNA, 25 bp, Homo sapien
ctgatcagaaggacaatgagacagt

SEQ ID NO: 847660 - DNA, 25 bp, Homo sapien
gaaaggtgatagcagtctgcacaag

SEQ ID NO: 847661 - DNA, 25 bp, Homo sapien
acaagagagttgatggagccactga

SEQ ID NO: 847662 - DNA, 25 bp, Homo sapien
tgcatgatggccgagtatcgcaggc

SEQ ID NO: 847663 - DNA, 25 bp, Homo sapien
caatgctagacaccatgatggcagc

SEQ ID NO: 847664 - DNA, 25 bp, Homo sapien
tcgttgtgccgtagcacagggcaac

SEQ ID NO: 847665 - DNA, 25 bp, Homo sapien
ggcatagaagacagagatcagcttc

SEQ ID NO: 847666 - DNA, 25 bp, Homo sapien
actataaatcacagggttcagcaga

SEQ ID NO: 847667 - DNA, 25 bp, Homo sapien
gttcagcagaggcataacaatggca

SEQ ID NO: 847668 - DNA, 25 bp, Homo sapien
tggatgttaacccagagaatttctc

SEQ ID NO: 847669 - DNA, 25 bp, Homo sapien
ggatgttaacccagagaatttctct

SEQ ID NO: 847670 - DNA, 25 bp, Homo sapien
catttggacacccagaacccaagtg

SEQ ID NO: 847671 - DNA, 25 bp, Homo sapien
atttggacacccagaacccaagtgc

SEQ ID NO: 847672 - DNA, 25 bp, Homo sapien
ttggacacccagaacccaagtgcca

SEQ ID NO: 847673 - DNA, 25 bp, Homo sapien
tttggacacccagaacccaagtgcc

SEQ ID NO: 847674 - DNA, 25 bp, Homo sapien
cttggttgtatacgctgaatgcatc

SEQ ID NO: 847675 - DNA, 25 bp, Homo sapien
ggttgtatacgctgaatgcatccat

SEQ ID NO: 847676 - DNA, 25 bp, Homo sapien
tgagcacttggttgtatacgctgaa

SEQ ID NO: 847677 - DNA, 25 bp, Homo sapien
cacttggttgtatacgctgaatgca

SEQ ID NO: 847678 - DNA, 25 bp, Homo sapien
ttctatcaacgacaaagaaagaaca

SEQ ID NO: 847679 - DNA, 25 bp, Homo sapien
attattagttacagcaaatatcagg

SEQ ID NO: 847680 - DNA, 25 bp, Homo sapien
taaatttcaatcagtcaagatctct

SEQ ID NO: 847681 - DNA, 25 bp, Homo sapien
gatctctctttagtaaagcaaatca

SEQ ID NO: 847682 - DNA, 25 bp, Homo sapien
cacataatagtaaaagctggagttt

SEQ ID NO: 847683 - DNA, 25 bp, Homo sapien
tcacataatagtaaaagctggagtt

SEQ ID NO: 847684 - DNA, 25 bp, Homo sapien
aaaagctggagttttagatgtaaat

SEQ ID NO: 847685 - DNA, 25 bp, Homo sapien
agctggagttttagatgtaaataac

SEQ ID NO: 847686 - DNA, 25 bp, Homo sapien
taaagctacagaagtgccgaaacag

SEQ ID NO: 847687 - DNA, 25 bp, Homo sapien
tccattgtttactgatgatccttag

SEQ ID NO: 847688 - DNA, 25 bp, Homo sapien
gcttcctgagacttggagcaagata

SEQ ID NO: 847689 - DNA, 25 bp, Homo sapien
aaggaattgaaggactaaagctaca

SEQ ID NO: 847690 - DNA, 25 bp, Homo sapien
tggggccaccggtctttcaggtagc

SEQ ID NO: 847691 - DNA, 25 bp, Homo sapien
tgtgggatgggattgtaattgtact

SEQ ID NO: 847692 - DNA, 25 bp, Homo sapien
gatggtttggatgctttgaggatcc

SEQ ID NO: 847693 - DNA, 25 bp, Homo sapien
tgtaattgtacttcggtctctctct

SEQ ID NO: 847694 - DNA, 25 bp, Homo sapien
caggccgaggagaataaattcactc

SEQ ID NO: 847695 - DNA, 25 bp, Homo sapien
ggccgaggagaataaattcactcac

SEQ ID NO: 847696 - DNA, 25 bp, Homo sapien
ctggacaggccgaggagaataaatt

SEQ ID NO: 847697 - DNA, 25 bp, Homo sapien
gacaggccgaggagaataaattcac

SEQ ID NO: 847698 - DNA, 25 bp, Homo sapien
gacaaacagggagacccgagtgtcc

SEQ ID NO: 847699 - DNA, 25 bp, Homo sapien
caaacagggagacccgagtgtccca

SEQ ID NO: 847700 - DNA, 25 bp, Homo sapien
aggacaaacagggagacccgagtgt

SEQ ID NO: 847701 - DNA, 25 bp, Homo sapien
cagggagacccgagtgtcccagtca

SEQ ID NO: 847702 - DNA, 25 bp, Homo sapien
aatgagacagttccccagcacggtc

SEQ ID NO: 847703 - DNA, 25 bp, Homo sapien
ctgatcagaaggacaatgagacagt

SEQ ID NO: 847704 - DNA, 25 bp, Homo sapien
tccccagcacggtcaccacatacat

SEQ ID NO: 847705 - DNA, 25 bp, Homo sapien
acaatgagacagttccccagcacgg

SEQ ID NO: 847706 - DNA, 25 bp, Homo sapien
tggcataggagacatcgacaaggga

SEQ ID NO: 847707 - DNA, 25 bp, Homo sapien
cttgtggcataggagacatcgacaa

SEQ ID NO: 847708 - DNA, 25 bp, Homo sapien
catgggagtgtggagtcggctgtcc

SEQ ID NO: 847709 - DNA, 25 bp, Homo sapien
cataggagacatcgacaagggagag

SEQ ID NO: 847710 - DNA, 25 bp, Homo sapien
gaatgggatggctttatgttctgca

SEQ ID NO: 847711 - DNA, 25 bp, Homo sapien
aatgggatggctttatgttctgcaa

SEQ ID NO: 847712 - DNA, 25 bp, Homo sapien
gaacaatgctagacaccatgatggt

SEQ ID NO: 847713 - DNA, 25 bp, Homo sapien
tatcgcagggcatcacacacagcca

SEQ ID NO: 847714 - DNA, 25 bp, Homo sapien
gaaaggtgatagcagtctgcacagg

SEQ ID NO: 847715 - DNA, 25 bp, Homo sapien
catgatggccgagtatcgcagggca

SEQ ID NO: 847716 - DNA, 25 bp, Homo sapien
tcagcattggtgttaaaatggcata

SEQ ID NO: 847717 - DNA, 25 bp, Homo sapien
ggttcagcattggtgttaaaatggc

SEQ ID NO: 847718 - DNA, 25 bp, Homo sapien
ttcagcattggtgttaaaatggcat

SEQ ID NO: 847719 - DNA, 25 bp, Homo sapien
gttcagcattggtgttaaaatggca

SEQ ID NO: 847720 - DNA, 25 bp, Homo sapien
ccagagaatttccataatagtttct

SEQ ID NO: 847721 - DNA, 25 bp, Homo sapien
tcaagttgccagctttgatgttaac

SEQ ID NO: 847722 - DNA, 25 bp, Homo sapien
agagtggagatttccgtgtgtgcat

SEQ ID NO: 847723 - DNA, 25 bp, Homo sapien
gagagtggagatttccgtgtgtgca

SEQ ID NO: 847724 - DNA, 25 bp, Homo sapien
acttgcccatgaaggtgacatttgg

SEQ ID NO: 847725 - DNA, 25 bp, Homo sapien
cagtgcaccggagtacgcttatccc

SEQ ID NO: 847726 - DNA, 25 bp, Homo sapien
accggagtacgcttatccccacttg

SEQ ID NO: 847727 - DNA, 25 bp, Homo sapien
ccaagagtcacagtgcaccggagta

SEQ ID NO: 847728 - DNA, 25 bp, Homo sapien
tgtgatgcagcaagttttccagata

SEQ ID NO: 847729 - DNA, 25 bp, Homo sapien
ccagatactatcattggggatgacg

SEQ ID NO: 847730 - DNA, 25 bp, Homo sapien
cattggggatgacgtgcacacaggt

SEQ ID NO: 847731 - DNA, 25 bp, Homo sapien
ggttggattcgtttatacttgacac

SEQ ID NO: 847732 - DNA, 25 bp, Homo sapien
aaataccctttctttagtgctgcct

SEQ ID NO: 847733 - DNA, 25 bp, Homo sapien
caaataccctttctttagtgctgcc

SEQ ID NO: 847734 - DNA, 25 bp, Homo sapien
ataccctttctttagtgctgcctac

SEQ ID NO: 847735 - DNA, 25 bp, Homo sapien
ttcaaataccctttctttagtgctg

SEQ ID NO: 847736 - DNA, 25 bp, Homo sapien
caagtgggacagcatttgtgggaca

SEQ ID NO: 847737 - DNA, 25 bp, Homo sapien
tagagctggagcacacaactgtaga

SEQ ID NO: 847738 - DNA, 25 bp, Homo sapien
tcaccaaatacatggccaggatcag

SEQ ID NO: 847739 - DNA, 25 bp, Homo sapien
gaagagggatacctgaatgccccaa

SEQ ID NO: 847740 - DNA, 25 bp, Homo sapien
agccctccatgcatgatgaccgtgt

SEQ ID NO: 847741 - DNA, 25 bp, Homo sapien
gccctccatgcatgatgaccgtgta

SEQ ID NO: 847742 - DNA, 25 bp, Homo sapien
gaccgtgtagtgcagtgggtggcac

SEQ ID NO: 847743 - DNA, 25 bp, Homo sapien
gcagtgggtggcacacggccacgta

SEQ ID NO: 847744 - DNA, 25 bp, Homo sapien
aggcggctggccgccagccccaggc

SEQ ID NO: 847745 - DNA, 25 bp, Homo sapien
caggcggctggccgccagccccagg

SEQ ID NO: 847746 - DNA, 25 bp, Homo sapien
gcggctggccgccagccccaggcac

SEQ ID NO: 847747 - DNA, 25 bp, Homo sapien
ggcggctggccgccagccccaggca

SEQ ID NO: 847748 - DNA, 25 bp, Homo sapien
tgattgataacaccgtgacacagga

SEQ ID NO: 847749 - DNA, 25 bp, Homo sapien
gacaaagtgattgataacaccgtga

SEQ ID NO: 847750 - DNA, 25 bp, Homo sapien
ataacaccgtgacacaggaagctgg

SEQ ID NO: 847751 - DNA, 25 bp, Homo sapien
aagctggaaggtgataattgtttcc

SEQ ID NO: 847752 - DNA, 25 bp, Homo sapien
caaaatggtggcaactatgcaagca

SEQ ID NO: 847753 - DNA, 25 bp, Homo sapien
tatgcaagcataggagaatagaacc

SEQ ID NO: 847754 - DNA, 25 bp, Homo sapien
ctgggtagaacgaatgcacaaaatg

SEQ ID NO: 847755 - DNA, 25 bp, Homo sapien
gaagcaagatcaccagaaaccctga

SEQ ID NO: 847756 - DNA, 25 bp, Homo sapien
gtaggtgcagatggtagccccaaag

SEQ ID NO: 847757 - DNA, 25 bp, Homo sapien
ggtaggtgcagatggtagccccaaa

SEQ ID NO: 847758 - DNA, 25 bp, Homo sapien
aggtgcagatggtagccccaaagca

SEQ ID NO: 847759 - DNA, 25 bp, Homo sapien
taggtgcagatggtagccccaaagc

SEQ ID NO: 847760 - DNA, 25 bp, Homo sapien
ctaaaactttccggacagcagccgt

SEQ ID NO: 847761 - DNA, 25 bp, Homo sapien
ttctaaaactttccggacagcagcc

SEQ ID NO: 847762 - DNA, 25 bp, Homo sapien
taaaactttccggacagcagccgta

SEQ ID NO: 847763 - DNA, 25 bp, Homo sapien
tctaaaactttccggacagcagccg

SEQ ID NO: 847764 - DNA, 25 bp, Homo sapien
tgtagaaaaattccagcttgcagca

SEQ ID NO: 847765 - DNA, 25 bp, Homo sapien
atctgtctgaaggggtgtatccaac

SEQ ID NO: 847766 - DNA, 25 bp, Homo sapien
tctgtctgaaggggtgtatccaact

SEQ ID NO: 847767 - DNA, 25 bp, Homo sapien
aaaattccagcttgcagcactgagc

SEQ ID NO: 847768 - DNA, 25 bp, Homo sapien
ttggctgcaagtcccatagaaggcc

SEQ ID NO: 847769 - DNA, 25 bp, Homo sapien
tattggtcacatcgggtctccagct

SEQ ID NO: 847770 - DNA, 25 bp, Homo sapien
tacgcagcagtttagcagggaagcc

SEQ ID NO: 847771 - DNA, 25 bp, Homo sapien
tcattactgagaaaggccaaaggtg

SEQ ID NO: 847772 - DNA, 25 bp, Homo sapien
tatcactttggcttttatttctttc

SEQ ID NO: 847773 - DNA, 25 bp, Homo sapien
agttatcactttggcttttatttct

SEQ ID NO: 847774 - DNA, 25 bp, Homo sapien
tgttgatgctgggctccatccaagt

SEQ ID NO: 847775 - DNA, 25 bp, Homo sapien
gctgggctccatccaagtcctcatc

SEQ ID NO: 847776 - DNA, 25 bp, Homo sapien
ccaagtcctcatcccctgtgggtgg

SEQ ID NO: 847777 - DNA, 25 bp, Homo sapien
ctcatcccctgtgggtggcagcttc

SEQ ID NO: 847778 - DNA, 25 bp, Homo sapien
taacttgatggacttgattggctaa

SEQ ID NO: 847779 - DNA, 25 bp, Homo sapien
ccatgaaggttattggactcttttg

SEQ ID NO: 847780 - DNA, 25 bp, Homo sapien
aacttgatggacttgattggctaac

SEQ ID NO: 847781 - DNA, 25 bp, Homo sapien
tattaagaatggttgtgtgtccatg

SEQ ID NO: 847782 - DNA, 25 bp, Homo sapien
catctgatgtggcacgaggctgctt

SEQ ID NO: 847783 - DNA, 25 bp, Homo sapien
cctaggcactaggaccacatctgca

SEQ ID NO: 847784 - DNA, 25 bp, Homo sapien
caggataagatgacaggagagccct

SEQ ID NO: 847785 - DNA, 25 bp, Homo sapien
tctgagggctttatagagtaccaag

SEQ ID NO: 847786 - DNA, 25 bp, Homo sapien
caccaattctaaaataggaagatgc

SEQ ID NO: 847787 - DNA, 25 bp, Homo sapien
aagagtgactgggtacagattgccc

SEQ ID NO: 847788 - DNA, 25 bp, Homo sapien
tctaaacctagaaagagtgactggg

SEQ ID NO: 847789 - DNA, 25 bp, Homo sapien
gaatagatgtgaggaacccactttc

SEQ ID NO: 847790 - DNA, 25 bp, Homo sapien
attggagacacagggcttagctctc

SEQ ID NO: 847791 - DNA, 25 bp, Homo sapien
gcagtggccgattttgcagcaccaa

SEQ ID NO: 847792 - DNA, 25 bp, Homo sapien
gatgtaccaggtctccaagaaggac

SEQ ID NO: 847793 - DNA, 25 bp, Homo sapien
gggaatcccaccagaatgaacttgg

SEQ ID NO: 847794 - DNA, 25 bp, Homo sapien
taaacagtaacttgggcacagtcac

SEQ ID NO: 847795 - DNA, 25 bp, Homo sapien
tgaaggcatggataactcgaggtcg

SEQ ID NO: 847796 - DNA, 25 bp, Homo sapien
gcatccgtaggacaggacagtaata

SEQ ID NO: 847797 - DNA, 25 bp, Homo sapien
tagtcagatctgctggcctggcaat

SEQ ID NO: 847798 - DNA, 25 bp, Homo sapien
tatggtggccagaatgcatccgtag

SEQ ID NO: 847799 - DNA, 25 bp, Homo sapien
caggtggtggagagaaacactgagg

SEQ ID NO: 847800 - DNA, 25 bp, Homo sapien
ctgcaggtggtggagagaaacactg

SEQ ID NO: 847801 - DNA, 25 bp, Homo sapien
ggtggtggagagaaacactgaggtg

SEQ ID NO: 847802 - DNA, 25 bp, Homo sapien
tggtggagagaaacactgaggtgtt

SEQ ID NO: 847803 - DNA, 25 bp, Homo sapien
gatgctgcgaagcacaggaccctgc

SEQ ID NO: 847804 - DNA, 25 bp, Homo sapien
tacagcgatgctgcgaagcacagga

SEQ ID NO: 847805 - DNA, 25 bp, Homo sapien
cgatgatgagaggtacaggcgatgc

SEQ ID NO: 847806 - DNA, 25 bp, Homo sapien
tgacgctgagaggtacagcgatgct

SEQ ID NO: 847807 - DNA, 25 bp, Homo sapien
gagaggtacaggcgatgatgagagg

SEQ ID NO: 847808 - DNA, 25 bp, Homo sapien
agaggtacaggcgatgatgagaggt

SEQ ID NO: 847809 - DNA, 25 bp, Homo sapien
tacaggcaatgctgagaggtacagg

SEQ ID NO: 847810 - DNA, 25 bp, Homo sapien
aggtacaggcaatgctgagaggtac

SEQ ID NO: 847811 - DNA, 25 bp, Homo sapien
ggtacaggcaatgctgagaggtaca

SEQ ID NO: 847812 - DNA, 25 bp, Homo sapien
agaggtacaggcaatgctgagaggt

SEQ ID NO: 847813 - DNA, 25 bp, Homo sapien
ttcctgcaagtttaacattttccat

SEQ ID NO: 847814 - DNA, 25 bp, Homo sapien
ctgcagaacctatctttcctgcaag

SEQ ID NO: 847815 - DNA, 25 bp, Homo sapien
tctttcctgcaagtttaacattttc

SEQ ID NO: 847816 - DNA, 25 bp, Homo sapien
gcagaacctatctttcctgcaagtt

SEQ ID NO: 847817 - DNA, 25 bp, Homo sapien
tctcctgatctccctttgacttctt

SEQ ID NO: 847818 - DNA, 25 bp, Homo sapien
ctttctcctgatctccctttgactt

SEQ ID NO: 847819 - DNA, 25 bp, Homo sapien
tatggtggggttatctccactcaag

SEQ ID NO: 847820 - DNA, 25 bp, Homo sapien
tctgggaacaccagcagtataggtt

SEQ ID NO: 847821 - DNA, 25 bp, Homo sapien
ggaacaccagcagtataggttttat

SEQ ID NO: 847822 - DNA, 25 bp, Homo sapien
tccactcaagccttcacggattgtc

SEQ ID NO: 847823 - DNA, 25 bp, Homo sapien
tgtgacagtacctgcgttggactct

SEQ ID NO: 847824 - DNA, 25 bp, Homo sapien
gcccttgtgacagtacctgcgttgg

SEQ ID NO: 847825 - DNA, 25 bp, Homo sapien
ctctgctgtggcaatgagctatgtg

SEQ ID NO: 847826 - DNA, 25 bp, Homo sapien
agtacctgcgttggactctgctgtg

SEQ ID NO: 847827 - DNA, 25 bp, Homo sapien
cgtataacagggagaaaagcccaga

SEQ ID NO: 847828 - DNA, 25 bp, Homo sapien
gcatctgaatccttaggctgagtgg

SEQ ID NO: 847829 - DNA, 25 bp, Homo sapien
taggctgagtggaaatcccaggaga

SEQ ID NO: 847830 - DNA, 25 bp, Homo sapien
agcatacgaaatatcaatgatggcc

SEQ ID NO: 847831 - DNA, 25 bp, Homo sapien
cttgttcaagccaaggtttgtcagc

SEQ ID NO: 847832 - DNA, 25 bp, Homo sapien
ttcaagccaaggtttgtcagcatct

SEQ ID NO: 847833 - DNA, 25 bp, Homo sapien
caagccaaggtttgtcagcatcttg

SEQ ID NO: 847834 - DNA, 25 bp, Homo sapien
tgttcaagccaaggtttgtcagcat

SEQ ID NO: 847835 - DNA, 25 bp, Homo sapien
gatcgtaggacatcattaccaagat

SEQ ID NO: 847836 - DNA, 25 bp, Homo sapien
ttgatctctgtttccacaacactct

SEQ ID NO: 847837 - DNA, 25 bp, Homo sapien
cactcagtgtgagcaaaagccatgt

SEQ ID NO: 847838 - DNA, 25 bp, Homo sapien
gaaccacatgcccaagaagtgacag

SEQ ID NO: 847839 - DNA, 25 bp, Homo sapien
ctgaaagtctttatcaagacttgac

SEQ ID NO: 847840 - DNA, 25 bp, Homo sapien
ctttggaattttgttgaggttcctg

SEQ ID NO: 847841 - DNA, 25 bp, Homo sapien
attttgttgaggttcctgaaagtct

SEQ ID NO: 847842 - DNA, 25 bp, Homo sapien
tgaaagtctttatcaagacttgaca

SEQ ID NO: 847843 - DNA, 25 bp, Homo sapien
cttgtatctggctgaaaggctggtg

SEQ ID NO: 847844 - DNA, 25 bp, Homo sapien
tagccgctgagctgaccagtgactc

SEQ ID NO: 847845 - DNA, 25 bp, Homo sapien
tgactcatgtggctgtaatcactag

SEQ ID NO: 847846 - DNA, 25 bp, Homo sapien
gacagacgtattgcctgctacaact

SEQ ID NO: 847847 - DNA, 25 bp, Homo sapien
gcttgttggtgattggtgttcagat

SEQ ID NO: 847848 - DNA, 25 bp, Homo sapien
catattgatgcccaagggcatctaa

SEQ ID NO: 847849 - DNA, 25 bp, Homo sapien
ttccccatcagacctgttcagtaag

SEQ ID NO: 847850 - DNA, 25 bp, Homo sapien
gattgtgtcctcatatactgaaaag

SEQ ID NO: 847851 - DNA, 25 bp, Homo sapien
tcccaaagtaggaccaggtagcaag

SEQ ID NO: 847852 - DNA, 25 bp, Homo sapien
tgtgcaacccgaacatatattctgt

SEQ ID NO: 847853 - DNA, 25 bp, Homo sapien
tatagtattcccatcccattttgac

SEQ ID NO: 847854 - DNA, 25 bp, Homo sapien
tcagggcaggtggaacccatatagt

SEQ ID NO: 847855 - DNA, 25 bp, Homo sapien
cagaaggacagtggtagcagtaaca

SEQ ID NO: 847856 - DNA, 25 bp, Homo sapien
gctgcaagcacaggcgatgtcgacg

SEQ ID NO: 847857 - DNA, 25 bp, Homo sapien
cagtaacactagatggacaagggcc

SEQ ID NO: 847858 - DNA, 25 bp, Homo sapien
caggaagtcaatgccaaagtgatgc

SEQ ID NO: 847859 - DNA, 25 bp, Homo sapien
tatgaacataagatattacagtgga

SEQ ID NO: 847860 - DNA, 25 bp, Homo sapien
cctctcctgactggatctttagaat

SEQ ID NO: 847861 - DNA, 25 bp, Homo sapien
ttagaatggcacatagaatatgaac

SEQ ID NO: 847862 - DNA, 25 bp, Homo sapien
ctggggctcaacatacatgatgatg

SEQ ID NO: 847863 - DNA, 25 bp, Homo sapien
ttcttttcaagcatcctctttagag

SEQ ID NO: 847864 - DNA, 25 bp, Homo sapien
tcttttcaagcatcctctttagagt

SEQ ID NO: 847865 - DNA, 25 bp, Homo sapien
ttttcaagcatcctctttagagtac

SEQ ID NO: 847866 - DNA, 25 bp, Homo sapien
tcttcttttcaagcatcctctttag

SEQ ID NO: 847867 - DNA, 25 bp, Homo sapien
cctggaatcccaacaggatgacttc

SEQ ID NO: 847868 - DNA, 25 bp, Homo sapien
catcttagggacagtactcgaggca

SEQ ID NO: 847869 - DNA, 25 bp, Homo sapien
tgtgacaggaagacatacatgggtg

SEQ ID NO: 847870 - DNA, 25 bp, Homo sapien
tagagtccaagtagatgagccccag

SEQ ID NO: 847871 - DNA, 25 bp, Homo sapien
gaagtatgcaaggagcaaaggagat

SEQ ID NO: 847872 - DNA, 25 bp, Homo sapien
cagacactctgtaatagcaaacgcc

SEQ ID NO: 847873 - DNA, 25 bp, Homo sapien
gacactctgtaatagcaaacgccaa

SEQ ID NO: 847874 - DNA, 25 bp, Homo sapien
aatcagacactctgtaatagcaaac

SEQ ID NO: 847875 - DNA, 25 bp, Homo sapien
tcagacactctgtaatagcaaacgc

SEQ ID NO: 847876 - DNA, 25 bp, Homo sapien
gcacaggccaatttgaatacggaca

SEQ ID NO: 847877 - DNA, 25 bp, Homo sapien
taaatatccagcaagttgaggccag

SEQ ID NO: 847878 - DNA, 25 bp, Homo sapien
aaagtggttgatcttttgtgggcca

SEQ ID NO: 847879 - DNA, 25 bp, Homo sapien
aataagagtaatatggaccagagcc

SEQ ID NO: 847880 - DNA, 25 bp, Homo sapien
cagggaaaggatcttcctccgttct

SEQ ID NO: 847881 - DNA, 25 bp, Homo sapien
agcggccccactaagatgaacgcag

SEQ ID NO: 847882 - DNA, 25 bp, Homo sapien
tcttcctccgttcttgagaatggct

SEQ ID NO: 847883 - DNA, 25 bp, Homo sapien
acgcagaacccgcaaataggaccac

SEQ ID NO: 847884 - DNA, 25 bp, Homo sapien
ccaaaggactctctttagagcccct

SEQ ID NO: 847885 - DNA, 25 bp, Homo sapien
ggactctctttagagcccctttcac

SEQ ID NO: 847886 - DNA, 25 bp, Homo sapien
attgatctctgtttccaaaggactc

SEQ ID NO: 847887 - DNA, 25 bp, Homo sapien
ttgatctctgtttccaaaggactct

SEQ ID NO: 847888 - DNA, 25 bp, Homo sapien
atacaagttttcaaaactcaaagtg

SEQ ID NO: 847889 - DNA, 25 bp, Homo sapien
tttcaaaactcaaagtgctattctg

SEQ ID NO: 847890 - DNA, 25 bp, Homo sapien
aaaactcaaagtgctattctgccat

SEQ ID NO: 847891 - DNA, 25 bp, Homo sapien
aactcaaagtgctattctgccatgc

SEQ ID NO: 847892 - DNA, 25 bp, Homo sapien
tgattctgaacggtgaacattacaa

SEQ ID NO: 847893 - DNA, 25 bp, Homo sapien
ctgaacggtgaacattacaaagttg

SEQ ID NO: 847894 - DNA, 25 bp, Homo sapien
tgagtaccttattctgaacctcact

SEQ ID NO: 847895 - DNA, 25 bp, Homo sapien
gagtaccttattctgaacctcacta

SEQ ID NO: 847896 - DNA, 25 bp, Homo sapien
cccagcagggtgagtgtatagaaga

SEQ ID NO: 847897 - DNA, 25 bp, Homo sapien
gtctgtgatccatgtctggttgcct

SEQ ID NO: 847898 - DNA, 25 bp, Homo sapien
cagcagggtgagtgtatagaagaca

SEQ ID NO: 847899 - DNA, 25 bp, Homo sapien
ggtgatgtctgtgatccatgtctgg

SEQ ID NO: 847900 - DNA, 25 bp, Homo sapien
aacattgttggaagcataggacatg

SEQ ID NO: 847901 - DNA, 25 bp, Homo sapien
cttgggaacattgttggaagcatag

SEQ ID NO: 847902 - DNA, 25 bp, Homo sapien
ggaacattgttggaagcataggaca

SEQ ID NO: 847903 - DNA, 25 bp, Homo sapien
cattgttggaagcataggacatgtc

SEQ ID NO: 847904 - DNA, 25 bp, Homo sapien
agaaggcctttatgcggccctcctt

SEQ ID NO: 847905 - DNA, 25 bp, Homo sapien
ggttcagcattggattaaagacact

SEQ ID NO: 847906 - DNA, 25 bp, Homo sapien
tctcgttgattagagtctgggacca

SEQ ID NO: 847907 - DNA, 25 bp, Homo sapien
aaaggcaaagcccatacaccgttct

SEQ ID NO: 847908 - DNA, 25 bp, Homo sapien
catggctatgccaaagaatagtcca

SEQ ID NO: 847909 - DNA, 25 bp, Homo sapien
gctcttgtggacatctaggacagga

SEQ ID NO: 847910 - DNA, 25 bp, Homo sapien
tcttgtggacatctaggacaggaag

SEQ ID NO: 847911 - DNA, 25 bp, Homo sapien
tgtggacatctaggacaggaaggtc

SEQ ID NO: 847912 - DNA, 25 bp, Homo sapien
cttgtggacatctaggacaggaagg

SEQ ID NO: 847913 - DNA, 25 bp, Homo sapien
gtctgtgatccatgtcttgttgcct

SEQ ID NO: 847914 - DNA, 25 bp, Homo sapien
tgatgtctgtgatccatgtcttgtt

SEQ ID NO: 847915 - DNA, 25 bp, Homo sapien
ctggaatcgcggcaaggtgatgtct

SEQ ID NO: 847916 - DNA, 25 bp, Homo sapien
tgtctgtgatccatgtcttgttgcc

SEQ ID NO: 847917 - DNA, 25 bp, Homo sapien
tgggtgtgtgaagcttacagtccag

SEQ ID NO: 847918 - DNA, 25 bp, Homo sapien
cccagcagggtgagtgtatagaagg

SEQ ID NO: 847919 - DNA, 25 bp, Homo sapien
agcataggatatgtcaacaatggcc

SEQ ID NO: 847920 - DNA, 25 bp, Homo sapien
cagggtgagtgtatagaaggcagag

SEQ ID NO: 847921 - DNA, 25 bp, Homo sapien
ctgcattatgcatggaaaaaaggag

SEQ ID NO: 847922 - DNA, 25 bp, Homo sapien
tcctggttcataagattcgtcagca

SEQ ID NO: 847923 - DNA, 25 bp, Homo sapien
gacactctacgtgagcaaaagccaa

SEQ ID NO: 847924 - DNA, 25 bp, Homo sapien
aaaaaaggagatggtgctttcctgg

SEQ ID NO: 847925 - DNA, 25 bp, Homo sapien
gggtggcagatgtccgcatagcgat

SEQ ID NO: 847926 - DNA, 25 bp, Homo sapien
ggctattgtaacgtaaggggtggca

SEQ ID NO: 847927 - DNA, 25 bp, Homo sapien
ctattgtaacgtaaggggtggcaga

SEQ ID NO: 847928 - DNA, 25 bp, Homo sapien
gcagatgtccgcatagcgatcatag

SEQ ID NO: 847929 - DNA, 25 bp, Homo sapien
ccacctggttgagccaggtgtcagc

SEQ ID NO: 847930 - DNA, 25 bp, Homo sapien
accacctggttgagccaggtgtcag

SEQ ID NO: 847931 - DNA, 25 bp, Homo sapien
gaccacctggttgagccaggtgtca

SEQ ID NO: 847932 - DNA, 25 bp, Homo sapien
atgaccacctggttgagccaggtgt

SEQ ID NO: 847933 - DNA, 25 bp, Homo sapien
ttcctcagtgccctcctcagggcgc

SEQ ID NO: 847934 - DNA, 25 bp, Homo sapien
tcctcagtgccctcctcagggcgcc

SEQ ID NO: 847935 - DNA, 25 bp, Homo sapien
agtgccctcctcagggcgcccttga

SEQ ID NO: 847936 - DNA, 25 bp, Homo sapien
tcagtgccctcctcagggcgccctt

SEQ ID NO: 847937 - DNA, 25 bp, Homo sapien
tgtgacccatgattggttgactccc

SEQ ID NO: 847938 - DNA, 25 bp, Homo sapien
tctgtgacccatgattggttgactc

SEQ ID NO: 847939 - DNA, 25 bp, Homo sapien
tgacccatgattggttgactcccat

SEQ ID NO: 847940 - DNA, 25 bp, Homo sapien
ttctgtgacccatgattggttgact

SEQ ID NO: 847941 - DNA, 25 bp, Homo sapien
gagcacttccatctcggcactgagc

SEQ ID NO: 847942 - DNA, 25 bp, Homo sapien
ctaaaagaggagcacttccatctcg

SEQ ID NO: 847943 - DNA, 25 bp, Homo sapien
gcacttccatctcggcactgagctg

SEQ ID NO: 847944 - DNA, 25 bp, Homo sapien
aggagcacttccatctcggcactga

SEQ ID NO: 847945 - DNA, 25 bp, Homo sapien
tgaagatgtataacagggagaagat

SEQ ID NO: 847946 - DNA, 25 bp, Homo sapien
ctgaagatgtataacagggagaaga

SEQ ID NO: 847947 - DNA, 25 bp, Homo sapien
ggtaggcagaatgtggtccagacag

SEQ ID NO: 847948 - DNA, 25 bp, Homo sapien
gggtaggcagaatgtggtccagaca

SEQ ID NO: 847949 - DNA, 25 bp, Homo sapien
gtaggcagaatgtggtccagacaga

SEQ ID NO: 847950 - DNA, 25 bp, Homo sapien
gggggtaggcagaatgtggtccaga

SEQ ID NO: 847951 - DNA, 25 bp, Homo sapien
tagacagcgtcctctgcagtgctct

SEQ ID NO: 847952 - DNA, 25 bp, Homo sapien
caccatggctatgccaaagaagagt

SEQ ID NO: 847953 - DNA, 25 bp, Homo sapien
gtggagggcgcccttcacctgagca

SEQ ID NO: 847954 - DNA, 25 bp, Homo sapien
tctcgttgattagagtctgggacta

SEQ ID NO: 847955 - DNA, 25 bp, Homo sapien
tgtgacccgtgattggttgtccccc

SEQ ID NO: 847956 - DNA, 25 bp, Homo sapien
ctgtgacccgtgattggttgtcccc

SEQ ID NO: 847957 - DNA, 25 bp, Homo sapien
tgacccgtgattggttgtcccccat

SEQ ID NO: 847958 - DNA, 25 bp, Homo sapien
gtgacccgtgattggttgtccccca

SEQ ID NO: 847959 - DNA, 25 bp, Homo sapien
agagatataacagggagaagatcca

SEQ ID NO: 847960 - DNA, 25 bp, Homo sapien
tccacactgagctggaatccaacca

SEQ ID NO: 847961 - DNA, 25 bp, Homo sapien
tgggatccagacagatgagccccaa

SEQ ID NO: 847962 - DNA, 25 bp, Homo sapien
atgggggtgcgcagtctgggatcca

SEQ ID NO: 847963 - DNA, 25 bp, Homo sapien
gcaaattgctggaagcatagtatat

SEQ ID NO: 847964 - DNA, 25 bp, Homo sapien
aaattgctggaagcatagtatatgt

SEQ ID NO: 847965 - DNA, 25 bp, Homo sapien
aattgctggaagcatagtatatgtc

SEQ ID NO: 847966 - DNA, 25 bp, Homo sapien
caaattgctggaagcatagtatatg

SEQ ID NO: 847967 - DNA, 25 bp, Homo sapien
tgcaagagatgaacgagatagtttt

SEQ ID NO: 847968 - DNA, 25 bp, Homo sapien
atgcaagagatgaacgagatagttt

SEQ ID NO: 847969 - DNA, 25 bp, Homo sapien
gcaagagatgaacgagatagttttt

SEQ ID NO: 847970 - DNA, 25 bp, Homo sapien
aatgcaagagatgaacgagatagtt

SEQ ID NO: 847971 - DNA, 25 bp, Homo sapien
gcagcagcaaaagtcaaatacaaag

SEQ ID NO: 847972 - DNA, 25 bp, Homo sapien
ctgcagcagcaaaagtcaaatacaa

SEQ ID NO: 847973 - DNA, 25 bp, Homo sapien
cagcaaaagtcaaatacaaagccat

SEQ ID NO: 847974 - DNA, 25 bp, Homo sapien
cagcagcaaaagtcaaatacaaagc

SEQ ID NO: 847975 - DNA, 25 bp, Homo sapien
ttagatttatgagggccagggaaaa

SEQ ID NO: 847976 - DNA, 25 bp, Homo sapien
aggagaattagatttatgagggcca

SEQ ID NO: 847977 - DNA, 25 bp, Homo sapien
tgcccaggaagtaatagccagtact

SEQ ID NO: 847978 - DNA, 25 bp, Homo sapien
ggaagtaatagccagtactgtgcac

SEQ ID NO: 847979 - DNA, 25 bp, Homo sapien
tgcacaggccagtttgaggacagac

SEQ ID NO: 847980 - DNA, 25 bp, Homo sapien
cagaatttcaccgaagaagtggttc

SEQ ID NO: 847981 - DNA, 25 bp, Homo sapien
gaagtggttcacctcctggggccca

SEQ ID NO: 847982 - DNA, 25 bp, Homo sapien
ccagtttgaggacagacagaatttc

SEQ ID NO: 847983 - DNA, 25 bp, Homo sapien
taagacaaacacaccaccagcaaag

SEQ ID NO: 847984 - DNA, 25 bp, Homo sapien
ctaagacaaacacaccaccagcaaa

SEQ ID NO: 847985 - DNA, 25 bp, Homo sapien
gccatgccaaagtaaagcccaacca

SEQ ID NO: 847986 - DNA, 25 bp, Homo sapien
caagaggatgcgcatgtaggagatc

SEQ ID NO: 847987 - DNA, 25 bp, Homo sapien
atcagcatcaaggaaaggggcccga

SEQ ID NO: 847988 - DNA, 25 bp, Homo sapien
cttttttgcggccctcctttgactg

SEQ ID NO: 847989 - DNA, 25 bp, Homo sapien
tcgttgactgttgtctgggaccagg

SEQ ID NO: 847990 - DNA, 25 bp, Homo sapien
gttgactgttgtctgggaccaggta

SEQ ID NO: 847991 - DNA, 25 bp, Homo sapien
tgactgttgtctgggaccaggtaaa

SEQ ID NO: 847992 - DNA, 25 bp, Homo sapien
gtcgttgactgttgtctgggaccag

SEQ ID NO: 847993 - DNA, 25 bp, Homo sapien
tctgcagtgctctgtataaggcacc

SEQ ID NO: 847994 - DNA, 25 bp, Homo sapien
tttctgcagtgctctgtataaggca

SEQ ID NO: 847995 - DNA, 25 bp, Homo sapien
tttttctgcagtgctctgtataagg

SEQ ID NO: 847996 - DNA, 25 bp, Homo sapien
ctctttttctgcagtgctctgtata

SEQ ID NO: 847997 - DNA, 25 bp, Homo sapien
cattcttaaatgaagcctcttcttg

SEQ ID NO: 847998 - DNA, 25 bp, Homo sapien
tgttcccattttcagggccaaaatc

SEQ ID NO: 847999 - DNA, 25 bp, Homo sapien
gagttgtattgcacaagcaaaccac

SEQ ID NO: 848000 - DNA, 25 bp, Homo sapien
ggtagatcaactgaaccaaaattct

SEQ ID NO: 848001 - DNA, 25 bp, Homo sapien
cacgatagtaagcctcctgaggctc

SEQ ID NO: 848002 - DNA, 25 bp, Homo sapien
acgatagtaagcctcctgaggctct

SEQ ID NO: 848003 - DNA, 25 bp, Homo sapien
ccacgatagtaagcctcctgaggct

SEQ ID NO: 848004 - DNA, 25 bp, Homo sapien
cctgtgtagccccctaaaatttctg

SEQ ID NO: 848005 - DNA, 25 bp, Homo sapien
caccagtcctgtgtagccccctaaa

SEQ ID NO: 848006 - DNA, 25 bp, Homo sapien
caactctcaccagtcctgtgtagcc

SEQ ID NO: 848007 - DNA, 25 bp, Homo sapien
actctcaccagtcctgtgtagcccc

SEQ ID NO: 848008 - DNA, 25 bp, Homo sapien
aaaatcgcgagaagatgcaagagag

SEQ ID NO: 848009 - DNA, 25 bp, Homo sapien
aaggcataaaatcgcgagaagatgc

SEQ ID NO: 848010 - DNA, 25 bp, Homo sapien
cataaaatcgcgagaagatgcaaga

SEQ ID NO: 848011 - DNA, 25 bp, Homo sapien
ctgaaggcataaaatcgcgagaaga

SEQ ID NO: 848012 - DNA, 25 bp, Homo sapien
gtgtagtctgtcgtctctgtcatcc

SEQ ID NO: 848013 - DNA, 25 bp, Homo sapien
aaaatgtatatgagggtgtgtagtc

SEQ ID NO: 848014 - DNA, 25 bp, Homo sapien
agataggtgagtcccatgttcatgc

SEQ ID NO: 848015 - DNA, 25 bp, Homo sapien
tctgtcatccagataggtgagtccc

SEQ ID NO: 848016 - DNA, 25 bp, Homo sapien
ggacattgtctaggtgtccctctcc

SEQ ID NO: 848017 - DNA, 25 bp, Homo sapien
tttgcaggacattgtctaggtgtcc

SEQ ID NO: 848018 - DNA, 25 bp, Homo sapien
tctcgttttgcaggacattgtctag

SEQ ID NO: 848019 - DNA, 25 bp, Homo sapien
agtatttctcgttttgcaggacatt

SEQ ID NO: 848020 - DNA, 25 bp, Homo sapien
gtccttacgcagatcccatcttgaa

SEQ ID NO: 848021 - DNA, 25 bp, Homo sapien
ataattcccacatgtagccagccca

SEQ ID NO: 848022 - DNA, 25 bp, Homo sapien
tttggctgtgtccttacgcagatcc

SEQ ID NO: 848023 - DNA, 25 bp, Homo sapien
ctgacttgctacaacaatgttcttc

SEQ ID NO: 848024 - DNA, 25 bp, Homo sapien
taaggagtcacagaaggaccaaaat

SEQ ID NO: 848025 - DNA, 25 bp, Homo sapien
aggagtcacagaaggaccaaaatgg

SEQ ID NO: 848026 - DNA, 25 bp, Homo sapien
ggagtcacagaaggaccaaaatggc

SEQ ID NO: 848027 - DNA, 25 bp, Homo sapien
ctaaggagtcacagaaggaccaaaa

SEQ ID NO: 848028 - DNA, 25 bp, Homo sapien
ctttccaggaagttttcagtccctg

SEQ ID NO: 848029 - DNA, 25 bp, Homo sapien
gagaatttttagagtcccaactgag

SEQ ID NO: 848030 - DNA, 25 bp, Homo sapien
ctcttcttagccaactgtcacatag

SEQ ID NO: 848031 - DNA, 25 bp, Homo sapien
cttagaacatatgcctcactcctgg

SEQ ID NO: 848032 - DNA, 25 bp, Homo sapien
tccagtctgagtgaagtatagcaac

SEQ ID NO: 848033 - DNA, 25 bp, Homo sapien
tagaataacactagacaatgctatg

SEQ ID NO: 848034 - DNA, 25 bp, Homo sapien
atgatgccctatctgttaactccaa

SEQ ID NO: 848035 - DNA, 25 bp, Homo sapien
tatcacagtcaattggtatcatctt

SEQ ID NO: 848036 - DNA, 25 bp, Homo sapien
ttgggtctggaacccgaatgcgcac

SEQ ID NO: 848037 - DNA, 25 bp, Homo sapien
atgcgcacgtgacaaccaaccggag

SEQ ID NO: 848038 - DNA, 25 bp, Homo sapien
cacaacaagcggtggagaacacgca

SEQ ID NO: 848039 - DNA, 25 bp, Homo sapien
ggtcaccgcagtaacactggccaca

SEQ ID NO: 848040 - DNA, 25 bp, Homo sapien
ctgttccaccggagatgacagggac

SEQ ID NO: 848041 - DNA, 25 bp, Homo sapien
aggaataaggccagggccagttgct

SEQ ID NO: 848042 - DNA, 25 bp, Homo sapien
ccctcggtggatagatgtttctcat

SEQ ID NO: 848043 - DNA, 25 bp, Homo sapien
aggtaaacccctcggtggatagatg

SEQ ID NO: 848044 - DNA, 25 bp, Homo sapien
cactggaaacaatggaccgctgatt

SEQ ID NO: 848045 - DNA, 25 bp, Homo sapien
ggaatcaatcctgaagggaactcgc

SEQ ID NO: 848046 - DNA, 25 bp, Homo sapien
tgtttctctaagagtggattagttc

SEQ ID NO: 848047 - DNA, 25 bp, Homo sapien
taagagtggattagttcaccaagtt

SEQ ID NO: 848048 - DNA, 25 bp, Homo sapien
gagtggattagttcaccaagttaaa

SEQ ID NO: 848049 - DNA, 25 bp, Homo sapien
tctctaagagtggattagttcacca

SEQ ID NO: 848050 - DNA, 25 bp, Homo sapien
tttagaaagtgctgccaaagccaac

SEQ ID NO: 848051 - DNA, 25 bp, Homo sapien
ggcatcattctgattttagaaagtg

SEQ ID NO: 848052 - DNA, 25 bp, Homo sapien
tgtgtaatctatattcaagaaccat

SEQ ID NO: 848053 - DNA, 25 bp, Homo sapien
cattttaatcttgttggcatcattc

SEQ ID NO: 848054 - DNA, 25 bp, Homo sapien
ttgttgtggcgagttttagggccta

SEQ ID NO: 848055 - DNA, 25 bp, Homo sapien
tctgctctggatgattactatctct

SEQ ID NO: 848056 - DNA, 25 bp, Homo sapien
ctatcttgccatgtgtttcgtcagc

SEQ ID NO: 848057 - DNA, 25 bp, Homo sapien
caattggattccctacaatgatttc

SEQ ID NO: 848058 - DNA, 25 bp, Homo sapien
gcagcatgtgacaccgaccaggtgg

SEQ ID NO: 848059 - DNA, 25 bp, Homo sapien
ctggggccgaagcagcatgtgacac

SEQ ID NO: 848060 - DNA, 25 bp, Homo sapien
gcgccgggacctggaggggacgctg

SEQ ID NO: 848061 - DNA, 25 bp, Homo sapien
cgaagcagcatgtgacaccgaccag

SEQ ID NO: 848062 - DNA, 25 bp, Homo sapien
tccagagtcaggctccggtgaagct

SEQ ID NO: 848063 - DNA, 25 bp, Homo sapien
cggtgaagctccgaagaaacaaaca

SEQ ID NO: 848064 - DNA, 25 bp, Homo sapien
gaaacaaacacgcagggagatttcg

SEQ ID NO: 848065 - DNA, 25 bp, Homo sapien
atttcggaggcgtccgaggacaccg

SEQ ID NO: 848066 - DNA, 25 bp, Homo sapien
tctttgaagtcactggaggggcaca

SEQ ID NO: 848067 - DNA, 25 bp, Homo sapien
cattctttgaagtcactggaggggc

SEQ ID NO: 848068 - DNA, 25 bp, Homo sapien
acaggcacactcgagagacttttgg

SEQ ID NO: 848069 - DNA, 25 bp, Homo sapien
cactcgagagacttttggcattctt

SEQ ID NO: 848070 - DNA, 25 bp, Homo sapien
tgctgccattatttgctacctgttt

SEQ ID NO: 848071 - DNA, 25 bp, Homo sapien
cctcaatcagattgagagcttcttg

SEQ ID NO: 848072 - DNA, 25 bp, Homo sapien
atgctctgctgccattatttgctac

SEQ ID NO: 848073 - DNA, 25 bp, Homo sapien
tgtctttgtatatctggtttctaag

SEQ ID NO: 848074 - DNA, 25 bp, Homo sapien
tagtttgtatagagctgacttagta

SEQ ID NO: 848075 - DNA, 25 bp, Homo sapien
ctgtcatgtaacactttagtgttct

SEQ ID NO: 848076 - DNA, 25 bp, Homo sapien
aacactttagtgttctatatttgca

SEQ ID NO: 848077 - DNA, 25 bp, Homo sapien
ccttccattagtttgtatagagctg

SEQ ID NO: 848078 - DNA, 25 bp, Homo sapien
aaggacacctcctctaggccaaagg

SEQ ID NO: 848079 - DNA, 25 bp, Homo sapien
agatttctcaaaccctccagaagag

SEQ ID NO: 848080 - DNA, 25 bp, Homo sapien
catcttctgctatgggatttccacc

SEQ ID NO: 848081 - DNA, 25 bp, Homo sapien
taacatggtctactaggcccacgtg

SEQ ID NO: 848082 - DNA, 25 bp, Homo sapien
cacaacaaaggcgttacaagcccca

SEQ ID NO: 848083 - DNA, 25 bp, Homo sapien
tcacgggctggcgtttagggtctgt

SEQ ID NO: 848084 - DNA, 25 bp, Homo sapien
ggagaaagtgcccacaacaaaggcg

SEQ ID NO: 848085 - DNA, 25 bp, Homo sapien
gaggcagtcaaattataacgttcca

SEQ ID NO: 848086 - DNA, 25 bp, Homo sapien
cctcagaatcacagtgggaggcaaa

SEQ ID NO: 848087 - DNA, 25 bp, Homo sapien
ctcagaatcacagtgggaggcaaaa

SEQ ID NO: 848088 - DNA, 25 bp, Homo sapien
agaatcacagtgggaggcaaaaggt

SEQ ID NO: 848089 - DNA, 25 bp, Homo sapien
atcacagtgggaggcaaaaggtact

SEQ ID NO: 848090 - DNA, 25 bp, Homo sapien
gattaccttgatatacagtgagcag

SEQ ID NO: 848091 - DNA, 25 bp, Homo sapien
tgactgcctcccttgattgaataat

SEQ ID NO: 848092 - DNA, 25 bp, Homo sapien
tcccatctcagggttagtttgatgc

SEQ ID NO: 848093 - DNA, 25 bp, Homo sapien
tcagaggttaaagggtaatgactgc

SEQ ID NO: 848094 - DNA, 25 bp, Homo sapien
aaacatctttgtatgtgtcagtatg

SEQ ID NO: 848095 - DNA, 25 bp, Homo sapien
ctttgaatagcagcagattttagtc

SEQ ID NO: 848096 - DNA, 25 bp, Homo sapien
tccgacagatgtaagaggcagtata

SEQ ID NO: 848097 - DNA, 25 bp, Homo sapien
tcacaggaattcttggaaccctctc

SEQ ID NO: 848098 - DNA, 25 bp, Homo sapien
tggcacactatgctactcgggagac

SEQ ID NO: 848099 - DNA, 25 bp, Homo sapien
gaaaagaacattggtacccagtgag

SEQ ID NO: 848100 - DNA, 25 bp, Homo sapien
tatttagaaggcaagatccctcggg

SEQ ID NO: 848101 - DNA, 25 bp, Homo sapien
tgagcctgggacttcgagactgtat

SEQ ID NO: 848102 - DNA, 25 bp, Homo sapien
tcgagtcctagatacctgaagaggg

SEQ ID NO: 848103 - DNA, 25 bp, Homo sapien
taaaccttgtcacttctgaaacctg

SEQ ID NO: 848104 - DNA, 25 bp, Homo sapien
tgtgactagcaggtaataagtgtcc

SEQ ID NO: 848105 - DNA, 25 bp, Homo sapien
gtccactaagttccaccaatacagg

SEQ ID NO: 848106 - DNA, 25 bp, Homo sapien
tccccacagtcttaatagatttcgg

SEQ ID NO: 848107 - DNA, 25 bp, Homo sapien
taggcaagtggatacttccccacag

SEQ ID NO: 848108 - DNA, 25 bp, Homo sapien
ggatactttctagcatcgctaagca

SEQ ID NO: 848109 - DNA, 25 bp, Homo sapien
tatttacagtagaacaagtgacaga

SEQ ID NO: 848110 - DNA, 25 bp, Homo sapien
tggaccagggattgccaactgccga

SEQ ID NO: 848111 - DNA, 25 bp, Homo sapien
gctctcatgttttcgcagccagcag

SEQ ID NO: 848112 - DNA, 25 bp, Homo sapien
gacatttggaatgctgtctcactgg

SEQ ID NO: 848113 - DNA, 25 bp, Homo sapien
ccttgccgcctgagattggcacctg

SEQ ID NO: 848114 - DNA, 25 bp, Homo sapien
taaatacacaaggtgcgtaccggag

SEQ ID NO: 848115 - DNA, 25 bp, Homo sapien
actgcattgcaactaacactgggaa

SEQ ID NO: 848116 - DNA, 25 bp, Homo sapien
gatacattcaagtggcaggacaaag

SEQ ID NO: 848117 - DNA, 25 bp, Homo sapien
tcctctcttaggattggcccaggca

SEQ ID NO: 848118 - DNA, 25 bp, Homo sapien
cacttagaggaagttagtaccacca

SEQ ID NO: 848119 - DNA, 25 bp, Homo sapien
tagactcatacccaaacaatctggc

SEQ ID NO: 848120 - DNA, 25 bp, Homo sapien
tttacttaaccaggacaatgtggga

SEQ ID NO: 848121 - DNA, 25 bp, Homo sapien
taagcacatgctcttcacttagagg

SEQ ID NO: 848122 - DNA, 25 bp, Homo sapien
taactgccaaatcaccaattatcgg

SEQ ID NO: 848123 - DNA, 25 bp, Homo sapien
tcaggaacccaaacaatcacaatgt

SEQ ID NO: 848124 - DNA, 25 bp, Homo sapien
tgtagcacatccattagttccttct

SEQ ID NO: 848125 - DNA, 25 bp, Homo sapien
aaatcagtaactgtgcatcaatcag

SEQ ID NO: 848126 - DNA, 25 bp, Homo sapien
tcctagacatgttgtagctcctggt

SEQ ID NO: 848127 - DNA, 25 bp, Homo sapien
cattggtaaggaaattcactcctct

SEQ ID NO: 848128 - DNA, 25 bp, Homo sapien
aaatgtgggagctaaccaggttgcc

SEQ ID NO: 848129 - DNA, 25 bp, Homo sapien
aaccttcaggtgcttcactcttctg

SEQ ID NO: 848130 - DNA, 25 bp, Homo sapien
gagggtcacttggaaccagctaact

SEQ ID NO: 848131 - DNA, 25 bp, Homo sapien
tggaaccagctaacttttcagggtc

SEQ ID NO: 848132 - DNA, 25 bp, Homo sapien
tcacttggaaccagctaacttttca

SEQ ID NO: 848133 - DNA, 25 bp, Homo sapien
ttggagggtcacttggaaccagcta

SEQ ID NO: 848134 - DNA, 25 bp, Homo sapien
ggagaggtagtagcttctagggaaa

SEQ ID NO: 848135 - DNA, 25 bp, Homo sapien
ctccagggagaggtagtagcttcta

SEQ ID NO: 848136 - DNA, 25 bp, Homo sapien
tttgaccagcaaatatctccaccct

SEQ ID NO: 848137 - DNA, 25 bp, Homo sapien
gtgggctctgaatccagcactcttc

SEQ ID NO: 848138 - DNA, 25 bp, Homo sapien
tacattaagtagtcaacagaagttg

SEQ ID NO: 848139 - DNA, 25 bp, Homo sapien
gagctgcaatgaaaatagctcatca

SEQ ID NO: 848140 - DNA, 25 bp, Homo sapien
gcagggaaatctcctagctatacat

SEQ ID NO: 848141 - DNA, 25 bp, Homo sapien
gctatacataaattcgtacacctgt

SEQ ID NO: 848142 - DNA, 25 bp, Homo sapien
tactcactgcatgaccttagagaag

SEQ ID NO: 848143 - DNA, 25 bp, Homo sapien
ttcacaaaattatgggttcctctcc

SEQ ID NO: 848144 - DNA, 25 bp, Homo sapien
ttagaaactgtacgccaagaaatgg

SEQ ID NO: 848145 - DNA, 25 bp, Homo sapien
gagaagtcacttaattcctctgcac

SEQ ID NO: 848146 - DNA, 25 bp, Homo sapien
atcaaggtgtcagcatctgcagagg

SEQ ID NO: 848147 - DNA, 25 bp, Homo sapien
tgtcagcatctgcagagggccttct

SEQ ID NO: 848148 - DNA, 25 bp, Homo sapien
aaggtgtcagcatctgcagagggcc

SEQ ID NO: 848149 - DNA, 25 bp, Homo sapien
atatcaaggtgtcagcatctgcaga

SEQ ID NO: 848150 - DNA, 25 bp, Homo sapien
aagaggttcactactaggcacggcc

SEQ ID NO: 848151 - DNA, 25 bp, Homo sapien
tagcaatctgcaatggacaccgact

SEQ ID NO: 848152 - DNA, 25 bp, Homo sapien
caactggctatacattgggactctc

SEQ ID NO: 848153 - DNA, 25 bp, Homo sapien
gcgacctgtgcttctgttcaactgg

SEQ ID NO: 848154 - DNA, 25 bp, Homo sapien
gctgtgccatggtaagacgtgcctt

SEQ ID NO: 848155 - DNA, 25 bp, Homo sapien
tccccgcatgtcagcggagggacct

SEQ ID NO: 848156 - DNA, 25 bp, Homo sapien
gccacttacttctttaaccaaatga

SEQ ID NO: 848157 - DNA, 25 bp, Homo sapien
tctgttgatagtgaacgagttctca

SEQ ID NO: 848158 - DNA, 25 bp, Homo sapien
cacgtggactcttgatgcccaatta

SEQ ID NO: 848159 - DNA, 25 bp, Homo sapien
gaactgccagcctcagttgtcacgt

SEQ ID NO: 848160 - DNA, 25 bp, Homo sapien
atctgtgctttactgacagaagggc

SEQ ID NO: 848161 - DNA, 25 bp, Homo sapien
tctctttatctgtgctttactgaca

SEQ ID NO: 848162 - DNA, 25 bp, Homo sapien
tgtggctccctcctggctatggtcc

SEQ ID NO: 848163 - DNA, 25 bp, Homo sapien
tgatgtcctacgatcggtacgtggc

SEQ ID NO: 848164 - DNA, 25 bp, Homo sapien
ccagatgctggtgaacctcctgcat

SEQ ID NO: 848165 - DNA, 25 bp, Homo sapien
gcctcctgttggtgctgatgtccta

SEQ ID NO: 848166 - DNA, 25 bp, Homo sapien
ggggctcatctcactggactccaga

SEQ ID NO: 848167 - DNA, 25 bp, Homo sapien
tggggctcatctcactggactccag

SEQ ID NO: 848168 - DNA, 25 bp, Homo sapien
ctggggctcatctcactggactcca

SEQ ID NO: 848169 - DNA, 25 bp, Homo sapien
cctggggctcatctcactggactcc

SEQ ID NO: 848170 - DNA, 25 bp, Homo sapien
gggcccaaggattcagatgctcctc

SEQ ID NO: 848171 - DNA, 25 bp, Homo sapien
tgggcccaaggattcagatgctcct

SEQ ID NO: 848172 - DNA, 25 bp, Homo sapien
ggcccaaggattcagatgctcctct

SEQ ID NO: 848173 - DNA, 25 bp, Homo sapien
tactgctaattcattgatgctgcca

SEQ ID NO: 848174 - DNA, 25 bp, Homo sapien
tatgaaggacttgaattaacagcaa

SEQ ID NO: 848175 - DNA, 25 bp, Homo sapien
aattcatcaattcagcacaccacca

SEQ ID NO: 848176 - DNA, 25 bp, Homo sapien
tgctgccatttgtcaagtgccaaat

SEQ ID NO: 848177 - DNA, 25 bp, Homo sapien
gatttcatcaaagcacccgcagtgg

SEQ ID NO: 848178 - DNA, 25 bp, Homo sapien
tccagactgtagacatagaatcacc

SEQ ID NO: 848179 - DNA, 25 bp, Homo sapien
catacaaccgactacacttgggctc

SEQ ID NO: 848180 - DNA, 25 bp, Homo sapien
ccagatggctaggatcctggtgcag

SEQ ID NO: 848181 - DNA, 25 bp, Homo sapien
aaggtaacttgatcacctatcaata

SEQ ID NO: 848182 - DNA, 25 bp, Homo sapien
tcaggaactgcatcatacaacccaa

SEQ ID NO: 848183 - DNA, 25 bp, Homo sapien
gagtctggtcctcacattttagatt

SEQ ID NO: 848184 - DNA, 25 bp, Homo sapien
tctcatctgttgctgttagaaagga

SEQ ID NO: 848185 - DNA, 25 bp, Homo sapien
tagacggtcgttacatgaaactgac

SEQ ID NO: 848186 - DNA, 25 bp, Homo sapien
tccagtgcccagttcacaggaagca

SEQ ID NO: 848187 - DNA, 25 bp, Homo sapien
gcgattctgctttacccatgcccaa

SEQ ID NO: 848188 - DNA, 25 bp, Homo sapien
tgtgtcaaggtagagcaaaatcccc

SEQ ID NO: 848189 - DNA, 25 bp, Homo sapien
tttcttaattgtgcatcctgctggg

SEQ ID NO: 848190 - DNA, 25 bp, Homo sapien
gaatatgcggtttcttaatatgtgt

SEQ ID NO: 848191 - DNA, 25 bp, Homo sapien
ttatctctccttccccgaggagttg

SEQ ID NO: 848192 - DNA, 25 bp, Homo sapien
tgtaggaagtttcatggcccagccc

SEQ ID NO: 848193 - DNA, 25 bp, Homo sapien
tacttatccttggaatggtggtagg

SEQ ID NO: 848194 - DNA, 25 bp, Homo sapien
ttcaacatgagcataatacttatcc

SEQ ID NO: 848195 - DNA, 25 bp, Homo sapien
ggtaggaaaaatccaatgcaaatga

SEQ ID NO: 848196 - DNA, 25 bp, Homo sapien
tcggttttgcaggattaaatttata

SEQ ID NO: 848197 - DNA, 25 bp, Homo sapien
ccagaaatcattgtagggaatccaa

SEQ ID NO: 848198 - DNA, 25 bp, Homo sapien
gagatagtaatcatccagagcagat

SEQ ID NO: 848199 - DNA, 25 bp, Homo sapien
cacatggcaagatagagctgtccta

SEQ ID NO: 848200 - DNA, 25 bp, Homo sapien
tttgagtgctgacgaaacacatggc

SEQ ID NO: 848201 - DNA, 25 bp, Homo sapien
ggtgaactaatccactcttagagaa

SEQ ID NO: 848202 - DNA, 25 bp, Homo sapien
tttctaaaatcagaatgatgccaac

SEQ ID NO: 848203 - DNA, 25 bp, Homo sapien
tctaaaggttgtggtgtcttcatgc

SEQ ID NO: 848204 - DNA, 25 bp, Homo sapien
cactgtggttgtagataaatgtgaa

SEQ ID NO: 848205 - DNA, 25 bp, Homo sapien
tgtagtccctcaccattgggtcggc

SEQ ID NO: 848206 - DNA, 25 bp, Homo sapien
aaagatcagccgtgccactgaaggg

SEQ ID NO: 848207 - DNA, 25 bp, Homo sapien
catgataattggttggcagctcgga

SEQ ID NO: 848208 - DNA, 25 bp, Homo sapien
tcggccttcatctgaaacgagagct

SEQ ID NO: 848209 - DNA, 25 bp, Homo sapien
aacttggtgcaacgctttctggact

SEQ ID NO: 848210 - DNA, 25 bp, Homo sapien
tcggctttacgtgggaagagagcaa

SEQ ID NO: 848211 - DNA, 25 bp, Homo sapien
cagctttgagaaggcggcagcagaa

SEQ ID NO: 848212 - DNA, 25 bp, Homo sapien
gaagcacgaagtttggaggcaacct

SEQ ID NO: 848213 - DNA, 25 bp, Homo sapien
tgaattttaccaatacagggcaggc

SEQ ID NO: 848214 - DNA, 25 bp, Homo sapien
gggcaggccaaattaacaggatgaa

SEQ ID NO: 848215 - DNA, 25 bp, Homo sapien
ttcttgtatgctgtgtacaagaaac

SEQ ID NO: 848216 - DNA, 25 bp, Homo sapien
tttaccaatacagggcaggccaaat

SEQ ID NO: 848217 - DNA, 25 bp, Homo sapien
gtaagagcgaagtgtcccctggcat

SEQ ID NO: 848218 - DNA, 25 bp, Homo sapien
agcaggagtaagagcgaagtgtccc

SEQ ID NO: 848219 - DNA, 25 bp, Homo sapien
tcagcaacatgacaaacttcctatg

SEQ ID NO: 848220 - DNA, 25 bp, Homo sapien
atcaacagagtctttcacttccacc

SEQ ID NO: 848221 - DNA, 25 bp, Homo sapien
gaaacaaacacgcagggagatttcg

SEQ ID NO: 848222 - DNA, 25 bp, Homo sapien
tccagagtcaggctccggtgaagct

SEQ ID NO: 848223 - DNA, 25 bp, Homo sapien
cggtgaagctccgaagaaacaaaca

SEQ ID NO: 848224 - DNA, 25 bp, Homo sapien
atttcggaggcgtccgaggacaccg

SEQ ID NO: 848225 - DNA, 25 bp, Homo sapien
tagttatgagccaagactttgcaaa

SEQ ID NO: 848226 - DNA, 25 bp, Homo sapien
tgtcagtttcatgtaacgaccgtct

SEQ ID NO: 848227 - DNA, 25 bp, Homo sapien
taacaattgatcctactcttgagtg

SEQ ID NO: 848228 - DNA, 25 bp, Homo sapien
tatcgtggaccatgaagaactgagt

SEQ ID NO: 848229 - DNA, 25 bp, Homo sapien
gaatcgctgaagtgattacctgtag

SEQ ID NO: 848230 - DNA, 25 bp, Homo sapien
ttgggcatgggtaaagcagaatcgc

SEQ ID NO: 848231 - DNA, 25 bp, Homo sapien
cagcgtaactttatggaacctgcat

SEQ ID NO: 848232 - DNA, 25 bp, Homo sapien
tagttaatctgtagctcagctgagc

SEQ ID NO: 848233 - DNA, 25 bp, Homo sapien
tatatccctttaattgtgtatgtta

SEQ ID NO: 848234 - DNA, 25 bp, Homo sapien
tttatatccctttaattgtgtatgt

SEQ ID NO: 848235 - DNA, 25 bp, Homo sapien
ttatatccctttaattgtgtatgtt

SEQ ID NO: 848236 - DNA, 25 bp, Homo sapien
atatccctttaattgtgtatgttaa

SEQ ID NO: 848237 - DNA, 25 bp, Homo sapien
ctcatagtctgagtattctttcaga

SEQ ID NO: 848238 - DNA, 25 bp, Homo sapien
tagtcctgtttgattcagccttgat

SEQ ID NO: 848239 - DNA, 25 bp, Homo sapien
ttctttcagaacagtagtcctgttt

SEQ ID NO: 848240 - DNA, 25 bp, Homo sapien
catagtctgagtattctttcagaac

SEQ ID NO: 848241 - DNA, 25 bp, Homo sapien
ttgactgtgaaagatgtattcaaac

SEQ ID NO: 848242 - DNA, 25 bp, Homo sapien
atttgactgtgaaagatgtattcaa

SEQ ID NO: 848243 - DNA, 25 bp, Homo sapien
ttttaagctcataaggcatagaaaa

SEQ ID NO: 848244 - DNA, 25 bp, Homo sapien
tttgactgtgaaagatgtattcaaa

SEQ ID NO: 848245 - DNA, 25 bp, Homo sapien
gatagatggtttgggtaaatagccc

SEQ ID NO: 848246 - DNA, 25 bp, Homo sapien
caggtgaccaatatggagtgtagtc

SEQ ID NO: 848247 - DNA, 25 bp, Homo sapien
gctgcaccaggatcctagccatctg

SEQ ID NO: 848248 - DNA, 25 bp, Homo sapien
cagactctgggtcaaggaaacctca

SEQ ID NO: 848249 - DNA, 25 bp, Homo sapien
ccactgcgggtgctttgatgaaatc

SEQ ID NO: 848250 - DNA, 25 bp, Homo sapien
tttcccgaggatataagagacagac

SEQ ID NO: 848251 - DNA, 25 bp, Homo sapien
ttcagtgagcccaagtgtagtcggt

SEQ ID NO: 848252 - DNA, 25 bp, Homo sapien
caatctagaggtgagaaacacgaca

SEQ ID NO: 848253 - DNA, 25 bp, Homo sapien
aacaaaaaacaagcagctgtgtgac

SEQ ID NO: 848254 - DNA, 25 bp, Homo sapien
aaaaacaagcagctgtgtgacacgc

SEQ ID NO: 848255 - DNA, 25 bp, Homo sapien
caaaaaacaagcagctgtgtgacac

SEQ ID NO: 848256 - DNA, 25 bp, Homo sapien
aaaacaagcagctgtgtgacacgct

SEQ ID NO: 848257 - DNA, 25 bp, Homo sapien
gcaggcataggcgatgttgacgacg

SEQ ID NO: 848258 - DNA, 25 bp, Homo sapien
aggcataggcgatgttgacgacggc

SEQ ID NO: 848259 - DNA, 25 bp, Homo sapien
caggcataggcgatgttgacgacgg

SEQ ID NO: 848260 - DNA, 25 bp, Homo sapien
ctatgtcatgcagccagcaaaggag

SEQ ID NO: 848261 - DNA, 25 bp, Homo sapien
gcttggctggatgcaggaggttcac

SEQ ID NO: 848262 - DNA, 25 bp, Homo sapien
tgggcttggctggatgcaggaggtt

SEQ ID NO: 848263 - DNA, 25 bp, Homo sapien
aaaggagatgggcttggctggatgc

SEQ ID NO: 848264 - DNA, 25 bp, Homo sapien
gcaccaacaggaggcattcagtatg

SEQ ID NO: 848265 - DNA, 25 bp, Homo sapien
cagcaccaacaggaggcattcagta

SEQ ID NO: 848266 - DNA, 25 bp, Homo sapien
ccaacaggaggcattcagtatgtgc

SEQ ID NO: 848267 - DNA, 25 bp, Homo sapien
ttcagtatgtgcaaaactcaaaaag

SEQ ID NO: 848268 - DNA, 25 bp, Homo sapien
ttcacgaggcccacaaaagggcagt

SEQ ID NO: 848269 - DNA, 25 bp, Homo sapien
aaagggcagtcttaggatgaggctc

SEQ ID NO: 848270 - DNA, 25 bp, Homo sapien
tcacatggaccatagccaggaggga

SEQ ID NO: 848271 - DNA, 25 bp, Homo sapien
tgaggctcacatggaccatagccag

SEQ ID NO: 848272 - DNA, 25 bp, Homo sapien
aatcagggggtttagcatcgggttg

SEQ ID NO: 848273 - DNA, 25 bp, Homo sapien
gacctctacattcctcaggttgtaa

SEQ ID NO: 848274 - DNA, 25 bp, Homo sapien
ccttgacctctacattcctcaggtt

SEQ ID NO: 848275 - DNA, 25 bp, Homo sapien
tgacctctacattcctcaggttgta

SEQ ID NO: 848276 - DNA, 25 bp, Homo sapien
ttaggaatgactttccttgcacagt

SEQ ID NO: 848277 - DNA, 25 bp, Homo sapien
ttgcacagtgctctcctcagggcac

SEQ ID NO: 848278 - DNA, 25 bp, Homo sapien
tccttgcacagtgctctcctcaggg

SEQ ID NO: 848279 - DNA, 25 bp, Homo sapien
taggaatgactttccttgcacagtg

SEQ ID NO: 848280 - DNA, 25 bp, Homo sapien
ttgaggcaataattgggcatcaaga

SEQ ID NO: 848281 - DNA, 25 bp, Homo sapien
agtccacgtgacaactgaggctggc

SEQ ID NO: 848282 - DNA, 25 bp, Homo sapien
attgggcatcaagagtccacgtgac

SEQ ID NO: 848283 - DNA, 25 bp, Homo sapien
gcatcaagagtccacgtgacaactg

SEQ ID NO: 848284 - DNA, 25 bp, Homo sapien
gaaacccaatgaatgcaacacatct

SEQ ID NO: 848285 - DNA, 25 bp, Homo sapien
tggttaaagaagtaagtggcctgta

SEQ ID NO: 848286 - DNA, 25 bp, Homo sapien
ggcacgtcttaccatggcacagcag

SEQ ID NO: 848287 - DNA, 25 bp, Homo sapien
tgtctgataaaaccacatctcatag

SEQ ID NO: 848288 - DNA, 25 bp, Homo sapien
tctcatcaattggtaaggcactgct

SEQ ID NO: 848289 - DNA, 25 bp, Homo sapien
cggtcttctcgttcagtgttgtctg

SEQ ID NO: 848290 - DNA, 25 bp, Homo sapien
taacactgcattgtcggtcttctcg

SEQ ID NO: 848291 - DNA, 25 bp, Homo sapien
ccccagagtcctcacggccatgcat

SEQ ID NO: 848292 - DNA, 25 bp, Homo sapien
taacttacttaaacatagcccaata

SEQ ID NO: 848293 - DNA, 25 bp, Homo sapien
catagcccaatattgaataataatg

SEQ ID NO: 848294 - DNA, 25 bp, Homo sapien
taatgtaagtgatacaaaatgatat

SEQ ID NO: 848295 - DNA, 25 bp, Homo sapien
aggagtcatggtttattttgtgtgc

SEQ ID NO: 848296 - DNA, 25 bp, Homo sapien
caccagcaggagacattcgctgtgt

SEQ ID NO: 848297 - DNA, 25 bp, Homo sapien
caggtcatgatgacggagtatcgga

SEQ ID NO: 848298 - DNA, 25 bp, Homo sapien
taggatgagaaccacatgggccaga

SEQ ID NO: 848299 - DNA, 25 bp, Homo sapien
gagacattcgctgtgtccaaaactc

SEQ ID NO: 848300 - DNA, 25 bp, Homo sapien
tagaaaaaagaccttttgctgctcc

SEQ ID NO: 848301 - DNA, 25 bp, Homo sapien
gctcctcaggatggcgggacttggg

SEQ ID NO: 848302 - DNA, 25 bp, Homo sapien
gatggcactgccaaagaagagtccc

SEQ ID NO: 848303 - DNA, 25 bp, Homo sapien
gacctctccgttcctcaggctgtaa

SEQ ID NO: 848304 - DNA, 25 bp, Homo sapien
tgcaggtgccaatctcaggcggcaa

SEQ ID NO: 848305 - DNA, 25 bp, Homo sapien
tctgctggctgcgaaaacatgagag

SEQ ID NO: 848306 - DNA, 25 bp, Homo sapien
caggcggcaaggaaactgactacaa

SEQ ID NO: 848307 - DNA, 25 bp, Homo sapien
cagtcctacaggtcggcagttggca

SEQ ID NO: 848308 - DNA, 25 bp, Homo sapien
gttgatgttagtgccggtcggctct

SEQ ID NO: 848309 - DNA, 25 bp, Homo sapien
gttgggaggtctcagaattttgtct

SEQ ID NO: 848310 - DNA, 25 bp, Homo sapien
tgccggtcggctcttcctgaattcc

SEQ ID NO: 848311 - DNA, 25 bp, Homo sapien
ggcctagaggaggtgtcctttcaga

SEQ ID NO: 848312 - DNA, 25 bp, Homo sapien
gggcagggcatattcacttcttttg

SEQ ID NO: 848313 - DNA, 25 bp, Homo sapien
ggtgcttttgagccaggatgagcca

SEQ ID NO: 848314 - DNA, 25 bp, Homo sapien
gtgggggtgcttttgagccaggatg

SEQ ID NO: 848315 - DNA, 25 bp, Homo sapien
gggggtgcttttgagccaggatgag

SEQ ID NO: 848316 - DNA, 25 bp, Homo sapien
gtttgttctctggtgggtaggagtg

SEQ ID NO: 848317 - DNA, 25 bp, Homo sapien
gggtcgataaatggtatagtaaata

SEQ ID NO: 848318 - DNA, 25 bp, Homo sapien
ggtcgataaatggtatagtaaatat

SEQ ID NO: 848319 - DNA, 25 bp, Homo sapien
tttaaagagttgattagcaaagttg

SEQ ID NO: 848320 - DNA, 25 bp, Homo sapien
caaagccattcactactccaggggt

SEQ ID NO: 848321 - DNA, 25 bp, Homo sapien
aaagccattcactactccaggggtt

SEQ ID NO: 848322 - DNA, 25 bp, Homo sapien
tccccaaagccattcactactccag

SEQ ID NO: 848323 - DNA, 25 bp, Homo sapien
cccaaagccattcactactccaggg

SEQ ID NO: 848324 - DNA, 25 bp, Homo sapien
agaatgccaaaagtctctcgagtgt

SEQ ID NO: 848325 - DNA, 25 bp, Homo sapien
aatgccaaaagtctctcgagtgtgc

SEQ ID NO: 848326 - DNA, 25 bp, Homo sapien
gaatgccaaaagtctctcgagtgtg

SEQ ID NO: 848327 - DNA, 25 bp, Homo sapien
aagaatgccaaaagtctctcgagtg

SEQ ID NO: 848328 - DNA, 25 bp, Homo sapien
gggcccctccgcgcgcgagccccat

SEQ ID NO: 848329 - DNA, 25 bp, Homo sapien
ggaggggcagggcccctccgcgcgc

SEQ ID NO: 848330 - DNA, 25 bp, Homo sapien
gcagggcccctccgcgcgcgagccc

SEQ ID NO: 848331 - DNA, 25 bp, Homo sapien
gggcagggcccctccgcgcgcgagc

SEQ ID NO: 848332 - DNA, 25 bp, Homo sapien
gaaagagccctgattattggcccgg

SEQ ID NO: 848333 - DNA, 25 bp, Homo sapien
aaagagccctgattattggcccggg

SEQ ID NO: 848334 - DNA, 25 bp, Homo sapien
ctccggtagtcttgccggaaggcaa

SEQ ID NO: 848335 - DNA, 25 bp, Homo sapien
gagggcaaatctgtctttggaaccc

SEQ ID NO: 848336 - DNA, 25 bp, Homo sapien
acaagagtcctggccagagttcact

SEQ ID NO: 848337 - DNA, 25 bp, Homo sapien
gacgtagtatcacaactggctctcc

SEQ ID NO: 848338 - DNA, 25 bp, Homo sapien
tccagacaccacaaatgacgtattc

SEQ ID NO: 848339 - DNA, 25 bp, Homo sapien
gttgaacccaagaccctacgagtga

SEQ ID NO: 848340 - DNA, 25 bp, Homo sapien
cattcctgtccataccacatagcga

SEQ ID NO: 848341 - DNA, 25 bp, Homo sapien
agtaatgctgctcccgttgaaccca

SEQ ID NO: 848342 - DNA, 25 bp, Homo sapien
gcccctgtctacactagagctgttg

SEQ ID NO: 848343 - DNA, 25 bp, Homo sapien
cctgtctacactagagctgttggtc

SEQ ID NO: 848344 - DNA, 25 bp, Homo sapien
tgtctacactagagctgttggtcac

SEQ ID NO: 848345 - DNA, 25 bp, Homo sapien
gtgagtgacccagcccctgtctaca

SEQ ID NO: 848346 - DNA, 25 bp, Homo sapien
ctaccttgcaggcactataagtgat

SEQ ID NO: 848347 - DNA, 25 bp, Homo sapien
gcaggcactataagtgatcggctcc

SEQ ID NO: 848348 - DNA, 25 bp, Homo sapien
cactataagtgatcggctcctgctt

SEQ ID NO: 848349 - DNA, 25 bp, Homo sapien
cttgcaggcactataagtgatcggc

SEQ ID NO: 848350 - DNA, 25 bp, Homo sapien
gagttaccctctattgcaaccaata

SEQ ID NO: 848351 - DNA, 25 bp, Homo sapien
aatagtggcctatactcagtgttta

SEQ ID NO: 848352 - DNA, 25 bp, Homo sapien
gaactatgacttgctgaattatcca

SEQ ID NO: 848353 - DNA, 25 bp, Homo sapien
tatccatacttagcctaatagtggc

SEQ ID NO: 848354 - DNA, 25 bp, Homo sapien
attctgccaatattccctacaatcg

SEQ ID NO: 848355 - DNA, 25 bp, Homo sapien
cctacaatcgacatgttgttaattc

SEQ ID NO: 848356 - DNA, 25 bp, Homo sapien
ccaaagaagaccttatggatcttca

SEQ ID NO: 848357 - DNA, 25 bp, Homo sapien
caactgagctttgatagcggcattc

SEQ ID NO: 848358 - DNA, 25 bp, Homo sapien
aaggctttcctgattgggctccaca

SEQ ID NO: 848359 - DNA, 25 bp, Homo sapien
caatgtcaaagaagtaagtcctggc

SEQ ID NO: 848360 - DNA, 25 bp, Homo sapien
aaaagagggcatcgtctcaatcgca

SEQ ID NO: 848361 - DNA, 25 bp, Homo sapien
ccagtgttccggagtgtcacaggcc

SEQ ID NO: 848362 - DNA, 25 bp, Homo sapien
aaggtttgactcttttcgtcctgag

SEQ ID NO: 848363 - DNA, 25 bp, Homo sapien
tatcagagcgggcattgaaggccca

SEQ ID NO: 848364 - DNA, 25 bp, Homo sapien
tgcccgctgactggcacccctttct

SEQ ID NO: 848365 - DNA, 25 bp, Homo sapien
gaaggcccatgatgctcattctcct

SEQ ID NO: 848366 - DNA, 25 bp, Homo sapien
ctgagtgggagtaggaaagcaacat

SEQ ID NO: 848367 - DNA, 25 bp, Homo sapien
gtcccacagggagatgggtcatcca

SEQ ID NO: 848368 - DNA, 25 bp, Homo sapien
tcaggtgactcctcagtcaaaaagg

SEQ ID NO: 848369 - DNA, 25 bp, Homo sapien
tccgtaagtgctggacggtgcctgt

SEQ ID NO: 848370 - DNA, 25 bp, Homo sapien
ggtctctctagatttgagatggatt

SEQ ID NO: 848371 - DNA, 25 bp, Homo sapien
gagatggattcttgagagtcctgct

SEQ ID NO: 848372 - DNA, 25 bp, Homo sapien
tgaaacggtgctgtagtccctacca

SEQ ID NO: 848373 - DNA, 25 bp, Homo sapien
gagtcctgcttcagcgtggataagg

SEQ ID NO: 848374 - DNA, 25 bp, Homo sapien
ggaggagggggcagaggttcgtgga

SEQ ID NO: 848375 - DNA, 25 bp, Homo sapien
ggggcagaggttcgtggatcctcac

SEQ ID NO: 848376 - DNA, 25 bp, Homo sapien
ggagggggcagaggttcgtggatcc

SEQ ID NO: 848377 - DNA, 25 bp, Homo sapien
gggggcagaggttcgtggatcctca

SEQ ID NO: 848378 - DNA, 25 bp, Homo sapien
tagatggcagaggtcggtgctgcct

SEQ ID NO: 848379 - DNA, 25 bp, Homo sapien
ccaccacggagggatgggtgtccct

SEQ ID NO: 848380 - DNA, 25 bp, Homo sapien
cgtgggaaccactacacgagcatgg

SEQ ID NO: 848381 - DNA, 25 bp, Homo sapien
ggctatgctgcttcagcgtgggaac

SEQ ID NO: 848382 - DNA, 25 bp, Homo sapien
ggggtagcggcttgttgtatctcca

SEQ ID NO: 848383 - DNA, 25 bp, Homo sapien
gatccttgagctaccaggagcagaa

SEQ ID NO: 848384 - DNA, 25 bp, Homo sapien
gcaggtcttgttttggcatgacccc

SEQ ID NO: 848385 - DNA, 25 bp, Homo sapien
aagactctgttgatctagctgtggc

SEQ ID NO: 848386 - DNA, 25 bp, Homo sapien
gggcataggaagtttgtcatgttgc

SEQ ID NO: 848387 - DNA, 25 bp, Homo sapien
gagacccctgcttcatccttagagg

SEQ ID NO: 848388 - DNA, 25 bp, Homo sapien
cagggtgttctgagacccctgcttc

SEQ ID NO: 848389 - DNA, 25 bp, Homo sapien
tttgtcatgttgctgaaagccatgc

SEQ ID NO: 848390 - DNA, 25 bp, Homo sapien
ctgagtcccgcctgtggggccagct

SEQ ID NO: 848391 - DNA, 25 bp, Homo sapien
tccaggtgcagatggctgggttttt

SEQ ID NO: 848392 - DNA, 25 bp, Homo sapien
cagctggacgccttctccaggtgca

SEQ ID NO: 848393 - DNA, 25 bp, Homo sapien
actaggagccacagcctgtccactg

SEQ ID NO: 848394 - DNA, 25 bp, Homo sapien
cctcaggcaagatggaaggtctgcg

SEQ ID NO: 848395 - DNA, 25 bp, Homo sapien
gagccctcaggcaagatggaaggtc

SEQ ID NO: 848396 - DNA, 25 bp, Homo sapien
tcaggcaagatggaaggtctgcgca

SEQ ID NO: 848397 - DNA, 25 bp, Homo sapien
aagatggaaggtctgcgcaggccct

SEQ ID NO: 848398 - DNA, 25 bp, Homo sapien
ttctccacggctggacctcttgaat

SEQ ID NO: 848399 - DNA, 25 bp, Homo sapien
gtttctccacggctggacctcttga

SEQ ID NO: 848400 - DNA, 25 bp, Homo sapien
aacaacagtgtctgagggtcccgga

SEQ ID NO: 848401 - DNA, 25 bp, Homo sapien
aaacaacagtgtctgagggtcccgg

SEQ ID NO: 848402 - DNA, 25 bp, Homo sapien
agttgatgagtttggagcagcgtct

SEQ ID NO: 848403 - DNA, 25 bp, Homo sapien
gatgagtttggagcagcgtcttgaa

SEQ ID NO: 848404 - DNA, 25 bp, Homo sapien
tttggagcagcgtcttgaaaagcct

SEQ ID NO: 848405 - DNA, 25 bp, Homo sapien
gagcagcgtcttgaaaagcctccca

SEQ ID NO: 848406 - DNA, 25 bp, Homo sapien
ctatactcctggtaaagcagctggg

SEQ ID NO: 848407 - DNA, 25 bp, Homo sapien
ctggatctccttattcaggacaaca

SEQ ID NO: 848408 - DNA, 25 bp, Homo sapien
ggacaacatcactatactcctggta

SEQ ID NO: 848409 - DNA, 25 bp, Homo sapien
tctccttattcaggacaacatcact

SEQ ID NO: 848410 - DNA, 25 bp, Homo sapien
gaccagggccttccgaggctgccgc

SEQ ID NO: 848411 - DNA, 25 bp, Homo sapien
agggccttccgaggctgccgcggag

SEQ ID NO: 848412 - DNA, 25 bp, Homo sapien
gagaccagggccttccgaggctgcc

SEQ ID NO: 848413 - DNA, 25 bp, Homo sapien
cagggccttccgaggctgccgcgga

SEQ ID NO: 848414 - DNA, 25 bp, Homo sapien
ccacggggatttcctgccagaggga

SEQ ID NO: 848415 - DNA, 25 bp, Homo sapien
caccacggggatttcctgccagagg

SEQ ID NO: 848416 - DNA, 25 bp, Homo sapien
gcgcaccacggggatttcctgccag

SEQ ID NO: 848417 - DNA, 25 bp, Homo sapien
tgttgcgcaccacggggatttcctg

SEQ ID NO: 848418 - DNA, 25 bp, Homo sapien
taggaggcctctgacacaatcagct

SEQ ID NO: 848419 - DNA, 25 bp, Homo sapien
cctgtaaacgagagaagagccattg

SEQ ID NO: 848420 - DNA, 25 bp, Homo sapien
tttagactgcgcaggtaggaggcct

SEQ ID NO: 848421 - DNA, 25 bp, Homo sapien
ggaaatgatccacagctatgtttag

SEQ ID NO: 848422 - DNA, 25 bp, Homo sapien
cggaacatttaaagcctaacaacag

SEQ ID NO: 848423 - DNA, 25 bp, Homo sapien
aacatttaaagcctaacaacagtga

SEQ ID NO: 848424 - DNA, 25 bp, Homo sapien
agtgagtggtatttaggagaagggg

SEQ ID NO: 848425 - DNA, 25 bp, Homo sapien
gaacatttaaagcctaacaacagtg

SEQ ID NO: 848426 - DNA, 25 bp, Homo sapien
cttcttcctataaccatcgggaatc

SEQ ID NO: 848427 - DNA, 25 bp, Homo sapien
accatcgggaatcatggaagaaact

SEQ ID NO: 848428 - DNA, 25 bp, Homo sapien
tcctataaccatcgggaatcatgga

SEQ ID NO: 848429 - DNA, 25 bp, Homo sapien
tataaccatcgggaatcatggaaga

SEQ ID NO: 848430 - DNA, 25 bp, Homo sapien
cagtaatccaaaacctcaacccagg

SEQ ID NO: 848431 - DNA, 25 bp, Homo sapien
ttaatggatctatccacccacagac

SEQ ID NO: 848432 - DNA, 25 bp, Homo sapien
gatggtttttccacctcatctccaa

SEQ ID NO: 848433 - DNA, 25 bp, Homo sapien
tgcagtgcatgaccacagtaatcca

SEQ ID NO: 848434 - DNA, 25 bp, Homo sapien
tgttctcaaagttctcttccaggtc

SEQ ID NO: 848435 - DNA, 25 bp, Homo sapien
ttcctgataggtctggttggtgaca

SEQ ID NO: 848436 - DNA, 25 bp, Homo sapien
gactacgtcacatacttggaaggag

SEQ ID NO: 848437 - DNA, 25 bp, Homo sapien
gtgacataaggcaggtagacccggc

SEQ ID NO: 848438 - DNA, 25 bp, Homo sapien
cagaaaggacttgagggaaaggcgc

SEQ ID NO: 848439 - DNA, 25 bp, Homo sapien
ctggcagacggggtcgctctccagc

SEQ ID NO: 848440 - DNA, 25 bp, Homo sapien
ctggagcagcagtttgaggcgggtg

SEQ ID NO: 848441 - DNA, 25 bp, Homo sapien
gatgcgttggaagggcagaatcaga

SEQ ID NO: 848442 - DNA, 25 bp, Homo sapien
tgctccagggcgtggtgtgccttcg

SEQ ID NO: 848443 - DNA, 25 bp, Homo sapien
ctcctccgaggagccaggctgtgtt

SEQ ID NO: 848444 - DNA, 25 bp, Homo sapien
ggtgtgccttcgtggcctctgcctc

SEQ ID NO: 848445 - DNA, 25 bp, Homo sapien
cagggcgtggtgtgccttcgtggcc

SEQ ID NO: 848446 - DNA, 25 bp, Homo sapien
ctcaaactcaatcttctggctcagg

SEQ ID NO: 848447 - DNA, 25 bp, Homo sapien
gtcgcatactctggacattgttatt

SEQ ID NO: 848448 - DNA, 25 bp, Homo sapien
tcctctgtccgtcgcatactctgga

SEQ ID NO: 848449 - DNA, 25 bp, Homo sapien
tgtccgtcgcatactctggacattg

SEQ ID NO: 848450 - DNA, 25 bp, Homo sapien
gtgactgagaaatgagcgggaatat

SEQ ID NO: 848451 - DNA, 25 bp, Homo sapien
ttttcaccagccagcgtgactgaga

SEQ ID NO: 848452 - DNA, 25 bp, Homo sapien
gcgtgactgagaaatgagcgggaat

SEQ ID NO: 848453 - DNA, 25 bp, Homo sapien
cagccagcgtgactgagaaatgagc

SEQ ID NO: 848454 - DNA, 25 bp, Homo sapien
ggactggacgcgtgttcagcttcct

SEQ ID NO: 848455 - DNA, 25 bp, Homo sapien
caggtggactggacgcgtgttcagc

SEQ ID NO: 848456 - DNA, 25 bp, Homo sapien
gttcagcttccttcgtagccctggg

SEQ ID NO: 848457 - DNA, 25 bp, Homo sapien
ctcggggccgagacagcagcagaca

SEQ ID NO: 848458 - DNA, 25 bp, Homo sapien
ttcccctcttgtgccctggcctgcc

SEQ ID NO: 848459 - DNA, 25 bp, Homo sapien
ttgtgccctggcctgccactccagt

SEQ ID NO: 848460 - DNA, 25 bp, Homo sapien
catccccttcccctcttgtgccctg

SEQ ID NO: 848461 - DNA, 25 bp, Homo sapien
cctggcctgccactccagtcactga

SEQ ID NO: 848462 - DNA, 25 bp, Homo sapien
ccatacttcacctaccctcataacc

SEQ ID NO: 848463 - DNA, 25 bp, Homo sapien
acaaatcttttcaacctgattctag

SEQ ID NO: 848464 - DNA, 25 bp, Homo sapien
ttcgaaatccctacatctacagcct

SEQ ID NO: 848465 - DNA, 25 bp, Homo sapien
ccttgggttcgaaatccctacatct

SEQ ID NO: 848466 - DNA, 25 bp, Homo sapien
tctccgtgcggaagaggaactcggc

SEQ ID NO: 848467 - DNA, 25 bp, Homo sapien
tgccgcagaaagagtcggaacaggt

SEQ ID NO: 848468 - DNA, 25 bp, Homo sapien
gcgccctgagtgttctgccgcagaa

SEQ ID NO: 848469 - DNA, 25 bp, Homo sapien
gtcaaataccaggaatcggctaccc

SEQ ID NO: 848470 - DNA, 25 bp, Homo sapien
tagaagggtttctgcctcaggcatg

SEQ ID NO: 848471 - DNA, 25 bp, Homo sapien
gaatttctctatggtggtccccagt

SEQ ID NO: 848472 - DNA, 25 bp, Homo sapien
taaaatagatgctaagcctcggtgg

SEQ ID NO: 848473 - DNA, 25 bp, Homo sapien
ccagtccagaatgggctaaatgagg

SEQ ID NO: 848474 - DNA, 25 bp, Homo sapien
tgcacggtgtaatccaagcttaggt

SEQ ID NO: 848475 - DNA, 25 bp, Homo sapien
gcctaggtaactgggaatggactat

SEQ ID NO: 848476 - DNA, 25 bp, Homo sapien
aaaagtgtctacaacatagggatcc

SEQ ID NO: 848477 - DNA, 25 bp, Homo sapien
gagaacaggtgttatcggtcccact

SEQ ID NO: 848478 - DNA, 25 bp, Homo sapien
tgtaacactccagaaggtccaactc

SEQ ID NO: 848479 - DNA, 25 bp, Homo sapien
tgagatccaccgaagcttttcactt

SEQ ID NO: 848480 - DNA, 25 bp, Homo sapien
ccaactcctctcttggcatggccaa

SEQ ID NO: 848481 - DNA, 25 bp, Homo sapien
ggctgagatccaccgaagcttttca

SEQ ID NO: 848482 - DNA, 25 bp, Homo sapien
cctaccccaacaagaccttcaagca

SEQ ID NO: 848483 - DNA, 25 bp, Homo sapien
tcatcattctctcggggcttgtagg

SEQ ID NO: 848484 - DNA, 25 bp, Homo sapien
tttctccagtgccaattcatcattc

SEQ ID NO: 848485 - DNA, 25 bp, Homo sapien
gtcaccatcaccacgtcggctttct

SEQ ID NO: 848486 - DNA, 25 bp, Homo sapien
attctctcggggcttgtaggctcga

SEQ ID NO: 848487 - DNA, 25 bp, Homo sapien
gcttccttcaggttctgtgcacgga

SEQ ID NO: 848488 - DNA, 25 bp, Homo sapien
gacctctgggttggaaatgaactcc

SEQ ID NO: 848489 - DNA, 25 bp, Homo sapien
tgtgcacggacctctgggttggaaa

SEQ ID NO: 848490 - DNA, 25 bp, Homo sapien
ccagctgtagtttggcagtcttgac

SEQ ID NO: 848491 - DNA, 25 bp, Homo sapien
gaagataccttagaggtcaccgggc

SEQ ID NO: 848492 - DNA, 25 bp, Homo sapien
caagcacaaagcacgaaaggaggcc

SEQ ID NO: 848493 - DNA, 25 bp, Homo sapien
ccctggaggcggagaatgtttaagc

SEQ ID NO: 848494 - DNA, 25 bp, Homo sapien
gagacacactgaccttgcaccataa

SEQ ID NO: 848495 - DNA, 25 bp, Homo sapien
tcatattcttcaactgagacaggca

SEQ ID NO: 848496 - DNA, 25 bp, Homo sapien
taaaatcatggatggtccgagtcgg

SEQ ID NO: 848497 - DNA, 25 bp, Homo sapien
cagtttgggtcttgtgacttggatc

SEQ ID NO: 848498 - DNA, 25 bp, Homo sapien
cacatttgttagagttaagtagggc

SEQ ID NO: 848499 - DNA, 25 bp, Homo sapien
tgacttcagagttagaagattaccc

SEQ ID NO: 848500 - DNA, 25 bp, Homo sapien
tagaagattaccctcaactacaggc

SEQ ID NO: 848501 - DNA, 25 bp, Homo sapien
ctcaactacaggcttggaactgctg

SEQ ID NO: 848502 - DNA, 25 bp, Homo sapien
ggcttggaactgctgtaatcacaca

SEQ ID NO: 848503 - DNA, 25 bp, Homo sapien
tgctgatattcgagtccagagggcc

SEQ ID NO: 848504 - DNA, 25 bp, Homo sapien
ccagagggccagtccgggagattca

SEQ ID NO: 848505 - DNA, 25 bp, Homo sapien
gattcagcgttcttgtgtttgtagt

SEQ ID NO: 848506 - DNA, 25 bp, Homo sapien
ttgtagtttagttcatactgttctt

SEQ ID NO: 848507 - DNA, 25 bp, Homo sapien
cctccagaagctcaaaaatcagcat

SEQ ID NO: 848508 - DNA, 25 bp, Homo sapien
aaatggcagattcctcggctttcct

SEQ ID NO: 848509 - DNA, 25 bp, Homo sapien
gcagattcctcggctttcctccaga

SEQ ID NO: 848510 - DNA, 25 bp, Homo sapien
ttcctccagaagctcaaaaatcagc

SEQ ID NO: 848511 - DNA, 25 bp, Homo sapien
tgagggcagagcctagattattcat

SEQ ID NO: 848512 - DNA, 25 bp, Homo sapien
ttgagggcagagcctagattattca

SEQ ID NO: 848513 - DNA, 25 bp, Homo sapien
tctcattgcagataaactatcctcc

SEQ ID NO: 848514 - DNA, 25 bp, Homo sapien
gggagtgcactcctctaaatctgct

SEQ ID NO: 848515 - DNA, 25 bp, Homo sapien
ctatcctccaggtttggcccatcag

SEQ ID NO: 848516 - DNA, 25 bp, Homo sapien
cacaccatgattcaaagatttgagg

SEQ ID NO: 848517 - DNA, 25 bp, Homo sapien
cttctgttctaggaatggcaagacc

SEQ ID NO: 848518 - DNA, 25 bp, Homo sapien
ggcagggtaaaagatggcatgaata

SEQ ID NO: 848519 - DNA, 25 bp, Homo sapien
ccatggagtgcttctgttctaggaa

SEQ ID NO: 848520 - DNA, 25 bp, Homo sapien
agggatgtggtctttggcagggtaa

SEQ ID NO: 848521 - DNA, 25 bp, Homo sapien
cagggagaagtctgatgatgagaac

SEQ ID NO: 848522 - DNA, 25 bp, Homo sapien
atgagaacctcatcctgaggcctat

SEQ ID NO: 848523 - DNA, 25 bp, Homo sapien
agggagaagtctgatgatgagaacc

SEQ ID NO: 848524 - DNA, 25 bp, Homo sapien
gagaacctcatcctgaggcctatgg

SEQ ID NO: 848525 - DNA, 25 bp, Homo sapien
aagacctcagaaaacagtcttgttc

SEQ ID NO: 848526 - DNA, 25 bp, Homo sapien
aagttccaaagacctcagaaaacag

SEQ ID NO: 848527 - DNA, 25 bp, Homo sapien
tgttctaagaacttgagaaaaagga

SEQ ID NO: 848528 - DNA, 25 bp, Homo sapien
aaacagtcttgttctaagaacttga

SEQ ID NO: 848529 - DNA, 25 bp, Homo sapien
cttcatcatcgccatagcaagcccc

SEQ ID NO: 848530 - DNA, 25 bp, Homo sapien
atcatcgccatagcaagcccctggg

SEQ ID NO: 848531 - DNA, 25 bp, Homo sapien
ttcatcatcgccatagcaagcccct

SEQ ID NO: 848532 - DNA, 25 bp, Homo sapien
tcatcatcgccatagcaagcccctg

SEQ ID NO: 848533 - DNA, 25 bp, Homo sapien
tgccactagccacgttcaacctcac

SEQ ID NO: 848534 - DNA, 25 bp, Homo sapien
ccagagccccttgccactagccacg

SEQ ID NO: 848535 - DNA, 25 bp, Homo sapien
cttgccactagccacgttcaacctc

SEQ ID NO: 848536 - DNA, 25 bp, Homo sapien
cccttgccactagccacgttcaacc

SEQ ID NO: 848537 - DNA, 25 bp, Homo sapien
cagtttccatttgcctgagtcttct

SEQ ID NO: 848538 - DNA, 25 bp, Homo sapien
gagtcttctctgaggatccgacata

SEQ ID NO: 848539 - DNA, 25 bp, Homo sapien
tactcctccttgtaatcaaggcttg

SEQ ID NO: 848540 - DNA, 25 bp, Homo sapien
ggcttgcctgcccagtttccatttg

SEQ ID NO: 848541 - DNA, 25 bp, Homo sapien
gttaggtgctagttttaaccatatg

SEQ ID NO: 848542 - DNA, 25 bp, Homo sapien
ggtgctagttttaaccatatgtgtg

SEQ ID NO: 848543 - DNA, 25 bp, Homo sapien
gagttaggtgctagttttaaccata

SEQ ID NO: 848544 - DNA, 25 bp, Homo sapien
taggtgctagttttaaccatatgtg

SEQ ID NO: 848545 - DNA, 25 bp, Homo sapien
ttatttgccacatgtccaagcaggc

SEQ ID NO: 848546 - DNA, 25 bp, Homo sapien
tgtgaccgcatagctacatatgaaa

SEQ ID NO: 848547 - DNA, 25 bp, Homo sapien
tataacctcggactctgtgaccgca

SEQ ID NO: 848548 - DNA, 25 bp, Homo sapien
tgggagccacactatgaggatacaa

SEQ ID NO: 848549 - DNA, 25 bp, Homo sapien
cacaagcactaagaagttctggtag

SEQ ID NO: 848550 - DNA, 25 bp, Homo sapien
cagggcctcctgcatcaatgagtgg

SEQ ID NO: 848551 - DNA, 25 bp, Homo sapien
aaggctgtccttggtgagcttcaat

SEQ ID NO: 848552 - DNA, 25 bp, Homo sapien
tggtagacactgcaagttaatttcc

SEQ ID NO: 848553 - DNA, 25 bp, Homo sapien
cctttgtgagaggagcgggaatttc

SEQ ID NO: 848554 - DNA, 25 bp, Homo sapien
taacagggaatctcgagtgggcagt

SEQ ID NO: 848555 - DNA, 25 bp, Homo sapien
gaatttcaccagcaagaggtggcct

SEQ ID NO: 848556 - DNA, 25 bp, Homo sapien
aggaaagcagggcaccgcgtaggga

SEQ ID NO: 848557 - DNA, 25 bp, Homo sapien
tcatgttgcattggattcacctctc

SEQ ID NO: 848558 - DNA, 25 bp, Homo sapien
aatttgtttagctaaaacatttctg

SEQ ID NO: 848559 - DNA, 25 bp, Homo sapien
tttctgttggtgacacgaagatgat

SEQ ID NO: 848560 - DNA, 25 bp, Homo sapien
tgacacgaagatgatagagatttgg

SEQ ID NO: 848561 - DNA, 25 bp, Homo sapien
taggagcgatcacacttttcagggc

SEQ ID NO: 848562 - DNA, 25 bp, Homo sapien
aacttcctgctggatctaggagcga

SEQ ID NO: 848563 - DNA, 25 bp, Homo sapien
aagaggaccgttggcactaggagca

SEQ ID NO: 848564 - DNA, 25 bp, Homo sapien
tatacttcccacagtagtatgcaca

SEQ ID NO: 848565 - DNA, 25 bp, Homo sapien
gtagttgagtcaagtccagggtgag

SEQ ID NO: 848566 - DNA, 25 bp, Homo sapien
actgggtagttgagtcaagtccagg

SEQ ID NO: 848567 - DNA, 25 bp, Homo sapien
aagactgggtagttgagtcaagtcc

SEQ ID NO: 848568 - DNA, 25 bp, Homo sapien
ggtagttgagtcaagtccagggtga

SEQ ID NO: 848569 - DNA, 25 bp, Homo sapien
tcgggtggcatatctactctagcgt

SEQ ID NO: 848570 - DNA, 25 bp, Homo sapien
ccagcttctcatagaacagagttaa

SEQ ID NO: 848571 - DNA, 25 bp, Homo sapien
tactctagcgtgctcacttctctga

SEQ ID NO: 848572 - DNA, 25 bp, Homo sapien
ttaactgatggactttggcttcggg

SEQ ID NO: 848573 - DNA, 25 bp, Homo sapien
ccagagaagcagcacatgccatgcc

SEQ ID NO: 848574 - DNA, 25 bp, Homo sapien
ggcagaagaatcagtgttaccaaga

SEQ ID NO: 848575 - DNA, 25 bp, Homo sapien
tagagaatattatgggagcccagag

SEQ ID NO: 848576 - DNA, 25 bp, Homo sapien
cacagactggcgtaggaaggattcc

SEQ ID NO: 848577 - DNA, 25 bp, Homo sapien
tgccacctgctattgcatgtagata

SEQ ID NO: 848578 - DNA, 25 bp, Homo sapien
ctgccacctgctattgcatgtagat

SEQ ID NO: 848579 - DNA, 25 bp, Homo sapien
tccaaagccaattccttttctgtcc

SEQ ID NO: 848580 - DNA, 25 bp, Homo sapien
tgtcctctttccgatatctctgtga

SEQ ID NO: 848581 - DNA, 25 bp, Homo sapien
tgcagcttgcattgatcctctagtg

SEQ ID NO: 848582 - DNA, 25 bp, Homo sapien
tcaaatgtcctacttacagccagaa

SEQ ID NO: 848583 - DNA, 25 bp, Homo sapien
ttttgattattgtagccttgtagtg

SEQ ID NO: 848584 - DNA, 25 bp, Homo sapien
gccattccgtaggttgcctgtttgc

SEQ ID NO: 848585 - DNA, 25 bp, Homo sapien
ctgccattccgtaggttgcctgttt

SEQ ID NO: 848586 - DNA, 25 bp, Homo sapien
ttgattattgtagccttgtagtgta

SEQ ID NO: 848587 - DNA, 25 bp, Homo sapien
gctgtggagcaactttgcattgccc

SEQ ID NO: 848588 - DNA, 25 bp, Homo sapien
tagcttcacgagagagtgtgcttgg

SEQ ID NO: 848589 - DNA, 25 bp, Homo sapien
tgatgactgtgcacctctgttgggc

SEQ ID NO: 848590 - DNA, 25 bp, Homo sapien
tcttgctgcggcttgatgactgtgc

SEQ ID NO: 848591 - DNA, 25 bp, Homo sapien
gctgacacctgggtgtgatacccag

SEQ ID NO: 848592 - DNA, 25 bp, Homo sapien
tgtcatgtaggggtgctgacacctg

SEQ ID NO: 848593 - DNA, 25 bp, Homo sapien
gctgggtgtcatgtaggggtgctga

SEQ ID NO: 848594 - DNA, 25 bp, Homo sapien
gtgctgacacctgggtgtgataccc

SEQ ID NO: 848595 - DNA, 25 bp, Homo sapien
aggtgtattccttaaagacttcagt

SEQ ID NO: 848596 - DNA, 25 bp, Homo sapien
tctgagagttgtttgaggtgtattc

SEQ ID NO: 848597 - DNA, 25 bp, Homo sapien
agctacgggtagatgtatcttcttc

SEQ ID NO: 848598 - DNA, 25 bp, Homo sapien
tagctacgggtagatgtatcttctt

SEQ ID NO: 848599 - DNA, 25 bp, Homo sapien
ttagctacgggtagatgtatcttct

SEQ ID NO: 848600 - DNA, 25 bp, Homo sapien
gctacgggtagatgtatcttcttca

SEQ ID NO: 848601 - DNA, 25 bp, Homo sapien
tctttcgtgcttatagctgaattgg

SEQ ID NO: 848602 - DNA, 25 bp, Homo sapien
gctttctttcgtgcttatagctgaa

SEQ ID NO: 848603 - DNA, 25 bp, Homo sapien
ggtttgctttctttcgtgcttatag

SEQ ID NO: 848604 - DNA, 25 bp, Homo sapien
gcttatagctgaattggctttgtcc

SEQ ID NO: 848605 - DNA, 25 bp, Homo sapien
gtttcccacatggagtttgagtgag

SEQ ID NO: 848606 - DNA, 25 bp, Homo sapien
ccacatggagtttgagtgagtctgt

SEQ ID NO: 848607 - DNA, 25 bp, Homo sapien
ttcccacatggagtttgagtgagtc

SEQ ID NO: 848608 - DNA, 25 bp, Homo sapien
cccacatggagtttgagtgagtctg

SEQ ID NO: 848609 - DNA, 25 bp, Homo sapien
ccccctggacctctgatctgaaaca

SEQ ID NO: 848610 - DNA, 25 bp, Homo sapien
atctttgaatgaattgaattccccc

SEQ ID NO: 848611 - DNA, 25 bp, Homo sapien
cccctggacctctgatctgaaacag

SEQ ID NO: 848612 - DNA, 25 bp, Homo sapien
tgaatctttgaatgaattgaattcc

SEQ ID NO: 848613 - DNA, 25 bp, Homo sapien
tccatcaaagtccagcatattttct

SEQ ID NO: 848614 - DNA, 25 bp, Homo sapien
ttccatcaaagtccagcatattttc

SEQ ID NO: 848615 - DNA, 25 bp, Homo sapien
ctttccatcaaagtccagcatattt

SEQ ID NO: 848616 - DNA, 25 bp, Homo sapien
catcaaagtccagcatattttcttc

SEQ ID NO: 848617 - DNA, 25 bp, Homo sapien
atcttcctggaaaactgttccacct

SEQ ID NO: 848618 - DNA, 25 bp, Homo sapien
ctcctatgtggaatttggatatctt

SEQ ID NO: 848619 - DNA, 25 bp, Homo sapien
gtgtttcaggatcatacatttctct

SEQ ID NO: 848620 - DNA, 25 bp, Homo sapien
tggaaaactgttccaccttcagtgt

SEQ ID NO: 848621 - DNA, 25 bp, Homo sapien
tatttttgccattcctgattccctc

SEQ ID NO: 848622 - DNA, 25 bp, Homo sapien
acttgattcgtgatgcattgatgca

SEQ ID NO: 848623 - DNA, 25 bp, Homo sapien
tcttagaatgcaaacctcgtatgtg

SEQ ID NO: 848624 - DNA, 25 bp, Homo sapien
taggccaaggtagataggcagaaga

SEQ ID NO: 848625 - DNA, 25 bp, Homo sapien
gttgaatgcctcttttggcagtgta

SEQ ID NO: 848626 - DNA, 25 bp, Homo sapien
tgttgaatgcctcttttggcagtgt

SEQ ID NO: 848627 - DNA, 25 bp, Homo sapien
ttgaatgcctcttttggcagtgtag

SEQ ID NO: 848628 - DNA, 25 bp, Homo sapien
tgactcttgatatggtggattgtgt

SEQ ID NO: 848629 - DNA, 25 bp, Homo sapien
gcccacagtgcccatgagatgaaaa

SEQ ID NO: 848630 - DNA, 25 bp, Homo sapien
aagcccacagtgcccatgagatgaa

SEQ ID NO: 848631 - DNA, 25 bp, Homo sapien
ggatttccttcagtatgggtttgac

SEQ ID NO: 848632 - DNA, 25 bp, Homo sapien
ctccagggaggtcgtctaaaggcag

SEQ ID NO: 848633 - DNA, 25 bp, Homo sapien
cagctcctgtgctctattgcaaaac

SEQ ID NO: 848634 - DNA, 25 bp, Homo sapien
gctcctgtgctctattgcaaaacct

SEQ ID NO: 848635 - DNA, 25 bp, Homo sapien
ggctccagggaggtcgtctaaaggc

SEQ ID NO: 848636 - DNA, 25 bp, Homo sapien
cttcttgttgtgaaattgcatcatt

SEQ ID NO: 848637 - DNA, 25 bp, Homo sapien
atgccatccaagagttagagctgct

SEQ ID NO: 848638 - DNA, 25 bp, Homo sapien
catttttatgccatccaagagttag

SEQ ID NO: 848639 - DNA, 25 bp, Homo sapien
ttcttgttgtgaaattgcatcattt

SEQ ID NO: 848640 - DNA, 25 bp, Homo sapien
cttgggtggttctcacagttacctc

SEQ ID NO: 848641 - DNA, 25 bp, Homo sapien
ttccacattggagcaaggcctgtag

SEQ ID NO: 848642 - DNA, 25 bp, Homo sapien
tatatgaagtacagatccagggaac

SEQ ID NO: 848643 - DNA, 25 bp, Homo sapien
tgttcctatgggtaaaactgtgtag

SEQ ID NO: 848644 - DNA, 25 bp, Homo sapien
caggatggagccaagatgcattact

SEQ ID NO: 848645 - DNA, 25 bp, Homo sapien
gatggagccaagatgcattacttct

SEQ ID NO: 848646 - DNA, 25 bp, Homo sapien
ggatggagccaagatgcattacttc

SEQ ID NO: 848647 - DNA, 25 bp, Homo sapien
tggagccaagatgcattacttcttt

SEQ ID NO: 848648 - DNA, 25 bp, Homo sapien
gtgtacttcagggacgaggaaagtg

SEQ ID NO: 848649 - DNA, 25 bp, Homo sapien
cacagatgtggccatagtgacatgt

SEQ ID NO: 848650 - DNA, 25 bp, Homo sapien
ttgcagaagggatcatccacagatg

SEQ ID NO: 848651 - DNA, 25 bp, Homo sapien
gggtcccggttgcttctctctgcaa

SEQ ID NO: 848652 - DNA, 25 bp, Homo sapien
caaagcctgtccttgtttacccttg

SEQ ID NO: 848653 - DNA, 25 bp, Homo sapien
ggcaagcccttgagtgctctaatat

SEQ ID NO: 848654 - DNA, 25 bp, Homo sapien
gctctaatattctggacagtgactc

SEQ ID NO: 848655 - DNA, 25 bp, Homo sapien
atctcgcccttcagatgataagtgg

SEQ ID NO: 848656 - DNA, 25 bp, Homo sapien
tcatccacaagggaaatctcgccct

SEQ ID NO: 848657 - DNA, 25 bp, Homo sapien
taagagttgccaaacgcagaggcaa

SEQ ID NO: 848658 - DNA, 25 bp, Homo sapien
ttgtccctggcaacatgagcagcag

SEQ ID NO: 848659 - DNA, 25 bp, Homo sapien
catctctggaagcaataagagttgc

SEQ ID NO: 848660 - DNA, 25 bp, Homo sapien
agcagcagctgtaagaccctctaaa

SEQ ID NO: 848661 - DNA, 25 bp, Homo sapien
tagaaaagtgtaccgattatctggt

SEQ ID NO: 848662 - DNA, 25 bp, Homo sapien
aaatcttcatagaaaagtgtaccga

SEQ ID NO: 848663 - DNA, 25 bp, Homo sapien
tcttcatagaaaagtgtaccgatta

SEQ ID NO: 848664 - DNA, 25 bp, Homo sapien
catagaaaagtgtaccgattatctg

SEQ ID NO: 848665 - DNA, 25 bp, Homo sapien
gaagctgtggcttggcagttgcaac

SEQ ID NO: 848666 - DNA, 25 bp, Homo sapien
ccaacatgtccggaaatgttttcca

SEQ ID NO: 848667 - DNA, 25 bp, Homo sapien
cagttgcaactccaacatgtccgga

SEQ ID NO: 848668 - DNA, 25 bp, Homo sapien
ctgagaggacaaagtgtccatccac

SEQ ID NO: 848669 - DNA, 25 bp, Homo sapien
gctggattcaagcacacagcttgga

SEQ ID NO: 848670 - DNA, 25 bp, Homo sapien
ggaatctttgattcccctgccaagg

SEQ ID NO: 848671 - DNA, 25 bp, Homo sapien
cacccaatgagcactggaggttgac

SEQ ID NO: 848672 - DNA, 25 bp, Homo sapien
aggaagaattctagccatgactgag

SEQ ID NO: 848673 - DNA, 25 bp, Homo sapien
cacaaacactccttgattgaggaaa

SEQ ID NO: 848674 - DNA, 25 bp, Homo sapien
agctgaacaacaatatggatgggaa

SEQ ID NO: 848675 - DNA, 25 bp, Homo sapien
aaacactccttgattgaggaaaaga

SEQ ID NO: 848676 - DNA, 25 bp, Homo sapien
cagctgaacaacaatatggatggga

SEQ ID NO: 848677 - DNA, 25 bp, Homo sapien
taatgaagactgcattgccgtgaga

SEQ ID NO: 848678 - DNA, 25 bp, Homo sapien
cactgataatatggctgcactggta

SEQ ID NO: 848679 - DNA, 25 bp, Homo sapien
acaactggaagaggtacgctgtgcc

SEQ ID NO: 848680 - DNA, 25 bp, Homo sapien
gactgtcctgtaagagtctggtgct

SEQ ID NO: 848681 - DNA, 25 bp, Homo sapien
gacttcaaatgtaccggtgaaaata

SEQ ID NO: 848682 - DNA, 25 bp, Homo sapien
caggttctctgagtgttacgctgca

SEQ ID NO: 848683 - DNA, 25 bp, Homo sapien
acgctgcagtggcacttgtccggaa

SEQ ID NO: 848684 - DNA, 25 bp, Homo sapien
tcaaatgtaccggtgaaaatatcat

SEQ ID NO: 848685 - DNA, 25 bp, Homo sapien
caagaagagccaatagtgagtcaac

SEQ ID NO: 848686 - DNA, 25 bp, Homo sapien
aagaagagccaatagtgagtcaact

SEQ ID NO: 848687 - DNA, 25 bp, Homo sapien
tgcaagaagagccaatagtgagtca

SEQ ID NO: 848688 - DNA, 25 bp, Homo sapien
gaagagccaatagtgagtcaactgc

SEQ ID NO: 848689 - DNA, 25 bp, Homo sapien
aagattacgtaagtaaccacatgct

SEQ ID NO: 848690 - DNA, 25 bp, Homo sapien
gattacgtaagtaaccacatgctaa

SEQ ID NO: 848691 - DNA, 25 bp, Homo sapien
gtaagattacgtaagtaaccacatg

SEQ ID NO: 848692 - DNA, 25 bp, Homo sapien
cacatgctaaagatgacatatcagg

SEQ ID NO: 848693 - DNA, 25 bp, Homo sapien
gattcttgttgcaacaaaggtttgt

SEQ ID NO: 848694 - DNA, 25 bp, Homo sapien
tctcaacagcacctaatggagctgc

SEQ ID NO: 848695 - DNA, 25 bp, Homo sapien
aaacagcccagcatgtatctactaa

SEQ ID NO: 848696 - DNA, 25 bp, Homo sapien
aatacttctggattattgtgatgaa

SEQ ID NO: 848697 - DNA, 25 bp, Homo sapien
gcttcacgagttgggtcacaacttc

SEQ ID NO: 848698 - DNA, 25 bp, Homo sapien
agcttcacgagttgggtcacaactt

SEQ ID NO: 848699 - DNA, 25 bp, Homo sapien
agtctatgtagcttccttccgattg

SEQ ID NO: 848700 - DNA, 25 bp, Homo sapien
taggctgggaaagatggtgagtgct

SEQ ID NO: 848701 - DNA, 25 bp, Homo sapien
tccgattgttagttttaggctggga

SEQ ID NO: 848702 - DNA, 25 bp, Homo sapien
tatgtagcttccttccgattgttag

SEQ ID NO: 848703 - DNA, 25 bp, Homo sapien
ggcttgctgtatctggtcctgaagg

SEQ ID NO: 848704 - DNA, 25 bp, Homo sapien
ttgctgtatctggtcctgaaggcca

SEQ ID NO: 848705 - DNA, 25 bp, Homo sapien
cttgctgtatctggtcctgaaggcc

SEQ ID NO: 848706 - DNA, 25 bp, Homo sapien
tgctgtatctggtcctgaaggccag

SEQ ID NO: 848707 - DNA, 25 bp, Homo sapien
caatacggcttctttttgtgtctta

SEQ ID NO: 848708 - DNA, 25 bp, Homo sapien
gttggtcacagccaatacggcttct

SEQ ID NO: 848709 - DNA, 25 bp, Homo sapien
attccactacttgtagagttggtca

SEQ ID NO: 848710 - DNA, 25 bp, Homo sapien
agaacactgactaatctatgattca

SEQ ID NO: 848711 - DNA, 25 bp, Homo sapien
tcattctgaacatgggaggtatagc

SEQ ID NO: 848712 - DNA, 25 bp, Homo sapien
atagctttcagaggtagtgtctggc

SEQ ID NO: 848713 - DNA, 25 bp, Homo sapien
aagagtctcattctgaacatgggag

SEQ ID NO: 848714 - DNA, 25 bp, Homo sapien
catgggaggtatagctttcagaggt

SEQ ID NO: 848715 - DNA, 25 bp, Homo sapien
tattagtaactgagccaggtgtcga

SEQ ID NO: 848716 - DNA, 25 bp, Homo sapien
caggtgtcgaccatggaaaagctgg

SEQ ID NO: 848717 - DNA, 25 bp, Homo sapien
tgggccctggaacgttcagtcagat

SEQ ID NO: 848718 - DNA, 25 bp, Homo sapien
tactgcagactgctgaggagttgcc

SEQ ID NO: 848719 - DNA, 25 bp, Homo sapien
cagcttggacaaacctgagaacttt

SEQ ID NO: 848720 - DNA, 25 bp, Homo sapien
gctctgatcgcctgctttccgcctg

SEQ ID NO: 848721 - DNA, 25 bp, Homo sapien
aacccacactgctctgatcgcctgc

SEQ ID NO: 848722 - DNA, 25 bp, Homo sapien
ggaggtggctttctgctagcccagc

SEQ ID NO: 848723 - DNA, 25 bp, Homo sapien
gaagaaaattgcttcgacagatcat

SEQ ID NO: 848724 - DNA, 25 bp, Homo sapien
gcaaaatagataagaagaaaattgc

SEQ ID NO: 848725 - DNA, 25 bp, Homo sapien
aattgcttcgacagatcatgctttg

SEQ ID NO: 848726 - DNA, 25 bp, Homo sapien
gaaaattgcttcgacagatcatgct

SEQ ID NO: 848727 - DNA, 25 bp, Homo sapien
gccatagattgcatgggggaaccca

SEQ ID NO: 848728 - DNA, 25 bp, Homo sapien
atagattgcatgggggaacccaaat

SEQ ID NO: 848729 - DNA, 25 bp, Homo sapien
ccatagattgcatgggggaacccaa

SEQ ID NO: 848730 - DNA, 25 bp, Homo sapien
catagattgcatgggggaacccaaa

SEQ ID NO: 848731 - DNA, 25 bp, Homo sapien
gaagaaaattgcttcgacagatcat

SEQ ID NO: 848732 - DNA, 25 bp, Homo sapien
gcaaaatagataagaagaaaattgc

SEQ ID NO: 848733 - DNA, 25 bp, Homo sapien
gaaaattgcttcgacagatcatgct

SEQ ID NO: 848734 - DNA, 25 bp, Homo sapien
aattgcttcgacagatcatgctttg

SEQ ID NO: 848735 - DNA, 25 bp, Homo sapien
gccaaattggcctttgtcatcaaga

SEQ ID NO: 848736 - DNA, 25 bp, Homo sapien
gccttcgtcaagtcttcaatggaac

SEQ ID NO: 848737 - DNA, 25 bp, Homo sapien
tccaaaaggtgttgcagattcttcg

SEQ ID NO: 848738 - DNA, 25 bp, Homo sapien
tggtgtgagcccaaaggtccaaaag

SEQ ID NO: 848739 - DNA, 25 bp, Homo sapien
taatgctccctaatgtgaaaatttc

SEQ ID NO: 848740 - DNA, 25 bp, Homo sapien
tctattttgtagatgcaagcttctt

SEQ ID NO: 848741 - DNA, 25 bp, Homo sapien
agttcctgtaatgctccctaatgtg

SEQ ID NO: 848742 - DNA, 25 bp, Homo sapien
tcaactgagacaactgtgtattctt

SEQ ID NO: 848743 - DNA, 25 bp, Homo sapien
ttctctagagccactccattgcgtg

SEQ ID NO: 848744 - DNA, 25 bp, Homo sapien
cactccattgcgtgcagacaagtaa

SEQ ID NO: 848745 - DNA, 25 bp, Homo sapien
ttgcgtgcagacaagtaacgggttg

SEQ ID NO: 848746 - DNA, 25 bp, Homo sapien
gcagacaagtaacgggttgaatcac

SEQ ID NO: 848747 - DNA, 25 bp, Homo sapien
ctgttcttctgataggtaattgaac

SEQ ID NO: 848748 - DNA, 25 bp, Homo sapien
tgataggtaattgaacagcatcttg

SEQ ID NO: 848749 - DNA, 25 bp, Homo sapien
ttgtctcaactgcactgcactctca

SEQ ID NO: 848750 - DNA, 25 bp, Homo sapien
cagagcttgtatgacctggctgctt

SEQ ID NO: 848751 - DNA, 25 bp, Homo sapien
tctctcaaatccaccgtgtgcttta

SEQ ID NO: 848752 - DNA, 25 bp, Homo sapien
tcaaatccaccgtgtgctttagccc

SEQ ID NO: 848753 - DNA, 25 bp, Homo sapien
accgtgtgctttagcccccaatgct

SEQ ID NO: 848754 - DNA, 25 bp, Homo sapien
ccgtgtgctttagcccccaatgctg

SEQ ID NO: 848755 - DNA, 25 bp, Homo sapien
gcagatgactgcctattgccacttt

SEQ ID NO: 848756 - DNA, 25 bp, Homo sapien
tagtttcagattgcaggttcgtcca

SEQ ID NO: 848757 - DNA, 25 bp, Homo sapien
tgtgaactcacaaatcctcagaata

SEQ ID NO: 848758 - DNA, 25 bp, Homo sapien
gataaagcgaaaggtgtataaccgc

SEQ ID NO: 848759 - DNA, 25 bp, Homo sapien
taggatcattataccctgcatgcac

SEQ ID NO: 848760 - DNA, 25 bp, Homo sapien
gatcattataccctgcatgcaccat

SEQ ID NO: 848761 - DNA, 25 bp, Homo sapien
cactctaggatcattataccctgca

SEQ ID NO: 848762 - DNA, 25 bp, Homo sapien
tatctcaacacaaatctccacaccc

SEQ ID NO: 848763 - DNA, 25 bp, Homo sapien
caagtgaaacatattcaatctgcac

SEQ ID NO: 848764 - DNA, 25 bp, Homo sapien
aagtgaaacatattcaatctgcaca

SEQ ID NO: 848765 - DNA, 25 bp, Homo sapien
tcccttccaacattaccaagtgaaa

SEQ ID NO: 848766 - DNA, 25 bp, Homo sapien
ctcccttccaacattaccaagtgaa

SEQ ID NO: 848767 - DNA, 25 bp, Homo sapien
gaccagcaggcacacagtgtcgatg

SEQ ID NO: 848768 - DNA, 25 bp, Homo sapien
catctctgcaaatggagaatgctca

SEQ ID NO: 848769 - DNA, 25 bp, Homo sapien
ccacagtaagagtttcattgtactc

SEQ ID NO: 848770 - DNA, 25 bp, Homo sapien
tctaaagtcactgtactatgagctc

SEQ ID NO: 848771 - DNA, 25 bp, Homo sapien
tgtcagaatccagtccaggtgagga

SEQ ID NO: 848772 - DNA, 25 bp, Homo sapien
tctagcacagggtgtaagagcccag

SEQ ID NO: 848773 - DNA, 25 bp, Homo sapien
gaaggtcccaatactcctggagtag

SEQ ID NO: 848774 - DNA, 25 bp, Homo sapien
cccagtagggtagtgagagctctcc

SEQ ID NO: 848775 - DNA, 25 bp, Homo sapien
ctgccaacatgcatgcgattttctg

SEQ ID NO: 848776 - DNA, 25 bp, Homo sapien
caacatgcatgcgattttctgcagc

SEQ ID NO: 848777 - DNA, 25 bp, Homo sapien
tggcgatgcccttcccatgacactg

SEQ ID NO: 848778 - DNA, 25 bp, Homo sapien
ttcccatgacactgccaacatgcat

SEQ ID NO: 848779 - DNA, 25 bp, Homo sapien
ctcttgtatatccagggcagtccaa

SEQ ID NO: 848780 - DNA, 25 bp, Homo sapien
ccagggcagtccaaaaaaggagatg

SEQ ID NO: 848781 - DNA, 25 bp, Homo sapien
tcattagacaaccacagtttctggg

SEQ ID NO: 848782 - DNA, 25 bp, Homo sapien
cacttggattgaaaagctatggtca

SEQ ID NO: 848783 - DNA, 25 bp, Homo sapien
tgtctaatggtatcacaaagatctc

SEQ ID NO: 848784 - DNA, 25 bp, Homo sapien
caaagatctcagtctctcgagttga

SEQ ID NO: 848785 - DNA, 25 bp, Homo sapien
gaaactacccacagtaacagcctaa

SEQ ID NO: 848786 - DNA, 25 bp, Homo sapien
tgccagacgccgaagtgtggaagtt

SEQ ID NO: 848787 - DNA, 25 bp, Homo sapien
gagttgcagaggacaacgactcggg

SEQ ID NO: 848788 - DNA, 25 bp, Homo sapien
agccatgaagcctccgtgggcaaca

SEQ ID NO: 848789 - DNA, 25 bp, Homo sapien
caacgactcggggaactgacagaaa

SEQ ID NO: 848790 - DNA, 25 bp, Homo sapien
agtcacctcagtgacatcttgcctc

SEQ ID NO: 848791 - DNA, 25 bp, Homo sapien
caaggaaactgatatggcaaccaca

SEQ ID NO: 848792 - DNA, 25 bp, Homo sapien
tgaaacgggccaagacatactagac

SEQ ID NO: 848793 - DNA, 25 bp, Homo sapien
tggccattaagcgatccacacagct

SEQ ID NO: 848794 - DNA, 25 bp, Homo sapien
ttgaattctcaacctcgcagcgtgc

SEQ ID NO: 848795 - DNA, 25 bp, Homo sapien
gctgcgttcgtagaaaaagctggca

SEQ ID NO: 848796 - DNA, 25 bp, Homo sapien
gcatgtgtacgtcttgttaaaccaa

SEQ ID NO: 848797 - DNA, 25 bp, Homo sapien
tcttcttttggtaaatccctcagca

SEQ ID NO: 848798 - DNA, 25 bp, Homo sapien
tgtatgcttgctagaaaaaccacat

SEQ ID NO: 848799 - DNA, 25 bp, Homo sapien
tctggaatgccgaaaggaatgccac

SEQ ID NO: 848800 - DNA, 25 bp, Homo sapien
ggcaggtttctaccagcttggaaga

SEQ ID NO: 848801 - DNA, 25 bp, Homo sapien
ggtgagcaagaatcaagcctcttct

SEQ ID NO: 848802 - DNA, 25 bp, Homo sapien
ggaagagatcaccaacagccacgtg

SEQ ID NO: 848803 - DNA, 25 bp, Homo sapien
tgggtacagaggaacttaagctcca

SEQ ID NO: 848804 - DNA, 25 bp, Homo sapien
gacatgtgaatccctgggtacagag

SEQ ID NO: 848805 - DNA, 25 bp, Homo sapien
tctgtgcatggtgacatgtgaatcc

SEQ ID NO: 848806 - DNA, 25 bp, Homo sapien
gggtacagaggaacttaagctccat

SEQ ID NO: 848807 - DNA, 25 bp, Homo sapien
cgtttctgaatatccctcctctcat

SEQ ID NO: 848808 - DNA, 25 bp, Homo sapien
cagcagaagttgtcatggggcagac

SEQ ID NO: 848809 - DNA, 25 bp, Homo sapien
gcacactcatctgagtcgctggtcc

SEQ ID NO: 848810 - DNA, 25 bp, Homo sapien
tcagggcacactcatctgagtcgct

SEQ ID NO: 848811 - DNA, 25 bp, Homo sapien
gtcaacgtggctgtcactgatccat

SEQ ID NO: 848812 - DNA, 25 bp, Homo sapien
catcttggcattctggctgatcctc

SEQ ID NO: 848813 - DNA, 25 bp, Homo sapien
gtatttaaaagtcaacgtggctgtc

SEQ ID NO: 848814 - DNA, 25 bp, Homo sapien
tcactgatccatcttggcattctgg

SEQ ID NO: 848815 - DNA, 25 bp, Homo sapien
ccagctgttttcactgctgccactt

SEQ ID NO: 848816 - DNA, 25 bp, Homo sapien
tgccacttccaaatgctgtggacag

SEQ ID NO: 848817 - DNA, 25 bp, Homo sapien
tgttttcactgctgccacttccaaa

SEQ ID NO: 848818 - DNA, 25 bp, Homo sapien
tgctgccacttccaaatgctgtgga

SEQ ID NO: 848819 - DNA, 25 bp, Homo sapien
gcatcctcccgcgtctgtgagaacg

SEQ ID NO: 848820 - DNA, 25 bp, Homo sapien
ctcgtccttgaacgcctgctcctgc

SEQ ID NO: 848821 - DNA, 25 bp, Homo sapien
ctgctggaggctcacctgctcccgg

SEQ ID NO: 848822 - DNA, 25 bp, Homo sapien
tgagaacggcctttagttcgcccag

SEQ ID NO: 848823 - DNA, 25 bp, Homo sapien
agacgtctgagtgtttgaaggttca

SEQ ID NO: 848824 - DNA, 25 bp, Homo sapien
gacgtctgagtgtttgaaggttcat

SEQ ID NO: 848825 - DNA, 25 bp, Homo sapien
aagacgtctgagtgtttgaaggttc

SEQ ID NO: 848826 - DNA, 25 bp, Homo sapien
ctaagacgtctgagtgtttgaaggt

SEQ ID NO: 848827 - DNA, 25 bp, Homo sapien
ggctcttggacaaggcgcactgcag

SEQ ID NO: 848828 - DNA, 25 bp, Homo sapien
agggcggccaggctctgcgtcagct

SEQ ID NO: 848829 - DNA, 25 bp, Homo sapien
caatccctgagtctttttccggagg

SEQ ID NO: 848830 - DNA, 25 bp, Homo sapien
ggcacagaagccgtctccagagaac

SEQ ID NO: 848831 - DNA, 25 bp, Homo sapien
ggccaggctcctcaccgcactgcca

SEQ ID NO: 848832 - DNA, 25 bp, Homo sapien
ccaggctcctcaccgcactgccagg

SEQ ID NO: 848833 - DNA, 25 bp, Homo sapien
gccctgtctgcttccgaggaccctg

SEQ ID NO: 848834 - DNA, 25 bp, Homo sapien
tgtctgcttccgaggaccctgggcc

SEQ ID NO: 848835 - DNA, 25 bp, Homo sapien
gcagcgtgtgctaggagcttgccca

SEQ ID NO: 848836 - DNA, 25 bp, Homo sapien
tgggcagcgtgtgctaggagcttgc

SEQ ID NO: 848837 - DNA, 25 bp, Homo sapien
agcgtgtgctaggagcttgcccaca

SEQ ID NO: 848838 - DNA, 25 bp, Homo sapien
ctgggcagcgtgtgctaggagcttg

SEQ ID NO: 848839 - DNA, 25 bp, Homo sapien
cagacgggcagcctgggcttggtcc

SEQ ID NO: 848840 - DNA, 25 bp, Homo sapien
acgggcagcctgggcttggtcctgg

SEQ ID NO: 848841 - DNA, 25 bp, Homo sapien
ctgaaggggcagacgggcagcctgg

SEQ ID NO: 848842 - DNA, 25 bp, Homo sapien
gcagacgggcagcctgggcttggtc

SEQ ID NO: 848843 - DNA, 25 bp, Homo sapien
agagaagaacaacggtccaggaagt

SEQ ID NO: 848844 - DNA, 25 bp, Homo sapien
ctagagaagaacaacggtccaggaa

SEQ ID NO: 848845 - DNA, 25 bp, Homo sapien
tctgttgtggcctgccgggtacaca

SEQ ID NO: 848846 - DNA, 25 bp, Homo sapien
gctgttctcgttggttctgttgtgg

SEQ ID NO: 848847 - DNA, 25 bp, Homo sapien
taaacccttggttgatcccaggctg

SEQ ID NO: 848848 - DNA, 25 bp, Homo sapien
aagcaaactgtctccgacagccctg

SEQ ID NO: 848849 - DNA, 25 bp, Homo sapien
cctgcacacacaattcattgagaca

SEQ ID NO: 848850 - DNA, 25 bp, Homo sapien
gacattttcataaatcttttcaacc

SEQ ID NO: 848851 - DNA, 25 bp, Homo sapien
taaatccgtgccctgcacacacaat

SEQ ID NO: 848852 - DNA, 25 bp, Homo sapien
cacaattcattgagacattttcata

SEQ ID NO: 848853 - DNA, 25 bp, Homo sapien
gatttatatcggtcaaactggccat

SEQ ID NO: 848854 - DNA, 25 bp, Homo sapien
tgatttatatcggtcaaactggcca

SEQ ID NO: 848855 - DNA, 25 bp, Homo sapien
tattttgatttatatcggtcaaact

SEQ ID NO: 848856 - DNA, 25 bp, Homo sapien
tttgatttatatcggtcaaactggc

SEQ ID NO: 848857 - DNA, 25 bp, Homo sapien
gtctatttctggaaccttagattta

SEQ ID NO: 848858 - DNA, 25 bp, Homo sapien
tatttctggaaccttagatttattg

SEQ ID NO: 848859 - DNA, 25 bp, Homo sapien
aagacgtctatttctggaaccttag

SEQ ID NO: 848860 - DNA, 25 bp, Homo sapien
gacgtctatttctggaaccttagat

SEQ ID NO: 848861 - DNA, 25 bp, Homo sapien
caaaatagctgactaggactgctta

SEQ ID NO: 848862 - DNA, 25 bp, Homo sapien
caaatctaatatgatatcttggcag

SEQ ID NO: 848863 - DNA, 25 bp, Homo sapien
cagtgatccacgaaatgcaaaaagg

SEQ ID NO: 848864 - DNA, 25 bp, Homo sapien
aactgccaaagcatcaaaaacaagg

SEQ ID NO: 848865 - DNA, 25 bp, Homo sapien
caaagaatacagaataggaagggag

SEQ ID NO: 848866 - DNA, 25 bp, Homo sapien
tgtgttagctactcttagaaacttc

SEQ ID NO: 848867 - DNA, 25 bp, Homo sapien
tacactccactctttatgtgttagc

SEQ ID NO: 848868 - DNA, 25 bp, Homo sapien
tagttaggtgaccatgctcaacatc

SEQ ID NO: 848869 - DNA, 25 bp, Homo sapien
tatatgttgaggacctattgagagt

SEQ ID NO: 848870 - DNA, 25 bp, Homo sapien
tgatcagaggttgaaacacttccct

SEQ ID NO: 848871 - DNA, 25 bp, Homo sapien
aagaagtatcccaagaagttaactg

SEQ ID NO: 848872 - DNA, 25 bp, Homo sapien
ctggaagaagaagtatcccaagaag

SEQ ID NO: 848873 - DNA, 25 bp, Homo sapien
gacctgtagtctgaaatatgatgat

SEQ ID NO: 848874 - DNA, 25 bp, Homo sapien
gcttatggtcatataggtcactctt

SEQ ID NO: 848875 - DNA, 25 bp, Homo sapien
aatttaaggatcttacagtttatgc

SEQ ID NO: 848876 - DNA, 25 bp, Homo sapien
caactttccttgacggctaggtgct

SEQ ID NO: 848877 - DNA, 25 bp, Homo sapien
agctagcttcttctggggtgccagc

SEQ ID NO: 848878 - DNA, 25 bp, Homo sapien
cccgcacatgctgagctagcttctt

SEQ ID NO: 848879 - DNA, 25 bp, Homo sapien
gacccgcacatgctgagctagcttc

SEQ ID NO: 848880 - DNA, 25 bp, Homo sapien
acccgcacatgctgagctagcttct

SEQ ID NO: 848881 - DNA, 25 bp, Homo sapien
ggctctgtcctgttctggaacttac

SEQ ID NO: 848882 - DNA, 25 bp, Homo sapien
caaaaagtgtcaaggcggctctgtc

SEQ ID NO: 848883 - DNA, 25 bp, Homo sapien
ggcggctctgtcctgttctggaact

SEQ ID NO: 848884 - DNA, 25 bp, Homo sapien
tcaaaaagtgtcaaggcggctctgt

SEQ ID NO: 848885 - DNA, 25 bp, Homo sapien
tctactggtgtcttttccagtatcc

SEQ ID NO: 848886 - DNA, 25 bp, Homo sapien
ctctactggtgtcttttccagtatc

SEQ ID NO: 848887 - DNA, 25 bp, Homo sapien
gtcatgatcctgaaggcagcagtaa

SEQ ID NO: 848888 - DNA, 25 bp, Homo sapien
tcatgatcctgaaggcagcagtaaa

SEQ ID NO: 848889 - DNA, 25 bp, Homo sapien
catgatcctgaaggcagcagtaaaa

SEQ ID NO: 848890 - DNA, 25 bp, Homo sapien
tttcccaagtttatcgaagatttga

SEQ ID NO: 848891 - DNA, 25 bp, Homo sapien
tcgaagatttgatactgagaagtca

SEQ ID NO: 848892 - DNA, 25 bp, Homo sapien
cattagattgctgtgactttagttg

SEQ ID NO: 848893 - DNA, 25 bp, Homo sapien
gaagtcaacacagcattagattgct

SEQ ID NO: 848894 - DNA, 25 bp, Homo sapien
gaaatctccaggtgccaaattgaat

SEQ ID NO: 848895 - DNA, 25 bp, Homo sapien
tctttggctaatgtgttacttgaga

SEQ ID NO: 848896 - DNA, 25 bp, Homo sapien
caggtgccaaattgaataattctga

SEQ ID NO: 848897 - DNA, 25 bp, Homo sapien
gttacttgagaaatctccaggtgcc

SEQ ID NO: 848898 - DNA, 25 bp, Homo sapien
gagctttcatagcacttgctcttcc

SEQ ID NO: 848899 - DNA, 25 bp, Homo sapien
gtgaggagctttcatagcacttgct

SEQ ID NO: 848900 - DNA, 25 bp, Homo sapien
gaggagctttcatagcacttgctct

SEQ ID NO: 848901 - DNA, 25 bp, Homo sapien
cagtgaggagctttcatagcacttg

SEQ ID NO: 848902 - DNA, 25 bp, Homo sapien
ttcttctatataaatgactaacaac

SEQ ID NO: 848903 - DNA, 25 bp, Homo sapien
ctatataaatgactaacaacagagg

SEQ ID NO: 848904 - DNA, 25 bp, Homo sapien
agcttcttctatataaatgactaac

SEQ ID NO: 848905 - DNA, 25 bp, Homo sapien
ctggtaataaaagcttcttctatat

SEQ ID NO: 848906 - DNA, 25 bp, Homo sapien
gcaaacaacctggaagcctaataca

SEQ ID NO: 848907 - DNA, 25 bp, Homo sapien
ggcaatctgactaactatcctttga

SEQ ID NO: 848908 - DNA, 25 bp, Homo sapien
aagaagatgctgtttatggtctacc

SEQ ID NO: 848909 - DNA, 25 bp, Homo sapien
caaggatatctttgttggactttga

SEQ ID NO: 848910 - DNA, 25 bp, Homo sapien
gctataaaccatgttcttcgtacaa

SEQ ID NO: 848911 - DNA, 25 bp, Homo sapien
aagacacatatggagagacacgtat

SEQ ID NO: 848912 - DNA, 25 bp, Homo sapien
cgtacaatctgtacactctgaagag

SEQ ID NO: 848913 - DNA, 25 bp, Homo sapien
gagttcttccagtagttcttcgtac

SEQ ID NO: 848914 - DNA, 25 bp, Homo sapien
tgttcccttggaaacggcaaccaga

SEQ ID NO: 848915 - DNA, 25 bp, Homo sapien
tactgagactaagatcaacaccagc

SEQ ID NO: 848916 - DNA, 25 bp, Homo sapien
ctccttatgtggaacaatgaagtca

SEQ ID NO: 848917 - DNA, 25 bp, Homo sapien
ttatgtggaacaatgaagtcacagc

SEQ ID NO: 848918 - DNA, 25 bp, Homo sapien
tcattagccgtgtatgagctagaac

SEQ ID NO: 848919 - DNA, 25 bp, Homo sapien
taatgtagctgtcccagagcttcct

SEQ ID NO: 848920 - DNA, 25 bp, Homo sapien
tgggagacctgtaatgtagctgtcc

SEQ ID NO: 848921 - DNA, 25 bp, Homo sapien
gctgctttggctaagccaaccaccc

SEQ ID NO: 848922 - DNA, 25 bp, Homo sapien
accatagaggttaggcctctgcaga

SEQ ID NO: 848923 - DNA, 25 bp, Homo sapien
cggcacctgctaaactgagatttcc

SEQ ID NO: 848924 - DNA, 25 bp, Homo sapien
aaagaagccaccatagaggttaggc

SEQ ID NO: 848925 - DNA, 25 bp, Homo sapien
gccacggcacctgctaaactgagat

SEQ ID NO: 848926 - DNA, 25 bp, Homo sapien
ttgctgggcagtgcctaaagaggaa

SEQ ID NO: 848927 - DNA, 25 bp, Homo sapien
gtggaggtgcctaacccccattgct

SEQ ID NO: 848928 - DNA, 25 bp, Homo sapien
caacttgtgacccttgctgggcagt

SEQ ID NO: 848929 - DNA, 25 bp, Homo sapien
tcaataacatatttcggcaagccag

SEQ ID NO: 848930 - DNA, 25 bp, Homo sapien
tacactaaacttcttaagattctgt

SEQ ID NO: 848931 - DNA, 25 bp, Homo sapien
ggtacctcattgaccctataacttg

SEQ ID NO: 848932 - DNA, 25 bp, Homo sapien
tcacttctagctggtacctcattga

SEQ ID NO: 848933 - DNA, 25 bp, Homo sapien
gaccctataacttgtactacactaa

SEQ ID NO: 848934 - DNA, 25 bp, Homo sapien
tctccgcggaggccaggacatacct

SEQ ID NO: 848935 - DNA, 25 bp, Homo sapien
ttgttctcttctttagcggattcct

SEQ ID NO: 848936 - DNA, 25 bp, Homo sapien
cctctgccctggtctccgcggaggc

SEQ ID NO: 848937 - DNA, 25 bp, Homo sapien
tggaatgtcattgattgttctcttc

SEQ ID NO: 848938 - DNA, 25 bp, Homo sapien
ctctttcaaatgaaggtgcctttaa

SEQ ID NO: 848939 - DNA, 25 bp, Homo sapien
tcaaatgaaggtgcctttaacatat

SEQ ID NO: 848940 - DNA, 25 bp, Homo sapien
aaatgaaggtgcctttaacatatct

SEQ ID NO: 848941 - DNA, 25 bp, Homo sapien
gaaggtgcctttaacatatctttat

SEQ ID NO: 848942 - DNA, 25 bp, Homo sapien
gcatgtatagtctttggagatacag

SEQ ID NO: 848943 - DNA, 25 bp, Homo sapien
cactggcaataagttctggatatac

SEQ ID NO: 848944 - DNA, 25 bp, Homo sapien
ctaccagtggcttgacataaaacac

SEQ ID NO: 848945 - DNA, 25 bp, Homo sapien
ctgcactgcatgtatagtctttgga

SEQ ID NO: 848946 - DNA, 25 bp, Homo sapien
ttggaatccaaaaacagcgccaata

SEQ ID NO: 848947 - DNA, 25 bp, Homo sapien
ctttggaatccaaaaacagcgccaa

SEQ ID NO: 848948 - DNA, 25 bp, Homo sapien
gtaacaaataatgcggtaacatatt

SEQ ID NO: 848949 - DNA, 25 bp, Homo sapien
aaataatgcggtaacatattctttg

SEQ ID NO: 848950 - DNA, 25 bp, Homo sapien
tcaatgtcactgtcagagtacgcac

SEQ ID NO: 848951 - DNA, 25 bp, Homo sapien
agaaacaggagatagcggccgtacc

SEQ ID NO: 848952 - DNA, 25 bp, Homo sapien
tgtcactttgctccagcggcaagat

SEQ ID NO: 848953 - DNA, 25 bp, Homo sapien
gcaagatatcgagcaggaatagaga

SEQ ID NO: 848954 - DNA, 25 bp, Homo sapien
gagaacccatgaataaagctacaca

SEQ ID NO: 848955 - DNA, 25 bp, Homo sapien
gaaaggacttctatatgtactggga

SEQ ID NO: 848956 - DNA, 25 bp, Homo sapien
gaagtgatttaaggatacatagccc

SEQ ID NO: 848957 - DNA, 25 bp, Homo sapien
ttatggtggcctgaaacacaacccc

SEQ ID NO: 848958 - DNA, 25 bp, Homo sapien
ctgttacccacaaatagtaggcatg

SEQ ID NO: 848959 - DNA, 25 bp, Homo sapien
tacccacaaatagtaggcatgaaga

SEQ ID NO: 848960 - DNA, 25 bp, Homo sapien
gttacccacaaatagtaggcatgaa

SEQ ID NO: 848961 - DNA, 25 bp, Homo sapien
cccacaaatagtaggcatgaagaaa

SEQ ID NO: 848962 - DNA, 25 bp, Homo sapien
ccctgcagaacccagaactgtgaag

SEQ ID NO: 848963 - DNA, 25 bp, Homo sapien
tggtgaccaggacatgtaaccctgc

SEQ ID NO: 848964 - DNA, 25 bp, Homo sapien
caggacatgtaaccctgcagaaccc

SEQ ID NO: 848965 - DNA, 25 bp, Homo sapien
gcagaacccagaactgtgaagatgg

SEQ ID NO: 848966 - DNA, 25 bp, Homo sapien
catttacaagctgactggaggttcc

SEQ ID NO: 848967 - DNA, 25 bp, Homo sapien
tagcatggcagtactccctgtgggt

SEQ ID NO: 848968 - DNA, 25 bp, Homo sapien
tctagatacatcctggtccagaggg

SEQ ID NO: 848969 - DNA, 25 bp, Homo sapien
tgctgactagggagctcttaggccc

SEQ ID NO: 848970 - DNA, 25 bp, Homo sapien
tcatcctcttatcacatctccaaaa

SEQ ID NO: 848971 - DNA, 25 bp, Homo sapien
catcctcttatcacatctccaaaag

SEQ ID NO: 848972 - DNA, 25 bp, Homo sapien
tcctcttatcacatctccaaaagct

SEQ ID NO: 848973 - DNA, 25 bp, Homo sapien
ctcttatcacatctccaaaagctgc

SEQ ID NO: 848974 - DNA, 25 bp, Homo sapien
cacaaccgcattatcaatggataac

SEQ ID NO: 848975 - DNA, 25 bp, Homo sapien
tgaaagaggcgtcttcagtatttca

SEQ ID NO: 848976 - DNA, 25 bp, Homo sapien
tacaggtcactcacaaccgcattat

SEQ ID NO: 848977 - DNA, 25 bp, Homo sapien
catacagaacctttcctggcgaatt

SEQ ID NO: 848978 - DNA, 25 bp, Homo sapien
ctcctaagtgtaagttgggtgcttt

SEQ ID NO: 848979 - DNA, 25 bp, Homo sapien
gtaaattctcgctgccatagccaca

SEQ ID NO: 848980 - DNA, 25 bp, Homo sapien
tcgtacatgctgtccgcaatcaaag

SEQ ID NO: 848981 - DNA, 25 bp, Homo sapien
tagccacagcagtagtcttggatga

SEQ ID NO: 848982 - DNA, 25 bp, Homo sapien
gacatactaaagtaaattctcgctg

SEQ ID NO: 848983 - DNA, 25 bp, Homo sapien
tcactctccagcaccctcccttttt

SEQ ID NO: 848984 - DNA, 25 bp, Homo sapien
cactctccagcaccctccctttttt

SEQ ID NO: 848985 - DNA, 25 bp, Homo sapien
actttctctatgctccctccacctt

SEQ ID NO: 848986 - DNA, 25 bp, Homo sapien
aactttctctatgctccctccacct

SEQ ID NO: 848987 - DNA, 25 bp, Homo sapien
aaactttctctatgctccctccacc

SEQ ID NO: 848988 - DNA, 25 bp, Homo sapien
gagcaggaacatgagtttgtgagac

SEQ ID NO: 848989 - DNA, 25 bp, Homo sapien
gcaggaacatgagtttgtgagacat

SEQ ID NO: 848990 - DNA, 25 bp, Homo sapien
tgctcagtttgcctgtcctccatga

SEQ ID NO: 848991 - DNA, 25 bp, Homo sapien
tttgcctgtcctccatgagcaggaa

SEQ ID NO: 848992 - DNA, 25 bp, Homo sapien
agaacaccctcgctcggatgccttc

SEQ ID NO: 848993 - DNA, 25 bp, Homo sapien
taaagatggtacaggctcctggagc

SEQ ID NO: 848994 - DNA, 25 bp, Homo sapien
tcagataaagatggtacaggctcct

SEQ ID NO: 848995 - DNA, 25 bp, Homo sapien
ccttcagataaagatggtacaggct

SEQ ID NO: 848996 - DNA, 25 bp, Homo sapien
agatgggctgtcctcaaatacgcga

SEQ ID NO: 848997 - DNA, 25 bp, Homo sapien
gggagtctcagccttcgttctccct

SEQ ID NO: 848998 - DNA, 25 bp, Homo sapien
cactgtgtgccagtgcaacgccggg

SEQ ID NO: 848999 - DNA, 25 bp, Homo sapien
cctccgtgcgggtattgcctcttgc

SEQ ID NO: 849000 - DNA, 25 bp, Homo sapien
gagatgcagtccgactctccgtagg

SEQ ID NO: 849001 - DNA, 25 bp, Homo sapien
atgcagtccgactctccgtagggtt

SEQ ID NO: 849002 - DNA, 25 bp, Homo sapien
cggagatgcagtccgactctccgta

SEQ ID NO: 849003 - DNA, 25 bp, Homo sapien
cgctgcggagatgcagtccgactct

SEQ ID NO: 849004 - DNA, 25 bp, Homo sapien
gggacgtggagggagccgtccaggc

SEQ ID NO: 849005 - DNA, 25 bp, Homo sapien
gctgctgacaatccacagcaggagc

SEQ ID NO: 849006 - DNA, 25 bp, Homo sapien
tgacaatccacagcaggagcgctgc

SEQ ID NO: 849007 - DNA, 25 bp, Homo sapien
tggagggagccgtccaggctctgca

SEQ ID NO: 849008 - DNA, 25 bp, Homo sapien
gcagaatctattctttctgcaggca

SEQ ID NO: 849009 - DNA, 25 bp, Homo sapien
agaatctattctttctgcaggcagc

SEQ ID NO: 849010 - DNA, 25 bp, Homo sapien
cagcagaatctattctttctgcagg

SEQ ID NO: 849011 - DNA, 25 bp, Homo sapien
ctatcgttcagcagaatctattctt

SEQ ID NO: 849012 - DNA, 25 bp, Homo sapien
tgatgcgtgtcttacaggaattttc

SEQ ID NO: 849013 - DNA, 25 bp, Homo sapien
ttagtaacctaaaggctatgagtct

SEQ ID NO: 849014 - DNA, 25 bp, Homo sapien
taccttgagttgcacaatatttgaa

SEQ ID NO: 849015 - DNA, 25 bp, Homo sapien
ttttcttgaaaggtacaatcttaca

SEQ ID NO: 849016 - DNA, 25 bp, Homo sapien
catttggatggctggatttaggtac

SEQ ID NO: 849017 - DNA, 25 bp, Homo sapien
tgggaaaccggcacacaggcaattt

SEQ ID NO: 849018 - DNA, 25 bp, Homo sapien
tgcttctgaaggtgaaagtctgctt

SEQ ID NO: 849019 - DNA, 25 bp, Homo sapien
caatttttctagagacgcgaggtac

SEQ ID NO: 849020 - DNA, 25 bp, Homo sapien
gacacaattttgagtgcctgctcta

SEQ ID NO: 849021 - DNA, 25 bp, Homo sapien
ccccagtggagtctttgacatatat

SEQ ID NO: 849022 - DNA, 25 bp, Homo sapien
tcaatgatgctagacgacttgctct

SEQ ID NO: 849023 - DNA, 25 bp, Homo sapien
ggcgtgcacgtctttatcagtagga

SEQ ID NO: 849024 - DNA, 25 bp, Homo sapien
aagtaagcctaacactgtgctgctg

SEQ ID NO: 849025 - DNA, 25 bp, Homo sapien
gatcaattggccatatctgcgtgga

SEQ ID NO: 849026 - DNA, 25 bp, Homo sapien
tgaactttcaagcttctgatacaag

SEQ ID NO: 849027 - DNA, 25 bp, Homo sapien
gcctagctcaggtccaggaaatatt

SEQ ID NO: 849028 - DNA, 25 bp, Homo sapien
tacatttcttattatgggtattcgg

SEQ ID NO: 849029 - DNA, 25 bp, Homo sapien
taggtggtaagagtcaagttactaa

SEQ ID NO: 849030 - DNA, 25 bp, Homo sapien
ctcctggcctatagttttaaatgag

SEQ ID NO: 849031 - DNA, 25 bp, Homo sapien
agttactaagcccaaaaatgtggag

SEQ ID NO: 849032 - DNA, 25 bp, Homo sapien
cttcatattgtatctcttgcctgga

SEQ ID NO: 849033 - DNA, 25 bp, Homo sapien
gaagaaattgaacattatcccagaa

SEQ ID NO: 849034 - DNA, 25 bp, Homo sapien
ttacaacacctaagtaagcagcatg

SEQ ID NO: 849035 - DNA, 25 bp, Homo sapien
aaagaatgatgcatgttgagcagaa

SEQ ID NO: 849036 - DNA, 25 bp, Homo sapien
aatgagttgaacacccacagaagaa

SEQ ID NO: 849037 - DNA, 25 bp, Homo sapien
caaaagagggaagagccaaaggatt

SEQ ID NO: 849038 - DNA, 25 bp, Homo sapien
tgacatgtgaagagaaatccggtac

SEQ ID NO: 849039 - DNA, 25 bp, Homo sapien
tcagaagacattgggaagtcaacct

SEQ ID NO: 849040 - DNA, 25 bp, Homo sapien
tggaaggatatgtaaaaccgcattg

SEQ ID NO: 849041 - DNA, 25 bp, Homo sapien
caaatatcagagatgtttagtggca

SEQ ID NO: 849042 - DNA, 25 bp, Homo sapien
caagtggcacggttatggaaggata

SEQ ID NO: 849043 - DNA, 25 bp, Homo sapien
aacaaggccaggcttgtgttgccaa

SEQ ID NO: 849044 - DNA, 25 bp, Homo sapien
tctaagctaacctacatgaccaatg

SEQ ID NO: 849045 - DNA, 25 bp, Homo sapien
agtgccatgcactctacttgtgtaa

SEQ ID NO: 849046 - DNA, 25 bp, Homo sapien
gagcctgcacatcaacataaggcag

SEQ ID NO: 849047 - DNA, 25 bp, Homo sapien
ttgtgtaaatatgtgcttgaccagc

SEQ ID NO: 849048 - DNA, 25 bp, Homo sapien
cctgtgcagagatccaaagtgaagc

SEQ ID NO: 849049 - DNA, 25 bp, Homo sapien
tggatcagacgtgagtgcctacgaa

SEQ ID NO: 849050 - DNA, 25 bp, Homo sapien
gaaaaggattaatctgctgtgccag

SEQ ID NO: 849051 - DNA, 25 bp, Homo sapien
gagaagctctcactaaaaggtggta

SEQ ID NO: 849052 - DNA, 25 bp, Homo sapien
ttaagagagcaagccacaaactcat

SEQ ID NO: 849053 - DNA, 25 bp, Homo sapien
gctagaatcccagacaccaattgtt

SEQ ID NO: 849054 - DNA, 25 bp, Homo sapien
gagggtaccagttttcatcatacca

SEQ ID NO: 849055 - DNA, 25 bp, Homo sapien
ttgggaccaatgaagggttaactgc

SEQ ID NO: 849056 - DNA, 25 bp, Homo sapien
ctcccacatgtaacacctctgctgt

SEQ ID NO: 849057 - DNA, 25 bp, Homo sapien
tgaagcaagggtgctaacgcttgag

SEQ ID NO: 849058 - DNA, 25 bp, Homo sapien
tgctaacgcttgagggttctttcat

SEQ ID NO: 849059 - DNA, 25 bp, Homo sapien
caagggtgctaacgcttgagggttc

SEQ ID NO: 849060 - DNA, 25 bp, Homo sapien
tgcatcctttatcgtacttcaacag

SEQ ID NO: 849061 - DNA, 25 bp, Homo sapien
gatgaagtacaactcaacgacagtg

SEQ ID NO: 849062 - DNA, 25 bp, Homo sapien
ggtagagccatgctattgctacaat

SEQ ID NO: 849063 - DNA, 25 bp, Homo sapien
gacactgataaaaagggtctactga

SEQ ID NO: 849064 - DNA, 25 bp, Homo sapien
ggtaccacagggatgtggcacattt

SEQ ID NO: 849065 - DNA, 25 bp, Homo sapien
taccacagggatgtggcacattttt

SEQ ID NO: 849066 - DNA, 25 bp, Homo sapien
tggtaccacagggatgtggcacatt

SEQ ID NO: 849067 - DNA, 25 bp, Homo sapien
gtaccacagggatgtggcacatttt

SEQ ID NO: 849068 - DNA, 25 bp, Homo sapien
tttctttaccaaatctgaatgcatc

SEQ ID NO: 849069 - DNA, 25 bp, Homo sapien
gattgtaaggcgaaggtggacactc

SEQ ID NO: 849070 - DNA, 25 bp, Homo sapien
atcaatcctgattgtaaggcgaagg

SEQ ID NO: 849071 - DNA, 25 bp, Homo sapien
tcctgattgtaaggcgaaggtggac

SEQ ID NO: 849072 - DNA, 25 bp, Homo sapien
tattaataggctctgcataggagcc

SEQ ID NO: 849073 - DNA, 25 bp, Homo sapien
ttattaataggctctgcataggagc

SEQ ID NO: 849074 - DNA, 25 bp, Homo sapien
ctgctttttcctggttaattttgct

SEQ ID NO: 849075 - DNA, 25 bp, Homo sapien
tgcacctcatatggctcatttccag

SEQ ID NO: 849076 - DNA, 25 bp, Homo sapien
gattttaagattagctctgcacctc

SEQ ID NO: 849077 - DNA, 25 bp, Homo sapien
tcttgagggccaatggaaggctgaa

SEQ ID NO: 849078 - DNA, 25 bp, Homo sapien
tccaggtatttaaatggcgacagca

SEQ ID NO: 849079 - DNA, 25 bp, Homo sapien
gaaagccaacccctggcttcttggc

SEQ ID NO: 849080 - DNA, 25 bp, Homo sapien
taaggattcttactggctggactgg

SEQ ID NO: 849081 - DNA, 25 bp, Homo sapien
gctggactgggtcttgtgcacaacg

SEQ ID NO: 849082 - DNA, 25 bp, Homo sapien
cgtttgaactctcacgtggtttggg

SEQ ID NO: 849083 - DNA, 25 bp, Homo sapien
cgcgcccggccgatggcaatgtttt

SEQ ID NO: 849084 - DNA, 25 bp, Homo sapien
tgcaagtgaagacgactctggactc

SEQ ID NO: 849085 - DNA, 25 bp, Homo sapien
gtgaagacgactctggactctggaa

SEQ ID NO: 849086 - DNA, 25 bp, Homo sapien
cagattcattctcacacggattaag

SEQ ID NO: 849087 - DNA, 25 bp, Homo sapien
cggattaaggaccaacctgtggtat

SEQ ID NO: 849088 - DNA, 25 bp, Homo sapien
ccctatgtgaggttgtgctacagat

SEQ ID NO: 849089 - DNA, 25 bp, Homo sapien
caactgatgctaacggaaggaaaat

SEQ ID NO: 849090 - DNA, 25 bp, Homo sapien
tccttgataaaaacgtaacttgcta

SEQ ID NO: 849091 - DNA, 25 bp, Homo sapien
tatgttattttccagcaactgatgc

SEQ ID NO: 849092 - DNA, 25 bp, Homo sapien
gcattgctagctatctaaagtcact

SEQ ID NO: 849093 - DNA, 25 bp, Homo sapien
ttatacaggcctagtcaatttgaag

SEQ ID NO: 849094 - DNA, 25 bp, Homo sapien
catccagaatgtaattgagtgatca

SEQ ID NO: 849095 - DNA, 25 bp, Homo sapien
cactctctgtattcaaagtgcccct

SEQ ID NO: 849096 - DNA, 25 bp, Homo sapien
ccaaatcctaagtgatgggatagat

SEQ ID NO: 849097 - DNA, 25 bp, Homo sapien
ttccaaatcctaagtgatgggatag

SEQ ID NO: 849098 - DNA, 25 bp, Homo sapien
tctttgtagccaatcttcatgtctg

SEQ ID NO: 849099 - DNA, 25 bp, Homo sapien
caatcttcatgtctgctagtttcca

SEQ ID NO: 849100 - DNA, 25 bp, Homo sapien
gtaacagttctaatacagcaaattt

SEQ ID NO: 849101 - DNA, 25 bp, Homo sapien
gccgtttactcaatgcttgtttata

SEQ ID NO: 849102 - DNA, 25 bp, Homo sapien
tgtgttgactatcagagacactttt

SEQ ID NO: 849103 - DNA, 25 bp, Homo sapien
tttatccttcttgccgtttactcaa

SEQ ID NO: 849104 - DNA, 25 bp, Homo sapien
ctgggacctgggtgtgccctatttc

SEQ ID NO: 849105 - DNA, 25 bp, Homo sapien
ttctgaactgggacctgggtgtgcc

SEQ ID NO: 849106 - DNA, 25 bp, Homo sapien
tgaactgggacctgggtgtgcccta

SEQ ID NO: 849107 - DNA, 25 bp, Homo sapien
ggacctgggtgtgccctatttccat

SEQ ID NO: 849108 - DNA, 25 bp, Homo sapien
ggaatctaccaaagtgaaatcactt

SEQ ID NO: 849109 - DNA, 25 bp, Homo sapien
ttggaatctaccaaagtgaaatcac

SEQ ID NO: 849110 - DNA, 25 bp, Homo sapien
aagtgaaatcactttctaacttact

SEQ ID NO: 849111 - DNA, 25 bp, Homo sapien
gtgaaatcactttctaacttactta

SEQ ID NO: 849112 - DNA, 25 bp, Homo sapien
tccacaagttaaatttgtattccca

SEQ ID NO: 849113 - DNA, 25 bp, Homo sapien
atagaactgtgggatgctttcaaac

SEQ ID NO: 849114 - DNA, 25 bp, Homo sapien
aaccatgccttatctactgtacttg

SEQ ID NO: 849115 - DNA, 25 bp, Homo sapien
gcaacaatggaaggctagacactca

SEQ ID NO: 849116 - DNA, 25 bp, Homo sapien
aagctcagatgataggatgccgcca

SEQ ID NO: 849117 - DNA, 25 bp, Homo sapien
gaagtgtccatctagtccatcagaa

SEQ ID NO: 849118 - DNA, 25 bp, Homo sapien
gacgtggctgctctctatgatccaa

SEQ ID NO: 849119 - DNA, 25 bp, Homo sapien
ctaaggctccgtaacaaagtgtggg

SEQ ID NO: 849120 - DNA, 25 bp, Homo sapien
gatgggacaaataaatctctgtaac

SEQ ID NO: 849121 - DNA, 25 bp, Homo sapien
tgggacaaataaatctctgtaactg

SEQ ID NO: 849122 - DNA, 25 bp, Homo sapien
gagatgggacaaataaatctctgta

SEQ ID NO: 849123 - DNA, 25 bp, Homo sapien
aaatgaaggagttaggtgtagagat

SEQ ID NO: 849124 - DNA, 25 bp, Homo sapien
tttttccgggcatgagataacaggc

SEQ ID NO: 849125 - DNA, 25 bp, Homo sapien
tactctgatattcactggcttctct

SEQ ID NO: 849126 - DNA, 25 bp, Homo sapien
ttttttccgggcatgagataacagg

SEQ ID NO: 849127 - DNA, 25 bp, Homo sapien
gtttctactctgatattcactggct

SEQ ID NO: 849128 - DNA, 25 bp, Homo sapien
tctgtgtagaagttgtaaccataag

SEQ ID NO: 849129 - DNA, 25 bp, Homo sapien
attgcacgttggatgctgtcgtttt

SEQ ID NO: 849130 - DNA, 25 bp, Homo sapien
agaagttgtaaccataagcagcgac

SEQ ID NO: 849131 - DNA, 25 bp, Homo sapien
tgtcgtttttgcagaaaggaagctg

SEQ ID NO: 849132 - DNA, 25 bp, Homo sapien
gtagatgtccaaagtctgtacccca

SEQ ID NO: 849133 - DNA, 25 bp, Homo sapien
gaagagtgaacaatggaagccccat

SEQ ID NO: 849134 - DNA, 25 bp, Homo sapien
tttgaccgcagatgcacctttaggg

SEQ ID NO: 849135 - DNA, 25 bp, Homo sapien
tcaagataggcaagtctcctaggcc

SEQ ID NO: 849136 - DNA, 25 bp, Homo sapien
ctggaagccatgatctgtagcaaac

SEQ ID NO: 849137 - DNA, 25 bp, Homo sapien
cttaatgtataagatcaaagttggg

SEQ ID NO: 849138 - DNA, 25 bp, Homo sapien
taagcctagtacacgttcattattt

SEQ ID NO: 849139 - DNA, 25 bp, Homo sapien
ggttgtagaaaagctcacatcatct

SEQ ID NO: 849140 - DNA, 25 bp, Homo sapien
ggcgaattcacattatctcaaatag

SEQ ID NO: 849141 - DNA, 25 bp, Homo sapien
tattacaaacgaacaaaatcgcagc

SEQ ID NO: 849142 - DNA, 25 bp, Homo sapien
tcatttgggctcttattatgtgaag

SEQ ID NO: 849143 - DNA, 25 bp, Homo sapien
ttattagggctaaaggcaatatttc

SEQ ID NO: 849144 - DNA, 25 bp, Homo sapien
gactgaatctcagtacaccgaaact

SEQ ID NO: 849145 - DNA, 25 bp, Homo sapien
gaatctcagtacaccgaaactggaa

SEQ ID NO: 849146 - DNA, 25 bp, Homo sapien
tcagtacaccgaaactggaaattca

SEQ ID NO: 849147 - DNA, 25 bp, Homo sapien
tctgactgaatctcagtacaccgaa

SEQ ID NO: 849148 - DNA, 25 bp, Homo sapien
gaagtttgagttgacatgtgaagga

SEQ ID NO: 849149 - DNA, 25 bp, Homo sapien
gcccaaggccaactccagcagaagg

SEQ ID NO: 849150 - DNA, 25 bp, Homo sapien
aatgaagtttgagttgacatgtgaa

SEQ ID NO: 849151 - DNA, 25 bp, Homo sapien
gagggaagaagcatggcaagtgggc

SEQ ID NO: 849152 - DNA, 25 bp, Homo sapien
tgaagccgtgaaataagatccaaac

SEQ ID NO: 849153 - DNA, 25 bp, Homo sapien
ttgggatcttgggacttgcagaaga

SEQ ID NO: 849154 - DNA, 25 bp, Homo sapien
tccaaacaggattgagaaagtggcc

SEQ ID NO: 849155 - DNA, 25 bp, Homo sapien
agttgcaagtggaaggtccaacctg

SEQ ID NO: 849156 - DNA, 25 bp, Homo sapien
cgagatgatgtgcaggatggctact

SEQ ID NO: 849157 - DNA, 25 bp, Homo sapien
ggagcagtctctgggaccgagatga

SEQ ID NO: 849158 - DNA, 25 bp, Homo sapien
gaaggcagctggattggtcagaagg

SEQ ID NO: 849159 - DNA, 25 bp, Homo sapien
gggcgacaggtaaaggcagctcacc

SEQ ID NO: 849160 - DNA, 25 bp, Homo sapien
gagatgctagatcacggacaactct

SEQ ID NO: 849161 - DNA, 25 bp, Homo sapien
tagacgttccttcagagatgctaga

SEQ ID NO: 849162 - DNA, 25 bp, Homo sapien
gatgctagatcacggacaactctca

SEQ ID NO: 849163 - DNA, 25 bp, Homo sapien
cagagatgctagatcacggacaact

SEQ ID NO: 849164 - DNA, 25 bp, Homo sapien
gaagcagcatcagattgagcaatac

SEQ ID NO: 849165 - DNA, 25 bp, Homo sapien
taacagcatagaatgccaactccct

SEQ ID NO: 849166 - DNA, 25 bp, Homo sapien
tgagcaatacacttctacctggata

SEQ ID NO: 849167 - DNA, 25 bp, Homo sapien
caatgctaaagctcaaatcatgtga

SEQ ID NO: 849168 - DNA, 25 bp, Homo sapien
gaagcacccactaggaatcttggtt

SEQ ID NO: 849169 - DNA, 25 bp, Homo sapien
gtttagattgaaggtgctttcctcc

SEQ ID NO: 849170 - DNA, 25 bp, Homo sapien
tggctcttccatttaggtcttagat

SEQ ID NO: 849171 - DNA, 25 bp, Homo sapien
aatcttggttggagtcttgtgactg

SEQ ID NO: 849172 - DNA, 25 bp, Homo sapien
gatacataagaatctgacccagcct

SEQ ID NO: 849173 - DNA, 25 bp, Homo sapien
tcaacgcatgaactgaattggctca

SEQ ID NO: 849174 - DNA, 25 bp, Homo sapien
cttcagaagtgagcacggtcaggcc

SEQ ID NO: 849175 - DNA, 25 bp, Homo sapien
tctggcgatagagtgggactccgaa

SEQ ID NO: 849176 - DNA, 25 bp, Homo sapien
cttaggaattggagcgacacatggc

SEQ ID NO: 849177 - DNA, 25 bp, Homo sapien
tctcagtagactctggagcaggcag

SEQ ID NO: 849178 - DNA, 25 bp, Homo sapien
ccaggtttcatgacagccggatttg

SEQ ID NO: 849179 - DNA, 25 bp, Homo sapien
gaccatctggtccacaggcagtaat

SEQ ID NO: 849180 - DNA, 25 bp, Homo sapien
tcaatattcccaggatcggatgcct

SEQ ID NO: 849181 - DNA, 25 bp, Homo sapien
tgttaaaccagaggcaaactgctta

SEQ ID NO: 849182 - DNA, 25 bp, Homo sapien
gaatggtacctctttccagatatag

SEQ ID NO: 849183 - DNA, 25 bp, Homo sapien
gcctctagggcaaaaggtttctgac

SEQ ID NO: 849184 - DNA, 25 bp, Homo sapien
tgtaccctgacgtaagaactactgt

SEQ ID NO: 849185 - DNA, 25 bp, Homo sapien
ctgtaatccatagaggcattcgttt

SEQ ID NO: 849186 - DNA, 25 bp, Homo sapien
ttttctcgacttgtaccctgacgta

SEQ ID NO: 849187 - DNA, 25 bp, Homo sapien
gaggcattcgttttctcgacttgta

SEQ ID NO: 849188 - DNA, 25 bp, Homo sapien
ttttccctagatcacatttctctcc

SEQ ID NO: 849189 - DNA, 25 bp, Homo sapien
ccttttccctagatcacatttctct

SEQ ID NO: 849190 - DNA, 25 bp, Homo sapien
tttccctagatcacatttctctcca

SEQ ID NO: 849191 - DNA, 25 bp, Homo sapien
tccccttttccctagatcacatttc

SEQ ID NO: 849192 - DNA, 25 bp, Homo sapien
ttagtggctgcggtgtctccagtag

SEQ ID NO: 849193 - DNA, 25 bp, Homo sapien
aggaggtcctgcagccttagtggct

SEQ ID NO: 849194 - DNA, 25 bp, Homo sapien
tacccacggtcagtagcaggaggtc

SEQ ID NO: 849195 - DNA, 25 bp, Homo sapien
taaacaagggattgggtttctggca

SEQ ID NO: 849196 - DNA, 25 bp, Homo sapien
cggatccatgtgactataactgctg

SEQ ID NO: 849197 - DNA, 25 bp, Homo sapien
ggcccatggatcagtgacatgtttc

SEQ ID NO: 849198 - DNA, 25 bp, Homo sapien
catgcttcgttattatcatctgcac

SEQ ID NO: 849199 - DNA, 25 bp, Homo sapien
tctttctagtatgtcccggatccat

SEQ ID NO: 849200 - DNA, 25 bp, Homo sapien
tcagctttgataggaagttccacag

SEQ ID NO: 849201 - DNA, 25 bp, Homo sapien
catctcatcagctttgataggaagt

SEQ ID NO: 849202 - DNA, 25 bp, Homo sapien
agtccagcactcttgtaacaccttc

SEQ ID NO: 849203 - DNA, 25 bp, Homo sapien
ctcttgtaacaccttcacacatgtt

SEQ ID NO: 849204 - DNA, 25 bp, Homo sapien
gagagaaccatttccagcatgcatc

SEQ ID NO: 849205 - DNA, 25 bp, Homo sapien
agaagcagagagaaccatttccagc

SEQ ID NO: 849206 - DNA, 25 bp, Homo sapien
cagtatagcattggctccaggagca

SEQ ID NO: 849207 - DNA, 25 bp, Homo sapien
tccaggagcacccagccacagaagc

SEQ ID NO: 849208 - DNA, 25 bp, Homo sapien
tggcagaataattgattaaagaaat

SEQ ID NO: 849209 - DNA, 25 bp, Homo sapien
tattggcagaataattgattaaaga

SEQ ID NO: 849210 - DNA, 25 bp, Homo sapien
taaagaaatatcatcaacatagtgc

SEQ ID NO: 849211 - DNA, 25 bp, Homo sapien
gaaatatcatcaacatagtgcttca

SEQ ID NO: 849212 - DNA, 25 bp, Homo sapien
gctgtcaggaagcagtgattgtttg

SEQ ID NO: 849213 - DNA, 25 bp, Homo sapien
tttgctttaatgttcaaagctttct

SEQ ID NO: 849214 - DNA, 25 bp, Homo sapien
cagtgattgtttggcttccatatag

SEQ ID NO: 849215 - DNA, 25 bp, Homo sapien
taatgttcaaagctttctttgatgt

SEQ ID NO: 849216 - DNA, 25 bp, Homo sapien
tacgtgaatcacaacgaggctatcc

SEQ ID NO: 849217 - DNA, 25 bp, Homo sapien
tcttacataataccaaaacggcctg

SEQ ID NO: 849218 - DNA, 25 bp, Homo sapien
ggcctgaaaaacatgaccctgtaag

SEQ ID NO: 849219 - DNA, 25 bp, Homo sapien
caattgggaaacatgtacgtgaatc

SEQ ID NO: 849220 - DNA, 25 bp, Homo sapien
aaggagtacacgataaatttcaagt

SEQ ID NO: 849221 - DNA, 25 bp, Homo sapien
tagcagcaaggagtacacgataaat

SEQ ID NO: 849222 - DNA, 25 bp, Homo sapien
tggttagcagcaaggagtacacgat

SEQ ID NO: 849223 - DNA, 25 bp, Homo sapien
gcagcaaggagtacacgataaattt

SEQ ID NO: 849224 - DNA, 25 bp, Homo sapien
aatctcattatagaatgtattctta

SEQ ID NO: 849225 - DNA, 25 bp, Homo sapien
tcattatagaatgtattcttatttc

SEQ ID NO: 849226 - DNA, 25 bp, Homo sapien
tgcaatctcattatagaatgtattc

SEQ ID NO: 849227 - DNA, 25 bp, Homo sapien
tctcattatagaatgtattcttatt

SEQ ID NO: 849228 - DNA, 25 bp, Homo sapien
tcttggtgctactaattgagggatg

SEQ ID NO: 849229 - DNA, 25 bp, Homo sapien
tactcagacacttgtactgtgcatg

SEQ ID NO: 849230 - DNA, 25 bp, Homo sapien
aattgtcaggtctactgcaagggca

SEQ ID NO: 849231 - DNA, 25 bp, Homo sapien
gattttcaggcaagtacttaagaca

SEQ ID NO: 849232 - DNA, 25 bp, Homo sapien
tcatgggatcaaaatcatgagtcaa

SEQ ID NO: 849233 - DNA, 25 bp, Homo sapien
ttaaaggactagtgagtgttccgcc

SEQ ID NO: 849234 - DNA, 25 bp, Homo sapien
gggatcaaaatcatgagtcaagttc

SEQ ID NO: 849235 - DNA, 25 bp, Homo sapien
tgagtgttccgccacatccaacagc

SEQ ID NO: 849236 - DNA, 25 bp, Homo sapien
cttagttatactgcgtgcctctgtg

SEQ ID NO: 849237 - DNA, 25 bp, Homo sapien
gaacaatggtacttggcacgtactc

SEQ ID NO: 849238 - DNA, 25 bp, Homo sapien
tactctccagtgatctgaacaatgg

SEQ ID NO: 849239 - DNA, 25 bp, Homo sapien
cttaagtccccaatgatactggaga

SEQ ID NO: 849240 - DNA, 25 bp, Homo sapien
tgctgaaagccacatgggggagtcc

SEQ ID NO: 849241 - DNA, 25 bp, Homo sapien
ccgggagaatagctaccagagatgg

SEQ ID NO: 849242 - DNA, 25 bp, Homo sapien
tgtttatcttggcatagccgggaga

SEQ ID NO: 849243 - DNA, 25 bp, Homo sapien
tcctctcttgtttatcttggcatag

SEQ ID NO: 849244 - DNA, 25 bp, Homo sapien
cagaagagtctttccggttgtggat

SEQ ID NO: 849245 - DNA, 25 bp, Homo sapien
agagtctttccggttgtggatgtct

SEQ ID NO: 849246 - DNA, 25 bp, Homo sapien
gagtctttccggttgtggatgtctg

SEQ ID NO: 849247 - DNA, 25 bp, Homo sapien
gaggcagaagagtctttccggttgt

SEQ ID NO: 849248 - DNA, 25 bp, Homo sapien
cagtgtgcttcagaccaacagtgcc

SEQ ID NO: 849249 - DNA, 25 bp, Homo sapien
gcttcagaccaacagtgccttgtgt

SEQ ID NO: 849250 - DNA, 25 bp, Homo sapien
tgtgcttcagaccaacagtgccttg

SEQ ID NO: 849251 - DNA, 25 bp, Homo sapien
tcagaccaacagtgccttgtgtcat

SEQ ID NO: 849252 - DNA, 25 bp, Homo sapien
ccagtaggtggtacaagtactatca

SEQ ID NO: 849253 - DNA, 25 bp, Homo sapien
ttttgcctcttgttcgcctcctgtg

SEQ ID NO: 849254 - DNA, 25 bp, Homo sapien
gagatgggccagaaaaatctgccac

SEQ ID NO: 849255 - DNA, 25 bp, Homo sapien
tgccacaaacccaatggccactatg

SEQ ID NO: 849256 - DNA, 25 bp, Homo sapien
gctgagtaaaggcattcactggctt

SEQ ID NO: 849257 - DNA, 25 bp, Homo sapien
tatggattatatgaggctgtatgcc

SEQ ID NO: 849258 - DNA, 25 bp, Homo sapien
ctgagctgagtaaaggcattcactg

SEQ ID NO: 849259 - DNA, 25 bp, Homo sapien
tatgaggctgtatgcccaaagaggt

SEQ ID NO: 849260 - DNA, 25 bp, Homo sapien
ctgttagatatacagttcgaaacct

SEQ ID NO: 849261 - DNA, 25 bp, Homo sapien
gataatggtcgctgtctgatggaga

SEQ ID NO: 849262 - DNA, 25 bp, Homo sapien
gagcatccggtattgggtcacccaa

SEQ ID NO: 849263 - DNA, 25 bp, Homo sapien
tccctgtgtcgctgtagagcatccg

SEQ ID NO: 849264 - DNA, 25 bp, Homo sapien
tctgagctgctataccttccttggg

SEQ ID NO: 849265 - DNA, 25 bp, Homo sapien
ttccaatccaattctgtgtctttgc

SEQ ID NO: 849266 - DNA, 25 bp, Homo sapien
taataaaggaataaagtgaacatag

SEQ ID NO: 849267 - DNA, 25 bp, Homo sapien
tcataataaaggaataaagtgaaca

SEQ ID NO: 849268 - DNA, 25 bp, Homo sapien
ataaaggaataaagtgaacatagat

SEQ ID NO: 849269 - DNA, 25 bp, Homo sapien
cataataaaggaataaagtgaacat

SEQ ID NO: 849270 - DNA, 25 bp, Homo sapien
cctgtgcatgccaactgcacacaat

SEQ ID NO: 849271 - DNA, 25 bp, Homo sapien
ctgtgcatgccaactgcacacaatg

SEQ ID NO: 849272 - DNA, 25 bp, Homo sapien
ccctgtgcatgccaactgcacacaa

SEQ ID NO: 849273 - DNA, 25 bp, Homo sapien
taagtgtgacttgttggtgcttttg

SEQ ID NO: 849274 - DNA, 25 bp, Homo sapien
taagctaatgtcacgtcttctttct

SEQ ID NO: 849275 - DNA, 25 bp, Homo sapien
ctaagctaatgtcacgtcttctttc

SEQ ID NO: 849276 - DNA, 25 bp, Homo sapien
tcaaacttattctgataagtgtgac

SEQ ID NO: 849277 - DNA, 25 bp, Homo sapien
tacagacatgttccacttttgcctg

SEQ ID NO: 849278 - DNA, 25 bp, Homo sapien
ctacagacatgttccacttttgcct

SEQ ID NO: 849279 - DNA, 25 bp, Homo sapien
tacccacagagggtcactgtgcagc

SEQ ID NO: 849280 - DNA, 25 bp, Homo sapien
ttcaaatactctaggagcccacttc

SEQ ID NO: 849281 - DNA, 25 bp, Homo sapien
gcttattattcttctcatacacccc

SEQ ID NO: 849282 - DNA, 25 bp, Homo sapien
actgtgcagcctctgaatcgcatgc

SEQ ID NO: 849283 - DNA, 25 bp, Homo sapien
taacttgtatgttcttgtttctgaa

SEQ ID NO: 849284 - DNA, 25 bp, Homo sapien
aataaccattaagatcatttcttac

SEQ ID NO: 849285 - DNA, 25 bp, Homo sapien
tttcttacatgcttaatgtcatcaa

SEQ ID NO: 849286 - DNA, 25 bp, Homo sapien
acaaagcacataatgagaaagacac

SEQ ID NO: 849287 - DNA, 25 bp, Homo sapien
gagaaggagctgtatagtagtaaca

SEQ ID NO: 849288 - DNA, 25 bp, Homo sapien
gccaaaatagggaccactctttcca

SEQ ID NO: 849289 - DNA, 25 bp, Homo sapien
cactcagttcttaagatggcactgg

SEQ ID NO: 849290 - DNA, 25 bp, Homo sapien
cactgggaggtttcgagatgcccaa

SEQ ID NO: 849291 - DNA, 25 bp, Homo sapien
tccgtggtgaggtatcaagtgcttc

SEQ ID NO: 849292 - DNA, 25 bp, Homo sapien
caagtgcttcgtaatagtcctggct

SEQ ID NO: 849293 - DNA, 25 bp, Homo sapien
acacggatcaccttgcataggcaca

SEQ ID NO: 849294 - DNA, 25 bp, Homo sapien
gaattttctcatcagtcctccgtgg

SEQ ID NO: 849295 - DNA, 25 bp, Homo sapien
ccagccacaaaggtgacatccactt

SEQ ID NO: 849296 - DNA, 25 bp, Homo sapien
gaaattgtggtgtccagccacaaag

SEQ ID NO: 849297 - DNA, 25 bp, Homo sapien
tatggggagcagaaattgtggtgtc

SEQ ID NO: 849298 - DNA, 25 bp, Homo sapien
ctatggggagcagaaattgtggtgt

SEQ ID NO: 849299 - DNA, 25 bp, Homo sapien
catcattagactttaagtggttgac

SEQ ID NO: 849300 - DNA, 25 bp, Homo sapien
tcttcgctcatcatcattagacttt

SEQ ID NO: 849301 - DNA, 25 bp, Homo sapien
catcatcattagactttaagtggtt

SEQ ID NO: 849302 - DNA, 25 bp, Homo sapien
gctcatcatcattagactttaagtg

SEQ ID NO: 849303 - DNA, 25 bp, Homo sapien
ttttcctggacaacgtcaatgactt

SEQ ID NO: 849304 - DNA, 25 bp, Homo sapien
ttcttttcctggacaacgtcaatga

SEQ ID NO: 849305 - DNA, 25 bp, Homo sapien
ctggacaacgtcaatgacttcaaat

SEQ ID NO: 849306 - DNA, 25 bp, Homo sapien
cctggacaacgtcaatgacttcaaa

SEQ ID NO: 849307 - DNA, 25 bp, Homo sapien
catcaagcatgaagccaagcagaag

SEQ ID NO: 849308 - DNA, 25 bp, Homo sapien
gtatcttatggtccattgcccttgg

SEQ ID NO: 849309 - DNA, 25 bp, Homo sapien
aacactgagtctgatcagaggcatc

SEQ ID NO: 849310 - DNA, 25 bp, Homo sapien
ggaccttttgacatgtgcagcaaca

SEQ ID NO: 849311 - DNA, 25 bp, Homo sapien
ccgtaacagacaggagaatgcagca

SEQ ID NO: 849312 - DNA, 25 bp, Homo sapien
cacaaatagtgctccaatgaagata

SEQ ID NO: 849313 - DNA, 25 bp, Homo sapien
tggaagccctcatgcttactatggg

SEQ ID NO: 849314 - DNA, 25 bp, Homo sapien
gggtacacccatacatactctgctt

SEQ ID NO: 849315 - DNA, 25 bp, Homo sapien
ttttttgtacatctaaccaaatata

SEQ ID NO: 849316 - DNA, 25 bp, Homo sapien
caaatatatttcctcgccaaatatc

SEQ ID NO: 849317 - DNA, 25 bp, Homo sapien
tattgtacctaattaacaagcaaaa

SEQ ID NO: 849318 - DNA, 25 bp, Homo sapien
cctcgccaaatatcatggaaatata

SEQ ID NO: 849319 - DNA, 25 bp, Homo sapien
taatggaagatttagaaccagctgg

SEQ ID NO: 849320 - DNA, 25 bp, Homo sapien
catagtaagcgacctcttcttgaag

SEQ ID NO: 849321 - DNA, 25 bp, Homo sapien
taaccaggattaacaagtcacggtc

SEQ ID NO: 849322 - DNA, 25 bp, Homo sapien
tcattcaatacgcttataaccagga

SEQ ID NO: 849323 - DNA, 25 bp, Homo sapien
aaaatatcctgtgaaactaaccagg

SEQ ID NO: 849324 - DNA, 25 bp, Homo sapien
cagtgttatttgagatgatgtattc

SEQ ID NO: 849325 - DNA, 25 bp, Homo sapien
accaggagaaacgtaggcatgatag

SEQ ID NO: 849326 - DNA, 25 bp, Homo sapien
cattccaagaatgaactcagtgtta

SEQ ID NO: 849327 - DNA, 25 bp, Homo sapien
aaactgcaggaatggaggtgctctt

SEQ ID NO: 849328 - DNA, 25 bp, Homo sapien
aactgcaggaatggaggtgctcttc

SEQ ID NO: 849329 - DNA, 25 bp, Homo sapien
actgcaggaatggaggtgctcttcc

SEQ ID NO: 849330 - DNA, 25 bp, Homo sapien
ttcaattctgagtccaatgcgacct

SEQ ID NO: 849331 - DNA, 25 bp, Homo sapien
cattccaatccagaggcactatgcg

SEQ ID NO: 849332 - DNA, 25 bp, Homo sapien
gatgctgtaattcgtgccggaccac

SEQ ID NO: 849333 - DNA, 25 bp, Homo sapien
catagcgggcaataatcggatgctg

SEQ ID NO: 849334 - DNA, 25 bp, Homo sapien
tacagtgttccccatattccaaacg

SEQ ID NO: 849335 - DNA, 25 bp, Homo sapien
cagacagtgtttgccgacctaacat

SEQ ID NO: 849336 - DNA, 25 bp, Homo sapien
tgttgacctcagacaagccttgatt

SEQ ID NO: 849337 - DNA, 25 bp, Homo sapien
gaaggctctcgaaactacgttatga

SEQ ID NO: 849338 - DNA, 25 bp, Homo sapien
cagtgtctattttcctacaaaccac

SEQ ID NO: 849339 - DNA, 25 bp, Homo sapien
agtgtctattttcctacaaaccaca

SEQ ID NO: 849340 - DNA, 25 bp, Homo sapien
gtgtctattttcctacaaaccacaa

SEQ ID NO: 849341 - DNA, 25 bp, Homo sapien
ctgtgtcatttcttggagctgccat

SEQ ID NO: 849342 - DNA, 25 bp, Homo sapien
ttcttcagtgagcagccatttttct

SEQ ID NO: 849343 - DNA, 25 bp, Homo sapien
tttcttcagtgagcagccatttttc

SEQ ID NO: 849344 - DNA, 25 bp, Homo sapien
ctccttgcatttggaatggagaatt

SEQ ID NO: 849345 - DNA, 25 bp, Homo sapien
tttggaatggagaattgggcaccat

SEQ ID NO: 849346 - DNA, 25 bp, Homo sapien
tgcatttggaatggagaattgggca

SEQ ID NO: 849347 - DNA, 25 bp, Homo sapien
ccttgcatttggaatggagaattgg

SEQ ID NO: 849348 - DNA, 25 bp, Homo sapien
gaagcagtgtgtctcaaatttctta

SEQ ID NO: 849349 - DNA, 25 bp, Homo sapien
ttattcttaggaagcagtgtgtctc

SEQ ID NO: 849350 - DNA, 25 bp, Homo sapien
gcagtgtgtctcaaatttcttatta

SEQ ID NO: 849351 - DNA, 25 bp, Homo sapien
cttaggaagcagtgtgtctcaaatt

SEQ ID NO: 849352 - DNA, 25 bp, Homo sapien
tcaaggcaatgacatctttcagtgt

SEQ ID NO: 849353 - DNA, 25 bp, Homo sapien
taagtttaaactgaggaccagcttg

SEQ ID NO: 849354 - DNA, 25 bp, Homo sapien
tcagttccaaggtaatgtaatctcc

SEQ ID NO: 849355 - DNA, 25 bp, Homo sapien
tcagacgtcttaaagttcaaggcaa

SEQ ID NO: 849356 - DNA, 25 bp, Homo sapien
tccagagtgaggttaatgctccgcc

SEQ ID NO: 849357 - DNA, 25 bp, Homo sapien
attggtacggaagtgctgcatgctc

SEQ ID NO: 849358 - DNA, 25 bp, Homo sapien
tagtccaagtccaggtagtcaaact

SEQ ID NO: 849359 - DNA, 25 bp, Homo sapien
tggcgctcaatgaccacagagtgcc

SEQ ID NO: 849360 - DNA, 25 bp, Homo sapien
tgttgacgccattgtagttgatgct

SEQ ID NO: 849361 - DNA, 25 bp, Homo sapien
agaaagggatgcctccaaaggttat

SEQ ID NO: 849362 - DNA, 25 bp, Homo sapien
ggcaagatcagtaatgttgacgcca

SEQ ID NO: 849363 - DNA, 25 bp, Homo sapien
gccagagaaagggatgcctccaaag

SEQ ID NO: 849364 - DNA, 25 bp, Homo sapien
gctttcagtgaggtcaatctccaca

SEQ ID NO: 849365 - DNA, 25 bp, Homo sapien
acttgtagcgttgaaaaagacaggc

SEQ ID NO: 849366 - DNA, 25 bp, Homo sapien
gacaggcaccgtatagggttccaca

SEQ ID NO: 849367 - DNA, 25 bp, Homo sapien
tgttgatgtgaacacccactttgct

SEQ ID NO: 849368 - DNA, 25 bp, Homo sapien
ttttatgtttagtcattaggcaata

SEQ ID NO: 849369 - DNA, 25 bp, Homo sapien
acaatataatgtgggagtttttcaa

SEQ ID NO: 849370 - DNA, 25 bp, Homo sapien
tattttcgatttgctgtaaacctcc

SEQ ID NO: 849371 - DNA, 25 bp, Homo sapien
ggagacaggccttcatactaatatt

SEQ ID NO: 849372 - DNA, 25 bp, Homo sapien
tgggaacatgactcaatggaagcag

SEQ ID NO: 849373 - DNA, 25 bp, Homo sapien
ctttttgtagaggacatgtgagacc

SEQ ID NO: 849374 - DNA, 25 bp, Homo sapien
cacatgagtggcgttaggagtacag

SEQ ID NO: 849375 - DNA, 25 bp, Homo sapien
gcaacagtctaggtgtgaatcaaac

SEQ ID NO: 849376 - DNA, 25 bp, Homo sapien
ttcctccattggtggcattttatag

SEQ ID NO: 849377 - DNA, 25 bp, Homo sapien
tatagttgtagggactgtccaggtc

SEQ ID NO: 849378 - DNA, 25 bp, Homo sapien
ctgttttcacaagagcttcctccat

SEQ ID NO: 849379 - DNA, 25 bp, Homo sapien
attttatagttgtagggactgtcca

SEQ ID NO: 849380 - DNA, 25 bp, Homo sapien
atgtgtgcggggtcaaataacggaa

SEQ ID NO: 849381 - DNA, 25 bp, Homo sapien
agcagcggcaacttgctcgtcccct

SEQ ID NO: 849382 - DNA, 25 bp, Homo sapien
taacggaataagagctagccacccc

SEQ ID NO: 849383 - DNA, 25 bp, Homo sapien
cggcaacttgctcgtccccttccat

SEQ ID NO: 849384 - DNA, 25 bp, Homo sapien
tactctgttgtcgtcttgttctgtt

SEQ ID NO: 849385 - DNA, 25 bp, Homo sapien
ctctgttgtcgtcttgttctgtttt

SEQ ID NO: 849386 - DNA, 25 bp, Homo sapien
actctgttgtcgtcttgttctgttt

SEQ ID NO: 849387 - DNA, 25 bp, Homo sapien
ctactctgttgtcgtcttgttctgt

SEQ ID NO: 849388 - DNA, 25 bp, Homo sapien
actggtcactacgttctttcacact

SEQ ID NO: 849389 - DNA, 25 bp, Homo sapien
tgcaactggtcactacgttctttca

SEQ ID NO: 849390 - DNA, 25 bp, Homo sapien
ggtcactacgttctttcacacttac

SEQ ID NO: 849391 - DNA, 25 bp, Homo sapien
cccttgcaactggtcactacgttct

SEQ ID NO: 849392 - DNA, 25 bp, Homo sapien
cagaggttctagtaaagagattagc

SEQ ID NO: 849393 - DNA, 25 bp, Homo sapien
gattagcagatacttcagtgaagat

SEQ ID NO: 849394 - DNA, 25 bp, Homo sapien
agattagcagatacttcagtgaaga

SEQ ID NO: 849395 - DNA, 25 bp, Homo sapien
cttcaaactgtgaacagaggttcta

SEQ ID NO: 849396 - DNA, 25 bp, Homo sapien
aaaatatccaccctttctgtgctct

SEQ ID NO: 849397 - DNA, 25 bp, Homo sapien
gtagccagttgatgtggtcgcccct

SEQ ID NO: 849398 - DNA, 25 bp, Homo sapien
cctcaatttgaaaagcgcatattta

SEQ ID NO: 849399 - DNA, 25 bp, Homo sapien
gggacaattgtagccagttgatgtg

SEQ ID NO: 849400 - DNA, 25 bp, Homo sapien
tggtcgcccctcaatttgaaaagcg

SEQ ID NO: 849401 - DNA, 25 bp, Homo sapien
caaagttgtagtaacgtttggcaga

SEQ ID NO: 849402 - DNA, 25 bp, Homo sapien
agttgtagtaacgtttggcagaaat

SEQ ID NO: 849403 - DNA, 25 bp, Homo sapien
tgtagtaacgtttggcagaaatgtc

SEQ ID NO: 849404 - DNA, 25 bp, Homo sapien
ttcaaagttgtagtaacgtttggca

SEQ ID NO: 849405 - DNA, 25 bp, Homo sapien
gcaacaaactccaagttagggtctc

SEQ ID NO: 849406 - DNA, 25 bp, Homo sapien
caagttagggtctccaatgagcttc

SEQ ID NO: 849407 - DNA, 25 bp, Homo sapien
aaactccaagttagggtctccaatg

SEQ ID NO: 849408 - DNA, 25 bp, Homo sapien
ctccaagttagggtctccaatgagc

SEQ ID NO: 849409 - DNA, 25 bp, Homo sapien
tgtctgaagaacctctaagtcatgc

SEQ ID NO: 849410 - DNA, 25 bp, Homo sapien
gtctgaagaacctctaagtcatgct

SEQ ID NO: 849411 - DNA, 25 bp, Homo sapien
tctgaagaacctctaagtcatgctt

SEQ ID NO: 849412 - DNA, 25 bp, Homo sapien
gggatgcaatgtcccacttgtgatg

SEQ ID NO: 849413 - DNA, 25 bp, Homo sapien
caggtgccgctgcagttagcagcaa

SEQ ID NO: 849414 - DNA, 25 bp, Homo sapien
gttagcagcaacgtgtgcagagtcc

SEQ ID NO: 849415 - DNA, 25 bp, Homo sapien
ttgcttcccgggatgcaatgtccca

SEQ ID NO: 849416 - DNA, 25 bp, Homo sapien
aagtgctccctctagtggactggca

SEQ ID NO: 849417 - DNA, 25 bp, Homo sapien
tgtctggaccaacccgggatgaaac

SEQ ID NO: 849418 - DNA, 25 bp, Homo sapien
tagagaattccactttacaccgagg

SEQ ID NO: 849419 - DNA, 25 bp, Homo sapien
tatttgctaccccacagagagacga

SEQ ID NO: 849420 - DNA, 25 bp, Homo sapien
tagagaccactcgtccagcctgaag

SEQ ID NO: 849421 - DNA, 25 bp, Homo sapien
gatcacgggattcactttggagcct

SEQ ID NO: 849422 - DNA, 25 bp, Homo sapien
gatctctgtgtctaagatcacggga

SEQ ID NO: 849423 - DNA, 25 bp, Homo sapien
aacagttttgctcacagcggttttg

SEQ ID NO: 849424 - DNA, 25 bp, Homo sapien
gtgtcttgcaccctgactggtatct

SEQ ID NO: 849425 - DNA, 25 bp, Homo sapien
tagtcaaggaaaaggcgagcaagaa

SEQ ID NO: 849426 - DNA, 25 bp, Homo sapien
cttctggtgatcagagggtctttca

SEQ ID NO: 849427 - DNA, 25 bp, Homo sapien
tgaagttttcactgactccatgaga

SEQ ID NO: 849428 - DNA, 25 bp, Homo sapien
ttagtttgccttcgtccttgatctc

SEQ ID NO: 849429 - DNA, 25 bp, Homo sapien
tgccttcgtccttgatctcttccat

SEQ ID NO: 849430 - DNA, 25 bp, Homo sapien
gtttagtttgccttcgtccttgatc

SEQ ID NO: 849431 - DNA, 25 bp, Homo sapien
ttgccttcgtccttgatctcttcca

SEQ ID NO: 849432 - DNA, 25 bp, Homo sapien
tctaccattctacgtatctctttca

SEQ ID NO: 849433 - DNA, 25 bp, Homo sapien
cattctacgtatctctttcacagag

SEQ ID NO: 849434 - DNA, 25 bp, Homo sapien
tctacgtatctctttcacagaggag

SEQ ID NO: 849435 - DNA, 25 bp, Homo sapien
cttgttctaccattctacgtatctc

SEQ ID NO: 849436 - DNA, 25 bp, Homo sapien
gaaatcttgtgtgaccttggtgtta

SEQ ID NO: 849437 - DNA, 25 bp, Homo sapien
tataaaggttcttaacagctgtagg

SEQ ID NO: 849438 - DNA, 25 bp, Homo sapien
gtgaccttggtgttattgtggctgc

SEQ ID NO: 849439 - DNA, 25 bp, Homo sapien
gcatcctccattgcttgaaatcttg

SEQ ID NO: 849440 - DNA, 25 bp, Homo sapien
catgctaagaaacagataagttgga

SEQ ID NO: 849441 - DNA, 25 bp, Homo sapien
tgtagccttccatgccccttactgt

SEQ ID NO: 849442 - DNA, 25 bp, Homo sapien
tagatgggtttgatatgtagccttc

SEQ ID NO: 849443 - DNA, 25 bp, Homo sapien
gattaaatccaacaataggctcaaa

SEQ ID NO: 849444 - DNA, 25 bp, Homo sapien
tgctctccttctgacatccctaatg

SEQ ID NO: 849445 - DNA, 25 bp, Homo sapien
tgtatcaagaggtcccctacctcca

SEQ ID NO: 849446 - DNA, 25 bp, Homo sapien
tcagctacacaaaacctggatgcat

SEQ ID NO: 849447 - DNA, 25 bp, Homo sapien
tacctccaatttgtataaagctttc

SEQ ID NO: 849448 - DNA, 25 bp, Homo sapien
aatcaggtataaaaagcggctctag

SEQ ID NO: 849449 - DNA, 25 bp, Homo sapien
ccattctgaagctgacttccgaaaa

SEQ ID NO: 849450 - DNA, 25 bp, Homo sapien
cactgtcatggcttaaattagcttg

SEQ ID NO: 849451 - DNA, 25 bp, Homo sapien
cctggagaagctaagttctttggta

SEQ ID NO: 849452 - DNA, 25 bp, Homo sapien
tctgctctcacatatttgagagatg

SEQ ID NO: 849453 - DNA, 25 bp, Homo sapien
tcatccaaaccatggctcacaatga

SEQ ID NO: 849454 - DNA, 25 bp, Homo sapien
ctggtaagtacaagataaaagtcat

SEQ ID NO: 849455 - DNA, 25 bp, Homo sapien
tgctgatgcttcatctccatcgatg

SEQ ID NO: 849456 - DNA, 25 bp, Homo sapien
tccatcgatggtgagaatagcaaaa

SEQ ID NO: 849457 - DNA, 25 bp, Homo sapien
tccttggctaggaagcgaacctcgt

SEQ ID NO: 849458 - DNA, 25 bp, Homo sapien
gactattagttcgaactgctgatgc

SEQ ID NO: 849459 - DNA, 25 bp, Homo sapien
gatggtaaaagattctggcgaggcc

SEQ ID NO: 849460 - DNA, 25 bp, Homo sapien
tcacttagtgatcctgtgccagtca

SEQ ID NO: 849461 - DNA, 25 bp, Homo sapien
tgtgccagtcattcgctgaggaggc

SEQ ID NO: 849462 - DNA, 25 bp, Homo sapien
tggcgaggcctgtaacctgagttct

SEQ ID NO: 849463 - DNA, 25 bp, Homo sapien
agtcctctaatgaactgaatgccaa

SEQ ID NO: 849464 - DNA, 25 bp, Homo sapien
aactgaatgccaaactgggttttct

SEQ ID NO: 849465 - DNA, 25 bp, Homo sapien
tgggttttctttggtgaaatcagtg

SEQ ID NO: 849466 - DNA, 25 bp, Homo sapien
gaatcaacaagtcctctaatgaact

SEQ ID NO: 849467 - DNA, 25 bp, Homo sapien
ggccacgctgcctggactgccctca

SEQ ID NO: 849468 - DNA, 25 bp, Homo sapien
ccacgctgcctggactgccctcagt

SEQ ID NO: 849469 - DNA, 25 bp, Homo sapien
cagctgaggccacgctgcctggact

SEQ ID NO: 849470 - DNA, 25 bp, Homo sapien
gctgaggccacgctgcctggactgc

SEQ ID NO: 849471 - DNA, 25 bp, Homo sapien
tggctgctctaaatagggtccacag

SEQ ID NO: 849472 - DNA, 25 bp, Homo sapien
ttggctgctctaaatagggtccaca

SEQ ID NO: 849473 - DNA, 25 bp, Homo sapien
gttggctgctctaaatagggtccac

SEQ ID NO: 849474 - DNA, 25 bp, Homo sapien
agttggctgctctaaatagggtcca

SEQ ID NO: 849475 - DNA, 25 bp, Homo sapien
gggcacagcactgttgcagtgatca

SEQ ID NO: 849476 - DNA, 25 bp, Homo sapien
tcaggacctcaaggtagtttgacat

SEQ ID NO: 849477 - DNA, 25 bp, Homo sapien
cactgttgcagtgatcagattgagg

SEQ ID NO: 849478 - DNA, 25 bp, Homo sapien
gatatcatcgtccactaaaggttta

SEQ ID NO: 849479 - DNA, 25 bp, Homo sapien
gcttagggttgcctcttgaagactt

SEQ ID NO: 849480 - DNA, 25 bp, Homo sapien
gtcataagtgcaccgtgacaaagga

SEQ ID NO: 849481 - DNA, 25 bp, Homo sapien
catagtaatggcttagggttgcctc

SEQ ID NO: 849482 - DNA, 25 bp, Homo sapien
tcttggttgaccatttctatgtcat

SEQ ID NO: 849483 - DNA, 25 bp, Homo sapien
tgaccactcttaagaagactgtcat

SEQ ID NO: 849484 - DNA, 25 bp, Homo sapien
gacttgagttattcatctggttcag

SEQ ID NO: 849485 - DNA, 25 bp, Homo sapien
acttgagttattcatctggttcaga

SEQ ID NO: 849486 - DNA, 25 bp, Homo sapien
gtgccacttcgtataaatttacaag

SEQ ID NO: 849487 - DNA, 25 bp, Homo sapien
tgatcgtccacttgaatgagctgca

SEQ ID NO: 849488 - DNA, 25 bp, Homo sapien
tgacattcgcgaaacttcccggctt

SEQ ID NO: 849489 - DNA, 25 bp, Homo sapien
tatgatcgcacacatgtcaatgctg

SEQ ID NO: 849490 - DNA, 25 bp, Homo sapien
gttgagtcaggcatcttaagatgtt

SEQ ID NO: 849491 - DNA, 25 bp, Homo sapien
tcaggttttcacacctggaaagagg

SEQ ID NO: 849492 - DNA, 25 bp, Homo sapien
gaatgcctatagcatgtgccttgaa

SEQ ID NO: 849493 - DNA, 25 bp, Homo sapien
tccagctccctggaatgcctatagc

SEQ ID NO: 849494 - DNA, 25 bp, Homo sapien
tatagcatgtgccttgaactgctcc

SEQ ID NO: 849495 - DNA, 25 bp, Homo sapien
gctccctggaatgcctatagcatgt

SEQ ID NO: 849496 - DNA, 25 bp, Homo sapien
cctatcagaagttgcgaggatctct

SEQ ID NO: 849497 - DNA, 25 bp, Homo sapien
ctggggatctgcattgtctctgaga

SEQ ID NO: 849498 - DNA, 25 bp, Homo sapien
ggatctgcattgtctctgagataaa

SEQ ID NO: 849499 - DNA, 25 bp, Homo sapien
gaagttgcgaggatctctttactca

SEQ ID NO: 849500 - DNA, 25 bp, Homo sapien
gatacgggttccatacaataataat

SEQ ID NO: 849501 - DNA, 25 bp, Homo sapien
catcagatacgggttccatacaata

SEQ ID NO: 849502 - DNA, 25 bp, Homo sapien
cagatacgggttccatacaataata

SEQ ID NO: 849503 - DNA, 25 bp, Homo sapien
catcatcagatacgggttccataca

SEQ ID NO: 849504 - DNA, 25 bp, Homo sapien
tattgaggaatcaaagctacaaggg

SEQ ID NO: 849505 - DNA, 25 bp, Homo sapien
catagagttaatgtgattggctgac

SEQ ID NO: 849506 - DNA, 25 bp, Homo sapien
tctgaaagtcagttgtgccatatac

SEQ ID NO: 849507 - DNA, 25 bp, Homo sapien
gaaggatgtcccgaagtggtaacca

SEQ ID NO: 849508 - DNA, 25 bp, Homo sapien
ttctatctccattctgtaacatttc

SEQ ID NO: 849509 - DNA, 25 bp, Homo sapien
cttctatctccattctgtaacattt

SEQ ID NO: 849510 - DNA, 25 bp, Homo sapien
ctccattctgtaacatttcttgcat

SEQ ID NO: 849511 - DNA, 25 bp, Homo sapien
tatctccattctgtaacatttcttg

SEQ ID NO: 849512 - DNA, 25 bp, Homo sapien
ttttcttaaagttgcagtgctggca

SEQ ID NO: 849513 - DNA, 25 bp, Homo sapien
tggcagctttatcatgagccctgac

SEQ ID NO: 849514 - DNA, 25 bp, Homo sapien
tgttattaaaggtcgtcgggatctc

SEQ ID NO: 849515 - DNA, 25 bp, Homo sapien
tcttaaagttgcagtgctggcagct

SEQ ID NO: 849516 - DNA, 25 bp, Homo sapien
ttcaggtcaagtctgatatcaaagc

SEQ ID NO: 849517 - DNA, 25 bp, Homo sapien
tcatccctcagctcataactagagg

SEQ ID NO: 849518 - DNA, 25 bp, Homo sapien
gtatctgtagtagaactttcttaag

SEQ ID NO: 849519 - DNA, 25 bp, Homo sapien
tgccaaggggatcttcctgcatgtc

SEQ ID NO: 849520 - DNA, 25 bp, Homo sapien
aggtttattcttccgaatgcctaca

SEQ ID NO: 849521 - DNA, 25 bp, Homo sapien
cttatgagaataattgatgaaatga

SEQ ID NO: 849522 - DNA, 25 bp, Homo sapien
aaactgaaacatccccttagataag

SEQ ID NO: 849523 - DNA, 25 bp, Homo sapien
tgatttaaaggaagtgacgttttca

SEQ ID NO: 849524 - DNA, 25 bp, Homo sapien
actgaagccttacactcctagggtc

SEQ ID NO: 849525 - DNA, 25 bp, Homo sapien
agcctcttatatagctgaaactata

SEQ ID NO: 849526 - DNA, 25 bp, Homo sapien
ccatgtttgcgagcactttccacca

SEQ ID NO: 849527 - DNA, 25 bp, Homo sapien
ctttccaccatgctcacagtgattg

SEQ ID NO: 849528 - DNA, 25 bp, Homo sapien
caagtgcatttgaagctgtcccatg

SEQ ID NO: 849529 - DNA, 25 bp, Homo sapien
tcctgtctcatcacaagtgcatttg

SEQ ID NO: 849530 - DNA, 25 bp, Homo sapien
taaagtgagataaattggcactcac

SEQ ID NO: 849531 - DNA, 25 bp, Homo sapien
tcatgcaattacaagattaaagtga

SEQ ID NO: 849532 - DNA, 25 bp, Homo sapien
gcaattacaagattaaagtgagata

SEQ ID NO: 849533 - DNA, 25 bp, Homo sapien
catgcaattacaagattaaagtgag

SEQ ID NO: 849534 - DNA, 25 bp, Homo sapien
gtttagcaaacaaatccaggtgtct

SEQ ID NO: 849535 - DNA, 25 bp, Homo sapien
cataaatttgatgcagctgagtcac

SEQ ID NO: 849536 - DNA, 25 bp, Homo sapien
gaagacataaatttgatgcagctga

SEQ ID NO: 849537 - DNA, 25 bp, Homo sapien
aatccaggtgtcttaatttcagaag

SEQ ID NO: 849538 - DNA, 25 bp, Homo sapien
cagctgctctcaggctgatgcactg

SEQ ID NO: 849539 - DNA, 25 bp, Homo sapien
gctgctctcaggctgatgcactggg

SEQ ID NO: 849540 - DNA, 25 bp, Homo sapien
tcaggctgatgcactggggactcat

SEQ ID NO: 849541 - DNA, 25 bp, Homo sapien
agcagctgctctcaggctgatgcac

SEQ ID NO: 849542 - DNA, 25 bp, Homo sapien
gagactgaaactcttgatcatgagg

SEQ ID NO: 849543 - DNA, 25 bp, Homo sapien
tgcagggatctccttgactatgtcc

SEQ ID NO: 849544 - DNA, 25 bp, Homo sapien
tggctggtggcttacatggcaagga

SEQ ID NO: 849545 - DNA, 25 bp, Homo sapien
gaagtcctttgtcagtgtattctgc

SEQ ID NO: 849546 - DNA, 25 bp, Homo sapien
tattgtgaccttcgcggtcctcgcc

SEQ ID NO: 849547 - DNA, 25 bp, Homo sapien
cattcttattgtgaccttcgcggtc

SEQ ID NO: 849548 - DNA, 25 bp, Homo sapien
gctgtatttgcattcttattgtgac

SEQ ID NO: 849549 - DNA, 25 bp, Homo sapien
gtttttactgctgtatttgcattct

SEQ ID NO: 849550 - DNA, 25 bp, Homo sapien
cagctctacagttgcctggcattgt

SEQ ID NO: 849551 - DNA, 25 bp, Homo sapien
acaagatcgtttcagaaggtgctgg

SEQ ID NO: 849552 - DNA, 25 bp, Homo sapien
ctgctatataatatctgttgtggtt

SEQ ID NO: 849553 - DNA, 25 bp, Homo sapien
gggaacaagatcgtttcagaaggtg

SEQ ID NO: 849554 - DNA, 25 bp, Homo sapien
tcattctctaggagtttagtagaca

SEQ ID NO: 849555 - DNA, 25 bp, Homo sapien
tctcattctctaggagtttagtaga

SEQ ID NO: 849556 - DNA, 25 bp, Homo sapien
attctctaggagtttagtagacatt

SEQ ID NO: 849557 - DNA, 25 bp, Homo sapien
ttagtagacattgtcattgttggct

SEQ ID NO: 849558 - DNA, 25 bp, Homo sapien
ttttccattggctgcatcttctcta

SEQ ID NO: 849559 - DNA, 25 bp, Homo sapien
tctcttttttccattggctgcatct

SEQ ID NO: 849560 - DNA, 25 bp, Homo sapien
tccattggctgcatcttctctattc

SEQ ID NO: 849561 - DNA, 25 bp, Homo sapien
cttttttccattggctgcatcttct

SEQ ID NO: 849562 - DNA, 25 bp, Homo sapien
tggccgcaggcctatacaggattgc

SEQ ID NO: 849563 - DNA, 25 bp, Homo sapien
gtggccgcaggcctatacaggattg

SEQ ID NO: 849564 - DNA, 25 bp, Homo sapien
cgcaggcctatacaggattgccaaa

SEQ ID NO: 849565 - DNA, 25 bp, Homo sapien
gccgcaggcctatacaggattgcca

SEQ ID NO: 849566 - DNA, 25 bp, Homo sapien
tgtctaccagtagaatacgaaacac

SEQ ID NO: 849567 - DNA, 25 bp, Homo sapien
cttgaaggttatgtctaccagtaga

SEQ ID NO: 849568 - DNA, 25 bp, Homo sapien
tgaaggttatgtctaccagtagaat

SEQ ID NO: 849569 - DNA, 25 bp, Homo sapien
ggttatgtctaccagtagaatacga

SEQ ID NO: 849570 - DNA, 25 bp, Homo sapien
aataatttgatgtctgtcctaggtg

SEQ ID NO: 849571 - DNA, 25 bp, Homo sapien
cccagaggtccgctgccatcaggat

SEQ ID NO: 849572 - DNA, 25 bp, Homo sapien
gtcctaggtgtttgtaggcttcaca

SEQ ID NO: 849573 - DNA, 25 bp, Homo sapien
caggatctatccagtaataatttga

SEQ ID NO: 849574 - DNA, 25 bp, Homo sapien
agggttggttagtggcaaagaactg

SEQ ID NO: 849575 - DNA, 25 bp, Homo sapien
ggttggttagtggcaaagaactgaa

SEQ ID NO: 849576 - DNA, 25 bp, Homo sapien
gggttggttagtggcaaagaactga

SEQ ID NO: 849577 - DNA, 25 bp, Homo sapien
tcatgctctctttatgatgttaaat

SEQ ID NO: 849578 - DNA, 25 bp, Homo sapien
agctgtcccctcaatgttgcctggc

SEQ ID NO: 849579 - DNA, 25 bp, Homo sapien
tgtgtgaattattgatgctatacca

SEQ ID NO: 849580 - DNA, 25 bp, Homo sapien
tattgatgctataccataattccta

SEQ ID NO: 849581 - DNA, 25 bp, Homo sapien
cagttgcctgaagaggcttagatgc

SEQ ID NO: 849582 - DNA, 25 bp, Homo sapien
agttgctgcattcttttcgtggtcc

SEQ ID NO: 849583 - DNA, 25 bp, Homo sapien
ctagttgctgcattcttttcgtggt

SEQ ID NO: 849584 - DNA, 25 bp, Homo sapien
tagttgctgcattcttttcgtggtc

SEQ ID NO: 849585 - DNA, 25 bp, Homo sapien
gtaatcaacatatacccttataatg

SEQ ID NO: 849586 - DNA, 25 bp, Homo sapien
caacatatacccttataatgcagag

SEQ ID NO: 849587 - DNA, 25 bp, Homo sapien
tatacccttataatgcagagcagca

SEQ ID NO: 849588 - DNA, 25 bp, Homo sapien
acccttataatgcagagcagcactt

SEQ ID NO: 849589 - DNA, 25 bp, Homo sapien
tatgggtggctagcaaagaacctga

SEQ ID NO: 849590 - DNA, 25 bp, Homo sapien
gatcatatgattggatccccaggac

SEQ ID NO: 849591 - DNA, 25 bp, Homo sapien
tgtttctgacctacgcccttgggaa

SEQ ID NO: 849592 - DNA, 25 bp, Homo sapien
gaactaaagggtgcgaattgactgg

SEQ ID NO: 849593 - DNA, 25 bp, Homo sapien
gctgctggcaatgccaggattgaaa

SEQ ID NO: 849594 - DNA, 25 bp, Homo sapien
gctggcaatgccaggattgaaagta

SEQ ID NO: 849595 - DNA, 25 bp, Homo sapien
aatgccaggattgaaagtactgagc

SEQ ID NO: 849596 - DNA, 25 bp, Homo sapien
gcaatgccaggattgaaagtactga

SEQ ID NO: 849597 - DNA, 25 bp, Homo sapien
gctgaaaccattaatgatcttagaa

SEQ ID NO: 849598 - DNA, 25 bp, Homo sapien
ttttctatgctgaaaccattaatga

SEQ ID NO: 849599 - DNA, 25 bp, Homo sapien
ccattaatgatcttagaactgctcc

SEQ ID NO: 849600 - DNA, 25 bp, Homo sapien
aatgatcttagaactgctccttccc

SEQ ID NO: 849601 - DNA, 25 bp, Homo sapien
catggaagcgtttaacccctgttct

SEQ ID NO: 849602 - DNA, 25 bp, Homo sapien
ataacgggccctcaagattaaccag

SEQ ID NO: 849603 - DNA, 25 bp, Homo sapien
tctctggcaataacgggccctcaag

SEQ ID NO: 849604 - DNA, 25 bp, Homo sapien
ccctcaagattaaccagtgtagtca

SEQ ID NO: 849605 - DNA, 25 bp, Homo sapien
tcctgtctctggcaataacgggccc

SEQ ID NO: 849606 - DNA, 25 bp, Homo sapien
ttaacatcctttatcttgtggactg

SEQ ID NO: 849607 - DNA, 25 bp, Homo sapien
cattaacatcctttatcttgtggac

SEQ ID NO: 849608 - DNA, 25 bp, Homo sapien
tcattaacatcctttatcttgtgga

SEQ ID NO: 849609 - DNA, 25 bp, Homo sapien
taacatcctttatcttgtggactga

SEQ ID NO: 849610 - DNA, 25 bp, Homo sapien
ctttagcctctttgtaactgccttc

SEQ ID NO: 849611 - DNA, 25 bp, Homo sapien
tttagcctctttgtaactgccttcc

SEQ ID NO: 849612 - DNA, 25 bp, Homo sapien
tagcctctttgtaactgccttcctt

SEQ ID NO: 849613 - DNA, 25 bp, Homo sapien
cctctttgtaactgccttcctttag

SEQ ID NO: 849614 - DNA, 25 bp, Homo sapien
cacttatctggtccatggaggcgct

SEQ ID NO: 849615 - DNA, 25 bp, Homo sapien
catcttgcagaaataggagacatac

SEQ ID NO: 849616 - DNA, 25 bp, Homo sapien
tgctcgcagtactcggcactgtcag

SEQ ID NO: 849617 - DNA, 25 bp, Homo sapien
ttctgggttgtagccgaccacaggc

SEQ ID NO: 849618 - DNA, 25 bp, Homo sapien
tgttaggcttagacataagagtttc

SEQ ID NO: 849619 - DNA, 25 bp, Homo sapien
acaggatctcggagaactctatcaa

SEQ ID NO: 849620 - DNA, 25 bp, Homo sapien
gtgtcacttgtgttaggcttagaca

SEQ ID NO: 849621 - DNA, 25 bp, Homo sapien
tctttctcgttttaacaggatctcg

SEQ ID NO: 849622 - DNA, 25 bp, Homo sapien
catgtctgtatcagtgtcctgctgt

SEQ ID NO: 849623 - DNA, 25 bp, Homo sapien
gtctgtatcagtgtcctgctgttca

SEQ ID NO: 849624 - DNA, 25 bp, Homo sapien
tgtctgtatcagtgtcctgctgttc

SEQ ID NO: 849625 - DNA, 25 bp, Homo sapien
tcatgtctgtatcagtgtcctgctg

SEQ ID NO: 849626 - DNA, 25 bp, Homo sapien
aagcccaagaagcaagcatctgatt

SEQ ID NO: 849627 - DNA, 25 bp, Homo sapien
ttacagagtagattcaaagagattt

SEQ ID NO: 849628 - DNA, 25 bp, Homo sapien
tacagagtagattcaaagagatttc

SEQ ID NO: 849629 - DNA, 25 bp, Homo sapien
tgacgggtgttagtgaaatgtttgt

SEQ ID NO: 849630 - DNA, 25 bp, Homo sapien
gggagtccaagcctgatatggtcat

SEQ ID NO: 849631 - DNA, 25 bp, Homo sapien
ttatggtagcgaataaatattaggg

SEQ ID NO: 849632 - DNA, 25 bp, Homo sapien
tgcctcacaaacagatgacgggtgt

SEQ ID NO: 849633 - DNA, 25 bp, Homo sapien
tcttgtccaggagtacagcacatca

SEQ ID NO: 849634 - DNA, 25 bp, Homo sapien
catcataaagctaaggattgccttc

SEQ ID NO: 849635 - DNA, 25 bp, Homo sapien
ttttggagctcgatcacagccagag

SEQ ID NO: 849636 - DNA, 25 bp, Homo sapien
gagatacggaatcccttagggcttc

SEQ ID NO: 849637 - DNA, 25 bp, Homo sapien
tctctgaagggtttgttgagaatcc

SEQ ID NO: 849638 - DNA, 25 bp, Homo sapien
tcttcctggattccacttttgaaag

SEQ ID NO: 849639 - DNA, 25 bp, Homo sapien
tctctctgaagggtttgttgagaat

SEQ ID NO: 849640 - DNA, 25 bp, Homo sapien
cttcctggattccacttttgaaaga

SEQ ID NO: 849641 - DNA, 25 bp, Homo sapien
catggtggtaccttgcataacagca

SEQ ID NO: 849642 - DNA, 25 bp, Homo sapien
cagcagggtctgcagtgaatacaca

SEQ ID NO: 849643 - DNA, 25 bp, Homo sapien
caaaagctgatgaaatggctccctg

SEQ ID NO: 849644 - DNA, 25 bp, Homo sapien
tctaaaatgggacgtgcttgacacc

SEQ ID NO: 849645 - DNA, 25 bp, Homo sapien
ggagcttcctacttgataaaatata

SEQ ID NO: 849646 - DNA, 25 bp, Homo sapien
ccatcatatcaatgggttaaggaag

SEQ ID NO: 849647 - DNA, 25 bp, Homo sapien
gaaacctgaagttctcctgctaaga

SEQ ID NO: 849648 - DNA, 25 bp, Homo sapien
tccagcaatgtatagaaagaactgt

SEQ ID NO: 849649 - DNA, 25 bp, Homo sapien
gactgcagctgtctggattgccaca

SEQ ID NO: 849650 - DNA, 25 bp, Homo sapien
taaagccattgaaggaaggtcatcc

SEQ ID NO: 849651 - DNA, 25 bp, Homo sapien
cattgggagcttcgatgtgagtaca

SEQ ID NO: 849652 - DNA, 25 bp, Homo sapien
gagtacagcagagtccaattttaga

SEQ ID NO: 849653 - DNA, 25 bp, Homo sapien
ttatcaaatgggaacaataccaccc

SEQ ID NO: 849654 - DNA, 25 bp, Homo sapien
catccttagcagtagtataaaaacc

SEQ ID NO: 849655 - DNA, 25 bp, Homo sapien
aaagagaaggatttggagagtcaca

SEQ ID NO: 849656 - DNA, 25 bp, Homo sapien
gcacttactacagcgcttggcatac

SEQ ID NO: 849657 - DNA, 25 bp, Homo sapien
gccagtgctgtaatgacccaaatct

SEQ ID NO: 849658 - DNA, 25 bp, Homo sapien
gcggccagtgctgtaatgacccaaa

SEQ ID NO: 849659 - DNA, 25 bp, Homo sapien
atagcagacagtgctgcggccagtg

SEQ ID NO: 849660 - DNA, 25 bp, Homo sapien
cagtgctgtaatgacccaaatctct

SEQ ID NO: 849661 - DNA, 25 bp, Homo sapien
cctggttgaatgaacgacggttcca

SEQ ID NO: 849662 - DNA, 25 bp, Homo sapien
aggctcctggttgaatgaacgacgg

SEQ ID NO: 849663 - DNA, 25 bp, Homo sapien
tcctggttgaatgaacgacggttcc

SEQ ID NO: 849664 - DNA, 25 bp, Homo sapien
gctcctggttgaatgaacgacggtt

SEQ ID NO: 849665 - DNA, 25 bp, Homo sapien
cagatgaattgtctgccttatgcaa

SEQ ID NO: 849666 - DNA, 25 bp, Homo sapien
gaattgtctgccttatgcaattatc

SEQ ID NO: 849667 - DNA, 25 bp, Homo sapien
tgtctgccttatgcaattatcaaag

SEQ ID NO: 849668 - DNA, 25 bp, Homo sapien
ttatgcaattatcaaaggccccttc

SEQ ID NO: 849669 - DNA, 25 bp, Homo sapien
taccccaactgtcacagctgaacta

SEQ ID NO: 849670 - DNA, 25 bp, Homo sapien
tccctaccccaactgtcacagctga

SEQ ID NO: 849671 - DNA, 25 bp, Homo sapien
ccaactgtcacagctgaactagctt

SEQ ID NO: 849672 - DNA, 25 bp, Homo sapien
tctccctaccccaactgtcacagct

SEQ ID NO: 849673 - DNA, 25 bp, Homo sapien
tgaaaaccaaggtcaaggatcctta

SEQ ID NO: 849674 - DNA, 25 bp, Homo sapien
atagaaaggtttacgcatgggagga

SEQ ID NO: 849675 - DNA, 25 bp, Homo sapien
cagtaacaacctggatctaatcaga

SEQ ID NO: 849676 - DNA, 25 bp, Homo sapien
gagggactgaattgtccttaggaac

SEQ ID NO: 849677 - DNA, 25 bp, Homo sapien
aaactgtcttatgggattcagacaa

SEQ ID NO: 849678 - DNA, 25 bp, Homo sapien
gatttctgatggtttgtgcactctg

SEQ ID NO: 849679 - DNA, 25 bp, Homo sapien
ctctgaggacgtccaagaagagaag

SEQ ID NO: 849680 - DNA, 25 bp, Homo sapien
aatccttggaaacatactaatcagg

SEQ ID NO: 849681 - DNA, 25 bp, Homo sapien
ggcttatttagtaacccatcgtgtc

SEQ ID NO: 849682 - DNA, 25 bp, Homo sapien
tcctgaagttacctctttttgccaa

SEQ ID NO: 849683 - DNA, 25 bp, Homo sapien
ttcctgaagttacctctttttgcca

SEQ ID NO: 849684 - DNA, 25 bp, Homo sapien
catgtggccacgtagagaagaacat

SEQ ID NO: 849685 - DNA, 25 bp, Homo sapien
tgacatccgtgtcctttcgctgaag

SEQ ID NO: 849686 - DNA, 25 bp, Homo sapien
tttctgggccaagccgctctatgcc

SEQ ID NO: 849687 - DNA, 25 bp, Homo sapien
tgcccggaatggcaggcaacacgga

SEQ ID NO: 849688 - DNA, 25 bp, Homo sapien
atcatccatcttctttgcctgcgat

SEQ ID NO: 849689 - DNA, 25 bp, Homo sapien
catcatccatcttctttgcctgcga

SEQ ID NO: 849690 - DNA, 25 bp, Homo sapien
tttgcatgtgtaggcaggtgagaga

SEQ ID NO: 849691 - DNA, 25 bp, Homo sapien
tagcacatgggttatgggaaggcct

SEQ ID NO: 849692 - DNA, 25 bp, Homo sapien
tgctgagataagggcagaattctct

SEQ ID NO: 849693 - DNA, 25 bp, Homo sapien
tgtgtagcacatgggttatgggaag

SEQ ID NO: 849694 - DNA, 25 bp, Homo sapien
ctatgaatacaaaacacagggttgc

SEQ ID NO: 849695 - DNA, 25 bp, Homo sapien
atacaaaacacagggttgcgcttca

SEQ ID NO: 849696 - DNA, 25 bp, Homo sapien
tgaatacaaaacacagggttgcgct

SEQ ID NO: 849697 - DNA, 25 bp, Homo sapien
tatgaatacaaaacacagggttgcg

SEQ ID NO: 849698 - DNA, 25 bp, Homo sapien
cagttcatccaatacccaagtttgc

SEQ ID NO: 849699 - DNA, 25 bp, Homo sapien
cgggcagagtgacccacaatgccca

SEQ ID NO: 849700 - DNA, 25 bp, Homo sapien
aatgcccagttcatccaatacccaa

SEQ ID NO: 849701 - DNA, 25 bp, Homo sapien
aggtccacgggcagagtgacccaca

SEQ ID NO: 849702 - DNA, 25 bp, Homo sapien
ttaattacagatgccaggtaagggc

SEQ ID NO: 849703 - DNA, 25 bp, Homo sapien
tcaattgcactaccaaacagagaag

SEQ ID NO: 849704 - DNA, 25 bp, Homo sapien
cagggaagtgtcattagtgtcaacc

SEQ ID NO: 849705 - DNA, 25 bp, Homo sapien
gatagttgccaaagatagccaccag

SEQ ID NO: 849706 - DNA, 25 bp, Homo sapien
ttcccgtacatacccgtctttgcta

SEQ ID NO: 849707 - DNA, 25 bp, Homo sapien
tacatacccgtctttgctacctttc

SEQ ID NO: 849708 - DNA, 25 bp, Homo sapien
tcaccttggtaacattctttctcca

SEQ ID NO: 849709 - DNA, 25 bp, Homo sapien
cgttcaccttggtaacattctttct

SEQ ID NO: 849710 - DNA, 25 bp, Homo sapien
ataatcatcagcatccaactttgaa

SEQ ID NO: 849711 - DNA, 25 bp, Homo sapien
gaaaatgctgtcttagcgatgtcat

SEQ ID NO: 849712 - DNA, 25 bp, Homo sapien
aactttgaaacatccacttggcatc

SEQ ID NO: 849713 - DNA, 25 bp, Homo sapien
taaacggcagccatatttttgactg

SEQ ID NO: 849714 - DNA, 25 bp, Homo sapien
caagacttcgtcatcatagccagac

SEQ ID NO: 849715 - DNA, 25 bp, Homo sapien
catcttacagatatgtgccccatct

SEQ ID NO: 849716 - DNA, 25 bp, Homo sapien
tctgggtccacatcttacagatatg

SEQ ID NO: 849717 - DNA, 25 bp, Homo sapien
tcatagccagacttgagagtagagt

SEQ ID NO: 849718 - DNA, 25 bp, Homo sapien
caccattcacttctcttacttctta

SEQ ID NO: 849719 - DNA, 25 bp, Homo sapien
ccattcacttctcttacttcttaaa

SEQ ID NO: 849720 - DNA, 25 bp, Homo sapien
acttcttaaatatcgatttgaggct

SEQ ID NO: 849721 - DNA, 25 bp, Homo sapien
tcaggcattgtgtgaccaccattca

SEQ ID NO: 849722 - DNA, 25 bp, Homo sapien
ttctatcttcaacacccacacccca

SEQ ID NO: 849723 - DNA, 25 bp, Homo sapien
tcttatattttacatcccaccttct

SEQ ID NO: 849724 - DNA, 25 bp, Homo sapien
tatattttacatcccaccttctatc

SEQ ID NO: 849725 - DNA, 25 bp, Homo sapien
accttctatcttcaacacccacacc

SEQ ID NO: 849726 - DNA, 25 bp, Homo sapien
ttactcataaccagtacctgcttct

SEQ ID NO: 849727 - DNA, 25 bp, Homo sapien
tgatcttccctgtattggtccagtg

SEQ ID NO: 849728 - DNA, 25 bp, Homo sapien
cttccctgtattggtccagtgttag

SEQ ID NO: 849729 - DNA, 25 bp, Homo sapien
ccctgtattggtccagtgttagcat

SEQ ID NO: 849730 - DNA, 25 bp, Homo sapien
tatgcatttatgtgtcattcttgtg

SEQ ID NO: 849731 - DNA, 25 bp, Homo sapien
cctccctcttgttcacctgcgttgc

SEQ ID NO: 849732 - DNA, 25 bp, Homo sapien
gtcccctccctcttgttcacctgcg

SEQ ID NO: 849733 - DNA, 25 bp, Homo sapien
cccctccctcttgttcacctgcgtt

SEQ ID NO: 849734 - DNA, 25 bp, Homo sapien
tccctcttgttcacctgcgttgcca

SEQ ID NO: 849735 - DNA, 25 bp, Homo sapien
tcctctccatgacttctgaatctgt

SEQ ID NO: 849736 - DNA, 25 bp, Homo sapien
ccatgacttctgaatctgtcttcat

SEQ ID NO: 849737 - DNA, 25 bp, Homo sapien
cttcctctccatgacttctgaatct

SEQ ID NO: 849738 - DNA, 25 bp, Homo sapien
tctccatgacttctgaatctgtctt

SEQ ID NO: 849739 - DNA, 25 bp, Homo sapien
gtctatgaaagacccagaaacatta

SEQ ID NO: 849740 - DNA, 25 bp, Homo sapien
taggtgtctatgaaagacccagaaa

SEQ ID NO: 849741 - DNA, 25 bp, Homo sapien
ggatccatttggtcgatgtaggtgt

SEQ ID NO: 849742 - DNA, 25 bp, Homo sapien
caaaggtgggagatggatccatttg

SEQ ID NO: 849743 - DNA, 25 bp, Homo sapien
tataaatggactaaattctgcaatt

SEQ ID NO: 849744 - DNA, 25 bp, Homo sapien
ttaaatataaatggactaaattctg

SEQ ID NO: 849745 - DNA, 25 bp, Homo sapien
taaatataaatggactaaattctgc

SEQ ID NO: 849746 - DNA, 25 bp, Homo sapien
aatataaatggactaaattctgcaa

SEQ ID NO: 849747 - DNA, 25 bp, Homo sapien
tgaggaccgtgaggttgtgcatacc

SEQ ID NO: 849748 - DNA, 25 bp, Homo sapien
catgtgataacaacctgaggaccgt

SEQ ID NO: 849749 - DNA, 25 bp, Homo sapien
tgttgtaaagtgttcggccatgtga

SEQ ID NO: 849750 - DNA, 25 bp, Homo sapien
taagtgcggcgagatcttctttgat

SEQ ID NO: 849751 - DNA, 25 bp, Homo sapien
cattgagatgctgtcgatccctaac

SEQ ID NO: 849752 - DNA, 25 bp, Homo sapien
gagtttattttgtagcacggcatgg

SEQ ID NO: 849753 - DNA, 25 bp, Homo sapien
tactatgtaacataacagatgacta

SEQ ID NO: 849754 - DNA, 25 bp, Homo sapien
gaacttggcagatatgatatttctg

SEQ ID NO: 849755 - DNA, 25 bp, Homo sapien
tcagcacatcattaatttgctatta

SEQ ID NO: 849756 - DNA, 25 bp, Homo sapien
gtcagcacatcattaatttgctatt

SEQ ID NO: 849757 - DNA, 25 bp, Homo sapien
catcattaatttgctattaaactac

SEQ ID NO: 849758 - DNA, 25 bp, Homo sapien
tgtcagcacatcattaatttgctat

SEQ ID NO: 849759 - DNA, 25 bp, Homo sapien
gagggtagggggagatgcttggtta

SEQ ID NO: 849760 - DNA, 25 bp, Homo sapien
ttgagggtagggggagatgcttggt

SEQ ID NO: 849761 - DNA, 25 bp, Homo sapien
taatagttgagggtagggggagatg

SEQ ID NO: 849762 - DNA, 25 bp, Homo sapien
tagttgagggtagggggagatgctt

SEQ ID NO: 849763 - DNA, 25 bp, Homo sapien
caagccggttgtaatggctgtagtg

SEQ ID NO: 849764 - DNA, 25 bp, Homo sapien
tagtgggggctgataccccaatgag

SEQ ID NO: 849765 - DNA, 25 bp, Homo sapien
gtgccaagccggttgtaatggctgt

SEQ ID NO: 849766 - DNA, 25 bp, Homo sapien
gccaagccggttgtaatggctgtag

SEQ ID NO: 849767 - DNA, 25 bp, Homo sapien
ccagagtaatctgatgctgaaaaca

SEQ ID NO: 849768 - DNA, 25 bp, Homo sapien
tctgcttctgaaggtagggtcaccc

SEQ ID NO: 849769 - DNA, 25 bp, Homo sapien
gaagaatactccttaattgtgttgt

SEQ ID NO: 849770 - DNA, 25 bp, Homo sapien
tgtgttgttaccacttttatctgct

SEQ ID NO: 849771 - DNA, 25 bp, Homo sapien
cactatttgacagtggaccccagag

SEQ ID NO: 849772 - DNA, 25 bp, Homo sapien
cttcccaaggatattacagatcctg

SEQ ID NO: 849773 - DNA, 25 bp, Homo sapien
tattacagatcctgcatattccagc

SEQ ID NO: 849774 - DNA, 25 bp, Homo sapien
gctgattcagatgtccactatttga

SEQ ID NO: 849775 - DNA, 25 bp, Homo sapien
atctgagcggcagactcatgtttca

SEQ ID NO: 849776 - DNA, 25 bp, Homo sapien
catctgagcggcagactcatgtttc

SEQ ID NO: 849777 - DNA, 25 bp, Homo sapien
tctgagcggcagactcatgtttcag

SEQ ID NO: 849778 - DNA, 25 bp, Homo sapien
cactgattctgtactccagcttcta

SEQ ID NO: 849779 - DNA, 25 bp, Homo sapien
aacgagcggtgagtgtttcagaaag

SEQ ID NO: 849780 - DNA, 25 bp, Homo sapien
cagcttctagcaggtaaacgagcgg

SEQ ID NO: 849781 - DNA, 25 bp, Homo sapien
ggacactgattctgtactccagctt

SEQ ID NO: 849782 - DNA, 25 bp, Homo sapien
tcagaccagtctgccatatactgac

SEQ ID NO: 849783 - DNA, 25 bp, Homo sapien
atcagaccagtctgccatatactga

SEQ ID NO: 849784 - DNA, 25 bp, Homo sapien
catcagaccagtctgccatatactg

SEQ ID NO: 849785 - DNA, 25 bp, Homo sapien
aataagaatctcagaggaagagttt

SEQ ID NO: 849786 - DNA, 25 bp, Homo sapien
gaggtgaagccgtggagtaataact

SEQ ID NO: 849787 - DNA, 25 bp, Homo sapien
gaagccgtggagtaataacttctga

SEQ ID NO: 849788 - DNA, 25 bp, Homo sapien
cactaagatcttgtaaacaatatag

SEQ ID NO: 849789 - DNA, 25 bp, Homo sapien
tttcaatttccctatgattccacta

SEQ ID NO: 849790 - DNA, 25 bp, Homo sapien
tcaaaacattcttgcacctgtgaga

SEQ ID NO: 849791 - DNA, 25 bp, Homo sapien
taagtataggcatccttaattggtg

SEQ ID NO: 849792 - DNA, 25 bp, Homo sapien
cttgcacctgtgagaaactttcctt

SEQ ID NO: 849793 - DNA, 25 bp, Homo sapien
ccttaattggtgcaattctagacca

SEQ ID NO: 849794 - DNA, 25 bp, Homo sapien
gtgtcccctgccggcagctcattgg

SEQ ID NO: 849795 - DNA, 25 bp, Homo sapien
ttgcagcacaaacacgcttttcact

SEQ ID NO: 849796 - DNA, 25 bp, Homo sapien
ccctgccggcagctcattggcagtc

SEQ ID NO: 849797 - DNA, 25 bp, Homo sapien
gcacaaacacgcttttcactattgt

SEQ ID NO: 849798 - DNA, 25 bp, Homo sapien
ttcagaatgagactacaaggaacat

SEQ ID NO: 849799 - DNA, 25 bp, Homo sapien
tcagaatgagactacaaggaacata

SEQ ID NO: 849800 - DNA, 25 bp, Homo sapien
cagaatgagactacaaggaacatac

SEQ ID NO: 849801 - DNA, 25 bp, Homo sapien
agaatgagactacaaggaacatact

SEQ ID NO: 849802 - DNA, 25 bp, Homo sapien
tccgcaatgaaggtgtatgggccat

SEQ ID NO: 849803 - DNA, 25 bp, Homo sapien
ctctccttggaagacaattttacat

SEQ ID NO: 849804 - DNA, 25 bp, Homo sapien
ggaagccaagttgcggtcagtccgc

SEQ ID NO: 849805 - DNA, 25 bp, Homo sapien
tttagtaaactggaagccaagttgc

SEQ ID NO: 849806 - DNA, 25 bp, Homo sapien
gcagttgcgttcgatgccgcaggca

SEQ ID NO: 849807 - DNA, 25 bp, Homo sapien
agtccgcgtcgcagttacagtagta

SEQ ID NO: 849808 - DNA, 25 bp, Homo sapien
tggctttgccaacccaccaagtgta

SEQ ID NO: 849809 - DNA, 25 bp, Homo sapien
cagagcctccccagtagtagtgctt

SEQ ID NO: 849810 - DNA, 25 bp, Homo sapien
gatgtaaggtctacccgcatcaagc

SEQ ID NO: 849811 - DNA, 25 bp, Homo sapien
aagggaagaccattttaagagctat

SEQ ID NO: 849812 - DNA, 25 bp, Homo sapien
gctaggtgctggtgaattcaaagac

SEQ ID NO: 849813 - DNA, 25 bp, Homo sapien
gaaagtgtctctagaagcaacccca

SEQ ID NO: 849814 - DNA, 25 bp, Homo sapien
cacagcaggtcaagagcatgaaggg

SEQ ID NO: 849815 - DNA, 25 bp, Homo sapien
catgaaggggcctacttgccacgct

SEQ ID NO: 849816 - DNA, 25 bp, Homo sapien
ctacgacacagcaggtcaagagcat

SEQ ID NO: 849817 - DNA, 25 bp, Homo sapien
cgacacagcaggtcaagagcatgaa

SEQ ID NO: 849818 - DNA, 25 bp, Homo sapien
ccttggtgcattcagcggaatagcc

SEQ ID NO: 849819 - DNA, 25 bp, Homo sapien
gctttcgcacgtctccctgagggat

SEQ ID NO: 849820 - DNA, 25 bp, Homo sapien
tcctggtaacgaatgcccttggtgc

SEQ ID NO: 849821 - DNA, 25 bp, Homo sapien
tgcatgtggcgttgtggaattagac

SEQ ID NO: 849822 - DNA, 25 bp, Homo sapien
tggtgccccatgcatctgattttcc

SEQ ID NO: 849823 - DNA, 25 bp, Homo sapien
acagcaggcacctatgcccagactg

SEQ ID NO: 849824 - DNA, 25 bp, Homo sapien
ttgtaaacagcaggcacctatgccc

SEQ ID NO: 849825 - DNA, 25 bp, Homo sapien
cccagacaacacttgtaaacagcag

SEQ ID NO: 849826 - DNA, 25 bp, Homo sapien
gagtaaggatctcaggagggcagtg

SEQ ID NO: 849827 - DNA, 25 bp, Homo sapien
gtaaggatctcaggagggcagtgtc

SEQ ID NO: 849828 - DNA, 25 bp, Homo sapien
taaggatctcaggagggcagtgtca

SEQ ID NO: 849829 - DNA, 25 bp, Homo sapien
agagtaaggatctcaggagggcagt

SEQ ID NO: 849830 - DNA, 25 bp, Homo sapien
catctctccataagggcatcagtga

SEQ ID NO: 849831 - DNA, 25 bp, Homo sapien
gcactgaggttgagtagggggccct

SEQ ID NO: 849832 - DNA, 25 bp, Homo sapien
ctccataagggcatcagtgactgtc

SEQ ID NO: 849833 - DNA, 25 bp, Homo sapien
gctgaaagccatagcttcgtttcca

SEQ ID NO: 849834 - DNA, 25 bp, Homo sapien
taatatgcacgaataagaccactga

SEQ ID NO: 849835 - DNA, 25 bp, Homo sapien
aatattctcagtttcacggcgcccg

SEQ ID NO: 849836 - DNA, 25 bp, Homo sapien
tgtcaagtgattgttccccagaagg

SEQ ID NO: 849837 - DNA, 25 bp, Homo sapien
gaaaatggccttcatgagatcagga

SEQ ID NO: 849838 - DNA, 25 bp, Homo sapien
gagagtcaacactctcatgtctctt

SEQ ID NO: 849839 - DNA, 25 bp, Homo sapien
gagtcaacactctcatgtctctttt

SEQ ID NO: 849840 - DNA, 25 bp, Homo sapien
ctgagagtcaacactctcatgtctc

SEQ ID NO: 849841 - DNA, 25 bp, Homo sapien
tgagagtcaacactctcatgtctct

SEQ ID NO: 849842 - DNA, 25 bp, Homo sapien
gcgactaccctatcagcacagtgca

SEQ ID NO: 849843 - DNA, 25 bp, Homo sapien
ttagtgcgactaccctatcagcaca

SEQ ID NO: 849844 - DNA, 25 bp, Homo sapien
cgccaaacttagtgcgactacccta

SEQ ID NO: 849845 - DNA, 25 bp, Homo sapien
gcacagtgcactaccacgcagaact

SEQ ID NO: 849846 - DNA, 25 bp, Homo sapien
cagcctactcattgtgaagacagga

SEQ ID NO: 849847 - DNA, 25 bp, Homo sapien
cactataaatagcacctctgttaaa

SEQ ID NO: 849848 - DNA, 25 bp, Homo sapien
tactatggaattcttgcttggggga

SEQ ID NO: 849849 - DNA, 25 bp, Homo sapien
ggtcaagtctgtacccccatcacaa

SEQ ID NO: 849850 - DNA, 25 bp, Homo sapien
ctgtggtttgattatagtcagtaat

SEQ ID NO: 849851 - DNA, 25 bp, Homo sapien
ccttcctctgagcttggctgcctct

SEQ ID NO: 849852 - DNA, 25 bp, Homo sapien
tcctctgagcttggctgcctcttgc

SEQ ID NO: 849853 - DNA, 25 bp, Homo sapien
ttcctctgagcttggctgcctcttg

SEQ ID NO: 849854 - DNA, 25 bp, Homo sapien
ctctgagcttggctgcctcttgcat

SEQ ID NO: 849855 - DNA, 25 bp, Homo sapien
agaagcagacacttcgcactgtgaa

SEQ ID NO: 849856 - DNA, 25 bp, Homo sapien
aagcagacacttcgcactgtgaatt

SEQ ID NO: 849857 - DNA, 25 bp, Homo sapien
gacacttcgcactgtgaattaacca

SEQ ID NO: 849858 - DNA, 25 bp, Homo sapien
gcagacacttcgcactgtgaattaa

SEQ ID NO: 849859 - DNA, 25 bp, Homo sapien
ttctttctccaactcataattgggc

SEQ ID NO: 849860 - DNA, 25 bp, Homo sapien
caactcataattgggcacatggctt

SEQ ID NO: 849861 - DNA, 25 bp, Homo sapien
gatggccaacatattaaaggattct

SEQ ID NO: 849862 - DNA, 25 bp, Homo sapien
gattcttgggcttgtacctttggaa

SEQ ID NO: 849863 - DNA, 25 bp, Homo sapien
ctctgaagtctgtaaggcccttagg

SEQ ID NO: 849864 - DNA, 25 bp, Homo sapien
tctgtaaggcccttaggatgatcga

SEQ ID NO: 849865 - DNA, 25 bp, Homo sapien
ttatgttatcaatatctcgaagatg

SEQ ID NO: 849866 - DNA, 25 bp, Homo sapien
ggcccttaggatgatcgatatttgt

SEQ ID NO: 849867 - DNA, 25 bp, Homo sapien
taaaggttgctcatggctggcttca

SEQ ID NO: 849868 - DNA, 25 bp, Homo sapien
aaaggttgctcatggctggcttcat

SEQ ID NO: 849869 - DNA, 25 bp, Homo sapien
ttaaaggttgctcatggctggcttc

SEQ ID NO: 849870 - DNA, 25 bp, Homo sapien
aggttgctcatggctggcttcattc

SEQ ID NO: 849871 - DNA, 25 bp, Homo sapien
tgtctccttggcagcgcagaggacc

SEQ ID NO: 849872 - DNA, 25 bp, Homo sapien
tggcttctgagccttgacggtcagt

SEQ ID NO: 849873 - DNA, 25 bp, Homo sapien
ctttgtatgataagaaaccagcatc

SEQ ID NO: 849874 - DNA, 25 bp, Homo sapien
gcagaggacctacgctcaatttggc

SEQ ID NO: 849875 - DNA, 25 bp, Homo sapien
gagagcaagtctgattgcaggcatc

SEQ ID NO: 849876 - DNA, 25 bp, Homo sapien
gcaagtctgattgcaggcatcttct

SEQ ID NO: 849877 - DNA, 25 bp, Homo sapien
ccctcctctaagttatctctgcttg

SEQ ID NO: 849878 - DNA, 25 bp, Homo sapien
tctaagttatctctgcttgggttgt

SEQ ID NO: 849879 - DNA, 25 bp, Homo sapien
gagtaatcttaaagagctgatttcc

SEQ ID NO: 849880 - DNA, 25 bp, Homo sapien
catttcaacagtgagtttgcagctg

SEQ ID NO: 849881 - DNA, 25 bp, Homo sapien
ttcaacagtgagtttgcagctgaag

SEQ ID NO: 849882 - DNA, 25 bp, Homo sapien
gagtaactgagtaatcttaaagagc

SEQ ID NO: 849883 - DNA, 25 bp, Homo sapien
cttctctgtaggcccactgactgct

SEQ ID NO: 849884 - DNA, 25 bp, Homo sapien
tgtaggcccactgactgctccccgt

SEQ ID NO: 849885 - DNA, 25 bp, Homo sapien
ccccgtgctgatcaaaatacccatt

SEQ ID NO: 849886 - DNA, 25 bp, Homo sapien
ctccccgtgctgatcaaaataccca

SEQ ID NO: 849887 - DNA, 25 bp, Homo sapien
gaataaggtcagtttgagaatgagt

SEQ ID NO: 849888 - DNA, 25 bp, Homo sapien
tgagaatgagtttctattgtcagca

SEQ ID NO: 849889 - DNA, 25 bp, Homo sapien
gagaatgagtttctattgtcagcat

SEQ ID NO: 849890 - DNA, 25 bp, Homo sapien
cttgaataaggtcagtttgagaatg

SEQ ID NO: 849891 - DNA, 25 bp, Homo sapien
taattcagagctcggtttcccataa

SEQ ID NO: 849892 - DNA, 25 bp, Homo sapien
gtgacttccaaatgaggactccaat

SEQ ID NO: 849893 - DNA, 25 bp, Homo sapien
tccagattttcgtttgtcaactcga

SEQ ID NO: 849894 - DNA, 25 bp, Homo sapien
tcaaataatactgggtggtcgccag

SEQ ID NO: 849895 - DNA, 25 bp, Homo sapien
ttgcagtgtaaacagacttccccag

SEQ ID NO: 849896 - DNA, 25 bp, Homo sapien
tggacagaggtatcacaatcagctc

SEQ ID NO: 849897 - DNA, 25 bp, Homo sapien
ctgggctggcataggtggacagagg

SEQ ID NO: 849898 - DNA, 25 bp, Homo sapien
tctaccgccatgcagaagtcaggag

SEQ ID NO: 849899 - DNA, 25 bp, Homo sapien
tcccggtcacttttgctaccgagta

SEQ ID NO: 849900 - DNA, 25 bp, Homo sapien
tcacttttgctaccgagtaaaagga

SEQ ID NO: 849901 - DNA, 25 bp, Homo sapien
tgtatccgggagtgacccttgatcc

SEQ ID NO: 849902 - DNA, 25 bp, Homo sapien
cgagtaaaaggatgcttcagttttc

SEQ ID NO: 849903 - DNA, 25 bp, Homo sapien
ctgcacataggaaggtttcaggcct

SEQ ID NO: 849904 - DNA, 25 bp, Homo sapien
taggaaggtttcaggcctgttggaa

SEQ ID NO: 849905 - DNA, 25 bp, Homo sapien
ccagactgatgctaggaggtcccct

SEQ ID NO: 849906 - DNA, 25 bp, Homo sapien
gatgctaggaggtcccctctgagga

SEQ ID NO: 849907 - DNA, 25 bp, Homo sapien
gaagacactctttctgataatcggg

SEQ ID NO: 849908 - DNA, 25 bp, Homo sapien
taatcgggcttcgaaaggtctgttc

SEQ ID NO: 849909 - DNA, 25 bp, Homo sapien
tagcactgatgatcgggcagacggt

SEQ ID NO: 849910 - DNA, 25 bp, Homo sapien
tctgttctcatcgttattttcctag

SEQ ID NO: 849911 - DNA, 25 bp, Homo sapien
ggtcaaaaagtcctgctatcctgga

SEQ ID NO: 849912 - DNA, 25 bp, Homo sapien
ttcaggtcaaaaagtcctgctatcc

SEQ ID NO: 849913 - DNA, 25 bp, Homo sapien
tttcaggtcaaaaagtcctgctatc

SEQ ID NO: 849914 - DNA, 25 bp, Homo sapien
caggtcaaaaagtcctgctatcctg

SEQ ID NO: 849915 - DNA, 25 bp, Homo sapien
tgggaagcccgagacagaggtagca

SEQ ID NO: 849916 - DNA, 25 bp, Homo sapien
gacagaggtagcagtagatttggtg

SEQ ID NO: 849917 - DNA, 25 bp, Homo sapien
atgagggccgactctctgcttcata

SEQ ID NO: 849918 - DNA, 25 bp, Homo sapien
tgatgagggccgactctctgcttca

SEQ ID NO: 849919 - DNA, 25 bp, Homo sapien
cccatcaatgttgcgggagggacca

SEQ ID NO: 849920 - DNA, 25 bp, Homo sapien
cgggagggaccacagatcctgtctt

SEQ ID NO: 849921 - DNA, 25 bp, Homo sapien
catttaggggcatatgctcagtgag

SEQ ID NO: 849922 - DNA, 25 bp, Homo sapien
acagatcctgtcttcatctcatatt

SEQ ID NO: 849923 - DNA, 25 bp, Homo sapien
gaacagcgcaggctcatcagcattg

SEQ ID NO: 849924 - DNA, 25 bp, Homo sapien
tattggtgcagccagatcagagacc

SEQ ID NO: 849925 - DNA, 25 bp, Homo sapien
tgagcaggagtagcttggcaagccc

SEQ ID NO: 849926 - DNA, 25 bp, Homo sapien
gagacctcatgcagagaacacaggg

SEQ ID NO: 849927 - DNA, 25 bp, Homo sapien
tacgattacgttacacaaatcaaag

SEQ ID NO: 849928 - DNA, 25 bp, Homo sapien
atttcagcagaatgacggatgtgaa

SEQ ID NO: 849929 - DNA, 25 bp, Homo sapien
tgctctatacccagggtaatgggtt

SEQ ID NO: 849930 - DNA, 25 bp, Homo sapien
tgggttgatatgatccatacgatta

SEQ ID NO: 849931 - DNA, 25 bp, Homo sapien
taataaatcatggatgcttctgctc

SEQ ID NO: 849932 - DNA, 25 bp, Homo sapien
aataataaatcatggatgcttctgc

SEQ ID NO: 849933 - DNA, 25 bp, Homo sapien
aataaatcatggatgcttctgctcc

SEQ ID NO: 849934 - DNA, 25 bp, Homo sapien
taaatcatggatgcttctgctccag

SEQ ID NO: 849935 - DNA, 25 bp, Homo sapien
agaggcgttcaggtgcacctctgtg

SEQ ID NO: 849936 - DNA, 25 bp, Homo sapien
tctgtgagaaaacctaaatctacgc

SEQ ID NO: 849937 - DNA, 25 bp, Homo sapien
tctcgctcatcagagagtcctgaag

SEQ ID NO: 849938 - DNA, 25 bp, Homo sapien
tacacagcaagaggcgttcaggtgc

SEQ ID NO: 849939 - DNA, 25 bp, Homo sapien
tcagctccagcttgatgaaatcttc

SEQ ID NO: 849940 - DNA, 25 bp, Homo sapien
tagaaagaaatgtcagcgctagttt

SEQ ID NO: 849941 - DNA, 25 bp, Homo sapien
aaatgtcagcgctagtttccccttg

SEQ ID NO: 849942 - DNA, 25 bp, Homo sapien
tcagcgctagtttccccttggaaag

SEQ ID NO: 849943 - DNA, 25 bp, Homo sapien
ggctccccatgagttgacaagcaac

SEQ ID NO: 849944 - DNA, 25 bp, Homo sapien
tgacgaaagtggctccccatgagtt

SEQ ID NO: 849945 - DNA, 25 bp, Homo sapien
caccctgaggtgacgaaagtggctc

SEQ ID NO: 849946 - DNA, 25 bp, Homo sapien
ccggaccaccctgaggtgacgaaag

SEQ ID NO: 849947 - DNA, 25 bp, Homo sapien
tgtgtgtccacctctagtcctgctc

SEQ ID NO: 849948 - DNA, 25 bp, Homo sapien
tcatgaactgtgaccaaattcctct

SEQ ID NO: 849949 - DNA, 25 bp, Homo sapien
tctggaaagcaatatgtagtcatga

SEQ ID NO: 849950 - DNA, 25 bp, Homo sapien
gaaagcaatatgtagtcatgaactg

SEQ ID NO: 849951 - DNA, 25 bp, Homo sapien
tatgtagtcatgaactgtgaccaaa

SEQ ID NO: 849952 - DNA, 25 bp, Homo sapien
ttttctgagtcgagaatcttccact

SEQ ID NO: 849953 - DNA, 25 bp, Homo sapien
tatctcattaacttagtgtacactg

SEQ ID NO: 849954 - DNA, 25 bp, Homo sapien
gtgcataagatgctgatggtatctc

SEQ ID NO: 849955 - DNA, 25 bp, Homo sapien
gtgtacactgactcattgttttctg

SEQ ID NO: 849956 - DNA, 25 bp, Homo sapien
tactttgtcttataaggcacagggg

SEQ ID NO: 849957 - DNA, 25 bp, Homo sapien
actttgtcttataaggcacaggggg

SEQ ID NO: 849958 - DNA, 25 bp, Homo sapien
cctagggttttactgggtagagcag

SEQ ID NO: 849959 - DNA, 25 bp, Homo sapien
ccatagcatgcatatcagactgtca

SEQ ID NO: 849960 - DNA, 25 bp, Homo sapien
tgtcatatggctgcagaaacctagg

SEQ ID NO: 849961 - DNA, 25 bp, Homo sapien
tctagatctcgtggcctcaggctat

SEQ ID NO: 849962 - DNA, 25 bp, Homo sapien
ccagaaaacttggtgttaaacacat

SEQ ID NO: 849963 - DNA, 25 bp, Homo sapien
aataatccctgtcgtacatcgtctg

SEQ ID NO: 849964 - DNA, 25 bp, Homo sapien
tgttgcaaaccttggttattcccca

SEQ ID NO: 849965 - DNA, 25 bp, Homo sapien
aaggtagcacaacatttctggagaa

SEQ ID NO: 849966 - DNA, 25 bp, Homo sapien
tgaaaggtagcacaacatttctgga

SEQ ID NO: 849967 - DNA, 25 bp, Homo sapien
ttttctcccagataccaaatagcag

SEQ ID NO: 849968 - DNA, 25 bp, Homo sapien
tcccagataccaaatagcagtaaat

SEQ ID NO: 849969 - DNA, 25 bp, Homo sapien
gaaagcatgaaaaacatgagtattt

SEQ ID NO: 849970 - DNA, 25 bp, Homo sapien
atgagtatttttctcccagatacca

SEQ ID NO: 849971 - DNA, 25 bp, Homo sapien
acattcctctctgcagtgacccggt

SEQ ID NO: 849972 - DNA, 25 bp, Homo sapien
cggtgccactggtcatcgttgagag

SEQ ID NO: 849973 - DNA, 25 bp, Homo sapien
tcactacaatctctactggcccatt

SEQ ID NO: 849974 - DNA, 25 bp, Homo sapien
gccttgcggatctgctgcggtagcc

SEQ ID NO: 849975 - DNA, 25 bp, Homo sapien
atataaacccagttatctggttgaa

SEQ ID NO: 849976 - DNA, 25 bp, Homo sapien
tttctcctgttctatatgctaccat

SEQ ID NO: 849977 - DNA, 25 bp, Homo sapien
atttctcctgttctatatgctacca

SEQ ID NO: 849978 - DNA, 25 bp, Homo sapien
ttccatagctggtgcaatggcccga

SEQ ID NO: 849979 - DNA, 25 bp, Homo sapien
tagagcaatcgcaggagtaaccgtg

SEQ ID NO: 849980 - DNA, 25 bp, Homo sapien
cgagcatccggatatgaacccagat

SEQ ID NO: 849981 - DNA, 25 bp, Homo sapien
gtaaccgtggtatctctctaggcat

SEQ ID NO: 849982 - DNA, 25 bp, Homo sapien
ttctggtgagtgtagcttgaatcca

SEQ ID NO: 849983 - DNA, 25 bp, Homo sapien
tgagtgtagcttgaatccagtctct

SEQ ID NO: 849984 - DNA, 25 bp, Homo sapien
agctttctggtgagtgtagcttgaa

SEQ ID NO: 849985 - DNA, 25 bp, Homo sapien
tggtgagtgtagcttgaatccagtc

SEQ ID NO: 849986 - DNA, 25 bp, Homo sapien
tgtgtgccgcaggaaaatcatggaa

SEQ ID NO: 849987 - DNA, 25 bp, Homo sapien
gttctgcaggcccattcaattgtgt

SEQ ID NO: 849988 - DNA, 25 bp, Homo sapien
ccattcaattgtgtgccgcaggaaa

SEQ ID NO: 849989 - DNA, 25 bp, Homo sapien
tgcaggcccattcaattgtgtgccg

SEQ ID NO: 849990 - DNA, 25 bp, Homo sapien
gaactgctgtgcaggcaccaggcta

SEQ ID NO: 849991 - DNA, 25 bp, Homo sapien
aactgctgtgcaggcaccaggctac

SEQ ID NO: 849992 - DNA, 25 bp, Homo sapien
caggaactgctgtgcaggcaccagg

SEQ ID NO: 849993 - DNA, 25 bp, Homo sapien
tcacaggaactgctgtgcaggcacc

SEQ ID NO: 849994 - DNA, 25 bp, Homo sapien
gccaatgccaaagctctttgtagag

SEQ ID NO: 849995 - DNA, 25 bp, Homo sapien
ctgcaagcatagacctatactccca

SEQ ID NO: 849996 - DNA, 25 bp, Homo sapien
atagacctatactcccaaaggaagg

SEQ ID NO: 849997 - DNA, 25 bp, Homo sapien
tattagcgatgttttccacatctgc

SEQ ID NO: 849998 - DNA, 25 bp, Homo sapien
aagcatagacctatactcccaaagg

SEQ ID NO: 849999 - DNA, 25 bp, Homo sapien
caaatctgtcaaacctcctgttcca

SEQ ID NO: 850000 - DNA, 25 bp, Homo sapien
aaatctgtcaaacctcctgttccaa

SEQ ID NO: 850001 - DNA, 25 bp, Homo sapien
cttccaaatctgtcaaacctcctgt

SEQ ID NO: 850002 - DNA, 25 bp, Homo sapien
tccaaatctgtcaaacctcctgttc

SEQ ID NO: 850003 - DNA, 25 bp, Homo sapien
tgagcggccggaagctcatagttgt

SEQ ID NO: 850004 - DNA, 25 bp, Homo sapien
taatgcagtagcttgagcggccgga

SEQ ID NO: 850005 - DNA, 25 bp, Homo sapien
tcagagtatggccatgtagtgtaat

SEQ ID NO: 850006 - DNA, 25 bp, Homo sapien
agagtatggccatgtagtgtaatgc

SEQ ID NO: 850007 - DNA, 25 bp, Homo sapien
ggacacatacggtcacaatcctcat

SEQ ID NO: 850008 - DNA, 25 bp, Homo sapien
gatgtagttatttcagcatgggaga

SEQ ID NO: 850009 - DNA, 25 bp, Homo sapien
cacttgctgggacacatacggtcac

SEQ ID NO: 850010 - DNA, 25 bp, Homo sapien
catacggtcacaatcctcatagctg

SEQ ID NO: 850011 - DNA, 25 bp, Homo sapien
tggtccccttcatcgtctggactgg

SEQ ID NO: 850012 - DNA, 25 bp, Homo sapien
gtccccttcatcgtctggactggct

SEQ ID NO: 850013 - DNA, 25 bp, Homo sapien
ttggtccccttcatcgtctggactg

SEQ ID NO: 850014 - DNA, 25 bp, Homo sapien
tcttggtccccttcatcgtctggac

SEQ ID NO: 850015 - DNA, 25 bp, Homo sapien
gctggagtctctggcatttgttgct

SEQ ID NO: 850016 - DNA, 25 bp, Homo sapien
cagtgggtttgacgaggactgccaa

SEQ ID NO: 850017 - DNA, 25 bp, Homo sapien
tctgctggtcgggagcgttgtctac

SEQ ID NO: 850018 - DNA, 25 bp, Homo sapien
gaaagttatatcgtagccacatccc

SEQ ID NO: 850019 - DNA, 25 bp, Homo sapien
cctgagaggttagggctgaagtgag

SEQ ID NO: 850020 - DNA, 25 bp, Homo sapien
ctgtgatcctgctactgtactcaag

SEQ ID NO: 850021 - DNA, 25 bp, Homo sapien
tgagcctgagaggttagggctgaag

SEQ ID NO: 850022 - DNA, 25 bp, Homo sapien
tgtgatcctgctactgtactcaagc

SEQ ID NO: 850023 - DNA, 25 bp, Homo sapien
tagcgaatacagttgaggaccaaat

SEQ ID NO: 850024 - DNA, 25 bp, Homo sapien
gcagtgggcatgtgaggtagcgaat

SEQ ID NO: 850025 - DNA, 25 bp, Homo sapien
ggcatgtgaggtagcgaatacagtt

SEQ ID NO: 850026 - DNA, 25 bp, Homo sapien
tgaggtagcgaatacagttgaggac

SEQ ID NO: 850027 - DNA, 25 bp, Homo sapien
agggtactgatcgtaggcaggagat

SEQ ID NO: 850028 - DNA, 25 bp, Homo sapien
gtagtgctgggagcttttcatctct

SEQ ID NO: 850029 - DNA, 25 bp, Homo sapien
gtactgatcgtaggcaggagatgta

SEQ ID NO: 850030 - DNA, 25 bp, Homo sapien
gagatgtagtgctgggagcttttca

SEQ ID NO: 850031 - DNA, 25 bp, Homo sapien
gttcctgtggtctacgtcaatattg

SEQ ID NO: 850032 - DNA, 25 bp, Homo sapien
gggtgccacccaggttgtatcgaat

SEQ ID NO: 850033 - DNA, 25 bp, Homo sapien
tcaatattgtatggctctcgggtgc

SEQ ID NO: 850034 - DNA, 25 bp, Homo sapien
tctcgtggcgggtgatgttgacact

SEQ ID NO: 850035 - DNA, 25 bp, Homo sapien
gtaatttatatgtacatgtatgtat

SEQ ID NO: 850036 - DNA, 25 bp, Homo sapien
tatgtaatttatatgtacatgtatg

SEQ ID NO: 850037 - DNA, 25 bp, Homo sapien
aatttatatgtacatgtatgtatac

SEQ ID NO: 850038 - DNA, 25 bp, Homo sapien
tgtaatttatatgtacatgtatgta

SEQ ID NO: 850039 - DNA, 25 bp, Homo sapien
aaaccatccctttgtgtgccgaaag

SEQ ID NO: 850040 - DNA, 25 bp, Homo sapien
tttgtgtgccgaaagcccacagtca

SEQ ID NO: 850041 - DNA, 25 bp, Homo sapien
caatgaacctgaagtaaaatttgag

SEQ ID NO: 850042 - DNA, 25 bp, Homo sapien
ataaaaccatccctttgtgtgccga

SEQ ID NO: 850043 - DNA, 25 bp, Homo sapien
tccgaattacttccacgtctgcaag

SEQ ID NO: 850044 - DNA, 25 bp, Homo sapien
aagcactttccgaattacttccacg

SEQ ID NO: 850045 - DNA, 25 bp, Homo sapien
ttacttccacgtctgcaaggcctcc

SEQ ID NO: 850046 - DNA, 25 bp, Homo sapien
tgcaaagcactttccgaattacttc

SEQ ID NO: 850047 - DNA, 25 bp, Homo sapien
caatatcaggaaggatgctcggata

SEQ ID NO: 850048 - DNA, 25 bp, Homo sapien
tatcaggaaggatgctcggatagga

SEQ ID NO: 850049 - DNA, 25 bp, Homo sapien
atcaggaaggatgctcggataggat

SEQ ID NO: 850050 - DNA, 25 bp, Homo sapien
ggatgctcggataggatggcagcca

SEQ ID NO: 850051 - DNA, 25 bp, Homo sapien
ggcctcggcgtaagactcaaatcat

SEQ ID NO: 850052 - DNA, 25 bp, Homo sapien
agtagtacactcatcccatgggcca

SEQ ID NO: 850053 - DNA, 25 bp, Homo sapien
gactggagtccagctgatgacgtgc

SEQ ID NO: 850054 - DNA, 25 bp, Homo sapien
ccagctgggctcaaggcgctttaga

SEQ ID NO: 850055 - DNA, 25 bp, Homo sapien
gatggtaactcacagaaggataatg

SEQ ID NO: 850056 - DNA, 25 bp, Homo sapien
tcggatgaacttggcagatggtaac

SEQ ID NO: 850057 - DNA, 25 bp, Homo sapien
ttttcccagaaagagcgacttggga

SEQ ID NO: 850058 - DNA, 25 bp, Homo sapien
aattgaagagggtgtcggatgaact

SEQ ID NO: 850059 - DNA, 25 bp, Homo sapien
tagagccagaatagcaccagggaag

SEQ ID NO: 850060 - DNA, 25 bp, Homo sapien
ggtataaatcttagaaggctgctgg

SEQ ID NO: 850061 - DNA, 25 bp, Homo sapien
ggacaggaatgtgccccatgctgac

SEQ ID NO: 850062 - DNA, 25 bp, Homo sapien
taacgattgatggtcctcagggaca

SEQ ID NO: 850063 - DNA, 25 bp, Homo sapien
ctgaatggcttaatgtggtactctt

SEQ ID NO: 850064 - DNA, 25 bp, Homo sapien
gaatggcttaatgtggtactcttcc

SEQ ID NO: 850065 - DNA, 25 bp, Homo sapien
aatggcttaatgtggtactcttccc

SEQ ID NO: 850066 - DNA, 25 bp, Homo sapien
tgaatggcttaatgtggtactcttc

SEQ ID NO: 850067 - DNA, 25 bp, Homo sapien
taacacaaagcgttgctccttcacc

SEQ ID NO: 850068 - DNA, 25 bp, Homo sapien
tgtctttaagtaacacaaagcgttg

SEQ ID NO: 850069 - DNA, 25 bp, Homo sapien
ggcaaagtgtgtctttaagtaacac

SEQ ID NO: 850070 - DNA, 25 bp, Homo sapien
taatcacaatggcaaagtgtgtctt

SEQ ID NO: 850071 - DNA, 25 bp, Homo sapien
agggggacgggtgctgaggcatgag

SEQ ID NO: 850072 - DNA, 25 bp, Homo sapien
agaatttacagttcttggctgggtg

SEQ ID NO: 850073 - DNA, 25 bp, Homo sapien
gggggacgggtgctgaggcatgaga

SEQ ID NO: 850074 - DNA, 25 bp, Homo sapien
gccaagttattgtgtagcaaattta

SEQ ID NO: 850075 - DNA, 25 bp, Homo sapien
aggccacccgattgactgtcaccag

SEQ ID NO: 850076 - DNA, 25 bp, Homo sapien
gatttttgcttatagcctgcttttc

SEQ ID NO: 850077 - DNA, 25 bp, Homo sapien
taatcactacatggtaggccacccg

SEQ ID NO: 850078 - DNA, 25 bp, Homo sapien
gattagcatggaaagggttactgtg

SEQ ID NO: 850079 - DNA, 25 bp, Homo sapien
cacttcgtgtcttacttacactacg

SEQ ID NO: 850080 - DNA, 25 bp, Homo sapien
tacactacgcttgttgtggatggca

SEQ ID NO: 850081 - DNA, 25 bp, Homo sapien
tgtggatggcattaataacgggatt

SEQ ID NO: 850082 - DNA, 25 bp, Homo sapien
actggccgggtcagacttcagaacc

SEQ ID NO: 850083 - DNA, 25 bp, Homo sapien
cggttcaggtgtgcccctcgctttg

SEQ ID NO: 850084 - DNA, 25 bp, Homo sapien
gaggaccgtcctttgtcggccggca

SEQ ID NO: 850085 - DNA, 25 bp, Homo sapien
cgggcagctttgagtccaccgctct

SEQ ID NO: 850086 - DNA, 25 bp, Homo sapien
ccagcgggtgaacaggcaggccagc

SEQ ID NO: 850087 - DNA, 25 bp, Homo sapien
catttggccgtaggtgaatgaacgg

SEQ ID NO: 850088 - DNA, 25 bp, Homo sapien
ctagtcccatttggccgtaggtgaa

SEQ ID NO: 850089 - DNA, 25 bp, Homo sapien
tcccatttggccgtaggtgaatgaa

SEQ ID NO: 850090 - DNA, 25 bp, Homo sapien
tctagtcccatttggccgtaggtga

SEQ ID NO: 850091 - DNA, 25 bp, Homo sapien
tactccttggaaaatcagactgaag

SEQ ID NO: 850092 - DNA, 25 bp, Homo sapien
caggcctcacacgtagaacagtggt

SEQ ID NO: 850093 - DNA, 25 bp, Homo sapien
tcggtttgaaatcactgcctgggtg

SEQ ID NO: 850094 - DNA, 25 bp, Homo sapien
tcagggctggtcatctgggcctctt

SEQ ID NO: 850095 - DNA, 25 bp, Homo sapien
atggatttgtctttcaaaacgttgt

SEQ ID NO: 850096 - DNA, 25 bp, Homo sapien
ctgaaaatctgtccgtctcattaaa

SEQ ID NO: 850097 - DNA, 25 bp, Homo sapien
aatctgtccgtctcattaaaaatgg

SEQ ID NO: 850098 - DNA, 25 bp, Homo sapien
gaaaatctgtccgtctcattaaaaa

SEQ ID NO: 850099 - DNA, 25 bp, Homo sapien
tggagaggcaaccagtgaatcctgg

SEQ ID NO: 850100 - DNA, 25 bp, Homo sapien
tgtgaatctcttggtcaattttccc

SEQ ID NO: 850101 - DNA, 25 bp, Homo sapien
gagccgaggcgtttgtctgcctcaa

SEQ ID NO: 850102 - DNA, 25 bp, Homo sapien
gggcgatctggttgaactggactct

SEQ ID NO: 850103 - DNA, 25 bp, Homo sapien
ctatagaaatggtgcatggaagtgt

SEQ ID NO: 850104 - DNA, 25 bp, Homo sapien
gagaagagtgatcatcagcagcaaa

SEQ ID NO: 850105 - DNA, 25 bp, Homo sapien
gagtgatcatcagcagcaaaaggca

SEQ ID NO: 850106 - DNA, 25 bp, Homo sapien
tggtaagaaactatagaaatggtgc

SEQ ID NO: 850107 - DNA, 25 bp, Homo sapien
tctggagggtgcagtcctggaggcg

SEQ ID NO: 850108 - DNA, 25 bp, Homo sapien
gcaagccattggtgtcaattacatc

SEQ ID NO: 850109 - DNA, 25 bp, Homo sapien
acatctggagggtgcagtcctggag

SEQ ID NO: 850110 - DNA, 25 bp, Homo sapien
ctagtgcaagccattggtgtcaatt

SEQ ID NO: 850111 - DNA, 25 bp, Homo sapien
tctgctgctgcatgggtgcaatgcg

SEQ ID NO: 850112 - DNA, 25 bp, Homo sapien
ctgcatgggtgcaatgcgggataca

SEQ ID NO: 850113 - DNA, 25 bp, Homo sapien
ctgctgcatgggtgcaatgcgggat

SEQ ID NO: 850114 - DNA, 25 bp, Homo sapien
catgggtgcaatgcgggatacagcc

SEQ ID NO: 850115 - DNA, 25 bp, Homo sapien
cacttttaaccccatgcacaactgg

SEQ ID NO: 850116 - DNA, 25 bp, Homo sapien
ttaaccccatgcacaactggtggca

SEQ ID NO: 850117 - DNA, 25 bp, Homo sapien
ccatgcacaactggtggcattcaat

SEQ ID NO: 850118 - DNA, 25 bp, Homo sapien
gcattcaatgtatttgtagatgagc

SEQ ID NO: 850119 - DNA, 25 bp, Homo sapien
tcctgctgtttctctttgcacaagg

SEQ ID NO: 850120 - DNA, 25 bp, Homo sapien
ctgttcctgctgtttctctttgcac

SEQ ID NO: 850121 - DNA, 25 bp, Homo sapien
gttcctgctgtttctctttgcacaa

SEQ ID NO: 850122 - DNA, 25 bp, Homo sapien
cctgctgtttctctttgcacaaggc

SEQ ID NO: 850123 - DNA, 25 bp, Homo sapien
tatttcttcatgcaactcttcaaca

SEQ ID NO: 850124 - DNA, 25 bp, Homo sapien
ccatttcagatggacccgtcttgcc

SEQ ID NO: 850125 - DNA, 25 bp, Homo sapien
gaaatctccatttcagatggacccg

SEQ ID NO: 850126 - DNA, 25 bp, Homo sapien
aatgaaatctccatttcagatggac

SEQ ID NO: 850127 - DNA, 25 bp, Homo sapien
gccttgtcctggattatatggaaaa

SEQ ID NO: 850128 - DNA, 25 bp, Homo sapien
ggattatatggaaaatccgcactgg

SEQ ID NO: 850129 - DNA, 25 bp, Homo sapien
ccaatgatagccgagtttctgttga

SEQ ID NO: 850130 - DNA, 25 bp, Homo sapien
tctgttgactccatttcttatagct

SEQ ID NO: 850131 - DNA, 25 bp, Homo sapien
gcttcgttggtatggtaggtgccct

SEQ ID NO: 850132 - DNA, 25 bp, Homo sapien
taggtgcccttgtggcggaacatgt

SEQ ID NO: 850133 - DNA, 25 bp, Homo sapien
gaacatgtaccggatcaggaagacc

SEQ ID NO: 850134 - DNA, 25 bp, Homo sapien
cgttgttcatgatggcggcgtccgc

SEQ ID NO: 850135 - DNA, 25 bp, Homo sapien
tggtatcagtcaggaaccccagatg

SEQ ID NO: 850136 - DNA, 25 bp, Homo sapien
tggtctaagactacatacgtggaac

SEQ ID NO: 850137 - DNA, 25 bp, Homo sapien
gctcaagagtatgaagcagggtgct

SEQ ID NO: 850138 - DNA, 25 bp, Homo sapien
tctgtaacagcccattaaggttgac

SEQ ID NO: 850139 - DNA, 25 bp, Homo sapien
tcctctgggaagcaacaggtaccag

SEQ ID NO: 850140 - DNA, 25 bp, Homo sapien
gccacattgtaaccctcttgaagga

SEQ ID NO: 850141 - DNA, 25 bp, Homo sapien
cagccgggccatcagaacaatagca

SEQ ID NO: 850142 - DNA, 25 bp, Homo sapien
tgcatgttcaagtcccacagctgtg

SEQ ID NO: 850143 - DNA, 25 bp, Homo sapien
taactgagcagctgtagagccatgc

SEQ ID NO: 850144 - DNA, 25 bp, Homo sapien
caaaagttcgaggacttgaccaagg

SEQ ID NO: 850145 - DNA, 25 bp, Homo sapien
aaagtttgcagcactaccatgcagg

SEQ ID NO: 850146 - DNA, 25 bp, Homo sapien
ggcacctcgcaactgtcttatgaag

SEQ ID NO: 850147 - DNA, 25 bp, Homo sapien
tctgcagtcaccacgctcactgaaa

SEQ ID NO: 850148 - DNA, 25 bp, Homo sapien
ggatggaatcctgtttgactttaca

SEQ ID NO: 850149 - DNA, 25 bp, Homo sapien
caaagaatattaggcatacgtacat

SEQ ID NO: 850150 - DNA, 25 bp, Homo sapien
tagcccagcttttcacagcactaac

SEQ ID NO: 850151 - DNA, 25 bp, Homo sapien
aattgctattgattggccttgggga

SEQ ID NO: 850152 - DNA, 25 bp, Homo sapien
gcgaagcattcatgaccaatctttt

SEQ ID NO: 850153 - DNA, 25 bp, Homo sapien
ctgttggatcacattcgcgaagcat

SEQ ID NO: 850154 - DNA, 25 bp, Homo sapien
ctttttgacgcttgatgctttctga

SEQ ID NO: 850155 - DNA, 25 bp, Homo sapien
gctgttaacaggtgaaattccacta

SEQ ID NO: 850156 - DNA, 25 bp, Homo sapien
gacacctcatcatagagcactatag

SEQ ID NO: 850157 - DNA, 25 bp, Homo sapien
agtgcagacacctcatcatagagca

SEQ ID NO: 850158 - DNA, 25 bp, Homo sapien
ggccgtggctgttaacaggtgaaat

SEQ ID NO: 850159 - DNA, 25 bp, Homo sapien
tgtagcaccatcgccggctcaggct

SEQ ID NO: 850160 - DNA, 25 bp, Homo sapien
gagcgtggcggaagtcacagagcag

SEQ ID NO: 850161 - DNA, 25 bp, Homo sapien
ccgtgggagcgtggcggaagtcaca

SEQ ID NO: 850162 - DNA, 25 bp, Homo sapien
gccacccgtgggagcgtggcggaag

SEQ ID NO: 850163 - DNA, 25 bp, Homo sapien
caagcttggcggtgttgagctcagt

SEQ ID NO: 850164 - DNA, 25 bp, Homo sapien
cgcagctcaccaccaagtcattcat

SEQ ID NO: 850165 - DNA, 25 bp, Homo sapien
gaggcctcaagctgcacatgcgggt

SEQ ID NO: 850166 - DNA, 25 bp, Homo sapien
gatccaggcacatggccggctccag

SEQ ID NO: 850167 - DNA, 25 bp, Homo sapien
gcatggggtcgagggctcgcagccc

SEQ ID NO: 850168 - DNA, 25 bp, Homo sapien
atggggtcgagggctcgcagccctc

SEQ ID NO: 850169 - DNA, 25 bp, Homo sapien
catggggtcgagggctcgcagccct

SEQ ID NO: 850170 - DNA, 25 bp, Homo sapien
tgcgcggcacaagggaattgcagaa

SEQ ID NO: 850171 - DNA, 25 bp, Homo sapien
gaactaacaaaaggcagattattag

SEQ ID NO: 850172 - DNA, 25 bp, Homo sapien
gggttcagatacttacatttgttac

SEQ ID NO: 850173 - DNA, 25 bp, Homo sapien
gaatgataatccaataatccaatgg

SEQ ID NO: 850174 - DNA, 25 bp, Homo sapien
tgagtaccatggctaaaggcaaacg

SEQ ID NO: 850175 - DNA, 25 bp, Homo sapien
gctaaaggcaaacgatctttatggg

SEQ ID NO: 850176 - DNA, 25 bp, Homo sapien
atgcaagtctgtggggctgaatctg

SEQ ID NO: 850177 - DNA, 25 bp, Homo sapien
gcaaacgatctttatgggatacaga

SEQ ID NO: 850178 - DNA, 25 bp, Homo sapien
gctttgcctctccaagcattcgaga

SEQ ID NO: 850179 - DNA, 25 bp, Homo sapien
aaagaccgtctggtgccatattgtc

SEQ ID NO: 850180 - DNA, 25 bp, Homo sapien
agcttcagtggaaacccttggccat

SEQ ID NO: 850181 - DNA, 25 bp, Homo sapien
tcaaggtcggtgaaggtcaaaatca

SEQ ID NO: 850182 - DNA, 25 bp, Homo sapien
ggcttcgtcgggctttcatcaggac

SEQ ID NO: 850183 - DNA, 25 bp, Homo sapien
aggcttcgtcgggctttcatcagga

SEQ ID NO: 850184 - DNA, 25 bp, Homo sapien
gcttcgtcgggctttcatcaggaca

SEQ ID NO: 850185 - DNA, 25 bp, Homo sapien
tctggaattacacgaacgccctggg

SEQ ID NO: 850186 - DNA, 25 bp, Homo sapien
ccaggcgagtttggctttatacgga

SEQ ID NO: 850187 - DNA, 25 bp, Homo sapien
tatacggataaaagcaacatgcaag

SEQ ID NO: 850188 - DNA, 25 bp, Homo sapien
ggattttgtgcacgaagtgtcccaa

SEQ ID NO: 850189 - DNA, 25 bp, Homo sapien
tacatctgtcatctcgaatcccttc

SEQ ID NO: 850190 - DNA, 25 bp, Homo sapien
caaagccgtttgatgctcgatggca

SEQ ID NO: 850191 - DNA, 25 bp, Homo sapien
gactgcgagagctccagaaatgtga

SEQ ID NO: 850192 - DNA, 25 bp, Homo sapien
tctgtcatagatcatgtgggttaca

SEQ ID NO: 850193 - DNA, 25 bp, Homo sapien
agctctttctggagcttagtgagat

SEQ ID NO: 850194 - DNA, 25 bp, Homo sapien
ctctttctggagcttagtgagattc

SEQ ID NO: 850195 - DNA, 25 bp, Homo sapien
gagacccactgctgatttggacacc

SEQ ID NO: 850196 - DNA, 25 bp, Homo sapien
cactgctgatttggacacctgcagc

SEQ ID NO: 850197 - DNA, 25 bp, Homo sapien
aaagcatacagactgtgtttctact

SEQ ID NO: 850198 - DNA, 25 bp, Homo sapien
tggaagagtggtgtccacattttcc

SEQ ID NO: 850199 - DNA, 25 bp, Homo sapien
cttttggaagagtggtgtccacatt

SEQ ID NO: 850200 - DNA, 25 bp, Homo sapien
ccaaagcatacagactgtgtttcta

SEQ ID NO: 850201 - DNA, 25 bp, Homo sapien
tatttaacgatgcttgttgagttgc

SEQ ID NO: 850202 - DNA, 25 bp, Homo sapien
atgattctgttgtgaacaagaacaa

SEQ ID NO: 850203 - DNA, 25 bp, Homo sapien
tttgaatgtcgtccccagtggctcg

SEQ ID NO: 850204 - DNA, 25 bp, Homo sapien
tccaagtagcagaccaggcaagtcc

SEQ ID NO: 850205 - DNA, 25 bp, Homo sapien
cctggcatctagaatattgggagtc

SEQ ID NO: 850206 - DNA, 25 bp, Homo sapien
gcatctgatatagccagagcctgtg

SEQ ID NO: 850207 - DNA, 25 bp, Homo sapien
tgtccgctggctcacgtaggcaggt

SEQ ID NO: 850208 - DNA, 25 bp, Homo sapien
tgacgtcaactatgaggcctcggct

SEQ ID NO: 850209 - DNA, 25 bp, Homo sapien
tagatatgtatcaatggaccagaac

SEQ ID NO: 850210 - DNA, 25 bp, Homo sapien
agtctcacagcttatgcaaacatta

SEQ ID NO: 850211 - DNA, 25 bp, Homo sapien
gacccacagaaatatggctagttga

SEQ ID NO: 850212 - DNA, 25 bp, Homo sapien
catggaggaaggatagtctttcaac

SEQ ID NO: 850213 - DNA, 25 bp, Homo sapien
tagggcttaatgacagctcttccac

SEQ ID NO: 850214 - DNA, 25 bp, Homo sapien
cactttagggcttaatgacagctct

SEQ ID NO: 850215 - DNA, 25 bp, Homo sapien
gggcctctctttacagcccacttta

SEQ ID NO: 850216 - DNA, 25 bp, Homo sapien
acagcccactttagggcttaatgac

SEQ ID NO: 850217 - DNA, 25 bp, Homo sapien
gatgctgataagcagcccagtctcg

SEQ ID NO: 850218 - DNA, 25 bp, Homo sapien
acatgatgctgataagcagcccagt

SEQ ID NO: 850219 - DNA, 25 bp, Homo sapien
cagtctcgctgttgagggtgtaata

SEQ ID NO: 850220 - DNA, 25 bp, Homo sapien
gataagcagcccagtctcgctgttg

SEQ ID NO: 850221 - DNA, 25 bp, Homo sapien
tgctcggcagcgtctgagaactcag

SEQ ID NO: 850222 - DNA, 25 bp, Homo sapien
gcatgacgtgtttgccccacttgag

SEQ ID NO: 850223 - DNA, 25 bp, Homo sapien
gaatagtcagtctgcttgcatgacg

SEQ ID NO: 850224 - DNA, 25 bp, Homo sapien
ttgatggagtgcgttgctcacccgc

SEQ ID NO: 850225 - DNA, 25 bp, Homo sapien
acatcgctagagaggctgtgcgtga

SEQ ID NO: 850226 - DNA, 25 bp, Homo sapien
gaaaaactgagctgagacatcgcta

SEQ ID NO: 850227 - DNA, 25 bp, Homo sapien
aaaagcccagccagccgctgaaaaa

SEQ ID NO: 850228 - DNA, 25 bp, Homo sapien
ctgtgcgtgagcagccaaaggctat

SEQ ID NO: 850229 - DNA, 25 bp, Homo sapien
atgtagtgttccgacggcttttcca

SEQ ID NO: 850230 - DNA, 25 bp, Homo sapien
cttttccaatgtgtccgaaattgct

SEQ ID NO: 850231 - DNA, 25 bp, Homo sapien
caatgtgtccgaaattgctttaagt

SEQ ID NO: 850232 - DNA, 25 bp, Homo sapien
tgttgttttggaatgtagtgttccg

SEQ ID NO: 850233 - DNA, 25 bp, Homo sapien
taagagaagggaatgtattgagttt

SEQ ID NO: 850234 - DNA, 25 bp, Homo sapien
agggaatgtattgagtttaggaaga

SEQ ID NO: 850235 - DNA, 25 bp, Homo sapien
agaagggaatgtattgagtttagga

SEQ ID NO: 850236 - DNA, 25 bp, Homo sapien
ggaatgtattgagtttaggaagaaa

SEQ ID NO: 850237 - DNA, 25 bp, Homo sapien
acgcctagaagtaggagtggccctt

SEQ ID NO: 850238 - DNA, 25 bp, Homo sapien
ttggaaccaaccatcatcacatgtg

SEQ ID NO: 850239 - DNA, 25 bp, Homo sapien
catagtacctaaagctgtaggtgcc

SEQ ID NO: 850240 - DNA, 25 bp, Homo sapien
gacatctgggaaccaacgcctagaa

SEQ ID NO: 850241 - DNA, 25 bp, Homo sapien
tctccaaaccctgttgccaatactg

SEQ ID NO: 850242 - DNA, 25 bp, Homo sapien
ccaaaccctgttgccaatactgctg

SEQ ID NO: 850243 - DNA, 25 bp, Homo sapien
cctgttgccaatactgctgggtttc

SEQ ID NO: 850244 - DNA, 25 bp, Homo sapien
tgttgccaatactgctgggtttcca

SEQ ID NO: 850245 - DNA, 25 bp, Homo sapien
gcagctgggctgccctttccatatg

SEQ ID NO: 850246 - DNA, 25 bp, Homo sapien
ctgccctttccatatggctttgtgg

SEQ ID NO: 850247 - DNA, 25 bp, Homo sapien
agctgggctgccctttccatatggc

SEQ ID NO: 850248 - DNA, 25 bp, Homo sapien
gggctgccctttccatatggctttg

SEQ ID NO: 850249 - DNA, 25 bp, Homo sapien
ccttgttgatggaaatagagctaga

SEQ ID NO: 850250 - DNA, 25 bp, Homo sapien
aaaaccttgttgatggaaatagagc

SEQ ID NO: 850251 - DNA, 25 bp, Homo sapien
ttaaaaccttgttgatggaaataga

SEQ ID NO: 850252 - DNA, 25 bp, Homo sapien
aaccttgttgatggaaatagagcta

SEQ ID NO: 850253 - DNA, 25 bp, Homo sapien
tgagccctagcggctccagcaagat

SEQ ID NO: 850254 - DNA, 25 bp, Homo sapien
gtcagtcatgaagccccattgaagg

SEQ ID NO: 850255 - DNA, 25 bp, Homo sapien
cttggtcagtcatgaagccccattg

SEQ ID NO: 850256 - DNA, 25 bp, Homo sapien
aattgctgtgaatgcagccgcatca

SEQ ID NO: 850257 - DNA, 25 bp, Homo sapien
gcatcagcaagtccccatctgggga

SEQ ID NO: 850258 - DNA, 25 bp, Homo sapien
cctaatgcgagtttacggaaagtca

SEQ ID NO: 850259 - DNA, 25 bp, Homo sapien
taattcagatcacgttgcctgcagc

SEQ ID NO: 850260 - DNA, 25 bp, Homo sapien
caccgagcagtgtgataggcagccc

SEQ ID NO: 850261 - DNA, 25 bp, Homo sapien
caatatctaagatcaagtcgcacgg

SEQ ID NO: 850262 - DNA, 25 bp, Homo sapien
caaaggtaattacctttcctggatg

SEQ ID NO: 850263 - DNA, 25 bp, Homo sapien
tcccactcaggcgaaggtcaatccg

SEQ ID NO: 850264 - DNA, 25 bp, Homo sapien
ggcgaaggtcaatccggcgccttgc

SEQ ID NO: 850265 - DNA, 25 bp, Homo sapien
cccgtggcatatgacaagttaaatt

SEQ ID NO: 850266 - DNA, 25 bp, Homo sapien
tctccagggacactcttcaaggctg

SEQ ID NO: 850267 - DNA, 25 bp, Homo sapien
aggccattttatcgggcacctgtgg

SEQ ID NO: 850268 - DNA, 25 bp, Homo sapien
ctttaattggcgtttgagagggagt

SEQ ID NO: 850269 - DNA, 25 bp, Homo sapien
gcagagattgaaggccattttatcg

SEQ ID NO: 850270 - DNA, 25 bp, Homo sapien
ggtaatacgctggaagtaaaggcag

SEQ ID NO: 850271 - DNA, 25 bp, Homo sapien
gacaactggatctgaggacaagccc

SEQ ID NO: 850272 - DNA, 25 bp, Homo sapien
cccaggcttgtaagagagagttagc

SEQ ID NO: 850273 - DNA, 25 bp, Homo sapien
tggaagacaaggtgccgacaactgg

SEQ ID NO: 850274 - DNA, 25 bp, Homo sapien
gcatccgtgggaccttgagaaagaa

SEQ ID NO: 850275 - DNA, 25 bp, Homo sapien
aattctggagctttcttacttcatg

SEQ ID NO: 850276 - DNA, 25 bp, Homo sapien
ttctggagctttcttacttcatgcc

SEQ ID NO: 850277 - DNA, 25 bp, Homo sapien
ctggagctttcttacttcatgccca

SEQ ID NO: 850278 - DNA, 25 bp, Homo sapien
gaaatccttgtggcctcaacagaat

SEQ ID NO: 850279 - DNA, 25 bp, Homo sapien
tcctgcaggtacacgtggaacttgg

SEQ ID NO: 850280 - DNA, 25 bp, Homo sapien
tggtggcttgtcactccgtggtcct

SEQ ID NO: 850281 - DNA, 25 bp, Homo sapien
tctccctttagaacctggtggcttg

SEQ ID NO: 850282 - DNA, 25 bp, Homo sapien
gaacttgggctcatgatcaaagaga

SEQ ID NO: 850283 - DNA, 25 bp, Homo sapien
acaggaacctccatatgtttggcca

SEQ ID NO: 850284 - DNA, 25 bp, Homo sapien
taagtcattggccactagtgaccag

SEQ ID NO: 850285 - DNA, 25 bp, Homo sapien
cagggctggacaatctgtgaatgcc

SEQ ID NO: 850286 - DNA, 25 bp, Homo sapien
taaaaatgccaggtgtcgcagcaca

SEQ ID NO: 850287 - DNA, 25 bp, Homo sapien
gtccgccgcactgctgtcagtcatg

SEQ ID NO: 850288 - DNA, 25 bp, Homo sapien
ccaagtccgccgcactgctgtcagt

SEQ ID NO: 850289 - DNA, 25 bp, Homo sapien
aagtccgccgcactgctgtcagtca

SEQ ID NO: 850290 - DNA, 25 bp, Homo sapien
tccgccgcactgctgtcagtcatgt

SEQ ID NO: 850291 - DNA, 25 bp, Homo sapien
cttcttgatactgcctattgccagt

SEQ ID NO: 850292 - DNA, 25 bp, Homo sapien
ttcttgatactgcctattgccagtt

SEQ ID NO: 850293 - DNA, 25 bp, Homo sapien
aagcgcctctaccacgttgcccatg

SEQ ID NO: 850294 - DNA, 25 bp, Homo sapien
gctgctgctcgagatatctccatct

SEQ ID NO: 850295 - DNA, 25 bp, Homo sapien
gcgcctctaccacgttgcccatgtg

SEQ ID NO: 850296 - DNA, 25 bp, Homo sapien
gcctctaccacgttgcccatgtgtt

SEQ ID NO: 850297 - DNA, 25 bp, Homo sapien
tgtcatctgtcagcacgatctgctg

SEQ ID NO: 850298 - DNA, 25 bp, Homo sapien
tcatctgtcagcacgatctgctgag

SEQ ID NO: 850299 - DNA, 25 bp, Homo sapien
catctgtcagcacgatctgctgaga

SEQ ID NO: 850300 - DNA, 25 bp, Homo sapien
ctgtcagcacgatctgctgagacat

SEQ ID NO: 850301 - DNA, 25 bp, Homo sapien
ttttgggtcatgactaattctaggg

SEQ ID NO: 850302 - DNA, 25 bp, Homo sapien
ttttttgggtcatgactaattctag

SEQ ID NO: 850303 - DNA, 25 bp, Homo sapien
cattttttgggtcatgactaattct

SEQ ID NO: 850304 - DNA, 25 bp, Homo sapien
gggtcatgactaattctaggggctt

SEQ ID NO: 850305 - DNA, 25 bp, Homo sapien
gcaaggtgaggactgacacgctcac

SEQ ID NO: 850306 - DNA, 25 bp, Homo sapien
cacgctcaccatagacaacaatgag

SEQ ID NO: 850307 - DNA, 25 bp, Homo sapien
caggtaagagcaactctagctgacc

SEQ ID NO: 850308 - DNA, 25 bp, Homo sapien
catagacaacaatgaggtcccaggt

SEQ ID NO: 850309 - DNA, 25 bp, Homo sapien
gcttttgggcatggcgaaagaacga

SEQ ID NO: 850310 - DNA, 25 bp, Homo sapien
cctctgcagattctgtgtcacacag

SEQ ID NO: 850311 - DNA, 25 bp, Homo sapien
cacagctcactgtggacagtttgcc

SEQ ID NO: 850312 - DNA, 25 bp, Homo sapien
tgtggacagtttgccagcttttggg

SEQ ID NO: 850313 - DNA, 25 bp, Homo sapien
ctaaggtggctttcaaacccctgtg

SEQ ID NO: 850314 - DNA, 25 bp, Homo sapien
tgttgttacattatctactaaggtg

SEQ ID NO: 850315 - DNA, 25 bp, Homo sapien
ggagagtgcctattttaccgatata

SEQ ID NO: 850316 - DNA, 25 bp, Homo sapien
tattttaccgatatactgttttgct

SEQ ID NO: 850317 - DNA, 25 bp, Homo sapien
ctccacgcttatgatcatactctaa

SEQ ID NO: 850318 - DNA, 25 bp, Homo sapien
cgcttatgatcatactctaaacctt

SEQ ID NO: 850319 - DNA, 25 bp, Homo sapien
cttatgatcatactctaaacctttc

SEQ ID NO: 850320 - DNA, 25 bp, Homo sapien
cacgcttatgatcatactctaaacc

SEQ ID NO: 850321 - DNA, 25 bp, Homo sapien
ggatgtgcttcttactcccaggttc

SEQ ID NO: 850322 - DNA, 25 bp, Homo sapien
gcttttgctaattctccactggatg

SEQ ID NO: 850323 - DNA, 25 bp, Homo sapien
tgtgcttcttactcccaggttcatc

SEQ ID NO: 850324 - DNA, 25 bp, Homo sapien
tctccactggatgtgcttcttactc

SEQ ID NO: 850325 - DNA, 25 bp, Homo sapien
tacctgcgagctatttgggagcagg

SEQ ID NO: 850326 - DNA, 25 bp, Homo sapien
tttgtacctgcgagctatttgggag

SEQ ID NO: 850327 - DNA, 25 bp, Homo sapien
tatcattttgtacctgcgagctatt

SEQ ID NO: 850328 - DNA, 25 bp, Homo sapien
cattttgtacctgcgagctatttgg

SEQ ID NO: 850329 - DNA, 25 bp, Homo sapien
ctacaggtgtgctttttccagctct

SEQ ID NO: 850330 - DNA, 25 bp, Homo sapien
acaggtgtgctttttccagctctgc

SEQ ID NO: 850331 - DNA, 25 bp, Homo sapien
tacaggtgtgctttttccagctctg

SEQ ID NO: 850332 - DNA, 25 bp, Homo sapien
aggtgtgctttttccagctctgctg

SEQ ID NO: 850333 - DNA, 25 bp, Homo sapien
atcagaaagtcagaggtggccctcc

SEQ ID NO: 850334 - DNA, 25 bp, Homo sapien
cccagatcagaaagtcagaggtggc

SEQ ID NO: 850335 - DNA, 25 bp, Homo sapien
ctttgtcgaccgggacagggactgg

SEQ ID NO: 850336 - DNA, 25 bp, Homo sapien
tgcaccccagatcagaaagtcagag

SEQ ID NO: 850337 - DNA, 25 bp, Homo sapien
cccggcgcgccggattctctgccag

SEQ ID NO: 850338 - DNA, 25 bp, Homo sapien
agcctccctcgccttgggaccgccg

SEQ ID NO: 850339 - DNA, 25 bp, Homo sapien
ccgacccggcgcgccggattctctg

SEQ ID NO: 850340 - DNA, 25 bp, Homo sapien
gcgcgccggattctctgccaggttt

SEQ ID NO: 850341 - DNA, 25 bp, Homo sapien
cgccccgccagcccgaggcgcggga

SEQ ID NO: 850342 - DNA, 25 bp, Homo sapien
cggaaagctccctcccgcccgctcg

SEQ ID NO: 850343 - DNA, 25 bp, Homo sapien
ggaaagctccctcccgcccgctcgc

SEQ ID NO: 850344 - DNA, 25 bp, Homo sapien
ccgccagcccgaggcgcgggagggg

SEQ ID NO: 850345 - DNA, 25 bp, Homo sapien
gctgttgggggagggccggaacgca

SEQ ID NO: 850346 - DNA, 25 bp, Homo sapien
ctccggcgaccgcgggggagaagct

SEQ ID NO: 850347 - DNA, 25 bp, Homo sapien
gctccggcgaccgcgggggagaagc

SEQ ID NO: 850348 - DNA, 25 bp, Homo sapien
aggtctagctgcgtccctcagctac

SEQ ID NO: 850349 - DNA, 25 bp, Homo sapien
ctggagctgcgtgcgacacggcgcc

SEQ ID NO: 850350 - DNA, 25 bp, Homo sapien
tgccccgcctggagctgcgtgcgac

SEQ ID NO: 850351 - DNA, 25 bp, Homo sapien
ccgtcccgccaaggtctagctgcgt

SEQ ID NO: 850352 - DNA, 25 bp, Homo sapien
tcggcgtcctccgcccacgagtccc

SEQ ID NO: 850353 - DNA, 25 bp, Homo sapien
cttcggcgtcctccgcccacgagtc

SEQ ID NO: 850354 - DNA, 25 bp, Homo sapien
ttcggcgtcctccgcccacgagtcc

SEQ ID NO: 850355 - DNA, 25 bp, Homo sapien
taacccctactacgaaccagaagca

SEQ ID NO: 850356 - DNA, 25 bp, Homo sapien
gctacacaatactgcacgggtggca

SEQ ID NO: 850357 - DNA, 25 bp, Homo sapien
gaagcaaccaagagtgacccaatcg

SEQ ID NO: 850358 - DNA, 25 bp, Homo sapien
gacccaatcggaaaagagaatcctc

SEQ ID NO: 850359 - DNA, 25 bp, Homo sapien
aaaagctgtggcattcccatggaat

SEQ ID NO: 850360 - DNA, 25 bp, Homo sapien
agctgtggcattcccatggaatcca

SEQ ID NO: 850361 - DNA, 25 bp, Homo sapien
tcccatggaatccacatactttcgg

SEQ ID NO: 850362 - DNA, 25 bp, Homo sapien
cccatggaatccacatactttcggg

SEQ ID NO: 850363 - DNA, 25 bp, Homo sapien
gctattacaacatcaagtactaaga

SEQ ID NO: 850364 - DNA, 25 bp, Homo sapien
tccttactagctattacaacatcaa

SEQ ID NO: 850365 - DNA, 25 bp, Homo sapien
gctgaaaatttccttactagctatt

SEQ ID NO: 850366 - DNA, 25 bp, Homo sapien
catcaagtactaagaactttttagt

SEQ ID NO: 850367 - DNA, 25 bp, Homo sapien
taatgacacgtccaaactgctgcca

SEQ ID NO: 850368 - DNA, 25 bp, Homo sapien
ccaggctcagaggtgttacccatgc

SEQ ID NO: 850369 - DNA, 25 bp, Homo sapien
tacaagctacgtttcacaaatgagg

SEQ ID NO: 850370 - DNA, 25 bp, Homo sapien
gaagtgtgctaccaagagttactcc

SEQ ID NO: 850371 - DNA, 25 bp, Homo sapien
ggcaagcttctaatgctacaaagta

SEQ ID NO: 850372 - DNA, 25 bp, Homo sapien
tgtgctatgcatttgtgtaccaaaa

SEQ ID NO: 850373 - DNA, 25 bp, Homo sapien
aaagcatttgttcttaagagccaaa

SEQ ID NO: 850374 - DNA, 25 bp, Homo sapien
gaaaccactgtaagtcataggaaaa

SEQ ID NO: 850375 - DNA, 25 bp, Homo sapien
catggccgtcagctgtctaaaatcg

SEQ ID NO: 850376 - DNA, 25 bp, Homo sapien
aacctgggaatgagtctgatgccac

SEQ ID NO: 850377 - DNA, 25 bp, Homo sapien
gaataggctgtcaccctaagagcaa

SEQ ID NO: 850378 - DNA, 25 bp, Homo sapien
tccgtgtcagcgagtggcaatgcca

SEQ ID NO: 850379 - DNA, 25 bp, Homo sapien
tttcctagtctgcaaaatggaggcc

SEQ ID NO: 850380 - DNA, 25 bp, Homo sapien
gataggtacatgtgctactgggtga

SEQ ID NO: 850381 - DNA, 25 bp, Homo sapien
ggaaaaatcatacaatctcacgggt

SEQ ID NO: 850382 - DNA, 25 bp, Homo sapien
tttgcacaagcacaactatgttgcc

SEQ ID NO: 850383 - DNA, 25 bp, Homo sapien
agaatgaaatctcattgcaggcaaa

SEQ ID NO: 850384 - DNA, 25 bp, Homo sapien
tgttctaaagtcgtccagtgcagca

SEQ ID NO: 850385 - DNA, 25 bp, Homo sapien
tctaaagtcgtccagtgcagcaatc

SEQ ID NO: 850386 - DNA, 25 bp, Homo sapien
ggatgttctaaagtcgtccagtgca

SEQ ID NO: 850387 - DNA, 25 bp, Homo sapien
tgtgagggatgttctaaagtcgtcc

SEQ ID NO: 850388 - DNA, 25 bp, Homo sapien
gggttctggctccgggttgacgaca

SEQ ID NO: 850389 - DNA, 25 bp, Homo sapien
ggttctggctccgggttgacgacat

SEQ ID NO: 850390 - DNA, 25 bp, Homo sapien
ctgcttcaggccgtgggggttctgg

SEQ ID NO: 850391 - DNA, 25 bp, Homo sapien
cttcaggccgtgggggttctggctc

SEQ ID NO: 850392 - DNA, 25 bp, Homo sapien
ctggatgccggctctgaggtcgtcc

SEQ ID NO: 850393 - DNA, 25 bp, Homo sapien
gacttggccatgctctgccgtgtgt

SEQ ID NO: 850394 - DNA, 25 bp, Homo sapien
cgtcccagatctggtccaggccaat

SEQ ID NO: 850395 - DNA, 25 bp, Homo sapien
tggacttggccatgctctgccgtgt

SEQ ID NO: 850396 - DNA, 25 bp, Homo sapien
tggtgactgtactgcccagtgctgc

SEQ ID NO: 850397 - DNA, 25 bp, Homo sapien
taaggctaaaaatgaaccctgcgat

SEQ ID NO: 850398 - DNA, 25 bp, Homo sapien
taaacctgaagctccgttgaatcag

SEQ ID NO: 850399 - DNA, 25 bp, Homo sapien
gtggcaatctcctctctcctgagtg

SEQ ID NO: 850400 - DNA, 25 bp, Homo sapien
cagtggaactaccaccttcagcttt

SEQ ID NO: 850401 - DNA, 25 bp, Homo sapien
agtggaactaccaccttcagctttc

SEQ ID NO: 850402 - DNA, 25 bp, Homo sapien
caaatgtcacaggttcctaaagcct

SEQ ID NO: 850403 - DNA, 25 bp, Homo sapien
tctcctccaggatagacaatgggta

SEQ ID NO: 850404 - DNA, 25 bp, Homo sapien
caagtattagatgtcacagcgagca

SEQ ID NO: 850405 - DNA, 25 bp, Homo sapien
ccaactgctgatgaggcatgtctaa

SEQ ID NO: 850406 - DNA, 25 bp, Homo sapien
caagggctcagcagattgactcggg

SEQ ID NO: 850407 - DNA, 25 bp, Homo sapien
cagctcctatggaagggaaggcgat

SEQ ID NO: 850408 - DNA, 25 bp, Homo sapien
caagacgggactgctcaactggcag

SEQ ID NO: 850409 - DNA, 25 bp, Homo sapien
gaattttgcagtgagcaggcgaagc

SEQ ID NO: 850410 - DNA, 25 bp, Homo sapien
tggggaatcaattcttgacttttag

SEQ ID NO: 850411 - DNA, 25 bp, Homo sapien
gttattgccaaactccaaccattct

SEQ ID NO: 850412 - DNA, 25 bp, Homo sapien
tcttgacttttagttattgccaaac

SEQ ID NO: 850413 - DNA, 25 bp, Homo sapien
gacttttagttattgccaaactcca

SEQ ID NO: 850414 - DNA, 25 bp, Homo sapien
ctttcagcaagcagacaccttctgg

SEQ ID NO: 850415 - DNA, 25 bp, Homo sapien
tggagactagaggtccgagctcaag

SEQ ID NO: 850416 - DNA, 25 bp, Homo sapien
gagactagaggtccgagctcaaggt

SEQ ID NO: 850417 - DNA, 25 bp, Homo sapien
agactagaggtccgagctcaaggta

SEQ ID NO: 850418 - DNA, 25 bp, Homo sapien
ctggagactagaggtccgagctcaa

SEQ ID NO: 850419 - DNA, 25 bp, Homo sapien
tttccatggaaacgtcagctctcag

SEQ ID NO: 850420 - DNA, 25 bp, Homo sapien
ttcttcagatgcctgggaattccct

SEQ ID NO: 850421 - DNA, 25 bp, Homo sapien
ggctcacaatggttagcaccttcat

SEQ ID NO: 850422 - DNA, 25 bp, Homo sapien
cagccaggtgtaaggctttgtttcc

SEQ ID NO: 850423 - DNA, 25 bp, Homo sapien
ttgaacactctgaagccattgtggg

SEQ ID NO: 850424 - DNA, 25 bp, Homo sapien
tatcattgattttgccagaggcttg

SEQ ID NO: 850425 - DNA, 25 bp, Homo sapien
cagtcggtggagcagacacatgcat

SEQ ID NO: 850426 - DNA, 25 bp, Homo sapien
gggttatcaactggcctcaactcaa

SEQ ID NO: 850427 - DNA, 25 bp, Homo sapien
actcccaacttcaggctatccagcc

SEQ ID NO: 850428 - DNA, 25 bp, Homo sapien
cttcaggctatccagcctcctcggc

SEQ ID NO: 850429 - DNA, 25 bp, Homo sapien
aacttcaggctatccagcctcctcg

SEQ ID NO: 850430 - DNA, 25 bp, Homo sapien
cccaacttcaggctatccagcctcc

SEQ ID NO: 850431 - DNA, 25 bp, Homo sapien
gatttggtatatatcattcctatgt

SEQ ID NO: 850432 - DNA, 25 bp, Homo sapien
tttggtatatatcattcctatgttt

SEQ ID NO: 850433 - DNA, 25 bp, Homo sapien
ggtatatatcattcctatgttttta

SEQ ID NO: 850434 - DNA, 25 bp, Homo sapien
tggtatatatcattcctatgttttt

SEQ ID NO: 850435 - DNA, 25 bp, Homo sapien
tcttactgcattcccacacttgtct

SEQ ID NO: 850436 - DNA, 25 bp, Homo sapien
catgacccagttttgatagatctta

SEQ ID NO: 850437 - DNA, 25 bp, Homo sapien
caactactgtatactcatgacccag

SEQ ID NO: 850438 - DNA, 25 bp, Homo sapien
ttgtctcatattccacctacagcct

SEQ ID NO: 850439 - DNA, 25 bp, Homo sapien
tgtctgcccctttttcgacttagaa

SEQ ID NO: 850440 - DNA, 25 bp, Homo sapien
gtgtctgcccctttttcgacttaga

SEQ ID NO: 850441 - DNA, 25 bp, Homo sapien
tttatataattccaggccaacaaac

SEQ ID NO: 850442 - DNA, 25 bp, Homo sapien
agtcgtttatataattccaggccaa

SEQ ID NO: 850443 - DNA, 25 bp, Homo sapien
cttaagaagatttgtcaagtaattc

SEQ ID NO: 850444 - DNA, 25 bp, Homo sapien
tgtcaagtaattcttcaaaaattcc

SEQ ID NO: 850445 - DNA, 25 bp, Homo sapien
cattcacggcgaacccaatgtctat

SEQ ID NO: 850446 - DNA, 25 bp, Homo sapien
gaatttcagtacactctcatccatc

SEQ ID NO: 850447 - DNA, 25 bp, Homo sapien
tgaggtaggcacaaattccattcag

SEQ ID NO: 850448 - DNA, 25 bp, Homo sapien
gataatcttcccattgttgagtgta

SEQ ID NO: 850449 - DNA, 25 bp, Homo sapien
gaacagacagtctctccaagtcacc

SEQ ID NO: 850450 - DNA, 25 bp, Homo sapien
acagacagtctctccaagtcaccaa

SEQ ID NO: 850451 - DNA, 25 bp, Homo sapien
agtggcctgaacagacagtctctcc

SEQ ID NO: 850452 - DNA, 25 bp, Homo sapien
gcctgaacagacagtctctccaagt

SEQ ID NO: 850453 - DNA, 25 bp, Homo sapien
tgtacaactccactaatcaatcttg

SEQ ID NO: 850454 - DNA, 25 bp, Homo sapien
tcaatcttgtattgatggtttcacc

SEQ ID NO: 850455 - DNA, 25 bp, Homo sapien
caatcttgtattgatggtttcacca

SEQ ID NO: 850456 - DNA, 25 bp, Homo sapien
cgtaagactgtacaactccactaat

SEQ ID NO: 850457 - DNA, 25 bp, Homo sapien
tctgctgcaagaattcagtactctc

SEQ ID NO: 850458 - DNA, 25 bp, Homo sapien
ctctctctggtataaaatctctctg

SEQ ID NO: 850459 - DNA, 25 bp, Homo sapien
cactgttaacgtagggccctttgca

SEQ ID NO: 850460 - DNA, 25 bp, Homo sapien
tgtgtcagccaaaaattgagattca

SEQ ID NO: 850461 - DNA, 25 bp, Homo sapien
caacctgggcaacctatctctacaa

SEQ ID NO: 850462 - DNA, 25 bp, Homo sapien
ggagaactctcagtcacgattacca

SEQ ID NO: 850463 - DNA, 25 bp, Homo sapien
tatcagcgggccatggttactcaca

SEQ ID NO: 850464 - DNA, 25 bp, Homo sapien
ggttatatccttagaacagcaagga

SEQ ID NO: 850465 - DNA, 25 bp, Homo sapien
tttaagtgccctaacaacatcatcg

SEQ ID NO: 850466 - DNA, 25 bp, Homo sapien
agagtcacacaaatataagccctga

SEQ ID NO: 850467 - DNA, 25 bp, Homo sapien
cattttgatccctcagagaatggta

SEQ ID NO: 850468 - DNA, 25 bp, Homo sapien
taagccctgaagtgattacatggaa

SEQ ID NO: 850469 - DNA, 25 bp, Homo sapien
atgaaggtaaacctgaactcttcgt

SEQ ID NO: 850470 - DNA, 25 bp, Homo sapien
cctgaactcttcgttgttcctcaag

SEQ ID NO: 850471 - DNA, 25 bp, Homo sapien
ctttcatgaaggtaaacctgaactc

SEQ ID NO: 850472 - DNA, 25 bp, Homo sapien
gttgttcctcaagcagacgagcctc

SEQ ID NO: 850473 - DNA, 25 bp, Homo sapien
ccctgattatgaatgtgtgtctcca

SEQ ID NO: 850474 - DNA, 25 bp, Homo sapien
gccatcctggattctagatacaaga

SEQ ID NO: 850475 - DNA, 25 bp, Homo sapien
tttcaattctcctaggccatcctgg

SEQ ID NO: 850476 - DNA, 25 bp, Homo sapien
acacttttcaatggctgcaagaccc

SEQ ID NO: 850477 - DNA, 25 bp, Homo sapien
caggagccttttgtttctagggaag

SEQ ID NO: 850478 - DNA, 25 bp, Homo sapien
cagatcaaagttcctgtaaggcaca

SEQ ID NO: 850479 - DNA, 25 bp, Homo sapien
tctccagagtacagccctgtggtct

SEQ ID NO: 850480 - DNA, 25 bp, Homo sapien
gcaaagtaacagcttccaggagcct

SEQ ID NO: 850481 - DNA, 25 bp, Homo sapien
tccaacagaaggagccaaacggcaa

SEQ ID NO: 850482 - DNA, 25 bp, Homo sapien
tctttcttacaataagtaatcaagc

SEQ ID NO: 850483 - DNA, 25 bp, Homo sapien
ggaagggcacgaggaacccatgcac

SEQ ID NO: 850484 - DNA, 25 bp, Homo sapien
ctttcccagagatggcgaatggagg

SEQ ID NO: 850485 - DNA, 25 bp, Homo sapien
cggggtcaagagtcgtgcagccgag

SEQ ID NO: 850486 - DNA, 25 bp, Homo sapien
caagagtcgtgcagccgagacggca

SEQ ID NO: 850487 - DNA, 25 bp, Homo sapien
cagcggggtcaagagtcgtgcagcc

SEQ ID NO: 850488 - DNA, 25 bp, Homo sapien
gcagcggggtcaagagtcgtgcagc

SEQ ID NO: 850489 - DNA, 25 bp, Homo sapien
caatacctgttaggctgaggacact

SEQ ID NO: 850490 - DNA, 25 bp, Homo sapien
ggtgttgaagtatctcacagaccca

SEQ ID NO: 850491 - DNA, 25 bp, Homo sapien
taacatccagactgctgagcaactg

SEQ ID NO: 850492 - DNA, 25 bp, Homo sapien
tgaaaaataacttgccggagctacc

SEQ ID NO: 850493 - DNA, 25 bp, Homo sapien
taaggcaaggtcatacgaatttctc

SEQ ID NO: 850494 - DNA, 25 bp, Homo sapien
taaggaatagctatggctctaagag

SEQ ID NO: 850495 - DNA, 25 bp, Homo sapien
gacttactgtacaaaaccgtgcttc

SEQ ID NO: 850496 - DNA, 25 bp, Homo sapien
cccattagccagctttaaggaatag

SEQ ID NO: 850497 - DNA, 25 bp, Homo sapien
gtcaccctggcaggagtgcaggagt

SEQ ID NO: 850498 - DNA, 25 bp, Homo sapien
caccctggcaggagtgcaggagtgc

SEQ ID NO: 850499 - DNA, 25 bp, Homo sapien
ccctggcaggagtgcaggagtgcag

SEQ ID NO: 850500 - DNA, 25 bp, Homo sapien
ctggcaggagtgcaggagtgcagtg

SEQ ID NO: 850501 - DNA, 25 bp, Homo sapien
tagtaaaacttaccccatgtactca

SEQ ID NO: 850502 - DNA, 25 bp, Homo sapien
aaacctgtccattacaaagccagtg

SEQ ID NO: 850503 - DNA, 25 bp, Homo sapien
tgtgtgttagtcaaggttccctaga

SEQ ID NO: 850504 - DNA, 25 bp, Homo sapien
tatctgaaccacgacaacaaaccta

SEQ ID NO: 850505 - DNA, 25 bp, Homo sapien
ttccaaagcctatgtcacgaatggc

SEQ ID NO: 850506 - DNA, 25 bp, Homo sapien
gtcacgaatggcctgatctgctccc

SEQ ID NO: 850507 - DNA, 25 bp, Homo sapien
cctgggctatcatgggatttccaaa

SEQ ID NO: 850508 - DNA, 25 bp, Homo sapien
tggagctcttctcggcaagtgccac

SEQ ID NO: 850509 - DNA, 25 bp, Homo sapien
tcacgagagcttttcacatgtaaga

SEQ ID NO: 850510 - DNA, 25 bp, Homo sapien
cagggcttgtccctaagggctcatt

SEQ ID NO: 850511 - DNA, 25 bp, Homo sapien
tagtaatgggtttgattcaggaccc

SEQ ID NO: 850512 - DNA, 25 bp, Homo sapien
tcaggaccctctgtgtattcacgag

SEQ ID NO: 850513 - DNA, 25 bp, Homo sapien
taacggccctacaaagaactgcgtg

SEQ ID NO: 850514 - DNA, 25 bp, Homo sapien
tacaaagtgctccagcctacagcga

SEQ ID NO: 850515 - DNA, 25 bp, Homo sapien
tcgaatacggtaacatgcaggatcc

SEQ ID NO: 850516 - DNA, 25 bp, Homo sapien
tgaactgcactaccagatagccttg

SEQ ID NO: 850517 - DNA, 25 bp, Homo sapien
ccagccaagcacagatccaggcgcc

SEQ ID NO: 850518 - DNA, 25 bp, Homo sapien
caagcacagatccaggcgccgcggc

SEQ ID NO: 850519 - DNA, 25 bp, Homo sapien
gccaagcacagatccaggcgccgcg

SEQ ID NO: 850520 - DNA, 25 bp, Homo sapien
cagccaagcacagatccaggcgccg

SEQ ID NO: 850521 - DNA, 25 bp, Homo sapien
caaaggagacggagctaagtgctaa

SEQ ID NO: 850522 - DNA, 25 bp, Homo sapien
tctacagacgtagaaactgtcacag

SEQ ID NO: 850523 - DNA, 25 bp, Homo sapien
aaaacagcgctgctgctaggcatgc

SEQ ID NO: 850524 - DNA, 25 bp, Homo sapien
accacccttcatgagaccgcgaaag

SEQ ID NO: 850525 - DNA, 25 bp, Homo sapien
actgcaaaccagaggcgcggatccg

SEQ ID NO: 850526 - DNA, 25 bp, Homo sapien
ccagggcctcatcgcaggacgggaa

SEQ ID NO: 850527 - DNA, 25 bp, Homo sapien
aggaacaacatggaaatgcaacggg

SEQ ID NO: 850528 - DNA, 25 bp, Homo sapien
aaatgcaacgggaaggctggccgca

SEQ ID NO: 850529 - DNA, 25 bp, Homo sapien
gagaaggcgtttagccgccgaggtc

SEQ ID NO: 850530 - DNA, 25 bp, Homo sapien
ttaaacagtggaactctggactctg

SEQ ID NO: 850531 - DNA, 25 bp, Homo sapien
gccaattcctccttgttaaacagtg

SEQ ID NO: 850532 - DNA, 25 bp, Homo sapien
gccgaggtcggtcatcagcccggct

SEQ ID NO: 850533 - DNA, 25 bp, Homo sapien
ttcaaagttaagagataagagcaag

SEQ ID NO: 850534 - DNA, 25 bp, Homo sapien
actaaatattgattccgagcttgca

SEQ ID NO: 850535 - DNA, 25 bp, Homo sapien
taagagcaagaaatacttttggtac

SEQ ID NO: 850536 - DNA, 25 bp, Homo sapien
tcgttgaaacacataggacattttg

SEQ ID NO: 850537 - DNA, 25 bp, Homo sapien
agccacaaagccagcgtcattgttg

SEQ ID NO: 850538 - DNA, 25 bp, Homo sapien
cttatcaagagcagccacaaagcca

SEQ ID NO: 850539 - DNA, 25 bp, Homo sapien
ccagcgtcattgttgaatgcagaca

SEQ ID NO: 850540 - DNA, 25 bp, Homo sapien
gcagacattaccagggcattgtatt

SEQ ID NO: 850541 - DNA, 25 bp, Homo sapien
tcacagtatcgagccagcaactcag

SEQ ID NO: 850542 - DNA, 25 bp, Homo sapien
tgttgtttatgaagcgaccacaagc

SEQ ID NO: 850543 - DNA, 25 bp, Homo sapien
ttcaacaaggagtcacagtatcgag

SEQ ID NO: 850544 - DNA, 25 bp, Homo sapien
tgattgggccatcttggtaaccgcg

SEQ ID NO: 850545 - DNA, 25 bp, Homo sapien
cacttgattgagtgtgtcttctagt

SEQ ID NO: 850546 - DNA, 25 bp, Homo sapien
ttctgcctcctctgggttcttggaa

SEQ ID NO: 850547 - DNA, 25 bp, Homo sapien
cttgattgagtgtgtcttctagttc

SEQ ID NO: 850548 - DNA, 25 bp, Homo sapien
cttctagttctgcctcctctgggtt

SEQ ID NO: 850549 - DNA, 25 bp, Homo sapien
gctggcttcggcatcgtcacttgca

SEQ ID NO: 850550 - DNA, 25 bp, Homo sapien
gagcatcttcgcatagaacttctga

SEQ ID NO: 850551 - DNA, 25 bp, Homo sapien
ttctggtggacgagcctcttggcga

SEQ ID NO: 850552 - DNA, 25 bp, Homo sapien
taacttggagatcatgctggcttcg

SEQ ID NO: 850553 - DNA, 25 bp, Homo sapien
caaacctccaacgtgatgctgtgtg

SEQ ID NO: 850554 - DNA, 25 bp, Homo sapien
tatggtattccgtcatggcagccca

SEQ ID NO: 850555 - DNA, 25 bp, Homo sapien
tctctctgacacgtgaggcactgca

SEQ ID NO: 850556 - DNA, 25 bp, Homo sapien
tcagataagagcactcgacagcgcc

SEQ ID NO: 850557 - DNA, 25 bp, Homo sapien
agtgctttttgaattgctcgttcag

SEQ ID NO: 850558 - DNA, 25 bp, Homo sapien
taggggttctgagtttgtcaagtgc

SEQ ID NO: 850559 - DNA, 25 bp, Homo sapien
aaacatgcgctgaagtttagaggtg

SEQ ID NO: 850560 - DNA, 25 bp, Homo sapien
aggtgtactcgaacccgcaagcttg

SEQ ID NO: 850561 - DNA, 25 bp, Homo sapien
ggcaaatgtacaagactgctggaag

SEQ ID NO: 850562 - DNA, 25 bp, Homo sapien
cggcaaggcaaatgtacaagactgc

SEQ ID NO: 850563 - DNA, 25 bp, Homo sapien
aatgtacaagactgctggaagggcc

SEQ ID NO: 850564 - DNA, 25 bp, Homo sapien
ctctgacggcaaggcaaatgtacaa

SEQ ID NO: 850565 - DNA, 25 bp, Homo sapien
gacagcccacctttagacatccaga

SEQ ID NO: 850566 - DNA, 25 bp, Homo sapien
tacaggcagcgtttctaagtaaagc

SEQ ID NO: 850567 - DNA, 25 bp, Homo sapien
tacttcaagaccagcaggtccatcg

SEQ ID NO: 850568 - DNA, 25 bp, Homo sapien
aaatacaaacgccaggtgtctgcct

SEQ ID NO: 850569 - DNA, 25 bp, Homo sapien
tgaatcgctgataactacgttccaa

SEQ ID NO: 850570 - DNA, 25 bp, Homo sapien
ttagacaactgatataaccacgtca

SEQ ID NO: 850571 - DNA, 25 bp, Homo sapien
cggctggcgtagaaagctgtgaatc

SEQ ID NO: 850572 - DNA, 25 bp, Homo sapien
aattttcggccactgtggcggctgg

SEQ ID NO: 850573 - DNA, 25 bp, Homo sapien
gcttgagtctgcagaacaacccatt

SEQ ID NO: 850574 - DNA, 25 bp, Homo sapien
caggagcggtgccaaacacttacta

SEQ ID NO: 850575 - DNA, 25 bp, Homo sapien
ttgaagtcactacctgaacagctga

SEQ ID NO: 850576 - DNA, 25 bp, Homo sapien
caagttgataaagacctctggagcc

SEQ ID NO: 850577 - DNA, 25 bp, Homo sapien
taaaaaacgtattgtctatgtggat

SEQ ID NO: 850578 - DNA, 25 bp, Homo sapien
ggatacatactatagatacgtcccc

SEQ ID NO: 850579 - DNA, 25 bp, Homo sapien
aacgtattgtctatgtggatacata

SEQ ID NO: 850580 - DNA, 25 bp, Homo sapien
tgtggatacatactatagatacgtc

SEQ ID NO: 850581 - DNA, 25 bp, Homo sapien
aaacgtggcaatgccactacaatgc

SEQ ID NO: 850582 - DNA, 25 bp, Homo sapien
gaaggaaaatttacatgcatggaaa

SEQ ID NO: 850583 - DNA, 25 bp, Homo sapien
aatataaaacgtggcaatgccacta

SEQ ID NO: 850584 - DNA, 25 bp, Homo sapien
gtttgaagaacttatttatgaaaca

SEQ ID NO: 850585 - DNA, 25 bp, Homo sapien
ctgtcggtcagctgctgcacagtgt

SEQ ID NO: 850586 - DNA, 25 bp, Homo sapien
ttttaatttgagtgctgtcggtcag

SEQ ID NO: 850587 - DNA, 25 bp, Homo sapien
agtgctgtcggtcagctgctgcaca

SEQ ID NO: 850588 - DNA, 25 bp, Homo sapien
aatttgagtgctgtcggtcagctgc

SEQ ID NO: 850589 - DNA, 25 bp, Homo sapien
acaccagggtggttcaacatcagtg

SEQ ID NO: 850590 - DNA, 25 bp, Homo sapien
tgggactcaccctaagaacaccagg

SEQ ID NO: 850591 - DNA, 25 bp, Homo sapien
caaaactcgagaaaataccggcaag

SEQ ID NO: 850592 - DNA, 25 bp, Homo sapien
tccataaggccaggattagccagac

SEQ ID NO: 850593 - DNA, 25 bp, Homo sapien
aggatacgtggtgaaagctgtcaaa

SEQ ID NO: 850594 - DNA, 25 bp, Homo sapien
aagcgagaggcctctctctagtcta

SEQ ID NO: 850595 - DNA, 25 bp, Homo sapien
ctgaggatacgtggtgaaagctgtc

SEQ ID NO: 850596 - DNA, 25 bp, Homo sapien
tcaaagcgagaggcctctctctagt

SEQ ID NO: 850597 - DNA, 25 bp, Homo sapien
gagtcacacggactcttacaaccca

SEQ ID NO: 850598 - DNA, 25 bp, Homo sapien
tcttacaacccacgggcagtggagt

SEQ ID NO: 850599 - DNA, 25 bp, Homo sapien
cacgggcagtggagtcctgtcgtca

SEQ ID NO: 850600 - DNA, 25 bp, Homo sapien
tcctgtcgtcataatgggtacccat

SEQ ID NO: 850601 - DNA, 25 bp, Homo sapien
gcagccctgattggaaaatccgaaa

SEQ ID NO: 850602 - DNA, 25 bp, Homo sapien
cgaaatttcaactgcgccatgagca

SEQ ID NO: 850603 - DNA, 25 bp, Homo sapien
gaacctgtattggaaaccatgcaca

SEQ ID NO: 850604 - DNA, 25 bp, Homo sapien
gatgcactcaagcacgttgtgtggc

SEQ ID NO: 850605 - DNA, 25 bp, Homo sapien
tagcttcgactttaataaaatctgt

SEQ ID NO: 850606 - DNA, 25 bp, Homo sapien
caatagcttcgactttaataaaatc

SEQ ID NO: 850607 - DNA, 25 bp, Homo sapien
ataaaatctgtaaaacttgcgccaa

SEQ ID NO: 850608 - DNA, 25 bp, Homo sapien
tctgtaaaacttgcgccaaaatgtc

SEQ ID NO: 850609 - DNA, 25 bp, Homo sapien
ggcttcaattccacctcatcaacat

SEQ ID NO: 850610 - DNA, 25 bp, Homo sapien
tggcttcaattccacctcatcaaca

SEQ ID NO: 850611 - DNA, 25 bp, Homo sapien
tattaaggtatctggcttcaattcc

SEQ ID NO: 850612 - DNA, 25 bp, Homo sapien
attttattaaggtatctggcttcaa

SEQ ID NO: 850613 - DNA, 25 bp, Homo sapien
tcagaattggagaaacatcaggctc

SEQ ID NO: 850614 - DNA, 25 bp, Homo sapien
tgtgagctctccgtgaaaatgtcct

SEQ ID NO: 850615 - DNA, 25 bp, Homo sapien
tcaggctcgctgaatggaatcaaag

SEQ ID NO: 850616 - DNA, 25 bp, Homo sapien
caatactgagatccgtgctagggct

SEQ ID NO: 850617 - DNA, 25 bp, Homo sapien
ctgaatcagtagtttgcggtcttcc

SEQ ID NO: 850618 - DNA, 25 bp, Homo sapien
gcttctgttcggttttcattggcac

SEQ ID NO: 850619 - DNA, 25 bp, Homo sapien
tcattggcacattgatgttaaccct

SEQ ID NO: 850620 - DNA, 25 bp, Homo sapien
tgcggtcttcctcgatgtttttgtg

SEQ ID NO: 850621 - DNA, 25 bp, Homo sapien
ccacggcccgtccttgcgagccatc

SEQ ID NO: 850622 - DNA, 25 bp, Homo sapien
agcacacctggcacaggcatacaga

SEQ ID NO: 850623 - DNA, 25 bp, Homo sapien
gcacacctggcacaggcatacagat

SEQ ID NO: 850624 - DNA, 25 bp, Homo sapien
gcgagccatccctgcgtgagggaca

SEQ ID NO: 850625 - DNA, 25 bp, Homo sapien
acagctgagtgaggacctcgccaag

SEQ ID NO: 850626 - DNA, 25 bp, Homo sapien
tgaggacctcgccaagtaactgctg

SEQ ID NO: 850627 - DNA, 25 bp, Homo sapien
actgctggtgtttcagaaccttcct

SEQ ID NO: 850628 - DNA, 25 bp, Homo sapien
tcttcatgattctcacgatggccgc

SEQ ID NO: 850629 - DNA, 25 bp, Homo sapien
gatgccgggcatgtttcaattctta

SEQ ID NO: 850630 - DNA, 25 bp, Homo sapien
gaggaaattcttaccaggcacggga

SEQ ID NO: 850631 - DNA, 25 bp, Homo sapien
tgcttctcgataccgcaatgcgacg

SEQ ID NO: 850632 - DNA, 25 bp, Homo sapien
gacgaacctcccgaagatactgctg

SEQ ID NO: 850633 - DNA, 25 bp, Homo sapien
taactgtaggtgtccttttcaccat

SEQ ID NO: 850634 - DNA, 25 bp, Homo sapien
catccactcgctccaaatattcttt

SEQ ID NO: 850635 - DNA, 25 bp, Homo sapien
tctttctcaattagaatgtcaatgc

SEQ ID NO: 850636 - DNA, 25 bp, Homo sapien
ttaagccaagtaactgtaggtgtcc

SEQ ID NO: 850637 - DNA, 25 bp, Homo sapien
tagcaggttacatgtgggtccactc

SEQ ID NO: 850638 - DNA, 25 bp, Homo sapien
tgtaaatccgagaccagctgatggg

SEQ ID NO: 850639 - DNA, 25 bp, Homo sapien
catgaactatttgctgcgggtcaca

SEQ ID NO: 850640 - DNA, 25 bp, Homo sapien
gacttagtgcggtagcatgcagccc

SEQ ID NO: 850641 - DNA, 25 bp, Homo sapien
gcacaatcattatatcttttattta

SEQ ID NO: 850642 - DNA, 25 bp, Homo sapien
caatcattatatcttttatttacat

SEQ ID NO: 850643 - DNA, 25 bp, Homo sapien
tcttttatttacatatagaaattag

SEQ ID NO: 850644 - DNA, 25 bp, Homo sapien
tacatatagaaattagtaaaactta

SEQ ID NO: 850645 - DNA, 25 bp, Homo sapien
ccgagcccacaatcggagaagcatg

SEQ ID NO: 850646 - DNA, 25 bp, Homo sapien
cggagaagcatggacgagcaggctc

SEQ ID NO: 850647 - DNA, 25 bp, Homo sapien
agcccacaatcggagaagcatggac

SEQ ID NO: 850648 - DNA, 25 bp, Homo sapien
cccacaatcggagaagcatggacga

SEQ ID NO: 850649 - DNA, 25 bp, Homo sapien
gctgatgccctgaagtatgtcggca

SEQ ID NO: 850650 - DNA, 25 bp, Homo sapien
cagcgtctcaattagatggccagca

SEQ ID NO: 850651 - DNA, 25 bp, Homo sapien
taagtctcagcacatgttggatggg

SEQ ID NO: 850652 - DNA, 25 bp, Homo sapien
tatgaatgtgccgttatgcaggcag

SEQ ID NO: 850653 - DNA, 25 bp, Homo sapien
cctttgacgtgagaattggaactcc

SEQ ID NO: 850654 - DNA, 25 bp, Homo sapien
ggcaaaccctgaagaactgtaacca

SEQ ID NO: 850655 - DNA, 25 bp, Homo sapien
tcggtaaatccaaactgctatgcaa

SEQ ID NO: 850656 - DNA, 25 bp, Homo sapien
tttgtggtggatgcaacccgcaagg

SEQ ID NO: 850657 - DNA, 25 bp, Homo sapien
tgtaaggctgtgtagggatgtttct

SEQ ID NO: 850658 - DNA, 25 bp, Homo sapien
catcttccagactcccctggatatt

SEQ ID NO: 850659 - DNA, 25 bp, Homo sapien
tgtgaaaatggaggtaggcttaaca

SEQ ID NO: 850660 - DNA, 25 bp, Homo sapien
tcctccagtcagtgcctctgagcgg

SEQ ID NO: 850661 - DNA, 25 bp, Homo sapien
acagtgactctggttccgtttccga

SEQ ID NO: 850662 - DNA, 25 bp, Homo sapien
gatgaaagcataatactgagccgtg

SEQ ID NO: 850663 - DNA, 25 bp, Homo sapien
gctatttgggaagttcacatgacag

SEQ ID NO: 850664 - DNA, 25 bp, Homo sapien
gtttccgatggcatacctgctcaga

SEQ ID NO: 850665 - DNA, 25 bp, Homo sapien
gatgttatctttactcagacggctc

SEQ ID NO: 850666 - DNA, 25 bp, Homo sapien
gagcactcccttgtttacttgacga

SEQ ID NO: 850667 - DNA, 25 bp, Homo sapien
ttattgagccccatacctggccctg

SEQ ID NO: 850668 - DNA, 25 bp, Homo sapien
cagttcgtgcccttgtgtgatagca

SEQ ID NO: 850669 - DNA, 25 bp, Homo sapien
cctggtaattgaaacttctaagcac

SEQ ID NO: 850670 - DNA, 25 bp, Homo sapien
gcgtcaactacttttgaggcacata

SEQ ID NO: 850671 - DNA, 25 bp, Homo sapien
cctctggcatttctagggaatgtgg

SEQ ID NO: 850672 - DNA, 25 bp, Homo sapien
agtacgtctgtctatggcatggtaa

SEQ ID NO: 850673 - DNA, 25 bp, Homo sapien
gcttactacctgtgatgattattct

SEQ ID NO: 850674 - DNA, 25 bp, Homo sapien
aactggagtttttccgcaaagctgc

SEQ ID NO: 850675 - DNA, 25 bp, Homo sapien
gatctaaatttcctcccagcctgag

SEQ ID NO: 850676 - DNA, 25 bp, Homo sapien
gcaaagctgcagatgagggaatgat

SEQ ID NO: 850677 - DNA, 25 bp, Homo sapien
atattttcaggttcagcttctgtgc

SEQ ID NO: 850678 - DNA, 25 bp, Homo sapien
gacgtgagacacgatgtctggctaa

SEQ ID NO: 850679 - DNA, 25 bp, Homo sapien
ggcgccgcgtttgtaggcgtgcggg

SEQ ID NO: 850680 - DNA, 25 bp, Homo sapien
ccgcgggaccctgcgagtgaggcag

SEQ ID NO: 850681 - DNA, 25 bp, Homo sapien
accctgcgagtgaggcagcgcacac

SEQ ID NO: 850682 - DNA, 25 bp, Homo sapien
tggcccgcgggaccctgcgagtgag

SEQ ID NO: 850683 - DNA, 25 bp, Homo sapien
ggcaacctcgtggtctctagttcct

SEQ ID NO: 850684 - DNA, 25 bp, Homo sapien
cacctgatcaacacagcccactaca

SEQ ID NO: 850685 - DNA, 25 bp, Homo sapien
acctgatcaacacagcccactacag

SEQ ID NO: 850686 - DNA, 25 bp, Homo sapien
gccggcccacgtgtctaggacaaaa

SEQ ID NO: 850687 - DNA, 25 bp, Homo sapien
gtgtgtgcgacggtactctgcctgc

SEQ ID NO: 850688 - DNA, 25 bp, Homo sapien
gacaagagaactttgcagctcaaac

SEQ ID NO: 850689 - DNA, 25 bp, Homo sapien
gggccaacaggccagatatcagcag

SEQ ID NO: 850690 - DNA, 25 bp, Homo sapien
cacaggtcagattatgtgtgacaac

SEQ ID NO: 850691 - DNA, 25 bp, Homo sapien
ttaaaaacatatggctcccagctga

SEQ ID NO: 850692 - DNA, 25 bp, Homo sapien
tagccagcagttattagtacaccaa

SEQ ID NO: 850693 - DNA, 25 bp, Homo sapien
gtacaccaagaattgcaaggcaaca

SEQ ID NO: 850694 - DNA, 25 bp, Homo sapien
aatgcaacaaaatgtgtagatattg

SEQ ID NO: 850695 - DNA, 25 bp, Homo sapien
ccttcactctgacaaactgccaggg

SEQ ID NO: 850696 - DNA, 25 bp, Homo sapien
caatttggagatgagtgtaggtaga

SEQ ID NO: 850697 - DNA, 25 bp, Homo sapien
ggttggccggtgagttctgctggct

SEQ ID NO: 850698 - DNA, 25 bp, Homo sapien
gtctttagagtttagaatttctctc

SEQ ID NO: 850699 - DNA, 25 bp, Homo sapien
tcctcatcacaactcctttctggtt

SEQ ID NO: 850700 - DNA, 25 bp, Homo sapien
ctttctggttcaggcttgatcttat

SEQ ID NO: 850701 - DNA, 25 bp, Homo sapien
tcgtctttagagtttagaatttctc

SEQ ID NO: 850702 - DNA, 25 bp, Homo sapien
tgataaactgataagacaaaagtaa

SEQ ID NO: 850703 - DNA, 25 bp, Homo sapien
ataaactgataagacaaaagtaagt

SEQ ID NO: 850704 - DNA, 25 bp, Homo sapien
ctgataaactgataagacaaaagta

SEQ ID NO: 850705 - DNA, 25 bp, Homo sapien
gataaactgataagacaaaagtaag

SEQ ID NO: 850706 - DNA, 25 bp, Homo sapien
tggcagatataatccagaggagagg

SEQ ID NO: 850707 - DNA, 25 bp, Homo sapien
tctggagctcactgggtaataagct

SEQ ID NO: 850708 - DNA, 25 bp, Homo sapien
tcaggagatggcagatataatccag

SEQ ID NO: 850709 - DNA, 25 bp, Homo sapien
ttctggagctcactgggtaataagc

SEQ ID NO: 850710 - DNA, 25 bp, Homo sapien
agtgggggaagtactcatggaccat

SEQ ID NO: 850711 - DNA, 25 bp, Homo sapien
aatcccgtcactcgcgtgcctgtgg

SEQ ID NO: 850712 - DNA, 25 bp, Homo sapien
agcgtctggactttgcggacgccga

SEQ ID NO: 850713 - DNA, 25 bp, Homo sapien
tgtccgtttcgtgtcagtttcaggg

SEQ ID NO: 850714 - DNA, 25 bp, Homo sapien
ggccgcgggtcaatgatccaggaaa

SEQ ID NO: 850715 - DNA, 25 bp, Homo sapien
cgggctccgggcaattgcgctttag

SEQ ID NO: 850716 - DNA, 25 bp, Homo sapien
ttagtctgggtggacagcttcgccg

SEQ ID NO: 850717 - DNA, 25 bp, Homo sapien
caaatgcattgtgggtagcgcctag

SEQ ID NO: 850718 - DNA, 25 bp, Homo sapien
aatatgaaagtaaacccggcgcgtg

SEQ ID NO: 850719 - DNA, 25 bp, Homo sapien
caaccaaggtttttctgcatttcac

SEQ ID NO: 850720 - DNA, 25 bp, Homo sapien
tcaaccaaggtttttctgcatttca

SEQ ID NO: 850721 - DNA, 25 bp, Homo sapien
agcaagctagtcaagcgcggttgtg

SEQ ID NO: 850722 - DNA, 25 bp, Homo sapien
cagcaagctagtcaagcgcggttgt

SEQ ID NO: 850723 - DNA, 25 bp, Homo sapien
acagcaagctagtcaagcgcggttg

SEQ ID NO: 850724 - DNA, 25 bp, Homo sapien
gaaggttggatacagcaactcagag

SEQ ID NO: 850725 - DNA, 25 bp, Homo sapien
gagatcgagcctcttctggtgttca

SEQ ID NO: 850726 - DNA, 25 bp, Homo sapien
tgcatatagttgataacatgggtcc

SEQ ID NO: 850727 - DNA, 25 bp, Homo sapien
tcctgaagtcaacctagatcttgca

SEQ ID NO: 850728 - DNA, 25 bp, Homo sapien
cggggcttagggatcatgggcaggc

SEQ ID NO: 850729 - DNA, 25 bp, Homo sapien
gcacggggcttagggatcatgggca

SEQ ID NO: 850730 - DNA, 25 bp, Homo sapien
gcttagggatcatgggcaggcccat

SEQ ID NO: 850731 - DNA, 25 bp, Homo sapien
ctgcacggggcttagggatcatggg

SEQ ID NO: 850732 - DNA, 25 bp, Homo sapien
aagttccttgtttctccggctcctg

SEQ ID NO: 850733 - DNA, 25 bp, Homo sapien
tccataccgattataactagagccc

SEQ ID NO: 850734 - DNA, 25 bp, Homo sapien
cagtgagttactctctttggcccag

SEQ ID NO: 850735 - DNA, 25 bp, Homo sapien
cccagaactgtctgtagttccccag

SEQ ID NO: 850736 - DNA, 25 bp, Homo sapien
taacccactaccatcggaccagcca

SEQ ID NO: 850737 - DNA, 25 bp, Homo sapien
ctttgttgttaaccctttggtgcat

SEQ ID NO: 850738 - DNA, 25 bp, Homo sapien
cccagcggtcgttcggccctgtcag

SEQ ID NO: 850739 - DNA, 25 bp, Homo sapien
agaggcccagcggtcgttcggccct

SEQ ID NO: 850740 - DNA, 25 bp, Homo sapien
aggcccagcggtcgttcggccctgt

SEQ ID NO: 850741 - DNA, 25 bp, Homo sapien
ggcccagcggtcgttcggccctgtc

SEQ ID NO: 850742 - DNA, 25 bp, Homo sapien
ttcgagccagcgcttgtcaccctgt

SEQ ID NO: 850743 - DNA, 25 bp, Homo sapien
ccaggttcgagccagcgcttgtcac

SEQ ID NO: 850744 - DNA, 25 bp, Homo sapien
aggttcgagccagcgcttgtcaccc

SEQ ID NO: 850745 - DNA, 25 bp, Homo sapien
gagccagcgcttgtcaccctgtctg

SEQ ID NO: 850746 - DNA, 25 bp, Homo sapien
gcgagtatcggcaccaccaggccag

SEQ ID NO: 850747 - DNA, 25 bp, Homo sapien
agaggcgagtatcggcaccaccagg

SEQ ID NO: 850748 - DNA, 25 bp, Homo sapien
cgagaggcgagtatcggcaccacca

SEQ ID NO: 850749 - DNA, 25 bp, Homo sapien
ctgcgagaggcgagtatcggcacca

SEQ ID NO: 850750 - DNA, 25 bp, Homo sapien
cttctctgggacttgcctggagcct

SEQ ID NO: 850751 - DNA, 25 bp, Homo sapien
tgttctcctgcgtgaaggctcccag

SEQ ID NO: 850752 - DNA, 25 bp, Homo sapien
cttcttatgtgaggagcgggaacac

SEQ ID NO: 850753 - DNA, 25 bp, Homo sapien
gttctcctgcgtgaaggctcccagg

SEQ ID NO: 850754 - DNA, 25 bp, Homo sapien
tgaggagcgggaacaccgggctttc

SEQ ID NO: 850755 - DNA, 25 bp, Homo sapien
ggcagaggcgatgatcattccgtga

SEQ ID NO: 850756 - DNA, 25 bp, Homo sapien
tcagacacaaccaagtgattgacag

SEQ ID NO: 850757 - DNA, 25 bp, Homo sapien
acagggaagttgagtgagggaggca

SEQ ID NO: 850758 - DNA, 25 bp, Homo sapien
tgggaaaccttggagaagcctcgta

SEQ ID NO: 850759 - DNA, 25 bp, Homo sapien
aacaccactgcactcggaccagccg

SEQ ID NO: 850760 - DNA, 25 bp, Homo sapien
cttgctgggatttaccgacgctgga

SEQ ID NO: 850761 - DNA, 25 bp, Homo sapien
gacttgaccagagatagctagctag

SEQ ID NO: 850762 - DNA, 25 bp, Homo sapien
tacagtaaggtctactcgccgctgc

SEQ ID NO: 850763 - DNA, 25 bp, Homo sapien
agagctgtgaattcggctgccccag

SEQ ID NO: 850764 - DNA, 25 bp, Homo sapien
gaagtgttcgcttttcaccatatca

SEQ ID NO: 850765 - DNA, 25 bp, Homo sapien
tctctatccatttgttggttgatgg

SEQ ID NO: 850766 - DNA, 25 bp, Homo sapien
cagccctatgccacagtttctctat

SEQ ID NO: 850767 - DNA, 25 bp, Homo sapien
tttttcccctctgggtagatatcca

SEQ ID NO: 850768 - DNA, 25 bp, Homo sapien
gcaagtttatagaagaacatgccac

SEQ ID NO: 850769 - DNA, 25 bp, Homo sapien
agagatctggagcatttgagcaagt

SEQ ID NO: 850770 - DNA, 25 bp, Homo sapien
gaggccggcaacaaacgacagtatc

SEQ ID NO: 850771 - DNA, 25 bp, Homo sapien
cgctataaggtggagggcttcccca

SEQ ID NO: 850772 - DNA, 25 bp, Homo sapien
tcatcgagttctacgcgccatggtg

SEQ ID NO: 850773 - DNA, 25 bp, Homo sapien
ccattgtgatggaccccaagaagga

SEQ ID NO: 850774 - DNA, 25 bp, Homo sapien
aaagggcctggtcatcgccaagatg

SEQ ID NO: 850775 - DNA, 25 bp, Homo sapien
caagcagctagagcccgtgtacaac

SEQ ID NO: 850776 - DNA, 25 bp, Homo sapien
ccatggagccagaggagtttgactc

SEQ ID NO: 850777 - DNA, 25 bp, Homo sapien
cattgcggacgaagaggactatgct

SEQ ID NO: 850778 - DNA, 25 bp, Homo sapien
aatgccgccatcctggacgagagtg

SEQ ID NO: 850779 - DNA, 25 bp, Homo sapien
tgagtacacctttgccattgcggac

SEQ ID NO: 850780 - DNA, 25 bp, Homo sapien
ccaatgcggaggctgtctgggctca

SEQ ID NO: 850781 - DNA, 25 bp, Homo sapien
gatgtcaccagccaatgacgtggtg

SEQ ID NO: 850782 - DNA, 25 bp, Homo sapien
cccctgggacatttggactttatat

SEQ ID NO: 850783 - DNA, 25 bp, Homo sapien
cacccgggacttgacacattctgaa

SEQ ID NO: 850784 - DNA, 25 bp, Homo sapien
tatttcaagtctgcactacctcacc

SEQ ID NO: 850785 - DNA, 25 bp, Homo sapien
ggccattcactgtcaaaacctgtca

SEQ ID NO: 850786 - DNA, 25 bp, Homo sapien
cgtgagccacggtgtgggcttacct

SEQ ID NO: 850787 - DNA, 25 bp, Homo sapien
gattcactgataacttgtccaacag

SEQ ID NO: 850788 - DNA, 25 bp, Homo sapien
ttcccaaatttgtgtcatcgttgcc

SEQ ID NO: 850789 - DNA, 25 bp, Homo sapien
ttattcttagtatattgctgccaaa

SEQ ID NO: 850790 - DNA, 25 bp, Homo sapien
gtatattgctgccaaagacagcacg

SEQ ID NO: 850791 - DNA, 25 bp, Homo sapien
aaatttgtgtcatcgttgcccagga

SEQ ID NO: 850792 - DNA, 25 bp, Homo sapien
gatttcggtctcgatgtcttcttcc

SEQ ID NO: 850793 - DNA, 25 bp, Homo sapien
cggtctcgatgtcttcttccgccat

SEQ ID NO: 850794 - DNA, 25 bp, Homo sapien
tttcggtctcgatgtcttcttccgc

SEQ ID NO: 850795 - DNA, 25 bp, Homo sapien
cttgatttcggtctcgatgtcttct

SEQ ID NO: 850796 - DNA, 25 bp, Homo sapien
cagtgcttgtcccaggctgtgaccc

SEQ ID NO: 850797 - DNA, 25 bp, Homo sapien
gccttcagcccagtgcttgtcccag

SEQ ID NO: 850798 - DNA, 25 bp, Homo sapien
gtgcttgtcccaggctgtgacccag

SEQ ID NO: 850799 - DNA, 25 bp, Homo sapien
ccttcagcccagtgcttgtcccagg

SEQ ID NO: 850800 - DNA, 25 bp, Homo sapien
tgggagaaggacagaggacagagga

SEQ ID NO: 850801 - DNA, 25 bp, Homo sapien
ctgggagaaggacagaggacagagg

SEQ ID NO: 850802 - DNA, 25 bp, Homo sapien
ggagaaggacagaggacagaggaga

SEQ ID NO: 850803 - DNA, 25 bp, Homo sapien
agaaggacagaggacagaggagagg

SEQ ID NO: 850804 - DNA, 25 bp, Homo sapien
catgattttggatgccggggtgggg

SEQ ID NO: 850805 - DNA, 25 bp, Homo sapien
ttctggaaagatgagcattgattac

SEQ ID NO: 850806 - DNA, 25 bp, Homo sapien
caattctggaaagatgagcattgat

SEQ ID NO: 850807 - DNA, 25 bp, Homo sapien
tggaaagatgagcattgattacagg

SEQ ID NO: 850808 - DNA, 25 bp, Homo sapien
gaaagatgagcattgattacaggcg

SEQ ID NO: 850809 - DNA, 25 bp, Homo sapien
gtttatttcatctgagaaccgcccc

SEQ ID NO: 850810 - DNA, 25 bp, Homo sapien
gacctccgataatcatcccacctcg

SEQ ID NO: 850811 - DNA, 25 bp, Homo sapien
cagagaggccctgcaacaaataaac

SEQ ID NO: 850812 - DNA, 25 bp, Homo sapien
ctcctgacctccgataatcatccca

SEQ ID NO: 850813 - DNA, 25 bp, Homo sapien
aatttgctcctctgttgatatgcat

SEQ ID NO: 850814 - DNA, 25 bp, Homo sapien
actaatatcctggattgaacacggg

SEQ ID NO: 850815 - DNA, 25 bp, Homo sapien
tgatccaggttttgaggaacagctg

SEQ ID NO: 850816 - DNA, 25 bp, Homo sapien
aattcaggaagccaaactaccctgt

SEQ ID NO: 850817 - DNA, 25 bp, Homo sapien
cattgcagtgcatgccaaagagaag

SEQ ID NO: 850818 - DNA, 25 bp, Homo sapien
cagctctgttggctcaagttgaggc

SEQ ID NO: 850819 - DNA, 25 bp, Homo sapien
gattcacagggtaagatcgggcaca

SEQ ID NO: 850820 - DNA, 25 bp, Homo sapien
gggcgctcaagacccacattgcagt

SEQ ID NO: 850821 - DNA, 25 bp, Homo sapien
tgaagttccaccagcggatgcacag

SEQ ID NO: 850822 - DNA, 25 bp, Homo sapien
tcctgaatgcgagaagactttccgc

SEQ ID NO: 850823 - DNA, 25 bp, Homo sapien
tgtcccgagtgtggcaaaggcttcc

SEQ ID NO: 850824 - DNA, 25 bp, Homo sapien
agaacacattcgagtccacagcggg

SEQ ID NO: 850825 - DNA, 25 bp, Homo sapien
gacgagcacatcagagttcacacgg

SEQ ID NO: 850826 - DNA, 25 bp, Homo sapien
agagaagcccttttcgtgtcccgag

SEQ ID NO: 850827 - DNA, 25 bp, Homo sapien
gggccaacctgaagaagcacctgtg

SEQ ID NO: 850828 - DNA, 25 bp, Homo sapien
gacgcacagcgaggaaaagccgttt

SEQ ID NO: 850829 - DNA, 25 bp, Homo sapien
cagtggtgtaatctccgctcactgc

SEQ ID NO: 850830 - DNA, 25 bp, Homo sapien
aacctctgcctcctgggttcaagtg

SEQ ID NO: 850831 - DNA, 25 bp, Homo sapien
cggagtccatactggagtgcagtgg

SEQ ID NO: 850832 - DNA, 25 bp, Homo sapien
gacggagtccatactggagtgcagt

SEQ ID NO: 850833 - DNA, 25 bp, Homo sapien
gggtccctcaaagaccggcgtgctg

SEQ ID NO: 850834 - DNA, 25 bp, Homo sapien
cagatccgggagtccaagggtccct

SEQ ID NO: 850835 - DNA, 25 bp, Homo sapien
ctcagtccgggtttctgtggagcgc

SEQ ID NO: 850836 - DNA, 25 bp, Homo sapien
gtggagcgcgtctcccagtcgctgt

SEQ ID NO: 850837 - DNA, 25 bp, Homo sapien
ggaaggaacagcaccggactctcac

SEQ ID NO: 850838 - DNA, 25 bp, Homo sapien
tgcgtcttcgtgtttctcacgccct

SEQ ID NO: 850839 - DNA, 25 bp, Homo sapien
gcatccctgggcgaccctgagtccc

SEQ ID NO: 850840 - DNA, 25 bp, Homo sapien
tttctcacgccctgtgtcatggcct

SEQ ID NO: 850841 - DNA, 25 bp, Homo sapien
ctctcccgtttttgcgtcttcgtgt

SEQ ID NO: 850842 - DNA, 25 bp, Homo sapien
tcacaccactctactccagcctagg

SEQ ID NO: 850843 - DNA, 25 bp, Homo sapien
cctaggcaacagagcaagactacgt

SEQ ID NO: 850844 - DNA, 25 bp, Homo sapien
cagcctaggcaacagagcaagacta

SEQ ID NO: 850845 - DNA, 25 bp, Homo sapien
cacaccactctactccagcctaggc

SEQ ID NO: 850846 - DNA, 25 bp, Homo sapien
cgctctgcaaccctctaagtgtgag

SEQ ID NO: 850847 - DNA, 25 bp, Homo sapien
ctgcaaccctctaagtgtgaggtgg

SEQ ID NO: 850848 - DNA, 25 bp, Homo sapien
gctctgcaaccctctaagtgtgagg

SEQ ID NO: 850849 - DNA, 25 bp, Homo sapien
tctgcaaccctctaagtgtgaggtg

SEQ ID NO: 850850 - DNA, 25 bp, Homo sapien
cgtgcgccaccatgcgcaactaatt

SEQ ID NO: 850851 - DNA, 25 bp, Homo sapien
tctctatattggtcagggtggtctt

SEQ ID NO: 850852 - DNA, 25 bp, Homo sapien
ggtttctctatattggtcagggtgg

SEQ ID NO: 850853 - DNA, 25 bp, Homo sapien
tttctctatattggtcagggtggtc

SEQ ID NO: 850854 - DNA, 25 bp, Homo sapien
tgtctagcccgggcctcggaagtcg

SEQ ID NO: 850855 - DNA, 25 bp, Homo sapien
acggacgggactcacgcggccgtcg

SEQ ID NO: 850856 - DNA, 25 bp, Homo sapien
cgccgggtcctctccacaggcggcg

SEQ ID NO: 850857 - DNA, 25 bp, Homo sapien
aggaacgcggcggaggcgcggtgca

SEQ ID NO: 850858 - DNA, 25 bp, Homo sapien
ctgctcagctaacctccggccttga

SEQ ID NO: 850859 - DNA, 25 bp, Homo sapien
ctcagctaacctccggccttgaatc

SEQ ID NO: 850860 - DNA, 25 bp, Homo sapien
ggccttgaatcagtccaatcattct

SEQ ID NO: 850861 - DNA, 25 bp, Homo sapien
cggccttgaatcagtccaatcattc

SEQ ID NO: 850862 - DNA, 25 bp, Homo sapien
ggcactcggagtcccattcagatgt

SEQ ID NO: 850863 - DNA, 25 bp, Homo sapien
ctgcagggatgtaaggcactcggag

SEQ ID NO: 850864 - DNA, 25 bp, Homo sapien
gatgtaaggcactcggagtcccatt

SEQ ID NO: 850865 - DNA, 25 bp, Homo sapien
taaggcactcggagtcccattcaga

SEQ ID NO: 850866 - DNA, 25 bp, Homo sapien
tggttcccaagctcggtaactgtct

SEQ ID NO: 850867 - DNA, 25 bp, Homo sapien
cacagagagatagctgctgtctgca

SEQ ID NO: 850868 - DNA, 25 bp, Homo sapien
ttcctctctatagcctgcacggcgg

SEQ ID NO: 850869 - DNA, 25 bp, Homo sapien
gctgtctgcaggtgtgcctcatttg

SEQ ID NO: 850870 - DNA, 25 bp, Homo sapien
ctagtggtaccactttacatctaga

SEQ ID NO: 850871 - DNA, 25 bp, Homo sapien
tagtggtaccactttacatctagaa

SEQ ID NO: 850872 - DNA, 25 bp, Homo sapien
gattttagagtctaagatggacagt

SEQ ID NO: 850873 - DNA, 25 bp, Homo sapien
gatgattttagagtctaagatggac

SEQ ID NO: 850874 - DNA, 25 bp, Homo sapien
aatctttaagggaaatcacattact

SEQ ID NO: 850875 - DNA, 25 bp, Homo sapien
atctttaagggaaatcacattactt

SEQ ID NO: 850876 - DNA, 25 bp, Homo sapien
ggcacagaccaatctctaggagttc

SEQ ID NO: 850877 - DNA, 25 bp, Homo sapien
taagactgcatgtagggaatggcca

SEQ ID NO: 850878 - DNA, 25 bp, Homo sapien
tcagagttagatacaaatgcaaagc

SEQ ID NO: 850879 - DNA, 25 bp, Homo sapien
ggctggcatgactcaaaaagagatg

SEQ ID NO: 850880 - DNA, 25 bp, Homo sapien
gactttatgtactcatcctgccacc

SEQ ID NO: 850881 - DNA, 25 bp, Homo sapien
tatggcgagtcaatctttagaaaca

SEQ ID NO: 850882 - DNA, 25 bp, Homo sapien
taggcacttgagtactttttgcgac

SEQ ID NO: 850883 - DNA, 25 bp, Homo sapien
gccaccttgtatgcttgtatgttag

SEQ ID NO: 850884 - DNA, 25 bp, Homo sapien
ttctctttttcagccgttaaatctg

SEQ ID NO: 850885 - DNA, 25 bp, Homo sapien
cagccgttaaatctgctacttcagc

SEQ ID NO: 850886 - DNA, 25 bp, Homo sapien
ttcagccgttaaatctgctacttca

SEQ ID NO: 850887 - DNA, 25 bp, Homo sapien
ttttcagccgttaaatctgctactt

SEQ ID NO: 850888 - DNA, 25 bp, Homo sapien
ttgtctgacagtaaaccatccagtt

SEQ ID NO: 850889 - DNA, 25 bp, Homo sapien
gcatctggtgccttacatattaata

SEQ ID NO: 850890 - DNA, 25 bp, Homo sapien
taagggcactttgtggtgttcaata

SEQ ID NO: 850891 - DNA, 25 bp, Homo sapien
tagcttttcatcctgtaatgccaga

SEQ ID NO: 850892 - DNA, 25 bp, Homo sapien
ccctgagatacattcatgaagcata

SEQ ID NO: 850893 - DNA, 25 bp, Homo sapien
gcaagtgaggtaacttggatctgaa

SEQ ID NO: 850894 - DNA, 25 bp, Homo sapien
cattcggttcgaactctgcaagtga

SEQ ID NO: 850895 - DNA, 25 bp, Homo sapien
taatgtctccatcgtttctttcagc

SEQ ID NO: 850896 - DNA, 25 bp, Homo sapien
tcttctaatttttcccactctggag

SEQ ID NO: 850897 - DNA, 25 bp, Homo sapien
tcccactctggagtggaaaagtaga

SEQ ID NO: 850898 - DNA, 25 bp, Homo sapien
ggagacatcatcaaatgccacaggc

SEQ ID NO: 850899 - DNA, 25 bp, Homo sapien
agtggaaaagtagatggagacatca

SEQ ID NO: 850900 - DNA, 25 bp, Homo sapien
ggagatgagagactcgtagttgccc

SEQ ID NO: 850901 - DNA, 25 bp, Homo sapien
gagatgagagactcgtagttgccct

SEQ ID NO: 850902 - DNA, 25 bp, Homo sapien
gatgagagactcgtagttgcccttc

SEQ ID NO: 850903 - DNA, 25 bp, Homo sapien
tgagagactcgtagttgcccttcat

SEQ ID NO: 850904 - DNA, 25 bp, Homo sapien
tctgtattatgttccccttctggtt

SEQ ID NO: 850905 - DNA, 25 bp, Homo sapien
ctgagataagacatcaggttgattt

SEQ ID NO: 850906 - DNA, 25 bp, Homo sapien
taagacatcaggttgatttatagca

SEQ ID NO: 850907 - DNA, 25 bp, Homo sapien
cccttctggttgaatctgagataag

SEQ ID NO: 850908 - DNA, 25 bp, Homo sapien
tctaaatcagttagacgccactgaa

SEQ ID NO: 850909 - DNA, 25 bp, Homo sapien
aagacgaaagcccaaacgaccatcg

SEQ ID NO: 850910 - DNA, 25 bp, Homo sapien
gattttagcatatgcaacagttgcc

SEQ ID NO: 850911 - DNA, 25 bp, Homo sapien
aaatctaaaggtgttctcaaagcag

SEQ ID NO: 850912 - DNA, 25 bp, Homo sapien
gaatatctgatgttgaaataccagg

SEQ ID NO: 850913 - DNA, 25 bp, Homo sapien
tcttcttgtttaatccaagacagaa

SEQ ID NO: 850914 - DNA, 25 bp, Homo sapien
gtcactctccttggactccggtggg

SEQ ID NO: 850915 - DNA, 25 bp, Homo sapien
tgtacacgtcactctccttggactc

SEQ ID NO: 850916 - DNA, 25 bp, Homo sapien
tcagggcacaacgaggatctagcaa

SEQ ID NO: 850917 - DNA, 25 bp, Homo sapien
gaacctcagggcacaacgaggatct

SEQ ID NO: 850918 - DNA, 25 bp, Homo sapien
gggcacaacgaggatctagcaaggc

SEQ ID NO: 850919 - DNA, 25 bp, Homo sapien
acaacgaggatctagcaaggccttc

SEQ ID NO: 850920 - DNA, 25 bp, Homo sapien
tgagtcgagcctggtcagcaaagcg

SEQ ID NO: 850921 - DNA, 25 bp, Homo sapien
caggtcagtggctggacgtccaaaa

SEQ ID NO: 850922 - DNA, 25 bp, Homo sapien
tcttgtgcatgaccccgctggtgga

SEQ ID NO: 850923 - DNA, 25 bp, Homo sapien
cgctcagtgctgttatggacccgaa

SEQ ID NO: 850924 - DNA, 25 bp, Homo sapien
ctgatgggtcactatcacccccaca

SEQ ID NO: 850925 - DNA, 25 bp, Homo sapien
tgatgggtcactatcacccccacag

SEQ ID NO: 850926 - DNA, 25 bp, Homo sapien
ccttcagtgttgacacccaggccag

SEQ ID NO: 850927 - DNA, 25 bp, Homo sapien
ttccccataccactggttggtctct

SEQ ID NO: 850928 - DNA, 25 bp, Homo sapien
ggtctctagaccttcagtgttgaca

SEQ ID NO: 850929 - DNA, 25 bp, Homo sapien
aggccagaagtttcaagcccagtta

SEQ ID NO: 850930 - DNA, 25 bp, Homo sapien
taatctaagaaacctaggcaggcag

SEQ ID NO: 850931 - DNA, 25 bp, Homo sapien
gaacttaggcccagttgcaaagcca

SEQ ID NO: 850932 - DNA, 25 bp, Homo sapien
tcctagtgggttgccaatgaagcca

SEQ ID NO: 850933 - DNA, 25 bp, Homo sapien
tactgaggaccaagagttcactggc

SEQ ID NO: 850934 - DNA, 25 bp, Homo sapien
ttccgtctctctgggatggccttgc

SEQ ID NO: 850935 - DNA, 25 bp, Homo sapien
gaggcttagtatcgcacctgcttcc

SEQ ID NO: 850936 - DNA, 25 bp, Homo sapien
taggtccctgctggctacacagttc

SEQ ID NO: 850937 - DNA, 25 bp, Homo sapien
catcgcctttcgttccatctgaggg

SEQ ID NO: 850938 - DNA, 25 bp, Homo sapien
catggtttctctcaggagcacttga

SEQ ID NO: 850939 - DNA, 25 bp, Homo sapien
cctggatccactctaagggaatggt

SEQ ID NO: 850940 - DNA, 25 bp, Homo sapien
acactctttggaactggcctgcagt

SEQ ID NO: 850941 - DNA, 25 bp, Homo sapien
tggttatagtcaacacctggatcca

SEQ ID NO: 850942 - DNA, 25 bp, Homo sapien
tcatccaatggtgacaatggaaaac

SEQ ID NO: 850943 - DNA, 25 bp, Homo sapien
tttcacaactgtggctaaaccagag

SEQ ID NO: 850944 - DNA, 25 bp, Homo sapien
tcaaccaacttccatttattttcac

SEQ ID NO: 850945 - DNA, 25 bp, Homo sapien
attttcacaactgtggctaaaccag

SEQ ID NO: 850946 - DNA, 25 bp, Homo sapien
tcacaactgtggctaaaccagaggt

SEQ ID NO: 850947 - DNA, 25 bp, Homo sapien
tccccgctaataggaaacttgcaca

SEQ ID NO: 850948 - DNA, 25 bp, Homo sapien
tattaccgagtaagtcacagggtct

SEQ ID NO: 850949 - DNA, 25 bp, Homo sapien
taatatcaacgaggcttgtgtggac

SEQ ID NO: 850950 - DNA, 25 bp, Homo sapien
tttgttcatggctactgagctgccc

SEQ ID NO: 850951 - DNA, 25 bp, Homo sapien
tgtcaggacttgaatcgaggactcc

SEQ ID NO: 850952 - DNA, 25 bp, Homo sapien
gatgtattgttgttaaggccctgca

SEQ ID NO: 850953 - DNA, 25 bp, Homo sapien
ttggtcctgtaaaatctgatagccg

SEQ ID NO: 850954 - DNA, 25 bp, Homo sapien
tagccgatatactgaacacctcctg

SEQ ID NO: 850955 - DNA, 25 bp, Homo sapien
tggcaatcctactccagaataaagg

SEQ ID NO: 850956 - DNA, 25 bp, Homo sapien
gagcaaccatgtgcctaacagcatg

SEQ ID NO: 850957 - DNA, 25 bp, Homo sapien
ggtagtttgccccatacaagtagag

SEQ ID NO: 850958 - DNA, 25 bp, Homo sapien
taatacatggcctctgttcttgggt

SEQ ID NO: 850959 - DNA, 25 bp, Homo sapien
ctccaaggtgtttatactgctttgc

SEQ ID NO: 850960 - DNA, 25 bp, Homo sapien
actgctttgcagaacaatcactcaa

SEQ ID NO: 850961 - DNA, 25 bp, Homo sapien
agtctgtaaaaacgcatacctctcc

SEQ ID NO: 850962 - DNA, 25 bp, Homo sapien
taaaaacgcatacctctccaaggtg

SEQ ID NO: 850963 - DNA, 25 bp, Homo sapien
tgcaggcacattaaaaccacttggg

SEQ ID NO: 850964 - DNA, 25 bp, Homo sapien
cagcataggcatagggtaccagtct

SEQ ID NO: 850965 - DNA, 25 bp, Homo sapien
taaatcataccatggcgggccttgg

SEQ ID NO: 850966 - DNA, 25 bp, Homo sapien
tgatcttctgtaccttgcaggcaca

SEQ ID NO: 850967 - DNA, 25 bp, Homo sapien
tacgaagtacaatgtggtcaccggg

SEQ ID NO: 850968 - DNA, 25 bp, Homo sapien
cctaatttaatgagcaggctacgaa

SEQ ID NO: 850969 - DNA, 25 bp, Homo sapien
tttaggttacaatacaagtgacagc

SEQ ID NO: 850970 - DNA, 25 bp, Homo sapien
cactaggagtaaggtgacaaagctc

SEQ ID NO: 850971 - DNA, 25 bp, Homo sapien
gagaagaagaacgttttccaggcgc

SEQ ID NO: 850972 - DNA, 25 bp, Homo sapien
gggagtgctgttccccgctcgggtc

SEQ ID NO: 850973 - DNA, 25 bp, Homo sapien
tacagcccgtaggagcaaacagtcc

SEQ ID NO: 850974 - DNA, 25 bp, Homo sapien
ctgttccccgctcgggtcggccagg

SEQ ID NO: 850975 - DNA, 25 bp, Homo sapien
atgggcggcattccctcggccattt

SEQ ID NO: 850976 - DNA, 25 bp, Homo sapien
gaggctgcggccgtgttgacacaaa

SEQ ID NO: 850977 - DNA, 25 bp, Homo sapien
gctgcggccgtgttgacacaaactg

SEQ ID NO: 850978 - DNA, 25 bp, Homo sapien
ctgaggctgcggccgtgttgacaca

SEQ ID NO: 850979 - DNA, 25 bp, Homo sapien
gagagcagggccctaggatcgccag

SEQ ID NO: 850980 - DNA, 25 bp, Homo sapien
gacctgctccgggacacagcagagt

SEQ ID NO: 850981 - DNA, 25 bp, Homo sapien
tgtcattttctgtcctcccgatggc

SEQ ID NO: 850982 - DNA, 25 bp, Homo sapien
cagaaaaggccctcaggctaggaaa

SEQ ID NO: 850983 - DNA, 25 bp, Homo sapien
cacttgctctccatgtggttcccaa

SEQ ID NO: 850984 - DNA, 25 bp, Homo sapien
aagacaggtgccctatctggaaagg

SEQ ID NO: 850985 - DNA, 25 bp, Homo sapien
ttccacggccgtcttttcacagtcg

SEQ ID NO: 850986 - DNA, 25 bp, Homo sapien
tgggaactgaaaaggcattggccgc

SEQ ID NO: 850987 - DNA, 25 bp, Homo sapien
ccctgccccagggaccaccacatac

SEQ ID NO: 850988 - DNA, 25 bp, Homo sapien
ctatccctgccccagggaccaccac

SEQ ID NO: 850989 - DNA, 25 bp, Homo sapien
ctctatccctgccccagggaccacc

SEQ ID NO: 850990 - DNA, 25 bp, Homo sapien
atccctgccccagggaccaccacat

SEQ ID NO: 850991 - DNA, 25 bp, Homo sapien
acctcctgcctgtgaagcttaatct

SEQ ID NO: 850992 - DNA, 25 bp, Homo sapien
taatctaagtcatcagtttctccct

SEQ ID NO: 850993 - DNA, 25 bp, Homo sapien
gtccttcagggtcattccaacctca

SEQ ID NO: 850994 - DNA, 25 bp, Homo sapien
ctccctctctactggctccgtcctt

SEQ ID NO: 850995 - DNA, 25 bp, Homo sapien
actgcacctggcctcttcattttgt

SEQ ID NO: 850996 - DNA, 25 bp, Homo sapien
gtgcagtgacgcgataccagctcac

SEQ ID NO: 850997 - DNA, 25 bp, Homo sapien
tgcagtgacgcgataccagctcact

SEQ ID NO: 850998 - DNA, 25 bp, Homo sapien
gcacctggcctcttcattttgtttt

SEQ ID NO: 850999 - DNA, 25 bp, Homo sapien
tacacagcaatgtcgacaaaagtca

SEQ ID NO: 851000 - DNA, 25 bp, Homo sapien
agctccttctgccattcgtccaagt

SEQ ID NO: 851001 - DNA, 25 bp, Homo sapien
cactcgtcttcggagaagtacacag

SEQ ID NO: 851002 - DNA, 25 bp, Homo sapien
caagttcttccactcgtcttcggag

SEQ ID NO: 851003 - DNA, 25 bp, Homo sapien
atctggcttggggactgagccctcc

SEQ ID NO: 851004 - DNA, 25 bp, Homo sapien
ctggcttggggactgagccctccgc

SEQ ID NO: 851005 - DNA, 25 bp, Homo sapien
tcagcctggactggagcatctggct

SEQ ID NO: 851006 - DNA, 25 bp, Homo sapien
agcctggactggagcatctggcttg

SEQ ID NO: 851007 - DNA, 25 bp, Homo sapien
tcgggatccattgggatttctctct

SEQ ID NO: 851008 - DNA, 25 bp, Homo sapien
tttctctctcttcggggtggcgctg

SEQ ID NO: 851009 - DNA, 25 bp, Homo sapien
gctcccacacacaaggttcttccct

SEQ ID NO: 851010 - DNA, 25 bp, Homo sapien
tcccacacacaaggttcttccctgg

SEQ ID NO: 851011 - DNA, 25 bp, Homo sapien
aggacgcatcctgcgcaggcaccag

SEQ ID NO: 851012 - DNA, 25 bp, Homo sapien
tgaccccggacacacagggtgtcct

SEQ ID NO: 851013 - DNA, 25 bp, Homo sapien
acctgggaggacgcatcctgcgcag

SEQ ID NO: 851014 - DNA, 25 bp, Homo sapien
taatggattccgtagggatggctct

SEQ ID NO: 851015 - DNA, 25 bp, Homo sapien
cctcctgtttaatccgggacaagag

SEQ ID NO: 851016 - DNA, 25 bp, Homo sapien
taatccgggacaagaggtcctgggc

SEQ ID NO: 851017 - DNA, 25 bp, Homo sapien
gggatccgtgggaatatctctgtct

SEQ ID NO: 851018 - DNA, 25 bp, Homo sapien
atctctgtctgccaaatcctgctga

SEQ ID NO: 851019 - DNA, 25 bp, Homo sapien
tggtccccatgggtatggctgctcc

SEQ ID NO: 851020 - DNA, 25 bp, Homo sapien
agggccagagtctaatccaagctct

SEQ ID NO: 851021 - DNA, 25 bp, Homo sapien
ccattgagtcgcgtggtccccatgg

SEQ ID NO: 851022 - DNA, 25 bp, Homo sapien
caagctctccgtccattgagtcgcg

SEQ ID NO: 851023 - DNA, 25 bp, Homo sapien
tgccttcgggccagggctagcaatg

SEQ ID NO: 851024 - DNA, 25 bp, Homo sapien
gccagggctagcaatggtagcctac

SEQ ID NO: 851025 - DNA, 25 bp, Homo sapien
tagttcctatgccttcgggccaggg

SEQ ID NO: 851026 - DNA, 25 bp, Homo sapien
cagggctagcaatggtagcctacca

SEQ ID NO: 851027 - DNA, 25 bp, Homo sapien
tgcctaggacccaactgctccccgg

SEQ ID NO: 851028 - DNA, 25 bp, Homo sapien
taggacccaactgctccccggaggc

SEQ ID NO: 851029 - DNA, 25 bp, Homo sapien
ctctgcctaggacccaactgctccc

SEQ ID NO: 851030 - DNA, 25 bp, Homo sapien
acccctctgcctaggacccaactgc

SEQ ID NO: 851031 - DNA, 25 bp, Homo sapien
agccagcacacacactgacaatgct

SEQ ID NO: 851032 - DNA, 25 bp, Homo sapien
gcacacacactgacaatgctcactt

SEQ ID NO: 851033 - DNA, 25 bp, Homo sapien
tgtgagccagcacacacactgacaa

SEQ ID NO: 851034 - DNA, 25 bp, Homo sapien
atgtgagccagcacacacactgaca

SEQ ID NO: 851035 - DNA, 25 bp, Homo sapien
gccattgcactggcccaggcatcca

SEQ ID NO: 851036 - DNA, 25 bp, Homo sapien
tcttgccattgcactggcccaggca

SEQ ID NO: 851037 - DNA, 25 bp, Homo sapien
gccgggagtggtggcccatgcatgt

SEQ ID NO: 851038 - DNA, 25 bp, Homo sapien
cgggagtggtggcccatgcatgtaa

SEQ ID NO: 851039 - DNA, 25 bp, Homo sapien
cctccagaacgctgagggctaaggg

SEQ ID NO: 851040 - DNA, 25 bp, Homo sapien
aggaagtccctccagaacgctgagg

SEQ ID NO: 851041 - DNA, 25 bp, Homo sapien
cccagaaacgggtcaagcaggtggc

SEQ ID NO: 851042 - DNA, 25 bp, Homo sapien
aaacgggtcaagcaggtggcacgca

SEQ ID NO: 851043 - DNA, 25 bp, Homo sapien
gtggcccttcgacctgttcgaagcc

SEQ ID NO: 851044 - DNA, 25 bp, Homo sapien
tggcccttcgacctgttcgaagcca

SEQ ID NO: 851045 - DNA, 25 bp, Homo sapien
gcccttcgacctgttcgaagccacc

SEQ ID NO: 851046 - DNA, 25 bp, Homo sapien
cttcgacctgttcgaagccaccctg

SEQ ID NO: 851047 - DNA, 25 bp, Homo sapien
gggtgggttcttcaccatcagcagg

SEQ ID NO: 851048 - DNA, 25 bp, Homo sapien
cgcccgggttctcggccaccgcgat

SEQ ID NO: 851049 - DNA, 25 bp, Homo sapien
ggttcttcaccatcagcaggctgtc

SEQ ID NO: 851050 - DNA, 25 bp, Homo sapien
gcacctggaaaccgtcgtccagcag

SEQ ID NO: 851051 - DNA, 25 bp, Homo sapien
gctcttgcgcacgccgaagctcttg

SEQ ID NO: 851052 - DNA, 25 bp, Homo sapien
atgaggctcttgcgcacgccgaagc

SEQ ID NO: 851053 - DNA, 25 bp, Homo sapien
ggctcttgcgcacgccgaagctctt

SEQ ID NO: 851054 - DNA, 25 bp, Homo sapien
gaggctcttgcgcacgccgaagctc

SEQ ID NO: 851055 - DNA, 25 bp, Homo sapien
gcaggtgctccttacggctgtaggt

SEQ ID NO: 851056 - DNA, 25 bp, Homo sapien
agtgcacattggaaaggccgctcgc

SEQ ID NO: 851057 - DNA, 25 bp, Homo sapien
gcccgagtggcagttgaagctcttc

SEQ ID NO: 851058 - DNA, 25 bp, Homo sapien
ttctcgcactcagcgcactcgtagg

SEQ ID NO: 851059 - DNA, 25 bp, Homo sapien
tggtccttgagcgactccttgtagc

SEQ ID NO: 851060 - DNA, 25 bp, Homo sapien
gcgcaggtggtccttgagcgactcc

SEQ ID NO: 851061 - DNA, 25 bp, Homo sapien
ccttgagcgactccttgtagcggaa

SEQ ID NO: 851062 - DNA, 25 bp, Homo sapien
gcgactccttgtagcggaagctctt

SEQ ID NO: 851063 - DNA, 25 bp, Homo sapien
aggaggcggcgggagctgccgtggg

SEQ ID NO: 851064 - DNA, 25 bp, Homo sapien
ggcggcgggagctgccgtggggcgc

SEQ ID NO: 851065 - DNA, 25 bp, Homo sapien
tagtctcgctcaggaggcggcggga

SEQ ID NO: 851066 - DNA, 25 bp, Homo sapien
ctagtctcgctcaggaggcggcggg

SEQ ID NO: 851067 - DNA, 25 bp, Homo sapien
ggttggtgctcaggccgcccccgat

SEQ ID NO: 851068 - DNA, 25 bp, Homo sapien
gatccactccgtccggccctgccct

SEQ ID NO: 851069 - DNA, 25 bp, Homo sapien
ccccgatccactccgtccggccctg

SEQ ID NO: 851070 - DNA, 25 bp, Homo sapien
cacccggcaaggtggttggtgctca

SEQ ID NO: 851071 - DNA, 25 bp, Homo sapien
cagctgggtccaccctagatgagct

SEQ ID NO: 851072 - DNA, 25 bp, Homo sapien
gcaatgcctgttgccgatttccaga

SEQ ID NO: 851073 - DNA, 25 bp, Homo sapien
gagctgggcgtccattcagaccaga

SEQ ID NO: 851074 - DNA, 25 bp, Homo sapien
ctgatgaccatctgtggcccagtgg

SEQ ID NO: 851075 - DNA, 25 bp, Homo sapien
tgagcacgggcagtaacagatagca

SEQ ID NO: 851076 - DNA, 25 bp, Homo sapien
tcccgtgtgattgggtgaaccgtct

SEQ ID NO: 851077 - DNA, 25 bp, Homo sapien
ctgggaagagacacgtgacggctac

SEQ ID NO: 851078 - DNA, 25 bp, Homo sapien
gatagcaccaattgggaggcccagg

SEQ ID NO: 851079 - DNA, 25 bp, Homo sapien
tgcaccaacgtgaaggggaatcctt

SEQ ID NO: 851080 - DNA, 25 bp, Homo sapien
agactgtggcccctcgggacgcagc

SEQ ID NO: 851081 - DNA, 25 bp, Homo sapien
catgcaagacgctgaaatggagact

SEQ ID NO: 851082 - DNA, 25 bp, Homo sapien
ccggtgccaggccatgcaagacgct

SEQ ID NO: 851083 - DNA, 25 bp, Homo sapien
tgggaggaacgccggacccacggca

SEQ ID NO: 851084 - DNA, 25 bp, Homo sapien
cacggcaagggcagggaaagtcatt

SEQ ID NO: 851085 - DNA, 25 bp, Homo sapien
gaacgccggacccacggcaagggca

SEQ ID NO: 851086 - DNA, 25 bp, Homo sapien
catttttgacacaaacaagggtcct

SEQ ID NO: 851087 - DNA, 25 bp, Homo sapien
gggtgccggctgcccactgtgatcc

SEQ ID NO: 851088 - DNA, 25 bp, Homo sapien
gtgccggctgcccactgtgatcccg

SEQ ID NO: 851089 - DNA, 25 bp, Homo sapien
ggtgccggctgcccactgtgatccc

SEQ ID NO: 851090 - DNA, 25 bp, Homo sapien
tgccggctgcccactgtgatcccgg

SEQ ID NO: 851091 - DNA, 25 bp, Homo sapien
tttgcacggcaaaaaggggtctgag

SEQ ID NO: 851092 - DNA, 25 bp, Homo sapien
aagcaggacgctcgccaaagtggtg

SEQ ID NO: 851093 - DNA, 25 bp, Homo sapien
ggcgagggcggaagcaggacgctcg

SEQ ID NO: 851094 - DNA, 25 bp, Homo sapien
agcagcgtagatgagggcgagggcg

SEQ ID NO: 851095 - DNA, 25 bp, Homo sapien
agttcattgaggctttactgtaggc

SEQ ID NO: 851096 - DNA, 25 bp, Homo sapien
cagttcattgaggctttactgtagg

SEQ ID NO: 851097 - DNA, 25 bp, Homo sapien
tctgcctttcaatcccaattgcatt

SEQ ID NO: 851098 - DNA, 25 bp, Homo sapien
cattctccccagtgtgtttcaccct

SEQ ID NO: 851099 - DNA, 25 bp, Homo sapien
ttctgcctttcaatcccaattgcat

SEQ ID NO: 851100 - DNA, 25 bp, Homo sapien
tctggcctcctttcagcgctatgca

SEQ ID NO: 851101 - DNA, 25 bp, Homo sapien
tcatttttggtggtgtctgacttaa

SEQ ID NO: 851102 - DNA, 25 bp, Homo sapien
taaacctgccttcttgagacttcca

SEQ ID NO: 851103 - DNA, 25 bp, Homo sapien
ttcagcgctatgcattcactgtttc

SEQ ID NO: 851104 - DNA, 25 bp, Homo sapien
taatgactccctaggaggcatggcc

SEQ ID NO: 851105 - DNA, 25 bp, Homo sapien
tgtgaaattataggcacaggctggc

SEQ ID NO: 851106 - DNA, 25 bp, Homo sapien
tgggcctctaggatgctctatcgca

SEQ ID NO: 851107 - DNA, 25 bp, Homo sapien
tccaaaacagggttctgggcctcta

SEQ ID NO: 851108 - DNA, 25 bp, Homo sapien
aacctatagaaattatcatgctgag

SEQ ID NO: 851109 - DNA, 25 bp, Homo sapien
ctatagaaattatcatgctgagggg

SEQ ID NO: 851110 - DNA, 25 bp, Homo sapien
atagaaattatcatgctgaggggtg

SEQ ID NO: 851111 - DNA, 25 bp, Homo sapien
cctatagaaattatcatgctgaggg

SEQ ID NO: 851112 - DNA, 25 bp, Homo sapien
catggcttggaagtggtcaagagac

SEQ ID NO: 851113 - DNA, 25 bp, Homo sapien
gcttggaagtggtcaagagacaagc

SEQ ID NO: 851114 - DNA, 25 bp, Homo sapien
tggcttggaagtggtcaagagacaa

SEQ ID NO: 851115 - DNA, 25 bp, Homo sapien
ttggaagtggtcaagagacaagcct

SEQ ID NO: 851116 - DNA, 25 bp, Homo sapien
agtggtgaagcagtcttcagggaca

SEQ ID NO: 851117 - DNA, 25 bp, Homo sapien
cttgagagaccaggacttggacaca

SEQ ID NO: 851118 - DNA, 25 bp, Homo sapien
gggagcgtgtgacctagagtggtga

SEQ ID NO: 851119 - DNA, 25 bp, Homo sapien
tgagagaccaggacttggacacagc

SEQ ID NO: 851120 - DNA, 25 bp, Homo sapien
tggagatacttctaaaacccctgtg

SEQ ID NO: 851121 - DNA, 25 bp, Homo sapien
cctgctagactgcaggtcagtgaga

SEQ ID NO: 851122 - DNA, 25 bp, Homo sapien
tcaacacgcattggctcaaggtgcc

SEQ ID NO: 851123 - DNA, 25 bp, Homo sapien
tgcctcccggctgtttatgtgtctg

SEQ ID NO: 851124 - DNA, 25 bp, Homo sapien
cgggcctggccgaacaatgtctttt

SEQ ID NO: 851125 - DNA, 25 bp, Homo sapien
ctccccggcacaagaccggctccag

SEQ ID NO: 851126 - DNA, 25 bp, Homo sapien
gtgctgcgttcctgtccgctcggcg

SEQ ID NO: 851127 - DNA, 25 bp, Homo sapien
cccggcacaagaccggctccagccg

SEQ ID NO: 851128 - DNA, 25 bp, Homo sapien
tcggagcccccgtgctgcgttcctg

SEQ ID NO: 851129 - DNA, 25 bp, Homo sapien
ctccagtcgcccctcaacacccaga

SEQ ID NO: 851130 - DNA, 25 bp, Homo sapien
ggctccagtcgcccctcaacaccca

SEQ ID NO: 851131 - DNA, 25 bp, Homo sapien
gctccagtcgcccctcaacacccag

SEQ ID NO: 851132 - DNA, 25 bp, Homo sapien
tgggaacgggctcttttggcacgaa

SEQ ID NO: 851133 - DNA, 25 bp, Homo sapien
gacggagaccgtttccaatctggaa

SEQ ID NO: 851134 - DNA, 25 bp, Homo sapien
gagagctcactcgtagcgacggaga

SEQ ID NO: 851135 - DNA, 25 bp, Homo sapien
tagataacatccgtccccaaggaga

SEQ ID NO: 851136 - DNA, 25 bp, Homo sapien
gaatgttaccctttgaactctctgc

SEQ ID NO: 851137 - DNA, 25 bp, Homo sapien
aaggtcagaccttactttcagttca

SEQ ID NO: 851138 - DNA, 25 bp, Homo sapien
aactctctgcttcatgggattgggt

SEQ ID NO: 851139 - DNA, 25 bp, Homo sapien
gattgggttagggagcttcttagac

SEQ ID NO: 851140 - DNA, 25 bp, Homo sapien
tgctagaatcccttgagaaatccca

SEQ ID NO: 851141 - DNA, 25 bp, Homo sapien
tctgcagttaaaggagggtggcaca

SEQ ID NO: 851142 - DNA, 25 bp, Homo sapien
gaagtgttctgttcaacggccttac

SEQ ID NO: 851143 - DNA, 25 bp, Homo sapien
tggcacatggatggttcgtctctgc

SEQ ID NO: 851144 - DNA, 25 bp, Homo sapien
cataaacatagtatgcaaatccttt

SEQ ID NO: 851145 - DNA, 25 bp, Homo sapien
agtggcacgattatacgtcctggta

SEQ ID NO: 851146 - DNA, 25 bp, Homo sapien
agtcaccccacccaacagaaaagtg

SEQ ID NO: 851147 - DNA, 25 bp, Homo sapien
gattatacgtcctggtattacaggc

SEQ ID NO: 851148 - DNA, 25 bp, Homo sapien
gaaactgactggtgcagaactgaac

SEQ ID NO: 851149 - DNA, 25 bp, Homo sapien
gaaatatctcggaaagaactgctgg

SEQ ID NO: 851150 - DNA, 25 bp, Homo sapien
gaatctgtgcaaaggaataagcccc

SEQ ID NO: 851151 - DNA, 25 bp, Homo sapien
caccaagaccgagacactagaggaa

SEQ ID NO: 851152 - DNA, 25 bp, Homo sapien
ccagacttcatagttgatcatgtca

SEQ ID NO: 851153 - DNA, 25 bp, Homo sapien
ttgatcatgtcacccgtttgaaaac

SEQ ID NO: 851154 - DNA, 25 bp, Homo sapien
catagttgatcatgtcacccgtttg

SEQ ID NO: 851155 - DNA, 25 bp, Homo sapien
ccctgccagacttcatagttgatca

SEQ ID NO: 851156 - DNA, 25 bp, Homo sapien
tcagtgctcagagttatctagtttc

SEQ ID NO: 851157 - DNA, 25 bp, Homo sapien
cacacacaataagctgttagggctg

SEQ ID NO: 851158 - DNA, 25 bp, Homo sapien
aaatcttctcacacacaataagctg

SEQ ID NO: 851159 - DNA, 25 bp, Homo sapien
gaaagcagtgttcaagtgtatcagt

SEQ ID NO: 851160 - DNA, 25 bp, Homo sapien
gatggattaaagacacagggtcaat

SEQ ID NO: 851161 - DNA, 25 bp, Homo sapien
ctgatggattaaagacacagggtca

SEQ ID NO: 851162 - DNA, 25 bp, Homo sapien
tggattaaagacacagggtcaatgt

SEQ ID NO: 851163 - DNA, 25 bp, Homo sapien
gattaaagacacagggtcaatgtca

SEQ ID NO: 851164 - DNA, 25 bp, Homo sapien
taaaggtgtggagcgtcgttttctc

SEQ ID NO: 851165 - DNA, 25 bp, Homo sapien
caccaccgtccagagtgaaatctcg

SEQ ID NO: 851166 - DNA, 25 bp, Homo sapien
gtgaaatctcggtggtctgaaaata

SEQ ID NO: 851167 - DNA, 25 bp, Homo sapien
gaagaagttaaaggtgtggagcgtc

SEQ ID NO: 851168 - DNA, 25 bp, Homo sapien
accagtgtctcatagttactctcca

SEQ ID NO: 851169 - DNA, 25 bp, Homo sapien
gttactctccatcacgtttctgtag

SEQ ID NO: 851170 - DNA, 25 bp, Homo sapien
agattctcccattcctgctcggtga

SEQ ID NO: 851171 - DNA, 25 bp, Homo sapien
ctgctcggtgaaacagacgccatca

SEQ ID NO: 851172 - DNA, 25 bp, Homo sapien
ccaagatgaccaatggcagggagga

SEQ ID NO: 851173 - DNA, 25 bp, Homo sapien
caactgacttggctagctgctgcct

SEQ ID NO: 851174 - DNA, 25 bp, Homo sapien
tgtcagtttcccctagcagtttggg

SEQ ID NO: 851175 - DNA, 25 bp, Homo sapien
cagagctaccactgcccttgatggc

SEQ ID NO: 851176 - DNA, 25 bp, Homo sapien
tctgtacccaactccgcttctccct

SEQ ID NO: 851177 - DNA, 25 bp, Homo sapien
tacccaactccgcttctccctctgt

SEQ ID NO: 851178 - DNA, 25 bp, Homo sapien
ctgtacccaactccgcttctccctc

SEQ ID NO: 851179 - DNA, 25 bp, Homo sapien
gtacccaactccgcttctccctctg

SEQ ID NO: 851180 - DNA, 25 bp, Homo sapien
taagtgaattaggataacgtggagg

SEQ ID NO: 851181 - DNA, 25 bp, Homo sapien
gatcacattctagtacctttggttt

SEQ ID NO: 851182 - DNA, 25 bp, Homo sapien
ggaggatgacactggctaggttcca

SEQ ID NO: 851183 - DNA, 25 bp, Homo sapien
ggaagaagaccaacaaaaaagatca

SEQ ID NO: 851184 - DNA, 25 bp, Homo sapien
aagaggacagaactgccctgaccac

SEQ ID NO: 851185 - DNA, 25 bp, Homo sapien
tgaccaccccagagttcggtctgct

SEQ ID NO: 851186 - DNA, 25 bp, Homo sapien
tcagcaatgcatgagaactctccag

SEQ ID NO: 851187 - DNA, 25 bp, Homo sapien
ctccaggaagatccgcagggccttc

SEQ ID NO: 851188 - DNA, 25 bp, Homo sapien
caggctcctctagagtagagtcccc

SEQ ID NO: 851189 - DNA, 25 bp, Homo sapien
ggaactctactaccaacaggctcct

SEQ ID NO: 851190 - DNA, 25 bp, Homo sapien
ctgctgctaggaactctactaccaa

SEQ ID NO: 851191 - DNA, 25 bp, Homo sapien
aggctcctctagagtagagtcccca

SEQ ID NO: 851192 - DNA, 25 bp, Homo sapien
tggctcctcaggtgtacaagacccc

SEQ ID NO: 851193 - DNA, 25 bp, Homo sapien
gccacagtaaccacagatgagggaa

SEQ ID NO: 851194 - DNA, 25 bp, Homo sapien
ccagctgctgcttatagcggaaggt

SEQ ID NO: 851195 - DNA, 25 bp, Homo sapien
cagatgggtgactgaagctcttgcc

SEQ ID NO: 851196 - DNA, 25 bp, Homo sapien
gaagacatgaaatgccgggacgagc

SEQ ID NO: 851197 - DNA, 25 bp, Homo sapien
tctccggcctaagtaagcatcagtg

SEQ ID NO: 851198 - DNA, 25 bp, Homo sapien
ttccacagggttttcaggacagcct

SEQ ID NO: 851199 - DNA, 25 bp, Homo sapien
taagcaaccgcaaatcatccaaggg

SEQ ID NO: 851200 - DNA, 25 bp, Homo sapien
gcgccagccctacaaggattccctc

SEQ ID NO: 851201 - DNA, 25 bp, Homo sapien
cgccagccctacaaggattccctcc

SEQ ID NO: 851202 - DNA, 25 bp, Homo sapien
agcgccagccctacaaggattccct

SEQ ID NO: 851203 - DNA, 25 bp, Homo sapien
aactgacaacatccagtggaggccc

SEQ ID NO: 851204 - DNA, 25 bp, Homo sapien
cccagtccgtggagtaacaagggtg

SEQ ID NO: 851205 - DNA, 25 bp, Homo sapien
ctctgggtgaactgacaacatccag

SEQ ID NO: 851206 - DNA, 25 bp, Homo sapien
tggaggcccagtccgtggagtaaca

SEQ ID NO: 851207 - DNA, 25 bp, Homo sapien
tctttaattgttaatctgtctcttg

SEQ ID NO: 851208 - DNA, 25 bp, Homo sapien
catctttaattgttaatctgtctct

SEQ ID NO: 851209 - DNA, 25 bp, Homo sapien
cattcatctttaattgttaatctgt

SEQ ID NO: 851210 - DNA, 25 bp, Homo sapien
ttcatctttaattgttaatctgtct

SEQ ID NO: 851211 - DNA, 25 bp, Homo sapien
ggaccgagactctgttgcagcgcct

SEQ ID NO: 851212 - DNA, 25 bp, Homo sapien
gaaagtgcgaaacctcgcgagggaa

SEQ ID NO: 851213 - DNA, 25 bp, Homo sapien
gaaggaaccgcgctggaaagtgcga

SEQ ID NO: 851214 - DNA, 25 bp, Homo sapien
aaaggatacgtgtgtacccagggag

SEQ ID NO: 851215 - DNA, 25 bp, Homo sapien
cagcgacggcggaagcggagcggga

SEQ ID NO: 851216 - DNA, 25 bp, Homo sapien
taacctgagagctactgccgggcgg

SEQ ID NO: 851217 - DNA, 25 bp, Homo sapien
agcgaactgcgtcccgagccacgtg

SEQ ID NO: 851218 - DNA, 25 bp, Homo sapien
ccgcgtccctcgctgggttgcagtc

SEQ ID NO: 851219 - DNA, 25 bp, Homo sapien
gcgtccgcggggccgagggcgctta

SEQ ID NO: 851220 - DNA, 25 bp, Homo sapien
tgcactcagggaacccaaaaagaag

SEQ ID NO: 851221 - DNA, 25 bp, Homo sapien
cagggaacccaaaaagaagctcagc

SEQ ID NO: 851222 - DNA, 25 bp, Homo sapien
cccaaaaagaagctcagcacactca

SEQ ID NO: 851223 - DNA, 25 bp, Homo sapien
ttttctctcccttgcactcagggaa

SEQ ID NO: 851224 - DNA, 25 bp, Homo sapien
tggtatctgattcacaagccctcat

SEQ ID NO: 851225 - DNA, 25 bp, Homo sapien
cctggtatctgattcacaagccctc

SEQ ID NO: 851226 - DNA, 25 bp, Homo sapien
ctggtatctgattcacaagccctca

SEQ ID NO: 851227 - DNA, 25 bp, Homo sapien
tttgtggcacagagaacatgactcc

SEQ ID NO: 851228 - DNA, 25 bp, Homo sapien
gatcttgctgtatgccacgtgagga

SEQ ID NO: 851229 - DNA, 25 bp, Homo sapien
tagcgcccttgtaagaggagacaca

SEQ ID NO: 851230 - DNA, 25 bp, Homo sapien
cacttacaagctggccaactgtggg

SEQ ID NO: 851231 - DNA, 25 bp, Homo sapien
agcgggtcaggcaggaatccacctt

SEQ ID NO: 851232 - DNA, 25 bp, Homo sapien
tagaggtacgagttcttctcagcag

SEQ ID NO: 851233 - DNA, 25 bp, Homo sapien
accaccgtccacagtgtgatttccg

SEQ ID NO: 851234 - DNA, 25 bp, Homo sapien
caagggtgtcgaaggactctggtcc

SEQ ID NO: 851235 - DNA, 25 bp, Homo sapien
ggttcccgaactccacagctgtctt

SEQ ID NO: 851236 - DNA, 25 bp, Homo sapien
gctgtcttctcgcagtcggccagct

SEQ ID NO: 851237 - DNA, 25 bp, Homo sapien
agctggttcccgaactccacagctg

SEQ ID NO: 851238 - DNA, 25 bp, Homo sapien
cagctgtcttctcgcagtcggccag

SEQ ID NO: 851239 - DNA, 25 bp, Homo sapien
ttcctgttgcgcagcaagttctcca

SEQ ID NO: 851240 - DNA, 25 bp, Homo sapien
ggggcagccgcaagatccagaagtt

SEQ ID NO: 851241 - DNA, 25 bp, Homo sapien
gaagttcctgttgcgcagcaagttc

SEQ ID NO: 851242 - DNA, 25 bp, Homo sapien
tccagaagttcctgttgcgcagcaa

SEQ ID NO: 851243 - DNA, 25 bp, Homo sapien
agggagaccagcgtctcgtagttgc

SEQ ID NO: 851244 - DNA, 25 bp, Homo sapien
tgtagagctccttctgccagtcctc

SEQ ID NO: 851245 - DNA, 25 bp, Homo sapien
agaccagcgtctcgtagttgcccct

SEQ ID NO: 851246 - DNA, 25 bp, Homo sapien
cctcatcacgtgcttgtagagctcc

SEQ ID NO: 851247 - DNA, 25 bp, Homo sapien
aaagacacagactgtccacagacaa

SEQ ID NO: 851248 - DNA, 25 bp, Homo sapien
acagactgtccacagacaacctgtg

SEQ ID NO: 851249 - DNA, 25 bp, Homo sapien
gacacagactgtccacagacaacct

SEQ ID NO: 851250 - DNA, 25 bp, Homo sapien
cacagactgtccacagacaacctgt

SEQ ID NO: 851251 - DNA, 25 bp, Homo sapien
cctctcccctctctatccgggtgag

SEQ ID NO: 851252 - DNA, 25 bp, Homo sapien
ctctctatccgggtgaggatgtctg

SEQ ID NO: 851253 - DNA, 25 bp, Homo sapien
tctatccgggtgaggatgtctggtt

SEQ ID NO: 851254 - DNA, 25 bp, Homo sapien
tcccctctctatccgggtgaggatg

SEQ ID NO: 851255 - DNA, 25 bp, Homo sapien
cttcattccccttctcctggcccca

SEQ ID NO: 851256 - DNA, 25 bp, Homo sapien
ttcattccccttctcctggccccac

SEQ ID NO: 851257 - DNA, 25 bp, Homo sapien
ctctacttcattccccttctcctgg

SEQ ID NO: 851258 - DNA, 25 bp, Homo sapien
tacttcattccccttctcctggccc

SEQ ID NO: 851259 - DNA, 25 bp, Homo sapien
agtgcccatcatccttggacgtccc

SEQ ID NO: 851260 - DNA, 25 bp, Homo sapien
gtgcccatcatccttggacgtccca

SEQ ID NO: 851261 - DNA, 25 bp, Homo sapien
tgcccatcatccttggacgtcccac

SEQ ID NO: 851262 - DNA, 25 bp, Homo sapien
ggtggccttgtacagagtggtccca

SEQ ID NO: 851263 - DNA, 25 bp, Homo sapien
gtaggcgatggtgcagctagcccct

SEQ ID NO: 851264 - DNA, 25 bp, Homo sapien
cagagtggtcccactttgggttaat

SEQ ID NO: 851265 - DNA, 25 bp, Homo sapien
taatggtctatgctcccttcctgcc

SEQ ID NO: 851266 - DNA, 25 bp, Homo sapien
catcagcagatcctaaaaatttcag

SEQ ID NO: 851267 - DNA, 25 bp, Homo sapien
tgctttcatgacaagcctaaagacg

SEQ ID NO: 851268 - DNA, 25 bp, Homo sapien
cctaaagacggttgcttcatcagca

SEQ ID NO: 851269 - DNA, 25 bp, Homo sapien
tcatgacaagcctaaagacggttgc

SEQ ID NO: 851270 - DNA, 25 bp, Homo sapien
agagaacaatgccttgtcagagata

SEQ ID NO: 851271 - DNA, 25 bp, Homo sapien
ccagagaacaatgccttgtcagaga

SEQ ID NO: 851272 - DNA, 25 bp, Homo sapien
aacaatgccttgtcagagataaaag

SEQ ID NO: 851273 - DNA, 25 bp, Homo sapien
acaatgccttgtcagagataaaaga

SEQ ID NO: 851274 - DNA, 25 bp, Homo sapien
tctaaagcctcatgtcccacagaag

SEQ ID NO: 851275 - DNA, 25 bp, Homo sapien
agcagacaggaaatcacggtaatga

SEQ ID NO: 851276 - DNA, 25 bp, Homo sapien
tggcagctagattccagtctaaagc

SEQ ID NO: 851277 - DNA, 25 bp, Homo sapien
cagaaggaaactgcagcacaggaat

SEQ ID NO: 851278 - DNA, 25 bp, Homo sapien
tgagcacaacatggaggtctcctgc

SEQ ID NO: 851279 - DNA, 25 bp, Homo sapien
ctggagaatgtaaatcagtgacatt

SEQ ID NO: 851280 - DNA, 25 bp, Homo sapien
atgtaaatcagtgacattgagcaca

SEQ ID NO: 851281 - DNA, 25 bp, Homo sapien
tgacattgagcacaacatggaggtc

SEQ ID NO: 851282 - DNA, 25 bp, Homo sapien
cggctggggccactctcgcctctga

SEQ ID NO: 851283 - DNA, 25 bp, Homo sapien
ggctggggccactctcgcctctgag

SEQ ID NO: 851284 - DNA, 25 bp, Homo sapien
tggggccactctcgcctctgagtcc

SEQ ID NO: 851285 - DNA, 25 bp, Homo sapien
gctggggccactctcgcctctgagt

SEQ ID NO: 851286 - DNA, 25 bp, Homo sapien
catgccctgggcctgatgacggctg

SEQ ID NO: 851287 - DNA, 25 bp, Homo sapien
gactgtgcctctgtcttgatggcca

SEQ ID NO: 851288 - DNA, 25 bp, Homo sapien
attctacactcggtctggcctcggg

SEQ ID NO: 851289 - DNA, 25 bp, Homo sapien
gctcaggcgtcatctcgtcttcaga

SEQ ID NO: 851290 - DNA, 25 bp, Homo sapien
agccagcggatgacagggccgggta

SEQ ID NO: 851291 - DNA, 25 bp, Homo sapien
ctccacatgggtccgctgatgaatc

SEQ ID NO: 851292 - DNA, 25 bp, Homo sapien
gaatcgtcagattgatcttcaggcg

SEQ ID NO: 851293 - DNA, 25 bp, Homo sapien
tccccgcagctggtgggcgagcggc

SEQ ID NO: 851294 - DNA, 25 bp, Homo sapien
cgcaggcactcgctgcagtggtaca

SEQ ID NO: 851295 - DNA, 25 bp, Homo sapien
caggctcttgcgctgctggaagaag

SEQ ID NO: 851296 - DNA, 25 bp, Homo sapien
ttgcggttgaaggtccggccacact

SEQ ID NO: 851297 - DNA, 25 bp, Homo sapien
tggccattgccggtgtgcaggcgct

SEQ ID NO: 851298 - DNA, 25 bp, Homo sapien
gcaggggcaggctcccgtggcgggc

SEQ ID NO: 851299 - DNA, 25 bp, Homo sapien
gggcggcagggaagtgtgggcccac

SEQ ID NO: 851300 - DNA, 25 bp, Homo sapien
tcctccttccggctgggccagggca

SEQ ID NO: 851301 - DNA, 25 bp, Homo sapien
gcaggctcccgtggcgggcgggggc

SEQ ID NO: 851302 - DNA, 25 bp, Homo sapien
tggtcacagtgccagacaaggcggt

SEQ ID NO: 851303 - DNA, 25 bp, Homo sapien
tctgcgagcctcacatggaaaagcc

SEQ ID NO: 851304 - DNA, 25 bp, Homo sapien
gactgccccgcctttaatgtgaaaa

SEQ ID NO: 851305 - DNA, 25 bp, Homo sapien
tgtgcgggtcacctaacatcaggag

SEQ ID NO: 851306 - DNA, 25 bp, Homo sapien
gggttaaactcgtgcacctgcactt

SEQ ID NO: 851307 - DNA, 25 bp, Homo sapien
acatcctgtctgagctcttgctgac

SEQ ID NO: 851308 - DNA, 25 bp, Homo sapien
tgcacttgcaccacatcctgtctga

SEQ ID NO: 851309 - DNA, 25 bp, Homo sapien
ctgacagcccgtctctggtttgtga

SEQ ID NO: 851310 - DNA, 25 bp, Homo sapien
gcttattaacgtcgtggcccactca

SEQ ID NO: 851311 - DNA, 25 bp, Homo sapien
caccaattagggcaagggactacca

SEQ ID NO: 851312 - DNA, 25 bp, Homo sapien
tcctgcaccacaaagcttcggttga

SEQ ID NO: 851313 - DNA, 25 bp, Homo sapien
atgaggaaaccgaggaccctgctgg

SEQ ID NO: 851314 - DNA, 25 bp, Homo sapien
agtagccgctgccgttacgcgcggc

SEQ ID NO: 851315 - DNA, 25 bp, Homo sapien
gctgcgcagtcctctccgcagacgg

SEQ ID NO: 851316 - DNA, 25 bp, Homo sapien
ctgctttccccgcacggaccgagct

SEQ ID NO: 851317 - DNA, 25 bp, Homo sapien
gctcgggacacgcggaaaacgcgtc

SEQ ID NO: 851318 - DNA, 25 bp, Homo sapien
cgtgtggccttaggagtccttgtcc

SEQ ID NO: 851319 - DNA, 25 bp, Homo sapien
caagcctccatgagggtcgccctta

SEQ ID NO: 851320 - DNA, 25 bp, Homo sapien
ccacaggcaaggaaacggagagcga

SEQ ID NO: 851321 - DNA, 25 bp, Homo sapien
gaacatcctcctggcgaattcagga

SEQ ID NO: 851322 - DNA, 25 bp, Homo sapien
ggccctttccttccccacacagcat

SEQ ID NO: 851323 - DNA, 25 bp, Homo sapien
caggtaccagacaccagatacctgg

SEQ ID NO: 851324 - DNA, 25 bp, Homo sapien
accagacaccagatacctggccctt

SEQ ID NO: 851325 - DNA, 25 bp, Homo sapien
cctggccctttccttccccacacag

SEQ ID NO: 851326 - DNA, 25 bp, Homo sapien
tctccctggaggtcagtccgcaatg

SEQ ID NO: 851327 - DNA, 25 bp, Homo sapien
tgcagatcagatctgggcctctccc

SEQ ID NO: 851328 - DNA, 25 bp, Homo sapien
cgatagccggaagggagatctctgc

SEQ ID NO: 851329 - DNA, 25 bp, Homo sapien
tgaacagcagccacgatagccggaa

SEQ ID NO: 851330 - DNA, 25 bp, Homo sapien
cctccaggctctgtagccaggcagc

SEQ ID NO: 851331 - DNA, 25 bp, Homo sapien
gcatccctccaggctctgtagccag

SEQ ID NO: 851332 - DNA, 25 bp, Homo sapien
tccaggctctgtagccaggcagcct

SEQ ID NO: 851333 - DNA, 25 bp, Homo sapien
atccctccaggctctgtagccaggc

SEQ ID NO: 851334 - DNA, 25 bp, Homo sapien
ctcgcagtcagccagcttcttcttg

SEQ ID NO: 851335 - DNA, 25 bp, Homo sapien
tcgcagtcagccagcttcttcttgg

SEQ ID NO: 851336 - DNA, 25 bp, Homo sapien
ttctcgcagtcagccagcttcttct

SEQ ID NO: 851337 - DNA, 25 bp, Homo sapien
cttctcgcagtcagccagcttcttc

SEQ ID NO: 851338 - DNA, 25 bp, Homo sapien
tgcagcagggtccccagcacggccc

SEQ ID NO: 851339 - DNA, 25 bp, Homo sapien
ctgcagcagggtccccagcacggcc

SEQ ID NO: 851340 - DNA, 25 bp, Homo sapien
gcagcagggtccccagcacggccca

SEQ ID NO: 851341 - DNA, 25 bp, Homo sapien
gttctccacgttccccagccacctc

SEQ ID NO: 851342 - DNA, 25 bp, Homo sapien
ccgggggcaactgcaggatccagaa

SEQ ID NO: 851343 - DNA, 25 bp, Homo sapien
tccagaagttcctgttgcacagcag

SEQ ID NO: 851344 - DNA, 25 bp, Homo sapien
ccttgctgcccgggggcaactgcag

SEQ ID NO: 851345 - DNA, 25 bp, Homo sapien
agggcctctcctcctacacccagct

SEQ ID NO: 851346 - DNA, 25 bp, Homo sapien
tctcctcctacacccagctcctgta

SEQ ID NO: 851347 - DNA, 25 bp, Homo sapien
caggcagggcctctcctcctacacc

SEQ ID NO: 851348 - DNA, 25 bp, Homo sapien
ctcctcctacacccagctcctgtac

SEQ ID NO: 851349 - DNA, 25 bp, Homo sapien
tgctgctctgagaaatacccgaccg

SEQ ID NO: 851350 - DNA, 25 bp, Homo sapien
tcacaacacatttgcagaactcctt

SEQ ID NO: 851351 - DNA, 25 bp, Homo sapien
ccgaccgtgtcttcaggagtcacag

SEQ ID NO: 851352 - DNA, 25 bp, Homo sapien
agggtgtcgcagctccccttcacaa

SEQ ID NO: 851353 - DNA, 25 bp, Homo sapien
aagaaatgatctccacatgcttcct

SEQ ID NO: 851354 - DNA, 25 bp, Homo sapien
agaaatgatctccacatgcttcctg

SEQ ID NO: 851355 - DNA, 25 bp, Homo sapien
gaaatgatctccacatgcttcctgc

SEQ ID NO: 851356 - DNA, 25 bp, Homo sapien
gcacacctgcctgaaggagcgaact

SEQ ID NO: 851357 - DNA, 25 bp, Homo sapien
caggttcacgcaggagagcttcgga

SEQ ID NO: 851358 - DNA, 25 bp, Homo sapien
cccaaagcagtgagaattccaggtt

SEQ ID NO: 851359 - DNA, 25 bp, Homo sapien
tcctagagatgcagatgtaaaccag

SEQ ID NO: 851360 - DNA, 25 bp, Homo sapien
aagagtgggtctggccatccatggc

SEQ ID NO: 851361 - DNA, 25 bp, Homo sapien
agcacactgggacccttttctgaag

SEQ ID NO: 851362 - DNA, 25 bp, Homo sapien
tccatggcagtcaggctcaggcttc

SEQ ID NO: 851363 - DNA, 25 bp, Homo sapien
acgtgcttctccttcctcgcctgag

SEQ ID NO: 851364 - DNA, 25 bp, Homo sapien
tgttctgctaggcttggagcagcct

SEQ ID NO: 851365 - DNA, 25 bp, Homo sapien
ggtgttctgctaggcttggagcagc

SEQ ID NO: 851366 - DNA, 25 bp, Homo sapien
caaggcgtgtgttgaggggcatgga

SEQ ID NO: 851367 - DNA, 25 bp, Homo sapien
cagcctcttcaaggcgtgtgttgag

SEQ ID NO: 851368 - DNA, 25 bp, Homo sapien
ctttctccactggtgccagatctgg

SEQ ID NO: 851369 - DNA, 25 bp, Homo sapien
ttctccactggtgccagatctggct

SEQ ID NO: 851370 - DNA, 25 bp, Homo sapien
ggcccctctccgcactgggcaggct

SEQ ID NO: 851371 - DNA, 25 bp, Homo sapien
tcctttctccactggtgccagatct

SEQ ID NO: 851372 - DNA, 25 bp, Homo sapien
cccaggcccacaccctgagggactc

SEQ ID NO: 851373 - DNA, 25 bp, Homo sapien
caggcccacaccctgagggactcac

SEQ ID NO: 851374 - DNA, 25 bp, Homo sapien
agatgcaggtggagaggcccaggcc

SEQ ID NO: 851375 - DNA, 25 bp, Homo sapien
ggcccaggcccacaccctgagggac

SEQ ID NO: 851376 - DNA, 25 bp, Homo sapien
acaccagcccgacctggctgccaca

SEQ ID NO: 851377 - DNA, 25 bp, Homo sapien
ctctgaagacaccagcccgacctgg

SEQ ID NO: 851378 - DNA, 25 bp, Homo sapien
tgaagacaccagcccgacctggctg

SEQ ID NO: 851379 - DNA, 25 bp, Homo sapien
gccactctgaagacaccagcccgac

SEQ ID NO: 851380 - DNA, 25 bp, Homo sapien
cctggggacgttccagctggcctgc

SEQ ID NO: 851381 - DNA, 25 bp, Homo sapien
cttgatccaggacagaacgcctggg

SEQ ID NO: 851382 - DNA, 25 bp, Homo sapien
cctcttgcttgatccaggacagaac

SEQ ID NO: 851383 - DNA, 25 bp, Homo sapien
ttgcttgatccaggacagaacgcct

SEQ ID NO: 851384 - DNA, 25 bp, Homo sapien
cacgcagcaagcatacaagattctg

SEQ ID NO: 851385 - DNA, 25 bp, Homo sapien
ctgcatgggaggacaccacgcagca

SEQ ID NO: 851386 - DNA, 25 bp, Homo sapien
gcaagcatacaagattctgcagaga

SEQ ID NO: 851387 - DNA, 25 bp, Homo sapien
aaggccccactagaggcgctgtgag

SEQ ID NO: 851388 - DNA, 25 bp, Homo sapien
ctacagacaagttcatgaaataaac

SEQ ID NO: 851389 - DNA, 25 bp, Homo sapien
aacaggaaacaggatcaggaataaa

SEQ ID NO: 851390 - DNA, 25 bp, Homo sapien
gaaataaacaggaaacaggatcagg

SEQ ID NO: 851391 - DNA, 25 bp, Homo sapien
gaaacaggatcaggaataaaagaat

SEQ ID NO: 851392 - DNA, 25 bp, Homo sapien
gtctcatgcattaatgagcccctgc

SEQ ID NO: 851393 - DNA, 25 bp, Homo sapien
cgtgtactgtgtctgtgttcgtctt

SEQ ID NO: 851394 - DNA, 25 bp, Homo sapien
cctgagtggaatctgtgtctcatgc

SEQ ID NO: 851395 - DNA, 25 bp, Homo sapien
tctcctgagtggaatctgtgtctca

SEQ ID NO: 851396 - DNA, 25 bp, Homo sapien
gagacaccccttttactatagttga

SEQ ID NO: 851397 - DNA, 25 bp, Homo sapien
tgggccgcctgtggccaccgagaca

SEQ ID NO: 851398 - DNA, 25 bp, Homo sapien
gctgtttgcacatcgtaagcatatg

SEQ ID NO: 851399 - DNA, 25 bp, Homo sapien
tggccatcttttgggtcagattctg

SEQ ID NO: 851400 - DNA, 25 bp, Homo sapien
aagaccagcgtggtgacattttccc

SEQ ID NO: 851401 - DNA, 25 bp, Homo sapien
accctgtgctgttccacctaaggct

SEQ ID NO: 851402 - DNA, 25 bp, Homo sapien
cgagggtcctctctacccagaaggt

SEQ ID NO: 851403 - DNA, 25 bp, Homo sapien
gtatagtgagtgaggcctgcctgcc

SEQ ID NO: 851404 - DNA, 25 bp, Homo sapien
cagactcctctctgcggcccagaca

SEQ ID NO: 851405 - DNA, 25 bp, Homo sapien
tccagactcctctctgcggcccaga

SEQ ID NO: 851406 - DNA, 25 bp, Homo sapien
agactcctctctgcggcccagacag

SEQ ID NO: 851407 - DNA, 25 bp, Homo sapien
ccagactcctctctgcggcccagac

SEQ ID NO: 851408 - DNA, 25 bp, Homo sapien
cccaaactggctcgtggcccttgga

SEQ ID NO: 851409 - DNA, 25 bp, Homo sapien
agcccaaactggctcgtggcccttg

SEQ ID NO: 851410 - DNA, 25 bp, Homo sapien
caaactggctcgtggcccttggacc

SEQ ID NO: 851411 - DNA, 25 bp, Homo sapien
cagcccaaactggctcgtggccctt

SEQ ID NO: 851412 - DNA, 25 bp, Homo sapien
tgcccctagcggctggctcagcctg

SEQ ID NO: 851413 - DNA, 25 bp, Homo sapien
gcccctagcggctggctcagcctgg

SEQ ID NO: 851414 - DNA, 25 bp, Homo sapien
ggccacgatgcacgcgctggtgcgg

SEQ ID NO: 851415 - DNA, 25 bp, Homo sapien
gctggtgcggcgcactgagctcctt

SEQ ID NO: 851416 - DNA, 25 bp, Homo sapien
ctctggccacactgggcgcaaggtg

SEQ ID NO: 851417 - DNA, 25 bp, Homo sapien
tgagctccttctggccgaagctctg

SEQ ID NO: 851418 - DNA, 25 bp, Homo sapien
ggcgggggtggtccgctgcgtgaag

SEQ ID NO: 851419 - DNA, 25 bp, Homo sapien
cgggggtggtccgctgcgtgaagct

SEQ ID NO: 851420 - DNA, 25 bp, Homo sapien
ggggtggtccgctgcgtgaagctct

SEQ ID NO: 851421 - DNA, 25 bp, Homo sapien
gggggtggtccgctgcgtgaagctc

SEQ ID NO: 851422 - DNA, 25 bp, Homo sapien
gcgcgggtgtaggtgcactcggcca

SEQ ID NO: 851423 - DNA, 25 bp, Homo sapien
cattgggcgcgggtgtaggtgcact

SEQ ID NO: 851424 - DNA, 25 bp, Homo sapien
tgtaggtgcactcggccacgtgcgc

SEQ ID NO: 851425 - DNA, 25 bp, Homo sapien
aaggtcttgccgcattgggcgcggg

SEQ ID NO: 851426 - DNA, 25 bp, Homo sapien
ctgatgtgcgcgcagtagtgggtgt

SEQ ID NO: 851427 - DNA, 25 bp, Homo sapien
gatgtgcgcgcagtagtgggtgtga

SEQ ID NO: 851428 - DNA, 25 bp, Homo sapien
tgcgcgcagtagtgggtgtgagcgt

SEQ ID NO: 851429 - DNA, 25 bp, Homo sapien
gcgcagtagtgggtgtgagcgtcga

SEQ ID NO: 851430 - DNA, 25 bp, Homo sapien
gcagcgtggacaggcggccaaagag

SEQ ID NO: 851431 - DNA, 25 bp, Homo sapien
gacaggcggccaaagagcttggcgc

SEQ ID NO: 851432 - DNA, 25 bp, Homo sapien
agcagcgtggacaggcggccaaaga

SEQ ID NO: 851433 - DNA, 25 bp, Homo sapien
cgtggacaggcggccaaagagcttg

SEQ ID NO: 851434 - DNA, 25 bp, Homo sapien
gaagccgggcttctgcatgaatctc

SEQ ID NO: 851435 - DNA, 25 bp, Homo sapien
tggccacacagatgacgcaggaagc

SEQ ID NO: 851436 - DNA, 25 bp, Homo sapien
tgaaacgcttgtcgcactgcgcaca

SEQ ID NO: 851437 - DNA, 25 bp, Homo sapien
agcagccacattgcgtgcactggaa

SEQ ID NO: 851438 - DNA, 25 bp, Homo sapien
caggagggacaggtgaagctctcac

SEQ ID NO: 851439 - DNA, 25 bp, Homo sapien
gccaggagggacaggtgaagctctc

SEQ ID NO: 851440 - DNA, 25 bp, Homo sapien
ccaggagggacaggtgaagctctca

SEQ ID NO: 851441 - DNA, 25 bp, Homo sapien
aagccaggagggacaggtgaagctc

SEQ ID NO: 851442 - DNA, 25 bp, Homo sapien
tcatcggtcgaggagtccctctcac

SEQ ID NO: 851443 - DNA, 25 bp, Homo sapien
gccctcaaatctgagtgcggcagaa

SEQ ID NO: 851444 - DNA, 25 bp, Homo sapien
tctgagtgcggcagaaggattacta

SEQ ID NO: 851445 - DNA, 25 bp, Homo sapien
caaaccaggcaagatggagaggcct

SEQ ID NO: 851446 - DNA, 25 bp, Homo sapien
ggagctctctgggtgctacccacat

SEQ ID NO: 851447 - DNA, 25 bp, Homo sapien
catcttcacgcgagaaagagaactg

SEQ ID NO: 851448 - DNA, 25 bp, Homo sapien
gggaagccaagaccatggccagaat

SEQ ID NO: 851449 - DNA, 25 bp, Homo sapien
catgggcaatctcagtgcctgggag

SEQ ID NO: 851450 - DNA, 25 bp, Homo sapien
tattacaccaactgggcagggcgct

SEQ ID NO: 851451 - DNA, 25 bp, Homo sapien
taagagtgagcaccttggatgtccc

SEQ ID NO: 851452 - DNA, 25 bp, Homo sapien
tggattcgcatctgagggacgcttg

SEQ ID NO: 851453 - DNA, 25 bp, Homo sapien
tggcacacgttggatcctcagaaag

SEQ ID NO: 851454 - DNA, 25 bp, Homo sapien
ctccagggcttgctaccatctgctc

SEQ ID NO: 851455 - DNA, 25 bp, Homo sapien
cagggcttgctaccatctgctcgtg

SEQ ID NO: 851456 - DNA, 25 bp, Homo sapien
gggcttgctaccatctgctcgtgtg

SEQ ID NO: 851457 - DNA, 25 bp, Homo sapien
tccagggcttgctaccatctgctcg

SEQ ID NO: 851458 - DNA, 25 bp, Homo sapien
gtgattatgtaaatcacagagcttc

SEQ ID NO: 851459 - DNA, 25 bp, Homo sapien
ccagctcaagctacaaacatgaaag

SEQ ID NO: 851460 - DNA, 25 bp, Homo sapien
tactgcatcacagacaagatcacag

SEQ ID NO: 851461 - DNA, 25 bp, Homo sapien
ctagagtggaatatcattactgcat

SEQ ID NO: 851462 - DNA, 25 bp, Homo sapien
tctttgggacgttgtcctggacttc

SEQ ID NO: 851463 - DNA, 25 bp, Homo sapien
gacttcagtccatccagtacttctt

SEQ ID NO: 851464 - DNA, 25 bp, Homo sapien
ggcttggtcctccaagcctacctgg

SEQ ID NO: 851465 - DNA, 25 bp, Homo sapien
ccaagcctacctggactctgccttt

SEQ ID NO: 851466 - DNA, 25 bp, Homo sapien
tcattccacaaacgtaggggctttc

SEQ ID NO: 851467 - DNA, 25 bp, Homo sapien
taggggctttccatgtgcagggcac

SEQ ID NO: 851468 - DNA, 25 bp, Homo sapien
tagccatggagcagtctgtgcagaa

SEQ ID NO: 851469 - DNA, 25 bp, Homo sapien
atcctgtagccatggagcagtctgt

SEQ ID NO: 851470 - DNA, 25 bp, Homo sapien
tgtagccatggagcagtctgtgcag

SEQ ID NO: 851471 - DNA, 25 bp, Homo sapien
cctgtagccatggagcagtctgtgc

SEQ ID NO: 851472 - DNA, 25 bp, Homo sapien
aagcaagtgaggaggaggccgcagt

SEQ ID NO: 851473 - DNA, 25 bp, Homo sapien
ctgcaggaagcaagtgaggaggagg

SEQ ID NO: 851474 - DNA, 25 bp, Homo sapien
aggaagcaagtgaggaggaggccgc

SEQ ID NO: 851475 - DNA, 25 bp, Homo sapien
tgcaggaagcaagtgaggaggaggc

SEQ ID NO: 851476 - DNA, 25 bp, Homo sapien
acaggtcctgtccaccacctctcac

SEQ ID NO: 851477 - DNA, 25 bp, Homo sapien
tcacaggtcctgtccaccacctctc

SEQ ID NO: 851478 - DNA, 25 bp, Homo sapien
cacaggtcctgtccaccacctctca

SEQ ID NO: 851479 - DNA, 25 bp, Homo sapien
tggatttgaaccagggacctcttga

SEQ ID NO: 851480 - DNA, 25 bp, Homo sapien
atctgcagtcaaatgctctaccact

SEQ ID NO: 851481 - DNA, 25 bp, Homo sapien
cctggatttgaaccagggacctctt

SEQ ID NO: 851482 - DNA, 25 bp, Homo sapien
ggcacctggatttgaaccagggacc

SEQ ID NO: 851483 - DNA, 25 bp, Homo sapien
tacctttgccacacggtactgtatg

SEQ ID NO: 851484 - DNA, 25 bp, Homo sapien
gccacacggtactgtatgcttgccg

SEQ ID NO: 851485 - DNA, 25 bp, Homo sapien
ctttgccacacggtactgtatgctt

SEQ ID NO: 851486 - DNA, 25 bp, Homo sapien
ctctgtacctttgccacacggtact

SEQ ID NO: 851487 - DNA, 25 bp, Homo sapien
actgacttcgtagaaaaccataaca

SEQ ID NO: 851488 - DNA, 25 bp, Homo sapien
gcactgacttcgtagaaaaccataa

SEQ ID NO: 851489 - DNA, 25 bp, Homo sapien
cactgacttcgtagaaaaccataac

SEQ ID NO: 851490 - DNA, 25 bp, Homo sapien
ctgacttcgtagaaaaccataacat

SEQ ID NO: 851491 - DNA, 25 bp, Homo sapien
cgccgccgccaacagcagcactgtc

SEQ ID NO: 851492 - DNA, 25 bp, Homo sapien
cgccaacagcagcactgtcagtgag

SEQ ID NO: 851493 - DNA, 25 bp, Homo sapien
cacattgaaaatcctgccacagcag

SEQ ID NO: 851494 - DNA, 25 bp, Homo sapien
acattgaaaatcctgccacagcagc

SEQ ID NO: 851495 - DNA, 25 bp, Homo sapien
aactgaacggcggagatcgaagacg

SEQ ID NO: 851496 - DNA, 25 bp, Homo sapien
ttaccactgggatgataacctgagg

SEQ ID NO: 851497 - DNA, 25 bp, Homo sapien
gaaggaccaagcttgatctgttacc

SEQ ID NO: 851498 - DNA, 25 bp, Homo sapien
gctacacgggcaacaaaagaattca

SEQ ID NO: 851499 - DNA, 25 bp, Homo sapien
actgtggagggtccgcaacacccat

SEQ ID NO: 851500 - DNA, 25 bp, Homo sapien
cacgaagctcacaaggactttgggt

SEQ ID NO: 851501 - DNA, 25 bp, Homo sapien
cagtctccaataaagtccacgaagc

SEQ ID NO: 851502 - DNA, 25 bp, Homo sapien
gggctgcttgtaccaagtttgccag

SEQ ID NO: 851503 - DNA, 25 bp, Homo sapien
tcaaatgctctacccctgagctata

SEQ ID NO: 851504 - DNA, 25 bp, Homo sapien
ggcacctggatttgaaccagggacc

SEQ ID NO: 851505 - DNA, 25 bp, Homo sapien
cctggatttgaaccagggacctctt

SEQ ID NO: 851506 - DNA, 25 bp, Homo sapien
tggatttgaaccagggacctcttga

SEQ ID NO: 851507 - DNA, 25 bp, Homo sapien
gtaggagagaaggtggatggagata

SEQ ID NO: 851508 - DNA, 25 bp, Homo sapien
gagagaaggtggatggagataaacg

SEQ ID NO: 851509 - DNA, 25 bp, Homo sapien
agaaggtggatggagataaacgacc

SEQ ID NO: 851510 - DNA, 25 bp, Homo sapien
gaaggtggatggagataaacgacca

SEQ ID NO: 851511 - DNA, 25 bp, Homo sapien
acgaatcttccatcaggtggtggca

SEQ ID NO: 851512 - DNA, 25 bp, Homo sapien
gaatcttccatcaggtggtggcacg

SEQ ID NO: 851513 - DNA, 25 bp, Homo sapien
atcttccatcaggtggtggcacgca

SEQ ID NO: 851514 - DNA, 25 bp, Homo sapien
gtccacgaatcttccatcaggtggt

SEQ ID NO: 851515 - DNA, 25 bp, Homo sapien
accagcccctaaattgattgttgtt

SEQ ID NO: 851516 - DNA, 25 bp, Homo sapien
caccagcccctaaattgattgttgt

SEQ ID NO: 851517 - DNA, 25 bp, Homo sapien
cagcccctaaattgattgttgttaa

SEQ ID NO: 851518 - DNA, 25 bp, Homo sapien
ccagcccctaaattgattgttgtta

SEQ ID NO: 851519 - DNA, 25 bp, Homo sapien
tttggcttggagtatctcatataga

SEQ ID NO: 851520 - DNA, 25 bp, Homo sapien
ttggcttggagtatctcatatagat

SEQ ID NO: 851521 - DNA, 25 bp, Homo sapien
catttttggcttggagtatctcata

SEQ ID NO: 851522 - DNA, 25 bp, Homo sapien
gcttggagtatctcatatagatttc

SEQ ID NO: 851523 - DNA, 25 bp, Homo sapien
tgtccatttgatcttgatgttgatg

SEQ ID NO: 851524 - DNA, 25 bp, Homo sapien
ggattcttgtccatttgatcttgat

SEQ ID NO: 851525 - DNA, 25 bp, Homo sapien
cttgtccatttgatcttgatgttga

SEQ ID NO: 851526 - DNA, 25 bp, Homo sapien
ccatttgatcttgatgttgatggtg

SEQ ID NO: 851527 - DNA, 25 bp, Homo sapien
cttctggtgtttcaggagttttttg

SEQ ID NO: 851528 - DNA, 25 bp, Homo sapien
actaggtccttctggtgtttcagga

SEQ ID NO: 851529 - DNA, 25 bp, Homo sapien
ggcttccactgtgggaatagaacca

SEQ ID NO: 851530 - DNA, 25 bp, Homo sapien
cttccactgtgggaatagaaccacc

SEQ ID NO: 851531 - DNA, 25 bp, Homo sapien
atctaaccaccgctattactatgtc

SEQ ID NO: 851532 - DNA, 25 bp, Homo sapien
ctgttacagaaatgagatgaaaatt

SEQ ID NO: 851533 - DNA, 25 bp, Homo sapien
tgtctccctaccatttccatatcta

SEQ ID NO: 851534 - DNA, 25 bp, Homo sapien
atttccatatctaaccaccgctatt

SEQ ID NO: 851535 - DNA, 25 bp, Homo sapien
gaagtcctttctggttgtaggagtc

SEQ ID NO: 851536 - DNA, 25 bp, Homo sapien
tcagctgtctccaactcagaagggc

SEQ ID NO: 851537 - DNA, 25 bp, Homo sapien
agctgtctccaactcagaagggcac

SEQ ID NO: 851538 - DNA, 25 bp, Homo sapien
gcacagaaaaggttatcctgaagtc

SEQ ID NO: 851539 - DNA, 25 bp, Homo sapien
cacagcaggacgattcagctgatga

SEQ ID NO: 851540 - DNA, 25 bp, Homo sapien
caggacgattcagctgatgaggtca

SEQ ID NO: 851541 - DNA, 25 bp, Homo sapien
gattcagctgatgaggtcacagtca

SEQ ID NO: 851542 - DNA, 25 bp, Homo sapien
ggcccacagcaggacgattcagctg

SEQ ID NO: 851543 - DNA, 25 bp, Homo sapien
cccgggaacagccagagatcagaag

SEQ ID NO: 851544 - DNA, 25 bp, Homo sapien
cctgccactgtagagggtatagctt

SEQ ID NO: 851545 - DNA, 25 bp, Homo sapien
gcgctaatgagaggagcctgccact

SEQ ID NO: 851546 - DNA, 25 bp, Homo sapien
cagttccccgaaagtgagagcccgg

SEQ ID NO: 851547 - DNA, 25 bp, Homo sapien
taattagggctaccttgagaacctg

SEQ ID NO: 851548 - DNA, 25 bp, Homo sapien
cactagcagtgacgacgggtgtcca

SEQ ID NO: 851549 - DNA, 25 bp, Homo sapien
gagcctatcggaagcactggagatg

SEQ ID NO: 851550 - DNA, 25 bp, Homo sapien
tgtaacccagcatgtacctcggtgg

SEQ ID NO: 851551 - DNA, 25 bp, Homo sapien
gggactcaggcaataaagattggca

SEQ ID NO: 851552 - DNA, 25 bp, Homo sapien
acagaagtagcactgtccccgcatg

SEQ ID NO: 851553 - DNA, 25 bp, Homo sapien
ggactcaggcaataaagattggcac

SEQ ID NO: 851554 - DNA, 25 bp, Homo sapien
ctgtccccgcatggcagagccatat

SEQ ID NO: 851555 - DNA, 25 bp, Homo sapien
aaggaatgacgccatagaatgcaaa

SEQ ID NO: 851556 - DNA, 25 bp, Homo sapien
tcatccagacaggtaggccttgtgc

SEQ ID NO: 851557 - DNA, 25 bp, Homo sapien
acagggaaggaatgacgccatagaa

SEQ ID NO: 851558 - DNA, 25 bp, Homo sapien
tccagacaggtaggccttgtgcctt

SEQ ID NO: 851559 - DNA, 25 bp, Homo sapien
tctgggatggtgatactcctggaac

SEQ ID NO: 851560 - DNA, 25 bp, Homo sapien
gttctgggatggtgatactcctgga

SEQ ID NO: 851561 - DNA, 25 bp, Homo sapien
ttctgggatggtgatactcctggaa

SEQ ID NO: 851562 - DNA, 25 bp, Homo sapien
caggctgacatttccaataggaact

SEQ ID NO: 851563 - DNA, 25 bp, Homo sapien
cctgtgacagcaggatcggggctca

SEQ ID NO: 851564 - DNA, 25 bp, Homo sapien
aaggatcctgtgacagcaggatcgg

SEQ ID NO: 851565 - DNA, 25 bp, Homo sapien
aggtcagggttgactgcaaaggatc

SEQ ID NO: 851566 - DNA, 25 bp, Homo sapien
aaggatcctgtgacagtgaggtcag

SEQ ID NO: 851567 - DNA, 25 bp, Homo sapien
cagtgacagcgcggtcagggctcac

SEQ ID NO: 851568 - DNA, 25 bp, Homo sapien
tataaaggatccagtgacagcgcgg

SEQ ID NO: 851569 - DNA, 25 bp, Homo sapien
aaggatccagtgacagcgcggtcag

SEQ ID NO: 851570 - DNA, 25 bp, Homo sapien
ataaaggatccagtgacagcgcggt

SEQ ID NO: 851571 - DNA, 25 bp, Homo sapien
ctatgacaccactaaaggcatctgg

SEQ ID NO: 851572 - DNA, 25 bp, Homo sapien
ccctatgacaccactaaaggcatct

SEQ ID NO: 851573 - DNA, 25 bp, Homo sapien
tatgacaccactaaaggcatctgga

SEQ ID NO: 851574 - DNA, 25 bp, Homo sapien
tgacaccactaaaggcatctggaga

SEQ ID NO: 851575 - DNA, 25 bp, Homo sapien
gattcagggggcacaacagaaaacc

SEQ ID NO: 851576 - DNA, 25 bp, Homo sapien
attcagggggcacaacagaaaacct

SEQ ID NO: 851577 - DNA, 25 bp, Homo sapien
cctcctgaggtgtgagattgagatt

SEQ ID NO: 851578 - DNA, 25 bp, Homo sapien
gctcctcctgaggtgtgagattgag

SEQ ID NO: 851579 - DNA, 25 bp, Homo sapien
agtcaaagtagggtggtccatgctc

SEQ ID NO: 851580 - DNA, 25 bp, Homo sapien
aggaggagaaagtcaaagtagggtg

SEQ ID NO: 851581 - DNA, 25 bp, Homo sapien
tccccaggataatgttttcctcaga

SEQ ID NO: 851582 - DNA, 25 bp, Homo sapien
tggcttcctagaaggccacggagag

SEQ ID NO: 851583 - DNA, 25 bp, Homo sapien
gccagttccacgcactgatgcttgt

SEQ ID NO: 851584 - DNA, 25 bp, Homo sapien
ctgacaggtaggtggcttcctagaa

SEQ ID NO: 851585 - DNA, 25 bp, Homo sapien
aactgagatgcccttaggtgggtga

SEQ ID NO: 851586 - DNA, 25 bp, Homo sapien
tgatgaagacctgtgccaagcccag

SEQ ID NO: 851587 - DNA, 25 bp, Homo sapien
gatgaagacctgtgccaagcccagc

SEQ ID NO: 851588 - DNA, 25 bp, Homo sapien
gtgatgaagacctgtgccaagccca

SEQ ID NO: 851589 - DNA, 25 bp, Homo sapien
ggtgatgaagacctgtgccaagccc

SEQ ID NO: 851590 - DNA, 25 bp, Homo sapien
ctgtgtggggagcaggcaaggaagc

SEQ ID NO: 851591 - DNA, 25 bp, Homo sapien
ggggagcaggcaaggaagccccgct

SEQ ID NO: 851592 - DNA, 25 bp, Homo sapien
tgtgtggggagcaggcaaggaagcc

SEQ ID NO: 851593 - DNA, 25 bp, Homo sapien
gtggggagcaggcaaggaagccccg

SEQ ID NO: 851594 - DNA, 25 bp, Homo sapien
tggaactgcctggtccagggtacga

SEQ ID NO: 851595 - DNA, 25 bp, Homo sapien
tctaaggcgtttgaggcatagggcc

SEQ ID NO: 851596 - DNA, 25 bp, Homo sapien
ctggtccagggtacgagcgttttct

SEQ ID NO: 851597 - DNA, 25 bp, Homo sapien
atagggccagacgatcctcccgcag

SEQ ID NO: 851598 - DNA, 25 bp, Homo sapien
agacccgctagtcccgacatccgag

SEQ ID NO: 851599 - DNA, 25 bp, Homo sapien
agccggctggcccttagtcgcagtg

SEQ ID NO: 851600 - DNA, 25 bp, Homo sapien
ggtggcggccgcctcgcgccagaga

SEQ ID NO: 851601 - DNA, 25 bp, Homo sapien
ccgctctaggaatgcgcgcggcctt

SEQ ID NO: 851602 - DNA, 25 bp, Homo sapien
gtcgggccgcgcggggccgcgcgct

SEQ ID NO: 851603 - DNA, 25 bp, Homo sapien
tcgggccgcgcggggccgcgcgctg

SEQ ID NO: 851604 - DNA, 25 bp, Homo sapien
gccgcgcggggccgcgcgctgcccc

SEQ ID NO: 851605 - DNA, 25 bp, Homo sapien
gggccgcgcggggccgcgcgctgcc

SEQ ID NO: 851606 - DNA, 25 bp, Homo sapien
ggcacaaccgtgtcggtctcactgg

SEQ ID NO: 851607 - DNA, 25 bp, Homo sapien
cagctgagagccaatggagcaagga

SEQ ID NO: 851608 - DNA, 25 bp, Homo sapien
tctcactggtgctgtgagtgcagct

SEQ ID NO: 851609 - DNA, 25 bp, Homo sapien
aaggacttaacacaaacgattatat

SEQ ID NO: 851610 - DNA, 25 bp, Homo sapien
ggctccattgctgccgcccgagagg

SEQ ID NO: 851611 - DNA, 25 bp, Homo sapien
gaggccctacgcgagctcctaaaac

SEQ ID NO: 851612 - DNA, 25 bp, Homo sapien
aaaccctgcgccctccatttggcgc

SEQ ID NO: 851613 - DNA, 25 bp, Homo sapien
cggcctcgcggctccattgctgccg

SEQ ID NO: 851614 - DNA, 25 bp, Homo sapien
aaagcgccgggcacgccgcgtggca

SEQ ID NO: 851615 - DNA, 25 bp, Homo sapien
ttcctgcttccctacggcagcggca

SEQ ID NO: 851616 - DNA, 25 bp, Homo sapien
ttcctctcgttcaggtcgcctggcg

SEQ ID NO: 851617 - DNA, 25 bp, Homo sapien
cttcctggctgggtatgaacaccag

SEQ ID NO: 851618 - DNA, 25 bp, Homo sapien
cacccagctgcctgataaggagtcc

SEQ ID NO: 851619 - DNA, 25 bp, Homo sapien
agctgcctgataaggagtccaggga

SEQ ID NO: 851620 - DNA, 25 bp, Homo sapien
aggagtccagggacgggcagcaagc

SEQ ID NO: 851621 - DNA, 25 bp, Homo sapien
cccagctgcctgataaggagtccag

SEQ ID NO: 851622 - DNA, 25 bp, Homo sapien
tgaacggatgaacaagccacaggtg

SEQ ID NO: 851623 - DNA, 25 bp, Homo sapien
caagctttcgtttgtagcctccgga

SEQ ID NO: 851624 - DNA, 25 bp, Homo sapien
caattttaaccacccagtatgagga

SEQ ID NO: 851625 - DNA, 25 bp, Homo sapien
caatgtgcgggaagaaacacgggta

SEQ ID NO: 851626 - DNA, 25 bp, Homo sapien
ataggacatatagggatggtggcca

SEQ ID NO: 851627 - DNA, 25 bp, Homo sapien
tctgggctggtgtaaaggactgagg

SEQ ID NO: 851628 - DNA, 25 bp, Homo sapien
catcagctgcgaggctggtgcagat

SEQ ID NO: 851629 - DNA, 25 bp, Homo sapien
cagatacgtgggcaggtagttccgt

SEQ ID NO: 851630 - DNA, 25 bp, Homo sapien
cctcctcccaaggacatgggggcag

SEQ ID NO: 851631 - DNA, 25 bp, Homo sapien
tcggacaccgccaggcccgagccca

SEQ ID NO: 851632 - DNA, 25 bp, Homo sapien
cccctttgccgtgagctccccctct

SEQ ID NO: 851633 - DNA, 25 bp, Homo sapien
ttcgggctgttaatttccttgacaa

SEQ ID NO: 851634 - DNA, 25 bp, Homo sapien
tctgcagcctgtgcggcaagagctt

SEQ ID NO: 851635 - DNA, 25 bp, Homo sapien
ttcaagtgccccgagtgcgagaaga

SEQ ID NO: 851636 - DNA, 25 bp, Homo sapien
ttggtgatccatcagcgcgtgcacg

SEQ ID NO: 851637 - DNA, 25 bp, Homo sapien
acgcgggcaagcatgaggtctcctt

SEQ ID NO: 851638 - DNA, 25 bp, Homo sapien
ccttcacatgcatggagtgcggcaa

SEQ ID NO: 851639 - DNA, 25 bp, Homo sapien
tgtccgggagatatgaggccagtat

SEQ ID NO: 851640 - DNA, 25 bp, Homo sapien
gaaaccccgcagtgaaaaggctggc

SEQ ID NO: 851641 - DNA, 25 bp, Homo sapien
tacgagtgcgccgaatgcgagatca

SEQ ID NO: 851642 - DNA, 25 bp, Homo sapien
tcaagggtggtcgagtctgactgtg

SEQ ID NO: 851643 - DNA, 25 bp, Homo sapien
tcttccacccatgagaggctgcaaa

SEQ ID NO: 851644 - DNA, 25 bp, Homo sapien
cggtgcatcttccacccatgagagg

SEQ ID NO: 851645 - DNA, 25 bp, Homo sapien
gagtctgactgtgccggtgcatctt

SEQ ID NO: 851646 - DNA, 25 bp, Homo sapien
aaagtttggagacacctgagcccct

SEQ ID NO: 851647 - DNA, 25 bp, Homo sapien
gaaggctccagcgagttcagcgaac

SEQ ID NO: 851648 - DNA, 25 bp, Homo sapien
taagatcgaggtacagaccaacgac

SEQ ID NO: 851649 - DNA, 25 bp, Homo sapien
gaccaacgacgagggctcagaaagt

SEQ ID NO: 851650 - DNA, 25 bp, Homo sapien
ccacagatgaaagcacgggcaccag

SEQ ID NO: 851651 - DNA, 25 bp, Homo sapien
atccagggctgcgagacacacgaca

SEQ ID NO: 851652 - DNA, 25 bp, Homo sapien
ttaactcctgtggagcgactgacat

SEQ ID NO: 851653 - DNA, 25 bp, Homo sapien
tgtggagcgactgacattaacaacc

SEQ ID NO: 851654 - DNA, 25 bp, Homo sapien
aagactctgaggagggcgaaacgcc

SEQ ID NO: 851655 - DNA, 25 bp, Homo sapien
ttccaaaccagacctcatgtcacag

SEQ ID NO: 851656 - DNA, 25 bp, Homo sapien
cgaaacgccgacagatcccagtgct

SEQ ID NO: 851657 - DNA, 25 bp, Homo sapien
aatttccaaaccagacctcatgtca

SEQ ID NO: 851658 - DNA, 25 bp, Homo sapien
cagaaggagctctacaagaacgtga

SEQ ID NO: 851659 - DNA, 25 bp, Homo sapien
atgttgctgtgcacttctcggagca

SEQ ID NO: 851660 - DNA, 25 bp, Homo sapien
gctgtgcacttctcggagcaggagt

SEQ ID NO: 851661 - DNA, 25 bp, Homo sapien
tccctgtcacatttgatgatgttgc

SEQ ID NO: 851662 - DNA, 25 bp, Homo sapien
gaaaagaagatagccgactgcgaga

SEQ ID NO: 851663 - DNA, 25 bp, Homo sapien
catgaggctactgaccctggaaggc

SEQ ID NO: 851664 - DNA, 25 bp, Homo sapien
agagatcacccgcttggctgtgtgg

SEQ ID NO: 851665 - DNA, 25 bp, Homo sapien
agaagacagccgtggagttcgcgaa

SEQ ID NO: 851666 - DNA, 25 bp, Homo sapien
aaaatcatccctcagatcctcccgc

SEQ ID NO: 851667 - DNA, 25 bp, Homo sapien
tgctctttgagacgccctggccgtg

SEQ ID NO: 851668 - DNA, 25 bp, Homo sapien
ccgtgctagtgagaggattactgca

SEQ ID NO: 851669 - DNA, 25 bp, Homo sapien
tggtgtctggggagtaagcttctca

SEQ ID NO: 851670 - DNA, 25 bp, Homo sapien
aggcatccgtggcacggtgcggcag

SEQ ID NO: 851671 - DNA, 25 bp, Homo sapien
ccagaaaggcctgcccagagggctg

SEQ ID NO: 851672 - DNA, 25 bp, Homo sapien
acggtgcggcagccccagaaaggcc

SEQ ID NO: 851673 - DNA, 25 bp, Homo sapien
gtgcggcagccccagaaaggcctgc

SEQ ID NO: 851674 - DNA, 25 bp, Homo sapien
ggcacagacacctggcggcgacccg

SEQ ID NO: 851675 - DNA, 25 bp, Homo sapien
ttttccgcagagctcggccccgcgg

SEQ ID NO: 851676 - DNA, 25 bp, Homo sapien
tgacgcggctctcccatttcgcaga

SEQ ID NO: 851677 - DNA, 25 bp, Homo sapien
catttcgcagaacggagacactgag

SEQ ID NO: 851678 - DNA, 25 bp, Homo sapien
ggcccgcgctgcgtccgtcggggta

SEQ ID NO: 851679 - DNA, 25 bp, Homo sapien
gcgctgcgtccgtcggggtagccgc

SEQ ID NO: 851680 - DNA, 25 bp, Homo sapien
gcgtccgtcggggtagccgccggca

SEQ ID NO: 851681 - DNA, 25 bp, Homo sapien
cgcgctgcgtccgtcggggtagccg

SEQ ID NO: 851682 - DNA, 25 bp, Homo sapien
atggagctgtctgggttccggcagc

SEQ ID NO: 851683 - DNA, 25 bp, Homo sapien
gagtgtttctctttaaacggcctga

SEQ ID NO: 851684 - DNA, 25 bp, Homo sapien
ggcagcctccgacgagcctcggagt

SEQ ID NO: 851685 - DNA, 25 bp, Homo sapien
tttaaacggcctgagagggacatgc

SEQ ID NO: 851686 - DNA, 25 bp, Homo sapien
tggtcacatgaactccgggctttct

SEQ ID NO: 851687 - DNA, 25 bp, Homo sapien
gactgagggtaaacaagtcgctgcc

SEQ ID NO: 851688 - DNA, 25 bp, Homo sapien
tttcatgtcgaaaacaacactcggg

SEQ ID NO: 851689 - DNA, 25 bp, Homo sapien
tacatgtttaagtggacctgtccag

SEQ ID NO: 851690 - DNA, 25 bp, Homo sapien
gacagggtttcatcacgttagccag

SEQ ID NO: 851691 - DNA, 25 bp, Homo sapien
ctacagggccgcgccaccacgtcca

SEQ ID NO: 851692 - DNA, 25 bp, Homo sapien
cagggtttcatcacgttagccaggt

SEQ ID NO: 851693 - DNA, 25 bp, Homo sapien
gagacagggtttcatcacgttagcc

SEQ ID NO: 851694 - DNA, 25 bp, Homo sapien
caagttgcaacaggatagggactgg

SEQ ID NO: 851695 - DNA, 25 bp, Homo sapien
ccttcagtgagcagttcgggaagcc

SEQ ID NO: 851696 - DNA, 25 bp, Homo sapien
catgcatgcagatgtcgctggcagc

SEQ ID NO: 851697 - DNA, 25 bp, Homo sapien
tcatcatgtcggcaaacgttctgag

SEQ ID NO: 851698 - DNA, 25 bp, Homo sapien
tatatagttggtaatcttgtgaggg

SEQ ID NO: 851699 - DNA, 25 bp, Homo sapien
ggcaaaagtaatctaccatggcaga

SEQ ID NO: 851700 - DNA, 25 bp, Homo sapien
tcaaaaacagtatgctgactaaagg

SEQ ID NO: 851701 - DNA, 25 bp, Homo sapien
cagctgattacacaatattcagtat

SEQ ID NO: 851702 - DNA, 25 bp, Homo sapien
cattctactggaacatcactgtggg

SEQ ID NO: 851703 - DNA, 25 bp, Homo sapien
catcataaaggtgggcccagatttc

SEQ ID NO: 851704 - DNA, 25 bp, Homo sapien
gatttcttgattcgaccacagtgct

SEQ ID NO: 851705 - DNA, 25 bp, Homo sapien
cagcctctcactgtgggtacacgtg

SEQ ID NO: 851706 - DNA, 25 bp, Homo sapien
gcatttctgtcactatctcactgag

SEQ ID NO: 851707 - DNA, 25 bp, Homo sapien
gggagtagcggttgcatttcccagc

SEQ ID NO: 851708 - DNA, 25 bp, Homo sapien
acttttggttttcagggcgtgcatt

SEQ ID NO: 851709 - DNA, 25 bp, Homo sapien
tcccttggagcacacctcagtgcag

SEQ ID NO: 851710 - DNA, 25 bp, Homo sapien
ttccctttcgtctgacactgagaaa

SEQ ID NO: 851711 - DNA, 25 bp, Homo sapien
ttttccctttcgtctgacactgaga

SEQ ID NO: 851712 - DNA, 25 bp, Homo sapien
ttcgtctgacactgagaaaggtggt

SEQ ID NO: 851713 - DNA, 25 bp, Homo sapien
cttgaccgtcccacctgccttggtt

SEQ ID NO: 851714 - DNA, 25 bp, Homo sapien
tgggtcatttgactagggagaccac

SEQ ID NO: 851715 - DNA, 25 bp, Homo sapien
gggtcatttgactagggagaccaca

SEQ ID NO: 851716 - DNA, 25 bp, Homo sapien
gtcatttgactagggagaccacatc

SEQ ID NO: 851717 - DNA, 25 bp, Homo sapien
ggtcatttgactagggagaccacat

SEQ ID NO: 851718 - DNA, 25 bp, Homo sapien
gagctactttggtctacattggtca

SEQ ID NO: 851719 - DNA, 25 bp, Homo sapien
gatatcagcgtctcagatttccctg

SEQ ID NO: 851720 - DNA, 25 bp, Homo sapien
cattggtcagccttatggtttggta

SEQ ID NO: 851721 - DNA, 25 bp, Homo sapien
agtcagccttgcctccaagaaccaa

SEQ ID NO: 851722 - DNA, 25 bp, Homo sapien
gaggtcctctcccagattgaacaag

SEQ ID NO: 851723 - DNA, 25 bp, Homo sapien
tgcaggaaacagagacggaaaggcc

SEQ ID NO: 851724 - DNA, 25 bp, Homo sapien
tggaccccagtccaggtaagggctg

SEQ ID NO: 851725 - DNA, 25 bp, Homo sapien
cccagctttgactggaacgtggcaa

SEQ ID NO: 851726 - DNA, 25 bp, Homo sapien
gcagtttcttcaccccggcactgtg

SEQ ID NO: 851727 - DNA, 25 bp, Homo sapien
acgtgaggttgtttcgtcagcacaa

SEQ ID NO: 851728 - DNA, 25 bp, Homo sapien
tgattctgtgtgtcggcggcatcct

SEQ ID NO: 851729 - DNA, 25 bp, Homo sapien
tgtttaacgtgcacgctctgtggca

SEQ ID NO: 851730 - DNA, 25 bp, Homo sapien
aagggcctggactctgtttcttcct

SEQ ID NO: 851731 - DNA, 25 bp, Homo sapien
ctggactctgtttcttcctgggctg

SEQ ID NO: 851732 - DNA, 25 bp, Homo sapien
ggcctggactctgtttcttcctggg

SEQ ID NO: 851733 - DNA, 25 bp, Homo sapien
gaagggcctggactctgtttcttcc

SEQ ID NO: 851734 - DNA, 25 bp, Homo sapien
gatttctccgtggacgatggcagcc

SEQ ID NO: 851735 - DNA, 25 bp, Homo sapien
tacaaacatgcgtggcccttacggc

SEQ ID NO: 851736 - DNA, 25 bp, Homo sapien
cagaaggagctctacaagcacgtga

SEQ ID NO: 851737 - DNA, 25 bp, Homo sapien
tggccgtgtatttctccgagcagga

SEQ ID NO: 851738 - DNA, 25 bp, Homo sapien
taacaaaattgcactgggtacctgc

SEQ ID NO: 851739 - DNA, 25 bp, Homo sapien
taagcaccgtgataagggtctgcat

SEQ ID NO: 851740 - DNA, 25 bp, Homo sapien
tgcaataccatgttcagggagccca

SEQ ID NO: 851741 - DNA, 25 bp, Homo sapien
caggctgcgctctagtaaatctgca

SEQ ID NO: 851742 - DNA, 25 bp, Homo sapien
caccagactgcagggtatgtcactg

SEQ ID NO: 851743 - DNA, 25 bp, Homo sapien
tgatcctcaggtcccgataccagga

SEQ ID NO: 851744 - DNA, 25 bp, Homo sapien
gatgtgggtggctcaaacagtccag

SEQ ID NO: 851745 - DNA, 25 bp, Homo sapien
gctacaaaaatgtcggaggccgtca

SEQ ID NO: 851746 - DNA, 25 bp, Homo sapien
gctgtaggaccacctactccttgag

SEQ ID NO: 851747 - DNA, 25 bp, Homo sapien
ggcccacccaggtgctgtaggacca

SEQ ID NO: 851748 - DNA, 25 bp, Homo sapien
aggaccacctactccttgagagcaa

SEQ ID NO: 851749 - DNA, 25 bp, Homo sapien
tggcccacccaggtgctgtaggacc

SEQ ID NO: 851750 - DNA, 25 bp, Homo sapien
taaggagctggtgaccagttgaaag

SEQ ID NO: 851751 - DNA, 25 bp, Homo sapien
tctgggatcacgtgacagggattga

SEQ ID NO: 851752 - DNA, 25 bp, Homo sapien
aaaggaagcttctggagtaaactct

SEQ ID NO: 851753 - DNA, 25 bp, Homo sapien
ttcagtggataaggagctggtgacc

SEQ ID NO: 851754 - DNA, 25 bp, Homo sapien
tggcgctcggcctgtaggtccctct

SEQ ID NO: 851755 - DNA, 25 bp, Homo sapien
ctgcctggcgctcggcctgtaggtc

SEQ ID NO: 851756 - DNA, 25 bp, Homo sapien
tctctgcctggcgctcggcctgtag

SEQ ID NO: 851757 - DNA, 25 bp, Homo sapien
ctggcgctcggcctgtaggtccctc

SEQ ID NO: 851758 - DNA, 25 bp, Homo sapien
gggccttcgtctgccgggccgcggc

SEQ ID NO: 851759 - DNA, 25 bp, Homo sapien
caggaacctgagtccacaagactgt

SEQ ID NO: 851760 - DNA, 25 bp, Homo sapien
ggaacctgagtccacaagactgtcc

SEQ ID NO: 851761 - DNA, 25 bp, Homo sapien
gaacctgagtccacaagactgtcct

SEQ ID NO: 851762 - DNA, 25 bp, Homo sapien
aggaacctgagtccacaagactgtc

SEQ ID NO: 851763 - DNA, 25 bp, Homo sapien
gacttctaggttgatgtggctttcc

SEQ ID NO: 851764 - DNA, 25 bp, Homo sapien
ggacttctaggttgatgtggctttc

SEQ ID NO: 851765 - DNA, 25 bp, Homo sapien
caaggacttctaggttgatgtggct

SEQ ID NO: 851766 - DNA, 25 bp, Homo sapien
ctcacaaggacttctaggttgatgt

SEQ ID NO: 851767 - DNA, 25 bp, Homo sapien
tgtctaagttagagcctgagagtca

SEQ ID NO: 851768 - DNA, 25 bp, Homo sapien
ctagtggcagtttgtaccgtgtccg

SEQ ID NO: 851769 - DNA, 25 bp, Homo sapien
gactgttatcatctctctagtggca

SEQ ID NO: 851770 - DNA, 25 bp, Homo sapien
cgaaattcaggttagagttggacaa

SEQ ID NO: 851771 - DNA, 25 bp, Homo sapien
tggatttgaaccaaggacttcttga

SEQ ID NO: 851772 - DNA, 25 bp, Homo sapien
cacctggatttgaaccaaggacttc

SEQ ID NO: 851773 - DNA, 25 bp, Homo sapien
ggcacctggatttgaaccaaggact

SEQ ID NO: 851774 - DNA, 25 bp, Homo sapien
cctggatttgaaccaaggacttctt

SEQ ID NO: 851775 - DNA, 25 bp, Homo sapien
gggaccagttcaccctacatcccag

SEQ ID NO: 851776 - DNA, 25 bp, Homo sapien
tacatcccaggcttctgttgtccct

SEQ ID NO: 851777 - DNA, 25 bp, Homo sapien
ggacacacaggtgagactccatctg

SEQ ID NO: 851778 - DNA, 25 bp, Homo sapien
aacttgacagcagagggcgttcagg

SEQ ID NO: 851779 - DNA, 25 bp, Homo sapien
ggcaaggccctatgctacacagtcc

SEQ ID NO: 851780 - DNA, 25 bp, Homo sapien
ccaggcaaggccctatgctacacag

SEQ ID NO: 851781 - DNA, 25 bp, Homo sapien
cctttagttccttcactctgtatag

SEQ ID NO: 851782 - DNA, 25 bp, Homo sapien
ctttagttccttcactctgtataga

SEQ ID NO: 851783 - DNA, 25 bp, Homo sapien
gagacactccatgccttgtaatcca

SEQ ID NO: 851784 - DNA, 25 bp, Homo sapien
ccccaagcagagtctcagcataagt

SEQ ID NO: 851785 - DNA, 25 bp, Homo sapien
ccagtggcaatatcatcagggtggg

SEQ ID NO: 851786 - DNA, 25 bp, Homo sapien
aagcagagtctcagcataagtacca

SEQ ID NO: 851787 - DNA, 25 bp, Homo sapien
gaactggggacctcttgatctgcag

SEQ ID NO: 851788 - DNA, 25 bp, Homo sapien
aatgctctacccctgagctatacgc

SEQ ID NO: 851789 - DNA, 25 bp, Homo sapien
gctctacccctgagctatacgccct

SEQ ID NO: 851790 - DNA, 25 bp, Homo sapien
agtgggcacccagatttgaactggg

SEQ ID NO: 851791 - DNA, 25 bp, Homo sapien
agagtgggctgtaattcacgtgcag

SEQ ID NO: 851792 - DNA, 25 bp, Homo sapien
ctgtctcccttgttagagtagctga

SEQ ID NO: 851793 - DNA, 25 bp, Homo sapien
cagagctacaggagtttggtcgtag

SEQ ID NO: 851794 - DNA, 25 bp, Homo sapien
acgtgcagccgcagagctacaggag

SEQ ID NO: 851795 - DNA, 25 bp, Homo sapien
ggacctcttgctctacagtcaaaaa

SEQ ID NO: 851796 - DNA, 25 bp, Homo sapien
ctacagtcaaaaagctctagccctg

SEQ ID NO: 851797 - DNA, 25 bp, Homo sapien
caaagaattgatgagcctgcaggag

SEQ ID NO: 851798 - DNA, 25 bp, Homo sapien
tctggaggccaggtgtcagtagtac

SEQ ID NO: 851799 - DNA, 25 bp, Homo sapien
tgtaaacggcctttccctgctactg

SEQ ID NO: 851800 - DNA, 25 bp, Homo sapien
cagtagtacagtgatgaacgggcat

SEQ ID NO: 851801 - DNA, 25 bp, Homo sapien
tattctgtcgtggtgtttgacattc

SEQ ID NO: 851802 - DNA, 25 bp, Homo sapien
tgttattctgtcgtggtgtttgaca

SEQ ID NO: 851803 - DNA, 25 bp, Homo sapien
ataggattgttattctgtcgtggtg

SEQ ID NO: 851804 - DNA, 25 bp, Homo sapien
gattgttattctgtcgtggtgtttg

SEQ ID NO: 851805 - DNA, 25 bp, Homo sapien
ggaagtccttagcattggaagcaca

SEQ ID NO: 851806 - DNA, 25 bp, Homo sapien
gctgtgaagatggaaatctcttagc

SEQ ID NO: 851807 - DNA, 25 bp, Homo sapien
tggaagtccttagcattggaagcac

SEQ ID NO: 851808 - DNA, 25 bp, Homo sapien
aagtccttagcattggaagcacatt

SEQ ID NO: 851809 - DNA, 25 bp, Homo sapien
agggggcacctggatttgaaccaga

SEQ ID NO: 851810 - DNA, 25 bp, Homo sapien
acctggatttgaaccagagacctct

SEQ ID NO: 851811 - DNA, 25 bp, Homo sapien
ggcacctggatttgaaccagagacc

SEQ ID NO: 851812 - DNA, 25 bp, Homo sapien
ggggcacctggatttgaaccagaga

SEQ ID NO: 851813 - DNA, 25 bp, Homo sapien
tcctgtgccacagtggaagctgggt

SEQ ID NO: 851814 - DNA, 25 bp, Homo sapien
ctcctgtgccacagtggaagctggg

SEQ ID NO: 851815 - DNA, 25 bp, Homo sapien
tctcctgtgccacagtggaagctgg

SEQ ID NO: 851816 - DNA, 25 bp, Homo sapien
tgggaggcaaagactcacacaccaa

SEQ ID NO: 851817 - DNA, 25 bp, Homo sapien
catgtgtggatgtagattcttggaa

SEQ ID NO: 851818 - DNA, 25 bp, Homo sapien
gagagtaagatctcagttgagcctg

SEQ ID NO: 851819 - DNA, 25 bp, Homo sapien
ttccaactggctaatgtctgtcagc

SEQ ID NO: 851820 - DNA, 25 bp, Homo sapien
gaattcacaattgtgtaagtcttgg

SEQ ID NO: 851821 - DNA, 25 bp, Homo sapien
tcattgtccacaggtctggggagaa

SEQ ID NO: 851822 - DNA, 25 bp, Homo sapien
gacaccagaagctgtagagaaaccc

SEQ ID NO: 851823 - DNA, 25 bp, Homo sapien
gaaacccagtttctagaaggctgtc

SEQ ID NO: 851824 - DNA, 25 bp, Homo sapien
ctccagcgggtctgctgaacaacca

SEQ ID NO: 851825 - DNA, 25 bp, Homo sapien
attttaatgtccctgccttcagtca

SEQ ID NO: 851826 - DNA, 25 bp, Homo sapien
gttctaggcgagtctgaaggatgtt

SEQ ID NO: 851827 - DNA, 25 bp, Homo sapien
caaccaattcttttgagtccctctg

SEQ ID NO: 851828 - DNA, 25 bp, Homo sapien
actgttcttcctatagttcgtgtca

SEQ ID NO: 851829 - DNA, 25 bp, Homo sapien
ctgttcttcctatagttcgtgtcag

SEQ ID NO: 851830 - DNA, 25 bp, Homo sapien
ccactgttcttcctatagttcgtgt

SEQ ID NO: 851831 - DNA, 25 bp, Homo sapien
accactgttcttcctatagttcgtg

SEQ ID NO: 851832 - DNA, 25 bp, Homo sapien
ctcttttcctgatgttgagcttgct

SEQ ID NO: 851833 - DNA, 25 bp, Homo sapien
ttttcctgatgttgagcttgctagt

SEQ ID NO: 851834 - DNA, 25 bp, Homo sapien
gtgggttctcttttcctgatgttga

SEQ ID NO: 851835 - DNA, 25 bp, Homo sapien
tcctgatgttgagcttgctagtcat

SEQ ID NO: 851836 - DNA, 25 bp, Homo sapien
tggagtggaccaccagcaaactctt

SEQ ID NO: 851837 - DNA, 25 bp, Homo sapien
gaccaccagcaaactcttagcagac

SEQ ID NO: 851838 - DNA, 25 bp, Homo sapien
tcatgtaggagagcgctggctggca

SEQ ID NO: 851839 - DNA, 25 bp, Homo sapien
gcatctggcgtgtgcccctctgaga

SEQ ID NO: 851840 - DNA, 25 bp, Homo sapien
gcagctgagaggagtgtttccgttt

SEQ ID NO: 851841 - DNA, 25 bp, Homo sapien
gctttccctcagtccgtggtgacag

SEQ ID NO: 851842 - DNA, 25 bp, Homo sapien
cgctttccctcagtccgtggtgaca

SEQ ID NO: 851843 - DNA, 25 bp, Homo sapien
tttccgtttactgctggaacagcct

SEQ ID NO: 851844 - DNA, 25 bp, Homo sapien
tacttttagagagtaagaccagcaa

SEQ ID NO: 851845 - DNA, 25 bp, Homo sapien
taatcgcacccaggagtcctacagc

SEQ ID NO: 851846 - DNA, 25 bp, Homo sapien
gattttaccacaaactcaccccaga

SEQ ID NO: 851847 - DNA, 25 bp, Homo sapien
gcttgtcataagtgtctaataacca

SEQ ID NO: 851848 - DNA, 25 bp, Homo sapien
ggcacccagatttgaactggggacc

SEQ ID NO: 851849 - DNA, 25 bp, Homo sapien
cacccagatttgaactggggacctc

SEQ ID NO: 851850 - DNA, 25 bp, Homo sapien
ccagatttgaactggggacctcttg

SEQ ID NO: 851851 - DNA, 25 bp, Homo sapien
gctctacccctgagctatacgccct

SEQ ID NO: 851852 - DNA, 25 bp, Homo sapien
ggagaagttatccagccaggttgca

SEQ ID NO: 851853 - DNA, 25 bp, Homo sapien
tgagccctgcgtgggagcaattctc

SEQ ID NO: 851854 - DNA, 25 bp, Homo sapien
tactactctctggtctgccctggaa

SEQ ID NO: 851855 - DNA, 25 bp, Homo sapien
taccaagaatatgagggatacccgt

SEQ ID NO: 851856 - DNA, 25 bp, Homo sapien
agagtgggctgtaattcacgtgcag

SEQ ID NO: 851857 - DNA, 25 bp, Homo sapien
cagagctacaggagtttggtcgtag

SEQ ID NO: 851858 - DNA, 25 bp, Homo sapien
acgtgcagccgcagagctacaggag

SEQ ID NO: 851859 - DNA, 25 bp, Homo sapien
ctgtctcccttgttagagtagctga

SEQ ID NO: 851860 - DNA, 25 bp, Homo sapien
gggttaacccaagagctggccactg

SEQ ID NO: 851861 - DNA, 25 bp, Homo sapien
tgattcacagctagacaccttccct

SEQ ID NO: 851862 - DNA, 25 bp, Homo sapien
taaaattaaatgatggcttccctcc

SEQ ID NO: 851863 - DNA, 25 bp, Homo sapien
ggaagctgccagacctgattcacag

SEQ ID NO: 851864 - DNA, 25 bp, Homo sapien
acctggatctgagcgagggacctct

SEQ ID NO: 851865 - DNA, 25 bp, Homo sapien
tacagtcaaaagctctagcccagag

SEQ ID NO: 851866 - DNA, 25 bp, Homo sapien
agaacctggatctgagcgagggacc

SEQ ID NO: 851867 - DNA, 25 bp, Homo sapien
ggatctgagcgagggacctcttgct

SEQ ID NO: 851868 - DNA, 25 bp, Homo sapien
gcaacgtggagaatgagactgagaa

SEQ ID NO: 851869 - DNA, 25 bp, Homo sapien
gtggagtcccatatgtcagagaaga

SEQ ID NO: 851870 - DNA, 25 bp, Homo sapien
ggcctatgccagtctaagttgtatg

SEQ ID NO: 851871 - DNA, 25 bp, Homo sapien
gagaaggtgaccctaccctctgtgt

SEQ ID NO: 851872 - DNA, 25 bp, Homo sapien
cacattgccatggtgtttgacattc

SEQ ID NO: 851873 - DNA, 25 bp, Homo sapien
ttagcattggacgcacattgccatg

SEQ ID NO: 851874 - DNA, 25 bp, Homo sapien
tagcattggacgcacattgccatgg

SEQ ID NO: 851875 - DNA, 25 bp, Homo sapien
cattggacgcacattgccatggtgt

SEQ ID NO: 851876 - DNA, 25 bp, Homo sapien
gacactagtggaaaacgctgactct

SEQ ID NO: 851877 - DNA, 25 bp, Homo sapien
aagaagcagggtaaaagacactagt

SEQ ID NO: 851878 - DNA, 25 bp, Homo sapien
ccacaccccttgagagcctcagtga

SEQ ID NO: 851879 - DNA, 25 bp, Homo sapien
tgaacattcgtagaggcagcaggat

SEQ ID NO: 851880 - DNA, 25 bp, Homo sapien
tggactgccaaggaagatgcggagg

SEQ ID NO: 851881 - DNA, 25 bp, Homo sapien
ttgatctctagtcaaattctctacc

SEQ ID NO: 851882 - DNA, 25 bp, Homo sapien
cctcttgatctctagtcaaattctc

SEQ ID NO: 851883 - DNA, 25 bp, Homo sapien
gatctctagtcaaattctctacccc

SEQ ID NO: 851884 - DNA, 25 bp, Homo sapien
tctctagtcaaattctctacccctg

SEQ ID NO: 851885 - DNA, 25 bp, Homo sapien
cctattgttcgaagtatttattcca

SEQ ID NO: 851886 - DNA, 25 bp, Homo sapien
tgctaagtagcatctaccggtatat

SEQ ID NO: 851887 - DNA, 25 bp, Homo sapien
agcgcagtgactgcgcgcgcacacg

SEQ ID NO: 851888 - DNA, 25 bp, Homo sapien
acctcgggcggcagaagtgcctgtt

SEQ ID NO: 851889 - DNA, 25 bp, Homo sapien
cctggatttgaaccagggacctctt

SEQ ID NO: 851890 - DNA, 25 bp, Homo sapien
tcaaatgctctacccctgagctata

SEQ ID NO: 851891 - DNA, 25 bp, Homo sapien
ggcacctggatttgaaccagggacc

SEQ ID NO: 851892 - DNA, 25 bp, Homo sapien
tggatttgaaccagggacctcttga

SEQ ID NO: 851893 - DNA, 25 bp, Homo sapien
gtcaaatgctctacctgtgagctat

SEQ ID NO: 851894 - DNA, 25 bp, Homo sapien
ccagatttgaaccggggacctcttg

SEQ ID NO: 851895 - DNA, 25 bp, Homo sapien
gcagtcaaatgctctacctgtgagc

SEQ ID NO: 851896 - DNA, 25 bp, Homo sapien
aatgctctacctgtgagctataccc

SEQ ID NO: 851897 - DNA, 25 bp, Homo sapien
tgtgggttctagattgactgatgcg

SEQ ID NO: 851898 - DNA, 25 bp, Homo sapien
ttctagattgactgatgcgaaccat

SEQ ID NO: 851899 - DNA, 25 bp, Homo sapien
tgggttctagattgactgatgcgaa

SEQ ID NO: 851900 - DNA, 25 bp, Homo sapien
tatgtgggttctagattgactgatg

SEQ ID NO: 851901 - DNA, 25 bp, Homo sapien
ctatgctggatggttctaaaggaca

SEQ ID NO: 851902 - DNA, 25 bp, Homo sapien
gcctgattatcaaagctgatgtcct

SEQ ID NO: 851903 - DNA, 25 bp, Homo sapien
taaaggacatttcacgcaaactggc

SEQ ID NO: 851904 - DNA, 25 bp, Homo sapien
gatgattctgacagggacatttcgg

SEQ ID NO: 851905 - DNA, 25 bp, Homo sapien
ggcacctggatttgaaccagggacc

SEQ ID NO: 851906 - DNA, 25 bp, Homo sapien
cctggatttgaaccagggacctctt

SEQ ID NO: 851907 - DNA, 25 bp, Homo sapien
tggatttgaaccagggacctcttga

SEQ ID NO: 851908 - DNA, 25 bp, Homo sapien
tcaaatgctctacccctgagctata

SEQ ID NO: 851909 - DNA, 25 bp, Homo sapien
ttgcggcccagacagcgctctgcct

SEQ ID NO: 851910 - DNA, 25 bp, Homo sapien
tggcccttgcagccgcgccggccat

SEQ ID NO: 851911 - DNA, 25 bp, Homo sapien
agggaattcctcgcccagtcgcccg

SEQ ID NO: 851912 - DNA, 25 bp, Homo sapien
ctctgcctgggcaatatcggaggga

SEQ ID NO: 851913 - DNA, 25 bp, Homo sapien
cctcgcatcccttggtgggtggtgc

SEQ ID NO: 851914 - DNA, 25 bp, Homo sapien
ggcgcagacgcggactacacttccc

SEQ ID NO: 851915 - DNA, 25 bp, Homo sapien
agcgcctcgcatcccttggtgggtg

SEQ ID NO: 851916 - DNA, 25 bp, Homo sapien
gcgcagacgcggactacacttccca

SEQ ID NO: 851917 - DNA, 25 bp, Homo sapien
cgccactcctcggtttccggcgcgg

SEQ ID NO: 851918 - DNA, 25 bp, Homo sapien
ccaggtccgcgcaggagaaggcggg

SEQ ID NO: 851919 - DNA, 25 bp, Homo sapien
cacgcgaccctcgtcggcggcggcc

SEQ ID NO: 851920 - DNA, 25 bp, Homo sapien
tggcgcgggcgcacgcgaccctcgt

SEQ ID NO: 851921 - DNA, 25 bp, Homo sapien
tcggggccgcactgcgccgaggggt

SEQ ID NO: 851922 - DNA, 25 bp, Homo sapien
gggtccgcgcgtccgcctgccttac

SEQ ID NO: 851923 - DNA, 25 bp, Homo sapien
gcactgcgccgaggggtccgcgcgt

SEQ ID NO: 851924 - DNA, 25 bp, Homo sapien
cgccttcggggccgcactgcgccga

SEQ ID NO: 851925 - DNA, 25 bp, Homo sapien
ccagccgatcccgaagttgcggggg

SEQ ID NO: 851926 - DNA, 25 bp, Homo sapien
cagccgatcccgaagttgcgggggg

SEQ ID NO: 851927 - DNA, 25 bp, Homo sapien
gtaccggcggcggagagctggagag

SEQ ID NO: 851928 - DNA, 25 bp, Homo sapien
ttgtaacgaaacaagccacgccaag

SEQ ID NO: 851929 - DNA, 25 bp, Homo sapien
gagaggttgtccgaggacctgaact

SEQ ID NO: 851930 - DNA, 25 bp, Homo sapien
tcatgcccactctaccaggataact

SEQ ID NO: 851931 - DNA, 25 bp, Homo sapien
ccacctaggcctccaggcgcacact

SEQ ID NO: 851932 - DNA, 25 bp, Homo sapien
tgcacttggtaaccccacctaggcc

SEQ ID NO: 851933 - DNA, 25 bp, Homo sapien
gttggttgttccatcccagagggga

SEQ ID NO: 851934 - DNA, 25 bp, Homo sapien
catcccagaggggacagcctagctg

SEQ ID NO: 851935 - DNA, 25 bp, Homo sapien
cccagaggggacagcctagctgtcc

SEQ ID NO: 851936 - DNA, 25 bp, Homo sapien
ttggttgttccatcccagaggggac

SEQ ID NO: 851937 - DNA, 25 bp, Homo sapien
cctcctccgagaaccgcacggccaa

SEQ ID NO: 851938 - DNA, 25 bp, Homo sapien
tcccgcatcacgtctcggtagaact

SEQ ID NO: 851939 - DNA, 25 bp, Homo sapien
tcacgtctcggtagaactccctctg

SEQ ID NO: 851940 - DNA, 25 bp, Homo sapien
cgtctcgtagttctcccgcatcacg

SEQ ID NO: 851941 - DNA, 25 bp, Homo sapien
ctcctgccacacgtgctgctccctc

SEQ ID NO: 851942 - DNA, 25 bp, Homo sapien
acgtgctgctccctcccgtccttac

SEQ ID NO: 851943 - DNA, 25 bp, Homo sapien
caggctcctgccacacgtgctgctc

SEQ ID NO: 851944 - DNA, 25 bp, Homo sapien
tgccacacgtgctgctccctcccgt

SEQ ID NO: 851945 - DNA, 25 bp, Homo sapien
acaggaaagcagagagggggagcag

SEQ ID NO: 851946 - DNA, 25 bp, Homo sapien
ctgagggtgacaggaaagcagagag

SEQ ID NO: 851947 - DNA, 25 bp, Homo sapien
ggaaagcagagagggggagcagctc

SEQ ID NO: 851948 - DNA, 25 bp, Homo sapien
gacaggaaagcagagagggggagca

SEQ ID NO: 851949 - DNA, 25 bp, Homo sapien
ggggatctccacaaccagcaggctc

SEQ ID NO: 851950 - DNA, 25 bp, Homo sapien
ctcctgcccctcatcagcgtggctc

SEQ ID NO: 851951 - DNA, 25 bp, Homo sapien
aggctcctgcccctcatcagcgtgg

SEQ ID NO: 851952 - DNA, 25 bp, Homo sapien
gggatctccacaaccagcaggctcc

SEQ ID NO: 851953 - DNA, 25 bp, Homo sapien
ggctctcgctctcggggctgtccat

SEQ ID NO: 851954 - DNA, 25 bp, Homo sapien
agaactctgggatctccttcaccag

SEQ ID NO: 851955 - DNA, 25 bp, Homo sapien
tctcggggctgtccatagcgccctt

SEQ ID NO: 851956 - DNA, 25 bp, Homo sapien
gggctgtccatagcgcccttgactt

SEQ ID NO: 851957 - DNA, 25 bp, Homo sapien
gtgccgtggacttgtgcttcatcat

SEQ ID NO: 851958 - DNA, 25 bp, Homo sapien
tcatgcggagtgcagaggaggctgc

SEQ ID NO: 851959 - DNA, 25 bp, Homo sapien
atgcagtgcagtgccgtggacttgt

SEQ ID NO: 851960 - DNA, 25 bp, Homo sapien
catcatgcggagtgcagaggaggct

SEQ ID NO: 851961 - DNA, 25 bp, Homo sapien
cacgagctgtcggtgggcgtggtgg

SEQ ID NO: 851962 - DNA, 25 bp, Homo sapien
ccactggaacacgagctgtcggtgg

SEQ ID NO: 851963 - DNA, 25 bp, Homo sapien
ggctggctggtagggccgtctggaa

SEQ ID NO: 851964 - DNA, 25 bp, Homo sapien
tgggccactggaacacgagctgtcg

SEQ ID NO: 851965 - DNA, 25 bp, Homo sapien
gagaggacttccctggaccccgtca

SEQ ID NO: 851966 - DNA, 25 bp, Homo sapien
tgatggggagaggacttccctggac

SEQ ID NO: 851967 - DNA, 25 bp, Homo sapien
gatggggagaggacttccctggacc

SEQ ID NO: 851968 - DNA, 25 bp, Homo sapien
gagcatcatgcctcctctttggtgg

SEQ ID NO: 851969 - DNA, 25 bp, Homo sapien
tgtgtacaaagtgctcagtgatcgg

SEQ ID NO: 851970 - DNA, 25 bp, Homo sapien
gacgccacgatcagggcttttgaaa

SEQ ID NO: 851971 - DNA, 25 bp, Homo sapien
catgttagaaactgccggagacttt

SEQ ID NO: 851972 - DNA, 25 bp, Homo sapien
aatgagaccccagagaaatcctagg

SEQ ID NO: 851973 - DNA, 25 bp, Homo sapien
tctgcagttagggttgctgtgatga

SEQ ID NO: 851974 - DNA, 25 bp, Homo sapien
cggtctaaggatcagaccagtgcac

SEQ ID NO: 851975 - DNA, 25 bp, Homo sapien
cagacatgcaaaatttgtgagaagt

SEQ ID NO: 851976 - DNA, 25 bp, Homo sapien
tccttgtaggccacggtttgtcggc

SEQ ID NO: 851977 - DNA, 25 bp, Homo sapien
ccttgtaggccacggtttgtcggca

SEQ ID NO: 851978 - DNA, 25 bp, Homo sapien
tgtaggccacggtttgtcggcagtt

SEQ ID NO: 851979 - DNA, 25 bp, Homo sapien
cttccttgtaggccacggtttgtcg

SEQ ID NO: 851980 - DNA, 25 bp, Homo sapien
tggcaggcattcaggtctccgggcg

SEQ ID NO: 851981 - DNA, 25 bp, Homo sapien
gtctccgggcggctgagattcccac

SEQ ID NO: 851982 - DNA, 25 bp, Homo sapien
tgagattcccacccgtgagaatgca

SEQ ID NO: 851983 - DNA, 25 bp, Homo sapien
gagattcccacccgtgagaatgcag

SEQ ID NO: 851984 - DNA, 25 bp, Homo sapien
tgtggcacatgcaaggtgggcctgg

SEQ ID NO: 851985 - DNA, 25 bp, Homo sapien
gcacatgcaaggtgggcctgggtca

SEQ ID NO: 851986 - DNA, 25 bp, Homo sapien
tggcacatgcaaggtgggcctgggt

SEQ ID NO: 851987 - DNA, 25 bp, Homo sapien
ctgtggcacatgcaaggtgggcctg

SEQ ID NO: 851988 - DNA, 25 bp, Homo sapien
gctctggttagcctggacgtgccca

SEQ ID NO: 851989 - DNA, 25 bp, Homo sapien
tctgctctggttagcctggacgtgc

SEQ ID NO: 851990 - DNA, 25 bp, Homo sapien
tgaggccttgcaaggggctgttccc

SEQ ID NO: 851991 - DNA, 25 bp, Homo sapien
aggtctgctctggttagcctggacg

SEQ ID NO: 851992 - DNA, 25 bp, Homo sapien
gggcaaagagggaagccatggaatt

SEQ ID NO: 851993 - DNA, 25 bp, Homo sapien
tcctggattctcctgtagccgtcgg

SEQ ID NO: 851994 - DNA, 25 bp, Homo sapien
gcagaccctggaggggacaatcccc

SEQ ID NO: 851995 - DNA, 25 bp, Homo sapien
gattctcctgtagccgtcggttccc

SEQ ID NO: 851996 - DNA, 25 bp, Homo sapien
caatcccctgaaaccgcctcggtct

SEQ ID NO: 851997 - DNA, 25 bp, Homo sapien
agcagaccgccagctccaagatcag

SEQ ID NO: 851998 - DNA, 25 bp, Homo sapien
catcttcacagagagcagaccgcca

SEQ ID NO: 851999 - DNA, 25 bp, Homo sapien
gagcagaccgccagctccaagatca

SEQ ID NO: 852000 - DNA, 25 bp, Homo sapien
atcttcacagagagcagaccgccag

SEQ ID NO: 852001 - DNA, 25 bp, Homo sapien
ttccagggcttccagcggtgagctt

SEQ ID NO: 852002 - DNA, 25 bp, Homo sapien
catttgggggaatgcccttcagaca

SEQ ID NO: 852003 - DNA, 25 bp, Homo sapien
ccttcagacaggcttccagggcttc

SEQ ID NO: 852004 - DNA, 25 bp, Homo sapien
ttccagcggtgagcttgaggcactg

SEQ ID NO: 852005 - DNA, 25 bp, Homo sapien
ctgagacctagagtctcctggctgg

SEQ ID NO: 852006 - DNA, 25 bp, Homo sapien
ggaacaagaagtgggtggcagctgg

SEQ ID NO: 852007 - DNA, 25 bp, Homo sapien
agttcaggcttctgagacctagagt

SEQ ID NO: 852008 - DNA, 25 bp, Homo sapien
cactgtgtgatctgtggggttgcag

SEQ ID NO: 852009 - DNA, 25 bp, Homo sapien
ccagaggcagaacaggctctctggt

SEQ ID NO: 852010 - DNA, 25 bp, Homo sapien
agaggcagaacaggctctctggtcg

SEQ ID NO: 852011 - DNA, 25 bp, Homo sapien
tgctggggccatctctcacacagct

SEQ ID NO: 852012 - DNA, 25 bp, Homo sapien
agacccagaggcagaacaggctctc

SEQ ID NO: 852013 - DNA, 25 bp, Homo sapien
tttccaggatgctgcccctggttcc

SEQ ID NO: 852014 - DNA, 25 bp, Homo sapien
ttccaggatgctgcccctggttccc

SEQ ID NO: 852015 - DNA, 25 bp, Homo sapien
ttttccaggatgctgcccctggttc

SEQ ID NO: 852016 - DNA, 25 bp, Homo sapien
tgggctctgctctcctcggtcccct

SEQ ID NO: 852017 - DNA, 25 bp, Homo sapien
ccttgtctgctgtccagttcctggg

SEQ ID NO: 852018 - DNA, 25 bp, Homo sapien
cttgagacaattctccagaccctgc

SEQ ID NO: 852019 - DNA, 25 bp, Homo sapien
atctccttgagacaattctccagac

SEQ ID NO: 852020 - DNA, 25 bp, Homo sapien
aggtgaacacctgtgggctgaccag

SEQ ID NO: 852021 - DNA, 25 bp, Homo sapien
cagggtctttgaacccccgctggtg

SEQ ID NO: 852022 - DNA, 25 bp, Homo sapien
taccctgcccgagacggctgactcg

SEQ ID NO: 852023 - DNA, 25 bp, Homo sapien
tgcccgagacggctgactcgcaggc

SEQ ID NO: 852024 - DNA, 25 bp, Homo sapien
tttatcttcttgtttagcgaacctc

SEQ ID NO: 852025 - DNA, 25 bp, Homo sapien
cttgtttagcgaacctcagtttctg

SEQ ID NO: 852026 - DNA, 25 bp, Homo sapien
cagcactttgtgacactttatcttc

SEQ ID NO: 852027 - DNA, 25 bp, Homo sapien
gtcagcactttgtgacactttatct

SEQ ID NO: 852028 - DNA, 25 bp, Homo sapien
aggcaagatccccctcagggcgctc

SEQ ID NO: 852029 - DNA, 25 bp, Homo sapien
agtgcagcggggagggcttgggggc

SEQ ID NO: 852030 - DNA, 25 bp, Homo sapien
ggcaagatccccctcagggcgctct

SEQ ID NO: 852031 - DNA, 25 bp, Homo sapien
agccgctgaagctcgagctggagcc

SEQ ID NO: 852032 - DNA, 25 bp, Homo sapien
agatcaggctctggcctcgggtctt

SEQ ID NO: 852033 - DNA, 25 bp, Homo sapien
ttctccttcagagccgctgaagctc

SEQ ID NO: 852034 - DNA, 25 bp, Homo sapien
cacgcaggcgaagcgcaagggcctt

SEQ ID NO: 852035 - DNA, 25 bp, Homo sapien
ctgccagcaggggtcccaccaggac

SEQ ID NO: 852036 - DNA, 25 bp, Homo sapien
ggacagagggacaggaggcttacag

SEQ ID NO: 852037 - DNA, 25 bp, Homo sapien
cagcaggggtcccaccaggacatgg

SEQ ID NO: 852038 - DNA, 25 bp, Homo sapien
gggacagagggacaggaggcttaca

SEQ ID NO: 852039 - DNA, 25 bp, Homo sapien
caccgaggccgctgcagtacctggg

SEQ ID NO: 852040 - DNA, 25 bp, Homo sapien
gcaccgaggccgctgcagtacctgg

SEQ ID NO: 852041 - DNA, 25 bp, Homo sapien
tgcaccgaggccgctgcagtacctg

SEQ ID NO: 852042 - DNA, 25 bp, Homo sapien
caggcaggactcaaaggatccagtc

SEQ ID NO: 852043 - DNA, 25 bp, Homo sapien
gcgacaggcaggactcaaaggatcc

SEQ ID NO: 852044 - DNA, 25 bp, Homo sapien
gcaggactcaaaggatccagtctgg

SEQ ID NO: 852045 - DNA, 25 bp, Homo sapien
aggactcaaaggatccagtctggac

SEQ ID NO: 852046 - DNA, 25 bp, Homo sapien
cttacagggaactaaagcacggcca

SEQ ID NO: 852047 - DNA, 25 bp, Homo sapien
aaagcacggccaatgtgcaggactc

SEQ ID NO: 852048 - DNA, 25 bp, Homo sapien
cagggaactaaagcacggccaatgt

SEQ ID NO: 852049 - DNA, 25 bp, Homo sapien
ggaactaaagcacggccaatgtgca

SEQ ID NO: 852050 - DNA, 25 bp, Homo sapien
gacagcaggtactctctaaactctc

SEQ ID NO: 852051 - DNA, 25 bp, Homo sapien
agctccaggcctctggatgcttcac

SEQ ID NO: 852052 - DNA, 25 bp, Homo sapien
ctgagaaaccgggcagggatcctga

SEQ ID NO: 852053 - DNA, 25 bp, Homo sapien
aagctccaggcctctggatgcttca

SEQ ID NO: 852054 - DNA, 25 bp, Homo sapien
tccagctgagaaaccgggcagggat

SEQ ID NO: 852055 - DNA, 25 bp, Homo sapien
ttgatgagaccaaatggcaccctgc

SEQ ID NO: 852056 - DNA, 25 bp, Homo sapien
tctttgtgttgttgatgagaccaaa

SEQ ID NO: 852057 - DNA, 25 bp, Homo sapien
gttgttgatgagaccaaatggcacc

SEQ ID NO: 852058 - DNA, 25 bp, Homo sapien
tctaggaatcggtgggtctttgtgt

SEQ ID NO: 852059 - DNA, 25 bp, Homo sapien
gcagctccggagggggagactcact

SEQ ID NO: 852060 - DNA, 25 bp, Homo sapien
cggagggggagactcactgggcagc

SEQ ID NO: 852061 - DNA, 25 bp, Homo sapien
caggaggcgcagcttccggaggggg

SEQ ID NO: 852062 - DNA, 25 bp, Homo sapien
cgcagcttccggagggggcagctcc

SEQ ID NO: 852063 - DNA, 25 bp, Homo sapien
agcttctccgcaagggcagcaccga

SEQ ID NO: 852064 - DNA, 25 bp, Homo sapien
gtggcgagccgatccagcttctccg

SEQ ID NO: 852065 - DNA, 25 bp, Homo sapien
tgagccaggcctgccagcgctgtgg

SEQ ID NO: 852066 - DNA, 25 bp, Homo sapien
cctgccagcgctgtggcgagccgat

SEQ ID NO: 852067 - DNA, 25 bp, Homo sapien
gcaggatctttggtttaggcctcgt

SEQ ID NO: 852068 - DNA, 25 bp, Homo sapien
agcccagcgaggtccccgtgggagg

SEQ ID NO: 852069 - DNA, 25 bp, Homo sapien
tctccctggccacgcaggatctttg

SEQ ID NO: 852070 - DNA, 25 bp, Homo sapien
taggcctcgtgggtcccttctgcct

SEQ ID NO: 852071 - DNA, 25 bp, Homo sapien
cctctggagagtccttgcaggtcac

SEQ ID NO: 852072 - DNA, 25 bp, Homo sapien
gcgagcggtccctctggagagtcct

SEQ ID NO: 852073 - DNA, 25 bp, Homo sapien
catggcagctgggtgtagaggacag

SEQ ID NO: 852074 - DNA, 25 bp, Homo sapien
agcgtctggaggcagcggacgtgcc

SEQ ID NO: 852075 - DNA, 25 bp, Homo sapien
tgctcggctccttgggccgctctgg

SEQ ID NO: 852076 - DNA, 25 bp, Homo sapien
ctctgggatcccgtctggtgccact

SEQ ID NO: 852077 - DNA, 25 bp, Homo sapien
tgaggtcggcacgtctgcatctgca

SEQ ID NO: 852078 - DNA, 25 bp, Homo sapien
gccactcctgaggtcggcacgtctg

SEQ ID NO: 852079 - DNA, 25 bp, Homo sapien
gcgccccccatctcgggtccctgtg

SEQ ID NO: 852080 - DNA, 25 bp, Homo sapien
cccatctcgggtccctgtgctcccc

SEQ ID NO: 852081 - DNA, 25 bp, Homo sapien
ccccatctcgggtccctgtgctccc

SEQ ID NO: 852082 - DNA, 25 bp, Homo sapien
caatgcgccccccatctcgggtccc

SEQ ID NO: 852083 - DNA, 25 bp, Homo sapien
gcgaggctcccagcaacagtaaggg

SEQ ID NO: 852084 - DNA, 25 bp, Homo sapien
gaatccacagaggtaagtccagctt

SEQ ID NO: 852085 - DNA, 25 bp, Homo sapien
acctacaagcttgggcggctccagt

SEQ ID NO: 852086 - DNA, 25 bp, Homo sapien
ctctacccagttgggacaaagggcg

SEQ ID NO: 852087 - DNA, 25 bp, Homo sapien
aatgttctcgaggatgtctgggaga

SEQ ID NO: 852088 - DNA, 25 bp, Homo sapien
ccacatggacctcccttctatagga

SEQ ID NO: 852089 - DNA, 25 bp, Homo sapien
cagcgtgctggtggcacaaccagcc

SEQ ID NO: 852090 - DNA, 25 bp, Homo sapien
gactcagagtgtgccccaggagtcc

SEQ ID NO: 852091 - DNA, 25 bp, Homo sapien
ggaactgaacctgacacctggattg

SEQ ID NO: 852092 - DNA, 25 bp, Homo sapien
agtcaacaggtgcacatacaggtcc

SEQ ID NO: 852093 - DNA, 25 bp, Homo sapien
ccccaaatgtgtatggtgaaggcct

SEQ ID NO: 852094 - DNA, 25 bp, Homo sapien
tccggtaaccaggacagaagtgggc

SEQ ID NO: 852095 - DNA, 25 bp, Homo sapien
acagggccaagtgtgccagtccaca

SEQ ID NO: 852096 - DNA, 25 bp, Homo sapien
gggcattcccctctgacaggtgtcc

SEQ ID NO: 852097 - DNA, 25 bp, Homo sapien
gatgttcagtctgttgcgggcattc

SEQ ID NO: 852098 - DNA, 25 bp, Homo sapien
gaccctgacttgagggacacactgg

SEQ ID NO: 852099 - DNA, 25 bp, Homo sapien
tctagaaggcgtttcagtgactgtg

SEQ ID NO: 852100 - DNA, 25 bp, Homo sapien
cagactgggaaggtcgcactcagat

SEQ ID NO: 852101 - DNA, 25 bp, Homo sapien
tgccaaagacctaaactgcatctag

SEQ ID NO: 852102 - DNA, 25 bp, Homo sapien
cctagacctagggaactgcttctgc

SEQ ID NO: 852103 - DNA, 25 bp, Homo sapien
cggccccatggtgtactgtcctata

SEQ ID NO: 852104 - DNA, 25 bp, Homo sapien
tacgggcctcaatcaggccaatttt

SEQ ID NO: 852105 - DNA, 25 bp, Homo sapien
aaatgtcctgtgtatgcttgaagag

SEQ ID NO: 852106 - DNA, 25 bp, Homo sapien
tatattaagcagtcccatggcacac

SEQ ID NO: 852107 - DNA, 25 bp, Homo sapien
gggctgttcgactccttgtggcagt

SEQ ID NO: 852108 - DNA, 25 bp, Homo sapien
gactccttgtggcagtcgaactcct

SEQ ID NO: 852109 - DNA, 25 bp, Homo sapien
cagtcgaactccttgtggtgtcacc

SEQ ID NO: 852110 - DNA, 25 bp, Homo sapien
tgtggcagtcgaactccttgtggtg

SEQ ID NO: 852111 - DNA, 25 bp, Homo sapien
ctgaacaatgtctcgttcttgacca

SEQ ID NO: 852112 - DNA, 25 bp, Homo sapien
agatggcaatagtctgaacaatgtc

SEQ ID NO: 852113 - DNA, 25 bp, Homo sapien
ggcaatagtctgaacaatgtctcgt

SEQ ID NO: 852114 - DNA, 25 bp, Homo sapien
tagtctgaacaatgtctcgttcttg

SEQ ID NO: 852115 - DNA, 25 bp, Homo sapien
tcatcctgcatgacagaacggaggc

SEQ ID NO: 852116 - DNA, 25 bp, Homo sapien
gctctcatcctgcatgacagaacgg

SEQ ID NO: 852117 - DNA, 25 bp, Homo sapien
tcctgcatgacagaacggaggcctg

SEQ ID NO: 852118 - DNA, 25 bp, Homo sapien
tctcatcctgcatgacagaacggag

SEQ ID NO: 852119 - DNA, 25 bp, Homo sapien
aatgtcttttaaccagagacaagtc

SEQ ID NO: 852120 - DNA, 25 bp, Homo sapien
cacggccacaattccacgctggtgg

SEQ ID NO: 852121 - DNA, 25 bp, Homo sapien
caagtcttgtatttcacagtcagag

SEQ ID NO: 852122 - DNA, 25 bp, Homo sapien
gagggagtatgcaagacccccagaa

SEQ ID NO: 852123 - DNA, 25 bp, Homo sapien
ccagtccacagccattctgatgacg

SEQ ID NO: 852124 - DNA, 25 bp, Homo sapien
aatcttaaatggaacccagtccaca

SEQ ID NO: 852125 - DNA, 25 bp, Homo sapien
cacagccattctgatgacgatcttg

SEQ ID NO: 852126 - DNA, 25 bp, Homo sapien
tcttaaatggaacccagtccacagc

SEQ ID NO: 852127 - DNA, 25 bp, Homo sapien
taagtgctaggtggcattctgtggg

SEQ ID NO: 852128 - DNA, 25 bp, Homo sapien
ctaagtgctaggtggcattctgtgg

SEQ ID NO: 852129 - DNA, 25 bp, Homo sapien
caggtgccccgttggaaagcagata

SEQ ID NO: 852130 - DNA, 25 bp, Homo sapien
ccgcagtgcggaaagagcttcagcc

SEQ ID NO: 852131 - DNA, 25 bp, Homo sapien
tgcccacagtttcgagaggcccgtg

SEQ ID NO: 852132 - DNA, 25 bp, Homo sapien
gacagagactcagcgaacccttgct

SEQ ID NO: 852133 - DNA, 25 bp, Homo sapien
gaagcgctttcgcaagaagacgcac

SEQ ID NO: 852134 - DNA, 25 bp, Homo sapien
gaagacgcacttgattcggcaccag

SEQ ID NO: 852135 - DNA, 25 bp, Homo sapien
gacaagcgcttcagcaagaaggccc

SEQ ID NO: 852136 - DNA, 25 bp, Homo sapien
cctgcacggaatgcgagaagcgctt

SEQ ID NO: 852137 - DNA, 25 bp, Homo sapien
cagcactgggattgggaagagaccc

SEQ ID NO: 852138 - DNA, 25 bp, Homo sapien
ggagaccgggaactaacagtccaga

SEQ ID NO: 852139 - DNA, 25 bp, Homo sapien
catctaactccaggtggtgtccggg

SEQ ID NO: 852140 - DNA, 25 bp, Homo sapien
aggagaaacctcgtaacctgggcag

SEQ ID NO: 852141 - DNA, 25 bp, Homo sapien
tcagccagggcccacgccatcccaa

SEQ ID NO: 852142 - DNA, 25 bp, Homo sapien
agccagggcccacgccatcccaaag

SEQ ID NO: 852143 - DNA, 25 bp, Homo sapien
cagggcccacgccatcccaaagagg

SEQ ID NO: 852144 - DNA, 25 bp, Homo sapien
gtcagccagggcccacgccatccca

SEQ ID NO: 852145 - DNA, 25 bp, Homo sapien
aggtcctcctgacggggtgccactt

SEQ ID NO: 852146 - DNA, 25 bp, Homo sapien
ccgagcggccactccagggcaggtc

SEQ ID NO: 852147 - DNA, 25 bp, Homo sapien
cagcccaggcggctgtaatggtcga

SEQ ID NO: 852148 - DNA, 25 bp, Homo sapien
ggctggcacagggtaccaggtcctc

SEQ ID NO: 852149 - DNA, 25 bp, Homo sapien
tgggcaacaagtcctcactgtccgg

SEQ ID NO: 852150 - DNA, 25 bp, Homo sapien
ctgtccggttccacttggcaggccg

SEQ ID NO: 852151 - DNA, 25 bp, Homo sapien
ttccacttggcaggccgggtttctg

SEQ ID NO: 852152 - DNA, 25 bp, Homo sapien
ggcaacaagtcctcactgtccggtt

SEQ ID NO: 852153 - DNA, 25 bp, Homo sapien
tcctgctgaggcattagctgagcct

SEQ ID NO: 852154 - DNA, 25 bp, Homo sapien
agtggccttcaggactggctttggc

SEQ ID NO: 852155 - DNA, 25 bp, Homo sapien
tggccttcaggactggctttggcaa

SEQ ID NO: 852156 - DNA, 25 bp, Homo sapien
ctgagcctgcctgtagctggcactg

SEQ ID NO: 852157 - DNA, 25 bp, Homo sapien
tgggagagacacaccaactgtgagc

SEQ ID NO: 852158 - DNA, 25 bp, Homo sapien
gggagagacacaccaactgtgagcc

SEQ ID NO: 852159 - DNA, 25 bp, Homo sapien
ctgggagagacacaccaactgtgag

SEQ ID NO: 852160 - DNA, 25 bp, Homo sapien
ggagagacacaccaactgtgagcct

SEQ ID NO: 852161 - DNA, 25 bp, Homo sapien
gcaggagggctggagaagaggcact

SEQ ID NO: 852162 - DNA, 25 bp, Homo sapien
tgcaggagggctggagaagaggcac

SEQ ID NO: 852163 - DNA, 25 bp, Homo sapien
gggctgcaggagggctggagaagag

SEQ ID NO: 852164 - DNA, 25 bp, Homo sapien
gctgcaggagggctggagaagaggc

SEQ ID NO: 852165 - DNA, 25 bp, Homo sapien
atcaaaggtgcggtagtggaagccc

SEQ ID NO: 852166 - DNA, 25 bp, Homo sapien
caggaagtgatagtggcggccatca

SEQ ID NO: 852167 - DNA, 25 bp, Homo sapien
cccgggtgttaggtggacagcccag

SEQ ID NO: 852168 - DNA, 25 bp, Homo sapien
gcagcacccgccagcaggtaggtgc

SEQ ID NO: 852169 - DNA, 25 bp, Homo sapien
cacctcctcgggtcccatagtcacc

SEQ ID NO: 852170 - DNA, 25 bp, Homo sapien
agcagccaagactgcccttcaggta

SEQ ID NO: 852171 - DNA, 25 bp, Homo sapien
tcctcgggtcccatagtcacctgga

SEQ ID NO: 852172 - DNA, 25 bp, Homo sapien
ctcctcgggtcccatagtcacctgg

SEQ ID NO: 852173 - DNA, 25 bp, Homo sapien
ggcacagaaagaggtcacttgcccc

SEQ ID NO: 852174 - DNA, 25 bp, Homo sapien
agaaagaggtcacttgccccctgca

SEQ ID NO: 852175 - DNA, 25 bp, Homo sapien
cctgcagccacaattctcacccttc

SEQ ID NO: 852176 - DNA, 25 bp, Homo sapien
ctgggcacagaaagaggtcacttgc

SEQ ID NO: 852177 - DNA, 25 bp, Homo sapien
agtcccccagccattgcaggctcag

SEQ ID NO: 852178 - DNA, 25 bp, Homo sapien
ctctggccagccattgtagagccca

SEQ ID NO: 852179 - DNA, 25 bp, Homo sapien
ggccagccattgtagagcccacaga

SEQ ID NO: 852180 - DNA, 25 bp, Homo sapien
tggccagccattgtagagcccacag

SEQ ID NO: 852181 - DNA, 25 bp, Homo sapien
cagccattgtagagcccacagaggc

SEQ ID NO: 852182 - DNA, 25 bp, Homo sapien
ccagggagcctccaggaatttccaa

SEQ ID NO: 852183 - DNA, 25 bp, Homo sapien
ccaaaggtggctgctaacatggcca

SEQ ID NO: 852184 - DNA, 25 bp, Homo sapien
agccctccgcctggctccatgaagt

SEQ ID NO: 852185 - DNA, 25 bp, Homo sapien
aacatggccagccctccgcctggct

SEQ ID NO: 852186 - DNA, 25 bp, Homo sapien
tcaggcccaccgcccacatcctggg

SEQ ID NO: 852187 - DNA, 25 bp, Homo sapien
caggcccaccgcccacatcctgggg

SEQ ID NO: 852188 - DNA, 25 bp, Homo sapien
ttcaggcccaccgcccacatcctgg

SEQ ID NO: 852189 - DNA, 25 bp, Homo sapien
cacctccactgcatccagacaccca

SEQ ID NO: 852190 - DNA, 25 bp, Homo sapien
gccacctccactgcatccagacacc

SEQ ID NO: 852191 - DNA, 25 bp, Homo sapien
ctatgagccccaggggctgtcacag

SEQ ID NO: 852192 - DNA, 25 bp, Homo sapien
cctccactgcatccagacacccaga

SEQ ID NO: 852193 - DNA, 25 bp, Homo sapien
ccgcaggtggccaggttctacatct

SEQ ID NO: 852194 - DNA, 25 bp, Homo sapien
gcccgcaggtggccaggttctacat

SEQ ID NO: 852195 - DNA, 25 bp, Homo sapien
cttcagcccgcaggtggccaggttc

SEQ ID NO: 852196 - DNA, 25 bp, Homo sapien
gcaggtggccaggttctacatctgc

SEQ ID NO: 852197 - DNA, 25 bp, Homo sapien
ggcactgcccgaatggaccttccag

SEQ ID NO: 852198 - DNA, 25 bp, Homo sapien
ctgggcatggcactgcccgaatgga

SEQ ID NO: 852199 - DNA, 25 bp, Homo sapien
tgcccgaatggaccttccagcagct

SEQ ID NO: 852200 - DNA, 25 bp, Homo sapien
atggcactgcccgaatggaccttcc

SEQ ID NO: 852201 - DNA, 25 bp, Homo sapien
gagacaggcctcgtggtactcagca

SEQ ID NO: 852202 - DNA, 25 bp, Homo sapien
cctggacatagctggcaaaggtggc

SEQ ID NO: 852203 - DNA, 25 bp, Homo sapien
cgaatgtggatgtgccgcctggcac

SEQ ID NO: 852204 - DNA, 25 bp, Homo sapien
tggcccctgcgcagtaggcaaagag

SEQ ID NO: 852205 - DNA, 25 bp, Homo sapien
ccaccgcctcgcagctgggtgggca

SEQ ID NO: 852206 - DNA, 25 bp, Homo sapien
ggttacacagctggcgcacggtgtc

SEQ ID NO: 852207 - DNA, 25 bp, Homo sapien
gtacatagcgctggcggcagtagta

SEQ ID NO: 852208 - DNA, 25 bp, Homo sapien
ctggcgcacggtgtcaccgggtaca

SEQ ID NO: 852209 - DNA, 25 bp, Homo sapien
gctccgcccatcgaaggtgaggtag

SEQ ID NO: 852210 - DNA, 25 bp, Homo sapien
ccagaaggagtagctccgcccatcg

SEQ ID NO: 852211 - DNA, 25 bp, Homo sapien
aggctgtagcggcaaccttgaccac

SEQ ID NO: 852212 - DNA, 25 bp, Homo sapien
gcaaccttgaccaccccagaaggag

SEQ ID NO: 852213 - DNA, 25 bp, Homo sapien
aggcagactctctgccaggtaaggg

SEQ ID NO: 852214 - DNA, 25 bp, Homo sapien
ggcttcgtcctcaccatgggccgca

SEQ ID NO: 852215 - DNA, 25 bp, Homo sapien
caggcagactctctgccaggtaagg

SEQ ID NO: 852216 - DNA, 25 bp, Homo sapien
caccatgggccgcatgcgtggatgt

SEQ ID NO: 852217 - DNA, 25 bp, Homo sapien
gggagacggagatggcgtgcaggca

SEQ ID NO: 852218 - DNA, 25 bp, Homo sapien
tccagtaggatcagtagctgtccct

SEQ ID NO: 852219 - DNA, 25 bp, Homo sapien
ggccccatgctccagtaggatcagt

SEQ ID NO: 852220 - DNA, 25 bp, Homo sapien
acggagatggcgtgcaggcagctcc

SEQ ID NO: 852221 - DNA, 25 bp, Homo sapien
ctggaacagggggtctgatggtggg

SEQ ID NO: 852222 - DNA, 25 bp, Homo sapien
tgggggtggggcacgtggaaggata

SEQ ID NO: 852223 - DNA, 25 bp, Homo sapien
tctgatggtgggggtggggcacgtg

SEQ ID NO: 852224 - DNA, 25 bp, Homo sapien
gatggtgggggtggggcacgtggaa

SEQ ID NO: 852225 - DNA, 25 bp, Homo sapien
atgtaggctacagggtcagacagtc

SEQ ID NO: 852226 - DNA, 25 bp, Homo sapien
ggcaagcccacatcctgcccattga

SEQ ID NO: 852227 - DNA, 25 bp, Homo sapien
aggaagctcggcgcacactgaggcc

SEQ ID NO: 852228 - DNA, 25 bp, Homo sapien
gccctcagcgccaatccagggcaag

SEQ ID NO: 852229 - DNA, 25 bp, Homo sapien
aatgctagtttccacatctccggct

SEQ ID NO: 852230 - DNA, 25 bp, Homo sapien
tcaggaagtcgtcctgctggttctg

SEQ ID NO: 852231 - DNA, 25 bp, Homo sapien
tctgcgaaggcgtggcgctgggagt

SEQ ID NO: 852232 - DNA, 25 bp, Homo sapien
tgcaggatggcacaggccgcctctg

SEQ ID NO: 852233 - DNA, 25 bp, Homo sapien
caggcagtcactgccgggatcacag

SEQ ID NO: 852234 - DNA, 25 bp, Homo sapien
ttcctgggcacagcgacgcgcatag

SEQ ID NO: 852235 - DNA, 25 bp, Homo sapien
gcgcataggcagacagcaccgggca

SEQ ID NO: 852236 - DNA, 25 bp, Homo sapien
caggcagcgcagatagaatggctct

SEQ ID NO: 852237 - DNA, 25 bp, Homo sapien
cagaggacagttacaaccagccaca

SEQ ID NO: 852238 - DNA, 25 bp, Homo sapien
agtcctctggtttcccgcagtgttg

SEQ ID NO: 852239 - DNA, 25 bp, Homo sapien
gcggttgcactccttcatggtggca

SEQ ID NO: 852240 - DNA, 25 bp, Homo sapien
tggtttcccgcagtgttgaccgcat

SEQ ID NO: 852241 - DNA, 25 bp, Homo sapien
cgttatctcccaagctacctcttca

SEQ ID NO: 852242 - DNA, 25 bp, Homo sapien
tatggaccctaaagtgccccacgac

SEQ ID NO: 852243 - DNA, 25 bp, Homo sapien
agcatgcacgctgcaaccaacaagg

SEQ ID NO: 852244 - DNA, 25 bp, Homo sapien
gggaagtgatcagcactctgtcacc

SEQ ID NO: 852245 - DNA, 25 bp, Homo sapien
tgcaattccagaggcccctttcctg

SEQ ID NO: 852246 - DNA, 25 bp, Homo sapien
cagtggcgagccgtgcaattccaga

SEQ ID NO: 852247 - DNA, 25 bp, Homo sapien
tgtgaagggcagtggcgagccgtgc

SEQ ID NO: 852248 - DNA, 25 bp, Homo sapien
gccgtgcaattccagaggccccttt

SEQ ID NO: 852249 - DNA, 25 bp, Homo sapien
gagacaggcaccaggggcatagaca

SEQ ID NO: 852250 - DNA, 25 bp, Homo sapien
ggcaccaggggcatagacaagctcc

SEQ ID NO: 852251 - DNA, 25 bp, Homo sapien
aggcaccaggggcatagacaagctc

SEQ ID NO: 852252 - DNA, 25 bp, Homo sapien
tgaggagacaggcaccaggggcata

SEQ ID NO: 852253 - DNA, 25 bp, Homo sapien
cagacacagccatcagtactgcctg

SEQ ID NO: 852254 - DNA, 25 bp, Homo sapien
ggtggacagacacagccatcagtac

SEQ ID NO: 852255 - DNA, 25 bp, Homo sapien
acagccatcagtactgcctgcaggg

SEQ ID NO: 852256 - DNA, 25 bp, Homo sapien
agccatcagtactgcctgcagggca

SEQ ID NO: 852257 - DNA, 25 bp, Homo sapien
cagggacagaggtcaggaggcacac

SEQ ID NO: 852258 - DNA, 25 bp, Homo sapien
ggtcaggaggcacacagcgctcgtc

SEQ ID NO: 852259 - DNA, 25 bp, Homo sapien
cagaggtcaggaggcacacagcgct

SEQ ID NO: 852260 - DNA, 25 bp, Homo sapien
tgtgacggcagggacagaggtcagg

SEQ ID NO: 852261 - DNA, 25 bp, Homo sapien
ggtggcgttgggcaggtaccactgc

SEQ ID NO: 852262 - DNA, 25 bp, Homo sapien
gtggcgttgggcaggtaccactgcc

SEQ ID NO: 852263 - DNA, 25 bp, Homo sapien
ggcgttgggcaggtaccactgccca

SEQ ID NO: 852264 - DNA, 25 bp, Homo sapien
tggcgttgggcaggtaccactgccc

SEQ ID NO: 852265 - DNA, 25 bp, Homo sapien
gaaggccagtccgtcaaatgtcaca

SEQ ID NO: 852266 - DNA, 25 bp, Homo sapien
tctcgcaccagcagatactcgcagg

SEQ ID NO: 852267 - DNA, 25 bp, Homo sapien
gagactgtgaataggccactggcct

SEQ ID NO: 852268 - DNA, 25 bp, Homo sapien
gacgcacggccagcgctttggtgca

SEQ ID NO: 852269 - DNA, 25 bp, Homo sapien
ccaggtgggtcgagagcagcaggaa

SEQ ID NO: 852270 - DNA, 25 bp, Homo sapien
ccagggcctgtgtagaccttggggg

SEQ ID NO: 852271 - DNA, 25 bp, Homo sapien
cctgtgtagaccttggggggcgtca

SEQ ID NO: 852272 - DNA, 25 bp, Homo sapien
tgaggcccaggtgggtcgagagcag

SEQ ID NO: 852273 - DNA, 25 bp, Homo sapien
taaggcggggcacaggtccaatggt

SEQ ID NO: 852274 - DNA, 25 bp, Homo sapien
gggcacaggtccaatggttgaggga

SEQ ID NO: 852275 - DNA, 25 bp, Homo sapien
ctatggtgctaaggcggggcacagg

SEQ ID NO: 852276 - DNA, 25 bp, Homo sapien
caggtccaatggttgagggagggca

SEQ ID NO: 852277 - DNA, 25 bp, Homo sapien
agcctggaaatctgccctgtggagg

SEQ ID NO: 852278 - DNA, 25 bp, Homo sapien
aaggtgagagctcagggtcctagcc

SEQ ID NO: 852279 - DNA, 25 bp, Homo sapien
gagatttcagatgcgcaccaccgtg

SEQ ID NO: 852280 - DNA, 25 bp, Homo sapien
caatgtttcccttggtgtggaagga

SEQ ID NO: 852281 - DNA, 25 bp, Homo sapien
ccagggtctgttttaccaccaccag

SEQ ID NO: 852282 - DNA, 25 bp, Homo sapien
aattctccatcaggtcagattctgg

SEQ ID NO: 852283 - DNA, 25 bp, Homo sapien
cggctcagagccaagtccatatggg

SEQ ID NO: 852284 - DNA, 25 bp, Homo sapien
tccacagaagcagttagatataaca

SEQ ID NO: 852285 - DNA, 25 bp, Homo sapien
ctgaggggacagttgcaccaggacc

SEQ ID NO: 852286 - DNA, 25 bp, Homo sapien
gacagttgcaccaggacccgagtcc

SEQ ID NO: 852287 - DNA, 25 bp, Homo sapien
aggggacagttgcaccaggacccga

SEQ ID NO: 852288 - DNA, 25 bp, Homo sapien
gggacagttgcaccaggacccgagt

SEQ ID NO: 852289 - DNA, 25 bp, Homo sapien
acacagcccagccacgcgaccacgg

SEQ ID NO: 852290 - DNA, 25 bp, Homo sapien
acagcccagccacgcgaccacggaa

SEQ ID NO: 852291 - DNA, 25 bp, Homo sapien
cacagcccagccacgcgaccacgga

SEQ ID NO: 852292 - DNA, 25 bp, Homo sapien
ccctggcggctccgcagatcattac

SEQ ID NO: 852293 - DNA, 25 bp, Homo sapien
cccgagcccaaccagcccggtgtgt

SEQ ID NO: 852294 - DNA, 25 bp, Homo sapien
acagcgggcccgagcccaaccagcc

SEQ ID NO: 852295 - DNA, 25 bp, Homo sapien
gcccgagcccaaccagcccggtgtg

SEQ ID NO: 852296 - DNA, 25 bp, Homo sapien
gccccacagcgggcccgagcccaac

SEQ ID NO: 852297 - DNA, 25 bp, Homo sapien
tccgcgtggcataatgtgaagagcg

SEQ ID NO: 852298 - DNA, 25 bp, Homo sapien
gcaggcgtcatacaggcaccactca

SEQ ID NO: 852299 - DNA, 25 bp, Homo sapien
gggacctccgcgtggcataatgtga

SEQ ID NO: 852300 - DNA, 25 bp, Homo sapien
catacaggcaccactcatagtgctg

SEQ ID NO: 852301 - DNA, 25 bp, Homo sapien
gcacgtggtgcccatgccgggcaca

SEQ ID NO: 852302 - DNA, 25 bp, Homo sapien
ctgcataggtggcaatggccgagca

SEQ ID NO: 852303 - DNA, 25 bp, Homo sapien
cagagctcctggctacgccagcgca

SEQ ID NO: 852304 - DNA, 25 bp, Homo sapien
tcatctgcataggtggcaatggccg

SEQ ID NO: 852305 - DNA, 25 bp, Homo sapien
gctggctggccaaggtgaccaccat

SEQ ID NO: 852306 - DNA, 25 bp, Homo sapien
ggcacaagggcaaaaggatgcaacc

SEQ ID NO: 852307 - DNA, 25 bp, Homo sapien
gggcaaaaggatgcaaccacaccag

SEQ ID NO: 852308 - DNA, 25 bp, Homo sapien
ctggctggccaaggtgaccaccatg

SEQ ID NO: 852309 - DNA, 25 bp, Homo sapien
caggcctcatatacctgtccccctt

SEQ ID NO: 852310 - DNA, 25 bp, Homo sapien
acaggcctcatatacctgtccccct

SEQ ID NO: 852311 - DNA, 25 bp, Homo sapien
cctcatatacctgtcccccttcaca

SEQ ID NO: 852312 - DNA, 25 bp, Homo sapien
ggcctcatatacctgtcccccttca

SEQ ID NO: 852313 - DNA, 25 bp, Homo sapien
tttgcagcacagaccccggcgggaa

SEQ ID NO: 852314 - DNA, 25 bp, Homo sapien
gggaaggagttgcggccccactcac

SEQ ID NO: 852315 - DNA, 25 bp, Homo sapien
gttcccgcagtccttttgcagcaca

SEQ ID NO: 852316 - DNA, 25 bp, Homo sapien
cttttgcagcacagaccccggcggg

SEQ ID NO: 852317 - DNA, 25 bp, Homo sapien
cacaatgccattgaccttcctggca

SEQ ID NO: 852318 - DNA, 25 bp, Homo sapien
ggcaggcacaagctcctcacagtgg

SEQ ID NO: 852319 - DNA, 25 bp, Homo sapien
atgccattgaccttcctggcacgtg

SEQ ID NO: 852320 - DNA, 25 bp, Homo sapien
tggccaccgtcacccccacaatgcc

SEQ ID NO: 852321 - DNA, 25 bp, Homo sapien
cagtcgtcctggttgtcacaaagcc

SEQ ID NO: 852322 - DNA, 25 bp, Homo sapien
gagccatcgccacagtcgtcctggt

SEQ ID NO: 852323 - DNA, 25 bp, Homo sapien
catcgccacagtcgtcctggttgtc

SEQ ID NO: 852324 - DNA, 25 bp, Homo sapien
gccacagtcgtcctggttgtcacaa

SEQ ID NO: 852325 - DNA, 25 bp, Homo sapien
aaggactgaccaaccctgtcgcttc

SEQ ID NO: 852326 - DNA, 25 bp, Homo sapien
atgtgcaaggactgaccaaccctgt

SEQ ID NO: 852327 - DNA, 25 bp, Homo sapien
ctgtcgcttccacgcatgggcaaag

SEQ ID NO: 852328 - DNA, 25 bp, Homo sapien
tccacgcatgggcaaagacactcac

SEQ ID NO: 852329 - DNA, 25 bp, Homo sapien
ggggcaaacaggcaggctcaggacg

SEQ ID NO: 852330 - DNA, 25 bp, Homo sapien
agcatggggcaaacaggcaggctca

SEQ ID NO: 852331 - DNA, 25 bp, Homo sapien
ctagcatggggcaaacaggcaggct

SEQ ID NO: 852332 - DNA, 25 bp, Homo sapien
ggcaaacaggcaggctcaggacgct

SEQ ID NO: 852333 - DNA, 25 bp, Homo sapien
cagtggccggagctgcaagtcatct

SEQ ID NO: 852334 - DNA, 25 bp, Homo sapien
cacagtcatcctggcggtcacagag

SEQ ID NO: 852335 - DNA, 25 bp, Homo sapien
ggatagctcggctcatccgtgccat

SEQ ID NO: 852336 - DNA, 25 bp, Homo sapien
caggatgcccatcgcagagcagggc

SEQ ID NO: 852337 - DNA, 25 bp, Homo sapien
cctcaggaccaacttcatagcagga

SEQ ID NO: 852338 - DNA, 25 bp, Homo sapien
ggcactgccctgtactcttactgtt

SEQ ID NO: 852339 - DNA, 25 bp, Homo sapien
tgtactcttactgtttggggtgccc

SEQ ID NO: 852340 - DNA, 25 bp, Homo sapien
ctgccctgtactcttactgtttggg

SEQ ID NO: 852341 - DNA, 25 bp, Homo sapien
ctctggggcactgccctgtactctt

SEQ ID NO: 852342 - DNA, 25 bp, Homo sapien
gcaggtgccatcaacacaggacacc

SEQ ID NO: 852343 - DNA, 25 bp, Homo sapien
tccccggggacgcaggtcacctgcc

SEQ ID NO: 852344 - DNA, 25 bp, Homo sapien
aggtgccatcaacacaggacacctc

SEQ ID NO: 852345 - DNA, 25 bp, Homo sapien
aggcaggtgccatcaacacaggaca

SEQ ID NO: 852346 - DNA, 25 bp, Homo sapien
ggcccctcatcggctccatctgggc

SEQ ID NO: 852347 - DNA, 25 bp, Homo sapien
ggcagtcccagactccgtcacacag

SEQ ID NO: 852348 - DNA, 25 bp, Homo sapien
gccaggggacttgacgcagtgtcca

SEQ ID NO: 852349 - DNA, 25 bp, Homo sapien
tagggggcagtgtcccggcccctca

SEQ ID NO: 852350 - DNA, 25 bp, Homo sapien
tgcagggagcgtccgcgctggatcc

SEQ ID NO: 852351 - DNA, 25 bp, Homo sapien
gcagggagcgtccgcgctggatcct

SEQ ID NO: 852352 - DNA, 25 bp, Homo sapien
ctgcagggagcgtccgcgctggatc

SEQ ID NO: 852353 - DNA, 25 bp, Homo sapien
tcttcctcctggtcgcagcgccagc

SEQ ID NO: 852354 - DNA, 25 bp, Homo sapien
cgcacagctgctcgggggacacgca

SEQ ID NO: 852355 - DNA, 25 bp, Homo sapien
tcgtcgctgccgtcggcgcagtctt

SEQ ID NO: 852356 - DNA, 25 bp, Homo sapien
cgcagggcgcgtggtgcggcgcgca

SEQ ID NO: 852357 - DNA, 25 bp, Homo sapien
ggccctcgtccgagccgtcgggaca

SEQ ID NO: 852358 - DNA, 25 bp, Homo sapien
cgggagcctcaacgcaggcgtcggg

SEQ ID NO: 852359 - DNA, 25 bp, Homo sapien
ggcttggccaggggggccgcgcatg

SEQ ID NO: 852360 - DNA, 25 bp, Homo sapien
agaggtgggcccgccggcttggcca

SEQ ID NO: 852361 - DNA, 25 bp, Homo sapien
gtcctgctccgctcctgtcccttcc

SEQ ID NO: 852362 - DNA, 25 bp, Homo sapien
gcactgtgagatgtgtcctgctccg

SEQ ID NO: 852363 - DNA, 25 bp, Homo sapien
ccacaccacagggaaagaggccagg

SEQ ID NO: 852364 - DNA, 25 bp, Homo sapien
gggacagtctgggatcccatcacag

SEQ ID NO: 852365 - DNA, 25 bp, Homo sapien
ctggaagcctatgcaggtgccattg

SEQ ID NO: 852366 - DNA, 25 bp, Homo sapien
gggcaggtgtattctgggcagggaa

SEQ ID NO: 852367 - DNA, 25 bp, Homo sapien
cagctggaagcctatgcaggtgcca

SEQ ID NO: 852368 - DNA, 25 bp, Homo sapien
ggcagggaagccctgtcctgttggg

SEQ ID NO: 852369 - DNA, 25 bp, Homo sapien
gggtcagggctcttgtgctgggagg

SEQ ID NO: 852370 - DNA, 25 bp, Homo sapien
tggggtcagggctcttgtgctggga

SEQ ID NO: 852371 - DNA, 25 bp, Homo sapien
ggggtcagggctcttgtgctgggag

SEQ ID NO: 852372 - DNA, 25 bp, Homo sapien
caccaggaggccgagtggggagcag

SEQ ID NO: 852373 - DNA, 25 bp, Homo sapien
ggccttccacagtcaggctgcccat

SEQ ID NO: 852374 - DNA, 25 bp, Homo sapien
agggcccacacgtccggctgcaggg

SEQ ID NO: 852375 - DNA, 25 bp, Homo sapien
tgccctggccttccacagtcaggct

SEQ ID NO: 852376 - DNA, 25 bp, Homo sapien
tgggcaggctgccgtgaagcaggcc

SEQ ID NO: 852377 - DNA, 25 bp, Homo sapien
caggcctccgggcagtgcagcacag

SEQ ID NO: 852378 - DNA, 25 bp, Homo sapien
agtgcagcacaggtgcggcccccat

SEQ ID NO: 852379 - DNA, 25 bp, Homo sapien
gttgccgcgtcatggtgcccctgca

SEQ ID NO: 852380 - DNA, 25 bp, Homo sapien
agtggcactgccgttgccgcgtcat

SEQ ID NO: 852381 - DNA, 25 bp, Homo sapien
ctgcagagaggatggcctcccacca

SEQ ID NO: 852382 - DNA, 25 bp, Homo sapien
tgagagaagccggaagcagaggtca

SEQ ID NO: 852383 - DNA, 25 bp, Homo sapien
ggtcagggaagggagctctgcagag

SEQ ID NO: 852384 - DNA, 25 bp, Homo sapien
gcagcaccatcctctcttcaactca

SEQ ID NO: 852385 - DNA, 25 bp, Homo sapien
ctgccgcagggccaatcaggtgggc

SEQ ID NO: 852386 - DNA, 25 bp, Homo sapien
gggcacagggctggaacatcagctc

SEQ ID NO: 852387 - DNA, 25 bp, Homo sapien
tggggcagccgtcctgagggcaagg

SEQ ID NO: 852388 - DNA, 25 bp, Homo sapien
acctggccagagatgtcatcacagg

SEQ ID NO: 852389 - DNA, 25 bp, Homo sapien
cacaccacccctcgctgcccagcac

SEQ ID NO: 852390 - DNA, 25 bp, Homo sapien
acaccacccctcgctgcccagcacc

SEQ ID NO: 852391 - DNA, 25 bp, Homo sapien
gtagcgggcaccgtccaccaggcag

SEQ ID NO: 852392 - DNA, 25 bp, Homo sapien
agcgcagtccgggttgagtcggcag

SEQ ID NO: 852393 - DNA, 25 bp, Homo sapien
ggccgtccgtcttggcagatgcaga

SEQ ID NO: 852394 - DNA, 25 bp, Homo sapien
agtcggccttgatgcgttgcccagg

SEQ ID NO: 852395 - DNA, 25 bp, Homo sapien
gaggtggtggatgtgcagctgggcg

SEQ ID NO: 852396 - DNA, 25 bp, Homo sapien
gatgccacggcactggcgacctcgg

SEQ ID NO: 852397 - DNA, 25 bp, Homo sapien
tgccttgcggtggatgccacggcac

SEQ ID NO: 852398 - DNA, 25 bp, Homo sapien
ggttgttggagctccggaaggacca

SEQ ID NO: 852399 - DNA, 25 bp, Homo sapien
ccggaaggaccactggatgctctgg

SEQ ID NO: 852400 - DNA, 25 bp, Homo sapien
cagtagggtgagcagtgtgcggtga

SEQ ID NO: 852401 - DNA, 25 bp, Homo sapien
agcgttccccgacacggtggacctg

SEQ ID NO: 852402 - DNA, 25 bp, Homo sapien
tgccgagcgggcagtagggtgagca

SEQ ID NO: 852403 - DNA, 25 bp, Homo sapien
gcggtgaggttgtgcagacactggc

SEQ ID NO: 852404 - DNA, 25 bp, Homo sapien
ggcacagtggcagcatgattctccc

SEQ ID NO: 852405 - DNA, 25 bp, Homo sapien
cagcatgattctcccgtcccctcca

SEQ ID NO: 852406 - DNA, 25 bp, Homo sapien
gtagggcacagtggcagcatgattc

SEQ ID NO: 852407 - DNA, 25 bp, Homo sapien
agtggcagcatgattctcccgtccc

SEQ ID NO: 852408 - DNA, 25 bp, Homo sapien
gagctgcggcaggagtggccatggg

SEQ ID NO: 852409 - DNA, 25 bp, Homo sapien
aatgtaagtggccaaagggaatctg

SEQ ID NO: 852410 - DNA, 25 bp, Homo sapien
actgggagccggagctgcggcagga

SEQ ID NO: 852411 - DNA, 25 bp, Homo sapien
agtggccaaagggaatctgatctgg

SEQ ID NO: 852412 - DNA, 25 bp, Homo sapien
gaagagagagacaggctggagtagg

SEQ ID NO: 852413 - DNA, 25 bp, Homo sapien
agagagacaggctggagtaggggag

SEQ ID NO: 852414 - DNA, 25 bp, Homo sapien
gtaggggaggacagagggcggcagg

SEQ ID NO: 852415 - DNA, 25 bp, Homo sapien
agtaggggaggacagagggcggcag

SEQ ID NO: 852416 - DNA, 25 bp, Homo sapien
gacgatgcatgcagactcccctcag

SEQ ID NO: 852417 - DNA, 25 bp, Homo sapien
ttggcataagcatcccctccagcgt

SEQ ID NO: 852418 - DNA, 25 bp, Homo sapien
agctgctgggacgatgcatgcagac

SEQ ID NO: 852419 - DNA, 25 bp, Homo sapien
taatggggccgagtgtgccacttgg

SEQ ID NO: 852420 - DNA, 25 bp, Homo sapien
agtgaggttccgaggctgaagcagg

SEQ ID NO: 852421 - DNA, 25 bp, Homo sapien
gaggttccgaggctgaagcaggtcc

SEQ ID NO: 852422 - DNA, 25 bp, Homo sapien
ggttccgaggctgaagcaggtccag

SEQ ID NO: 852423 - DNA, 25 bp, Homo sapien
gtgaggttccgaggctgaagcaggt

SEQ ID NO: 852424 - DNA, 25 bp, Homo sapien
ccagtgtagaccattgctgctgaac

SEQ ID NO: 852425 - DNA, 25 bp, Homo sapien
caagatgccaggcaggaggtcacga

SEQ ID NO: 852426 - DNA, 25 bp, Homo sapien
agaagctgctggcatatgcgttgga

SEQ ID NO: 852427 - DNA, 25 bp, Homo sapien
gaggagccagtctccggcactagga

SEQ ID NO: 852428 - DNA, 25 bp, Homo sapien
caagcatcgaatgcaggccatgccc

SEQ ID NO: 852429 - DNA, 25 bp, Homo sapien
cctcggggacactggaaggcccttg

SEQ ID NO: 852430 - DNA, 25 bp, Homo sapien
ccccatcggccttgggcgggtgata

SEQ ID NO: 852431 - DNA, 25 bp, Homo sapien
tggaacccacaaaagggcatggtgg

SEQ ID NO: 852432 - DNA, 25 bp, Homo sapien
ttaagacttaacacagcacggactg

SEQ ID NO: 852433 - DNA, 25 bp, Homo sapien
ctctcgctaagctggaggtgcccct

SEQ ID NO: 852434 - DNA, 25 bp, Homo sapien
ggactgattcctaccgcttcgtgcg

SEQ ID NO: 852435 - DNA, 25 bp, Homo sapien
catttgggcctctcaaggctggagg

SEQ ID NO: 852436 - DNA, 25 bp, Homo sapien
gtccatacggcagggtccaggtcat

SEQ ID NO: 852437 - DNA, 25 bp, Homo sapien
ggtggacatcgtggggccacaccct

SEQ ID NO: 852438 - DNA, 25 bp, Homo sapien
gggacatcgctgtggtggacatcgt

SEQ ID NO: 852439 - DNA, 25 bp, Homo sapien
caccatgcggccgaaagtccatacg

SEQ ID NO: 852440 - DNA, 25 bp, Homo sapien
ctgggcacagaggtgccggtgggga

SEQ ID NO: 852441 - DNA, 25 bp, Homo sapien
atcctcgcagtccagaacaccgtca

SEQ ID NO: 852442 - DNA, 25 bp, Homo sapien
tccgagccatcctcgcagtccagaa

SEQ ID NO: 852443 - DNA, 25 bp, Homo sapien
cagtccagaacaccgtcacaagggc

SEQ ID NO: 852444 - DNA, 25 bp, Homo sapien
tcgcagtccagaacaccgtcacaag

SEQ ID NO: 852445 - DNA, 25 bp, Homo sapien
tgccagtgccctcaggcagcaacac

SEQ ID NO: 852446 - DNA, 25 bp, Homo sapien
ccagtgccctcaggcagcaacacac

SEQ ID NO: 852447 - DNA, 25 bp, Homo sapien
gccagtgccctcaggcagcaacaca

SEQ ID NO: 852448 - DNA, 25 bp, Homo sapien
ctgccagtgccctcaggcagcaaca

SEQ ID NO: 852449 - DNA, 25 bp, Homo sapien
gccgggcccctcccacatggctgtc

SEQ ID NO: 852450 - DNA, 25 bp, Homo sapien
aggccaagggcgtgagctgcacggc

SEQ ID NO: 852451 - DNA, 25 bp, Homo sapien
ccaggccaagggcgtgagctgcacg

SEQ ID NO: 852452 - DNA, 25 bp, Homo sapien
caggccaagggcgtgagctgcacgg

SEQ ID NO: 852453 - DNA, 25 bp, Homo sapien
tcctcagcatgcagggtctgggcac

SEQ ID NO: 852454 - DNA, 25 bp, Homo sapien
gctcctcagcatgcagggtctgggc

SEQ ID NO: 852455 - DNA, 25 bp, Homo sapien
tgcagctcctcagcatgcagggtct

SEQ ID NO: 852456 - DNA, 25 bp, Homo sapien
ccggctgcagctcctcagcatgcag

SEQ ID NO: 852457 - DNA, 25 bp, Homo sapien
ggggcttgtaagacacacattgctg

SEQ ID NO: 852458 - DNA, 25 bp, Homo sapien
aggggcttgtaagacacacattgct

SEQ ID NO: 852459 - DNA, 25 bp, Homo sapien
gaggggcttgtaagacacacattgc

SEQ ID NO: 852460 - DNA, 25 bp, Homo sapien
gggcttgtaagacacacattgctgc

SEQ ID NO: 852461 - DNA, 25 bp, Homo sapien
ccagggtcttggctgtggaatggaa

SEQ ID NO: 852462 - DNA, 25 bp, Homo sapien
gaggagagggccagggtcttggctg

SEQ ID NO: 852463 - DNA, 25 bp, Homo sapien
agctgccccggctgggcagaggaga

SEQ ID NO: 852464 - DNA, 25 bp, Homo sapien
ctccctgggccagtgcagcagctgc

SEQ ID NO: 852465 - DNA, 25 bp, Homo sapien
gagctcagggaccttattctcagca

SEQ ID NO: 852466 - DNA, 25 bp, Homo sapien
cccaccagggtgatccatttcagct

SEQ ID NO: 852467 - DNA, 25 bp, Homo sapien
gcagagctgagcacgcaactgcgct

SEQ ID NO: 852468 - DNA, 25 bp, Homo sapien
gctgaccaggccattccaggtggga

SEQ ID NO: 852469 - DNA, 25 bp, Homo sapien
ggggccagtgctcagtctctgccag

SEQ ID NO: 852470 - DNA, 25 bp, Homo sapien
tgtcggggacgtgggggattcctgc

SEQ ID NO: 852471 - DNA, 25 bp, Homo sapien
cccagggggccagtgctcagtctct

SEQ ID NO: 852472 - DNA, 25 bp, Homo sapien
ggccagtgctcagtctctgccaggc

SEQ ID NO: 852473 - DNA, 25 bp, Homo sapien
agaacaggtgggacaagagtttggg

SEQ ID NO: 852474 - DNA, 25 bp, Homo sapien
aggaggcctggagtctgtgcacaca

SEQ ID NO: 852475 - DNA, 25 bp, Homo sapien
ctggaagaacaggtgggacaagagt

SEQ ID NO: 852476 - DNA, 25 bp, Homo sapien
ggaggaggcctggagtctgtgcaca

SEQ ID NO: 852477 - DNA, 25 bp, Homo sapien
gcaggacctggccatgtccaaagtg

SEQ ID NO: 852478 - DNA, 25 bp, Homo sapien
catgtccaaagtgaccagtgtctcc

SEQ ID NO: 852479 - DNA, 25 bp, Homo sapien
tgagccaaccccgtgactctcttgg

SEQ ID NO: 852480 - DNA, 25 bp, Homo sapien
tttgaacccctgagatgtaacggcc

SEQ ID NO: 852481 - DNA, 25 bp, Homo sapien
catttgatgccagcaaacgcttcag

SEQ ID NO: 852482 - DNA, 25 bp, Homo sapien
cacaggtgaataatcaggtagctcc

SEQ ID NO: 852483 - DNA, 25 bp, Homo sapien
gagaggcagccacattacagggcac

SEQ ID NO: 852484 - DNA, 25 bp, Homo sapien
ccgtgcccacttaagagacatttga

SEQ ID NO: 852485 - DNA, 25 bp, Homo sapien
cccctcatccccgcaggacagcagg

SEQ ID NO: 852486 - DNA, 25 bp, Homo sapien
ccctcatccccgcaggacagcaggc

SEQ ID NO: 852487 - DNA, 25 bp, Homo sapien
gccaggttctgaataacttccatca

SEQ ID NO: 852488 - DNA, 25 bp, Homo sapien
aattataatgtatcccatgggtctg

SEQ ID NO: 852489 - DNA, 25 bp, Homo sapien
gacacagaaacagtccggccaggtt

SEQ ID NO: 852490 - DNA, 25 bp, Homo sapien
taaggcctcctagtgtcacagatgg

SEQ ID NO: 852491 - DNA, 25 bp, Homo sapien
tgggggccctcgagagggtatccca

SEQ ID NO: 852492 - DNA, 25 bp, Homo sapien
gccctcgagagggtatcccaggctt

SEQ ID NO: 852493 - DNA, 25 bp, Homo sapien
gaggtgaggcttgcccagctcccct

SEQ ID NO: 852494 - DNA, 25 bp, Homo sapien
ctgtgggtgtaggtagagggaggtg

SEQ ID NO: 852495 - DNA, 25 bp, Homo sapien
tccccatggtgaggcaccccggagg

SEQ ID NO: 852496 - DNA, 25 bp, Homo sapien
agattccccatggtgaggcaccccg

SEQ ID NO: 852497 - DNA, 25 bp, Homo sapien
ctgcacagattccccatggtgaggc

SEQ ID NO: 852498 - DNA, 25 bp, Homo sapien
cacagattccccatggtgaggcacc

SEQ ID NO: 852499 - DNA, 25 bp, Homo sapien
accgtcacagctgccatacctggtg

SEQ ID NO: 852500 - DNA, 25 bp, Homo sapien
gggtcgctggagtcacagggtgtgg

SEQ ID NO: 852501 - DNA, 25 bp, Homo sapien
catacctggtggcagggtcctggcc

SEQ ID NO: 852502 - DNA, 25 bp, Homo sapien
gtgtgggggcaccaccgtcacagct

SEQ ID NO: 852503 - DNA, 25 bp, Homo sapien
cacaggtagaagggcttggcatctt

SEQ ID NO: 852504 - DNA, 25 bp, Homo sapien
acaggtagaagggcttggcatctta

SEQ ID NO: 852505 - DNA, 25 bp, Homo sapien
caggtagaagggcttggcatcttac

SEQ ID NO: 852506 - DNA, 25 bp, Homo sapien
ctgcacaggtgggaagggtcctggg

SEQ ID NO: 852507 - DNA, 25 bp, Homo sapien
cacaggtgggaagggtcctggggcg

SEQ ID NO: 852508 - DNA, 25 bp, Homo sapien
ggaagggtcctggggcgacgctctg

SEQ ID NO: 852509 - DNA, 25 bp, Homo sapien
tgggaagggtcctggggcgacgctc

SEQ ID NO: 852510 - DNA, 25 bp, Homo sapien
cgcagtgcctctcgtcggagccgtc

SEQ ID NO: 852511 - DNA, 25 bp, Homo sapien
acacctgcgcctgttccacgcagcc

SEQ ID NO: 852512 - DNA, 25 bp, Homo sapien
atcacacacctgcgcctgttccacg

SEQ ID NO: 852513 - DNA, 25 bp, Homo sapien
ggagccgtcgaggcaatcctccctg

SEQ ID NO: 852514 - DNA, 25 bp, Homo sapien
aggacagcaggccctccagcagctc

SEQ ID NO: 852515 - DNA, 25 bp, Homo sapien
ggacagcaggccctccagcagctca

SEQ ID NO: 852516 - DNA, 25 bp, Homo sapien
gacagcaggccctccagcagctcac

SEQ ID NO: 852517 - DNA, 25 bp, Homo sapien
ggtaggcatcatgaagggcacagtg

SEQ ID NO: 852518 - DNA, 25 bp, Homo sapien
taggcatcatgaagggcacagtgct

SEQ ID NO: 852519 - DNA, 25 bp, Homo sapien
gtaggcatcatgaagggcacagtgc

SEQ ID NO: 852520 - DNA, 25 bp, Homo sapien
ggcatcatgaagggcacagtgctcg

SEQ ID NO: 852521 - DNA, 25 bp, Homo sapien
ccatcctcgtccgagccatcctggc

SEQ ID NO: 852522 - DNA, 25 bp, Homo sapien
cagctcagctggctcggggaacaga

SEQ ID NO: 852523 - DNA, 25 bp, Homo sapien
agtcaggccgcaggtcacagcgccg

SEQ ID NO: 852524 - DNA, 25 bp, Homo sapien
gagccatcctggcagtcaggccgca

SEQ ID NO: 852525 - DNA, 25 bp, Homo sapien
actggcttcggaaccggtcacgcgg

SEQ ID NO: 852526 - DNA, 25 bp, Homo sapien
ggcctgcacaaagcaggactggctt

SEQ ID NO: 852527 - DNA, 25 bp, Homo sapien
caaagcaggactggcttcggaaccg

SEQ ID NO: 852528 - DNA, 25 bp, Homo sapien
ttcggaaccggtcacgcgggcagct

SEQ ID NO: 852529 - DNA, 25 bp, Homo sapien
cctctgggagcaggggctttcccga

SEQ ID NO: 852530 - DNA, 25 bp, Homo sapien
gctttcccgagggaaggctggagtg

SEQ ID NO: 852531 - DNA, 25 bp, Homo sapien
tccctctgggagcaggggctttccc

SEQ ID NO: 852532 - DNA, 25 bp, Homo sapien
tgggagcaggggctttcccgaggga

SEQ ID NO: 852533 - DNA, 25 bp, Homo sapien
ttctctggcgactctgatggccacc

SEQ ID NO: 852534 - DNA, 25 bp, Homo sapien
aagccgcagggtgccctctcttggg

SEQ ID NO: 852535 - DNA, 25 bp, Homo sapien
ggctgcaagccgcagggtgccctct

SEQ ID NO: 852536 - DNA, 25 bp, Homo sapien
acacagcttctctggcgactctgat

SEQ ID NO: 852537 - DNA, 25 bp, Homo sapien
gtgctgggaggcccaatcgccccgt

SEQ ID NO: 852538 - DNA, 25 bp, Homo sapien
ccaggtgagcctaggtgctgggagg

SEQ ID NO: 852539 - DNA, 25 bp, Homo sapien
caatcgccccgtgcccacagtgctc

SEQ ID NO: 852540 - DNA, 25 bp, Homo sapien
ccacagtgctccctccgtgtcccca

SEQ ID NO: 852541 - DNA, 25 bp, Homo sapien
tccacacaatgcccactgcagcttc

SEQ ID NO: 852542 - DNA, 25 bp, Homo sapien
agatcggcactcacatacacacggc

SEQ ID NO: 852543 - DNA, 25 bp, Homo sapien
ccccttctggcacagatcggcactc

SEQ ID NO: 852544 - DNA, 25 bp, Homo sapien
ttccacacaatgcccactgcagctt

SEQ ID NO: 852545 - DNA, 25 bp, Homo sapien
ccaaggggcacagcagggaggggag

SEQ ID NO: 852546 - DNA, 25 bp, Homo sapien
ctgggagtatgtggaagagggcact

SEQ ID NO: 852547 - DNA, 25 bp, Homo sapien
tggaagagggcactcagccccaagg

SEQ ID NO: 852548 - DNA, 25 bp, Homo sapien
agccccaaggggcacagcagggagg

SEQ ID NO: 852549 - DNA, 25 bp, Homo sapien
gccacttcagctcttcgcccaccag

SEQ ID NO: 852550 - DNA, 25 bp, Homo sapien
agcgagtgtcatgcagaaggagccc

SEQ ID NO: 852551 - DNA, 25 bp, Homo sapien
gggcaggcagcgagtgtcatgcaga

SEQ ID NO: 852552 - DNA, 25 bp, Homo sapien
ggaaggacacccctggccacttcag

SEQ ID NO: 852553 - DNA, 25 bp, Homo sapien
gggcagccccctggttggcacagca

SEQ ID NO: 852554 - DNA, 25 bp, Homo sapien
ccctggttggcacagcaactccccc

SEQ ID NO: 852555 - DNA, 25 bp, Homo sapien
agccccctggttggcacagcaactc

SEQ ID NO: 852556 - DNA, 25 bp, Homo sapien
ggcagccccctggttggcacagcaa

SEQ ID NO: 852557 - DNA, 25 bp, Homo sapien
agagccacaggagcggtcgcaggga

SEQ ID NO: 852558 - DNA, 25 bp, Homo sapien
tccagagccacaggagcggtcgcag

SEQ ID NO: 852559 - DNA, 25 bp, Homo sapien
ccacaggagcggtcgcagggagccc

SEQ ID NO: 852560 - DNA, 25 bp, Homo sapien
gccacaggagcggtcgcagggagcc

SEQ ID NO: 852561 - DNA, 25 bp, Homo sapien
tgcagttcctgccggtcaccttcac

SEQ ID NO: 852562 - DNA, 25 bp, Homo sapien
cctgcagttcctgccggtcaccttc

SEQ ID NO: 852563 - DNA, 25 bp, Homo sapien
ctgcagttcctgccggtcaccttca

SEQ ID NO: 852564 - DNA, 25 bp, Homo sapien
caatcccccacgtagagtggtcagt

SEQ ID NO: 852565 - DNA, 25 bp, Homo sapien
cacgtagagtggtcagtgggtccca

SEQ ID NO: 852566 - DNA, 25 bp, Homo sapien
ccccacgtagagtggtcagtgggtc

SEQ ID NO: 852567 - DNA, 25 bp, Homo sapien
ttctcagggtacagaattgggagga

SEQ ID NO: 852568 - DNA, 25 bp, Homo sapien
gggcagagtcgggaacgactgcgcc

SEQ ID NO: 852569 - DNA, 25 bp, Homo sapien
agtcgggaacgactgcgccagccag

SEQ ID NO: 852570 - DNA, 25 bp, Homo sapien
gaccaggaagtccagggcgtccagc

SEQ ID NO: 852571 - DNA, 25 bp, Homo sapien
aggaccaggaagtccagggcgtcca

SEQ ID NO: 852572 - DNA, 25 bp, Homo sapien
tggatgcctccatcacagggggctg

SEQ ID NO: 852573 - DNA, 25 bp, Homo sapien
ctgggcacgtggtgtcccctggagc

SEQ ID NO: 852574 - DNA, 25 bp, Homo sapien
cagggggctgagcaagtggaccagg

SEQ ID NO: 852575 - DNA, 25 bp, Homo sapien
gctgcgcccacgtgtctggatgcct

SEQ ID NO: 852576 - DNA, 25 bp, Homo sapien
cggaacaacatgttctctgggcact

SEQ ID NO: 852577 - DNA, 25 bp, Homo sapien
ccctgcgtcaggcatagccgagggc

SEQ ID NO: 852578 - DNA, 25 bp, Homo sapien
ctgcgtcaggcatagccgagggcaa

SEQ ID NO: 852579 - DNA, 25 bp, Homo sapien
ctgctctgctgagcggaacaacatg

SEQ ID NO: 852580 - DNA, 25 bp, Homo sapien
ggcaggtgcagccgggggcgcagaa

SEQ ID NO: 852581 - DNA, 25 bp, Homo sapien
agcattgtgcaggaaaagaccaggg

SEQ ID NO: 852582 - DNA, 25 bp, Homo sapien
agccgggggcgcagaagcccgtaca

SEQ ID NO: 852583 - DNA, 25 bp, Homo sapien
ctagcattgtgcaggaaaagaccag

SEQ ID NO: 852584 - DNA, 25 bp, Homo sapien
tcctgatgcatagagctgcccgtgc

SEQ ID NO: 852585 - DNA, 25 bp, Homo sapien
gctcctgatgcatagagctgcccgt

SEQ ID NO: 852586 - DNA, 25 bp, Homo sapien
ctcctgatgcatagagctgcccgtg

SEQ ID NO: 852587 - DNA, 25 bp, Homo sapien
cctgatgcatagagctgcccgtgca

SEQ ID NO: 852588 - DNA, 25 bp, Homo sapien
atgccatcttaccagagacacaggt

SEQ ID NO: 852589 - DNA, 25 bp, Homo sapien
ggcagcgctccgaggtgcatgccat

SEQ ID NO: 852590 - DNA, 25 bp, Homo sapien
gcatgccatcttaccagagacacag

SEQ ID NO: 852591 - DNA, 25 bp, Homo sapien
catgccatcttaccagagacacagg

SEQ ID NO: 852592 - DNA, 25 bp, Homo sapien
ctacagagactccacagggtccagg

SEQ ID NO: 852593 - DNA, 25 bp, Homo sapien
gactccacagggtccagggactcca

SEQ ID NO: 852594 - DNA, 25 bp, Homo sapien
agagactccacagggtccagggact

SEQ ID NO: 852595 - DNA, 25 bp, Homo sapien
cagagactccacagggtccagggac

SEQ ID NO: 852596 - DNA, 25 bp, Homo sapien
ggaagcggcgccgaatgcccacgtt

SEQ ID NO: 852597 - DNA, 25 bp, Homo sapien
gacatggccgcaggctgcagaattc

SEQ ID NO: 852598 - DNA, 25 bp, Homo sapien
gggtgcagtgcctgcccggaagcgg

SEQ ID NO: 852599 - DNA, 25 bp, Homo sapien
tgcagaattcagcctccatggtggg

SEQ ID NO: 852600 - DNA, 25 bp, Homo sapien
gaaaactccatgaggctgcgcagct

SEQ ID NO: 852601 - DNA, 25 bp, Homo sapien
accaccacagggcacggagcacgga

SEQ ID NO: 852602 - DNA, 25 bp, Homo sapien
cggagcacggagaccaagggcccca

SEQ ID NO: 852603 - DNA, 25 bp, Homo sapien
ggaaaactccatgaggctgcgcagc

SEQ ID NO: 852604 - DNA, 25 bp, Homo sapien
ggtggcaggtctggttagtccctct

SEQ ID NO: 852605 - DNA, 25 bp, Homo sapien
gagctctgcacaagaggcagggccc

SEQ ID NO: 852606 - DNA, 25 bp, Homo sapien
ttagtccctcttggggcgctgagct

SEQ ID NO: 852607 - DNA, 25 bp, Homo sapien
tgagctctgcacaagaggcagggcc

SEQ ID NO: 852608 - DNA, 25 bp, Homo sapien
cacagacatgcagctctcccctctg

SEQ ID NO: 852609 - DNA, 25 bp, Homo sapien
ctggaatcgaaaccctctatcatct

SEQ ID NO: 852610 - DNA, 25 bp, Homo sapien
ttcacatggacgaaccacagtgctg

SEQ ID NO: 852611 - DNA, 25 bp, Homo sapien
gttttcacatggacgaaccacagtg

SEQ ID NO: 852612 - DNA, 25 bp, Homo sapien
tgctgcccggggggtagaggtgccc

SEQ ID NO: 852613 - DNA, 25 bp, Homo sapien
gtagaggtgcccctcgtgggcacag

SEQ ID NO: 852614 - DNA, 25 bp, Homo sapien
tgcagttggcgatgagcccggagac

SEQ ID NO: 852615 - DNA, 25 bp, Homo sapien
gctgcagttggcgatgagcccggag

SEQ ID NO: 852616 - DNA, 25 bp, Homo sapien
agttggcgatgagcccggagacaca

SEQ ID NO: 852617 - DNA, 25 bp, Homo sapien
cagttggcgatgagcccggagacac

SEQ ID NO: 852618 - DNA, 25 bp, Homo sapien
agaaccggtgccgatggcaccgggc

SEQ ID NO: 852619 - DNA, 25 bp, Homo sapien
aaccggtgccgatggcaccgggcag

SEQ ID NO: 852620 - DNA, 25 bp, Homo sapien
ccggtgccgatggcaccgggcaggg

SEQ ID NO: 852621 - DNA, 25 bp, Homo sapien
gaaccggtgccgatggcaccgggca

SEQ ID NO: 852622 - DNA, 25 bp, Homo sapien
gcaggggcagcggagccacggtgga

SEQ ID NO: 852623 - DNA, 25 bp, Homo sapien
ggcagcggagccacggtggatggca

SEQ ID NO: 852624 - DNA, 25 bp, Homo sapien
gggcagcggagccacggtggatggc

SEQ ID NO: 852625 - DNA, 25 bp, Homo sapien
aggggcagcggagccacggtggatg

SEQ ID NO: 852626 - DNA, 25 bp, Homo sapien
gacatggctcctcttcagcctcggg

SEQ ID NO: 852627 - DNA, 25 bp, Homo sapien
catggctcctcttcagcctcggggc

SEQ ID NO: 852628 - DNA, 25 bp, Homo sapien
acccctgcaggagacatggctcctc

SEQ ID NO: 852629 - DNA, 25 bp, Homo sapien
ccctgcaggagacatggctcctctt

SEQ ID NO: 852630 - DNA, 25 bp, Homo sapien
gctggtcacaggcccgggtccggct

SEQ ID NO: 852631 - DNA, 25 bp, Homo sapien
ccacagctccggctacagtgggacc

SEQ ID NO: 852632 - DNA, 25 bp, Homo sapien
cagctccggctacagtgggaccagg

SEQ ID NO: 852633 - DNA, 25 bp, Homo sapien
tgtgcccgtggcccctcgcagtaat

SEQ ID NO: 852634 - DNA, 25 bp, Homo sapien
gggccacaggggctatactcggccc

SEQ ID NO: 852635 - DNA, 25 bp, Homo sapien
cactaggtcatcacaggagcgaggg

SEQ ID NO: 852636 - DNA, 25 bp, Homo sapien
caggggctatactcggccccttcaa

SEQ ID NO: 852637 - DNA, 25 bp, Homo sapien
tatactcggccccttcaatggcagt

SEQ ID NO: 852638 - DNA, 25 bp, Homo sapien
ttgccagccgagcacccggatggtg

SEQ ID NO: 852639 - DNA, 25 bp, Homo sapien
cagatggccccgttggaactcagta

SEQ ID NO: 852640 - DNA, 25 bp, Homo sapien
gcagctgcagtgacccggctgcacg

SEQ ID NO: 852641 - DNA, 25 bp, Homo sapien
ttggaactcagtacctggcctggtg

SEQ ID NO: 852642 - DNA, 25 bp, Homo sapien
gcaggtctgtgcagttcagcctccc

SEQ ID NO: 852643 - DNA, 25 bp, Homo sapien
cagggcaggtctgtgcagttcagcc

SEQ ID NO: 852644 - DNA, 25 bp, Homo sapien
ggcagggcaggtctgtgcagttcag

SEQ ID NO: 852645 - DNA, 25 bp, Homo sapien
gggcaggtctgtgcagttcagcctc

SEQ ID NO: 852646 - DNA, 25 bp, Homo sapien
tgggagcacattgtccactccgacc

SEQ ID NO: 852647 - DNA, 25 bp, Homo sapien
tggagcggctcctggtctggcccct

SEQ ID NO: 852648 - DNA, 25 bp, Homo sapien
ggcacgtggcgtagctggggcaggc

SEQ ID NO: 852649 - DNA, 25 bp, Homo sapien
ggcaggcctccctctgatgctgggc

SEQ ID NO: 852650 - DNA, 25 bp, Homo sapien
caagggcgactctgcgtgtggttcc

SEQ ID NO: 852651 - DNA, 25 bp, Homo sapien
gtgggactgccccaagcacatgtcg

SEQ ID NO: 852652 - DNA, 25 bp, Homo sapien
ggctccggtgggactgccccaagca

SEQ ID NO: 852653 - DNA, 25 bp, Homo sapien
acatgtcgcagggagaccatggccc

SEQ ID NO: 852654 - DNA, 25 bp, Homo sapien
tgaccaggtccatgactgatggcct

SEQ ID NO: 852655 - DNA, 25 bp, Homo sapien
gaccaggtccatgactgatggcctg

SEQ ID NO: 852656 - DNA, 25 bp, Homo sapien
agggctgcccacagggatgcagact

SEQ ID NO: 852657 - DNA, 25 bp, Homo sapien
tgcccacagggatgcagactctggc

SEQ ID NO: 852658 - DNA, 25 bp, Homo sapien
ccacagggatgcagactctggccac

SEQ ID NO: 852659 - DNA, 25 bp, Homo sapien
acagggatgcagactctggccaccc

SEQ ID NO: 852660 - DNA, 25 bp, Homo sapien
cgcacagcccgtcctgggagagctg

SEQ ID NO: 852661 - DNA, 25 bp, Homo sapien
cccagggggcacccacaagtgggct

SEQ ID NO: 852662 - DNA, 25 bp, Homo sapien
agggggcacccacaagtgggctggc

SEQ ID NO: 852663 - DNA, 25 bp, Homo sapien
gcacgcacagcccgtcctgggagag

SEQ ID NO: 852664 - DNA, 25 bp, Homo sapien
ccacctctccgggttccaggctctc

SEQ ID NO: 852665 - DNA, 25 bp, Homo sapien
ggagctaaacctagaccctgctgag

SEQ ID NO: 852666 - DNA, 25 bp, Homo sapien
gctaaacctagaccctgctgagcgg

SEQ ID NO: 852667 - DNA, 25 bp, Homo sapien
accacctctccgggttccaggctct

SEQ ID NO: 852668 - DNA, 25 bp, Homo sapien
tgtgctgcatgtgcggctctggcgg

SEQ ID NO: 852669 - DNA, 25 bp, Homo sapien
ctggcattgcagaatgcctgccaca

SEQ ID NO: 852670 - DNA, 25 bp, Homo sapien
agggaggacgagcacagcgccggga

SEQ ID NO: 852671 - DNA, 25 bp, Homo sapien
acaccccagggtccgggcagtcagg

SEQ ID NO: 852672 - DNA, 25 bp, Homo sapien
ctggcattcacggtacaggcggcca

SEQ ID NO: 852673 - DNA, 25 bp, Homo sapien
ggcattcacggtacaggcggccagc

SEQ ID NO: 852674 - DNA, 25 bp, Homo sapien
gagaaggggcatccctcgccgggct

SEQ ID NO: 852675 - DNA, 25 bp, Homo sapien
attcacggtacaggcggccagccgg

SEQ ID NO: 852676 - DNA, 25 bp, Homo sapien
tacgaagtgtctggcctgagtccag

SEQ ID NO: 852677 - DNA, 25 bp, Homo sapien
cagggtcacctatggtggctcccag

SEQ ID NO: 852678 - DNA, 25 bp, Homo sapien
gccacagcttgtacgaagtgtctgg

SEQ ID NO: 852679 - DNA, 25 bp, Homo sapien
gggctgaccagggtcacctatggtg

SEQ ID NO: 852680 - DNA, 25 bp, Homo sapien
gaagcagtcgtccagggagcaagac

SEQ ID NO: 852681 - DNA, 25 bp, Homo sapien
ctccagggaccgaaaccaccatcgg

SEQ ID NO: 852682 - DNA, 25 bp, Homo sapien
ctgcgggtacgggtgcccagccctc

SEQ ID NO: 852683 - DNA, 25 bp, Homo sapien
ccctccacaggagcgggagcacggg

SEQ ID NO: 852684 - DNA, 25 bp, Homo sapien
cactgagggtgggcatggtgagcac

SEQ ID NO: 852685 - DNA, 25 bp, Homo sapien
actgagggtgggcatggtgagcaca

SEQ ID NO: 852686 - DNA, 25 bp, Homo sapien
ctgagggtgggcatggtgagcacac

SEQ ID NO: 852687 - DNA, 25 bp, Homo sapien
cctggcggggcccacggcagccctg

SEQ ID NO: 852688 - DNA, 25 bp, Homo sapien
tcgaggtcctggcggggcccacggc

SEQ ID NO: 852689 - DNA, 25 bp, Homo sapien
aggtcctggcggggcccacggcagc

SEQ ID NO: 852690 - DNA, 25 bp, Homo sapien
tcctggcggggcccacggcagccct

SEQ ID NO: 852691 - DNA, 25 bp, Homo sapien
cagggcagtctgggctggggcagtt

SEQ ID NO: 852692 - DNA, 25 bp, Homo sapien
gggcagtctgggctggggcagttac

SEQ ID NO: 852693 - DNA, 25 bp, Homo sapien
agggcagtctgggctggggcagtta

SEQ ID NO: 852694 - DNA, 25 bp, Homo sapien
aaggcctgttactggctccaccgtg

SEQ ID NO: 852695 - DNA, 25 bp, Homo sapien
tggaaggcctgttactggctccacc

SEQ ID NO: 852696 - DNA, 25 bp, Homo sapien
tgttactggctccaccgtggaccct

SEQ ID NO: 852697 - DNA, 25 bp, Homo sapien
gcctgttactggctccaccgtggac

SEQ ID NO: 852698 - DNA, 25 bp, Homo sapien
tcctgtaatgggtcccccatggtgc

SEQ ID NO: 852699 - DNA, 25 bp, Homo sapien
gagcggggtccgtgcagcttctgga

SEQ ID NO: 852700 - DNA, 25 bp, Homo sapien
ccatggtgcagttagccaggcagag

SEQ ID NO: 852701 - DNA, 25 bp, Homo sapien
ggctgcgccatgcagggcgagcggg

SEQ ID NO: 852702 - DNA, 25 bp, Homo sapien
caggaggtccaggaacagttcccag

SEQ ID NO: 852703 - DNA, 25 bp, Homo sapien
tgcgggagcaaggttcccacggggc

SEQ ID NO: 852704 - DNA, 25 bp, Homo sapien
ggaggtccaggaacagttcccagcc

SEQ ID NO: 852705 - DNA, 25 bp, Homo sapien
gccagggccagggcacacgggcagc

SEQ ID NO: 852706 - DNA, 25 bp, Homo sapien
agggggacggtatgcccgcaggcgg

SEQ ID NO: 852707 - DNA, 25 bp, Homo sapien
aagcggcgctcttggtaggcagtaa

SEQ ID NO: 852708 - DNA, 25 bp, Homo sapien
ggcaggctcgcaggttgcagaagcg

SEQ ID NO: 852709 - DNA, 25 bp, Homo sapien
cgcaggttgcagaagcggcgctctt

SEQ ID NO: 852710 - DNA, 25 bp, Homo sapien
ggcctggtgccgctccccagcacag

SEQ ID NO: 852711 - DNA, 25 bp, Homo sapien
gcatgggattgcagaggcgggcctg

SEQ ID NO: 852712 - DNA, 25 bp, Homo sapien
tgcggcttctcagggattggcctcc

SEQ ID NO: 852713 - DNA, 25 bp, Homo sapien
ctgcggtcacaccaggaccagggac

SEQ ID NO: 852714 - DNA, 25 bp, Homo sapien
agcccttctggcagacctggtcgtc

SEQ ID NO: 852715 - DNA, 25 bp, Homo sapien
gacctggtcgtcctgacacacaatt

SEQ ID NO: 852716 - DNA, 25 bp, Homo sapien
tgacacacaattccctcctggaggt

SEQ ID NO: 852717 - DNA, 25 bp, Homo sapien
tggcagacctggtcgtcctgacaca

SEQ ID NO: 852718 - DNA, 25 bp, Homo sapien
gtcacagtgcccaattggcacgcag

SEQ ID NO: 852719 - DNA, 25 bp, Homo sapien
gagagctgcccagcttggcatgagc

SEQ ID NO: 852720 - DNA, 25 bp, Homo sapien
gcatgagcagttgttgcaggcatcc

SEQ ID NO: 852721 - DNA, 25 bp, Homo sapien
ctgggcatcggtgcagtcacagtgc

SEQ ID NO: 852722 - DNA, 25 bp, Homo sapien
gccctctgggcccgcatgagtggct

SEQ ID NO: 852723 - DNA, 25 bp, Homo sapien
ctctgggcccgcatgagtggctgca

SEQ ID NO: 852724 - DNA, 25 bp, Homo sapien
cctctgggcccgcatgagtggctgc

SEQ ID NO: 852725 - DNA, 25 bp, Homo sapien
gctgccctctgggcccgcatgagtg

SEQ ID NO: 852726 - DNA, 25 bp, Homo sapien
acaggggtgggcacgagggctgagg

SEQ ID NO: 852727 - DNA, 25 bp, Homo sapien
tgggactgctcctcccgacactctg

SEQ ID NO: 852728 - DNA, 25 bp, Homo sapien
gctcctcccgacactctggggccca

SEQ ID NO: 852729 - DNA, 25 bp, Homo sapien
gcacaggggtgggcacgagggctga

SEQ ID NO: 852730 - DNA, 25 bp, Homo sapien
gctgtcccccagggtgcgggagcga

SEQ ID NO: 852731 - DNA, 25 bp, Homo sapien
agctgtcccccagggtgcgggagcg

SEQ ID NO: 852732 - DNA, 25 bp, Homo sapien
ctgtcccccagggtgcgggagcgag

SEQ ID NO: 852733 - DNA, 25 bp, Homo sapien
tgcacactccgtatcttcgcagatc

SEQ ID NO: 852734 - DNA, 25 bp, Homo sapien
acactccgtatcttcgcagatcaca

SEQ ID NO: 852735 - DNA, 25 bp, Homo sapien
actccgtatcttcgcagatcacacc

SEQ ID NO: 852736 - DNA, 25 bp, Homo sapien
ccgtatcttcgcagatcacaccctc

SEQ ID NO: 852737 - DNA, 25 bp, Homo sapien
ggaggcggagggagcaaaggccaaa

SEQ ID NO: 852738 - DNA, 25 bp, Homo sapien
aggcggagggagcaaaggccaaagg

SEQ ID NO: 852739 - DNA, 25 bp, Homo sapien
acaggtgaggtcagaggaggcggag

SEQ ID NO: 852740 - DNA, 25 bp, Homo sapien
cggagggagcaaaggccaaaggact

SEQ ID NO: 852741 - DNA, 25 bp, Homo sapien
cagggcagtcggaccaggaggacca

SEQ ID NO: 852742 - DNA, 25 bp, Homo sapien
gaggaccacagcgtccaagcctcag

SEQ ID NO: 852743 - DNA, 25 bp, Homo sapien
ggagacagggcagtcggaccaggag

SEQ ID NO: 852744 - DNA, 25 bp, Homo sapien
caggaggaccacagcgtccaagcct

SEQ ID NO: 852745 - DNA, 25 bp, Homo sapien
gtggtgaggggctgcggccctgcag

SEQ ID NO: 852746 - DNA, 25 bp, Homo sapien
cccaggcagggtgggctcctgtggt

SEQ ID NO: 852747 - DNA, 25 bp, Homo sapien
ggccccaggagcaggcctccagcag

SEQ ID NO: 852748 - DNA, 25 bp, Homo sapien
ggcaaggctgctgcctggtctgggt

SEQ ID NO: 852749 - DNA, 25 bp, Homo sapien
gtgctgttgcaggtggggtcggcct

SEQ ID NO: 852750 - DNA, 25 bp, Homo sapien
tgcaggtggggtcggccttggccat

SEQ ID NO: 852751 - DNA, 25 bp, Homo sapien
gctgttgcaggtggggtcggccttg

SEQ ID NO: 852752 - DNA, 25 bp, Homo sapien
gttgcaggtggggtcggccttggcc

SEQ ID NO: 852753 - DNA, 25 bp, Homo sapien
gaagtggccatccagccgcgtgcag

SEQ ID NO: 852754 - DNA, 25 bp, Homo sapien
acgccgggccctggtgtcggtagcg

SEQ ID NO: 852755 - DNA, 25 bp, Homo sapien
agagcagttgctgataaggcaaggc

SEQ ID NO: 852756 - DNA, 25 bp, Homo sapien
cctggtgtcggtagcgctgctgcac

SEQ ID NO: 852757 - DNA, 25 bp, Homo sapien
aaggatcaggatgggttgggccttg

SEQ ID NO: 852758 - DNA, 25 bp, Homo sapien
ggaaggatcaggatgggttgggcct

SEQ ID NO: 852759 - DNA, 25 bp, Homo sapien
tcaggatgggttgggccttggagag

SEQ ID NO: 852760 - DNA, 25 bp, Homo sapien
gatcaggatgggttgggccttggag

SEQ ID NO: 852761 - DNA, 25 bp, Homo sapien
ccgcaggcatggaactcaaagggag

SEQ ID NO: 852762 - DNA, 25 bp, Homo sapien
ggcatggaactcaaagggaggcgtg

SEQ ID NO: 852763 - DNA, 25 bp, Homo sapien
caggcatggaactcaaagggaggcg

SEQ ID NO: 852764 - DNA, 25 bp, Homo sapien
catggaactcaaagggaggcgtgca

SEQ ID NO: 852765 - DNA, 25 bp, Homo sapien
ggccagggtcatcccggctcctgct

SEQ ID NO: 852766 - DNA, 25 bp, Homo sapien
cagggtcatcccggctcctgctgct

SEQ ID NO: 852767 - DNA, 25 bp, Homo sapien
gctgctgaggtatgccagcagttac

SEQ ID NO: 852768 - DNA, 25 bp, Homo sapien
caggggccagggtcatcccggctcc

SEQ ID NO: 852769 - DNA, 25 bp, Homo sapien
agtgcagctccccacgccggcattc

SEQ ID NO: 852770 - DNA, 25 bp, Homo sapien
atgaccaggaagtgctggaaacaga

SEQ ID NO: 852771 - DNA, 25 bp, Homo sapien
tcagggtcatgaccaggaagtgctg

SEQ ID NO: 852772 - DNA, 25 bp, Homo sapien
gtcatgaccaggaagtgctggaaac

SEQ ID NO: 852773 - DNA, 25 bp, Homo sapien
gctcagggtcatgaccaggaagtgc

SEQ ID NO: 852774 - DNA, 25 bp, Homo sapien
acagggtgtgggtgcccttcccagt

SEQ ID NO: 852775 - DNA, 25 bp, Homo sapien
tggaaggacagggtgtgggtgccct

SEQ ID NO: 852776 - DNA, 25 bp, Homo sapien
gaaggacagggtgtgggtgcccttc

SEQ ID NO: 852777 - DNA, 25 bp, Homo sapien
ttcccagtgaccacccctgggccca

SEQ ID NO: 852778 - DNA, 25 bp, Homo sapien
ggccagttgggtctcggagccagtg

SEQ ID NO: 852779 - DNA, 25 bp, Homo sapien
ttgggtctcggagccagtgctcctc

SEQ ID NO: 852780 - DNA, 25 bp, Homo sapien
acagggcgaccactcggaccactca

SEQ ID NO: 852781 - DNA, 25 bp, Homo sapien
accactcggaccactcactcagagg

SEQ ID NO: 852782 - DNA, 25 bp, Homo sapien
ctgaggggtgcggtgcagaggtgag

SEQ ID NO: 852783 - DNA, 25 bp, Homo sapien
ggatccagacagagccggtggcggt

SEQ ID NO: 852784 - DNA, 25 bp, Homo sapien
ctccctgtcgcaggatccagacaga

SEQ ID NO: 852785 - DNA, 25 bp, Homo sapien
atccagacagagccggtggcggtgc

SEQ ID NO: 852786 - DNA, 25 bp, Homo sapien
agggtcagggcagaggcgctgctgg

SEQ ID NO: 852787 - DNA, 25 bp, Homo sapien
ccagggtcagggcagaggcgctgct

SEQ ID NO: 852788 - DNA, 25 bp, Homo sapien
gggcaggctccagggtcagggcaga

SEQ ID NO: 852789 - DNA, 25 bp, Homo sapien
gctccagggtcagggcagaggcgct

SEQ ID NO: 852790 - DNA, 25 bp, Homo sapien
tcaatgtgctctatagcctagcccc

SEQ ID NO: 852791 - DNA, 25 bp, Homo sapien
ggcaggccttaaagccctctaggct

SEQ ID NO: 852792 - DNA, 25 bp, Homo sapien
gaaggtatgatggagtcagtaccca

SEQ ID NO: 852793 - DNA, 25 bp, Homo sapien
gccttgagctctgtcgtcgcaaacg

SEQ ID NO: 852794 - DNA, 25 bp, Homo sapien
tcttgagcccatggctcccggcagc

SEQ ID NO: 852795 - DNA, 25 bp, Homo sapien
tgggcagggccctccgttgcagctt

SEQ ID NO: 852796 - DNA, 25 bp, Homo sapien
ggccctccgttgcagctttctgtct

SEQ ID NO: 852797 - DNA, 25 bp, Homo sapien
ctgcctctctccagcgtagcctgaa

SEQ ID NO: 852798 - DNA, 25 bp, Homo sapien
cggtcccagaggtcggcacagctgt

SEQ ID NO: 852799 - DNA, 25 bp, Homo sapien
aacgcggtcccagaggtcggcacag

SEQ ID NO: 852800 - DNA, 25 bp, Homo sapien
tggcacagtccagggtgaatacagt

SEQ ID NO: 852801 - DNA, 25 bp, Homo sapien
tgaacgcggtcccagaggtcggcac

SEQ ID NO: 852802 - DNA, 25 bp, Homo sapien
aagaggagatcggcacacagcgccc

SEQ ID NO: 852803 - DNA, 25 bp, Homo sapien
gcaagaggagatcggcacacagcgc

SEQ ID NO: 852804 - DNA, 25 bp, Homo sapien
gaggagatcggcacacagcgcccat

SEQ ID NO: 852805 - DNA, 25 bp, Homo sapien
cggcaagaggagatcggcacacagc

SEQ ID NO: 852806 - DNA, 25 bp, Homo sapien
ctcccttagccctggcgtggctgca

SEQ ID NO: 852807 - DNA, 25 bp, Homo sapien
tcccttagccctggcgtggctgcag

SEQ ID NO: 852808 - DNA, 25 bp, Homo sapien
cccttagccctggcgtggctgcagc

SEQ ID NO: 852809 - DNA, 25 bp, Homo sapien
acagggggccgagcaactgctccag

SEQ ID NO: 852810 - DNA, 25 bp, Homo sapien
ggcagggctgcaggttacactcctg

SEQ ID NO: 852811 - DNA, 25 bp, Homo sapien
tcacaagtccgatgtcgctccatag

SEQ ID NO: 852812 - DNA, 25 bp, Homo sapien
tacactcctgccgttgctctgtgtc

SEQ ID NO: 852813 - DNA, 25 bp, Homo sapien
gcatgaggtggcacaggcactaagc

SEQ ID NO: 852814 - DNA, 25 bp, Homo sapien
cagaggcacgggcatgaggtggcac

SEQ ID NO: 852815 - DNA, 25 bp, Homo sapien
tgaggtggcacaggcactaagcacc

SEQ ID NO: 852816 - DNA, 25 bp, Homo sapien
gtggcacaggcactaagcacctggc

SEQ ID NO: 852817 - DNA, 25 bp, Homo sapien
gtgacactcagaccaccgcctcttc

SEQ ID NO: 852818 - DNA, 25 bp, Homo sapien
agcagggcaggctcagtgacactca

SEQ ID NO: 852819 - DNA, 25 bp, Homo sapien
gggagtcaggacacagcaccccgta

SEQ ID NO: 852820 - DNA, 25 bp, Homo sapien
ggagtcaggacacagcaccccgtac

SEQ ID NO: 852821 - DNA, 25 bp, Homo sapien
agtgggaggcacacacgtgccattg

SEQ ID NO: 852822 - DNA, 25 bp, Homo sapien
gtgcagttccgggtgagcacagtcc

SEQ ID NO: 852823 - DNA, 25 bp, Homo sapien
ggtgcagttccgggtgagcacagtc

SEQ ID NO: 852824 - DNA, 25 bp, Homo sapien
gcgggtgcagttccgggtgagcaca

SEQ ID NO: 852825 - DNA, 25 bp, Homo sapien
gggtgcagttccgggtgagcacagt

SEQ ID NO: 852826 - DNA, 25 bp, Homo sapien
acagaagcacactcagatgcctccc

SEQ ID NO: 852827 - DNA, 25 bp, Homo sapien
gcacactcagatgcctcccatgtcc

SEQ ID NO: 852828 - DNA, 25 bp, Homo sapien
aagcacactcagatgcctcccatgt

SEQ ID NO: 852829 - DNA, 25 bp, Homo sapien
agaagcacactcagatgcctcccat

SEQ ID NO: 852830 - DNA, 25 bp, Homo sapien
cagctgaaggctccaccgtggcaga

SEQ ID NO: 852831 - DNA, 25 bp, Homo sapien
ctgacagtcaacgagggagcagctg

SEQ ID NO: 852832 - DNA, 25 bp, Homo sapien
agctgaaggctccaccgtggcagac

SEQ ID NO: 852833 - DNA, 25 bp, Homo sapien
tcccgggccttgactttggaggtgc

SEQ ID NO: 852834 - DNA, 25 bp, Homo sapien
agaaaaggctccctgaccaatcctg

SEQ ID NO: 852835 - DNA, 25 bp, Homo sapien
ggtctccagttagagagaggtcagt

SEQ ID NO: 852836 - DNA, 25 bp, Homo sapien
tgtcagagacctagagactgtgccc

SEQ ID NO: 852837 - DNA, 25 bp, Homo sapien
acagggcaaatgctatcagcccggg

SEQ ID NO: 852838 - DNA, 25 bp, Homo sapien
gcagcccgaggctcgagctgaactg

SEQ ID NO: 852839 - DNA, 25 bp, Homo sapien
gggtctttgtggcgttcatctccag

SEQ ID NO: 852840 - DNA, 25 bp, Homo sapien
aagtgcccgggctggcacacgcagc

SEQ ID NO: 852841 - DNA, 25 bp, Homo sapien
tgccagcactcgcagtggtcttcgg

SEQ ID NO: 852842 - DNA, 25 bp, Homo sapien
tagcagagggggttcggtgtctcac

SEQ ID NO: 852843 - DNA, 25 bp, Homo sapien
gtagcagagggggttcggtgtctca

SEQ ID NO: 852844 - DNA, 25 bp, Homo sapien
gtggtagcagagggggttcggtgtc

SEQ ID NO: 852845 - DNA, 25 bp, Homo sapien
ggtagcagagggggttcggtgtctc

SEQ ID NO: 852846 - DNA, 25 bp, Homo sapien
aggcctcctgccattcagatccagg

SEQ ID NO: 852847 - DNA, 25 bp, Homo sapien
gcagacaggcctcccactgaggcag

SEQ ID NO: 852848 - DNA, 25 bp, Homo sapien
ggcagaggcagctctcacaggcctc

SEQ ID NO: 852849 - DNA, 25 bp, Homo sapien
ctgggtgcagacaggcctcccactg

SEQ ID NO: 852850 - DNA, 25 bp, Homo sapien
tgagcacaggtgagtggggagcagt

SEQ ID NO: 852851 - DNA, 25 bp, Homo sapien
ctgagcacaggtgagtggggagcag

SEQ ID NO: 852852 - DNA, 25 bp, Homo sapien
gagcacaggtgagtggggagcagtg

SEQ ID NO: 852853 - DNA, 25 bp, Homo sapien
ggctgcagggggtaccggagcccag

SEQ ID NO: 852854 - DNA, 25 bp, Homo sapien
gtagggctgcagggggtaccggagc

SEQ ID NO: 852855 - DNA, 25 bp, Homo sapien
gggctgcagggggtaccggagccca

SEQ ID NO: 852856 - DNA, 25 bp, Homo sapien
ctgcagggggtaccggagcccaggt

SEQ ID NO: 852857 - DNA, 25 bp, Homo sapien
gcctccctgcggcaagagggacagc

SEQ ID NO: 852858 - DNA, 25 bp, Homo sapien
tccctgcggcaagagggacagcagc

SEQ ID NO: 852859 - DNA, 25 bp, Homo sapien
gagcctccctgcggcaagagggaca

SEQ ID NO: 852860 - DNA, 25 bp, Homo sapien
cggagcctccctgcggcaagaggga

SEQ ID NO: 852861 - DNA, 25 bp, Homo sapien
ttggtgaagtttcgaagctccgtga

SEQ ID NO: 852862 - DNA, 25 bp, Homo sapien
tttggtgaagtttcgaagctccgtg

SEQ ID NO: 852863 - DNA, 25 bp, Homo sapien
cctttggtgaagtttcgaagctccg

SEQ ID NO: 852864 - DNA, 25 bp, Homo sapien
tccctttggtgaagtttcgaagctc

SEQ ID NO: 852865 - DNA, 25 bp, Homo sapien
tgggcagtacccactgcagtagctc

SEQ ID NO: 852866 - DNA, 25 bp, Homo sapien
tccgggtctagacggtagctgcagc

SEQ ID NO: 852867 - DNA, 25 bp, Homo sapien
tctagacggtagctgcagcagtcac

SEQ ID NO: 852868 - DNA, 25 bp, Homo sapien
ggctctccgggtctagacggtagct

SEQ ID NO: 852869 - DNA, 25 bp, Homo sapien
atccgcacagggctctccgggtcta

SEQ ID NO: 852870 - DNA, 25 bp, Homo sapien
acccaggtggcacgggtgccttcca

SEQ ID NO: 852871 - DNA, 25 bp, Homo sapien
ttaacagaactaggcacctgccagc

SEQ ID NO: 852872 - DNA, 25 bp, Homo sapien
tgtcagccttgcttaaaagatgagg

SEQ ID NO: 852873 - DNA, 25 bp, Homo sapien
cagtgggacctcaggttatcatatg

SEQ ID NO: 852874 - DNA, 25 bp, Homo sapien
agggacagctgtggactcacccagc

SEQ ID NO: 852875 - DNA, 25 bp, Homo sapien
cctgttagcgctttgagaagtcacc

SEQ ID NO: 852876 - DNA, 25 bp, Homo sapien
ttatttggaacatgctaatgccaag

SEQ ID NO: 852877 - DNA, 25 bp, Homo sapien
agtgctgctgagtcccatgatcaca

SEQ ID NO: 852878 - DNA, 25 bp, Homo sapien
cacatgtagcggactgtcctccaca

SEQ ID NO: 852879 - DNA, 25 bp, Homo sapien
tgaaatcatattgggtggaggaata

SEQ ID NO: 852880 - DNA, 25 bp, Homo sapien
ctgaaatcatattgggtggaggaat

SEQ ID NO: 852881 - DNA, 25 bp, Homo sapien
tcagcccacatgtagcggactgtcc

SEQ ID NO: 852882 - DNA, 25 bp, Homo sapien
ggtgagcggctctcgaagctgctat

SEQ ID NO: 852883 - DNA, 25 bp, Homo sapien
tggacccaggataagcgcgctgagc

SEQ ID NO: 852884 - DNA, 25 bp, Homo sapien
gagctgagacttgcgtcgcaccgag

SEQ ID NO: 852885 - DNA, 25 bp, Homo sapien
aacagctttacggtcactgcccagc

SEQ ID NO: 852886 - DNA, 25 bp, Homo sapien
gggagcgcggcccaagaacttcgct

SEQ ID NO: 852887 - DNA, 25 bp, Homo sapien
agggagcgcggcccaagaacttcgc

SEQ ID NO: 852888 - DNA, 25 bp, Homo sapien
gagcgcggcccaagaacttcgctct

SEQ ID NO: 852889 - DNA, 25 bp, Homo sapien
ggagggagcgcggcccaagaacttc

SEQ ID NO: 852890 - DNA, 25 bp, Homo sapien
atggccccgctttcggaggcccgtg

SEQ ID NO: 852891 - DNA, 25 bp, Homo sapien
tccatggccccgctttcggaggccc

SEQ ID NO: 852892 - DNA, 25 bp, Homo sapien
catggccccgctttcggaggcccgt

SEQ ID NO: 852893 - DNA, 25 bp, Homo sapien
tggccccgctttcggaggcccgtgc

SEQ ID NO: 852894 - DNA, 25 bp, Homo sapien
ggaagcgctggcaatcccgtcaaat

SEQ ID NO: 852895 - DNA, 25 bp, Homo sapien
cacaggtttctaagcaatgcccaga

SEQ ID NO: 852896 - DNA, 25 bp, Homo sapien
gaggatctaggcagggtcaagccct

SEQ ID NO: 852897 - DNA, 25 bp, Homo sapien
aaagatgttagtcccaagaggctgc

SEQ ID NO: 852898 - DNA, 25 bp, Homo sapien
ggaccacgtactctgtaggtgccgt

SEQ ID NO: 852899 - DNA, 25 bp, Homo sapien
agggtaagggccataagctccatct

SEQ ID NO: 852900 - DNA, 25 bp, Homo sapien
ccaatctggggatatttccaaaggg

SEQ ID NO: 852901 - DNA, 25 bp, Homo sapien
tgggttttgttgagctttattggct

SEQ ID NO: 852902 - DNA, 25 bp, Homo sapien
ctgactgaacagaatagcttggaaa

SEQ ID NO: 852903 - DNA, 25 bp, Homo sapien
tgagagcggtgttgatggaaacctt

SEQ ID NO: 852904 - DNA, 25 bp, Homo sapien
ccgttaaaggctaagaaagcctctg

SEQ ID NO: 852905 - DNA, 25 bp, Homo sapien
ccttgttatacagcgcatgaccgta

SEQ ID NO: 852906 - DNA, 25 bp, Homo sapien
cctcctggagtaagtacacagtgat

SEQ ID NO: 852907 - DNA, 25 bp, Homo sapien
tgatgtcatcaaacgtcacaggagc

SEQ ID NO: 852908 - DNA, 25 bp, Homo sapien
acagtgatgtcatcaaacgtcacag

SEQ ID NO: 852909 - DNA, 25 bp, Homo sapien
cagtgatgtcatcaaacgtcacagg

SEQ ID NO: 852910 - DNA, 25 bp, Homo sapien
ggacgctgccaagccatggctctgg

SEQ ID NO: 852911 - DNA, 25 bp, Homo sapien
atggctctggccctcgtccgaactt

SEQ ID NO: 852912 - DNA, 25 bp, Homo sapien
cctcgtccgaacttgcggaacagct

SEQ ID NO: 852913 - DNA, 25 bp, Homo sapien
gaacagctcaggattggcaacagtt

SEQ ID NO: 852914 - DNA, 25 bp, Homo sapien
ccactgcctgtactgaggtgggaaa

SEQ ID NO: 852915 - DNA, 25 bp, Homo sapien
cactctccctggtgggaccttgcac

SEQ ID NO: 852916 - DNA, 25 bp, Homo sapien
catttctcccatgtagcccatctgt

SEQ ID NO: 852917 - DNA, 25 bp, Homo sapien
tccctcgatgtgtccactgcctgta

SEQ ID NO: 852918 - DNA, 25 bp, Homo sapien
gggtattctcggcaagcagagcaga

SEQ ID NO: 852919 - DNA, 25 bp, Homo sapien
cattcatgatcagccacggaaactg

SEQ ID NO: 852920 - DNA, 25 bp, Homo sapien
caaaccacgacttctggatggaccg

SEQ ID NO: 852921 - DNA, 25 bp, Homo sapien
tataaccttctattagtcttgaccg

SEQ ID NO: 852922 - DNA, 25 bp, Homo sapien
cctcgctgccaaggcattgacacag

SEQ ID NO: 852923 - DNA, 25 bp, Homo sapien
gctcttcgcgtggtatttgagagtc

SEQ ID NO: 852924 - DNA, 25 bp, Homo sapien
atgtgggccttgctcttcgcgtggt

SEQ ID NO: 852925 - DNA, 25 bp, Homo sapien
gggccttgctcttcgcgtggtattt

SEQ ID NO: 852926 - DNA, 25 bp, Homo sapien
ggcaatctgcagtgaagagcggctc

SEQ ID NO: 852927 - DNA, 25 bp, Homo sapien
gtctctgatgctccggaaccgggct

SEQ ID NO: 852928 - DNA, 25 bp, Homo sapien
tgtctgaggagctgtggatgccatc

SEQ ID NO: 852929 - DNA, 25 bp, Homo sapien
catgctatcaaatcctcccagaggc

SEQ ID NO: 852930 - DNA, 25 bp, Homo sapien
ggaacgcgtctaaaacaatgcctag

SEQ ID NO: 852931 - DNA, 25 bp, Homo sapien
catcatcagcatggatatacatcgt

SEQ ID NO: 852932 - DNA, 25 bp, Homo sapien
tgcctagtccatgataagcatgttg

SEQ ID NO: 852933 - DNA, 25 bp, Homo sapien
gatgataatagggttgttgtccaaa

SEQ ID NO: 852934 - DNA, 25 bp, Homo sapien
ttaatagcacctgctctaccggcct

SEQ ID NO: 852935 - DNA, 25 bp, Homo sapien
aaactgcaatgtttacaagtgcaac

SEQ ID NO: 852936 - DNA, 25 bp, Homo sapien
gtgcaacatgactccaaacttaaaa

SEQ ID NO: 852937 - DNA, 25 bp, Homo sapien
caacatcagaaacattacatcaaac

SEQ ID NO: 852938 - DNA, 25 bp, Homo sapien
ttctgccgcttgtctagcatgcccc

SEQ ID NO: 852939 - DNA, 25 bp, Homo sapien
caaggatgccaacagctcgtagttc

SEQ ID NO: 852940 - DNA, 25 bp, Homo sapien
tagttcatccgcatcacgtctctgt

SEQ ID NO: 852941 - DNA, 25 bp, Homo sapien
tcctcccgggtgaaatacactgcca

SEQ ID NO: 852942 - DNA, 25 bp, Homo sapien
tagccccgggtactcttctggaagc

SEQ ID NO: 852943 - DNA, 25 bp, Homo sapien
tcggtctctgcctacacacagggag

SEQ ID NO: 852944 - DNA, 25 bp, Homo sapien
gataaagcacagttaccccaagcag

SEQ ID NO: 852945 - DNA, 25 bp, Homo sapien
taagaaccttgctaatctgccagaa

SEQ ID NO: 852946 - DNA, 25 bp, Homo sapien
aatttcacagacaaccggagaggcc

SEQ ID NO: 852947 - DNA, 25 bp, Homo sapien
taacctagggcatgacaacaaaacc

SEQ ID NO: 852948 - DNA, 25 bp, Homo sapien
tttaagacaggtgtgaatttcgccc

SEQ ID NO: 852949 - DNA, 25 bp, Homo sapien
cagtgaaactgagtcgctagtgccg

SEQ ID NO: 852950 - DNA, 25 bp, Homo sapien
tttgggggctaagtcagcaggatca

SEQ ID NO: 852951 - DNA, 25 bp, Homo sapien
agcaacagacttcatcagatatggc

SEQ ID NO: 852952 - DNA, 25 bp, Homo sapien
ctttgggggctaagtcagcaggatc

SEQ ID NO: 852953 - DNA, 25 bp, Homo sapien
ttgggggctaagtcagcaggatcac

SEQ ID NO: 852954 - DNA, 25 bp, Homo sapien
tctagctccggctgcccccacttgg

SEQ ID NO: 852955 - DNA, 25 bp, Homo sapien
ctctagctccggctgcccccacttg

SEQ ID NO: 852956 - DNA, 25 bp, Homo sapien
ttctctagctccggctgcccccact

SEQ ID NO: 852957 - DNA, 25 bp, Homo sapien
tttctctagctccggctgcccccac

SEQ ID NO: 852958 - DNA, 25 bp, Homo sapien
agggcagacattcacccatgtccag

SEQ ID NO: 852959 - DNA, 25 bp, Homo sapien
gcgcctatatagacaggctgccagg

SEQ ID NO: 852960 - DNA, 25 bp, Homo sapien
gccagggcagacattcacccatgtc

SEQ ID NO: 852961 - DNA, 25 bp, Homo sapien
atactcccctgtgaaggcgcctata

SEQ ID NO: 852962 - DNA, 25 bp, Homo sapien
gggtccttgatccagggtgcagccc

SEQ ID NO: 852963 - DNA, 25 bp, Homo sapien
tgggtccttgatccagggtgcagcc

SEQ ID NO: 852964 - DNA, 25 bp, Homo sapien
ctggaagcaacgcggagtctgcagc

SEQ ID NO: 852965 - DNA, 25 bp, Homo sapien
gaagcaacgcggagtctgcagccga

SEQ ID NO: 852966 - DNA, 25 bp, Homo sapien
gagtctgcagccgaggcctgtgtgt

SEQ ID NO: 852967 - DNA, 25 bp, Homo sapien
tggaagcaacgcggagtctgcagcc

SEQ ID NO: 852968 - DNA, 25 bp, Homo sapien
cagcaggaggcacgggcctccacgg

SEQ ID NO: 852969 - DNA, 25 bp, Homo sapien
ctgtatgtcctcttgattctcctag

SEQ ID NO: 852970 - DNA, 25 bp, Homo sapien
gtcctcttgattctcctaggtccat

SEQ ID NO: 852971 - DNA, 25 bp, Homo sapien
tatgtcctcttgattctcctaggtc

SEQ ID NO: 852972 - DNA, 25 bp, Homo sapien
tgggaactgcccaaaccatgacctc

SEQ ID NO: 852973 - DNA, 25 bp, Homo sapien
cacagagcctgtgcgctttgctgac

SEQ ID NO: 852974 - DNA, 25 bp, Homo sapien
tggagattaggtctttctatgcagg

SEQ ID NO: 852975 - DNA, 25 bp, Homo sapien
gtgtaacctctgactaaccgagatg

SEQ ID NO: 852976 - DNA, 25 bp, Homo sapien
gtgtgaggggtgtcttccttgattt

SEQ ID NO: 852977 - DNA, 25 bp, Homo sapien
agtgtgaggggtgtcttccttgatt

SEQ ID NO: 852978 - DNA, 25 bp, Homo sapien
tgtgaggggtgtcttccttgatttc

SEQ ID NO: 852979 - DNA, 25 bp, Homo sapien
cagtgtgaggggtgtcttccttgat

SEQ ID NO: 852980 - DNA, 25 bp, Homo sapien
cacggtccccgtgctttggaggagc

SEQ ID NO: 852981 - DNA, 25 bp, Homo sapien
ccttgagtggtatgcaatggagtag

SEQ ID NO: 852982 - DNA, 25 bp, Homo sapien
cgtgcgattgcggtacttgcctaat

SEQ ID NO: 852983 - DNA, 25 bp, Homo sapien
taggcggcattgaaaaagtgctcca

SEQ ID NO: 852984 - DNA, 25 bp, Homo sapien
gcagcacgctcacacagggcgagtt

SEQ ID NO: 852985 - DNA, 25 bp, Homo sapien
tgaagtagcggatgtaaatccccac

SEQ ID NO: 852986 - DNA, 25 bp, Homo sapien
ggccagagtgatgtaggactctttc

SEQ ID NO: 852987 - DNA, 25 bp, Homo sapien
acacagggcgagttccgcacgtcct

SEQ ID NO: 852988 - DNA, 25 bp, Homo sapien
tccagggcagaaacgatggtctcga

SEQ ID NO: 852989 - DNA, 25 bp, Homo sapien
catccagggcagaaacgatggtctc

SEQ ID NO: 852990 - DNA, 25 bp, Homo sapien
ctcatccagggcagaaacgatggtc

SEQ ID NO: 852991 - DNA, 25 bp, Homo sapien
gggcagaaacgatggtctcgaagta

SEQ ID NO: 852992 - DNA, 25 bp, Homo sapien
tgcgggatgacctcctggaactttt

SEQ ID NO: 852993 - DNA, 25 bp, Homo sapien
aacttgaagacggtgcggatgtgcc

SEQ ID NO: 852994 - DNA, 25 bp, Homo sapien
gcggaccgcattcagatccttcagg

SEQ ID NO: 852995 - DNA, 25 bp, Homo sapien
tcctctgcagctcaacatggctgag

SEQ ID NO: 852996 - DNA, 25 bp, Homo sapien
cagtttgtccaagcagatgccgtgg

SEQ ID NO: 852997 - DNA, 25 bp, Homo sapien
tggaggtactcaatccccgtcagga

SEQ ID NO: 852998 - DNA, 25 bp, Homo sapien
aacttgacaaagtggaagccgcgca

SEQ ID NO: 852999 - DNA, 25 bp, Homo sapien
ggagcactcgaaatacctggccagg

SEQ ID NO: 853000 - DNA, 25 bp, Homo sapien
agtgctgggccagggcgtttttgca

SEQ ID NO: 853001 - DNA, 25 bp, Homo sapien
gcagagcatggagaacgggaggtgc

SEQ ID NO: 853002 - DNA, 25 bp, Homo sapien
cttagcagggggaagcggcagtgct

SEQ ID NO: 853003 - DNA, 25 bp, Homo sapien
ccagggcgtttttgcagagcatgga

SEQ ID NO: 853004 - DNA, 25 bp, Homo sapien
agcttggtcctctcatcggtcctga

SEQ ID NO: 853005 - DNA, 25 bp, Homo sapien
catgttgagcacctcgttggagagc

SEQ ID NO: 853006 - DNA, 25 bp, Homo sapien
tgtagacatggctgaaacgccggcc

SEQ ID NO: 853007 - DNA, 25 bp, Homo sapien
cccgctcacagcaagaggtggagat

SEQ ID NO: 853008 - DNA, 25 bp, Homo sapien
ttgggggagctctgccacgtgtact

SEQ ID NO: 853009 - DNA, 25 bp, Homo sapien
cttgggggagctctgccacgtgtac

SEQ ID NO: 853010 - DNA, 25 bp, Homo sapien
ggggagctctgccacgtgtacttac

SEQ ID NO: 853011 - DNA, 25 bp, Homo sapien
tgggggagctctgccacgtgtactt

SEQ ID NO: 853012 - DNA, 25 bp, Homo sapien
cagcagaagatcctagggcagccta

SEQ ID NO: 853013 - DNA, 25 bp, Homo sapien
gggtgtgaacctagcagtgccagaa

SEQ ID NO: 853014 - DNA, 25 bp, Homo sapien
gaagagtggactagcctgtcgtgca

SEQ ID NO: 853015 - DNA, 25 bp, Homo sapien
agaggtagagttccgcacgagacca

SEQ ID NO: 853016 - DNA, 25 bp, Homo sapien
atgggaagggtactcagacagcagc

SEQ ID NO: 853017 - DNA, 25 bp, Homo sapien
aagggtactcaggtgctcagatgcc

SEQ ID NO: 853018 - DNA, 25 bp, Homo sapien
cctgggaataggaagggtactcagg

SEQ ID NO: 853019 - DNA, 25 bp, Homo sapien
gaatgggaagggtactcagacagca

SEQ ID NO: 853020 - DNA, 25 bp, Homo sapien
cctgactagaactgaaaatgacacg

SEQ ID NO: 853021 - DNA, 25 bp, Homo sapien
gaggggctcggacgccagcatctac

SEQ ID NO: 853022 - DNA, 25 bp, Homo sapien
aagcaacagtgctaaggctaagtac

SEQ ID NO: 853023 - DNA, 25 bp, Homo sapien
aagcaagaaaggaattcctgactag

SEQ ID NO: 853024 - DNA, 25 bp, Homo sapien
gcagatagtaacacctcccagagct

SEQ ID NO: 853025 - DNA, 25 bp, Homo sapien
gcctgtgtgtgccttagccacgcag

SEQ ID NO: 853026 - DNA, 25 bp, Homo sapien
ctgtggggtccctctgaccgccaga

SEQ ID NO: 853027 - DNA, 25 bp, Homo sapien
gcaagttcctgaacgcccatggaga

SEQ ID NO: 853028 - DNA, 25 bp, Homo sapien
cctaaggaaggcactggccggtgtc

SEQ ID NO: 853029 - DNA, 25 bp, Homo sapien
tgtcctcggagcacgctgatgctga

SEQ ID NO: 853030 - DNA, 25 bp, Homo sapien
gctggaacagcaccttgatgtggaa

SEQ ID NO: 853031 - DNA, 25 bp, Homo sapien
tgtgccccttgagaaatcgggtagt

SEQ ID NO: 853032 - DNA, 25 bp, Homo sapien
ctgaatgaggaagttcaggaataag

SEQ ID NO: 853033 - DNA, 25 bp, Homo sapien
tgaggaagttcaggaataagatggc

SEQ ID NO: 853034 - DNA, 25 bp, Homo sapien
tgtttccacgggggtcctgaatgag

SEQ ID NO: 853035 - DNA, 25 bp, Homo sapien
aagttcaggaataagatggcagtca

SEQ ID NO: 853036 - DNA, 25 bp, Homo sapien
tacttggaatgtcagacccggtggg

SEQ ID NO: 853037 - DNA, 25 bp, Homo sapien
gaaatgccaggacacgtacatacgg

SEQ ID NO: 853038 - DNA, 25 bp, Homo sapien
taagcacacacctgtatgagggacc

SEQ ID NO: 853039 - DNA, 25 bp, Homo sapien
tggagcgcggtcacatactctaagg

SEQ ID NO: 853040 - DNA, 25 bp, Homo sapien
tcacatacactcgagtaagactgag

SEQ ID NO: 853041 - DNA, 25 bp, Homo sapien
tctcaggagctaggcctcaaggagc

SEQ ID NO: 853042 - DNA, 25 bp, Homo sapien
gtatcccgagtctctgaaacctttg

SEQ ID NO: 853043 - DNA, 25 bp, Homo sapien
caccgaagagatctggctgtatccc

SEQ ID NO: 853044 - DNA, 25 bp, Homo sapien
agaggctctttaaaacttccctgag

SEQ ID NO: 853045 - DNA, 25 bp, Homo sapien
gacatctctatcgttcatcttttca

SEQ ID NO: 853046 - DNA, 25 bp, Homo sapien
gggctgatgaattcctagaaagggt

SEQ ID NO: 853047 - DNA, 25 bp, Homo sapien
gggtcctgatgttggtgacatctct

SEQ ID NO: 853048 - DNA, 25 bp, Homo sapien
tgcagcgaaccaggcagaggctttg

SEQ ID NO: 853049 - DNA, 25 bp, Homo sapien
tagcaacaagtgctaccccaagcgg

SEQ ID NO: 853050 - DNA, 25 bp, Homo sapien
taggagcccactcgctgattggctg

SEQ ID NO: 853051 - DNA, 25 bp, Homo sapien
tccaggcggtatctctagcaacaag

SEQ ID NO: 853052 - DNA, 25 bp, Homo sapien
gcgctgcaggtgcgcgggtccccag

SEQ ID NO: 853053 - DNA, 25 bp, Homo sapien
ggcgctgcaggtgcgcgggtcccca

SEQ ID NO: 853054 - DNA, 25 bp, Homo sapien
tccccagccgggcagcgcgctgagc

SEQ ID NO: 853055 - DNA, 25 bp, Homo sapien
cccagccgggcagcgcgctgagcat

SEQ ID NO: 853056 - DNA, 25 bp, Homo sapien
ggagggcgaatgagtgcgccgtcat

SEQ ID NO: 853057 - DNA, 25 bp, Homo sapien
ccagaacgtggtgaagatgatgacc

SEQ ID NO: 853058 - DNA, 25 bp, Homo sapien
ttcggcacgaaccagggcccggcga

SEQ ID NO: 853059 - DNA, 25 bp, Homo sapien
tgatgaccgggagggcgaatgagtg

SEQ ID NO: 853060 - DNA, 25 bp, Homo sapien
tacaaagtgtcacgcactggtaggt

SEQ ID NO: 853061 - DNA, 25 bp, Homo sapien
gcagccttttaaggcaggagtcgac

SEQ ID NO: 853062 - DNA, 25 bp, Homo sapien
aggtgttttaaatgcgttaccgcag

SEQ ID NO: 853063 - DNA, 25 bp, Homo sapien
tgcgttaccgcaggtcatcctcaca

SEQ ID NO: 853064 - DNA, 25 bp, Homo sapien
tgtccaaacggcctttgggcaaagc

SEQ ID NO: 853065 - DNA, 25 bp, Homo sapien
atgtccaaacggcctttgggcaaag

SEQ ID NO: 853066 - DNA, 25 bp, Homo sapien
cagcagaagaggacacgggtcagaa

SEQ ID NO: 853067 - DNA, 25 bp, Homo sapien
tcagaacaaatgcagccagcacctc

SEQ ID NO: 853068 - DNA, 25 bp, Homo sapien
tgcagcagaagaggacacgggtcag

SEQ ID NO: 853069 - DNA, 25 bp, Homo sapien
acaaatgcagccagcacctcacaag

SEQ ID NO: 853070 - DNA, 25 bp, Homo sapien
gacggcggtggcgaccagcatggtg

SEQ ID NO: 853071 - DNA, 25 bp, Homo sapien
cagacggcggtggcgaccagcatgg

SEQ ID NO: 853072 - DNA, 25 bp, Homo sapien
agcagacggcggtggcgaccagcat

SEQ ID NO: 853073 - DNA, 25 bp, Homo sapien
cggcggtggcgaccagcatggtgat

SEQ ID NO: 853074 - DNA, 25 bp, Homo sapien
ccggctccatgcaccagggagcgaa

SEQ ID NO: 853075 - DNA, 25 bp, Homo sapien
ggcgggcagcacgtcagaatcacct

SEQ ID NO: 853076 - DNA, 25 bp, Homo sapien
cctggcgggcagcacgtcagaatca

SEQ ID NO: 853077 - DNA, 25 bp, Homo sapien
catgcaccagggagcgaacagggca

SEQ ID NO: 853078 - DNA, 25 bp, Homo sapien
agggagccatccacactccggcagg

SEQ ID NO: 853079 - DNA, 25 bp, Homo sapien
tagatctgcaggatccccgagttgg

SEQ ID NO: 853080 - DNA, 25 bp, Homo sapien
tttggtttcatttgatgttcggtag

SEQ ID NO: 853081 - DNA, 25 bp, Homo sapien
ggttggtatggcacttctgggtttg

SEQ ID NO: 853082 - DNA, 25 bp, Homo sapien
gccagggacagcaaagcatggtgag

SEQ ID NO: 853083 - DNA, 25 bp, Homo sapien
ccagggacagcaaagcatggtgagc

SEQ ID NO: 853084 - DNA, 25 bp, Homo sapien
cccgaacagggggttcagctgcgcc

SEQ ID NO: 853085 - DNA, 25 bp, Homo sapien
agggggttcagctgcgccaggatgg

SEQ ID NO: 853086 - DNA, 25 bp, Homo sapien
tcttcagctggggcccgaacagggg

SEQ ID NO: 853087 - DNA, 25 bp, Homo sapien
acagggggttcagctgcgccaggat

SEQ ID NO: 853088 - DNA, 25 bp, Homo sapien
tcactcccacaggaagcgcacgtac

SEQ ID NO: 853089 - DNA, 25 bp, Homo sapien
cctgccggagtgtggatggctccct

SEQ ID NO: 853090 - DNA, 25 bp, Homo sapien
cccatgtgcctgccggagtgtggat

SEQ ID NO: 853091 - DNA, 25 bp, Homo sapien
caaaataatatgaccgaggcctgcc

SEQ ID NO: 853092 - DNA, 25 bp, Homo sapien
gctgggttggccgcatccaaaataa

SEQ ID NO: 853093 - DNA, 25 bp, Homo sapien
tagggtcttgccttggggtgaagcg

SEQ ID NO: 853094 - DNA, 25 bp, Homo sapien
caggttagggtcttgccttggggtg

SEQ ID NO: 853095 - DNA, 25 bp, Homo sapien
ttagggtcttgccttggggtgaagc

SEQ ID NO: 853096 - DNA, 25 bp, Homo sapien
gtgtagtgggaaattttgagcaaga

SEQ ID NO: 853097 - DNA, 25 bp, Homo sapien
tcttgctcaaaatttcccactacac

SEQ ID NO: 853098 - DNA, 25 bp, Homo sapien
aggagggagctggtgaccagacata

SEQ ID NO: 853099 - DNA, 25 bp, Homo sapien
cacagtcattccgagagctgggcac

SEQ ID NO: 853100 - DNA, 25 bp, Homo sapien
gctggtgaccagacatagttgtgtg

SEQ ID NO: 853101 - DNA, 25 bp, Homo sapien
agccacagtcattccgagagctggg

SEQ ID NO: 853102 - DNA, 25 bp, Homo sapien
ctggctgggaagactgggaagactt

SEQ ID NO: 853103 - DNA, 25 bp, Homo sapien
ccctcggccgctgctgtgcccaggg

SEQ ID NO: 853104 - DNA, 25 bp, Homo sapien
cccctcggccgctgctgtgcccagg

SEQ ID NO: 853105 - DNA, 25 bp, Homo sapien
tgggaagacttccaggaaccaggca

SEQ ID NO: 853106 - DNA, 25 bp, Homo sapien
caaactccagagcagtgcgggtatt

SEQ ID NO: 853107 - DNA, 25 bp, Homo sapien
cagcagcatctccttgggaaagagg

SEQ ID NO: 853108 - DNA, 25 bp, Homo sapien
actccagagcagtgcgggtattgga

SEQ ID NO: 853109 - DNA, 25 bp, Homo sapien
gcatctccttgggaaagagggcaaa

SEQ ID NO: 853110 - DNA, 25 bp, Homo sapien
tctccatgaggacacgtgtcctcct

SEQ ID NO: 853111 - DNA, 25 bp, Homo sapien
aggacacgtgtcctcctcaggatgg

SEQ ID NO: 853112 - DNA, 25 bp, Homo sapien
aaggccttgcctataacccaataga

SEQ ID NO: 853113 - DNA, 25 bp, Homo sapien
gcatctgccccgtctgtaaagggaa

SEQ ID NO: 853114 - DNA, 25 bp, Homo sapien
gacatccactgagggaggtccaggt

SEQ ID NO: 853115 - DNA, 25 bp, Homo sapien
catctaggactgaggccatctggac

SEQ ID NO: 853116 - DNA, 25 bp, Homo sapien
gaggctgtcgtttcttcccctggag

SEQ ID NO: 853117 - DNA, 25 bp, Homo sapien
tccaaagacaatgcccgctgaacag

SEQ ID NO: 853118 - DNA, 25 bp, Homo sapien
tgccaggcctggttctccgccgaat

SEQ ID NO: 853119 - DNA, 25 bp, Homo sapien
gggccggattttcctccagatctca

SEQ ID NO: 853120 - DNA, 25 bp, Homo sapien
gcacttgaacaagtcctcggtcttc

SEQ ID NO: 853121 - DNA, 25 bp, Homo sapien
ggatatctgtgttcataactgcagc

SEQ ID NO: 853122 - DNA, 25 bp, Homo sapien
gaattatcgtggctccctgctcaag

SEQ ID NO: 853123 - DNA, 25 bp, Homo sapien
gatcagagtggagaacgacagagct

SEQ ID NO: 853124 - DNA, 25 bp, Homo sapien
cactaaaaacctgtggcgtccctgt

SEQ ID NO: 853125 - DNA, 25 bp, Homo sapien
caatgcgcagattggacgagggctc

SEQ ID NO: 853126 - DNA, 25 bp, Homo sapien
aactcctgatggtacgtccagcctg

SEQ ID NO: 853127 - DNA, 25 bp, Homo sapien
cctggcgtgtatgggagcaccaaga

SEQ ID NO: 853128 - DNA, 25 bp, Homo sapien
gattggctcgacttggctcgggtca

SEQ ID NO: 853129 - DNA, 25 bp, Homo sapien
caagccagcgacactatgggcagct

SEQ ID NO: 853130 - DNA, 25 bp, Homo sapien
tgcgaactgaggcttgacaactctg

SEQ ID NO: 853131 - DNA, 25 bp, Homo sapien
tatcttcgagctgaacctgaggacc

SEQ ID NO: 853132 - DNA, 25 bp, Homo sapien
gggtggctgccaaattcctagatca

SEQ ID NO: 853133 - DNA, 25 bp, Homo sapien
cagtggccgatacgacatggaatca

SEQ ID NO: 853134 - DNA, 25 bp, Homo sapien
gtgtgtataacattgacacgaggaa

SEQ ID NO: 853135 - DNA, 25 bp, Homo sapien
ggaaatagatgcctgtagcagatgg

SEQ ID NO: 853136 - DNA, 25 bp, Homo sapien
cattgacacgaggaaatagatgcct

SEQ ID NO: 853137 - DNA, 25 bp, Homo sapien
gaaatagatgcctgtagcagatggg

SEQ ID NO: 853138 - DNA, 25 bp, Homo sapien
ctgcacatgtttgctggccaacgtt

SEQ ID NO: 853139 - DNA, 25 bp, Homo sapien
gcctcagactctctgcacatgtttg

SEQ ID NO: 853140 - DNA, 25 bp, Homo sapien
gggtcagcctcagactctctgcaca

SEQ ID NO: 853141 - DNA, 25 bp, Homo sapien
gctggccaacgttccagccagcggg

SEQ ID NO: 853142 - DNA, 25 bp, Homo sapien
gcccacatttgtggcaatcttggtc

SEQ ID NO: 853143 - DNA, 25 bp, Homo sapien
aggcccacatttgtggcaatcttgg

SEQ ID NO: 853144 - DNA, 25 bp, Homo sapien
tgtggcaatcttggtcagtacagtc

SEQ ID NO: 853145 - DNA, 25 bp, Homo sapien
atttgtggcaatcttggtcagtaca

SEQ ID NO: 853146 - DNA, 25 bp, Homo sapien
ttcccagcgttagcttagcaaccag

SEQ ID NO: 853147 - DNA, 25 bp, Homo sapien
ccacagttcccagcgttagcttagc

SEQ ID NO: 853148 - DNA, 25 bp, Homo sapien
ccagcgttagcttagcaaccagagc

SEQ ID NO: 853149 - DNA, 25 bp, Homo sapien
gttagcttagcaaccagagctgcag

SEQ ID NO: 853150 - DNA, 25 bp, Homo sapien
taaaagtaagttgtctcatctgaca

SEQ ID NO: 853151 - DNA, 25 bp, Homo sapien
aaaagtaagttgtctcatctgacag

SEQ ID NO: 853152 - DNA, 25 bp, Homo sapien
atacatttaaaagtaagttgtctca

SEQ ID NO: 853153 - DNA, 25 bp, Homo sapien
catttaaaagtaagttgtctcatct

SEQ ID NO: 853154 - DNA, 25 bp, Homo sapien
cgattcgaaacctgaattttcaggg

SEQ ID NO: 853155 - DNA, 25 bp, Homo sapien
ttccaagatgaacatgggtgtagct

SEQ ID NO: 853156 - DNA, 25 bp, Homo sapien
tcaggagtgtccatcgagcatcacg

SEQ ID NO: 853157 - DNA, 25 bp, Homo sapien
caagatgaacatgggtgtagctttc

SEQ ID NO: 853158 - DNA, 25 bp, Homo sapien
tgggacaaatgtgccgctcgctcat

SEQ ID NO: 853159 - DNA, 25 bp, Homo sapien
ctgggacaaatgtgccgctcgctca

SEQ ID NO: 853160 - DNA, 25 bp, Homo sapien
agggacagatcctcgggcactgttt

SEQ ID NO: 853161 - DNA, 25 bp, Homo sapien
cagggacagatcctcgggcactgtt

SEQ ID NO: 853162 - DNA, 25 bp, Homo sapien
ttcgggtactgaggatccagttaaa

SEQ ID NO: 853163 - DNA, 25 bp, Homo sapien
gacggatcaccacatcatcccctgt

SEQ ID NO: 853164 - DNA, 25 bp, Homo sapien
cccctgtgcatttgcatgttgtgta

SEQ ID NO: 853165 - DNA, 25 bp, Homo sapien
agtggtgacgtggaaatgtaaagaa

SEQ ID NO: 853166 - DNA, 25 bp, Homo sapien
gagtcccaggtgagagctaagttcc

SEQ ID NO: 853167 - DNA, 25 bp, Homo sapien
gtcgaggggactggatttctgcttc

SEQ ID NO: 853168 - DNA, 25 bp, Homo sapien
taagttccaggcgagaccagggagt

SEQ ID NO: 853169 - DNA, 25 bp, Homo sapien
cgttcacgctacaggacaatccctt

SEQ ID NO: 853170 - DNA, 25 bp, Homo sapien
agaaaagacagcgtcctggaggaga

SEQ ID NO: 853171 - DNA, 25 bp, Homo sapien
ttgttggagcagatttacaagggag

SEQ ID NO: 853172 - DNA, 25 bp, Homo sapien
aggagagcttgttggagcagattta

SEQ ID NO: 853173 - DNA, 25 bp, Homo sapien
tcagggctgtgctcgatagcacaga

SEQ ID NO: 853174 - DNA, 25 bp, Homo sapien
tctccacaggaggaacggcaaagtc

SEQ ID NO: 853175 - DNA, 25 bp, Homo sapien
tagctagacagacggtatccccggg

SEQ ID NO: 853176 - DNA, 25 bp, Homo sapien
tagcaccgttgcatgcaggcagttg

SEQ ID NO: 853177 - DNA, 25 bp, Homo sapien
cacgcggctctgtcggattgttcaa

SEQ ID NO: 853178 - DNA, 25 bp, Homo sapien
tagaattttggccagaatcctagag

SEQ ID NO: 853179 - DNA, 25 bp, Homo sapien
tatcggcgtctaacctggcatcaac

SEQ ID NO: 853180 - DNA, 25 bp, Homo sapien
gaacaggttttctgtacagtgccca

SEQ ID NO: 853181 - DNA, 25 bp, Homo sapien
aatcaggatattcgcagttggcaca

SEQ ID NO: 853182 - DNA, 25 bp, Homo sapien
gttgagcagacttatagcttctcat

SEQ ID NO: 853183 - DNA, 25 bp, Homo sapien
tgttgagcagacttatagcttctca

SEQ ID NO: 853184 - DNA, 25 bp, Homo sapien
attttgagcggtctatggctttctg

SEQ ID NO: 853185 - DNA, 25 bp, Homo sapien
gtattttgagcggtctatggctttc

SEQ ID NO: 853186 - DNA, 25 bp, Homo sapien
aaagtaaagtatcaaaggcagtgcc

SEQ ID NO: 853187 - DNA, 25 bp, Homo sapien
tccccagtaaagtgaggacaatact

SEQ ID NO: 853188 - DNA, 25 bp, Homo sapien
gacttgcactaatcagaggctcacc

SEQ ID NO: 853189 - DNA, 25 bp, Homo sapien
catgaaatcgacgtgaaatgcaagg

SEQ ID NO: 853190 - DNA, 25 bp, Homo sapien
ggagatggtgctcaagggttggagc

SEQ ID NO: 853191 - DNA, 25 bp, Homo sapien
cgggagatggtgctcaagggttgga

SEQ ID NO: 853192 - DNA, 25 bp, Homo sapien
tacgggagatggtgctcaagggttg

SEQ ID NO: 853193 - DNA, 25 bp, Homo sapien
ctacgggagatggtgctcaagggtt

SEQ ID NO: 853194 - DNA, 25 bp, Homo sapien
gaaccttactctgcatgtgaacaca

SEQ ID NO: 853195 - DNA, 25 bp, Homo sapien
ttggaggacttcaaccctcttagaa

SEQ ID NO: 853196 - DNA, 25 bp, Homo sapien
accttactctgcatgtgaacacagc

SEQ ID NO: 853197 - DNA, 25 bp, Homo sapien
tggaggacttcaaccctcttagaac

SEQ ID NO: 853198 - DNA, 25 bp, Homo sapien
tcctctgcaggatccctgatgccca

SEQ ID NO: 853199 - DNA, 25 bp, Homo sapien
tattcttgccccgctctgctctagt

SEQ ID NO: 853200 - DNA, 25 bp, Homo sapien
tggacccttcgatgttcctggccca

SEQ ID NO: 853201 - DNA, 25 bp, Homo sapien
acctgcgctacctattcttgccccg

SEQ ID NO: 853202 - DNA, 25 bp, Homo sapien
ggtagatgcccttagactgccaact

SEQ ID NO: 853203 - DNA, 25 bp, Homo sapien
tggagcctgcggttttcactggaag

SEQ ID NO: 853204 - DNA, 25 bp, Homo sapien
tattgggcacctgttacctgttcag

SEQ ID NO: 853205 - DNA, 25 bp, Homo sapien
ccaagaatggtcaaacgagaggcaa

SEQ ID NO: 853206 - DNA, 25 bp, Homo sapien
tctcaatttatattacgactttcaa

SEQ ID NO: 853207 - DNA, 25 bp, Homo sapien
tttatattacgactttcaaacttca

SEQ ID NO: 853208 - DNA, 25 bp, Homo sapien
cacacaccattttaaggcattgcta

SEQ ID NO: 853209 - DNA, 25 bp, Homo sapien
caaacttcagtgcatatgtacacac

SEQ ID NO: 853210 - DNA, 25 bp, Homo sapien
aatccttcagaaattttagcaccac

SEQ ID NO: 853211 - DNA, 25 bp, Homo sapien
cagacattaagtgtgctgaaagtag

SEQ ID NO: 853212 - DNA, 25 bp, Homo sapien
ctgaaagtagttgtgttgtcatctg

SEQ ID NO: 853213 - DNA, 25 bp, Homo sapien
gctttttccaagcagacattaagtg

SEQ ID NO: 853214 - DNA, 25 bp, Homo sapien
gatatttccgacagtgtctacttcc

SEQ ID NO: 853215 - DNA, 25 bp, Homo sapien
actgctcccggccaatagattatag

SEQ ID NO: 853216 - DNA, 25 bp, Homo sapien
caaaaccctggctgtacaagtatcc

SEQ ID NO: 853217 - DNA, 25 bp, Homo sapien
tcctctgtaaacttagatatttccg

SEQ ID NO: 853218 - DNA, 25 bp, Homo sapien
caagcctgcgcttcctcctgtcatc

SEQ ID NO: 853219 - DNA, 25 bp, Homo sapien
caaggattttccaagcctgcgcttc

SEQ ID NO: 853220 - DNA, 25 bp, Homo sapien
ctcctgtcatctcctttgctcctct

SEQ ID NO: 853221 - DNA, 25 bp, Homo sapien
tcctcctgtcatctcctttgctcct

SEQ ID NO: 853222 - DNA, 25 bp, Homo sapien
accgtgcctggcaagagactcgttt

SEQ ID NO: 853223 - DNA, 25 bp, Homo sapien
tgataaagattgagtcttcctatgt

SEQ ID NO: 853224 - DNA, 25 bp, Homo sapien
gaaacgaacagaatttggcgatggc

SEQ ID NO: 853225 - DNA, 25 bp, Homo sapien
caggatgcccttaggggtgtcaaca

SEQ ID NO: 853226 - DNA, 25 bp, Homo sapien
aatcatagctgcttgtgatgagcag

SEQ ID NO: 853227 - DNA, 25 bp, Homo sapien
catagctgcttgtgatgagcagcag

SEQ ID NO: 853228 - DNA, 25 bp, Homo sapien
gtaatcatagctgcttgtgatgagc

SEQ ID NO: 853229 - DNA, 25 bp, Homo sapien
ctgtaatcatagctgcttgtgatga

SEQ ID NO: 853230 - DNA, 25 bp, Homo sapien
cagtgatagacacattccacgacga

SEQ ID NO: 853231 - DNA, 25 bp, Homo sapien
agtgatagacacattccacgacgac

SEQ ID NO: 853232 - DNA, 25 bp, Homo sapien
accaccatcgcaggggggcaggcaa

SEQ ID NO: 853233 - DNA, 25 bp, Homo sapien
cccccctcgctctttgcacccccat

SEQ ID NO: 853234 - DNA, 25 bp, Homo sapien
atcgcaggggggcaggcaatccccc

SEQ ID NO: 853235 - DNA, 25 bp, Homo sapien
tcgctctttgcacccccatcgcagg

SEQ ID NO: 853236 - DNA, 25 bp, Homo sapien
gcggaggcaccccccgcgaggcagg

SEQ ID NO: 853237 - DNA, 25 bp, Homo sapien
ttgctcttaggaccccatcgctggg

SEQ ID NO: 853238 - DNA, 25 bp, Homo sapien
ctttgctcttaggaccccatcgctg

SEQ ID NO: 853239 - DNA, 25 bp, Homo sapien
tcttaggaccccatcgctgggggcg

SEQ ID NO: 853240 - DNA, 25 bp, Homo sapien
ggactgagagccagaccctcatccc

SEQ ID NO: 853241 - DNA, 25 bp, Homo sapien
ccccatcgcagaggggggaggcact

SEQ ID NO: 853242 - DNA, 25 bp, Homo sapien
atcgcagaggggggaggcactcccc

SEQ ID NO: 853243 - DNA, 25 bp, Homo sapien
agaggggggaggcactccccgcgag

SEQ ID NO: 853244 - DNA, 25 bp, Homo sapien
tcttccgcccctggctgttactacc

SEQ ID NO: 853245 - DNA, 25 bp, Homo sapien
cctcttccgcccctggctgttacta

SEQ ID NO: 853246 - DNA, 25 bp, Homo sapien
tcccctcttccgcccctggctgtta

SEQ ID NO: 853247 - DNA, 25 bp, Homo sapien
ggctgttactacccccatcacaggg

SEQ ID NO: 853248 - DNA, 25 bp, Homo sapien
ctcccctggctctttgcaccgccat

SEQ ID NO: 853249 - DNA, 25 bp, Homo sapien
ggctcttgggaccaccatagcaggg

SEQ ID NO: 853250 - DNA, 25 bp, Homo sapien
tagcagggggggaggcaattcccgc

SEQ ID NO: 853251 - DNA, 25 bp, Homo sapien
tggctctttgcaccgccatcgcagg

SEQ ID NO: 853252 - DNA, 25 bp, Homo sapien
gttaggtgtccaagtagaaagttca

SEQ ID NO: 853253 - DNA, 25 bp, Homo sapien
ccatcgttgctcctaagatccttag

SEQ ID NO: 853254 - DNA, 25 bp, Homo sapien
agttcaaatcttccgaccttacgtg

SEQ ID NO: 853255 - DNA, 25 bp, Homo sapien
cttacgtgggatttacgatccgacg

SEQ ID NO: 853256 - DNA, 25 bp, Homo sapien
tggttcccccactggctcttaggac

SEQ ID NO: 853257 - DNA, 25 bp, Homo sapien
cttaggacccccatcgcagaggtgg

SEQ ID NO: 853258 - DNA, 25 bp, Homo sapien
atcgcagaggtgggaggcacccccc

SEQ ID NO: 853259 - DNA, 25 bp, Homo sapien
gacccccatcgcagaggtgggaggc

SEQ ID NO: 853260 - DNA, 25 bp, Homo sapien
ccttacgtgggattactgagagcca

SEQ ID NO: 853261 - DNA, 25 bp, Homo sapien
gcaggtaccttacgtgggattactg

SEQ ID NO: 853262 - DNA, 25 bp, Homo sapien
acgtgggattactgagagccagtcc

SEQ ID NO: 853263 - DNA, 25 bp, Homo sapien
tttgtgatggctgagatccatcccc

SEQ ID NO: 853264 - DNA, 25 bp, Homo sapien
cggcctccctatttgagggctttgg

SEQ ID NO: 853265 - DNA, 25 bp, Homo sapien
acggcctccctatttgagggctttg

SEQ ID NO: 853266 - DNA, 25 bp, Homo sapien
aggacggcctccctatttgagggct

SEQ ID NO: 853267 - DNA, 25 bp, Homo sapien
agcaagtttttcatgagttacaaga

SEQ ID NO: 853268 - DNA, 25 bp, Homo sapien
gcttaggaccccccatcgttgctcc

SEQ ID NO: 853269 - DNA, 25 bp, Homo sapien
ccatcgttgctcctaagatccttag

SEQ ID NO: 853270 - DNA, 25 bp, Homo sapien
gaaagttcaaatcttccgacagcag

SEQ ID NO: 853271 - DNA, 25 bp, Homo sapien
ttccgacagcaggtaccttacgtgg

SEQ ID NO: 853272 - DNA, 25 bp, Homo sapien
gactgtgggtgttagttgtccaagt

SEQ ID NO: 853273 - DNA, 25 bp, Homo sapien
gacaacagcgagtctttcattagtt

SEQ ID NO: 853274 - DNA, 25 bp, Homo sapien
cccgacaacagcgagtctttcatta

SEQ ID NO: 853275 - DNA, 25 bp, Homo sapien
aataagacatgggtccgaacgcagc

SEQ ID NO: 853276 - DNA, 25 bp, Homo sapien
ccttgcgtgggatttacaataagac

SEQ ID NO: 853277 - DNA, 25 bp, Homo sapien
ccatggatattgcaggagcatggag

SEQ ID NO: 853278 - DNA, 25 bp, Homo sapien
gagttgcaatgttgccctctcttga

SEQ ID NO: 853279 - DNA, 25 bp, Homo sapien
ctacagaatagccatggatattgca

SEQ ID NO: 853280 - DNA, 25 bp, Homo sapien
gagcatggagagttgcaatgttgcc

SEQ ID NO: 853281 - DNA, 25 bp, Homo sapien
caccaataggaccagtgcttggtgt

SEQ ID NO: 853282 - DNA, 25 bp, Homo sapien
tactctcatcaccaataggaccagt

SEQ ID NO: 853283 - DNA, 25 bp, Homo sapien
tctcatcaccaataggaccagtgct

SEQ ID NO: 853284 - DNA, 25 bp, Homo sapien
catcaccaataggaccagtgcttgg

SEQ ID NO: 853285 - DNA, 25 bp, Homo sapien
tctcttggcttagcgcaggagaaat

SEQ ID NO: 853286 - DNA, 25 bp, Homo sapien
ggcttagcgcaggagaaatctccat

SEQ ID NO: 853287 - DNA, 25 bp, Homo sapien
ggaagactgttccaaggtacagaaa

SEQ ID NO: 853288 - DNA, 25 bp, Homo sapien
gaaacagcttcgctgccttggtcac

SEQ ID NO: 853289 - DNA, 25 bp, Homo sapien
aaagacattaggtagaaaaactgct

SEQ ID NO: 853290 - DNA, 25 bp, Homo sapien
tttgctacccaaatttaaagctgag

SEQ ID NO: 853291 - DNA, 25 bp, Homo sapien
gctttttaggtacagatacttgcca

SEQ ID NO: 853292 - DNA, 25 bp, Homo sapien
tacttgccaagactgaagaatctag

SEQ ID NO: 853293 - DNA, 25 bp, Homo sapien
gcactgagtaggtggttttggtcat

SEQ ID NO: 853294 - DNA, 25 bp, Homo sapien
ggcactgagtaggtggttttggtca

SEQ ID NO: 853295 - DNA, 25 bp, Homo sapien
ctggatgtgcggatgtctgttttta

SEQ ID NO: 853296 - DNA, 25 bp, Homo sapien
tggatgtgcggatgtctgtttttaa

SEQ ID NO: 853297 - DNA, 25 bp, Homo sapien
ggatgtgcggatgtctgtttttaac

SEQ ID NO: 853298 - DNA, 25 bp, Homo sapien
gtggcgccagatcgcggtcatcgcc

SEQ ID NO: 853299 - DNA, 25 bp, Homo sapien
gctccgtggcgccagatcgcggtca

SEQ ID NO: 853300 - DNA, 25 bp, Homo sapien
gatcgcggtcatcgccgtcccggag

SEQ ID NO: 853301 - DNA, 25 bp, Homo sapien
cggagggagcgggtctgtgtctgca

SEQ ID NO: 853302 - DNA, 25 bp, Homo sapien
aatcaggcgccctcccccagcccac

SEQ ID NO: 853303 - DNA, 25 bp, Homo sapien
ggggaatcaggcgccctcccccagc

SEQ ID NO: 853304 - DNA, 25 bp, Homo sapien
gggaatcaggcgccctcccccagcc

SEQ ID NO: 853305 - DNA, 25 bp, Homo sapien
gaatcaggcgccctcccccagccca

SEQ ID NO: 853306 - DNA, 25 bp, Homo sapien
cgcgcagcgagacgcgtcggccggg

SEQ ID NO: 853307 - DNA, 25 bp, Homo sapien
caaggaggacgtaagagcttctcgg

SEQ ID NO: 853308 - DNA, 25 bp, Homo sapien
caggcgcggagcgatggtgacaagg

SEQ ID NO: 853309 - DNA, 25 bp, Homo sapien
gggctgagcgcgcagcgagacgcgt

SEQ ID NO: 853310 - DNA, 25 bp, Homo sapien
gatgtgataggtccttcccggccgg

SEQ ID NO: 853311 - DNA, 25 bp, Homo sapien
ctctctggatgtgataggtccttcc

SEQ ID NO: 853312 - DNA, 25 bp, Homo sapien
tgtgataggtccttcccggccggga

SEQ ID NO: 853313 - DNA, 25 bp, Homo sapien
tcacaggttcccccctctggagttg

SEQ ID NO: 853314 - DNA, 25 bp, Homo sapien
tgtgtgggtgcataaacgtgcatgc

SEQ ID NO: 853315 - DNA, 25 bp, Homo sapien
tgcccattgggtacttttgctcctc

SEQ ID NO: 853316 - DNA, 25 bp, Homo sapien
agtgtatttcagacgttcaaggaga

SEQ ID NO: 853317 - DNA, 25 bp, Homo sapien
ccctcgactgcaatgtgtgtatccg

SEQ ID NO: 853318 - DNA, 25 bp, Homo sapien
ctgaccataccgcaagcaggacttg

SEQ ID NO: 853319 - DNA, 25 bp, Homo sapien
tgaccataccgcaagcaggacttgg

SEQ ID NO: 853320 - DNA, 25 bp, Homo sapien
gaagacagtgtaagcccttgttccc

SEQ ID NO: 853321 - DNA, 25 bp, Homo sapien
gcccttgttccctgcggctcacaga

SEQ ID NO: 853322 - DNA, 25 bp, Homo sapien
ttggtttcgctgttgctttgaagtc

SEQ ID NO: 853323 - DNA, 25 bp, Homo sapien
tttgaagtcaaagcctgagaatgcc

SEQ ID NO: 853324 - DNA, 25 bp, Homo sapien
tcccgctgcagctgagagtcactgt

SEQ ID NO: 853325 - DNA, 25 bp, Homo sapien
tcatcccgctgcagctgagagtcac

SEQ ID NO: 853326 - DNA, 25 bp, Homo sapien
ctcatcccgctgcagctgagagtca

SEQ ID NO: 853327 - DNA, 25 bp, Homo sapien
ccgctgcagctgagagtcactgttg

SEQ ID NO: 853328 - DNA, 25 bp, Homo sapien
tggctaagaaagccttcaaagtcct

SEQ ID NO: 853329 - DNA, 25 bp, Homo sapien
aaagactgaaatgggtctgcatcaa

SEQ ID NO: 853330 - DNA, 25 bp, Homo sapien
tttaccccaagatggctaagaaagc

SEQ ID NO: 853331 - DNA, 25 bp, Homo sapien
gactgaaatgggtctgcatcaatga

SEQ ID NO: 853332 - DNA, 25 bp, Homo sapien
ttgaagttgtggatgatatcagagc

SEQ ID NO: 853333 - DNA, 25 bp, Homo sapien
ttgagttggacttgaagttgtggat

SEQ ID NO: 853334 - DNA, 25 bp, Homo sapien
ccagcttctgatgcaggaaatccat

SEQ ID NO: 853335 - DNA, 25 bp, Homo sapien
gggatcaagatatccagcttctgat

SEQ ID NO: 853336 - DNA, 25 bp, Homo sapien
gtggtagaaccaggggatcaagata

SEQ ID NO: 853337 - DNA, 25 bp, Homo sapien
ccaggggatcaagatatccagcttc

SEQ ID NO: 853338 - DNA, 25 bp, Homo sapien
ttccataagctagaccagcagttgc

SEQ ID NO: 853339 - DNA, 25 bp, Homo sapien
tgtgagtgattccataagctagacc

SEQ ID NO: 853340 - DNA, 25 bp, Homo sapien
cattgtgagtgattccataagctag

SEQ ID NO: 853341 - DNA, 25 bp, Homo sapien
gagtgattccataagctagaccagc

SEQ ID NO: 853342 - DNA, 25 bp, Homo sapien
gcagctgaattgcacgtccagttca

SEQ ID NO: 853343 - DNA, 25 bp, Homo sapien
tgtatgtgtggagcgtgaagttggg

SEQ ID NO: 853344 - DNA, 25 bp, Homo sapien
gggttgcagctgaattgcacgtcca

SEQ ID NO: 853345 - DNA, 25 bp, Homo sapien
gctgaattgcacgtccagttcatca

SEQ ID NO: 853346 - DNA, 25 bp, Homo sapien
agaatgcagcgggtttccagacccc

SEQ ID NO: 853347 - DNA, 25 bp, Homo sapien
gagaatgcagcgggtttccagaccc

SEQ ID NO: 853348 - DNA, 25 bp, Homo sapien
gcaattgagaatgcagcgggtttcc

SEQ ID NO: 853349 - DNA, 25 bp, Homo sapien
attgagaatgcagcgggtttccaga

SEQ ID NO: 853350 - DNA, 25 bp, Homo sapien
caaacagggtttagccagcgctcac

SEQ ID NO: 853351 - DNA, 25 bp, Homo sapien
ttgtaaggcaaacagggtttagcca

SEQ ID NO: 853352 - DNA, 25 bp, Homo sapien
ggcaaacagggtttagccagcgctc

SEQ ID NO: 853353 - DNA, 25 bp, Homo sapien
aaggcaaacagggtttagccagcgc

SEQ ID NO: 853354 - DNA, 25 bp, Homo sapien
ctcgggatccttcacagccaggtgt

SEQ ID NO: 853355 - DNA, 25 bp, Homo sapien
gggatccttcacagccaggtgtgtg

SEQ ID NO: 853356 - DNA, 25 bp, Homo sapien
tgtgggcagaggagagagtgtggtc

SEQ ID NO: 853357 - DNA, 25 bp, Homo sapien
tgggcagaggagagagtgtggtcat

SEQ ID NO: 853358 - DNA, 25 bp, Homo sapien
gtggtgccccagtgttgggataggg

SEQ ID NO: 853359 - DNA, 25 bp, Homo sapien
tgagtggtgccccagtgttgggata

SEQ ID NO: 853360 - DNA, 25 bp, Homo sapien
tgtgagtggtgccccagtgttggga

SEQ ID NO: 853361 - DNA, 25 bp, Homo sapien
actgtgagtggtgccccagtgttgg

SEQ ID NO: 853362 - DNA, 25 bp, Homo sapien
gggctgaactttagcaggttccact

SEQ ID NO: 853363 - DNA, 25 bp, Homo sapien
tccactagtgctgttgggagctcca

SEQ ID NO: 853364 - DNA, 25 bp, Homo sapien
ccttgtggtcagaccccgggatttg

SEQ ID NO: 853365 - DNA, 25 bp, Homo sapien
cacagagaaaggtcgaacgcttggt

SEQ ID NO: 853366 - DNA, 25 bp, Homo sapien
atcatgaaggtgccctcaaccatag

SEQ ID NO: 853367 - DNA, 25 bp, Homo sapien
catgaaggtgccctcaaccatagca

SEQ ID NO: 853368 - DNA, 25 bp, Homo sapien
tgaaggtgccctcaaccatagcaat

SEQ ID NO: 853369 - DNA, 25 bp, Homo sapien
gaaggtgccctcaaccatagcaata

SEQ ID NO: 853370 - DNA, 25 bp, Homo sapien
tcgtctccaatagtggtaattttta

SEQ ID NO: 853371 - DNA, 25 bp, Homo sapien
gtctccaatagtggtaatttttaca

SEQ ID NO: 853372 - DNA, 25 bp, Homo sapien
tctccaatagtggtaatttttacag

SEQ ID NO: 853373 - DNA, 25 bp, Homo sapien
gcagccctcttgaataatgtccttc

SEQ ID NO: 853374 - DNA, 25 bp, Homo sapien
cggcttttggaagcagatagctcac

SEQ ID NO: 853375 - DNA, 25 bp, Homo sapien
ttttggaagcagatagctcacagca

SEQ ID NO: 853376 - DNA, 25 bp, Homo sapien
gcagatagctcacagcatttgaaga

SEQ ID NO: 853377 - DNA, 25 bp, Homo sapien
gaagcagatagctcacagcatttga

SEQ ID NO: 853378 - DNA, 25 bp, Homo sapien
gatggccccagaagtagatactgag

SEQ ID NO: 853379 - DNA, 25 bp, Homo sapien
tatagtacggtcacattatccagag

SEQ ID NO: 853380 - DNA, 25 bp, Homo sapien
taagacagcttctagtaccatgcct

SEQ ID NO: 853381 - DNA, 25 bp, Homo sapien
tagagcacgttgcaccgagatggcc

SEQ ID NO: 853382 - DNA, 25 bp, Homo sapien
cattggagcctgaccgtcttaaaaa

SEQ ID NO: 853383 - DNA, 25 bp, Homo sapien
gggcacattggagcctgaccgtctt

SEQ ID NO: 853384 - DNA, 25 bp, Homo sapien
tggagcctgaccgtcttaaaaaagc

SEQ ID NO: 853385 - DNA, 25 bp, Homo sapien
cacattggagcctgaccgtcttaaa

SEQ ID NO: 853386 - DNA, 25 bp, Homo sapien
caccaaactaatgccacttccattg

SEQ ID NO: 853387 - DNA, 25 bp, Homo sapien
aaacttcaatgcctgaccctcatgc

SEQ ID NO: 853388 - DNA, 25 bp, Homo sapien
cattgctaagcccactaggacactc

SEQ ID NO: 853389 - DNA, 25 bp, Homo sapien
taggacactccctaaaacttcaatg

SEQ ID NO: 853390 - DNA, 25 bp, Homo sapien
ttttctgatgacacaaacttgatga

SEQ ID NO: 853391 - DNA, 25 bp, Homo sapien
ttttctaatgagaggcatttggtgg

SEQ ID NO: 853392 - DNA, 25 bp, Homo sapien
caaaggcaggccaagaacctggcct

SEQ ID NO: 853393 - DNA, 25 bp, Homo sapien
cctctccgttcccatccgatgcttc

SEQ ID NO: 853394 - DNA, 25 bp, Homo sapien
agattttctaatgagaggcatttgg

SEQ ID NO: 853395 - DNA, 25 bp, Homo sapien
ggttgcatccttggtacagccctct

SEQ ID NO: 853396 - DNA, 25 bp, Homo sapien
caagagccgagggttttgcatatac

SEQ ID NO: 853397 - DNA, 25 bp, Homo sapien
tgcatatactgggtacactgattcc

SEQ ID NO: 853398 - DNA, 25 bp, Homo sapien
tacacttgcaggtcgagccaagagc

SEQ ID NO: 853399 - DNA, 25 bp, Homo sapien
ttcagggaccctctgccagtcgaag

SEQ ID NO: 853400 - DNA, 25 bp, Homo sapien
tcaacatccaaaatttgagtcgtcc

SEQ ID NO: 853401 - DNA, 25 bp, Homo sapien
tctgccagtcgaaggcattgtgtcc

SEQ ID NO: 853402 - DNA, 25 bp, Homo sapien
tgagtcgtccacttcatgatctcct

SEQ ID NO: 853403 - DNA, 25 bp, Homo sapien
tgattccttccacgacgaatcgatc

SEQ ID NO: 853404 - DNA, 25 bp, Homo sapien
agtattgattccttccacgacgaat

SEQ ID NO: 853405 - DNA, 25 bp, Homo sapien
ccagtattgattccttccacgacga

SEQ ID NO: 853406 - DNA, 25 bp, Homo sapien
tattgattccttccacgacgaatcg

SEQ ID NO: 853407 - DNA, 25 bp, Homo sapien
gagcagttgcagcattgggcagtaa

SEQ ID NO: 853408 - DNA, 25 bp, Homo sapien
ctgggccccgtaaggaacagctggt

SEQ ID NO: 853409 - DNA, 25 bp, Homo sapien
tccagatcggtccatgtgagagatg

SEQ ID NO: 853410 - DNA, 25 bp, Homo sapien
tcaaaattccccaggactgcaaggg

SEQ ID NO: 853411 - DNA, 25 bp, Homo sapien
ggcagctgccgggcggaggatctcc

SEQ ID NO: 853412 - DNA, 25 bp, Homo sapien
cagctgccgggcggaggatctcctc

SEQ ID NO: 853413 - DNA, 25 bp, Homo sapien
gacggggcagctgccgggcggagga

SEQ ID NO: 853414 - DNA, 25 bp, Homo sapien
cggggcagctgccgggcggaggatc

SEQ ID NO: 853415 - DNA, 25 bp, Homo sapien
tgcatggtcatgagcagcccaggga

SEQ ID NO: 853416 - DNA, 25 bp, Homo sapien
cgtgcatggtcatgagcagcccagg

SEQ ID NO: 853417 - DNA, 25 bp, Homo sapien
gccgtgcatggtcatgagcagccca

SEQ ID NO: 853418 - DNA, 25 bp, Homo sapien
agccgtgcatggtcatgagcagccc

SEQ ID NO: 853419 - DNA, 25 bp, Homo sapien
gttggacatctgtgtaatacaggtg

SEQ ID NO: 853420 - DNA, 25 bp, Homo sapien
acctattcataaactgccagttgga

SEQ ID NO: 853421 - DNA, 25 bp, Homo sapien
gacatctgtgtaatacaggtgttat

SEQ ID NO: 853422 - DNA, 25 bp, Homo sapien
tattcataaactgccagttggacat

SEQ ID NO: 853423 - DNA, 25 bp, Homo sapien
aaaagatattgcaaacactggatac

SEQ ID NO: 853424 - DNA, 25 bp, Homo sapien
agatattgcaaacactggataccat

SEQ ID NO: 853425 - DNA, 25 bp, Homo sapien
aaagatattgcaaacactggatacc

SEQ ID NO: 853426 - DNA, 25 bp, Homo sapien
aagatattgcaaacactggatacca

SEQ ID NO: 853427 - DNA, 25 bp, Homo sapien
gacatgagtatatcacagaaccaga

SEQ ID NO: 853428 - DNA, 25 bp, Homo sapien
ctatggacatgagtatatcacagaa

SEQ ID NO: 853429 - DNA, 25 bp, Homo sapien
tggacatgagtatatcacagaacca

SEQ ID NO: 853430 - DNA, 25 bp, Homo sapien
atgagtatatcacagaaccagagtc

SEQ ID NO: 853431 - DNA, 25 bp, Homo sapien
cagttgctgccataacagcaggtcc

SEQ ID NO: 853432 - DNA, 25 bp, Homo sapien
gcaaactcatgcaaggcttacggcg

SEQ ID NO: 853433 - DNA, 25 bp, Homo sapien
cttacggcgtttcaccagttgctgc

SEQ ID NO: 853434 - DNA, 25 bp, Homo sapien
aggctacgggacatggcaaactcat

SEQ ID NO: 853435 - DNA, 25 bp, Homo sapien
cctgctttgcggctgggctggcagg

SEQ ID NO: 853436 - DNA, 25 bp, Homo sapien
ctgggctggcaggtgcagctgtttc

SEQ ID NO: 853437 - DNA, 25 bp, Homo sapien
ggctggcaggtgcagctgtttccca

SEQ ID NO: 853438 - DNA, 25 bp, Homo sapien
gctggcaggtgcagctgtttcccat

SEQ ID NO: 853439 - DNA, 25 bp, Homo sapien
ctccacgcgcctaggaagttttgaa

SEQ ID NO: 853440 - DNA, 25 bp, Homo sapien
tggacatgaatcaaaccgcaggagt

SEQ ID NO: 853441 - DNA, 25 bp, Homo sapien
tttgaaggtagagaatctgggcccc

SEQ ID NO: 853442 - DNA, 25 bp, Homo sapien
gcaggagtctccaatagcgtcaggt

SEQ ID NO: 853443 - DNA, 25 bp, Homo sapien
acagaagcctgcagcgtggaggctc

SEQ ID NO: 853444 - DNA, 25 bp, Homo sapien
tcccctcgcgctcgcccagactcgg

SEQ ID NO: 853445 - DNA, 25 bp, Homo sapien
aagcctgcagcgtggaggctcccct

SEQ ID NO: 853446 - DNA, 25 bp, Homo sapien
gctcccctcgcgctcgcccagactc

SEQ ID NO: 853447 - DNA, 25 bp, Homo sapien
tggtcttgagcgtcctgaactgttt

SEQ ID NO: 853448 - DNA, 25 bp, Homo sapien
agctccttttgggtttgctcccgct

SEQ ID NO: 853449 - DNA, 25 bp, Homo sapien
agcactgggcagagcgccctcggag

SEQ ID NO: 853450 - DNA, 25 bp, Homo sapien
ctctgggctgcggattttaccgccc

SEQ ID NO: 853451 - DNA, 25 bp, Homo sapien
taactgattacgtcaaagtcaaaca

SEQ ID NO: 853452 - DNA, 25 bp, Homo sapien
gaataagcaaagctagtctatggtg

SEQ ID NO: 853453 - DNA, 25 bp, Homo sapien
ggcaatgtaacctgtcttaacaggg

SEQ ID NO: 853454 - DNA, 25 bp, Homo sapien
gaaaactattcgtgccatggaagaa

SEQ ID NO: 853455 - DNA, 25 bp, Homo sapien
ctcttgctatctcctgtgcgaatag

SEQ ID NO: 853456 - DNA, 25 bp, Homo sapien
tgcgaatagctctgaaggtctgtat

SEQ ID NO: 853457 - DNA, 25 bp, Homo sapien
tatctcctgtgcgaatagctctgaa

SEQ ID NO: 853458 - DNA, 25 bp, Homo sapien
gaaggtctgtattgcaaatatgaca

SEQ ID NO: 853459 - DNA, 25 bp, Homo sapien
ccggaacccgctgtgtgtgccacat

SEQ ID NO: 853460 - DNA, 25 bp, Homo sapien
tcaggcaggagcaaaacacgagttt

SEQ ID NO: 853461 - DNA, 25 bp, Homo sapien
ttgtcgtgttccgaagctcaggcag

SEQ ID NO: 853462 - DNA, 25 bp, Homo sapien
cacatccgtgtagacagtggacgtg

SEQ ID NO: 853463 - DNA, 25 bp, Homo sapien
gggagtcggccccatgggtggtgca

SEQ ID NO: 853464 - DNA, 25 bp, Homo sapien
gggaaagagttgcagccgggagtcg

SEQ ID NO: 853465 - DNA, 25 bp, Homo sapien
tcaggggctgctgaagtacgagcca

SEQ ID NO: 853466 - DNA, 25 bp, Homo sapien
tgcaggacggcttagggccgggcgg

SEQ ID NO: 853467 - DNA, 25 bp, Homo sapien
gaggagtggacggaccgggtgtaga

SEQ ID NO: 853468 - DNA, 25 bp, Homo sapien
gtagtggcggcttcagggaggagtg

SEQ ID NO: 853469 - DNA, 25 bp, Homo sapien
tggacggaccgggtgtagacctggc

SEQ ID NO: 853470 - DNA, 25 bp, Homo sapien
ctgtgtgtagtggcggcttcaggga

SEQ ID NO: 853471 - DNA, 25 bp, Homo sapien
ctgattttaggaagtcatgttaagc

SEQ ID NO: 853472 - DNA, 25 bp, Homo sapien
tcagaatctgattttaggaagtcat

SEQ ID NO: 853473 - DNA, 25 bp, Homo sapien
ttttaggaagtcatgttaagctggg

SEQ ID NO: 853474 - DNA, 25 bp, Homo sapien
aggaagtcatgttaagctgggtgca

SEQ ID NO: 853475 - DNA, 25 bp, Homo sapien
gctggtgtccggaaagtgtccagaa

SEQ ID NO: 853476 - DNA, 25 bp, Homo sapien
gaatgcgtttggatttccagttgca

SEQ ID NO: 853477 - DNA, 25 bp, Homo sapien
tgaccgccagaacgtcatccaggag

SEQ ID NO: 853478 - DNA, 25 bp, Homo sapien
tccagttgcagttctgagtgggctg

SEQ ID NO: 853479 - DNA, 25 bp, Homo sapien
cagtgtacttgattctgagggaccc

SEQ ID NO: 853480 - DNA, 25 bp, Homo sapien
tgagggaccctgtgttttcatgagc

SEQ ID NO: 853481 - DNA, 25 bp, Homo sapien
ttcatgagctcgcagaacttgttct

SEQ ID NO: 853482 - DNA, 25 bp, Homo sapien
acttgttctgaagctgcggttcttg

SEQ ID NO: 853483 - DNA, 25 bp, Homo sapien
cgtcttggttgtgttttcatagccc

SEQ ID NO: 853484 - DNA, 25 bp, Homo sapien
atagcccttggcaacttgcttctgg

SEQ ID NO: 853485 - DNA, 25 bp, Homo sapien
ggtaataagaacagaggccttcaga

SEQ ID NO: 853486 - DNA, 25 bp, Homo sapien
tctttaatacactttgggcatcctc

SEQ ID NO: 853487 - DNA, 25 bp, Homo sapien
tgattcagcctgtcaaggagtggcc

SEQ ID NO: 853488 - DNA, 25 bp, Homo sapien
tacagcaggcgcaagcagttgcagc

SEQ ID NO: 853489 - DNA, 25 bp, Homo sapien
tctggctcacgatgcaagcaggtgt

SEQ ID NO: 853490 - DNA, 25 bp, Homo sapien
ccgcaaagccgagatctgagaagca

SEQ ID NO: 853491 - DNA, 25 bp, Homo sapien
gaggccttgaattgggcaaaaggac

SEQ ID NO: 853492 - DNA, 25 bp, Homo sapien
ccagagaacaagtagaggtatccca

SEQ ID NO: 853493 - DNA, 25 bp, Homo sapien
ggcttcatccctttaaatcctggtg

SEQ ID NO: 853494 - DNA, 25 bp, Homo sapien
gggtagcctccatatcaattaaaaa

SEQ ID NO: 853495 - DNA, 25 bp, Homo sapien
aagctgggaagtccggcgcaactcc

SEQ ID NO: 853496 - DNA, 25 bp, Homo sapien
gcgctctggattccgggatgcgcca

SEQ ID NO: 853497 - DNA, 25 bp, Homo sapien
cctcctcggcaggtaagagccgcag

SEQ ID NO: 853498 - DNA, 25 bp, Homo sapien
gccaaaggccgtagtgggcgctctg

SEQ ID NO: 853499 - DNA, 25 bp, Homo sapien
ggctgttccggaagattctggcctc

SEQ ID NO: 853500 - DNA, 25 bp, Homo sapien
cacagtatttcagggcagttctcgg

SEQ ID NO: 853501 - DNA, 25 bp, Homo sapien
cagttctcggcacagagggagagat

SEQ ID NO: 853502 - DNA, 25 bp, Homo sapien
ctctcccagtgtgtttcggcgcgag

SEQ ID NO: 853503 - DNA, 25 bp, Homo sapien
tcgcaggcccgtcaggtagatctgg

SEQ ID NO: 853504 - DNA, 25 bp, Homo sapien
ggcactgttgagagccaaccttgaa

SEQ ID NO: 853505 - DNA, 25 bp, Homo sapien
ggtacaacagtgacaccaccatgtt

SEQ ID NO: 853506 - DNA, 25 bp, Homo sapien
tttaggatgacagtgcagctggcac

SEQ ID NO: 853507 - DNA, 25 bp, Homo sapien
catcataaatgctatactctgcaga

SEQ ID NO: 853508 - DNA, 25 bp, Homo sapien
ggcatgatctaccttgttgcaacct

SEQ ID NO: 853509 - DNA, 25 bp, Homo sapien
tcatcttaagacctacccagttacc

SEQ ID NO: 853510 - DNA, 25 bp, Homo sapien
catcaaatgtctactatgagccagc

SEQ ID NO: 853511 - DNA, 25 bp, Homo sapien
tccaaatgcaaacgagggcagctgg

SEQ ID NO: 853512 - DNA, 25 bp, Homo sapien
tatccaaatgcaaacgagggcagct

SEQ ID NO: 853513 - DNA, 25 bp, Homo sapien
ctatccaaatgcaaacgagggcagc

SEQ ID NO: 853514 - DNA, 25 bp, Homo sapien
caaatgcaaacgagggcagctgggg

SEQ ID NO: 853515 - DNA, 25 bp, Homo sapien
taccaggaagcctgccagcaggaag

SEQ ID NO: 853516 - DNA, 25 bp, Homo sapien
aaggttcccagcatcagcccttgga

SEQ ID NO: 853517 - DNA, 25 bp, Homo sapien
caggcctcgcatccagagcaaggtt

SEQ ID NO: 853518 - DNA, 25 bp, Homo sapien
gggcagctgctcgataccaggaagc

SEQ ID NO: 853519 - DNA, 25 bp, Homo sapien
cacagagccttagaaatggctgcag

SEQ ID NO: 853520 - DNA, 25 bp, Homo sapien
tctgccgggctccagaatgtggccg

SEQ ID NO: 853521 - DNA, 25 bp, Homo sapien
tggtaggccgagacccagtggtcca

SEQ ID NO: 853522 - DNA, 25 bp, Homo sapien
tggccgacaaggcaacaccagcctt

SEQ ID NO: 853523 - DNA, 25 bp, Homo sapien
gcttgttgagctgacagtcggtgca

SEQ ID NO: 853524 - DNA, 25 bp, Homo sapien
cagcacaaactcctcgcggtagaag

SEQ ID NO: 853525 - DNA, 25 bp, Homo sapien
tgtacacgaggacttgcttccagtg

SEQ ID NO: 853526 - DNA, 25 bp, Homo sapien
tcttgacaatgatgctggcccagtg

SEQ ID NO: 853527 - DNA, 25 bp, Homo sapien
cttctcccagtaagccagggggtca

SEQ ID NO: 853528 - DNA, 25 bp, Homo sapien
cccagtaagccagggggtcatcctg

SEQ ID NO: 853529 - DNA, 25 bp, Homo sapien
gggctccaacggtctcattctccca

SEQ ID NO: 853530 - DNA, 25 bp, Homo sapien
cctgggctccaacggtctcattctc

SEQ ID NO: 853531 - DNA, 25 bp, Homo sapien
ggccaggtcaccactagagcagatg

SEQ ID NO: 853532 - DNA, 25 bp, Homo sapien
cagggtctgtatccccttggccagg

SEQ ID NO: 853533 - DNA, 25 bp, Homo sapien
caatggcttccaccttgagagaaga

SEQ ID NO: 853534 - DNA, 25 bp, Homo sapien
aagagttttgctctacaagggtggg

SEQ ID NO: 853535 - DNA, 25 bp, Homo sapien
tggaaatggctattctacccttggg

SEQ ID NO: 853536 - DNA, 25 bp, Homo sapien
taggctacctggatgcaagtcttgc

SEQ ID NO: 853537 - DNA, 25 bp, Homo sapien
agtgacatgctccaagttaggcctg

SEQ ID NO: 853538 - DNA, 25 bp, Homo sapien
cacagacaaggtgtatgcaaggacc

SEQ ID NO: 853539 - DNA, 25 bp, Homo sapien
ctgcccgcagacacaaggaggatgg

SEQ ID NO: 853540 - DNA, 25 bp, Homo sapien
tcaggctgcccgcagacacaaggag

SEQ ID NO: 853541 - DNA, 25 bp, Homo sapien
gcttcccgcacgtccacctgcttca

SEQ ID NO: 853542 - DNA, 25 bp, Homo sapien
cgcagacacaaggaggatggcttcc

SEQ ID NO: 853543 - DNA, 25 bp, Homo sapien
tgtagagcataagaagttggccttt

SEQ ID NO: 853544 - DNA, 25 bp, Homo sapien
agctgtagagcataagaagttggcc

SEQ ID NO: 853545 - DNA, 25 bp, Homo sapien
gagcataagaagttggcctttagtc

SEQ ID NO: 853546 - DNA, 25 bp, Homo sapien
tagagcataagaagttggcctttag

SEQ ID NO: 853547 - DNA, 25 bp, Homo sapien
gttccgatgccctgctcgaagccag

SEQ ID NO: 853548 - DNA, 25 bp, Homo sapien
gatgccctgctcgaagccagccagt

SEQ ID NO: 853549 - DNA, 25 bp, Homo sapien
ggcctggttccgatgccctgctcga

SEQ ID NO: 853550 - DNA, 25 bp, Homo sapien
ggtgctcgccctggctctacccagg

SEQ ID NO: 853551 - DNA, 25 bp, Homo sapien
gagatggaagtcggttgggatggcc

SEQ ID NO: 853552 - DNA, 25 bp, Homo sapien
ggaagtcggttgggatggcctgggc

SEQ ID NO: 853553 - DNA, 25 bp, Homo sapien
gatggaagtcggttgggatggcctg

SEQ ID NO: 853554 - DNA, 25 bp, Homo sapien
tggaagtcggttgggatggcctggg

SEQ ID NO: 853555 - DNA, 25 bp, Homo sapien
gagaactcgcctgtgcgtgacttca

SEQ ID NO: 853556 - DNA, 25 bp, Homo sapien
tccaggcccgtcagccgattgttgg

SEQ ID NO: 853557 - DNA, 25 bp, Homo sapien
tgcaagttctcacaggtggccagtg

SEQ ID NO: 853558 - DNA, 25 bp, Homo sapien
gagcgcgttgcctgataggtccagc

SEQ ID NO: 853559 - DNA, 25 bp, Homo sapien
acgctcaccgtcgatgactttcagg

SEQ ID NO: 853560 - DNA, 25 bp, Homo sapien
tcggcacagctggtagaactcacta

SEQ ID NO: 853561 - DNA, 25 bp, Homo sapien
aaagggtctcggagccgcaggtact

SEQ ID NO: 853562 - DNA, 25 bp, Homo sapien
gacgcaaggagctgtccaggtctcg

SEQ ID NO: 853563 - DNA, 25 bp, Homo sapien
tgtgaagcaactaagacgagtgtgg

SEQ ID NO: 853564 - DNA, 25 bp, Homo sapien
gataaagcaatagcccagtgtgcag

SEQ ID NO: 853565 - DNA, 25 bp, Homo sapien
gctctcaggatagggataaagcaat

SEQ ID NO: 853566 - DNA, 25 bp, Homo sapien
tgaccagtgtgaagcaactaagacg

SEQ ID NO: 853567 - DNA, 25 bp, Homo sapien
cactaagttgcaggctggagcagcc

SEQ ID NO: 853568 - DNA, 25 bp, Homo sapien
ttccttccactaagttgcaggctgg

SEQ ID NO: 853569 - DNA, 25 bp, Homo sapien
gaagtaattccttccactaagttgc

SEQ ID NO: 853570 - DNA, 25 bp, Homo sapien
gctgcggacacaggctcacggatgt

SEQ ID NO: 853571 - DNA, 25 bp, Homo sapien
cacatttgcaaggcaggggagtccc

SEQ ID NO: 853572 - DNA, 25 bp, Homo sapien
taagtgcaggagcagtctggagagg

SEQ ID NO: 853573 - DNA, 25 bp, Homo sapien
agtgcaggagcagtctggagaggca

SEQ ID NO: 853574 - DNA, 25 bp, Homo sapien
gggtaagtgcaggagcagtctggag

SEQ ID NO: 853575 - DNA, 25 bp, Homo sapien
aagcatttaatagatgtgtggacaa

SEQ ID NO: 853576 - DNA, 25 bp, Homo sapien
gaagcatttaatagatgtgtggaca

SEQ ID NO: 853577 - DNA, 25 bp, Homo sapien
gagagaccttccttctcagtgtggc

SEQ ID NO: 853578 - DNA, 25 bp, Homo sapien
tgatccctgcggtgtgggaaccaga

SEQ ID NO: 853579 - DNA, 25 bp, Homo sapien
tacccaggagtcgagccggtatttg

SEQ ID NO: 853580 - DNA, 25 bp, Homo sapien
tgtcgatcaaggttgcaggcgccag

SEQ ID NO: 853581 - DNA, 25 bp, Homo sapien
tcctagagttagacaagggagagcc

SEQ ID NO: 853582 - DNA, 25 bp, Homo sapien
gagcctcggagaaagcctggctaca

SEQ ID NO: 853583 - DNA, 25 bp, Homo sapien
ttaacatacatgagagagaaccaca

SEQ ID NO: 853584 - DNA, 25 bp, Homo sapien
tctgaacagccaccttgaaatgtgt

SEQ ID NO: 853585 - DNA, 25 bp, Homo sapien
cctgttgttgctcccctggactggg

SEQ ID NO: 853586 - DNA, 25 bp, Homo sapien
ggagctgagctcatgaatatgccct

SEQ ID NO: 853587 - DNA, 25 bp, Homo sapien
gaacaactggatacgtgagtctact

SEQ ID NO: 853588 - DNA, 25 bp, Homo sapien
gactgggacatgttacctggagctg

SEQ ID NO: 853589 - DNA, 25 bp, Homo sapien
cactaatgcgaatcaatcctgataa

SEQ ID NO: 853590 - DNA, 25 bp, Homo sapien
taatgcgaatcaatcctgataactc

SEQ ID NO: 853591 - DNA, 25 bp, Homo sapien
tagtgacactaatgcgaatcaatcc

SEQ ID NO: 853592 - DNA, 25 bp, Homo sapien
tgacactaatgcgaatcaatcctga

SEQ ID NO: 853593 - DNA, 25 bp, Homo sapien
caggaacagtattccagttaggata

SEQ ID NO: 853594 - DNA, 25 bp, Homo sapien
tagggcgcctcttacgccaaggagg

SEQ ID NO: 853595 - DNA, 25 bp, Homo sapien
gaggacacgatgtggtgagtcacct

SEQ ID NO: 853596 - DNA, 25 bp, Homo sapien
caaatcgtcttggtgcctcagtcaa

SEQ ID NO: 853597 - DNA, 25 bp, Homo sapien
agtctggtagaacctgcagtgagag

SEQ ID NO: 853598 - DNA, 25 bp, Homo sapien
taaatcggcatataagtgaggcaaa

SEQ ID NO: 853599 - DNA, 25 bp, Homo sapien
gcagtgagaggaaataccacctttt

SEQ ID NO: 853600 - DNA, 25 bp, Homo sapien
cgtacccggtatgtatgtgaaccaa

SEQ ID NO: 853601 - DNA, 25 bp, Homo sapien
taacaggagtccgttccaaccacaa

SEQ ID NO: 853602 - DNA, 25 bp, Homo sapien
gaaggaggcctgctaagtcatgtga

SEQ ID NO: 853603 - DNA, 25 bp, Homo sapien
tgtcctgtcgcttccctaaaacttg

SEQ ID NO: 853604 - DNA, 25 bp, Homo sapien
gaggaaaaacccctacagtggcaca

SEQ ID NO: 853605 - DNA, 25 bp, Homo sapien
tacaatttcatgtactttcatgctt

SEQ ID NO: 853606 - DNA, 25 bp, Homo sapien
gtttccagggtagtacaatttcatg

SEQ ID NO: 853607 - DNA, 25 bp, Homo sapien
tgaattgtataattagtcgtaaaaa

SEQ ID NO: 853608 - DNA, 25 bp, Homo sapien
cataaaactcagttttacctcgtag

SEQ ID NO: 853609 - DNA, 25 bp, Homo sapien
gcacgtggggcatttcgcttggaaa

SEQ ID NO: 853610 - DNA, 25 bp, Homo sapien
caaaaaggcccgatcctgcgaactt

SEQ ID NO: 853611 - DNA, 25 bp, Homo sapien
tccgatttgttccaaagtggagcac

SEQ ID NO: 853612 - DNA, 25 bp, Homo sapien
aggtgcgagcctgtgcccatgactc

SEQ ID NO: 853613 - DNA, 25 bp, Homo sapien
ttcccagcgccacgtgactacagga

SEQ ID NO: 853614 - DNA, 25 bp, Homo sapien
gcgacagcggcaggttcgagttcac

SEQ ID NO: 853615 - DNA, 25 bp, Homo sapien
gtccatggagcccgaaggccggcct

SEQ ID NO: 853616 - DNA, 25 bp, Homo sapien
tcgagttcacaactgccaggcccgt

SEQ ID NO: 853617 - DNA, 25 bp, Homo sapien
ggtcacgcgccccgcaggtggagcg

SEQ ID NO: 853618 - DNA, 25 bp, Homo sapien
acgcgccccgcaggtggagcggccc

SEQ ID NO: 853619 - DNA, 25 bp, Homo sapien
cgcgccccgcaggtggagcggcccc

SEQ ID NO: 853620 - DNA, 25 bp, Homo sapien
tcacgcgccccgcaggtggagcggc

SEQ ID NO: 853621 - DNA, 25 bp, Homo sapien
acccccgcagatccagcagcgtccc

SEQ ID NO: 853622 - DNA, 25 bp, Homo sapien
ctgtgcgcaggtgcgctcccccacc

SEQ ID NO: 853623 - DNA, 25 bp, Homo sapien
agatccagcagcgtccccccccgcg

SEQ ID NO: 853624 - DNA, 25 bp, Homo sapien
ccccacccccgcagatccagcagcg

SEQ ID NO: 853625 - DNA, 25 bp, Homo sapien
agtgagccatttcgggtcccacgca

SEQ ID NO: 853626 - DNA, 25 bp, Homo sapien
ttgtactgatgcgtgtcctccgtcc

SEQ ID NO: 853627 - DNA, 25 bp, Homo sapien
cacacgggtcccgttcttgcgagtg

SEQ ID NO: 853628 - DNA, 25 bp, Homo sapien
cccttttgtactgatgcgtgtcctc

SEQ ID NO: 853629 - DNA, 25 bp, Homo sapien
agctggtgtgaccacgactccgtca

SEQ ID NO: 853630 - DNA, 25 bp, Homo sapien
acgactccgtcagaatccccttccg

SEQ ID NO: 853631 - DNA, 25 bp, Homo sapien
ggccagctggtgtgaccacgactcc

SEQ ID NO: 853632 - DNA, 25 bp, Homo sapien
aatccccttccgcatcgcggctggc

SEQ ID NO: 853633 - DNA, 25 bp, Homo sapien
gaatgtgccccttcaacaaggaagc

SEQ ID NO: 853634 - DNA, 25 bp, Homo sapien
ctggtaaggtcacggaacgaattct

SEQ ID NO: 853635 - DNA, 25 bp, Homo sapien
aacgaattctccattctgtggccag

SEQ ID NO: 853636 - DNA, 25 bp, Homo sapien
caaaggccggcctatggcaggaact

SEQ ID NO: 853637 - DNA, 25 bp, Homo sapien
ccccaggtgttagagaaaactgcag

SEQ ID NO: 853638 - DNA, 25 bp, Homo sapien
tgcttcggcccacactccggtagcc

SEQ ID NO: 853639 - DNA, 25 bp, Homo sapien
tcctggggatacttccgcggctgca

SEQ ID NO: 853640 - DNA, 25 bp, Homo sapien
aactgcagtaataaagacaccccta

SEQ ID NO: 853641 - DNA, 25 bp, Homo sapien
taaagcgcctgggtttgcaaagatc

SEQ ID NO: 853642 - DNA, 25 bp, Homo sapien
gacatcaaagatgacgagacctgcc

SEQ ID NO: 853643 - DNA, 25 bp, Homo sapien
ggtgacacagtaagccaacagcaga

SEQ ID NO: 853644 - DNA, 25 bp, Homo sapien
cactaactgcagtctccgtaggagg

SEQ ID NO: 853645 - DNA, 25 bp, Homo sapien
tgctccctacagtgccttatgctgc

SEQ ID NO: 853646 - DNA, 25 bp, Homo sapien
atgccacatccgagctgcacagcaa

SEQ ID NO: 853647 - DNA, 25 bp, Homo sapien
gaagctggacaaacagacactgagc

SEQ ID NO: 853648 - DNA, 25 bp, Homo sapien
ggccactgctccctacagtgcctta

SEQ ID NO: 853649 - DNA, 25 bp, Homo sapien
agagccccggacatggagctagact

SEQ ID NO: 853650 - DNA, 25 bp, Homo sapien
gtcttatgtctttgttgccctggaa

SEQ ID NO: 853651 - DNA, 25 bp, Homo sapien
gctaccccagtgtcagacagggagt

SEQ ID NO: 853652 - DNA, 25 bp, Homo sapien
gggagggactctgatactagaatcc

SEQ ID NO: 853653 - DNA, 25 bp, Homo sapien
gggcccctgcaacgacgttccagca

SEQ ID NO: 853654 - DNA, 25 bp, Homo sapien
ggggcccctgcaacgacgttccagc

SEQ ID NO: 853655 - DNA, 25 bp, Homo sapien
ggcccctgcaacgacgttccagcat

SEQ ID NO: 853656 - DNA, 25 bp, Homo sapien
ggcttgggcaccagactgggccact

SEQ ID NO: 853657 - DNA, 25 bp, Homo sapien
tgggccactgacgtgccttgttgcc

SEQ ID NO: 853658 - DNA, 25 bp, Homo sapien
accagactgggccactgacgtgcct

SEQ ID NO: 853659 - DNA, 25 bp, Homo sapien
tgacgtgccttgttgcctcagcccg

SEQ ID NO: 853660 - DNA, 25 bp, Homo sapien
ctttgcagctgaatgggcccgcaga

SEQ ID NO: 853661 - DNA, 25 bp, Homo sapien
catttgggacaagcgatgggccgct

SEQ ID NO: 853662 - DNA, 25 bp, Homo sapien
tcgaagctgctttcgtcgccagaag

SEQ ID NO: 853663 - DNA, 25 bp, Homo sapien
cacagttgccgcatatgaagggccg

SEQ ID NO: 853664 - DNA, 25 bp, Homo sapien
ctggaaggggcggtcgacggcatct

SEQ ID NO: 853665 - DNA, 25 bp, Homo sapien
ggtcgacggcatctccaccgggccg

SEQ ID NO: 853666 - DNA, 25 bp, Homo sapien
aaggggcggtcgacggcatctccac

SEQ ID NO: 853667 - DNA, 25 bp, Homo sapien
ggcggtcgacggcatctccaccggg

SEQ ID NO: 853668 - DNA, 25 bp, Homo sapien
tgcacgcggcggtgagcgatcaagt

SEQ ID NO: 853669 - DNA, 25 bp, Homo sapien
atcaagttgggcttgtgccggaagc

SEQ ID NO: 853670 - DNA, 25 bp, Homo sapien
ccggtgcgaagtcagatagggctta

SEQ ID NO: 853671 - DNA, 25 bp, Homo sapien
gcttattggtaaagcgcttcccgca

SEQ ID NO: 853672 - DNA, 25 bp, Homo sapien
gctcctgggccggtttcagaggtac

SEQ ID NO: 853673 - DNA, 25 bp, Homo sapien
tgaatcttgctgtgagacagcaggt

SEQ ID NO: 853674 - DNA, 25 bp, Homo sapien
ttcgatcgggtcctgcgggtgctct

SEQ ID NO: 853675 - DNA, 25 bp, Homo sapien
tgggccgacccctcggatcgcttgt

SEQ ID NO: 853676 - DNA, 25 bp, Homo sapien
caccaggtgcgtcttcttgccgaag

SEQ ID NO: 853677 - DNA, 25 bp, Homo sapien
ggtgcgacaccaggttggacttctg

SEQ ID NO: 853678 - DNA, 25 bp, Homo sapien
cagtcgggacacacgaagggccgat

SEQ ID NO: 853679 - DNA, 25 bp, Homo sapien
ttgccgaagttcttcccgcactcgg

SEQ ID NO: 853680 - DNA, 25 bp, Homo sapien
cctcgtcgtcgaaggtctggccaca

SEQ ID NO: 853681 - DNA, 25 bp, Homo sapien
ctcgtcgtcgaaggtctggccacag

SEQ ID NO: 853682 - DNA, 25 bp, Homo sapien
tcgtcgtcgaaggtctggccacaga

SEQ ID NO: 853683 - DNA, 25 bp, Homo sapien
taaggcgttaataccagaggatgga

SEQ ID NO: 853684 - DNA, 25 bp, Homo sapien
agtcaggacggagccttagcacaca

SEQ ID NO: 853685 - DNA, 25 bp, Homo sapien
gggttgacctctctcgctagcaggg

SEQ ID NO: 853686 - DNA, 25 bp, Homo sapien
tccctgcgcttggaagtgggttccc

SEQ ID NO: 853687 - DNA, 25 bp, Homo sapien
cagataaagcgagacagaccaagga

SEQ ID NO: 853688 - DNA, 25 bp, Homo sapien
gacgggtctctccaagtctgggtgc

SEQ ID NO: 853689 - DNA, 25 bp, Homo sapien
tccaagctgtatctagcccagagca

SEQ ID NO: 853690 - DNA, 25 bp, Homo sapien
cccaagtgctgtctaacaaggccag

SEQ ID NO: 853691 - DNA, 25 bp, Homo sapien
aattagaatcatccagggcctcagg

SEQ ID NO: 853692 - DNA, 25 bp, Homo sapien
ggccaggtgtccatatgctagaaat

SEQ ID NO: 853693 - DNA, 25 bp, Homo sapien
tgtcacctaagtgctcaagcagagg

SEQ ID NO: 853694 - DNA, 25 bp, Homo sapien
tccttgccgtgacatgctgagctct

SEQ ID NO: 853695 - DNA, 25 bp, Homo sapien
tttcccatccccataacaagcagtg

SEQ ID NO: 853696 - DNA, 25 bp, Homo sapien
ggcagtgaagcactgacgacaccca

SEQ ID NO: 853697 - DNA, 25 bp, Homo sapien
tgtgtgacctttccgtcctttggac

SEQ ID NO: 853698 - DNA, 25 bp, Homo sapien
gaaggaaccaggcacaatttgactc

SEQ ID NO: 853699 - DNA, 25 bp, Homo sapien
gaactgccaccccgagggcgacttg

SEQ ID NO: 853700 - DNA, 25 bp, Homo sapien
ccgagggcgacttgggcaccgggct

SEQ ID NO: 853701 - DNA, 25 bp, Homo sapien
ccggccctggccattcccggggcag

SEQ ID NO: 853702 - DNA, 25 bp, Homo sapien
tgtggctaaggttaacgggaactgc

SEQ ID NO: 853703 - DNA, 25 bp, Homo sapien
gatatcctcaacgttcttcacagag

SEQ ID NO: 853704 - DNA, 25 bp, Homo sapien
ccgagttcgcggctgctgtgcccat

SEQ ID NO: 853705 - DNA, 25 bp, Homo sapien
acatgtagatatcctcaacgttctt

SEQ ID NO: 853706 - DNA, 25 bp, Homo sapien
gccccaccgagttcgcggctgctgt

SEQ ID NO: 853707 - DNA, 25 bp, Homo sapien
ggtcccagcccaaaccaggtgggca

SEQ ID NO: 853708 - DNA, 25 bp, Homo sapien
agggtggttctgcatgcccctccca

SEQ ID NO: 853709 - DNA, 25 bp, Homo sapien
gtggttctgcatgcccctcccagag

SEQ ID NO: 853710 - DNA, 25 bp, Homo sapien
cagggtggttctgcatgcccctccc

SEQ ID NO: 853711 - DNA, 25 bp, Homo sapien
tggggtgggataagtcagcaggagc

SEQ ID NO: 853712 - DNA, 25 bp, Homo sapien
gctggctggagagacgttacagcaa

SEQ ID NO: 853713 - DNA, 25 bp, Homo sapien
tggctggagagacgttacagcaaga

SEQ ID NO: 853714 - DNA, 25 bp, Homo sapien
ctggggtgggataagtcagcaggag

SEQ ID NO: 853715 - DNA, 25 bp, Homo sapien
gggccataagtcaccgttggatgac

SEQ ID NO: 853716 - DNA, 25 bp, Homo sapien
ccataagtcaccgttggatgacctg

SEQ ID NO: 853717 - DNA, 25 bp, Homo sapien
ggccataagtcaccgttggatgacc

SEQ ID NO: 853718 - DNA, 25 bp, Homo sapien
ataagtcaccgttggatgacctgcg

SEQ ID NO: 853719 - DNA, 25 bp, Homo sapien
gccaaaggcccagtatcaggccctt

SEQ ID NO: 853720 - DNA, 25 bp, Homo sapien
agcaggatccgccactaggcgctaa

SEQ ID NO: 853721 - DNA, 25 bp, Homo sapien
tgccatgacaactgaagaccaacca

SEQ ID NO: 853722 - DNA, 25 bp, Homo sapien
cacaggtatcatctgctgctagtgg

SEQ ID NO: 853723 - DNA, 25 bp, Homo sapien
tttcctctctgctgcccctcgggct

SEQ ID NO: 853724 - DNA, 25 bp, Homo sapien
cggaccacctttcctctctgctgcc

SEQ ID NO: 853725 - DNA, 25 bp, Homo sapien
acctttcctctctgctgcccctcgg

SEQ ID NO: 853726 - DNA, 25 bp, Homo sapien
ggaccacctttcctctctgctgccc

SEQ ID NO: 853727 - DNA, 25 bp, Homo sapien
ggtgaatttaggacgacctgcctgc

SEQ ID NO: 853728 - DNA, 25 bp, Homo sapien
cctgcctgcgtgtgacaaatggtaa

SEQ ID NO: 853729 - DNA, 25 bp, Homo sapien
gcttccgtctttgcagttactcagg

SEQ ID NO: 853730 - DNA, 25 bp, Homo sapien
gaacatgtctgtaacgggctgcacc

SEQ ID NO: 853731 - DNA, 25 bp, Homo sapien
tgtcagaaagagaagcagaagaaag

SEQ ID NO: 853732 - DNA, 25 bp, Homo sapien
gaaagagaagcagaagaaagagaat

SEQ ID NO: 853733 - DNA, 25 bp, Homo sapien
gagaagcagaagaaagagaatgggc

SEQ ID NO: 853734 - DNA, 25 bp, Homo sapien
aagagaagcagaagaaagagaatgg

SEQ ID NO: 853735 - DNA, 25 bp, Homo sapien
cagcgccggctgtgtccctttcctg

SEQ ID NO: 853736 - DNA, 25 bp, Homo sapien
catcagcgccggctgtgtccctttc

SEQ ID NO: 853737 - DNA, 25 bp, Homo sapien
tcccagcatcagcgccggctgtgtc

SEQ ID NO: 853738 - DNA, 25 bp, Homo sapien
ccagcatcagcgccggctgtgtccc

SEQ ID NO: 853739 - DNA, 25 bp, Homo sapien
ccgttgccagccaggccactctcca

SEQ ID NO: 853740 - DNA, 25 bp, Homo sapien
gccgttgccagccaggccactctcc

SEQ ID NO: 853741 - DNA, 25 bp, Homo sapien
gtgccgttgccagccaggccactct

SEQ ID NO: 853742 - DNA, 25 bp, Homo sapien
ctgtgccgttgccagccaggccact

SEQ ID NO: 853743 - DNA, 25 bp, Homo sapien
gatttttgtctcagtcttgggtctc

SEQ ID NO: 853744 - DNA, 25 bp, Homo sapien
cgtttctcttttaccccgctgcctg

SEQ ID NO: 853745 - DNA, 25 bp, Homo sapien
tcctgacatgatattcctgggaggg

SEQ ID NO: 853746 - DNA, 25 bp, Homo sapien
cacgctgccatgttttgcacttgcg

SEQ ID NO: 853747 - DNA, 25 bp, Homo sapien
ggctccttggacaggcacgcagctg

SEQ ID NO: 853748 - DNA, 25 bp, Homo sapien
ctggctccttggacaggcacgcagc

SEQ ID NO: 853749 - DNA, 25 bp, Homo sapien
tggctccttggacaggcacgcagct

SEQ ID NO: 853750 - DNA, 25 bp, Homo sapien
tcttcccgcagtccaggcatacaaa

SEQ ID NO: 853751 - DNA, 25 bp, Homo sapien
agtgaccctcgccggaggaaagcga

SEQ ID NO: 853752 - DNA, 25 bp, Homo sapien
gccccatggtctggcgtggcgggag

SEQ ID NO: 853753 - DNA, 25 bp, Homo sapien
agccccgcatcctgctcagtgggag

SEQ ID NO: 853754 - DNA, 25 bp, Homo sapien
cttgccgcagaggtacggcttctcc

SEQ ID NO: 853755 - DNA, 25 bp, Homo sapien
acttgccgcagaggtacggcttctc

SEQ ID NO: 853756 - DNA, 25 bp, Homo sapien
cacttgccgcagaggtacggcttct

SEQ ID NO: 853757 - DNA, 25 bp, Homo sapien
cgcacttgccgcagaggtacggctt

SEQ ID NO: 853758 - DNA, 25 bp, Homo sapien
tcggggcagcagaagggtcgctcgc

SEQ ID NO: 853759 - DNA, 25 bp, Homo sapien
cgtgtggtgccgctggtggcgcgcc

SEQ ID NO: 853760 - DNA, 25 bp, Homo sapien
cggggcagcagaagggtcgctcgcc

SEQ ID NO: 853761 - DNA, 25 bp, Homo sapien
gtggcgcgccaggttcggcttctgg

SEQ ID NO: 853762 - DNA, 25 bp, Homo sapien
cggggcacgagtgggtggcgggccg

SEQ ID NO: 853763 - DNA, 25 bp, Homo sapien
gtgacggaagcagcgctcgcactcg

SEQ ID NO: 853764 - DNA, 25 bp, Homo sapien
ggtgacggaagcagcgctcgcactc

SEQ ID NO: 853765 - DNA, 25 bp, Homo sapien
actcggggcacgagtgggtggcggg

SEQ ID NO: 853766 - DNA, 25 bp, Homo sapien
gccgcgtcctgaatcagctcgtgca

SEQ ID NO: 853767 - DNA, 25 bp, Homo sapien
ggtcccgggcgtgcgcgcgctggtg

SEQ ID NO: 853768 - DNA, 25 bp, Homo sapien
cgcgctggtggatgcggaggcccac

SEQ ID NO: 853769 - DNA, 25 bp, Homo sapien
ctgaatcagctcgtgcaggccggcg

SEQ ID NO: 853770 - DNA, 25 bp, Homo sapien
gacgaccaccaggtgaagctcttgc

SEQ ID NO: 853771 - DNA, 25 bp, Homo sapien
ggcgggctcagcgacagcgtgggcg

SEQ ID NO: 853772 - DNA, 25 bp, Homo sapien
cagctcttaccgcagctggggcagg

SEQ ID NO: 853773 - DNA, 25 bp, Homo sapien
tcgcctgtgtggttgcgcaggtgcc

SEQ ID NO: 853774 - DNA, 25 bp, Homo sapien
aggcccagcgaggcccgcttgtccc

SEQ ID NO: 853775 - DNA, 25 bp, Homo sapien
tcggcctgcggctggtcgcccggtt

SEQ ID NO: 853776 - DNA, 25 bp, Homo sapien
ggaccgttgggagctccgcggcctc

SEQ ID NO: 853777 - DNA, 25 bp, Homo sapien
ggcctcgcggccaagcccgggatgg

SEQ ID NO: 853778 - DNA, 25 bp, Homo sapien
cgcctgtgtggttgcgccggtgccg

SEQ ID NO: 853779 - DNA, 25 bp, Homo sapien
ggccgcaggcgggacacaggtaggg

SEQ ID NO: 853780 - DNA, 25 bp, Homo sapien
gcaggcgggacacaggtagggccgc

SEQ ID NO: 853781 - DNA, 25 bp, Homo sapien
aagccgcggccgcaggcgggacaca

SEQ ID NO: 853782 - DNA, 25 bp, Homo sapien
tccttggggctgcacgcaggggccg

SEQ ID NO: 853783 - DNA, 25 bp, Homo sapien
ctccttggggctgcacgcaggggcc

SEQ ID NO: 853784 - DNA, 25 bp, Homo sapien
tattggatgtctacgacgtgccagc

SEQ ID NO: 853785 - DNA, 25 bp, Homo sapien
catccttggtatcgccgagtcttgg

SEQ ID NO: 853786 - DNA, 25 bp, Homo sapien
gcaccctttgggacgcttctagaac

SEQ ID NO: 853787 - DNA, 25 bp, Homo sapien
cccgcggtgaggaactcggatcttc

SEQ ID NO: 853788 - DNA, 25 bp, Homo sapien
acacacataccagttctagagtcgg

SEQ ID NO: 853789 - DNA, 25 bp, Homo sapien
cacataccagttctagagtcgggcc

SEQ ID NO: 853790 - DNA, 25 bp, Homo sapien
ataccagttctagagtcgggcccaa

SEQ ID NO: 853791 - DNA, 25 bp, Homo sapien
ccagttctagagtcgggcccaacca

SEQ ID NO: 853792 - DNA, 25 bp, Homo sapien
gaaaggaaagtgagaccacgtggaa

SEQ ID NO: 853793 - DNA, 25 bp, Homo sapien
gcaacaccagactgataaggatcca

SEQ ID NO: 853794 - DNA, 25 bp, Homo sapien
gatccaagccagtcaagacagccag

SEQ ID NO: 853795 - DNA, 25 bp, Homo sapien
tcagcaagggtggttcagaaaggaa

SEQ ID NO: 853796 - DNA, 25 bp, Homo sapien
taaagaacagtgaccagaagctagg

SEQ ID NO: 853797 - DNA, 25 bp, Homo sapien
ggctgagtgctaaccatcatcggca

SEQ ID NO: 853798 - DNA, 25 bp, Homo sapien
tcaaagaacgggacggagatgcagc

SEQ ID NO: 853799 - DNA, 25 bp, Homo sapien
taagccataacagtcagggcggccc

SEQ ID NO: 853800 - DNA, 25 bp, Homo sapien
aggggcaggtcattagagtcagggc

SEQ ID NO: 853801 - DNA, 25 bp, Homo sapien
tggtttcccgtggtcctaagcgctg

SEQ ID NO: 853802 - DNA, 25 bp, Homo sapien
ggggcaggtcattagagtcagggca

SEQ ID NO: 853803 - DNA, 25 bp, Homo sapien
gaggggcaggtcattagagtcaggg

SEQ ID NO: 853804 - DNA, 25 bp, Homo sapien
tagtgaacgaatgccgtgcagtccc

SEQ ID NO: 853805 - DNA, 25 bp, Homo sapien
tcccggcctggtcagtgagtcatac

SEQ ID NO: 853806 - DNA, 25 bp, Homo sapien
tgtcgtaaagatgctcctgcaggac

SEQ ID NO: 853807 - DNA, 25 bp, Homo sapien
gaaaaaagctgcaattaggcctcat

SEQ ID NO: 853808 - DNA, 25 bp, Homo sapien
gtaacccactaggataacaaatctg

SEQ ID NO: 853809 - DNA, 25 bp, Homo sapien
tcttggacttaatgacaatgcctct

SEQ ID NO: 853810 - DNA, 25 bp, Homo sapien
tctcagcatgctccagagtattttg

SEQ ID NO: 853811 - DNA, 25 bp, Homo sapien
gaagtgagaaggacagtaccacccc

SEQ ID NO: 853812 - DNA, 25 bp, Homo sapien
tagcaccatccctattttcctaatc

SEQ ID NO: 853813 - DNA, 25 bp, Homo sapien
cagcgacaggaaagagggtcggacg

SEQ ID NO: 853814 - DNA, 25 bp, Homo sapien
accgcccccagcgacaggaaagagg

SEQ ID NO: 853815 - DNA, 25 bp, Homo sapien
ctattttcctaatcccaaggccagg

SEQ ID NO: 853816 - DNA, 25 bp, Homo sapien
gagccttccgtctccgctgcagcgc

SEQ ID NO: 853817 - DNA, 25 bp, Homo sapien
gaggtctaactctccggcagcccgg

SEQ ID NO: 853818 - DNA, 25 bp, Homo sapien
agtcgccggcgtcgtcgcagccgca

SEQ ID NO: 853819 - DNA, 25 bp, Homo sapien
ctgaacgtcccacggagcgggccct

SEQ ID NO: 853820 - DNA, 25 bp, Homo sapien
taattaagtcccggcgctcccactc

SEQ ID NO: 853821 - DNA, 25 bp, Homo sapien
ggagccacgcaaccctggataaata

SEQ ID NO: 853822 - DNA, 25 bp, Homo sapien
ccccgcggagccacgcaaccctgga

SEQ ID NO: 853823 - DNA, 25 bp, Homo sapien
cggagccacgcaaccctggataaat

SEQ ID NO: 853824 - DNA, 25 bp, Homo sapien
cgcggagccacgcaaccctggataa

SEQ ID NO: 853825 - DNA, 25 bp, Homo sapien
tctgcgctgctcaacgcaaatacgg

SEQ ID NO: 853826 - DNA, 25 bp, Homo sapien
gccggagcaaccctggagaaatatg

SEQ ID NO: 853827 - DNA, 25 bp, Homo sapien
gcattaatcgggagagctgacccca

SEQ ID NO: 853828 - DNA, 25 bp, Homo sapien
aaatacggtaactctcccgcagcga

SEQ ID NO: 853829 - DNA, 25 bp, Homo sapien
tgcaaagacagatcatcaaagtccc

SEQ ID NO: 853830 - DNA, 25 bp, Homo sapien
tcagcccggccctgtgactgggcag

SEQ ID NO: 853831 - DNA, 25 bp, Homo sapien
tcagtcaacctatctgcagagtggg

SEQ ID NO: 853832 - DNA, 25 bp, Homo sapien
ggagacaagtcctacttgcaagaga

SEQ ID NO: 853833 - DNA, 25 bp, Homo sapien
tgaggtcaacatacttgccaaggtc

SEQ ID NO: 853834 - DNA, 25 bp, Homo sapien
cgtcacagagccatgcattccaaag

SEQ ID NO: 853835 - DNA, 25 bp, Homo sapien
caaggtgagcctggactaggcctta

SEQ ID NO: 853836 - DNA, 25 bp, Homo sapien
cggagcagggttattgagccccact

SEQ ID NO: 853837 - DNA, 25 bp, Homo sapien
gtttccaagtcactgaaccagggtg

SEQ ID NO: 853838 - DNA, 25 bp, Homo sapien
agtcactgaaccagggtgtgggctc

SEQ ID NO: 853839 - DNA, 25 bp, Homo sapien
tccaagtcactgaaccagggtgtgg

SEQ ID NO: 853840 - DNA, 25 bp, Homo sapien
caagtcactgaaccagggtgtgggc

SEQ ID NO: 853841 - DNA, 25 bp, Homo sapien
ctgggaattggtgttcctcttcctc

SEQ ID NO: 853842 - DNA, 25 bp, Homo sapien
tgctgggaattggtgttcctcttcc

SEQ ID NO: 853843 - DNA, 25 bp, Homo sapien
gctgggaattggtgttcctcttcct

SEQ ID NO: 853844 - DNA, 25 bp, Homo sapien
cgagggttagccaacccccagcctg

SEQ ID NO: 853845 - DNA, 25 bp, Homo sapien
ccccggaggacgccagctcggtcat

SEQ ID NO: 853846 - DNA, 25 bp, Homo sapien
ggtggatgaccaggcctcgctcgtc

SEQ ID NO: 853847 - DNA, 25 bp, Homo sapien
gggtggtggatgaccaggcctcgct

SEQ ID NO: 853848 - DNA, 25 bp, Homo sapien
ctgcagggtggtggatgaccaggcc

SEQ ID NO: 853849 - DNA, 25 bp, Homo sapien
cgtgcgccttctggtgccgcaccag

SEQ ID NO: 853850 - DNA, 25 bp, Homo sapien
gccgcactcgggacacacgaaggca

SEQ ID NO: 853851 - DNA, 25 bp, Homo sapien
ggttgtgcttgacgctgaaggcctt

SEQ ID NO: 853852 - DNA, 25 bp, Homo sapien
ccgctccggcgtgcgccttctggtg

SEQ ID NO: 853853 - DNA, 25 bp, Homo sapien
gaagggccgctccccggtgtgcgtg

SEQ ID NO: 853854 - DNA, 25 bp, Homo sapien
ccccggtgtgcgtgcgctggtgcac

SEQ ID NO: 853855 - DNA, 25 bp, Homo sapien
ccgctccccggtgtgcgtgcgctgg

SEQ ID NO: 853856 - DNA, 25 bp, Homo sapien
aagggccgctccccggtgtgcgtgc

SEQ ID NO: 853857 - DNA, 25 bp, Homo sapien
tgagcaggttctgcttgaggctgaa

SEQ ID NO: 853858 - DNA, 25 bp, Homo sapien
tgcgctggtgcgtgagcaggttctg

SEQ ID NO: 853859 - DNA, 25 bp, Homo sapien
gcttgaggctgaagcagcggccgca

SEQ ID NO: 853860 - DNA, 25 bp, Homo sapien
tgcttgaggctgaagcagcggccgc

SEQ ID NO: 853861 - DNA, 25 bp, Homo sapien
tgcgctggtggttgagcaggaagcg

SEQ ID NO: 853862 - DNA, 25 bp, Homo sapien
caggaagcgcggctcgcggaagcag

SEQ ID NO: 853863 - DNA, 25 bp, Homo sapien
tgatgggtcttgagcgagccctcgc

SEQ ID NO: 853864 - DNA, 25 bp, Homo sapien
tcatagcacgcgtcctaagtgggcc

SEQ ID NO: 853865 - DNA, 25 bp, Homo sapien
tccaggggtcggggacgcacgtgcg

SEQ ID NO: 853866 - DNA, 25 bp, Homo sapien
tcggggacgcacgtgcggggcggga

SEQ ID NO: 853867 - DNA, 25 bp, Homo sapien
caggggtcggggacgcacgtgcggg

SEQ ID NO: 853868 - DNA, 25 bp, Homo sapien
catctccaggggtcggggacgcacg

SEQ ID NO: 853869 - DNA, 25 bp, Homo sapien
cagagggtcccgagggaggaacgcg

SEQ ID NO: 853870 - DNA, 25 bp, Homo sapien
ggcggcggcccacaccttcaagagc

SEQ ID NO: 853871 - DNA, 25 bp, Homo sapien
cccgagggaggaacgcgagcgggcg

SEQ ID NO: 853872 - DNA, 25 bp, Homo sapien
tcccgagggaggaacgcgagcgggc

SEQ ID NO: 853873 - DNA, 25 bp, Homo sapien
tgctctaggccggatgggccagaga

SEQ ID NO: 853874 - DNA, 25 bp, Homo sapien
ctgctctaggccggatgggccagag

SEQ ID NO: 853875 - DNA, 25 bp, Homo sapien
gggtttgtggaaagtggcctctcca

SEQ ID NO: 853876 - DNA, 25 bp, Homo sapien
ctgaaacatgaagtgaaatgacatc

SEQ ID NO: 853877 - DNA, 25 bp, Homo sapien
tttgtggaaagtggcctctccaagt

SEQ ID NO: 853878 - DNA, 25 bp, Homo sapien
aagtgaaatgacatctcaaggacag

SEQ ID NO: 853879 - DNA, 25 bp, Homo sapien
gacagtctccgaggagccatagcca

SEQ ID NO: 853880 - DNA, 25 bp, Homo sapien
ggtaggcagaggacagtctccgagg

SEQ ID NO: 853881 - DNA, 25 bp, Homo sapien
gcagaggacagtctccgaggagcca

SEQ ID NO: 853882 - DNA, 25 bp, Homo sapien
agaggacagtctccgaggagccata

SEQ ID NO: 853883 - DNA, 25 bp, Homo sapien
agatcaggatcaggtgtggagccgt

SEQ ID NO: 853884 - DNA, 25 bp, Homo sapien
gatcagctggcctaccctgaatctg

SEQ ID NO: 853885 - DNA, 25 bp, Homo sapien
tgtcctagggtttgaatgaatcctc

SEQ ID NO: 853886 - DNA, 25 bp, Homo sapien
tgtggagccgtgacatggccctgcc

SEQ ID NO: 853887 - DNA, 25 bp, Homo sapien
tgggttctgcacctatcgggtctta

SEQ ID NO: 853888 - DNA, 25 bp, Homo sapien
caacttgctgtgttagcttagacca

SEQ ID NO: 853889 - DNA, 25 bp, Homo sapien
gatgggtttcattcagggagtccag

SEQ ID NO: 853890 - DNA, 25 bp, Homo sapien
gaactctagccaagtggtggaccag

SEQ ID NO: 853891 - DNA, 25 bp, Homo sapien
gaaaatctagcccaagggacctctg

SEQ ID NO: 853892 - DNA, 25 bp, Homo sapien
gagaacttgtagcttccaggctgac

SEQ ID NO: 853893 - DNA, 25 bp, Homo sapien
gaaacctgacgcaccattcgttagg

SEQ ID NO: 853894 - DNA, 25 bp, Homo sapien
tcaagacacacacggaagagactgg

SEQ ID NO: 853895 - DNA, 25 bp, Homo sapien
gaaaaggcacccttgagttaactca

SEQ ID NO: 853896 - DNA, 25 bp, Homo sapien
ccactgccccaaggaggtaagagcc

SEQ ID NO: 853897 - DNA, 25 bp, Homo sapien
ggtaagagcctgaggcctccgacat

SEQ ID NO: 853898 - DNA, 25 bp, Homo sapien
atccacttttgacccaggggagcca

SEQ ID NO: 853899 - DNA, 25 bp, Homo sapien
gtcagcaacctgtagaaatatccag

SEQ ID NO: 853900 - DNA, 25 bp, Homo sapien
agtcagctcccgcaggagtcagcaa

SEQ ID NO: 853901 - DNA, 25 bp, Homo sapien
atccaggctggacgaccacttccgt

SEQ ID NO: 853902 - DNA, 25 bp, Homo sapien
tcagtcagctcccgcaggagtcagc

SEQ ID NO: 853903 - DNA, 25 bp, Homo sapien
tacgtaagttgtggtggatggagga

SEQ ID NO: 853904 - DNA, 25 bp, Homo sapien
ccataagcatcaagagcgtgcagct

SEQ ID NO: 853905 - DNA, 25 bp, Homo sapien
tcagggcacctgataggcagccagg

SEQ ID NO: 853906 - DNA, 25 bp, Homo sapien
ggatggaaaattggccccataagca

SEQ ID NO: 853907 - DNA, 25 bp, Homo sapien
aagaagacaggaagaaggcggccaa

SEQ ID NO: 853908 - DNA, 25 bp, Homo sapien
gctggaatgcactttgccatttcct

SEQ ID NO: 853909 - DNA, 25 bp, Homo sapien
tctgtagacacttccttgggcagat

SEQ ID NO: 853910 - DNA, 25 bp, Homo sapien
tgggcagatgcggccatctggtcta

SEQ ID NO: 853911 - DNA, 25 bp, Homo sapien
cagcccctcgtagccggcagcctgg

SEQ ID NO: 853912 - DNA, 25 bp, Homo sapien
cacagcccctcgtagccggcagcct

SEQ ID NO: 853913 - DNA, 25 bp, Homo sapien
gcccctcgtagccggcagcctgggc

SEQ ID NO: 853914 - DNA, 25 bp, Homo sapien
gccacagcccctcgtagccggcagc

SEQ ID NO: 853915 - DNA, 25 bp, Homo sapien
ctgaagaccattgcctccagaagtt

SEQ ID NO: 853916 - DNA, 25 bp, Homo sapien
tggccacagccaagcggatctgaag

SEQ ID NO: 853917 - DNA, 25 bp, Homo sapien
cacagccaagcggatctgaagacca

SEQ ID NO: 853918 - DNA, 25 bp, Homo sapien
caagcggatctgaagaccattgcct

SEQ ID NO: 853919 - DNA, 25 bp, Homo sapien
ggaagataacaccaagaagtctttg

SEQ ID NO: 853920 - DNA, 25 bp, Homo sapien
gataacaccaagaagtctttgtctt

SEQ ID NO: 853921 - DNA, 25 bp, Homo sapien
aagataacaccaagaagtctttgtc

SEQ ID NO: 853922 - DNA, 25 bp, Homo sapien
catggaagataacaccaagaagtct

SEQ ID NO: 853923 - DNA, 25 bp, Homo sapien
gtggaagcaggtctaagctcacaga

SEQ ID NO: 853924 - DNA, 25 bp, Homo sapien
gctcacagaatcaggaagaaggtag

SEQ ID NO: 853925 - DNA, 25 bp, Homo sapien
gattgaaagtggaagcaggtctaag

SEQ ID NO: 853926 - DNA, 25 bp, Homo sapien
agagagattgaaagtggaagcaggt

SEQ ID NO: 853927 - DNA, 25 bp, Homo sapien
cgttccacgagggccactgaaaggc

SEQ ID NO: 853928 - DNA, 25 bp, Homo sapien
gccactgaaaggccagtcctcttca

SEQ ID NO: 853929 - DNA, 25 bp, Homo sapien
cactgaaaggccagtcctcttcagc

SEQ ID NO: 853930 - DNA, 25 bp, Homo sapien
ttccacgagggccactgaaaggcca

SEQ ID NO: 853931 - DNA, 25 bp, Homo sapien
caggctgttgtgggaaccgaacgat

SEQ ID NO: 853932 - DNA, 25 bp, Homo sapien
ttgtgggaaccgaacgatgtggcag

SEQ ID NO: 853933 - DNA, 25 bp, Homo sapien
gaaccgaacgatgtggcagagagtc

SEQ ID NO: 853934 - DNA, 25 bp, Homo sapien
gaacgatgtggcagagagtccagct

SEQ ID NO: 853935 - DNA, 25 bp, Homo sapien
tttttgaaggtgccacagattccag

SEQ ID NO: 853936 - DNA, 25 bp, Homo sapien
tctttttgaaggtgccacagattcc

SEQ ID NO: 853937 - DNA, 25 bp, Homo sapien
ctttttgaaggtgccacagattcca

SEQ ID NO: 853938 - DNA, 25 bp, Homo sapien
cgcttcttacgctgccaactgctaa

SEQ ID NO: 853939 - DNA, 25 bp, Homo sapien
gatgtgacccgttaaccaaaatggc

SEQ ID NO: 853940 - DNA, 25 bp, Homo sapien
cagtggatccttccgcttcttacgc

SEQ ID NO: 853941 - DNA, 25 bp, Homo sapien
tgccaactgctaagatgtgacccgt

SEQ ID NO: 853942 - DNA, 25 bp, Homo sapien
cgagtgcaaattgcccgcttttcca

SEQ ID NO: 853943 - DNA, 25 bp, Homo sapien
cccctgaagccctccgtgctctcag

SEQ ID NO: 853944 - DNA, 25 bp, Homo sapien
cacgagtgcaaattgcccgcttttc

SEQ ID NO: 853945 - DNA, 25 bp, Homo sapien
ttgcccgcttttccaaaggacaggc

SEQ ID NO: 853946 - DNA, 25 bp, Homo sapien
gaaaagatgggagcctacacagcac

SEQ ID NO: 853947 - DNA, 25 bp, Homo sapien
tggaggagctctccacgacgtcaaa

SEQ ID NO: 853948 - DNA, 25 bp, Homo sapien
caaactaaacgggtgcagcatgtgc

SEQ ID NO: 853949 - DNA, 25 bp, Homo sapien
ctcccagcatgaccggcagaaaaga

SEQ ID NO: 853950 - DNA, 25 bp, Homo sapien
cttccctgtgctctctgcgctgaga

SEQ ID NO: 853951 - DNA, 25 bp, Homo sapien
tgaagcgaatgaagccgtggccgca

SEQ ID NO: 853952 - DNA, 25 bp, Homo sapien
gagaaaagctcgcagctgaagcgaa

SEQ ID NO: 853953 - DNA, 25 bp, Homo sapien
cgtggccgcagccaaaatagtgatt

SEQ ID NO: 853954 - DNA, 25 bp, Homo sapien
caggcagtcataagaggcccacaga

SEQ ID NO: 853955 - DNA, 25 bp, Homo sapien
tcaatggtagttaaaagctggcaag

SEQ ID NO: 853956 - DNA, 25 bp, Homo sapien
agagaaggatcacccaaacagagag

SEQ ID NO: 853957 - DNA, 25 bp, Homo sapien
tgattgatagtggtagcaaacagct

SEQ ID NO: 853958 - DNA, 25 bp, Homo sapien
agcaaaggcctaaaagagtcatgtt

SEQ ID NO: 853959 - DNA, 25 bp, Homo sapien
caaaggcctaaaagagtcatgttgc

SEQ ID NO: 853960 - DNA, 25 bp, Homo sapien
gcctaaaagagtcatgttgcttctg

SEQ ID NO: 853961 - DNA, 25 bp, Homo sapien
aggcctaaaagagtcatgttgcttc

SEQ ID NO: 853962 - DNA, 25 bp, Homo sapien
tttattgcagtggtgacttttcttc

SEQ ID NO: 853963 - DNA, 25 bp, Homo sapien
caaagtgccctctttttattgcagt

SEQ ID NO: 853964 - DNA, 25 bp, Homo sapien
ccaagtaagacaaagtgccctcttt

SEQ ID NO: 853965 - DNA, 25 bp, Homo sapien
ggtggtggtttattgccaagtaaga

SEQ ID NO: 853966 - DNA, 25 bp, Homo sapien
tgttaacacgattgacccagttgcc

SEQ ID NO: 853967 - DNA, 25 bp, Homo sapien
aatagaaacaataaggccgggcctg

SEQ ID NO: 853968 - DNA, 25 bp, Homo sapien
gattctcataaagggcagtggtcac

SEQ ID NO: 853969 - DNA, 25 bp, Homo sapien
actactcgggagacagctttttctg

SEQ ID NO: 853970 - DNA, 25 bp, Homo sapien
aatgcagtcggagaggaagttccct

SEQ ID NO: 853971 - DNA, 25 bp, Homo sapien
gggacacacgcgccttccctgggtg

SEQ ID NO: 853972 - DNA, 25 bp, Homo sapien
aggcataaatgcagtcggagaggaa

SEQ ID NO: 853973 - DNA, 25 bp, Homo sapien
agtcggagaggaagttccctgtgca

SEQ ID NO: 853974 - DNA, 25 bp, Homo sapien
ggtgaggggagaatggccggagagc

SEQ ID NO: 853975 - DNA, 25 bp, Homo sapien
aatggccggagagcgaccctcttcc

SEQ ID NO: 853976 - DNA, 25 bp, Homo sapien
ggagaatggccggagagcgaccctc

SEQ ID NO: 853977 - DNA, 25 bp, Homo sapien
agaatggccggagagcgaccctctt

SEQ ID NO: 853978 - DNA, 25 bp, Homo sapien
gaactgggatctcattagaactgca

SEQ ID NO: 853979 - DNA, 25 bp, Homo sapien
caggttatcctcgtgcacattcaaa

SEQ ID NO: 853980 - DNA, 25 bp, Homo sapien
ttcacagagtagcaacatcgccaag

SEQ ID NO: 853981 - DNA, 25 bp, Homo sapien
aaaaagtcaacctgtgccaccaagc

SEQ ID NO: 853982 - DNA, 25 bp, Homo sapien
ttacacatcgcccactataaatgct

SEQ ID NO: 853983 - DNA, 25 bp, Homo sapien
aaaaatgacactgttgattggctaa

SEQ ID NO: 853984 - DNA, 25 bp, Homo sapien
tatgaggtaggcaactaattttaac

SEQ ID NO: 853985 - DNA, 25 bp, Homo sapien
tatttatcacgggattactgtcaat

SEQ ID NO: 853986 - DNA, 25 bp, Homo sapien
gagagtggctctccctatgaaagct

SEQ ID NO: 853987 - DNA, 25 bp, Homo sapien
tcttggatggccacccctccatggt

SEQ ID NO: 853988 - DNA, 25 bp, Homo sapien
ctatgcagatctacaagagagtggc

SEQ ID NO: 853989 - DNA, 25 bp, Homo sapien
tatgaaagcttcgtacagcaccctc

SEQ ID NO: 853990 - DNA, 25 bp, Homo sapien
gctttcctgacacaggctcccgctt

SEQ ID NO: 853991 - DNA, 25 bp, Homo sapien
tttcctgacacaggctcccgcttgt

SEQ ID NO: 853992 - DNA, 25 bp, Homo sapien
ctttcctgacacaggctcccgcttg

SEQ ID NO: 853993 - DNA, 25 bp, Homo sapien
tgttgaaaatgcagtatcggccctc

SEQ ID NO: 853994 - DNA, 25 bp, Homo sapien
cccttgtgaaatggccgatggcaat

SEQ ID NO: 853995 - DNA, 25 bp, Homo sapien
caaacacttgttggatgcccttggc

SEQ ID NO: 853996 - DNA, 25 bp, Homo sapien
gaagttcacatgatagggtcctccg

SEQ ID NO: 853997 - DNA, 25 bp, Homo sapien
tcatggagtgggtaggtagacaacc

SEQ ID NO: 853998 - DNA, 25 bp, Homo sapien
ggaagtgacttttagctgatgcaga

SEQ ID NO: 853999 - DNA, 25 bp, Homo sapien
taccttatgatcagcaggaagtcac

SEQ ID NO: 854000 - DNA, 25 bp, Homo sapien
cacagggcaaggagtcaagccaaat

SEQ ID NO: 854001 - DNA, 25 bp, Homo sapien
ctgtggcttgtctccctcttgagat

SEQ ID NO: 854002 - DNA, 25 bp, Homo sapien
gagatgcagcttcattcacacaatc

SEQ ID NO: 854003 - DNA, 25 bp, Homo sapien
ggcttgtctccctcttgagatgcag

SEQ ID NO: 854004 - DNA, 25 bp, Homo sapien
cttgtctccctcttgagatgcagct

SEQ ID NO: 854005 - DNA, 25 bp, Homo sapien
tgggaatctaatgcccacgttgagg

SEQ ID NO: 854006 - DNA, 25 bp, Homo sapien
tgtttccatgttggtagaatgggaa

SEQ ID NO: 854007 - DNA, 25 bp, Homo sapien
tttccatgttggtagaatgggaatc

SEQ ID NO: 854008 - DNA, 25 bp, Homo sapien
tctgtttccatgttggtagaatggg

SEQ ID NO: 854009 - DNA, 25 bp, Homo sapien
ctgatgtccccggattctgctcggg

SEQ ID NO: 854010 - DNA, 25 bp, Homo sapien
tccccggattctgctcgggtcctgt

SEQ ID NO: 854011 - DNA, 25 bp, Homo sapien
gattctgctcgggtcctgtggactg

SEQ ID NO: 854012 - DNA, 25 bp, Homo sapien
tctgctcgggtcctgtggactgcag

SEQ ID NO: 854013 - DNA, 25 bp, Homo sapien
ctgcactttttccagcaccgcgttt

SEQ ID NO: 854014 - DNA, 25 bp, Homo sapien
agcaccgcgtttccccacaaggagg

SEQ ID NO: 854015 - DNA, 25 bp, Homo sapien
taaatccggtctgaaaggcctgcct

SEQ ID NO: 854016 - DNA, 25 bp, Homo sapien
gcgtttccccacaaggaggactgtc

SEQ ID NO: 854017 - DNA, 25 bp, Homo sapien
tttaaagatgagatgtccggagcat

SEQ ID NO: 854018 - DNA, 25 bp, Homo sapien
gagcatcaatgatcgaaactttctt

SEQ ID NO: 854019 - DNA, 25 bp, Homo sapien
gaagctctgggttactgactgctca

SEQ ID NO: 854020 - DNA, 25 bp, Homo sapien
tctaacttctgagtcaatgttcttt

SEQ ID NO: 854021 - DNA, 25 bp, Homo sapien
aaaattgttttggatggtgctcagc

SEQ ID NO: 854022 - DNA, 25 bp, Homo sapien
tacacttctggatgagaccatagag

SEQ ID NO: 854023 - DNA, 25 bp, Homo sapien
cctggtaagaagtatgatcatgtac

SEQ ID NO: 854024 - DNA, 25 bp, Homo sapien
cttagtgtaaaagcccagtggtgtc

SEQ ID NO: 854025 - DNA, 25 bp, Homo sapien
tgcccggtagttgaaggcactatat

SEQ ID NO: 854026 - DNA, 25 bp, Homo sapien
ttttttccaggagctcgtccgcctg

SEQ ID NO: 854027 - DNA, 25 bp, Homo sapien
tcttctcctgttgcccggtagttga

SEQ ID NO: 854028 - DNA, 25 bp, Homo sapien
tgttcccattctgatgcaccatgct

SEQ ID NO: 854029 - DNA, 25 bp, Homo sapien
aagtgggaaagattcgtgaccatgg

SEQ ID NO: 854030 - DNA, 25 bp, Homo sapien
gaaagattcgtgaccatgggctgat

SEQ ID NO: 854031 - DNA, 25 bp, Homo sapien
tgggaaagattcgtgaccatgggct

SEQ ID NO: 854032 - DNA, 25 bp, Homo sapien
aaagtgggaaagattcgtgaccatg

SEQ ID NO: 854033 - DNA, 25 bp, Homo sapien
tccttttcgacatccagcatctggt

SEQ ID NO: 854034 - DNA, 25 bp, Homo sapien
cccggagccgagaggtgaagacgag

SEQ ID NO: 854035 - DNA, 25 bp, Homo sapien
ccaggatagagttcccggtcgcact

SEQ ID NO: 854036 - DNA, 25 bp, Homo sapien
tgaagacgaggctccccaggataga

SEQ ID NO: 854037 - DNA, 25 bp, Homo sapien
ggacaaacagcgcttgacctcctct

SEQ ID NO: 854038 - DNA, 25 bp, Homo sapien
gacaaacagcgcttgacctcctctt

SEQ ID NO: 854039 - DNA, 25 bp, Homo sapien
agcaggacaaacagcgcttgacctc

SEQ ID NO: 854040 - DNA, 25 bp, Homo sapien
aacagcgcttgacctcctcttctaa

SEQ ID NO: 854041 - DNA, 25 bp, Homo sapien
tccgggtgaacagcataatcgcgta

SEQ ID NO: 854042 - DNA, 25 bp, Homo sapien
gcgtatttcgtaaagtctgctccaa

SEQ ID NO: 854043 - DNA, 25 bp, Homo sapien
cagtttcgccacagctgttttgtcc

SEQ ID NO: 854044 - DNA, 25 bp, Homo sapien
atggcctccagtttcgccacagctg

SEQ ID NO: 854045 - DNA, 25 bp, Homo sapien
cacaaactcgccgcccacacttttt

SEQ ID NO: 854046 - DNA, 25 bp, Homo sapien
agcacaaactcgccgcccacacttt

SEQ ID NO: 854047 - DNA, 25 bp, Homo sapien
aaagcacaaactcgccgcccacact

SEQ ID NO: 854048 - DNA, 25 bp, Homo sapien
taaaagcacaaactcgccgcccaca

SEQ ID NO: 854049 - DNA, 25 bp, Homo sapien
cttgggacatttcctggacattttt

SEQ ID NO: 854050 - DNA, 25 bp, Homo sapien
tcttttctcagatcattgacctttg

SEQ ID NO: 854051 - DNA, 25 bp, Homo sapien
tttaattagtttgctgacgttctcc

SEQ ID NO: 854052 - DNA, 25 bp, Homo sapien
tgtgtatggggatacccggaccacc

SEQ ID NO: 854053 - DNA, 25 bp, Homo sapien
gatcccctgggttgttgtacgacta

SEQ ID NO: 854054 - DNA, 25 bp, Homo sapien
gctgccctggtctcatgtatctgga

SEQ ID NO: 854055 - DNA, 25 bp, Homo sapien
tcacaaggcgggatgcatttgcctc

SEQ ID NO: 854056 - DNA, 25 bp, Homo sapien
tcgcatcccaaaggagacaggagag

SEQ ID NO: 854057 - DNA, 25 bp, Homo sapien
tcctcagggacagccagcaatggaa

SEQ ID NO: 854058 - DNA, 25 bp, Homo sapien
cacatctaggcgtggaacgtgaaga

SEQ ID NO: 854059 - DNA, 25 bp, Homo sapien
gaacaaaactgggatgttgacgccc

SEQ ID NO: 854060 - DNA, 25 bp, Homo sapien
tattcctcggcttcctgacaggaga

SEQ ID NO: 854061 - DNA, 25 bp, Homo sapien
ttaatgttgacggtaacctgatatt

SEQ ID NO: 854062 - DNA, 25 bp, Homo sapien
taatgttgacggtaacctgatattg

SEQ ID NO: 854063 - DNA, 25 bp, Homo sapien
aatgttgacggtaacctgatattgt

SEQ ID NO: 854064 - DNA, 25 bp, Homo sapien
ccaaaagtattaatggcaacagtcc

SEQ ID NO: 854065 - DNA, 25 bp, Homo sapien
tgttaagggttatatggaatccaaa

SEQ ID NO: 854066 - DNA, 25 bp, Homo sapien
gcataacacgcaataggcagctttt

SEQ ID NO: 854067 - DNA, 25 bp, Homo sapien
gtgtctacggcacacacattttcta

SEQ ID NO: 854068 - DNA, 25 bp, Homo sapien
tgaattcataatgattcatctttat

SEQ ID NO: 854069 - DNA, 25 bp, Homo sapien
tttgattcaactaaatatatttaca

SEQ ID NO: 854070 - DNA, 25 bp, Homo sapien
catctttattatttgattcaactaa

SEQ ID NO: 854071 - DNA, 25 bp, Homo sapien
gaattcataatgattcatctttatt

SEQ ID NO: 854072 - DNA, 25 bp, Homo sapien
caaaggtgtttagcgcatgctccaa

SEQ ID NO: 854073 - DNA, 25 bp, Homo sapien
caatacccagtaggccttgcagtgt

SEQ ID NO: 854074 - DNA, 25 bp, Homo sapien
tgaacagccagtggagccaaaagtg

SEQ ID NO: 854075 - DNA, 25 bp, Homo sapien
aaagtggtgcccgtgagaacctcat

SEQ ID NO: 854076 - DNA, 25 bp, Homo sapien
tgttggtcagaacgtagttacaaac

SEQ ID NO: 854077 - DNA, 25 bp, Homo sapien
tacttctcggatgttggtcagaacg

SEQ ID NO: 854078 - DNA, 25 bp, Homo sapien
ccacagtacttctcggatgttggtc

SEQ ID NO: 854079 - DNA, 25 bp, Homo sapien
cggatgttggtcagaacgtagttac

SEQ ID NO: 854080 - DNA, 25 bp, Homo sapien
cactggcagcctgtagggagtcgct

SEQ ID NO: 854081 - DNA, 25 bp, Homo sapien
ccgctaagtaggatatatctgcatc

SEQ ID NO: 854082 - DNA, 25 bp, Homo sapien
gagtcgctggccgtcgtcgccgcta

SEQ ID NO: 854083 - DNA, 25 bp, Homo sapien
tcgtcgccgctaagtaggatatatc

SEQ ID NO: 854084 - DNA, 25 bp, Homo sapien
tactgtgagttaaaagtgtctgtac

SEQ ID NO: 854085 - DNA, 25 bp, Homo sapien
tgtgagttaaaagtgtctgtaccgc

SEQ ID NO: 854086 - DNA, 25 bp, Homo sapien
ggaggctgcttgagctgttgctttt

SEQ ID NO: 854087 - DNA, 25 bp, Homo sapien
tttcaggttttctccaaggaggctg

SEQ ID NO: 854088 - DNA, 25 bp, Homo sapien
gtgccttgtccctcctaagggcaga

SEQ ID NO: 854089 - DNA, 25 bp, Homo sapien
agcccaatagcaccagaccctcttc

SEQ ID NO: 854090 - DNA, 25 bp, Homo sapien
tctatgcagtgctgcttagcacagt

SEQ ID NO: 854091 - DNA, 25 bp, Homo sapien
ccacagcaccttctatgcagtgctg

SEQ ID NO: 854092 - DNA, 25 bp, Homo sapien
gtgtctatcacaacagccagtgagt

SEQ ID NO: 854093 - DNA, 25 bp, Homo sapien
gtgagtggagggtgcactatgcagc

SEQ ID NO: 854094 - DNA, 25 bp, Homo sapien
tctgtcttaggagcccttaatttct

SEQ ID NO: 854095 - DNA, 25 bp, Homo sapien
tacaaatctgtcttaggagccctta

SEQ ID NO: 854096 - DNA, 25 bp, Homo sapien
accagaacgatcctcagggagcggt

SEQ ID NO: 854097 - DNA, 25 bp, Homo sapien
tcagggagcggtcctcactctcagc

SEQ ID NO: 854098 - DNA, 25 bp, Homo sapien
cctcagggagcggtcctcactctca

SEQ ID NO: 854099 - DNA, 25 bp, Homo sapien
ctaccagaacgatcctcagggagcg

SEQ ID NO: 854100 - DNA, 25 bp, Homo sapien
ccaaggatggtgttcgctgttgcac

SEQ ID NO: 854101 - DNA, 25 bp, Homo sapien
tgtctacaacaagaaggtctctccc

SEQ ID NO: 854102 - DNA, 25 bp, Homo sapien
tctccttggtgtcaaagagccctgg

SEQ ID NO: 854103 - DNA, 25 bp, Homo sapien
gttcttggtaacagcttgggcagca

SEQ ID NO: 854104 - DNA, 25 bp, Homo sapien
agctccaccaactcctgcacttgac

SEQ ID NO: 854105 - DNA, 25 bp, Homo sapien
gctccaccaactcctgcacttgact

SEQ ID NO: 854106 - DNA, 25 bp, Homo sapien
agtaagccccttcgttgcactgcac

SEQ ID NO: 854107 - DNA, 25 bp, Homo sapien
cagaaaagtaagccccttcgttgca

SEQ ID NO: 854108 - DNA, 25 bp, Homo sapien
tgtgtccttgtatatgtcatcagaa

SEQ ID NO: 854109 - DNA, 25 bp, Homo sapien
ctctgtgtccttgtatatgtcatca

SEQ ID NO: 854110 - DNA, 25 bp, Homo sapien
atttaattggtcagtgtagattttc

SEQ ID NO: 854111 - DNA, 25 bp, Homo sapien
gacaaaaacctatgccatatttctg

SEQ ID NO: 854112 - DNA, 25 bp, Homo sapien
atttcgacaaaaacctatgccatat

SEQ ID NO: 854113 - DNA, 25 bp, Homo sapien
tttcgacaaaaacctatgccatatt

SEQ ID NO: 854114 - DNA, 25 bp, Homo sapien
tcgacaaaaacctatgccatatttc

SEQ ID NO: 854115 - DNA, 25 bp, Homo sapien
ggaaggaggtatttctctaactatc

SEQ ID NO: 854116 - DNA, 25 bp, Homo sapien
tcatccattaacaaatcacagtaaa

SEQ ID NO: 854117 - DNA, 25 bp, Homo sapien
aatgataccttaataaagctaaggg

SEQ ID NO: 854118 - DNA, 25 bp, Homo sapien
actatctttgcaaaatacaattcat

SEQ ID NO: 854119 - DNA, 25 bp, Homo sapien
ttatggacgaacattgcttaatttt

SEQ ID NO: 854120 - DNA, 25 bp, Homo sapien
gcttaattttaggtgttcctgcagc

SEQ ID NO: 854121 - DNA, 25 bp, Homo sapien
ttgcttaattttaggtgttcctgca

SEQ ID NO: 854122 - DNA, 25 bp, Homo sapien
cattgcttaattttaggtgttcctg

SEQ ID NO: 854123 - DNA, 25 bp, Homo sapien
gagaaggtttacttgtatcatcaac

SEQ ID NO: 854124 - DNA, 25 bp, Homo sapien
tgtatcatcaactatggtaaggatc

SEQ ID NO: 854125 - DNA, 25 bp, Homo sapien
catcaactatggtaaggatcttcct

SEQ ID NO: 854126 - DNA, 25 bp, Homo sapien
ctggaaatagtgcatgagaaggttt

SEQ ID NO: 854127 - DNA, 25 bp, Homo sapien
ctaaaagatctaactgtggcattgt

SEQ ID NO: 854128 - DNA, 25 bp, Homo sapien
tctaactgtggcattgtaaatgtca

SEQ ID NO: 854129 - DNA, 25 bp, Homo sapien
aatattccaatgagcggagctgaga

SEQ ID NO: 854130 - DNA, 25 bp, Homo sapien
gtcaatattccaatgagcggagctg

SEQ ID NO: 854131 - DNA, 25 bp, Homo sapien
tcaagtagcatctttaccaaagatt

SEQ ID NO: 854132 - DNA, 25 bp, Homo sapien
tttgggcagaatcttccactggctt

SEQ ID NO: 854133 - DNA, 25 bp, Homo sapien
caaagatttgggcagaatcttccac

SEQ ID NO: 854134 - DNA, 25 bp, Homo sapien
tagcatctttaccaaagatttgggc

SEQ ID NO: 854135 - DNA, 25 bp, Homo sapien
atactaagccaggatgttgagaaac

SEQ ID NO: 854136 - DNA, 25 bp, Homo sapien
cacacaatactaagccaggatgttg

SEQ ID NO: 854137 - DNA, 25 bp, Homo sapien
ttttgcacacaatactaagccagga

SEQ ID NO: 854138 - DNA, 25 bp, Homo sapien
gattttgcacacaatactaagccag

SEQ ID NO: 854139 - DNA, 25 bp, Homo sapien
gttgaagctcatactgccgtattgg

SEQ ID NO: 854140 - DNA, 25 bp, Homo sapien
ctggggttgaagctcatactgccgt

SEQ ID NO: 854141 - DNA, 25 bp, Homo sapien
gggttgaagctcatactgccgtatt

SEQ ID NO: 854142 - DNA, 25 bp, Homo sapien
tggggttgaagctcatactgccgta

SEQ ID NO: 854143 - DNA, 25 bp, Homo sapien
tggggagcactgaatgccctctcac

SEQ ID NO: 854144 - DNA, 25 bp, Homo sapien
ctggggagcactgaatgccctctca

SEQ ID NO: 854145 - DNA, 25 bp, Homo sapien
tctggggagcactgaatgccctctc

SEQ ID NO: 854146 - DNA, 25 bp, Homo sapien
actaacacaattctcaattgggaat

SEQ ID NO: 854147 - DNA, 25 bp, Homo sapien
ttctcaattgggaatttctgggctc

SEQ ID NO: 854148 - DNA, 25 bp, Homo sapien
caattctcaattgggaatttctggg

SEQ ID NO: 854149 - DNA, 25 bp, Homo sapien
tgctccggttttacccactaacaca

SEQ ID NO: 854150 - DNA, 25 bp, Homo sapien
gcggtcaccgaaaatgtccatcaag

SEQ ID NO: 854151 - DNA, 25 bp, Homo sapien
tgtttaacgcacagtagcggtcacc

SEQ ID NO: 854152 - DNA, 25 bp, Homo sapien
tcctcagtgtaacggcccagtggaa

SEQ ID NO: 854153 - DNA, 25 bp, Homo sapien
gaatgcagcgaataatctccttgga

SEQ ID NO: 854154 - DNA, 25 bp, Homo sapien
cctattagtgtagcagccttccttg

SEQ ID NO: 854155 - DNA, 25 bp, Homo sapien
tcctccgccctttggtacatcctat

SEQ ID NO: 854156 - DNA, 25 bp, Homo sapien
ggtacatcctattagtgtagcagcc

SEQ ID NO: 854157 - DNA, 25 bp, Homo sapien
cctttggtacatcctattagtgtag

SEQ ID NO: 854158 - DNA, 25 bp, Homo sapien
tctcttatccgcgctttctctctct

SEQ ID NO: 854159 - DNA, 25 bp, Homo sapien
cctctcttatccgcgctttctctct

SEQ ID NO: 854160 - DNA, 25 bp, Homo sapien
gaagcaatctgtaacgctgtcatga

SEQ ID NO: 854161 - DNA, 25 bp, Homo sapien
gttcttgccctttgctgccttacag

SEQ ID NO: 854162 - DNA, 25 bp, Homo sapien
tgccttacagcatagtgagcctcct

SEQ ID NO: 854163 - DNA, 25 bp, Homo sapien
cgcgaacagacgtaacaaaataaag

SEQ ID NO: 854164 - DNA, 25 bp, Homo sapien
ccttagttacgagtgcctgagagac

SEQ ID NO: 854165 - DNA, 25 bp, Homo sapien
ggcaaggttgccagagaatatgcag

SEQ ID NO: 854166 - DNA, 25 bp, Homo sapien
gaattcacaaggtagcaagcaccaa

SEQ ID NO: 854167 - DNA, 25 bp, Homo sapien
gagacagaaactagagcactcgact

SEQ ID NO: 854168 - DNA, 25 bp, Homo sapien
tgtggatgacctgccaaacaataag

SEQ ID NO: 854169 - DNA, 25 bp, Homo sapien
gggagattatctgccaacatagaaa

SEQ ID NO: 854170 - DNA, 25 bp, Homo sapien
gaggttcgtcaaagagtttctacag

SEQ ID NO: 854171 - DNA, 25 bp, Homo sapien
gaatttgtagagatcgattttccag

SEQ ID NO: 854172 - DNA, 25 bp, Homo sapien
acaggataaagaaaacatggcccat

SEQ ID NO: 854173 - DNA, 25 bp, Homo sapien
gatagacaggataaagaaaacatgg

SEQ ID NO: 854174 - DNA, 25 bp, Homo sapien
aggataaagaaaacatggcccatat

SEQ ID NO: 854175 - DNA, 25 bp, Homo sapien
tagacaggataaagaaaacatggcc

SEQ ID NO: 854176 - DNA, 25 bp, Homo sapien
aatgcagcaacactacttcctgtgg

SEQ ID NO: 854177 - DNA, 25 bp, Homo sapien
gtgaatgcagcaacactacttcctg

SEQ ID NO: 854178 - DNA, 25 bp, Homo sapien
gaatgcagcaacactacttcctgtg

SEQ ID NO: 854179 - DNA, 25 bp, Homo sapien
tgaatgcagcaacactacttcctgt

SEQ ID NO: 854180 - DNA, 25 bp, Homo sapien
acagccaccgtgaggactccggtct

SEQ ID NO: 854181 - DNA, 25 bp, Homo sapien
ccgctgaacagccaccgtgaggact

SEQ ID NO: 854182 - DNA, 25 bp, Homo sapien
gctgaacagccaccgtgaggactcc

SEQ ID NO: 854183 - DNA, 25 bp, Homo sapien
gaacagccaccgtgaggactccggt

SEQ ID NO: 854184 - DNA, 25 bp, Homo sapien
aaaccgagactccagtcggtcttct

SEQ ID NO: 854185 - DNA, 25 bp, Homo sapien
gatccttcacccttgtttattttgc

SEQ ID NO: 854186 - DNA, 25 bp, Homo sapien
cccaacatcatcagaagagccaaac

SEQ ID NO: 854187 - DNA, 25 bp, Homo sapien
tagctgtgggagttagaataagatc

SEQ ID NO: 854188 - DNA, 25 bp, Homo sapien
tattttgccccaacatcatcagaag

SEQ ID NO: 854189 - DNA, 25 bp, Homo sapien
gaggcagccaaattgcacgtttaac

SEQ ID NO: 854190 - DNA, 25 bp, Homo sapien
ggaagcaggcattacattacacatt

SEQ ID NO: 854191 - DNA, 25 bp, Homo sapien
tggcctcacagtagacatgcaatgg

SEQ ID NO: 854192 - DNA, 25 bp, Homo sapien
tacaccgcgctggagcttgcttaga

SEQ ID NO: 854193 - DNA, 25 bp, Homo sapien
tgtctcttgtagcaactctggggtt

SEQ ID NO: 854194 - DNA, 25 bp, Homo sapien
ctcttgtagcaactctggggtttag

SEQ ID NO: 854195 - DNA, 25 bp, Homo sapien
tctcttgtagcaactctggggttta

SEQ ID NO: 854196 - DNA, 25 bp, Homo sapien
atgtctcttgtagcaactctggggt

SEQ ID NO: 854197 - DNA, 25 bp, Homo sapien
gaaaacttcgcttgccagagggaca

SEQ ID NO: 854198 - DNA, 25 bp, Homo sapien
ttgagcagttatagaagccacctgg

SEQ ID NO: 854199 - DNA, 25 bp, Homo sapien
cagagggacaatgttgggccttcca

SEQ ID NO: 854200 - DNA, 25 bp, Homo sapien
caaactgtcacctagggaggtccca

SEQ ID NO: 854201 - DNA, 25 bp, Homo sapien
ctgtgaggagcaagtttactgtgtt

SEQ ID NO: 854202 - DNA, 25 bp, Homo sapien
tgggaacccagcttcgattcaaatg

SEQ ID NO: 854203 - DNA, 25 bp, Homo sapien
caagtcttagtcaaggtctgggaac

SEQ ID NO: 854204 - DNA, 25 bp, Homo sapien
gagcttcacagtggtccttccaaga

SEQ ID NO: 854205 - DNA, 25 bp, Homo sapien
gacagcaagtagcacctctgcacct

SEQ ID NO: 854206 - DNA, 25 bp, Homo sapien
gtcctgtgaggtatagcggcccagc

SEQ ID NO: 854207 - DNA, 25 bp, Homo sapien
tggtcctgtgaggtatagcggccca

SEQ ID NO: 854208 - DNA, 25 bp, Homo sapien
tcctgtgaggtatagcggcccagct

SEQ ID NO: 854209 - DNA, 25 bp, Homo sapien
ctgtgaggtatagcggcccagctga

SEQ ID NO: 854210 - DNA, 25 bp, Homo sapien
ggctttgttatctgagtcgtgcatg

SEQ ID NO: 854211 - DNA, 25 bp, Homo sapien
catgctgccaccagcttgcttaggg

SEQ ID NO: 854212 - DNA, 25 bp, Homo sapien
gagtcgtgcatgtaatccatcaggg

SEQ ID NO: 854213 - DNA, 25 bp, Homo sapien
agaggacaattgtgtgtcccatggc

SEQ ID NO: 854214 - DNA, 25 bp, Homo sapien
cttcagcacggttattaaaggcaca

SEQ ID NO: 854215 - DNA, 25 bp, Homo sapien
gcacggttattaaaggcacagattc

SEQ ID NO: 854216 - DNA, 25 bp, Homo sapien
ggttattaaaggcacagattcgccc

SEQ ID NO: 854217 - DNA, 25 bp, Homo sapien
ttattaaaggcacagattcgcccac

SEQ ID NO: 854218 - DNA, 25 bp, Homo sapien
tacagtccattagttccttcacttg

SEQ ID NO: 854219 - DNA, 25 bp, Homo sapien
agtccattagttccttcacttggtc

SEQ ID NO: 854220 - DNA, 25 bp, Homo sapien
cagatcctcaatacagtccattagt

SEQ ID NO: 854221 - DNA, 25 bp, Homo sapien
ctcaatacagtccattagttccttc

SEQ ID NO: 854222 - DNA, 25 bp, Homo sapien
tgtattaggctgtacaacccattgg

SEQ ID NO: 854223 - DNA, 25 bp, Homo sapien
tccacatttagacctctgtattagg

SEQ ID NO: 854224 - DNA, 25 bp, Homo sapien
tctgatcccacaggtccacatttag

SEQ ID NO: 854225 - DNA, 25 bp, Homo sapien
tgtacaacccattggtatagtgatc

SEQ ID NO: 854226 - DNA, 25 bp, Homo sapien
taaggctccttttaggcagtttgct

SEQ ID NO: 854227 - DNA, 25 bp, Homo sapien
attaaggctccttttaggcagtttg

SEQ ID NO: 854228 - DNA, 25 bp, Homo sapien
tgattaaggctccttttaggcagtt

SEQ ID NO: 854229 - DNA, 25 bp, Homo sapien
ttttgattaaggctccttttaggca

SEQ ID NO: 854230 - DNA, 25 bp, Homo sapien
ataataaacagcaaactgcagaata

SEQ ID NO: 854231 - DNA, 25 bp, Homo sapien
ggagtcttgcgttctagtctaataa

SEQ ID NO: 854232 - DNA, 25 bp, Homo sapien
ctataacctaggagtcttgcgttct

SEQ ID NO: 854233 - DNA, 25 bp, Homo sapien
gcgttctagtctaataactgttctc

SEQ ID NO: 854234 - DNA, 25 bp, Homo sapien
tttcaatgcaaacagtaacttatcg

SEQ ID NO: 854235 - DNA, 25 bp, Homo sapien
ttaggaacataaaactggctttaga

SEQ ID NO: 854236 - DNA, 25 bp, Homo sapien
tgagtaaataataactgggatctgt

SEQ ID NO: 854237 - DNA, 25 bp, Homo sapien
caggtaccacattttacagggaaat

SEQ ID NO: 854238 - DNA, 25 bp, Homo sapien
tgccattttcattatattcagtaga

SEQ ID NO: 854239 - DNA, 25 bp, Homo sapien
ttttcattatattcagtagaaatag

SEQ ID NO: 854240 - DNA, 25 bp, Homo sapien
cattatattcagtagaaatagtagt

SEQ ID NO: 854241 - DNA, 25 bp, Homo sapien
attgccattttcattatattcagta

SEQ ID NO: 854242 - DNA, 25 bp, Homo sapien
ctcatttaaactttctggagttggc

SEQ ID NO: 854243 - DNA, 25 bp, Homo sapien
catttaaactttctggagttggctt

SEQ ID NO: 854244 - DNA, 25 bp, Homo sapien
aactcatttaaactttctggagttg

SEQ ID NO: 854245 - DNA, 25 bp, Homo sapien
ctaactcatttaaactttctggagt

SEQ ID NO: 854246 - DNA, 25 bp, Homo sapien
tttcccttcggctgtgagtgcagaa

SEQ ID NO: 854247 - DNA, 25 bp, Homo sapien
gttggccacaagaagccccaacctg

SEQ ID NO: 854248 - DNA, 25 bp, Homo sapien
tgctttcccttcggctgtgagtgca

SEQ ID NO: 854249 - DNA, 25 bp, Homo sapien
ggctctgaagttggccacaagaagc

SEQ ID NO: 854250 - DNA, 25 bp, Homo sapien
gttctctcccattggcaccacacat

SEQ ID NO: 854251 - DNA, 25 bp, Homo sapien
tggtcacttggatacctgtgttctc

SEQ ID NO: 854252 - DNA, 25 bp, Homo sapien
gtgttctctcccattggcaccacac

SEQ ID NO: 854253 - DNA, 25 bp, Homo sapien
tgttctctcccattggcaccacaca

SEQ ID NO: 854254 - DNA, 25 bp, Homo sapien
atagacattttcttcatctgtcgcc

SEQ ID NO: 854255 - DNA, 25 bp, Homo sapien
agacattttcttcatctgtcgccat

SEQ ID NO: 854256 - DNA, 25 bp, Homo sapien
tagacattttcttcatctgtcgcca

SEQ ID NO: 854257 - DNA, 25 bp, Homo sapien
tgcgccagctcatacacctcgttgg

SEQ ID NO: 854258 - DNA, 25 bp, Homo sapien
gagctgaaaatgtccggagtgtcca

SEQ ID NO: 854259 - DNA, 25 bp, Homo sapien
cctcgttggagtaatgggcgccctt

SEQ ID NO: 854260 - DNA, 25 bp, Homo sapien
gacgatgaccatccattttaggacg

SEQ ID NO: 854261 - DNA, 25 bp, Homo sapien
ccctggctgccacgcgctccgccac

SEQ ID NO: 854262 - DNA, 25 bp, Homo sapien
ggcctccgaccaccgcctgtggagc

SEQ ID NO: 854263 - DNA, 25 bp, Homo sapien
aacggcctccgaccaccgcctgtgg

SEQ ID NO: 854264 - DNA, 25 bp, Homo sapien
ctccgcaacggcctccgaccaccgc

SEQ ID NO: 854265 - DNA, 25 bp, Homo sapien
gcaacggcctccgaccaccgcctgt

SEQ ID NO: 854266 - DNA, 25 bp, Homo sapien
tacaggattccttccgttggaatga

SEQ ID NO: 854267 - DNA, 25 bp, Homo sapien
aagaattcagcctcccttaaccaag

SEQ ID NO: 854268 - DNA, 25 bp, Homo sapien
gccttcagttttaggacctgcgctg

SEQ ID NO: 854269 - DNA, 25 bp, Homo sapien
taaaactatgcctgaaactacagga

SEQ ID NO: 854270 - DNA, 25 bp, Homo sapien
ggaacctatctacccatgtataaga

SEQ ID NO: 854271 - DNA, 25 bp, Homo sapien
taaaagtctacaaggatcacaaagg

SEQ ID NO: 854272 - DNA, 25 bp, Homo sapien
gccatgcgtttgtccccactacaag

SEQ ID NO: 854273 - DNA, 25 bp, Homo sapien
gaagtaacattcacgtgtgtaaccc

SEQ ID NO: 854274 - DNA, 25 bp, Homo sapien
gattgcagtactgcttccgagctgc

SEQ ID NO: 854275 - DNA, 25 bp, Homo sapien
catagcaacaatcccacgacctgga

SEQ ID NO: 854276 - DNA, 25 bp, Homo sapien
gcaacagctggaagttttggctcct

SEQ ID NO: 854277 - DNA, 25 bp, Homo sapien
cacgtcaggttaccattgctaaggc

SEQ ID NO: 854278 - DNA, 25 bp, Homo sapien
gaaacattatcagcacaggacccat

SEQ ID NO: 854279 - DNA, 25 bp, Homo sapien
taagtgaggtcacaaggcctaacct

SEQ ID NO: 854280 - DNA, 25 bp, Homo sapien
caatgacatgcttgcgcgaaagaat

SEQ ID NO: 854281 - DNA, 25 bp, Homo sapien
tctagttgcctaagaagaggccaac

SEQ ID NO: 854282 - DNA, 25 bp, Homo sapien
ccctggtgttggctggaaactgatt

SEQ ID NO: 854283 - DNA, 25 bp, Homo sapien
agtagagattatggagtgtgtcccc

SEQ ID NO: 854284 - DNA, 25 bp, Homo sapien
gaatgcagcgatgtgctgcttcctt

SEQ ID NO: 854285 - DNA, 25 bp, Homo sapien
tctgcggactaggacaccctggtgt

SEQ ID NO: 854286 - DNA, 25 bp, Homo sapien
gaggttgagcagacgcagttaagga

SEQ ID NO: 854287 - DNA, 25 bp, Homo sapien
gggaggttgagcagacgcagttaag

SEQ ID NO: 854288 - DNA, 25 bp, Homo sapien
ttaaggaggagccatgtgctggggc

SEQ ID NO: 854289 - DNA, 25 bp, Homo sapien
tgagcagacgcagttaaggaggagc

SEQ ID NO: 854290 - DNA, 25 bp, Homo sapien
cagaaacggttgttgtgccctgtcc

SEQ ID NO: 854291 - DNA, 25 bp, Homo sapien
gtgtgcggggatgctgttcacaggg

SEQ ID NO: 854292 - DNA, 25 bp, Homo sapien
gaaacggttgttgtgccctgtcctc

SEQ ID NO: 854293 - DNA, 25 bp, Homo sapien
tgtgtgcggggatgctgttcacagg

SEQ ID NO: 854294 - DNA, 25 bp, Homo sapien
gtctctgtgagcataaacccagttc

SEQ ID NO: 854295 - DNA, 25 bp, Homo sapien
ctgaccagcgaacccagaagtgagg

SEQ ID NO: 854296 - DNA, 25 bp, Homo sapien
tgccccgttttactgaccagcgaac

SEQ ID NO: 854297 - DNA, 25 bp, Homo sapien
cagctgtgaccaaactgtgatcctt

SEQ ID NO: 854298 - DNA, 25 bp, Homo sapien
caatggggcagcaaagcccgctgtc

SEQ ID NO: 854299 - DNA, 25 bp, Homo sapien
tttcatggagatcgacttggctaag

SEQ ID NO: 854300 - DNA, 25 bp, Homo sapien
tgctgatgcccgcaacactcatcac

SEQ ID NO: 854301 - DNA, 25 bp, Homo sapien
gacttggctaagtaatgggcaatgg

SEQ ID NO: 854302 - DNA, 25 bp, Homo sapien
gatgagaggatcagttcagccttac

SEQ ID NO: 854303 - DNA, 25 bp, Homo sapien
taaaattgagaagaatgccccggca

SEQ ID NO: 854304 - DNA, 25 bp, Homo sapien
tcttgtttggaacatgaggctcctg

SEQ ID NO: 854305 - DNA, 25 bp, Homo sapien
tgtgcaagcaagacagtagcagcct

SEQ ID NO: 854306 - DNA, 25 bp, Homo sapien
cttgaaggaatgtgatacgtgttgg

SEQ ID NO: 854307 - DNA, 25 bp, Homo sapien
gaactgaatagagcgtggtggacac

SEQ ID NO: 854308 - DNA, 25 bp, Homo sapien
tatgttatgttagccaatgaccagc

SEQ ID NO: 854309 - DNA, 25 bp, Homo sapien
tgtgtacaatgctgccactccctgg

SEQ ID NO: 854310 - DNA, 25 bp, Homo sapien
caaattaattggacagctagaagcc

SEQ ID NO: 854311 - DNA, 25 bp, Homo sapien
aaatggacattccagcggcggagag

SEQ ID NO: 854312 - DNA, 25 bp, Homo sapien
ggatgtacattttccacgtgactgg

SEQ ID NO: 854313 - DNA, 25 bp, Homo sapien
tattgccaaatatgactcccaggga

SEQ ID NO: 854314 - DNA, 25 bp, Homo sapien
gaacaactcattgcctgctccgggt

SEQ ID NO: 854315 - DNA, 25 bp, Homo sapien
tctatggaacaaagagtaggcatta

SEQ ID NO: 854316 - DNA, 25 bp, Homo sapien
gagggcacctcaattcagacatcta

SEQ ID NO: 854317 - DNA, 25 bp, Homo sapien
aatagtgcacgattacttccctccc

SEQ ID NO: 854318 - DNA, 25 bp, Homo sapien
aaaaagcagatgtacgtttgggagc

SEQ ID NO: 854319 - DNA, 25 bp, Homo sapien
tagttccatatttgcccctctggaa

SEQ ID NO: 854320 - DNA, 25 bp, Homo sapien
gccatagttccatatttgcccctct

SEQ ID NO: 854321 - DNA, 25 bp, Homo sapien
agttccatatttgcccctctggaat

SEQ ID NO: 854322 - DNA, 25 bp, Homo sapien
catagttccatatttgcccctctgg

SEQ ID NO: 854323 - DNA, 25 bp, Homo sapien
aaatctatagtgacccactgccggg

SEQ ID NO: 854324 - DNA, 25 bp, Homo sapien
tcttgcatgtagaaagccccattgg

SEQ ID NO: 854325 - DNA, 25 bp, Homo sapien
tcccctgcgtggtgtttaggccagc

SEQ ID NO: 854326 - DNA, 25 bp, Homo sapien
tcttgagggtcaaggaggtctccac

SEQ ID NO: 854327 - DNA, 25 bp, Homo sapien
taggtcattgttcatggttatctca

SEQ ID NO: 854328 - DNA, 25 bp, Homo sapien
ttatctcatgaaagctatgaacgtc

SEQ ID NO: 854329 - DNA, 25 bp, Homo sapien
taatgattcttaagactgttaggtc

SEQ ID NO: 854330 - DNA, 25 bp, Homo sapien
ctgtagaaaacgaagttttgtatct

SEQ ID NO: 854331 - DNA, 25 bp, Homo sapien
ctcaatgccggtggtgttgcagaca

SEQ ID NO: 854332 - DNA, 25 bp, Homo sapien
gtgttgcagacaagttatcttctga

SEQ ID NO: 854333 - DNA, 25 bp, Homo sapien
gccggtggtgttgcagacaagttat

SEQ ID NO: 854334 - DNA, 25 bp, Homo sapien
tggtgttgcagacaagttatcttct

SEQ ID NO: 854335 - DNA, 25 bp, Homo sapien
ttcacctggcacgtcctggtcactg

SEQ ID NO: 854336 - DNA, 25 bp, Homo sapien
cctgtgactcaaagatggagggcgt

SEQ ID NO: 854337 - DNA, 25 bp, Homo sapien
cagctcttgggtatcggcctgtgac

SEQ ID NO: 854338 - DNA, 25 bp, Homo sapien
tgtggcacttttcccgcagcctgtt

SEQ ID NO: 854339 - DNA, 25 bp, Homo sapien
tgttgaaggcacagtaccttctctc

SEQ ID NO: 854340 - DNA, 25 bp, Homo sapien
ttgttgaaggcacagtaccttctct

SEQ ID NO: 854341 - DNA, 25 bp, Homo sapien
gttgaaggcacagtaccttctctca

SEQ ID NO: 854342 - DNA, 25 bp, Homo sapien
gttgttgaaggcacagtaccttctc

SEQ ID NO: 854343 - DNA, 25 bp, Homo sapien
cgttctccctcagctcttgcttgtg

SEQ ID NO: 854344 - DNA, 25 bp, Homo sapien
tctcgttctccctcagctcttgctt

SEQ ID NO: 854345 - DNA, 25 bp, Homo sapien
ttctccctcagctcttgcttgtgct

SEQ ID NO: 854346 - DNA, 25 bp, Homo sapien
tccctcagctcttgcttgtgcttct

SEQ ID NO: 854347 - DNA, 25 bp, Homo sapien
tgtttgactctgaggagcgccttgt

SEQ ID NO: 854348 - DNA, 25 bp, Homo sapien
atgaaaaaaagtatgctgcacaaca

SEQ ID NO: 854349 - DNA, 25 bp, Homo sapien
tgactctgaggagcgccttgtatgc

SEQ ID NO: 854350 - DNA, 25 bp, Homo sapien
caagtgtttgactctgaggagcgcc

SEQ ID NO: 854351 - DNA, 25 bp, Homo sapien
gtctgaattggtgattattagaaca

SEQ ID NO: 854352 - DNA, 25 bp, Homo sapien
catagaccacgaggatctgagtctg

SEQ ID NO: 854353 - DNA, 25 bp, Homo sapien
gatacattagaagtgctccagggtc

SEQ ID NO: 854354 - DNA, 25 bp, Homo sapien
aagcagcatgctccatagaccacga

SEQ ID NO: 854355 - DNA, 25 bp, Homo sapien
tggaatagtgtttacagcaggcagg

SEQ ID NO: 854356 - DNA, 25 bp, Homo sapien
tgggatctcaggcccattcctgaag

SEQ ID NO: 854357 - DNA, 25 bp, Homo sapien
cagacagagtggaatagtgtttaca

SEQ ID NO: 854358 - DNA, 25 bp, Homo sapien
atagtgtttacagcaggcaggcagc

SEQ ID NO: 854359 - DNA, 25 bp, Homo sapien
agggaggaagacaggttctatctaa

SEQ ID NO: 854360 - DNA, 25 bp, Homo sapien
aaggagagatcttccatccccacct

SEQ ID NO: 854361 - DNA, 25 bp, Homo sapien
gacaggttctatctaaggagagatc

SEQ ID NO: 854362 - DNA, 25 bp, Homo sapien
cccacctctgcggacttttactcac

SEQ ID NO: 854363 - DNA, 25 bp, Homo sapien
caatctcaggttggcagcacaaagc

SEQ ID NO: 854364 - DNA, 25 bp, Homo sapien
gccttcaatctcaggttggcagcac

SEQ ID NO: 854365 - DNA, 25 bp, Homo sapien
aatctcaggttggcagcacaaagct

SEQ ID NO: 854366 - DNA, 25 bp, Homo sapien
ctaatacaactggaaatgcggagat

SEQ ID NO: 854367 - DNA, 25 bp, Homo sapien
gaaatctattggctaatacaactgg

SEQ ID NO: 854368 - DNA, 25 bp, Homo sapien
aagtaggaaatctattggctaatac

SEQ ID NO: 854369 - DNA, 25 bp, Homo sapien
tattggctaatacaactggaaatgc

SEQ ID NO: 854370 - DNA, 25 bp, Homo sapien
aggtagaagagacccggagctcaaa

SEQ ID NO: 854371 - DNA, 25 bp, Homo sapien
ccttgcagagcattgaaatgtgagc

SEQ ID NO: 854372 - DNA, 25 bp, Homo sapien
ttcagggaatgtccactatgtggca

SEQ ID NO: 854373 - DNA, 25 bp, Homo sapien
gaagcatgtggactgggaagttcca

SEQ ID NO: 854374 - DNA, 25 bp, Homo sapien
tgcgtacagggcaccccatttcctt

SEQ ID NO: 854375 - DNA, 25 bp, Homo sapien
ggcagctgggttgtataagtataag

SEQ ID NO: 854376 - DNA, 25 bp, Homo sapien
tggcagctgggttgtataagtataa

SEQ ID NO: 854377 - DNA, 25 bp, Homo sapien
gcagctgggttgtataagtataagc

SEQ ID NO: 854378 - DNA, 25 bp, Homo sapien
tgagcaggttggtgtgtcttgggaa

SEQ ID NO: 854379 - DNA, 25 bp, Homo sapien
tctgagcaggttggtgtgtcttggg

SEQ ID NO: 854380 - DNA, 25 bp, Homo sapien
ctgagcaggttggtgtgtcttggga

SEQ ID NO: 854381 - DNA, 25 bp, Homo sapien
cttctgagcaggttggtgtgtcttg

SEQ ID NO: 854382 - DNA, 25 bp, Homo sapien
tctggtgatccagctgggcgtttca

SEQ ID NO: 854383 - DNA, 25 bp, Homo sapien
tgtgggaaaagcaccacagggaaca

SEQ ID NO: 854384 - DNA, 25 bp, Homo sapien
taaccaggacatgccaggtggagac

SEQ ID NO: 854385 - DNA, 25 bp, Homo sapien
ccagcctgtgtttgagtgcaagctg

SEQ ID NO: 854386 - DNA, 25 bp, Homo sapien
ttgctctggaatgggttgtatgggt

SEQ ID NO: 854387 - DNA, 25 bp, Homo sapien
ctctggaatgggttgtatgggtttt

SEQ ID NO: 854388 - DNA, 25 bp, Homo sapien
gttgctctggaatgggttgtatggg

SEQ ID NO: 854389 - DNA, 25 bp, Homo sapien
tggaatgggttgtatgggtttttca

SEQ ID NO: 854390 - DNA, 25 bp, Homo sapien
gaaactttgcacacagcaaggtcct

SEQ ID NO: 854391 - DNA, 25 bp, Homo sapien
aaactttgcacacagcaaggtcctc

SEQ ID NO: 854392 - DNA, 25 bp, Homo sapien
gagttgtcaggaggtattccttcac

SEQ ID NO: 854393 - DNA, 25 bp, Homo sapien
tgtcaggaggtattccttcacccag

SEQ ID NO: 854394 - DNA, 25 bp, Homo sapien
ccggagttgtcaggaggtattcctt

SEQ ID NO: 854395 - DNA, 25 bp, Homo sapien
caggaggtattccttcacccaggcc

SEQ ID NO: 854396 - DNA, 25 bp, Homo sapien
aaacagcattgcagagcacagcagc

SEQ ID NO: 854397 - DNA, 25 bp, Homo sapien
aacttggaaattggtggagccatac

SEQ ID NO: 854398 - DNA, 25 bp, Homo sapien
tggtggagccatacagtctcattgc

SEQ ID NO: 854399 - DNA, 25 bp, Homo sapien
gtggagccatacagtctcattgccc

SEQ ID NO: 854400 - DNA, 25 bp, Homo sapien
agcaacttggaaattggtggagcca

SEQ ID NO: 854401 - DNA, 25 bp, Homo sapien
aatgttcctttttattcgagtctgc

SEQ ID NO: 854402 - DNA, 25 bp, Homo sapien
gtgcttgagtttcttgaatactatt

SEQ ID NO: 854403 - DNA, 25 bp, Homo sapien
tgttcctttttattcgagtctgcct

SEQ ID NO: 854404 - DNA, 25 bp, Homo sapien
agtgcttgagtttcttgaatactat

SEQ ID NO: 854405 - DNA, 25 bp, Homo sapien
actggtccaaccatattccatgtgt

SEQ ID NO: 854406 - DNA, 25 bp, Homo sapien
caggttaaactggtccaaccatatt

SEQ ID NO: 854407 - DNA, 25 bp, Homo sapien
tgcctggacaggttaaactggtcca

SEQ ID NO: 854408 - DNA, 25 bp, Homo sapien
tggacaggttaaactggtccaacca

SEQ ID NO: 854409 - DNA, 25 bp, Homo sapien
tgccttttgttgttgactataccac

SEQ ID NO: 854410 - DNA, 25 bp, Homo sapien
taccactccacttgatggaagtagt

SEQ ID NO: 854411 - DNA, 25 bp, Homo sapien
tgactataccactccacttgatgga

SEQ ID NO: 854412 - DNA, 25 bp, Homo sapien
gttgttgactataccactccacttg

SEQ ID NO: 854413 - DNA, 25 bp, Homo sapien
gtgtattggccattgattgttcatc

SEQ ID NO: 854414 - DNA, 25 bp, Homo sapien
cttcatgtcttggttaagaaagtac

SEQ ID NO: 854415 - DNA, 25 bp, Homo sapien
caactcttggcttgtacatataatc

SEQ ID NO: 854416 - DNA, 25 bp, Homo sapien
tctgtgaacagtctaaggatgttgc

SEQ ID NO: 854417 - DNA, 25 bp, Homo sapien
catttacgtcttaatacctgcactc

SEQ ID NO: 854418 - DNA, 25 bp, Homo sapien
tggagtaacagtgcctgtgaacact

SEQ ID NO: 854419 - DNA, 25 bp, Homo sapien
taatgtcggtgctagagaaacagaa

SEQ ID NO: 854420 - DNA, 25 bp, Homo sapien
tgtgaacactggatccccaagagtc

SEQ ID NO: 854421 - DNA, 25 bp, Homo sapien
gacatgtgcggttgaaagagtccca

SEQ ID NO: 854422 - DNA, 25 bp, Homo sapien
ggttgtctaggctgtaggccccaga

SEQ ID NO: 854423 - DNA, 25 bp, Homo sapien
cacttgccaatctgaactgtgagga

SEQ ID NO: 854424 - DNA, 25 bp, Homo sapien
tgaagccagattgagtcctgaccat

SEQ ID NO: 854425 - DNA, 25 bp, Homo sapien
aacctagacggatgtaagctggagc

SEQ ID NO: 854426 - DNA, 25 bp, Homo sapien
cacatggcctgaatgggtcatatca

SEQ ID NO: 854427 - DNA, 25 bp, Homo sapien
tgtgacccaaacttaaaccgcagat

SEQ ID NO: 854428 - DNA, 25 bp, Homo sapien
gcagatcattttccccaggccatgg

SEQ ID NO: 854429 - DNA, 25 bp, Homo sapien
cggctcataatcctgagcttctcca

SEQ ID NO: 854430 - DNA, 25 bp, Homo sapien
gaagatgtcacagtttctcggctca

SEQ ID NO: 854431 - DNA, 25 bp, Homo sapien
aggcgagggaagatgtcacagtttc

SEQ ID NO: 854432 - DNA, 25 bp, Homo sapien
tggtccagactggaggcgagggaag

SEQ ID NO: 854433 - DNA, 25 bp, Homo sapien
tgccaagttagcgatgcagcaggca

SEQ ID NO: 854434 - DNA, 25 bp, Homo sapien
gactgccaagttagcgatgcagcag

SEQ ID NO: 854435 - DNA, 25 bp, Homo sapien
ttgactgccaagttagcgatgcagc

SEQ ID NO: 854436 - DNA, 25 bp, Homo sapien
ccaagttagcgatgcagcaggcagg

SEQ ID NO: 854437 - DNA, 25 bp, Homo sapien
ccagtttcatgacttagcagcccca

SEQ ID NO: 854438 - DNA, 25 bp, Homo sapien
caccagcctgtgctttacatagagg

SEQ ID NO: 854439 - DNA, 25 bp, Homo sapien
tgctgcgctgggcaagacctgctcc

SEQ ID NO: 854440 - DNA, 25 bp, Homo sapien
cctgtgctttacatagaggcttgta

SEQ ID NO: 854441 - DNA, 25 bp, Homo sapien
gggtgcccgcatgtccctgtctagg

SEQ ID NO: 854442 - DNA, 25 bp, Homo sapien
tccacaatgctgattaaacataata

SEQ ID NO: 854443 - DNA, 25 bp, Homo sapien
tctggggttctcaagtccatgaaca

SEQ ID NO: 854444 - DNA, 25 bp, Homo sapien
gggagcagacctccactgccattgt

SEQ ID NO: 854445 - DNA, 25 bp, Homo sapien
tgagcaggaagagtccagtcttcgg

SEQ ID NO: 854446 - DNA, 25 bp, Homo sapien
ggacagagatgtaggctctttgagc

SEQ ID NO: 854447 - DNA, 25 bp, Homo sapien
tggaggacagagatgtaggctcttt

SEQ ID NO: 854448 - DNA, 25 bp, Homo sapien
gaggacagagatgtaggctctttga

SEQ ID NO: 854449 - DNA, 25 bp, Homo sapien
gaatctccgtggtgccggcctggtt

SEQ ID NO: 854450 - DNA, 25 bp, Homo sapien
tggtgccggcctggttcagatccga

SEQ ID NO: 854451 - DNA, 25 bp, Homo sapien
gttcagatccgactcttcaggcggg

SEQ ID NO: 854452 - DNA, 25 bp, Homo sapien
cccgcaggggaatctccgtggtgcc

SEQ ID NO: 854453 - DNA, 25 bp, Homo sapien
caagtgtgcgcgagtgggagcgcag

SEQ ID NO: 854454 - DNA, 25 bp, Homo sapien
ccagggccggcgtgcaagtgtgcgc

SEQ ID NO: 854455 - DNA, 25 bp, Homo sapien
cccctcgggttcatgacaggctgca

SEQ ID NO: 854456 - DNA, 25 bp, Homo sapien
ggttctcctgctgcgcgagggtcac

SEQ ID NO: 854457 - DNA, 25 bp, Homo sapien
gcagctcggggtgcgtgcggaagga

SEQ ID NO: 854458 - DNA, 25 bp, Homo sapien
ctcggggtgcgtgcggaaggaggcc

SEQ ID NO: 854459 - DNA, 25 bp, Homo sapien
cggaggcagctcggggtgcgtgcgg

SEQ ID NO: 854460 - DNA, 25 bp, Homo sapien
aggcagctcggggtgcgtgcggaag

SEQ ID NO: 854461 - DNA, 25 bp, Homo sapien
tcctctgcagtccccttcctggagt

SEQ ID NO: 854462 - DNA, 25 bp, Homo sapien
tctgcagtccccttcctggagtgtc

SEQ ID NO: 854463 - DNA, 25 bp, Homo sapien
ctggcttcctctgcagtccccttcc

SEQ ID NO: 854464 - DNA, 25 bp, Homo sapien
tggcttcctctgcagtccccttcct

SEQ ID NO: 854465 - DNA, 25 bp, Homo sapien
gactgctgctcacgcccgacgggtt

SEQ ID NO: 854466 - DNA, 25 bp, Homo sapien
tcccgctccaccgactgctgctcac

SEQ ID NO: 854467 - DNA, 25 bp, Homo sapien
tgccccgtgaaggaccgcgctgcgg

SEQ ID NO: 854468 - DNA, 25 bp, Homo sapien
gcggtgcggaggtaggtcaaaagcc

SEQ ID NO: 854469 - DNA, 25 bp, Homo sapien
cctccacagtccgcaggctctggga

SEQ ID NO: 854470 - DNA, 25 bp, Homo sapien
gacaggaccgagtccttggctgcct

SEQ ID NO: 854471 - DNA, 25 bp, Homo sapien
ctctgggacaggaccgagtccttgg

SEQ ID NO: 854472 - DNA, 25 bp, Homo sapien
ttcctgcggcctcccctccacagtc

SEQ ID NO: 854473 - DNA, 25 bp, Homo sapien
gaatgtgtgtagcagagggggtgct

SEQ ID NO: 854474 - DNA, 25 bp, Homo sapien
aatgtgtgtagcagagggggtgctg

SEQ ID NO: 854475 - DNA, 25 bp, Homo sapien
ctggtggatgtgcacatcgatgtgg

SEQ ID NO: 854476 - DNA, 25 bp, Homo sapien
ggccatctcatcactgtcggctgtt

SEQ ID NO: 854477 - DNA, 25 bp, Homo sapien
tccggggccatctcatcactgtcgg

SEQ ID NO: 854478 - DNA, 25 bp, Homo sapien
atgtgcacatcgatgtgggtgtgct

SEQ ID NO: 854479 - DNA, 25 bp, Homo sapien
taactggctcggtgtcctgttcaga

SEQ ID NO: 854480 - DNA, 25 bp, Homo sapien
ggccagagaatcacatcgctaagta

SEQ ID NO: 854481 - DNA, 25 bp, Homo sapien
gaagacataactggctcggtgtcct

SEQ ID NO: 854482 - DNA, 25 bp, Homo sapien
cgctaagtaagaagacataactggc

SEQ ID NO: 854483 - DNA, 25 bp, Homo sapien
aagatcccggctcctaggtggacct

SEQ ID NO: 854484 - DNA, 25 bp, Homo sapien
tcctaggtggacctgccactgcagg

SEQ ID NO: 854485 - DNA, 25 bp, Homo sapien
cactgcagggattaaccgctaaaac

SEQ ID NO: 854486 - DNA, 25 bp, Homo sapien
ctgaaagacaaaggacccaagatcc

SEQ ID NO: 854487 - DNA, 25 bp, Homo sapien
cctgtccagatggcagctcccgagg

SEQ ID NO: 854488 - DNA, 25 bp, Homo sapien
tgtagtcgcggatgtagaaaaatcc

SEQ ID NO: 854489 - DNA, 25 bp, Homo sapien
aagatccccagcacgatctgcatca

SEQ ID NO: 854490 - DNA, 25 bp, Homo sapien
aaaatcctcctaggactgcactcaa

SEQ ID NO: 854491 - DNA, 25 bp, Homo sapien
cagacagtgtgaataggacatgcca

SEQ ID NO: 854492 - DNA, 25 bp, Homo sapien
gagagtgtaggtaccatgaccagcc

SEQ ID NO: 854493 - DNA, 25 bp, Homo sapien
ggtaattactctcggcttctgtcag

SEQ ID NO: 854494 - DNA, 25 bp, Homo sapien
ggaaatctagtatgtcccagtggac

SEQ ID NO: 854495 - DNA, 25 bp, Homo sapien
ccccgtttctcgtaaatgaaggcag

SEQ ID NO: 854496 - DNA, 25 bp, Homo sapien
cccgtttctcgtaaatgaaggcagc

SEQ ID NO: 854497 - DNA, 25 bp, Homo sapien
cagtatgtaccaccccgtttctcgt

SEQ ID NO: 854498 - DNA, 25 bp, Homo sapien
ccagtatgtaccaccccgtttctcg

SEQ ID NO: 854499 - DNA, 25 bp, Homo sapien
tctcagagtccagtcgggggaaaaa

SEQ ID NO: 854500 - DNA, 25 bp, Homo sapien
cctgcaacagggcaggagattgggg

SEQ ID NO: 854501 - DNA, 25 bp, Homo sapien
caggagattggggtgacctccagcc

SEQ ID NO: 854502 - DNA, 25 bp, Homo sapien
agcctgaacctggtcccctcccatg

SEQ ID NO: 854503 - DNA, 25 bp, Homo sapien
catgaaggaggtacataggtgtagc

SEQ ID NO: 854504 - DNA, 25 bp, Homo sapien
gatgcggcaggcactgttgtaataa

SEQ ID NO: 854505 - DNA, 25 bp, Homo sapien
gctgtggagaaagctgccagcgtta

SEQ ID NO: 854506 - DNA, 25 bp, Homo sapien
tccagtcactcgagctggagatgcg

SEQ ID NO: 854507 - DNA, 25 bp, Homo sapien
ctgctgccccttccccttggccacc

SEQ ID NO: 854508 - DNA, 25 bp, Homo sapien
ctgctgctgccccttccccttggcc

SEQ ID NO: 854509 - DNA, 25 bp, Homo sapien
gctgccccttccccttggccaccta

SEQ ID NO: 854510 - DNA, 25 bp, Homo sapien
tgctgctgccccttccccttggcca

SEQ ID NO: 854511 - DNA, 25 bp, Homo sapien
gaacattctccagcagtacagccac

SEQ ID NO: 854512 - DNA, 25 bp, Homo sapien
cctttggttgggaacattctccagc

SEQ ID NO: 854513 - DNA, 25 bp, Homo sapien
agagatgccagaagcagcagaatcc

SEQ ID NO: 854514 - DNA, 25 bp, Homo sapien
agacacccaagagcatggcctgaag

SEQ ID NO: 854515 - DNA, 25 bp, Homo sapien
aaagacaggcatgataataggtggg

SEQ ID NO: 854516 - DNA, 25 bp, Homo sapien
catgataataggtgggacttgggtc

SEQ ID NO: 854517 - DNA, 25 bp, Homo sapien
gacttgggtcatgggcccctttctc

SEQ ID NO: 854518 - DNA, 25 bp, Homo sapien
caggcatgataataggtgggacttg

SEQ ID NO: 854519 - DNA, 25 bp, Homo sapien
ggcatagcatggatatggacttccc

SEQ ID NO: 854520 - DNA, 25 bp, Homo sapien
aaaggcatagcatggatatggactt

SEQ ID NO: 854521 - DNA, 25 bp, Homo sapien
ggattcctgggctctttgacttggg

SEQ ID NO: 854522 - DNA, 25 bp, Homo sapien
atagcatggatatggacttccctgg

SEQ ID NO: 854523 - DNA, 25 bp, Homo sapien
agattccactcacttccaacatttc

SEQ ID NO: 854524 - DNA, 25 bp, Homo sapien
attccactcacttccaacatttcct

SEQ ID NO: 854525 - DNA, 25 bp, Homo sapien
ctagattccactcacttccaacatt

SEQ ID NO: 854526 - DNA, 25 bp, Homo sapien
tagattccactcacttccaacattt

SEQ ID NO: 854527 - DNA, 25 bp, Homo sapien
attatcacatgactactcaggaggg

SEQ ID NO: 854528 - DNA, 25 bp, Homo sapien
ttccagcagtcagatgcagggacgc

SEQ ID NO: 854529 - DNA, 25 bp, Homo sapien
gaagcaccaggcactaataatcagg

SEQ ID NO: 854530 - DNA, 25 bp, Homo sapien
catgagagtttattatcacatgact

SEQ ID NO: 854531 - DNA, 25 bp, Homo sapien
aattccctggaataactaagcgaga

SEQ ID NO: 854532 - DNA, 25 bp, Homo sapien
tcaaagaggttctagctccagggcc

SEQ ID NO: 854533 - DNA, 25 bp, Homo sapien
agggccagcaactctagcctgaggc

SEQ ID NO: 854534 - DNA, 25 bp, Homo sapien
ttccctggaataactaagcgagaac

SEQ ID NO: 854535 - DNA, 25 bp, Homo sapien
ctggttttccgcatgcccattctag

SEQ ID NO: 854536 - DNA, 25 bp, Homo sapien
tccgcatgcccattctagaagtttg

SEQ ID NO: 854537 - DNA, 25 bp, Homo sapien
tgtctgcatagtcagtcccactgat

SEQ ID NO: 854538 - DNA, 25 bp, Homo sapien
aaaggagattatattcccatttggg

SEQ ID NO: 854539 - DNA, 25 bp, Homo sapien
gcagggtggaggagcttgttctttc

SEQ ID NO: 854540 - DNA, 25 bp, Homo sapien
gctccagtttcacttcggctcctga

SEQ ID NO: 854541 - DNA, 25 bp, Homo sapien
cttgtaggtcctagcgcagcagggt

SEQ ID NO: 854542 - DNA, 25 bp, Homo sapien
ttcagggctgcatctcgtggcgccg

SEQ ID NO: 854543 - DNA, 25 bp, Homo sapien
tatggctaccccgagttaccatggc

SEQ ID NO: 854544 - DNA, 25 bp, Homo sapien
tcagagtgactgcacgaaaatatgg

SEQ ID NO: 854545 - DNA, 25 bp, Homo sapien
tgcttccttaggacagcactgcctg

SEQ ID NO: 854546 - DNA, 25 bp, Homo sapien
gcctgtttgggaaacagttgtagaa

SEQ ID NO: 854547 - DNA, 25 bp, Homo sapien
tgctagggcatctcagggaaggcac

SEQ ID NO: 854548 - DNA, 25 bp, Homo sapien
gaaaagacccatttgctagggcatc

SEQ ID NO: 854549 - DNA, 25 bp, Homo sapien
gacccatttgctagggcatctcagg

SEQ ID NO: 854550 - DNA, 25 bp, Homo sapien
gtaatgttcgaaaagacccatttgc

SEQ ID NO: 854551 - DNA, 25 bp, Homo sapien
ttacaattcagctttagtcaaaggg

SEQ ID NO: 854552 - DNA, 25 bp, Homo sapien
tcattggtagtaggggacaaacctg

SEQ ID NO: 854553 - DNA, 25 bp, Homo sapien
gtttgcctcatcattggtagtaggg

SEQ ID NO: 854554 - DNA, 25 bp, Homo sapien
tagggctttagtcctttacaattca

SEQ ID NO: 854555 - DNA, 25 bp, Homo sapien
tacatatgaagaagtgagaaccggc

SEQ ID NO: 854556 - DNA, 25 bp, Homo sapien
taagccttcgataaagggagtctcc

SEQ ID NO: 854557 - DNA, 25 bp, Homo sapien
gaggttattacaggccaaaggagca

SEQ ID NO: 854558 - DNA, 25 bp, Homo sapien
gaatgcaaagaatccaaggcggcca

SEQ ID NO: 854559 - DNA, 25 bp, Homo sapien
aaaactagtcctgtggctgggcgtg

SEQ ID NO: 854560 - DNA, 25 bp, Homo sapien
caccttggtcacattgaagcctgta

SEQ ID NO: 854561 - DNA, 25 bp, Homo sapien
cagtctggactcttgggaccttccc

SEQ ID NO: 854562 - DNA, 25 bp, Homo sapien
ggtctacatgaccacccagtctgga

SEQ ID NO: 854563 - DNA, 25 bp, Homo sapien
tccccattttggatgtgagtctcca

SEQ ID NO: 854564 - DNA, 25 bp, Homo sapien
attctctcatgggtagggtcctggg

SEQ ID NO: 854565 - DNA, 25 bp, Homo sapien
gaggaggttcctcactcaagctggt

SEQ ID NO: 854566 - DNA, 25 bp, Homo sapien
tcaagctggtctgctggacttccac

SEQ ID NO: 854567 - DNA, 25 bp, Homo sapien
tcaggggaaaacagagcaggggcat

SEQ ID NO: 854568 - DNA, 25 bp, Homo sapien
ctcaggggaaaacagagcaggggca

SEQ ID NO: 854569 - DNA, 25 bp, Homo sapien
gctcaggggaaaacagagcaggggc

SEQ ID NO: 854570 - DNA, 25 bp, Homo sapien
tcacgggtgttcagagaggtgtcct

SEQ ID NO: 854571 - DNA, 25 bp, Homo sapien
tgttggccgtgggtataactgtctg

SEQ ID NO: 854572 - DNA, 25 bp, Homo sapien
gcttagtctggtgagtcctagtgaa

SEQ ID NO: 854573 - DNA, 25 bp, Homo sapien
caagtggtgacccagtgtgttccag

SEQ ID NO: 854574 - DNA, 25 bp, Homo sapien
gctgctgccccgaggatccacaagg

SEQ ID NO: 854575 - DNA, 25 bp, Homo sapien
ctgccccgaggatccacaaggtaga

SEQ ID NO: 854576 - DNA, 25 bp, Homo sapien
gccccgaggatccacaaggtagagc

SEQ ID NO: 854577 - DNA, 25 bp, Homo sapien
tgctgccccgaggatccacaaggta

SEQ ID NO: 854578 - DNA, 25 bp, Homo sapien
gacaggaaccaccacaggtcccgca

SEQ ID NO: 854579 - DNA, 25 bp, Homo sapien
acaggaaccaccacaggtcccgcac

SEQ ID NO: 854580 - DNA, 25 bp, Homo sapien
ggacaggaaccaccacaggtcccgc

SEQ ID NO: 854581 - DNA, 25 bp, Homo sapien
tgctgcccgcaatgcaagccatttc

SEQ ID NO: 854582 - DNA, 25 bp, Homo sapien
caatgcaagccatttcagtgtgcac

SEQ ID NO: 854583 - DNA, 25 bp, Homo sapien
tgcacaccgctttgtggttataggg

SEQ ID NO: 854584 - DNA, 25 bp, Homo sapien
caaggtttggttgctcagggattgc

SEQ ID NO: 854585 - DNA, 25 bp, Homo sapien
cagtgggcggacagtgctaacgccc

SEQ ID NO: 854586 - DNA, 25 bp, Homo sapien
caggtagtgcccatgcagtgggcgg

SEQ ID NO: 854587 - DNA, 25 bp, Homo sapien
cttagtcaggttgagaagggcgaac

SEQ ID NO: 854588 - DNA, 25 bp, Homo sapien
taacgcccacttagtcaggttgaga

SEQ ID NO: 854589 - DNA, 25 bp, Homo sapien
aggggctgatagaggctggcaccca

SEQ ID NO: 854590 - DNA, 25 bp, Homo sapien
tgaagctgacagatggaccagggca

SEQ ID NO: 854591 - DNA, 25 bp, Homo sapien
ctgaagctgacagatggaccagggc

SEQ ID NO: 854592 - DNA, 25 bp, Homo sapien
gggcaggggctgatagaggctggca

SEQ ID NO: 854593 - DNA, 25 bp, Homo sapien
tttgcccttaagctgatctctgact

SEQ ID NO: 854594 - DNA, 25 bp, Homo sapien
ctccttcttgaagtcaatcagaccc

SEQ ID NO: 854595 - DNA, 25 bp, Homo sapien
gcccttaagctgatctctgactcct

SEQ ID NO: 854596 - DNA, 25 bp, Homo sapien
ttcttgaagtcaatcagaccccgcc

SEQ ID NO: 854597 - DNA, 25 bp, Homo sapien
ttgggctctcggaggccctgcttac

SEQ ID NO: 854598 - DNA, 25 bp, Homo sapien
gatcttgggctctcggaggccctgc

SEQ ID NO: 854599 - DNA, 25 bp, Homo sapien
atgatcttgggctctcggaggccct

SEQ ID NO: 854600 - DNA, 25 bp, Homo sapien
cttgggctctcggaggccctgctta

SEQ ID NO: 854601 - DNA, 25 bp, Homo sapien
tgtccctctagttgccttgtcttgc

SEQ ID NO: 854602 - DNA, 25 bp, Homo sapien
tcatggggatgtccctctagttgcc

SEQ ID NO: 854603 - DNA, 25 bp, Homo sapien
gggatgtccctctagttgccttgtc

SEQ ID NO: 854604 - DNA, 25 bp, Homo sapien
agttgccttgtcttgccctctggtg

SEQ ID NO: 854605 - DNA, 25 bp, Homo sapien
cgtctgcagcatcaggatggcagcc

SEQ ID NO: 854606 - DNA, 25 bp, Homo sapien
gagggctccgccatggccgtctgca

SEQ ID NO: 854607 - DNA, 25 bp, Homo sapien
gctccgccatggccgtctgcagcat

SEQ ID NO: 854608 - DNA, 25 bp, Homo sapien
gcatcaggatggcagccacggccca

SEQ ID NO: 854609 - DNA, 25 bp, Homo sapien
cagaaacctcagcacatggtacttc

SEQ ID NO: 854610 - DNA, 25 bp, Homo sapien
agcagcatctcgatgagaaacacgg

SEQ ID NO: 854611 - DNA, 25 bp, Homo sapien
gcacatggtacttcttgggcagcag

SEQ ID NO: 854612 - DNA, 25 bp, Homo sapien
catctcgatgagaaacacggtgttc

SEQ ID NO: 854613 - DNA, 25 bp, Homo sapien
tcagccccgcatagaagttgaagcc

SEQ ID NO: 854614 - DNA, 25 bp, Homo sapien
ccaaagaagatgacggcacgggctt

SEQ ID NO: 854615 - DNA, 25 bp, Homo sapien
gaaagtagccttctacatagcgctg

SEQ ID NO: 854616 - DNA, 25 bp, Homo sapien
tatgataagccaactgcggcgctgg

SEQ ID NO: 854617 - DNA, 25 bp, Homo sapien
cttttgaagcggaaggccgcctggc

SEQ ID NO: 854618 - DNA, 25 bp, Homo sapien
aagagcaggtacttaggcagcttcc

SEQ ID NO: 854619 - DNA, 25 bp, Homo sapien
caggagtactgcgtctgctccagag

SEQ ID NO: 854620 - DNA, 25 bp, Homo sapien
cacctggtcggccatggagtggatc

SEQ ID NO: 854621 - DNA, 25 bp, Homo sapien
gagtcatagttacacttggcttctt

SEQ ID NO: 854622 - DNA, 25 bp, Homo sapien
catagactaggaaccccatagacac

SEQ ID NO: 854623 - DNA, 25 bp, Homo sapien
cctacaaaatatgtgttcacggaat

SEQ ID NO: 854624 - DNA, 25 bp, Homo sapien
agtatctgacacacagaacctacaa

SEQ ID NO: 854625 - DNA, 25 bp, Homo sapien
cacaggcgaagcagcttggctcagg

SEQ ID NO: 854626 - DNA, 25 bp, Homo sapien
gcacaggcgaagcagcttggctcag

SEQ ID NO: 854627 - DNA, 25 bp, Homo sapien
aggcacaggcgaagcagcttggctc

SEQ ID NO: 854628 - DNA, 25 bp, Homo sapien
tttcaatgttctcgttgttgtgaag

SEQ ID NO: 854629 - DNA, 25 bp, Homo sapien
acagctccgactcccggtacttggt

SEQ ID NO: 854630 - DNA, 25 bp, Homo sapien
caatgttctcgttgttgtgaagaaa

SEQ ID NO: 854631 - DNA, 25 bp, Homo sapien
ctgctcaaagaccacgggcgggtgc

SEQ ID NO: 854632 - DNA, 25 bp, Homo sapien
tgccgtccacacagcaaggcacagc

SEQ ID NO: 854633 - DNA, 25 bp, Homo sapien
gccgtccacacagcaaggcacagct

SEQ ID NO: 854634 - DNA, 25 bp, Homo sapien
agctcctgcgactggggacagatct

SEQ ID NO: 854635 - DNA, 25 bp, Homo sapien
ttgccgtccacacagcaaggcacag

SEQ ID NO: 854636 - DNA, 25 bp, Homo sapien
cactggaggccactctagcctttgg

SEQ ID NO: 854637 - DNA, 25 bp, Homo sapien
tggaggccactctagcctttggtca

SEQ ID NO: 854638 - DNA, 25 bp, Homo sapien
gaggccactctagcctttggtcatt

SEQ ID NO: 854639 - DNA, 25 bp, Homo sapien
ggccactctagcctttggtcatttt

SEQ ID NO: 854640 - DNA, 25 bp, Homo sapien
ggccgttgtcccgaggccacacgat

SEQ ID NO: 854641 - DNA, 25 bp, Homo sapien
ttgaatggccggagcaggaagccca

SEQ ID NO: 854642 - DNA, 25 bp, Homo sapien
tcacagtgtctctggatgccaggga

SEQ ID NO: 854643 - DNA, 25 bp, Homo sapien
tataggtcccattgtagctaaaagg

SEQ ID NO: 854644 - DNA, 25 bp, Homo sapien
tctgccccagtgaggctcctgggct

SEQ ID NO: 854645 - DNA, 25 bp, Homo sapien
gggtttattgtctgccccagtgagg

SEQ ID NO: 854646 - DNA, 25 bp, Homo sapien
tgccccagtgaggctcctgggcttc

SEQ ID NO: 854647 - DNA, 25 bp, Homo sapien
tgtctgccccagtgaggctcctggg

SEQ ID NO: 854648 - DNA, 25 bp, Homo sapien
tgtttcctacacacatggccctgtg

SEQ ID NO: 854649 - DNA, 25 bp, Homo sapien
gcagtagaccagtgtgaataaagta

SEQ ID NO: 854650 - DNA, 25 bp, Homo sapien
cacgtctgttcgtgtgtttcctaca

SEQ ID NO: 854651 - DNA, 25 bp, Homo sapien
tgcatgtccgtgtgagtgcgtgcac

SEQ ID NO: 854652 - DNA, 25 bp, Homo sapien
tactattagaaacacagcccaggaa

SEQ ID NO: 854653 - DNA, 25 bp, Homo sapien
cacaagctatgtgccggtcctggcg

SEQ ID NO: 854654 - DNA, 25 bp, Homo sapien
caagggcttgcattatcatttgagg

SEQ ID NO: 854655 - DNA, 25 bp, Homo sapien
ttagatgttagctgaggtctcctcc

SEQ ID NO: 854656 - DNA, 25 bp, Homo sapien
agcgaggccttgatgtcacagatct

SEQ ID NO: 854657 - DNA, 25 bp, Homo sapien
cacagatctgctttgaggcccagcc

SEQ ID NO: 854658 - DNA, 25 bp, Homo sapien
tcccattgtggtggaagcattgtct

SEQ ID NO: 854659 - DNA, 25 bp, Homo sapien
ggcccagcctttggatgtgcactgc

SEQ ID NO: 854660 - DNA, 25 bp, Homo sapien
ggaaggcacgcatgtggtcattctg

SEQ ID NO: 854661 - DNA, 25 bp, Homo sapien
cctgcaggaaggcacgcatgtggtc

SEQ ID NO: 854662 - DNA, 25 bp, Homo sapien
tgcaggaaggcacgcatgtggtcat

SEQ ID NO: 854663 - DNA, 25 bp, Homo sapien
agccctgcaggaaggcacgcatgtg

SEQ ID NO: 854664 - DNA, 25 bp, Homo sapien
cttggaggaaaagtggccccactgg

SEQ ID NO: 854665 - DNA, 25 bp, Homo sapien
gcttggaggaaaagtggccccactg

SEQ ID NO: 854666 - DNA, 25 bp, Homo sapien
aaaagtggccccactggcgtggcca

SEQ ID NO: 854667 - DNA, 25 bp, Homo sapien
aggaaaagtggccccactggcgtgg

SEQ ID NO: 854668 - DNA, 25 bp, Homo sapien
agagcaacccctctggaagccgcgt

SEQ ID NO: 854669 - DNA, 25 bp, Homo sapien
atcagaagggtgacagggtttgatc

SEQ ID NO: 854670 - DNA, 25 bp, Homo sapien
aacccctctggaagccgcgttgagg

SEQ ID NO: 854671 - DNA, 25 bp, Homo sapien
tcagaagggtgacagggtttgatct

SEQ ID NO: 854672 - DNA, 25 bp, Homo sapien
caaggtcttgataaatcacgttgaa

SEQ ID NO: 854673 - DNA, 25 bp, Homo sapien
gatgtagggatgggtcagattctca

SEQ ID NO: 854674 - DNA, 25 bp, Homo sapien
tcacgttgaaaattttgggagccat

SEQ ID NO: 854675 - DNA, 25 bp, Homo sapien
cccatgctaactgatacgtggagga

SEQ ID NO: 854676 - DNA, 25 bp, Homo sapien
cctgcagtgtcctcaaaggccatgg

SEQ ID NO: 854677 - DNA, 25 bp, Homo sapien
cagggcctgcagtgtcctcaaaggc

SEQ ID NO: 854678 - DNA, 25 bp, Homo sapien
tgcagggcctgcagtgtcctcaaag

SEQ ID NO: 854679 - DNA, 25 bp, Homo sapien
gggcctgcagtgtcctcaaaggcca

SEQ ID NO: 854680 - DNA, 25 bp, Homo sapien
ccagcttcacgagagcagtcagtgg

SEQ ID NO: 854681 - DNA, 25 bp, Homo sapien
aggcttcgacgtcttccactgccac

SEQ ID NO: 854682 - DNA, 25 bp, Homo sapien
ttctctccaggcttcgacgtcttcc

SEQ ID NO: 854683 - DNA, 25 bp, Homo sapien
tcagtggccgcctgacttgcaagct

SEQ ID NO: 854684 - DNA, 25 bp, Homo sapien
ctgctggaaagctgccaaacgcaag

SEQ ID NO: 854685 - DNA, 25 bp, Homo sapien
tggaaagctgccaaacgcaagctgc

SEQ ID NO: 854686 - DNA, 25 bp, Homo sapien
tgctggaaagctgccaaacgcaagc

SEQ ID NO: 854687 - DNA, 25 bp, Homo sapien
gaaagctgccaaacgcaagctgctc

SEQ ID NO: 854688 - DNA, 25 bp, Homo sapien
tcttggagatgcggccatgagagct

SEQ ID NO: 854689 - DNA, 25 bp, Homo sapien
aatagcaatggtgccgttgtgaatg

SEQ ID NO: 854690 - DNA, 25 bp, Homo sapien
cataatagcaatggtgccgttgtga

SEQ ID NO: 854691 - DNA, 25 bp, Homo sapien
ctgcataatagcaatggtgccgttg

SEQ ID NO: 854692 - DNA, 25 bp, Homo sapien
gaaatgctagcctggaagctcggca

SEQ ID NO: 854693 - DNA, 25 bp, Homo sapien
gcctcagggcagatatagcaagctc

SEQ ID NO: 854694 - DNA, 25 bp, Homo sapien
taacactgggccttactgcatgtgg

SEQ ID NO: 854695 - DNA, 25 bp, Homo sapien
cagcctcaagaggtgcgagccttct

SEQ ID NO: 854696 - DNA, 25 bp, Homo sapien
catgtgcacctttgcgctcatcgcg

SEQ ID NO: 854697 - DNA, 25 bp, Homo sapien
taagattaatgagacacctgtgctg

SEQ ID NO: 854698 - DNA, 25 bp, Homo sapien
caaagtgccctagaagctggtggga

SEQ ID NO: 854699 - DNA, 25 bp, Homo sapien
gaagctggatcgctactcagagtac

SEQ ID NO: 854700 - DNA, 25 bp, Homo sapien
caggaggtaggtgacacccggtcct

SEQ ID NO: 854701 - DNA, 25 bp, Homo sapien
gtgaggcgggccgtgcgcatctcca

SEQ ID NO: 854702 - DNA, 25 bp, Homo sapien
gaagtaggaagctttgggagccgtg

SEQ ID NO: 854703 - DNA, 25 bp, Homo sapien
tgcccacgcttactgccagggtgac

SEQ ID NO: 854704 - DNA, 25 bp, Homo sapien
gatcgcgggacatgtggacacttaa

SEQ ID NO: 854705 - DNA, 25 bp, Homo sapien
acttaactaagtactgccatgcctg

SEQ ID NO: 854706 - DNA, 25 bp, Homo sapien
catggtcccttctggacttgggtga

SEQ ID NO: 854707 - DNA, 25 bp, Homo sapien
tgaggatgtctgtgggatacacgcc

SEQ ID NO: 854708 - DNA, 25 bp, Homo sapien
tatcctcaacatcaccagattgttc

SEQ ID NO: 854709 - DNA, 25 bp, Homo sapien
cacgtatcctcaacatcaccagatt

SEQ ID NO: 854710 - DNA, 25 bp, Homo sapien
acccctccacgtatcctcaacatca

SEQ ID NO: 854711 - DNA, 25 bp, Homo sapien
aattttccgagctgacccagcccac

SEQ ID NO: 854712 - DNA, 25 bp, Homo sapien
gcagttgtccatgggttgtgcatcc

SEQ ID NO: 854713 - DNA, 25 bp, Homo sapien
tgtccatgggttgtgcatcctgggc

SEQ ID NO: 854714 - DNA, 25 bp, Homo sapien
ttttgcagttgtccatgggttgtgc

SEQ ID NO: 854715 - DNA, 25 bp, Homo sapien
ccatgggttgtgcatcctgggctcc

SEQ ID NO: 854716 - DNA, 25 bp, Homo sapien
agcgtctctggaagaggttcaccag

SEQ ID NO: 854717 - DNA, 25 bp, Homo sapien
gaagttggtccagactcccaagagc

SEQ ID NO: 854718 - DNA, 25 bp, Homo sapien
gaaggtggaagttggtccagactcc

SEQ ID NO: 854719 - DNA, 25 bp, Homo sapien
ctgaaggttgatcaaggcctggaga

SEQ ID NO: 854720 - DNA, 25 bp, Homo sapien
cctcctggtcgtggtttttgggcag

SEQ ID NO: 854721 - DNA, 25 bp, Homo sapien
tggaagacacaggtcagttcctctc

SEQ ID NO: 854722 - DNA, 25 bp, Homo sapien
gagtgggattgcttcatacattggc

SEQ ID NO: 854723 - DNA, 25 bp, Homo sapien
tttgttgcaaatgtgtgcagccgcc

SEQ ID NO: 854724 - DNA, 25 bp, Homo sapien
ccctggagtcttgtgtaggatataa

SEQ ID NO: 854725 - DNA, 25 bp, Homo sapien
cagatgccagccttcagtccaaggc

SEQ ID NO: 854726 - DNA, 25 bp, Homo sapien
ttccctggagtcttgtgtaggatat

SEQ ID NO: 854727 - DNA, 25 bp, Homo sapien
agccttcagtccaaggccatgtgct

SEQ ID NO: 854728 - DNA, 25 bp, Homo sapien
cacagggacctctagggtcatgcag

SEQ ID NO: 854729 - DNA, 25 bp, Homo sapien
gggatggcagcccacactctcagtg

SEQ ID NO: 854730 - DNA, 25 bp, Homo sapien
aaggtgagcaccgtttctgtagcag

SEQ ID NO: 854731 - DNA, 25 bp, Homo sapien
tcagtgaccacagggacctctaggg

SEQ ID NO: 854732 - DNA, 25 bp, Homo sapien
ttactgtgcgtccactctgctgcct

SEQ ID NO: 854733 - DNA, 25 bp, Homo sapien
gttactgtgcgtccactctgctgcc

SEQ ID NO: 854734 - DNA, 25 bp, Homo sapien
gggccacgctcttcaagttgcccat

SEQ ID NO: 854735 - DNA, 25 bp, Homo sapien
ccctgcttgccgcacagcccaaggc

SEQ ID NO: 854736 - DNA, 25 bp, Homo sapien
ctcctgggccacgctcttcaagttg

SEQ ID NO: 854737 - DNA, 25 bp, Homo sapien
ggctgggccctgcttgccgcacagc

SEQ ID NO: 854738 - DNA, 25 bp, Homo sapien
caccccccgcaaagctgctataagc

SEQ ID NO: 854739 - DNA, 25 bp, Homo sapien
cccccgcaaagctgctataagccct

SEQ ID NO: 854740 - DNA, 25 bp, Homo sapien
ccccccgcaaagctgctataagccc

SEQ ID NO: 854741 - DNA, 25 bp, Homo sapien
accccccgcaaagctgctataagcc

SEQ ID NO: 854742 - DNA, 25 bp, Homo sapien
ctgttgggagccagggatagggtca

SEQ ID NO: 854743 - DNA, 25 bp, Homo sapien
tgttgggagccagggatagggtcat

SEQ ID NO: 854744 - DNA, 25 bp, Homo sapien
ggtgtcataggtgatgctccccacc

SEQ ID NO: 854745 - DNA, 25 bp, Homo sapien
cctcccagttcttcacacgagggaa

SEQ ID NO: 854746 - DNA, 25 bp, Homo sapien
cacacgagggaacttgggcccctct

SEQ ID NO: 854747 - DNA, 25 bp, Homo sapien
ctgagggtgtcataggtgatgctcc

SEQ ID NO: 854748 - DNA, 25 bp, Homo sapien
cccaggcagcgtcttggggtgcagg

SEQ ID NO: 854749 - DNA, 25 bp, Homo sapien
ggagcccaggcagcgtcttggggtg

SEQ ID NO: 854750 - DNA, 25 bp, Homo sapien
agcgtcttggggtgcagggcccatc

SEQ ID NO: 854751 - DNA, 25 bp, Homo sapien
cagggagcccaggcagcgtcttggg

SEQ ID NO: 854752 - DNA, 25 bp, Homo sapien
tcttaatggagctgtagtactggtt

SEQ ID NO: 854753 - DNA, 25 bp, Homo sapien
gatgaagtcccgggcctgactcagc

SEQ ID NO: 854754 - DNA, 25 bp, Homo sapien
agctgtagtactggttgatgaagtc

SEQ ID NO: 854755 - DNA, 25 bp, Homo sapien
tgaagtcccgggcctgactcagcag

SEQ ID NO: 854756 - DNA, 25 bp, Homo sapien
acctcttgaagccgctgttcgtggg

SEQ ID NO: 854757 - DNA, 25 bp, Homo sapien
tggatccggcccacgcagcggggag

SEQ ID NO: 854758 - DNA, 25 bp, Homo sapien
cttgaagccgctgttcgtgggcctg

SEQ ID NO: 854759 - DNA, 25 bp, Homo sapien
ccacgcagcggggagcgttgcgcca

SEQ ID NO: 854760 - DNA, 25 bp, Homo sapien
ggtggcatacttgatgtggttgcag

SEQ ID NO: 854761 - DNA, 25 bp, Homo sapien
gtggcatacttgatgtggttgcaga

SEQ ID NO: 854762 - DNA, 25 bp, Homo sapien
tggtggcatacttgatgtggttgca

SEQ ID NO: 854763 - DNA, 25 bp, Homo sapien
acctgcagtcccgggcatcgaacac

SEQ ID NO: 854764 - DNA, 25 bp, Homo sapien
agattcggaagtctcctcggccagg

SEQ ID NO: 854765 - DNA, 25 bp, Homo sapien
atcctgctgccggtagcccgcgtag

SEQ ID NO: 854766 - DNA, 25 bp, Homo sapien
ctcggtgatctccacgttggctggg

SEQ ID NO: 854767 - DNA, 25 bp, Homo sapien
ctgcgggaacactgtgatggccgag

SEQ ID NO: 854768 - DNA, 25 bp, Homo sapien
ctccaggggcacctcaaggaccagc

SEQ ID NO: 854769 - DNA, 25 bp, Homo sapien
cacgtcgaagcgaccgtttcctggg

SEQ ID NO: 854770 - DNA, 25 bp, Homo sapien
gggtccagccgtgctgaatgcagag

SEQ ID NO: 854771 - DNA, 25 bp, Homo sapien
gggcagcacgtcgaagcgaccgttt

SEQ ID NO: 854772 - DNA, 25 bp, Homo sapien
tcctcgtgccgatctcagtgctcat

SEQ ID NO: 854773 - DNA, 25 bp, Homo sapien
gacactgccgggagggcgtaccagc

SEQ ID NO: 854774 - DNA, 25 bp, Homo sapien
gggtcacacaggttcctcgtgccga

SEQ ID NO: 854775 - DNA, 25 bp, Homo sapien
atgttgtagcggtgagggtcacaca

SEQ ID NO: 854776 - DNA, 25 bp, Homo sapien
gtccgggtatccaggtccatgcaga

SEQ ID NO: 854777 - DNA, 25 bp, Homo sapien
tgcagcacggccacgttgatttcca

SEQ ID NO: 854778 - DNA, 25 bp, Homo sapien
ctttccacagggacgaggtggtccg

SEQ ID NO: 854779 - DNA, 25 bp, Homo sapien
gccacgttgatttccactgctgcct

SEQ ID NO: 854780 - DNA, 25 bp, Homo sapien
gacaggaaatagttgaccatctcct

SEQ ID NO: 854781 - DNA, 25 bp, Homo sapien
ccaggtgcttcatgaaagaggccgt

SEQ ID NO: 854782 - DNA, 25 bp, Homo sapien
gggcacgatccaggcccagtctgca

SEQ ID NO: 854783 - DNA, 25 bp, Homo sapien
ggtccacgatggtgactttggctag

SEQ ID NO: 854784 - DNA, 25 bp, Homo sapien
cttcctggtgatgccggtgcccttg

SEQ ID NO: 854785 - DNA, 25 bp, Homo sapien
ggtgatgccggtgcccttggcggca

SEQ ID NO: 854786 - DNA, 25 bp, Homo sapien
tcctggtgatgccggtgcccttggc

SEQ ID NO: 854787 - DNA, 25 bp, Homo sapien
ctggtgatgccggtgcccttggcgg

SEQ ID NO: 854788 - DNA, 25 bp, Homo sapien
gatcaaaagccttccggaagagtct

SEQ ID NO: 854789 - DNA, 25 bp, Homo sapien
ggattgtcgccttcactcgcttcgc

SEQ ID NO: 854790 - DNA, 25 bp, Homo sapien
cagctgctgtgcgtagctctgggcc

SEQ ID NO: 854791 - DNA, 25 bp, Homo sapien
ggccggtctcggagccatacaggat

SEQ ID NO: 854792 - DNA, 25 bp, Homo sapien
ttcccaaatgtgctggttaccacca

SEQ ID NO: 854793 - DNA, 25 bp, Homo sapien
gagggacaccacgtcatactcatcc

SEQ ID NO: 854794 - DNA, 25 bp, Homo sapien
ccattcccaaatgtgctggttacca

SEQ ID NO: 854795 - DNA, 25 bp, Homo sapien
ccagcaccagcgtctcgtgttcgag

SEQ ID NO: 854796 - DNA, 25 bp, Homo sapien
taaacagcgctcaatttcttctttt

SEQ ID NO: 854797 - DNA, 25 bp, Homo sapien
ggcatctaaacagcgctcaatttct

SEQ ID NO: 854798 - DNA, 25 bp, Homo sapien
gttggcatctaaacagcgctcaatt

SEQ ID NO: 854799 - DNA, 25 bp, Homo sapien
tctaaacagcgctcaatttcttctt

SEQ ID NO: 854800 - DNA, 25 bp, Homo sapien
ttccaacttgcttaagatactgagg

SEQ ID NO: 854801 - DNA, 25 bp, Homo sapien
gcaaaaagggtttcacgagattcca

SEQ ID NO: 854802 - DNA, 25 bp, Homo sapien
taggttatatgggtgtctatacacc

SEQ ID NO: 854803 - DNA, 25 bp, Homo sapien
tgagggctgaaacggacactaaggc

SEQ ID NO: 854804 - DNA, 25 bp, Homo sapien
tcacacaatgaacggcactcagcag

SEQ ID NO: 854805 - DNA, 25 bp, Homo sapien
ataatagccccgacctggaaacagc

SEQ ID NO: 854806 - DNA, 25 bp, Homo sapien
taggtgccgttctagagcaggcgaa

SEQ ID NO: 854807 - DNA, 25 bp, Homo sapien
gcaacactgcgtgcttccatctagg

SEQ ID NO: 854808 - DNA, 25 bp, Homo sapien
tccggccgaggggagctgttgtagg

SEQ ID NO: 854809 - DNA, 25 bp, Homo sapien
tgtaggggccggacatctccatcag

SEQ ID NO: 854810 - DNA, 25 bp, Homo sapien
ggagctgttgtaggggccggacatc

SEQ ID NO: 854811 - DNA, 25 bp, Homo sapien
gctgttccggccgaggggagctgtt

SEQ ID NO: 854812 - DNA, 25 bp, Homo sapien
ctcttccgccgccaagaggacacca

SEQ ID NO: 854813 - DNA, 25 bp, Homo sapien
ttccgccgccaagaggacaccagtg

SEQ ID NO: 854814 - DNA, 25 bp, Homo sapien
gctgttgaagcggatcttataactc

SEQ ID NO: 854815 - DNA, 25 bp, Homo sapien
agggcccctgcactgtctgtgttac

SEQ ID NO: 854816 - DNA, 25 bp, Homo sapien
cagaagtgggggtatgcccgggagc

SEQ ID NO: 854817 - DNA, 25 bp, Homo sapien
ggagccgagcccgaacacacagaac

SEQ ID NO: 854818 - DNA, 25 bp, Homo sapien
ctggccgcacagctcgtcgccctgg

SEQ ID NO: 854819 - DNA, 25 bp, Homo sapien
gccgtgtgtccacggcacgagcaaa

SEQ ID NO: 854820 - DNA, 25 bp, Homo sapien
gagaccgagcccttgtcaactgcag

SEQ ID NO: 854821 - DNA, 25 bp, Homo sapien
taatggatcctacgcctctaaagtc

SEQ ID NO: 854822 - DNA, 25 bp, Homo sapien
tggatcccgtctactcctggtcagg

SEQ ID NO: 854823 - DNA, 25 bp, Homo sapien
gatgtggtctcatcccgctgcaatg

SEQ ID NO: 854824 - DNA, 25 bp, Homo sapien
gcgcttccagctccgtttggggctg

SEQ ID NO: 854825 - DNA, 25 bp, Homo sapien
tcagccggtacctctggcgcttcca

SEQ ID NO: 854826 - DNA, 25 bp, Homo sapien
gccggtacctctggcgcttccagct

SEQ ID NO: 854827 - DNA, 25 bp, Homo sapien
agccggtacctctggcgcttccagc

SEQ ID NO: 854828 - DNA, 25 bp, Homo sapien
cactgagcggattgtagcctggaac

SEQ ID NO: 854829 - DNA, 25 bp, Homo sapien
gcggattgtagcctggaacatcttc

SEQ ID NO: 854830 - DNA, 25 bp, Homo sapien
aacatcttccgcctgtgcacgtgga

SEQ ID NO: 854831 - DNA, 25 bp, Homo sapien
gcaggttttccactgagcggattgt

SEQ ID NO: 854832 - DNA, 25 bp, Homo sapien
gcgggcagacacctatgtggtcccc

SEQ ID NO: 854833 - DNA, 25 bp, Homo sapien
ccccggctggtactgcagcccctcc

SEQ ID NO: 854834 - DNA, 25 bp, Homo sapien
tcagcagcgcctccacaaggccggg

SEQ ID NO: 854835 - DNA, 25 bp, Homo sapien
ctgccacgggctcagtgggcgccgg

SEQ ID NO: 854836 - DNA, 25 bp, Homo sapien
gcctggcgcagcgtgcacgggggca

SEQ ID NO: 854837 - DNA, 25 bp, Homo sapien
tggcgcagcgtgcacgggggcagcc

SEQ ID NO: 854838 - DNA, 25 bp, Homo sapien
gagcagccgcaagagctgagggctg

SEQ ID NO: 854839 - DNA, 25 bp, Homo sapien
agcagccgcaagagctgagggctgg

SEQ ID NO: 854840 - DNA, 25 bp, Homo sapien
cacagctacagtgaggtggatctct

SEQ ID NO: 854841 - DNA, 25 bp, Homo sapien
cctgagtcctgtatgccagcacagc

SEQ ID NO: 854842 - DNA, 25 bp, Homo sapien
gtgccgagctgactgagtagtaccg

SEQ ID NO: 854843 - DNA, 25 bp, Homo sapien
ggcagcgccaccgacgggaactgct

SEQ ID NO: 854844 - DNA, 25 bp, Homo sapien
aggggccggtcccaaccctgctgtg

SEQ ID NO: 854845 - DNA, 25 bp, Homo sapien
gggccggtcccaaccctgctgtggc

SEQ ID NO: 854846 - DNA, 25 bp, Homo sapien
ggcacagggtctccgggcttgagct

SEQ ID NO: 854847 - DNA, 25 bp, Homo sapien
gcttgagctggcttagccacgtgga

SEQ ID NO: 854848 - DNA, 25 bp, Homo sapien
cgtggagcagactccatagtgcagg

SEQ ID NO: 854849 - DNA, 25 bp, Homo sapien
tagccacgtggagcagactccatag

SEQ ID NO: 854850 - DNA, 25 bp, Homo sapien
tttgctctcaatgtcatgcagccgc

SEQ ID NO: 854851 - DNA, 25 bp, Homo sapien
agggcaagctgggatcgggtggcag

SEQ ID NO: 854852 - DNA, 25 bp, Homo sapien
agctgggatcgggtggcagccggaa

SEQ ID NO: 854853 - DNA, 25 bp, Homo sapien
ccagaatccccggaagggggcaatg

SEQ ID NO: 854854 - DNA, 25 bp, Homo sapien
aaggcggtgaggactcggccaaaca

SEQ ID NO: 854855 - DNA, 25 bp, Homo sapien
ctgctgggcgttctgcacctcgtcg

SEQ ID NO: 854856 - DNA, 25 bp, Homo sapien
cacctcgtcgcggtagagatggtca

SEQ ID NO: 854857 - DNA, 25 bp, Homo sapien
gccgaacaccaaagtcatgggagtg

SEQ ID NO: 854858 - DNA, 25 bp, Homo sapien
cctggacgtgaaagtctccggagcg

SEQ ID NO: 854859 - DNA, 25 bp, Homo sapien
ggccctggacgtgaaagtctccgga

SEQ ID NO: 854860 - DNA, 25 bp, Homo sapien
gacgtgaaagtctccggagcgggcc

SEQ ID NO: 854861 - DNA, 25 bp, Homo sapien
ggacgtgaaagtctccggagcgggc

SEQ ID NO: 854862 - DNA, 25 bp, Homo sapien
tgccatggtaacatcgccgcagaca

SEQ ID NO: 854863 - DNA, 25 bp, Homo sapien
agacaaacatgtggccccgctcgag

SEQ ID NO: 854864 - DNA, 25 bp, Homo sapien
acggtctgcaggacgttggttgcca

SEQ ID NO: 854865 - DNA, 25 bp, Homo sapien
tcgaggcacagcacgcggtgcacct

SEQ ID NO: 854866 - DNA, 25 bp, Homo sapien
tgcgtatgcggcttgtcacctcctg

SEQ ID NO: 854867 - DNA, 25 bp, Homo sapien
cgcaactgacgctcctgcaaggaaa

SEQ ID NO: 854868 - DNA, 25 bp, Homo sapien
cagcgtgagcccgaaaatgtcttcg

SEQ ID NO: 854869 - DNA, 25 bp, Homo sapien
aatgtcttcgtggtagcgttgctga

SEQ ID NO: 854870 - DNA, 25 bp, Homo sapien
actaagaaacaggaagcgggtggca

SEQ ID NO: 854871 - DNA, 25 bp, Homo sapien
tagtagttctcctaacatctggcac

SEQ ID NO: 854872 - DNA, 25 bp, Homo sapien
aaaagaggcgttttgctccttcctg

SEQ ID NO: 854873 - DNA, 25 bp, Homo sapien
cttccagattaaggcggacccaggc

SEQ ID NO: 854874 - DNA, 25 bp, Homo sapien
tataattgtaatccacgccgggtgc

SEQ ID NO: 854875 - DNA, 25 bp, Homo sapien
tggattcgtcatgctggcggctgcc

SEQ ID NO: 854876 - DNA, 25 bp, Homo sapien
caagtggcgtgtaggactctgtcaa

SEQ ID NO: 854877 - DNA, 25 bp, Homo sapien
atcacgagcctgagaactgcacggg

SEQ ID NO: 854878 - DNA, 25 bp, Homo sapien
atagtaacgcgtcagccgccgacct

SEQ ID NO: 854879 - DNA, 25 bp, Homo sapien
gactggccctccaagctatggagta

SEQ ID NO: 854880 - DNA, 25 bp, Homo sapien
gagtatccatagtaacgcgtcagcc

SEQ ID NO: 854881 - DNA, 25 bp, Homo sapien
acgtccaaagggtgtggcccgactg

SEQ ID NO: 854882 - DNA, 25 bp, Homo sapien
cttcaagctgtgattggaggatatg

SEQ ID NO: 854883 - DNA, 25 bp, Homo sapien
ggagccgccggcaatagcagtttca

SEQ ID NO: 854884 - DNA, 25 bp, Homo sapien
ccttggcggtgattggtgaaaagac

SEQ ID NO: 854885 - DNA, 25 bp, Homo sapien
tgacgcggtaaaacaggagccgccg

SEQ ID NO: 854886 - DNA, 25 bp, Homo sapien
gaggggcggtagcagcctgcctggg

SEQ ID NO: 854887 - DNA, 25 bp, Homo sapien
cgaatcccgacccgaaataaatgca

SEQ ID NO: 854888 - DNA, 25 bp, Homo sapien
tcccgacccgaaataaatgcaccag

SEQ ID NO: 854889 - DNA, 25 bp, Homo sapien
tgagaatgtctggaagcggaggggc

SEQ ID NO: 854890 - DNA, 25 bp, Homo sapien
gcaagcctcgcgcaagctcgtggac

SEQ ID NO: 854891 - DNA, 25 bp, Homo sapien
tgccgggcggtcaatggcccgctct

SEQ ID NO: 854892 - DNA, 25 bp, Homo sapien
tggcccgctctgagtaggtttttcc

SEQ ID NO: 854893 - DNA, 25 bp, Homo sapien
tcgcgcaagctcgtggactccatct

SEQ ID NO: 854894 - DNA, 25 bp, Homo sapien
cgcggagtgacattccaccccggta

SEQ ID NO: 854895 - DNA, 25 bp, Homo sapien
ataattgaggccaacacccgcggag

SEQ ID NO: 854896 - DNA, 25 bp, Homo sapien
taaataattgaggccaacacccgcg

SEQ ID NO: 854897 - DNA, 25 bp, Homo sapien
agtgacattccaccccggtaggcct

SEQ ID NO: 854898 - DNA, 25 bp, Homo sapien
tggctgacacgcggctgcagacgca

SEQ ID NO: 854899 - DNA, 25 bp, Homo sapien
cttctggctgacacgcggctgcaga

SEQ ID NO: 854900 - DNA, 25 bp, Homo sapien
ttctggctgacacgcggctgcagac

SEQ ID NO: 854901 - DNA, 25 bp, Homo sapien
tccttctggctgacacgcggctgca

SEQ ID NO: 854902 - DNA, 25 bp, Homo sapien
tcgggagtgcggactgggcgtggtc

SEQ ID NO: 854903 - DNA, 25 bp, Homo sapien
ggagtgcggactgggcgtggtcact

SEQ ID NO: 854904 - DNA, 25 bp, Homo sapien
cccggtcgggagtgcggactgggcg

SEQ ID NO: 854905 - DNA, 25 bp, Homo sapien
ccggtcgggagtgcggactgggcgt

SEQ ID NO: 854906 - DNA, 25 bp, Homo sapien
agacagcactggcagaactccggta

SEQ ID NO: 854907 - DNA, 25 bp, Homo sapien
gcagaactccggtacataatagatg

SEQ ID NO: 854908 - DNA, 25 bp, Homo sapien
tagatgttccgcaaatgtttatgct

SEQ ID NO: 854909 - DNA, 25 bp, Homo sapien
aattatatcttagacagcactggca

SEQ ID NO: 854910 - DNA, 25 bp, Homo sapien
gccttgtgtaactgtccagttttcc

SEQ ID NO: 854911 - DNA, 25 bp, Homo sapien
ctcagggctgttctgaagcaacttc

SEQ ID NO: 854912 - DNA, 25 bp, Homo sapien
ttcagtttctaagacatgtccatgg

SEQ ID NO: 854913 - DNA, 25 bp, Homo sapien
gcatggatggcttgaggctccgact

SEQ ID NO: 854914 - DNA, 25 bp, Homo sapien
atggcttgaggctccgactgccctc

SEQ ID NO: 854915 - DNA, 25 bp, Homo sapien
ccgcaggtgggccacggcccggagg

SEQ ID NO: 854916 - DNA, 25 bp, Homo sapien
gaccgcaggtgggccacggcccgga

SEQ ID NO: 854917 - DNA, 25 bp, Homo sapien
gcaggtgggccacggcccggaggag

SEQ ID NO: 854918 - DNA, 25 bp, Homo sapien
caggtgggccacggcccggaggagg

SEQ ID NO: 854919 - DNA, 25 bp, Homo sapien
ctccatctgggagctaggggggctc

SEQ ID NO: 854920 - DNA, 25 bp, Homo sapien
agaggggctccatctgggagctagg

SEQ ID NO: 854921 - DNA, 25 bp, Homo sapien
ggcagaggggctccatctgggagct

SEQ ID NO: 854922 - DNA, 25 bp, Homo sapien
ggctccatctgggagctaggggggc

SEQ ID NO: 854923 - DNA, 25 bp, Homo sapien
gttaaagcgagaccccacgacatgg

SEQ ID NO: 854924 - DNA, 25 bp, Homo sapien
cttccagttaaagcgagaccccacg

SEQ ID NO: 854925 - DNA, 25 bp, Homo sapien
cagttaaagcgagaccccacgacat

SEQ ID NO: 854926 - DNA, 25 bp, Homo sapien
agagcttccagttaaagcgagaccc

SEQ ID NO: 854927 - DNA, 25 bp, Homo sapien
gcagcgaggcaggaatgccatccct

SEQ ID NO: 854928 - DNA, 25 bp, Homo sapien
ctactgagcactgcgcttgtccagg

SEQ ID NO: 854929 - DNA, 25 bp, Homo sapien
agacagagggcacaaatgttttaag

SEQ ID NO: 854930 - DNA, 25 bp, Homo sapien
acccagtgttgatgctcctggcacc

SEQ ID NO: 854931 - DNA, 25 bp, Homo sapien
atgaaactccctacgtggtcccttg

SEQ ID NO: 854932 - DNA, 25 bp, Homo sapien
ttggccacgacctctaccagctggc

SEQ ID NO: 854933 - DNA, 25 bp, Homo sapien
tgtacattcacgagtgccgcaccca

SEQ ID NO: 854934 - DNA, 25 bp, Homo sapien
tgctgagattctgggactcagtcat

SEQ ID NO: 854935 - DNA, 25 bp, Homo sapien
aagagcccagtgcactcagggatgc

SEQ ID NO: 854936 - DNA, 25 bp, Homo sapien
tgcgaaagagcccagtgcactcagg

SEQ ID NO: 854937 - DNA, 25 bp, Homo sapien
cgaaagagcccagtgcactcaggga

SEQ ID NO: 854938 - DNA, 25 bp, Homo sapien
gaaagagcccagtgcactcagggat

SEQ ID NO: 854939 - DNA, 25 bp, Homo sapien
acagccatgcgctcgccaacgtggg

SEQ ID NO: 854940 - DNA, 25 bp, Homo sapien
gggccctccgcatgtccacagccat

SEQ ID NO: 854941 - DNA, 25 bp, Homo sapien
agcagcaccaggtacccgaaggtca

SEQ ID NO: 854942 - DNA, 25 bp, Homo sapien
gctcgccaacgtgggacagcagcac

SEQ ID NO: 854943 - DNA, 25 bp, Homo sapien
actctgcaccctgcggctggcagta

SEQ ID NO: 854944 - DNA, 25 bp, Homo sapien
cccaactctgcaccctgcggctggc

SEQ ID NO: 854945 - DNA, 25 bp, Homo sapien
ctctgcaccctgcggctggcagtac

SEQ ID NO: 854946 - DNA, 25 bp, Homo sapien
caactctgcaccctgcggctggcag

SEQ ID NO: 854947 - DNA, 25 bp, Homo sapien
gacttaaactcctgcacgtcagttg

SEQ ID NO: 854948 - DNA, 25 bp, Homo sapien
tattggcgtcaaagaaggtgatgtc

SEQ ID NO: 854949 - DNA, 25 bp, Homo sapien
gacaagcttgaaggatgacttaaac

SEQ ID NO: 854950 - DNA, 25 bp, Homo sapien
acgtcagttgtcaagcggctcacca

SEQ ID NO: 854951 - DNA, 25 bp, Homo sapien
gcagcgtgaggcgtgtcgacagcat

SEQ ID NO: 854952 - DNA, 25 bp, Homo sapien
cctgacactggcgagacaattttcg

SEQ ID NO: 854953 - DNA, 25 bp, Homo sapien
gcccactcccatcagggctggtgtg

SEQ ID NO: 854954 - DNA, 25 bp, Homo sapien
ttcggaggcctgagcccatcagggt

SEQ ID NO: 854955 - DNA, 25 bp, Homo sapien
cgaaggcacgcacagtccgcacatt

SEQ ID NO: 854956 - DNA, 25 bp, Homo sapien
agggcctcgtctgctacgcccattg

SEQ ID NO: 854957 - DNA, 25 bp, Homo sapien
tcttcccgttgctccatggcgaagg

SEQ ID NO: 854958 - DNA, 25 bp, Homo sapien
ttgctccatggcgaaggcacgcaca

SEQ ID NO: 854959 - DNA, 25 bp, Homo sapien
agagagaccagtgcattcaggaggc

SEQ ID NO: 854960 - DNA, 25 bp, Homo sapien
ctggtgagagagaccagtgcattca

SEQ ID NO: 854961 - DNA, 25 bp, Homo sapien
gagagaccagtgcattcaggaggca

SEQ ID NO: 854962 - DNA, 25 bp, Homo sapien
gtgagagagaccagtgcattcagga

SEQ ID NO: 854963 - DNA, 25 bp, Homo sapien
aacaaggcgatgccgcggcccagct

SEQ ID NO: 854964 - DNA, 25 bp, Homo sapien
agttgaaggcgatgttggaaagccc

SEQ ID NO: 854965 - DNA, 25 bp, Homo sapien
tggaaagcccttggaacaaggcgat

SEQ ID NO: 854966 - DNA, 25 bp, Homo sapien
ggcgatgttggaaagcccttggaac

SEQ ID NO: 854967 - DNA, 25 bp, Homo sapien
caccaggaaggacatgaggtctccc

SEQ ID NO: 854968 - DNA, 25 bp, Homo sapien
gtcagctgctgtccggccacaaggg

SEQ ID NO: 854969 - DNA, 25 bp, Homo sapien
caataaatagggtacccaagaccat

SEQ ID NO: 854970 - DNA, 25 bp, Homo sapien
gccacaagggagcccccaataaata

SEQ ID NO: 854971 - DNA, 25 bp, Homo sapien
gatagtttccgctctgccaggtaag

SEQ ID NO: 854972 - DNA, 25 bp, Homo sapien
tcacaaaaggacatagtctgactcc

SEQ ID NO: 854973 - DNA, 25 bp, Homo sapien
tgacaacagccgcacagcaatgtga

SEQ ID NO: 854974 - DNA, 25 bp, Homo sapien
gactccacttagaggacgtccctag

SEQ ID NO: 854975 - DNA, 25 bp, Homo sapien
aattcggacagggtgcaacacggag

SEQ ID NO: 854976 - DNA, 25 bp, Homo sapien
agggaattcggacagggtgcaacac

SEQ ID NO: 854977 - DNA, 25 bp, Homo sapien
cggaagggaattcggacagggtgca

SEQ ID NO: 854978 - DNA, 25 bp, Homo sapien
tgcagcggaagggaattcggacagg

SEQ ID NO: 854979 - DNA, 25 bp, Homo sapien
caccctttgatgatctgttacagca

SEQ ID NO: 854980 - DNA, 25 bp, Homo sapien
aggcccgccttgagctgtctggtga

SEQ ID NO: 854981 - DNA, 25 bp, Homo sapien
tgtctggtgatcagctctggtcatc

SEQ ID NO: 854982 - DNA, 25 bp, Homo sapien
ggtggttttggaccaacgcaaagca

SEQ ID NO: 854983 - DNA, 25 bp, Homo sapien
tcagattagggagcacgagcagaaa

SEQ ID NO: 854984 - DNA, 25 bp, Homo sapien
tatgggccctcaggactaaaacgac

SEQ ID NO: 854985 - DNA, 25 bp, Homo sapien
tctgtctagacagtgggtggcctcc

SEQ ID NO: 854986 - DNA, 25 bp, Homo sapien
tgatatcagcccacgaggaagggag

SEQ ID NO: 854987 - DNA, 25 bp, Homo sapien
caggacagagaggttggccatggac

SEQ ID NO: 854988 - DNA, 25 bp, Homo sapien
caaacaggacagagaggttggccat

SEQ ID NO: 854989 - DNA, 25 bp, Homo sapien
gcccaaacaggacagagaggttggc

SEQ ID NO: 854990 - DNA, 25 bp, Homo sapien
aacaggacagagaggttggccatgg

SEQ ID NO: 854991 - DNA, 25 bp, Homo sapien
gcagacgttctgaaatgtaacggag

SEQ ID NO: 854992 - DNA, 25 bp, Homo sapien
ggttcagggccatgtactcaaagac

SEQ ID NO: 854993 - DNA, 25 bp, Homo sapien
gcagcccccagacagtgggatgcag

SEQ ID NO: 854994 - DNA, 25 bp, Homo sapien
atgtaacggagccacgcagctgctc

SEQ ID NO: 854995 - DNA, 25 bp, Homo sapien
cagcgtcagggtgaagtctttcagc

SEQ ID NO: 854996 - DNA, 25 bp, Homo sapien
cgatcttgccagggggcagcgtcag

SEQ ID NO: 854997 - DNA, 25 bp, Homo sapien
tgaagtctttcagcacctcgaagcc

SEQ ID NO: 854998 - DNA, 25 bp, Homo sapien
ggggcagcgtcagggtgaagtcttt

SEQ ID NO: 854999 - DNA, 25 bp, Homo sapien
tgccgtggggtcgtagaagcgctcc

SEQ ID NO: 855000 - DNA, 25 bp, Homo sapien
tgaagccgacaacctggccccggag

SEQ ID NO: 855001 - DNA, 25 bp, Homo sapien
tggctgatgaagccgacaacctggc

SEQ ID NO: 855002 - DNA, 25 bp, Homo sapien
tcaagggtgcgcaggtcccgcccat

SEQ ID NO: 855003 - DNA, 25 bp, Homo sapien
tgatggtcgtcccaaacaggacggg

SEQ ID NO: 855004 - DNA, 25 bp, Homo sapien
gctggtgatgaactcgtgagcattc

SEQ ID NO: 855005 - DNA, 25 bp, Homo sapien
cgacgaccgtgttgtagccctcggg

SEQ ID NO: 855006 - DNA, 25 bp, Homo sapien
ttcccaaagcggatgttttccatga

SEQ ID NO: 855007 - DNA, 25 bp, Homo sapien
actctgcatccagcgcgctggtagc

SEQ ID NO: 855008 - DNA, 25 bp, Homo sapien
accgtgggctgcttgataagggctc

SEQ ID NO: 855009 - DNA, 25 bp, Homo sapien
gcgcgctggtagcttcatccagtat

SEQ ID NO: 855010 - DNA, 25 bp, Homo sapien
gggcctcctgtacaacccgctcgga

SEQ ID NO: 855011 - DNA, 25 bp, Homo sapien
cacggacagtgctgagccggtgggc

SEQ ID NO: 855012 - DNA, 25 bp, Homo sapien
cagacacggccatcggccatgacga

SEQ ID NO: 855013 - DNA, 25 bp, Homo sapien
gacaatgcagtgggccccacggaca

SEQ ID NO: 855014 - DNA, 25 bp, Homo sapien
agacacggccatcggccatgacgac

SEQ ID NO: 855015 - DNA, 25 bp, Homo sapien
tcttcaggagctcttcatgtgtccc

SEQ ID NO: 855016 - DNA, 25 bp, Homo sapien
gggccgctgtcctcggggcatccag

SEQ ID NO: 855017 - DNA, 25 bp, Homo sapien
tgagctcggcgtatagcccgccttt

SEQ ID NO: 855018 - DNA, 25 bp, Homo sapien
ccggatgagctcggcgtatagcccg

SEQ ID NO: 855019 - DNA, 25 bp, Homo sapien
gaggtgtctcgtggaactctgtctc

SEQ ID NO: 855020 - DNA, 25 bp, Homo sapien
cccaatgactctggcagactctggt

SEQ ID NO: 855021 - DNA, 25 bp, Homo sapien
tgagccccagccctaacactgatgc

SEQ ID NO: 855022 - DNA, 25 bp, Homo sapien
cccggctttattgtgagcaggagca

SEQ ID NO: 855023 - DNA, 25 bp, Homo sapien
tctcgtgggaactggccattgtggc

SEQ ID NO: 855024 - DNA, 25 bp, Homo sapien
tcagtgggtgaaagacgccaggcac

SEQ ID NO: 855025 - DNA, 25 bp, Homo sapien
agcagagagctccaggtgggcatca

SEQ ID NO: 855026 - DNA, 25 bp, Homo sapien
tgtagatggaggctggttcacaatc

SEQ ID NO: 855027 - DNA, 25 bp, Homo sapien
tcccagtaggaagtgacagcggcac

SEQ ID NO: 855028 - DNA, 25 bp, Homo sapien
cagcagtgcagggacacgaggtcct

SEQ ID NO: 855029 - DNA, 25 bp, Homo sapien
cctggaccgattctgtactggattc

SEQ ID NO: 855030 - DNA, 25 bp, Homo sapien
tgaaggtgcattgcaggtaccacct

SEQ ID NO: 855031 - DNA, 25 bp, Homo sapien
tctggctcctgcacgcaaacttgag

SEQ ID NO: 855032 - DNA, 25 bp, Homo sapien
cagcagggcttgtggacttgccagc

SEQ ID NO: 855033 - DNA, 25 bp, Homo sapien
tggatttaaagaagccgcccagaag

SEQ ID NO: 855034 - DNA, 25 bp, Homo sapien
cacagggtaaatccagaatgcttgc

SEQ ID NO: 855035 - DNA, 25 bp, Homo sapien
tctccactgtggagcgaaggccgag

SEQ ID NO: 855036 - DNA, 25 bp, Homo sapien
ggctcctgcggtctagctcttccag

SEQ ID NO: 855037 - DNA, 25 bp, Homo sapien
ggcgaggttaggaagacggcgcggc

SEQ ID NO: 855038 - DNA, 25 bp, Homo sapien
agcatcaagcacagctaggctccca

SEQ ID NO: 855039 - DNA, 25 bp, Homo sapien
gctttgcaagtatttactgtagatg

SEQ ID NO: 855040 - DNA, 25 bp, Homo sapien
ctttgcaagtatttactgtagatga

SEQ ID NO: 855041 - DNA, 25 bp, Homo sapien
agtatttactgtagatgatcccact

SEQ ID NO: 855042 - DNA, 25 bp, Homo sapien
atttactgtagatgatcccactcac

SEQ ID NO: 855043 - DNA, 25 bp, Homo sapien
cagctccccagagccacagtgccat

SEQ ID NO: 855044 - DNA, 25 bp, Homo sapien
gagtaccatggttacagcacaggcg

SEQ ID NO: 855045 - DNA, 25 bp, Homo sapien
aacactttggaaggactgagtacca

SEQ ID NO: 855046 - DNA, 25 bp, Homo sapien
catggttccaccagccaaacgtgtg

SEQ ID NO: 855047 - DNA, 25 bp, Homo sapien
cacagatgtgaactcccaggacttt

SEQ ID NO: 855048 - DNA, 25 bp, Homo sapien
agaggattgggtttcagcagtaggg

SEQ ID NO: 855049 - DNA, 25 bp, Homo sapien
aggattgggtttcagcagtaggggg

SEQ ID NO: 855050 - DNA, 25 bp, Homo sapien
cagaggattgggtttcagcagtagg

SEQ ID NO: 855051 - DNA, 25 bp, Homo sapien
gattgggtttcagcagtagggggga

SEQ ID NO: 855052 - DNA, 25 bp, Homo sapien
gtgctgagccggcggtgctgagccg

SEQ ID NO: 855053 - DNA, 25 bp, Homo sapien
ggtgctgagccggcggtgctgagcc

SEQ ID NO: 855054 - DNA, 25 bp, Homo sapien
ctgttccttcccgaggaacaggcgg

SEQ ID NO: 855055 - DNA, 25 bp, Homo sapien
gtgatctggccggtcaggtcccact

SEQ ID NO: 855056 - DNA, 25 bp, Homo sapien
agagagagtcagtcagggggctaag

SEQ ID NO: 855057 - DNA, 25 bp, Homo sapien
gaggcactagcctggcaggattgga

SEQ ID NO: 855058 - DNA, 25 bp, Homo sapien
acccaggagcggaaccagctacaga

SEQ ID NO: 855059 - DNA, 25 bp, Homo sapien
gccagaacccaggagcggaaccagc

SEQ ID NO: 855060 - DNA, 25 bp, Homo sapien
gaacccaggagcggaaccagctaca

SEQ ID NO: 855061 - DNA, 25 bp, Homo sapien
cagaacccaggagcggaaccagcta

SEQ ID NO: 855062 - DNA, 25 bp, Homo sapien
ccatgtcaaaggtgggactgggcat

SEQ ID NO: 855063 - DNA, 25 bp, Homo sapien
cagcacgggcatagagttgcgccat

SEQ ID NO: 855064 - DNA, 25 bp, Homo sapien
cagttgctggcgaacacgcggatgt

SEQ ID NO: 855065 - DNA, 25 bp, Homo sapien
cggaagcgacagtccagcagcatgt

SEQ ID NO: 855066 - DNA, 25 bp, Homo sapien
atgccacccctagtagtggtgagca

SEQ ID NO: 855067 - DNA, 25 bp, Homo sapien
tgctgcacgtccagcatgatgtcca

SEQ ID NO: 855068 - DNA, 25 bp, Homo sapien
gagttaaatgtgtagcactttccca

SEQ ID NO: 855069 - DNA, 25 bp, Homo sapien
gttaaatgtgtagcactttcccatc

SEQ ID NO: 855070 - DNA, 25 bp, Homo sapien
ccagcctcatttgtgtgctccctac

SEQ ID NO: 855071 - DNA, 25 bp, Homo sapien
gccttttgcactccatccgtgccct

SEQ ID NO: 855072 - DNA, 25 bp, Homo sapien
ccagacaagacctctcactgcagcc

SEQ ID NO: 855073 - DNA, 25 bp, Homo sapien
gacctgtgtggtcaggtctcctgcc

SEQ ID NO: 855074 - DNA, 25 bp, Homo sapien
cagctgatcgatgatgggcggctcc

SEQ ID NO: 855075 - DNA, 25 bp, Homo sapien
caagcccagctgatcgatgatgggc

SEQ ID NO: 855076 - DNA, 25 bp, Homo sapien
cccagctgatcgatgatgggcggct

SEQ ID NO: 855077 - DNA, 25 bp, Homo sapien
ctgatcgatgatgggcggctcctcc

SEQ ID NO: 855078 - DNA, 25 bp, Homo sapien
gcttcccggagagcgtgagaggcca

SEQ ID NO: 855079 - DNA, 25 bp, Homo sapien
ggaggcttcccggagagcgtgagag

SEQ ID NO: 855080 - DNA, 25 bp, Homo sapien
tgagggtttagggtctgaggtggtg

SEQ ID NO: 855081 - DNA, 25 bp, Homo sapien
aggcttcccggagagcgtgagaggc

SEQ ID NO: 855082 - DNA, 25 bp, Homo sapien
cttccgagccacgtagcgggtttcg

SEQ ID NO: 855083 - DNA, 25 bp, Homo sapien
gagatgctgaactgcaatcgcccca

SEQ ID NO: 855084 - DNA, 25 bp, Homo sapien
ctgcaatcgccccagggcggtggca

SEQ ID NO: 855085 - DNA, 25 bp, Homo sapien
caggcgacaccccataagggtatag

SEQ ID NO: 855086 - DNA, 25 bp, Homo sapien
gcatgtacaccattcggcagccgca

SEQ ID NO: 855087 - DNA, 25 bp, Homo sapien
tggcatgtacaccattcggcagccg

SEQ ID NO: 855088 - DNA, 25 bp, Homo sapien
ggcatgtacaccattcggcagccgc

SEQ ID NO: 855089 - DNA, 25 bp, Homo sapien
tgcccgccatgggacgaaaacccca

SEQ ID NO: 855090 - DNA, 25 bp, Homo sapien
ctgcgggtaccggggagatggcttt

SEQ ID NO: 855091 - DNA, 25 bp, Homo sapien
taccggggagatggctttagaagca

SEQ ID NO: 855092 - DNA, 25 bp, Homo sapien
tgggccctgcccgccatgggacgaa

SEQ ID NO: 855093 - DNA, 25 bp, Homo sapien
gccgggtgggcacagttcttgtact

SEQ ID NO: 855094 - DNA, 25 bp, Homo sapien
ctcgggatccgcaccatggagagct

SEQ ID NO: 855095 - DNA, 25 bp, Homo sapien
tcgctgcggttgagcttccgggcca

SEQ ID NO: 855096 - DNA, 25 bp, Homo sapien
caggcgcacgagtccttgcgaagca

SEQ ID NO: 855097 - DNA, 25 bp, Homo sapien
tggagagctccttggcgtagcgcgt

SEQ ID NO: 855098 - DNA, 25 bp, Homo sapien
aatggcctcaaatgtgggctggcca

SEQ ID NO: 855099 - DNA, 25 bp, Homo sapien
tggcctcaaatgtgggctggccacc

SEQ ID NO: 855100 - DNA, 25 bp, Homo sapien
gctgtgggttctcccactcctttca

SEQ ID NO: 855101 - DNA, 25 bp, Homo sapien
agaatggcctcaaatgtgggctggc

SEQ ID NO: 855102 - DNA, 25 bp, Homo sapien
gggcctcaaagaagatgtccagggc

SEQ ID NO: 855103 - DNA, 25 bp, Homo sapien
tctgctccacggtctcatagttgag

SEQ ID NO: 855104 - DNA, 25 bp, Homo sapien
ttctgctccacggtctcatagttga

SEQ ID NO: 855105 - DNA, 25 bp, Homo sapien
cctcaaagaagatgtccagggccag

SEQ ID NO: 855106 - DNA, 25 bp, Homo sapien
cttcaacttacagccacctgcctgc

SEQ ID NO: 855107 - DNA, 25 bp, Homo sapien
cagggtcacccttcaacttacagcc

SEQ ID NO: 855108 - DNA, 25 bp, Homo sapien
agggtcacccttcaacttacagcca

SEQ ID NO: 855109 - DNA, 25 bp, Homo sapien
ccttcaacttacagccacctgcctg

SEQ ID NO: 855110 - DNA, 25 bp, Homo sapien
cacagaggtagtctaggatctcgag

SEQ ID NO: 855111 - DNA, 25 bp, Homo sapien
cagaggtagtctaggatctcgagga

SEQ ID NO: 855112 - DNA, 25 bp, Homo sapien
tagtctaggatctcgaggatggtga

SEQ ID NO: 855113 - DNA, 25 bp, Homo sapien
ctcacagaggtagtctaggatctcg

SEQ ID NO: 855114 - DNA, 25 bp, Homo sapien
ctggagtgcctttgggagtgctgtc

SEQ ID NO: 855115 - DNA, 25 bp, Homo sapien
ctcccagggaccagtcgaggtcact

SEQ ID NO: 855116 - DNA, 25 bp, Homo sapien
gccctagcacccttggagcaggcaa

SEQ ID NO: 855117 - DNA, 25 bp, Homo sapien
cgggatggtggtctaggcttcaggg

SEQ ID NO: 855118 - DNA, 25 bp, Homo sapien
ctgtgtgaggacgagagggtcagag

SEQ ID NO: 855119 - DNA, 25 bp, Homo sapien
ggggaacttgggttcgatggctgcc

SEQ ID NO: 855120 - DNA, 25 bp, Homo sapien
ggaacttgggttcgatggctgccca

SEQ ID NO: 855121 - DNA, 25 bp, Homo sapien
gaacttgggttcgatggctgcccag

SEQ ID NO: 855122 - DNA, 25 bp, Homo sapien
aacttgggttcgatggctgcccagc

SEQ ID NO: 855123 - DNA, 25 bp, Homo sapien
gattttagggggccattatgtgtta

SEQ ID NO: 855124 - DNA, 25 bp, Homo sapien
tgggaacgggcacacccactgtcct

SEQ ID NO: 855125 - DNA, 25 bp, Homo sapien
ggtgggaacgggcacacccactgtc

SEQ ID NO: 855126 - DNA, 25 bp, Homo sapien
ggaacgggcacacccactgtcctga

SEQ ID NO: 855127 - DNA, 25 bp, Homo sapien
agagtcttggtgacggcacagggag

SEQ ID NO: 855128 - DNA, 25 bp, Homo sapien
gagtcttggtgacggcacagggagg

SEQ ID NO: 855129 - DNA, 25 bp, Homo sapien
acaaggtagcaggtgcggtgggagg

SEQ ID NO: 855130 - DNA, 25 bp, Homo sapien
gtgacaaggtagcaggtgcggtggg

SEQ ID NO: 855131 - DNA, 25 bp, Homo sapien
gcggggctccgaggacacagacagc

SEQ ID NO: 855132 - DNA, 25 bp, Homo sapien
ggctccgaggacacagacagcaggt

SEQ ID NO: 855133 - DNA, 25 bp, Homo sapien
tcagggcggggctccgaggacacag

SEQ ID NO: 855134 - DNA, 25 bp, Homo sapien
gggctccgaggacacagacagcagg

SEQ ID NO: 855135 - DNA, 25 bp, Homo sapien
aaagctacgtgcaggctaggcatgt

SEQ ID NO: 855136 - DNA, 25 bp, Homo sapien
gggtgaagacggaaaagctacgtgc

SEQ ID NO: 855137 - DNA, 25 bp, Homo sapien
gtgaagacggaaaagctacgtgcag

SEQ ID NO: 855138 - DNA, 25 bp, Homo sapien
gctacgtgcaggctaggcatgtcca

SEQ ID NO: 855139 - DNA, 25 bp, Homo sapien
gggtctctccccgtcctccggcgca

SEQ ID NO: 855140 - DNA, 25 bp, Homo sapien
ctccggcgcactcgcgcgctcccga

SEQ ID NO: 855141 - DNA, 25 bp, Homo sapien
tctccccgtcctccggcgcactcgc

SEQ ID NO: 855142 - DNA, 25 bp, Homo sapien
cgtcctccggcgcactcgcgcgctc

SEQ ID NO: 855143 - DNA, 25 bp, Homo sapien
cccggacgggactgaaggactatgc

SEQ ID NO: 855144 - DNA, 25 bp, Homo sapien
gcgcggcaccctggctttagggaac

SEQ ID NO: 855145 - DNA, 25 bp, Homo sapien
ttcgcctctcaacccggagattggg

SEQ ID NO: 855146 - DNA, 25 bp, Homo sapien
tcttctgtctgaccccttgtccgac

SEQ ID NO: 855147 - DNA, 25 bp, Homo sapien
caggaagcagacgaatggaagaact

SEQ ID NO: 855148 - DNA, 25 bp, Homo sapien
gagggtgagacaccccgtggagccg

SEQ ID NO: 855149 - DNA, 25 bp, Homo sapien
ggcaggagctcaactccactcactc

SEQ ID NO: 855150 - DNA, 25 bp, Homo sapien
gagagagcccaagatgcccctgcag

SEQ ID NO: 855151 - DNA, 25 bp, Homo sapien
tttcgctgtcgctgcggctttcagg

SEQ ID NO: 855152 - DNA, 25 bp, Homo sapien
ggccgaatcttagcccttttcgctg

SEQ ID NO: 855153 - DNA, 25 bp, Homo sapien
tcagggcaacgaggcggaggcataa

SEQ ID NO: 855154 - DNA, 25 bp, Homo sapien
tcgctgcggctttcagggcaacgag

SEQ ID NO: 855155 - DNA, 25 bp, Homo sapien
tacagaaagaatctgcgcccttggc

SEQ ID NO: 855156 - DNA, 25 bp, Homo sapien
cgtacagaaagaatctgcgcccttg

SEQ ID NO: 855157 - DNA, 25 bp, Homo sapien
ctgcgcccttggcggggcgccgagg

SEQ ID NO: 855158 - DNA, 25 bp, Homo sapien
cagaaagaatctgcgcccttggcgg

SEQ ID NO: 855159 - DNA, 25 bp, Homo sapien
ggggagagagggtcgcagacccctc

SEQ ID NO: 855160 - DNA, 25 bp, Homo sapien
gagagagggtcgcagacccctcgca

SEQ ID NO: 855161 - DNA, 25 bp, Homo sapien
agagagggtcgcagacccctcgcac

SEQ ID NO: 855162 - DNA, 25 bp, Homo sapien
gggagagagggtcgcagacccctcg

SEQ ID NO: 855163 - DNA, 25 bp, Homo sapien
cagaagcagccccgtgggacgaggg

SEQ ID NO: 855164 - DNA, 25 bp, Homo sapien
gaagcagccccgtgggacgagggga

SEQ ID NO: 855165 - DNA, 25 bp, Homo sapien
agaggcgcagggagcttgccgccat

SEQ ID NO: 855166 - DNA, 25 bp, Homo sapien
gacgaggggacggggagaggcgcag

SEQ ID NO: 855167 - DNA, 25 bp, Homo sapien
gaatgcggcgcttgtaagagctcag

SEQ ID NO: 855168 - DNA, 25 bp, Homo sapien
ctgggactggcagaacaccggataa

SEQ ID NO: 855169 - DNA, 25 bp, Homo sapien
tccaggcgccgccaaatatttgctc

SEQ ID NO: 855170 - DNA, 25 bp, Homo sapien
acctgaagggcatcgggatctccaa

SEQ ID NO: 855171 - DNA, 25 bp, Homo sapien
ctgtaggatctcctcaaaccgctcc

SEQ ID NO: 855172 - DNA, 25 bp, Homo sapien
gtgaagttcgtcttcctcctgctcg

SEQ ID NO: 855173 - DNA, 25 bp, Homo sapien
acgagacccggcctcctgtaggatc

SEQ ID NO: 855174 - DNA, 25 bp, Homo sapien
tccacgcccagggtgcggtgaagtt

SEQ ID NO: 855175 - DNA, 25 bp, Homo sapien
tccccctcccctgcctgccccctca

SEQ ID NO: 855176 - DNA, 25 bp, Homo sapien
gtgggtgatggatgtggtgggagga

SEQ ID NO: 855177 - DNA, 25 bp, Homo sapien
cagtgggtgatggatgtggtgggag

SEQ ID NO: 855178 - DNA, 25 bp, Homo sapien
gacagtgggtgatggatgtggtggg

SEQ ID NO: 855179 - DNA, 25 bp, Homo sapien
gggtgatggatgtggtgggaggact

SEQ ID NO: 855180 - DNA, 25 bp, Homo sapien
tcttgcggcggcgtgcatccggagg

SEQ ID NO: 855181 - DNA, 25 bp, Homo sapien
ttgcggcggcgtgcatccggaggca

SEQ ID NO: 855182 - DNA, 25 bp, Homo sapien
gggtgtcttgcggcggcgtgcatcc

SEQ ID NO: 855183 - DNA, 25 bp, Homo sapien
gtgtcttgcggcggcgtgcatccgg

SEQ ID NO: 855184 - DNA, 25 bp, Homo sapien
ctcccgggcgccttcgaggcttccg

SEQ ID NO: 855185 - DNA, 25 bp, Homo sapien
ggctcccgggcgccttcgaggcttc

SEQ ID NO: 855186 - DNA, 25 bp, Homo sapien
gacaggggacggctgagtgagagcc

SEQ ID NO: 855187 - DNA, 25 bp, Homo sapien
ggacggctgagtgagagcccgggcc

SEQ ID NO: 855188 - DNA, 25 bp, Homo sapien
tctgccttccggtcagcactgtcat

SEQ ID NO: 855189 - DNA, 25 bp, Homo sapien
gtcctctctgccttccggtcagcac

SEQ ID NO: 855190 - DNA, 25 bp, Homo sapien
gcactgtcatcctcttggagaaaga

SEQ ID NO: 855191 - DNA, 25 bp, Homo sapien
caggggaagatggactggtcctctc

SEQ ID NO: 855192 - DNA, 25 bp, Homo sapien
cagcctgggcccctttggaggcccg

SEQ ID NO: 855193 - DNA, 25 bp, Homo sapien
ggcccgaggagtcgcctcctggtgg

SEQ ID NO: 855194 - DNA, 25 bp, Homo sapien
ttggaggcccgaggagtcgcctcct

SEQ ID NO: 855195 - DNA, 25 bp, Homo sapien
ctttggaggcccgaggagtcgcctc

SEQ ID NO: 855196 - DNA, 25 bp, Homo sapien
gcgccccgaggcacccccgtcgtca

SEQ ID NO: 855197 - DNA, 25 bp, Homo sapien
agccccagtcatgctcccgatgcgc

SEQ ID NO: 855198 - DNA, 25 bp, Homo sapien
ctgaaggttgtagctgcggtgccca

SEQ ID NO: 855199 - DNA, 25 bp, Homo sapien
cctctcctgaaggttgtagctgcgg

SEQ ID NO: 855200 - DNA, 25 bp, Homo sapien
tcttcatgaggtctaggtcggccgt

SEQ ID NO: 855201 - DNA, 25 bp, Homo sapien
gccgcaccccaggaacgtcctcaaa

SEQ ID NO: 855202 - DNA, 25 bp, Homo sapien
tttggcattcttccgcaccaagtgc

SEQ ID NO: 855203 - DNA, 25 bp, Homo sapien
tctgtgtggaacctttggcattctt

SEQ ID NO: 855204 - DNA, 25 bp, Homo sapien
ccactctgtgtggaacctttggcat

SEQ ID NO: 855205 - DNA, 25 bp, Homo sapien
gagctccaggagactgcggaaggag

SEQ ID NO: 855206 - DNA, 25 bp, Homo sapien
tcttcaaatttgatccagcgagctg

SEQ ID NO: 855207 - DNA, 25 bp, Homo sapien
ctggtttttgtccaggagcaactca

SEQ ID NO: 855208 - DNA, 25 bp, Homo sapien
aaatttgatccagcgagctgtctcc

SEQ ID NO: 855209 - DNA, 25 bp, Homo sapien
ctgtgtttcaacagcagagcccgca

SEQ ID NO: 855210 - DNA, 25 bp, Homo sapien
ggccttgatctggtcagagatgacc

SEQ ID NO: 855211 - DNA, 25 bp, Homo sapien
cctgtcctcggccttgatctggtca

SEQ ID NO: 855212 - DNA, 25 bp, Homo sapien
tggtgggccactccgggcagggtct

SEQ ID NO: 855213 - DNA, 25 bp, Homo sapien
agccgggtctcaggaacacctccca

SEQ ID NO: 855214 - DNA, 25 bp, Homo sapien
tgaccatggtgatgccccagcaggg

SEQ ID NO: 855215 - DNA, 25 bp, Homo sapien
cctcccatgagaggctcggtgacgt

SEQ ID NO: 855216 - DNA, 25 bp, Homo sapien
cagggagccagctgagatgttgcgg

SEQ ID NO: 855217 - DNA, 25 bp, Homo sapien
tggagcgggtgatgccagctggtgg

SEQ ID NO: 855218 - DNA, 25 bp, Homo sapien
acaaggaccaccgtggcctcggcat

SEQ ID NO: 855219 - DNA, 25 bp, Homo sapien
gtttcagctcgtgcttggacttgga

SEQ ID NO: 855220 - DNA, 25 bp, Homo sapien
gtggcctcggcattctcaggaatct

SEQ ID NO: 855221 - DNA, 25 bp, Homo sapien
ccggagccgcacaaaggccatggtg

SEQ ID NO: 855222 - DNA, 25 bp, Homo sapien
gagcggccgatctcgtggtagtcca

SEQ ID NO: 855223 - DNA, 25 bp, Homo sapien
atgttggcactactcgggcccagca

SEQ ID NO: 855224 - DNA, 25 bp, Homo sapien
aagaggaaacgcacaggcaccggca

SEQ ID NO: 855225 - DNA, 25 bp, Homo sapien
gggagagcacaaagaagagggctga

SEQ ID NO: 855226 - DNA, 25 bp, Homo sapien
tgccaaagcagcatggggatggggg

SEQ ID NO: 855227 - DNA, 25 bp, Homo sapien
gagggtgggcaaggccagtgggtgg

SEQ ID NO: 855228 - DNA, 25 bp, Homo sapien
gatgggggagagcacaaagaagagg

SEQ ID NO: 855229 - DNA, 25 bp, Homo sapien
gccaggtaggctgcctcgtggaatt

SEQ ID NO: 855230 - DNA, 25 bp, Homo sapien
ccagcccctgtaggtagcagccggc

SEQ ID NO: 855231 - DNA, 25 bp, Homo sapien
aaggcggcagcaccacgctgcagtc

SEQ ID NO: 855232 - DNA, 25 bp, Homo sapien
catctggcgctggaagtgggccaca

SEQ ID NO: 855233 - DNA, 25 bp, Homo sapien
cgaggcagccctggccccagcccgc

SEQ ID NO: 855234 - DNA, 25 bp, Homo sapien
cctcgaggcagccctggccccagcc

SEQ ID NO: 855235 - DNA, 25 bp, Homo sapien
cccctcgaggcagccctggccccag

SEQ ID NO: 855236 - DNA, 25 bp, Homo sapien
tcgaggcagccctggccccagcccg

SEQ ID NO: 855237 - DNA, 25 bp, Homo sapien
ccccccaaaggtgatggcaggagac

SEQ ID NO: 855238 - DNA, 25 bp, Homo sapien
agtgcatctcggaagtcactcaggt

SEQ ID NO: 855239 - DNA, 25 bp, Homo sapien
agatgaagatgactgcggccaggca

SEQ ID NO: 855240 - DNA, 25 bp, Homo sapien
ggcactgagggtcaagtgcatctcg

SEQ ID NO: 855241 - DNA, 25 bp, Homo sapien
cctatcaggtcctgcgtcttctctc

SEQ ID NO: 855242 - DNA, 25 bp, Homo sapien
tgtggacataatcagctccgacacc

SEQ ID NO: 855243 - DNA, 25 bp, Homo sapien
cctgagaagccgatcaccaacaggg

SEQ ID NO: 855244 - DNA, 25 bp, Homo sapien
accacgccctggagcgctgtggaca

SEQ ID NO: 855245 - DNA, 25 bp, Homo sapien
agggaggggcagtcaggtcctgagc

SEQ ID NO: 855246 - DNA, 25 bp, Homo sapien
ggagggaggggcagtcaggtcctga

SEQ ID NO: 855247 - DNA, 25 bp, Homo sapien
ctggagggaggggcagtcaggtcct

SEQ ID NO: 855248 - DNA, 25 bp, Homo sapien
gggaggggcagtcaggtcctgagct

SEQ ID NO: 855249 - DNA, 25 bp, Homo sapien
ccgatccacacacggcccaccaggt

SEQ ID NO: 855250 - DNA, 25 bp, Homo sapien
gtgaagcgggagacgaagcggacca

SEQ ID NO: 855251 - DNA, 25 bp, Homo sapien
gtgagatcaagaaggcgaagatctc

SEQ ID NO: 855252 - DNA, 25 bp, Homo sapien
tagatgaagatgagtgagatcaaga

SEQ ID NO: 855253 - DNA, 25 bp, Homo sapien
ggagaggaggccacacggcctccat

SEQ ID NO: 855254 - DNA, 25 bp, Homo sapien
ggggagaggaggccacacggcctcc

SEQ ID NO: 855255 - DNA, 25 bp, Homo sapien
gagaggaggccacacggcctccatc

SEQ ID NO: 855256 - DNA, 25 bp, Homo sapien
gaggaggccacacggcctccatcag

SEQ ID NO: 855257 - DNA, 25 bp, Homo sapien
atgtcatgttctcaccgccgtccac

SEQ ID NO: 855258 - DNA, 25 bp, Homo sapien
cggccccagcgtgggtcttgccccg

SEQ ID NO: 855259 - DNA, 25 bp, Homo sapien
gttctcaccgccgtccacctctgag

SEQ ID NO: 855260 - DNA, 25 bp, Homo sapien
cttgccccggcccatgtcatgttct

SEQ ID NO: 855261 - DNA, 25 bp, Homo sapien
cggccaggaaagaaccggctgttct

SEQ ID NO: 855262 - DNA, 25 bp, Homo sapien
gccaggaaagaaccggctgttcttg

SEQ ID NO: 855263 - DNA, 25 bp, Homo sapien
cagcagggccgtgttgggctggccc

SEQ ID NO: 855264 - DNA, 25 bp, Homo sapien
cgatgaagaaggtgccggccatgag

SEQ ID NO: 855265 - DNA, 25 bp, Homo sapien
caccacagccgctgacttcctgcca

SEQ ID NO: 855266 - DNA, 25 bp, Homo sapien
accacagccgctgacttcctgccac

SEQ ID NO: 855267 - DNA, 25 bp, Homo sapien
cacagccgctgacttcctgccaccc

SEQ ID NO: 855268 - DNA, 25 bp, Homo sapien
ccaccacagccgctgacttcctgcc

SEQ ID NO: 855269 - DNA, 25 bp, Homo sapien
atgaggatggcgatgggcaccccaa

SEQ ID NO: 855270 - DNA, 25 bp, Homo sapien
ggtgtcctcaatactgtaatccaca

SEQ ID NO: 855271 - DNA, 25 bp, Homo sapien
caaagtccccaatcacccgccggat

SEQ ID NO: 855272 - DNA, 25 bp, Homo sapien
taatccacaagcaccatgatgagga

SEQ ID NO: 855273 - DNA, 25 bp, Homo sapien
gggcagtcaccgagaatccactggg

SEQ ID NO: 855274 - DNA, 25 bp, Homo sapien
agaatccactgggaacgctcagctt

SEQ ID NO: 855275 - DNA, 25 bp, Homo sapien
tctcccagggggttgatgacccagc

SEQ ID NO: 855276 - DNA, 25 bp, Homo sapien
ggttgatgacccagcccctcttttc

SEQ ID NO: 855277 - DNA, 25 bp, Homo sapien
cttcctgaatcttgggcttgtcccc

SEQ ID NO: 855278 - DNA, 25 bp, Homo sapien
gtgagtgacagagcggacagtggca

SEQ ID NO: 855279 - DNA, 25 bp, Homo sapien
cttgctcatgacagtgagcgcgttg

SEQ ID NO: 855280 - DNA, 25 bp, Homo sapien
gagggcacagatgccgcccatggcc

SEQ ID NO: 855281 - DNA, 25 bp, Homo sapien
ctggccccagtagccctggggaatc

SEQ ID NO: 855282 - DNA, 25 bp, Homo sapien
tagccctggggaatccactgggaag

SEQ ID NO: 855283 - DNA, 25 bp, Homo sapien
gaagggaaaggcaagaggcaacgta

SEQ ID NO: 855284 - DNA, 25 bp, Homo sapien
cagtagccctggggaatccactggg

SEQ ID NO: 855285 - DNA, 25 bp, Homo sapien
tcttgacgtaagtgacatctgggtg

SEQ ID NO: 855286 - DNA, 25 bp, Homo sapien
catagaactggatcccgttaaggga

SEQ ID NO: 855287 - DNA, 25 bp, Homo sapien
gaaaattccaaagagcacggccagg

SEQ ID NO: 855288 - DNA, 25 bp, Homo sapien
ggaggtgactcccatgtacaggaaa

SEQ ID NO: 855289 - DNA, 25 bp, Homo sapien
agctggagagtgacccaagtagacc

SEQ ID NO: 855290 - DNA, 25 bp, Homo sapien
gaacattcctaggtgccagagctgg

SEQ ID NO: 855291 - DNA, 25 bp, Homo sapien
ctctcttcttcggaggcggggatgg

SEQ ID NO: 855292 - DNA, 25 bp, Homo sapien
cagaggcacaccccttccggtgggg

SEQ ID NO: 855293 - DNA, 25 bp, Homo sapien
aacaggtgcatacggagggtccgga

SEQ ID NO: 855294 - DNA, 25 bp, Homo sapien
accaccatgcggagcggcactgtga

SEQ ID NO: 855295 - DNA, 25 bp, Homo sapien
tgaagatacgggtgagcaccaccat

SEQ ID NO: 855296 - DNA, 25 bp, Homo sapien
tgcagggccgtgaacaggtgcatac

SEQ ID NO: 855297 - DNA, 25 bp, Homo sapien
tgtgtggggaggtggcggtcaagaa

SEQ ID NO: 855298 - DNA, 25 bp, Homo sapien
tgggggggcctttccagatccacag

SEQ ID NO: 855299 - DNA, 25 bp, Homo sapien
caggcatgggcatctcattgtactc

SEQ ID NO: 855300 - DNA, 25 bp, Homo sapien
gggcatctcattgtactcgtccaca

SEQ ID NO: 855301 - DNA, 25 bp, Homo sapien
aacaccggctctgcctcgttagcat

SEQ ID NO: 855302 - DNA, 25 bp, Homo sapien
tcccgctcatcaaacaccggctctg

SEQ ID NO: 855303 - DNA, 25 bp, Homo sapien
cctcgtccatcggtccctcggctgt

SEQ ID NO: 855304 - DNA, 25 bp, Homo sapien
tgtcccctcgtccatcggtccctcg

SEQ ID NO: 855305 - DNA, 25 bp, Homo sapien
gtccatcggtccctcggctgtccct

SEQ ID NO: 855306 - DNA, 25 bp, Homo sapien
ccagcctgtcccctcgtccatcggt

SEQ ID NO: 855307 - DNA, 25 bp, Homo sapien
tacccttcgaggaactggagtccca

SEQ ID NO: 855308 - DNA, 25 bp, Homo sapien
aggaactggagtcccagagaggcct

SEQ ID NO: 855309 - DNA, 25 bp, Homo sapien
cagctcaagagctacctgaggcaga

SEQ ID NO: 855310 - DNA, 25 bp, Homo sapien
tgccccagctcaagagctacctgag

SEQ ID NO: 855311 - DNA, 25 bp, Homo sapien
gcacctaggcctgatgggctaccag

SEQ ID NO: 855312 - DNA, 25 bp, Homo sapien
gagcggcacctaggcctgatgggct

SEQ ID NO: 855313 - DNA, 25 bp, Homo sapien
cggcacctaggcctgatgggctacc

SEQ ID NO: 855314 - DNA, 25 bp, Homo sapien
cctaggcctgatgggctaccagctc

SEQ ID NO: 855315 - DNA, 25 bp, Homo sapien
aattgctttgcaagtagtgctgcgc

SEQ ID NO: 855316 - DNA, 25 bp, Homo sapien
ggcctgcgtttctccaccggtgaaa

SEQ ID NO: 855317 - DNA, 25 bp, Homo sapien
taacttaaccccttcgctgctctgg

SEQ ID NO: 855318 - DNA, 25 bp, Homo sapien
tgcctactcttcatgggcgtgtaag

SEQ ID NO: 855319 - DNA, 25 bp, Homo sapien
gggtactctgacgtgctccagctga

SEQ ID NO: 855320 - DNA, 25 bp, Homo sapien
cactgcatcacgaacacgggtactc

SEQ ID NO: 855321 - DNA, 25 bp, Homo sapien
gataagggatcaggatttctgccag

SEQ ID NO: 855322 - DNA, 25 bp, Homo sapien
ggatgggtatccctagccagcctgg

SEQ ID NO: 855323 - DNA, 25 bp, Homo sapien
agctccctgaaatgtcccagttcct

SEQ ID NO: 855324 - DNA, 25 bp, Homo sapien
gctccctgaaatgtcccagttcctc

SEQ ID NO: 855325 - DNA, 25 bp, Homo sapien
ctccctgaaatgtcccagttcctct

SEQ ID NO: 855326 - DNA, 25 bp, Homo sapien
cctgctgccggagttttctccctgt

SEQ ID NO: 855327 - DNA, 25 bp, Homo sapien
ttcagtgcggcataggctcccctgt

SEQ ID NO: 855328 - DNA, 25 bp, Homo sapien
gtcagccctagagaccaccctgctg

SEQ ID NO: 855329 - DNA, 25 bp, Homo sapien
agcgtcccgccttcagtgcggcata

SEQ ID NO: 855330 - DNA, 25 bp, Homo sapien
cggcgcggggctagcgcatggagcc

SEQ ID NO: 855331 - DNA, 25 bp, Homo sapien
cgccgccgcgcacgctgtggccgcc

SEQ ID NO: 855332 - DNA, 25 bp, Homo sapien
cgagcgcttcccagcgccgtgatcc

SEQ ID NO: 855333 - DNA, 25 bp, Homo sapien
gggctagcgcatggagccgggggcc

SEQ ID NO: 855334 - DNA, 25 bp, Homo sapien
gctgcgggctctgccccccgcccgc

SEQ ID NO: 855335 - DNA, 25 bp, Homo sapien
tgctgcgcggcagcgccgccgcccc

SEQ ID NO: 855336 - DNA, 25 bp, Homo sapien
gcagcgccgccgccccccggagccg

SEQ ID NO: 855337 - DNA, 25 bp, Homo sapien
cgccgccgccccccggagccgccag

SEQ ID NO: 855338 - DNA, 25 bp, Homo sapien
cgccgccccccggagccgccaggct

SEQ ID NO: 855339 - DNA, 25 bp, Homo sapien
ttgggatgcacggactcgaagcgct

SEQ ID NO: 855340 - DNA, 25 bp, Homo sapien
tagatggcgtagatattgggatgca

SEQ ID NO: 855341 - DNA, 25 bp, Homo sapien
gctcgatcaggtcgtagatggcgta

SEQ ID NO: 855342 - DNA, 25 bp, Homo sapien
gttctgcagcgccaaatcctcgatg

SEQ ID NO: 855343 - DNA, 25 bp, Homo sapien
tccccgaacgagatatggcgaagct

SEQ ID NO: 855344 - DNA, 25 bp, Homo sapien
acgagatatggcgaagctgcccgcc

SEQ ID NO: 855345 - DNA, 25 bp, Homo sapien
caaagtgtccccgaacgagatatgg

SEQ ID NO: 855346 - DNA, 25 bp, Homo sapien
gatatggcgaagctgcccgccggtt

SEQ ID NO: 855347 - DNA, 25 bp, Homo sapien
ccccaagcgacaccaccttcgcgcc

SEQ ID NO: 855348 - DNA, 25 bp, Homo sapien
ccccccaagcgacaccaccttcgcg

SEQ ID NO: 855349 - DNA, 25 bp, Homo sapien
cccggccaggcctggacagatctgg

SEQ ID NO: 855350 - DNA, 25 bp, Homo sapien
caggcctggacagatctggtcccgg

SEQ ID NO: 855351 - DNA, 25 bp, Homo sapien
ccctcagcggtcgaaagtccagggc

SEQ ID NO: 855352 - DNA, 25 bp, Homo sapien
cctgtgccctcagcggtcgaaagtc

SEQ ID NO: 855353 - DNA, 25 bp, Homo sapien
acttcctgtgccctcagcggtcgaa

SEQ ID NO: 855354 - DNA, 25 bp, Homo sapien
cagggcttgcgaggcatctgccagc

SEQ ID NO: 855355 - DNA, 25 bp, Homo sapien
accatgccaccggggtgcctgcggg

SEQ ID NO: 855356 - DNA, 25 bp, Homo sapien
tcaccatgccaccggggtgcctgcg

SEQ ID NO: 855357 - DNA, 25 bp, Homo sapien
ccatgccaccggggtgcctgcgggt

SEQ ID NO: 855358 - DNA, 25 bp, Homo sapien
caccatgccaccggggtgcctgcgg

SEQ ID NO: 855359 - DNA, 25 bp, Homo sapien
cagtgaagctgcagcaacgatgtct

SEQ ID NO: 855360 - DNA, 25 bp, Homo sapien
agtgaagctgcagcaacgatgtctc

SEQ ID NO: 855361 - DNA, 25 bp, Homo sapien
ggacagtgaagctgcagcaacgatg

SEQ ID NO: 855362 - DNA, 25 bp, Homo sapien
gacagtgaagctgcagcaacgatgt

SEQ ID NO: 855363 - DNA, 25 bp, Homo sapien
aaatacatatttgggcacggacgtg

SEQ ID NO: 855364 - DNA, 25 bp, Homo sapien
ggcagagctttgttatgacccacct

SEQ ID NO: 855365 - DNA, 25 bp, Homo sapien
taaaaatgtgccgaccccagagtct

SEQ ID NO: 855366 - DNA, 25 bp, Homo sapien
tacaaggcggcacgtaataaacagc

SEQ ID NO: 855367 - DNA, 25 bp, Homo sapien
gagatccctggaggggtctagactt

SEQ ID NO: 855368 - DNA, 25 bp, Homo sapien
ctttgatcccactccaggcgctggg

SEQ ID NO: 855369 - DNA, 25 bp, Homo sapien
tagacttttcggtcctccctctgcc

SEQ ID NO: 855370 - DNA, 25 bp, Homo sapien
attggacaagacatttagagcatct

SEQ ID NO: 855371 - DNA, 25 bp, Homo sapien
atttttacaaccaacaggcatttgt

SEQ ID NO: 855372 - DNA, 25 bp, Homo sapien
tgatgcggacgccaggattgacgcg

SEQ ID NO: 855373 - DNA, 25 bp, Homo sapien
ggaggtggtgagtgatgcggacgcc

SEQ ID NO: 855374 - DNA, 25 bp, Homo sapien
acgccaggattgacgcgtgccagcg

SEQ ID NO: 855375 - DNA, 25 bp, Homo sapien
catcagggaggtggtgagtgatgcg

SEQ ID NO: 855376 - DNA, 25 bp, Homo sapien
tatggtgtgttcttcccgaggcatg

SEQ ID NO: 855377 - DNA, 25 bp, Homo sapien
tagcgggcacgcaaagcatgtatcc

SEQ ID NO: 855378 - DNA, 25 bp, Homo sapien
tttttagctaccacaagcaaggcgg

SEQ ID NO: 855379 - DNA, 25 bp, Homo sapien
gcaggagctcttcgtatagcgggca

SEQ ID NO: 855380 - DNA, 25 bp, Homo sapien
caccatgactggcataatacttgat

SEQ ID NO: 855381 - DNA, 25 bp, Homo sapien
ctggttagaattactggtgacttct

SEQ ID NO: 855382 - DNA, 25 bp, Homo sapien
atgacaaaatggtgaccgtggctgc

SEQ ID NO: 855383 - DNA, 25 bp, Homo sapien
tatgtaacaaaattatatggacctg

SEQ ID NO: 855384 - DNA, 25 bp, Homo sapien
ttcactggtacatttaaagccccca

SEQ ID NO: 855385 - DNA, 25 bp, Homo sapien
tacaagtaggaactgagaggtaaac

SEQ ID NO: 855386 - DNA, 25 bp, Homo sapien
aaggaatattgggtgctacaagtag

SEQ ID NO: 855387 - DNA, 25 bp, Homo sapien
acacaatgctcagagtacctgaact

SEQ ID NO: 855388 - DNA, 25 bp, Homo sapien
gccaggcccatggcgaggggcacgg

SEQ ID NO: 855389 - DNA, 25 bp, Homo sapien
ccaggcccatggcgaggggcacggg

SEQ ID NO: 855390 - DNA, 25 bp, Homo sapien
tcgcagacgctgtgggcgcggcggc

SEQ ID NO: 855391 - DNA, 25 bp, Homo sapien
cccgggacagctgtccccctgcggc

SEQ ID NO: 855392 - DNA, 25 bp, Homo sapien
ggtccagcgagtcgcagacgctgtg

SEQ ID NO: 855393 - DNA, 25 bp, Homo sapien
ggccgaggcgccgtgcaggtccagc

SEQ ID NO: 855394 - DNA, 25 bp, Homo sapien
gcggagtcggctccccgcgggtgcg

SEQ ID NO: 855395 - DNA, 25 bp, Homo sapien
cagcgctggctgctccacaacgccg

SEQ ID NO: 855396 - DNA, 25 bp, Homo sapien
gggtgcggctgcgccgggtcggcgc

SEQ ID NO: 855397 - DNA, 25 bp, Homo sapien
caggcgagacgggcggtcccgaggg

SEQ ID NO: 855398 - DNA, 25 bp, Homo sapien
cggcccgcgcccgccgcgcagcact

SEQ ID NO: 855399 - DNA, 25 bp, Homo sapien
gcccgcgcccgccgcgcagcactgg

SEQ ID NO: 855400 - DNA, 25 bp, Homo sapien
tccggcccgcgcccgccgcgcagca

SEQ ID NO: 855401 - DNA, 25 bp, Homo sapien
ctccggcccgcgcccgccgcgcagc

SEQ ID NO: 855402 - DNA, 25 bp, Homo sapien
gaagcggctcgtgagcagcctccag

SEQ ID NO: 855403 - DNA, 25 bp, Homo sapien
gccctgactcggagcgccgcacctc

SEQ ID NO: 855404 - DNA, 25 bp, Homo sapien
gtcgccgtcgctacgggtgcgcgcg

SEQ ID NO: 855405 - DNA, 25 bp, Homo sapien
gagcccagcaggtcgcggcggctgg

SEQ ID NO: 855406 - DNA, 25 bp, Homo sapien
ctcagtccccctggtttcggccctg

SEQ ID NO: 855407 - DNA, 25 bp, Homo sapien
tgaagcagagtaaggatggtcttca

SEQ ID NO: 855408 - DNA, 25 bp, Homo sapien
cagtccccctggtttcggccctgtg

SEQ ID NO: 855409 - DNA, 25 bp, Homo sapien
cagcaggtttattgtccccccacca

SEQ ID NO: 855410 - DNA, 25 bp, Homo sapien
gtccactcctggctgttcacaaacg

SEQ ID NO: 855411 - DNA, 25 bp, Homo sapien
cactcctggctgttcacaaacgagt

SEQ ID NO: 855412 - DNA, 25 bp, Homo sapien
ctccggtacggagcggctcagcgtc

SEQ ID NO: 855413 - DNA, 25 bp, Homo sapien
ctttaagctccggtacggagcggct

SEQ ID NO: 855414 - DNA, 25 bp, Homo sapien
gctgacttcccgctagacaggttcc

SEQ ID NO: 855415 - DNA, 25 bp, Homo sapien
tcagatagcggtgcaccagggctga

SEQ ID NO: 855416 - DNA, 25 bp, Homo sapien
accagggctgacttcccgctagaca

SEQ ID NO: 855417 - DNA, 25 bp, Homo sapien
tcctggacataggtccccgtcagat

SEQ ID NO: 855418 - DNA, 25 bp, Homo sapien
actctggccatccaccacaatctcc

SEQ ID NO: 855419 - DNA, 25 bp, Homo sapien
agcagcaggtaactctggccatcca

SEQ ID NO: 855420 - DNA, 25 bp, Homo sapien
cagcagcaggtaactctggccatcc

SEQ ID NO: 855421 - DNA, 25 bp, Homo sapien
acctcgctggcgttgcggaagctgc

SEQ ID NO: 855422 - DNA, 25 bp, Homo sapien
agttgtacaccgtctggaaactgat

SEQ ID NO: 855423 - DNA, 25 bp, Homo sapien
tgcagagacgcaggaagtagttgta

SEQ ID NO: 855424 - DNA, 25 bp, Homo sapien
agcaccatgggcacctcgctggcgt

SEQ ID NO: 855425 - DNA, 25 bp, Homo sapien
gcgggagtcattcagctttcggaga

SEQ ID NO: 855426 - DNA, 25 bp, Homo sapien
ctcagacacgagcagcacggagagt

SEQ ID NO: 855427 - DNA, 25 bp, Homo sapien
ctcactgagtgcaaaccagcaagca

SEQ ID NO: 855428 - DNA, 25 bp, Homo sapien
cacagacctgctagtcacagggaca

SEQ ID NO: 855429 - DNA, 25 bp, Homo sapien
taggtcgcgcacgtctcatagtagg

SEQ ID NO: 855430 - DNA, 25 bp, Homo sapien
gctctgctgtcgtcgataacccggg

SEQ ID NO: 855431 - DNA, 25 bp, Homo sapien
taggtgcaccgcttcagatctgtgg

SEQ ID NO: 855432 - DNA, 25 bp, Homo sapien
gaagacacgctccacattgagcccg

SEQ ID NO: 855433 - DNA, 25 bp, Homo sapien
ttgatgtgcacggccgggatggagg

SEQ ID NO: 855434 - DNA, 25 bp, Homo sapien
gctgggcgagttgggcagtgacttg

SEQ ID NO: 855435 - DNA, 25 bp, Homo sapien
cagttgctgcttctttcgcaaggcc

SEQ ID NO: 855436 - DNA, 25 bp, Homo sapien
ttcgcaaggccactaccttctgggc

SEQ ID NO: 855437 - DNA, 25 bp, Homo sapien
atgggaacgctgccgccttctcaca

SEQ ID NO: 855438 - DNA, 25 bp, Homo sapien
agccccactccgtcggtgtcgggcg

SEQ ID NO: 855439 - DNA, 25 bp, Homo sapien
tttcccacatgggaacgctgccgcc

SEQ ID NO: 855440 - DNA, 25 bp, Homo sapien
aagtgagctgcgcaagccccactcc

SEQ ID NO: 855441 - DNA, 25 bp, Homo sapien
ggaggaggcagcgatggtctcgatg

SEQ ID NO: 855442 - DNA, 25 bp, Homo sapien
tggtctcgatgcgcagctcccgctg

SEQ ID NO: 855443 - DNA, 25 bp, Homo sapien
gttggagcgccgcttggactgcttt

SEQ ID NO: 855444 - DNA, 25 bp, Homo sapien
acgagtagtcgctgaaggcgctgcc

SEQ ID NO: 855445 - DNA, 25 bp, Homo sapien
gcccaggaaaagatggctaagcctt

SEQ ID NO: 855446 - DNA, 25 bp, Homo sapien
ttgttaaaccaatcacagcggtggg

SEQ ID NO: 855447 - DNA, 25 bp, Homo sapien
tgtcgccttgggcaaacagccttcc

SEQ ID NO: 855448 - DNA, 25 bp, Homo sapien
agcatgaattttcccctcggcagtg

SEQ ID NO: 855449 - DNA, 25 bp, Homo sapien
gaatggtatgttcgccactcggcag

SEQ ID NO: 855450 - DNA, 25 bp, Homo sapien
ggaaaatataaggtcgccgctgtga

SEQ ID NO: 855451 - DNA, 25 bp, Homo sapien
ggaggccccaacagcaatgatgaga

SEQ ID NO: 855452 - DNA, 25 bp, Homo sapien
aagttatactcaagccccgcacaag

SEQ ID NO: 855453 - DNA, 25 bp, Homo sapien
gaaaagttggaaacagtggcacata

SEQ ID NO: 855454 - DNA, 25 bp, Homo sapien
aaaagttggaaacagtggcacatat

SEQ ID NO: 855455 - DNA, 25 bp, Homo sapien
agttggaaaggcctttttgttgatg

SEQ ID NO: 855456 - DNA, 25 bp, Homo sapien
gcctttttgttgatgaaaagttgga

SEQ ID NO: 855457 - DNA, 25 bp, Homo sapien
ctcggcggccgcttctcatctgaga

SEQ ID NO: 855458 - DNA, 25 bp, Homo sapien
ggccgcttctcatctgagagcagtc

SEQ ID NO: 855459 - DNA, 25 bp, Homo sapien
gtgctgtgtgtcaccaactggtctt

SEQ ID NO: 855460 - DNA, 25 bp, Homo sapien
agggggcatgtccagaggtgctgtg

SEQ ID NO: 855461 - DNA, 25 bp, Homo sapien
ttacacacggcaccatacagagcag

SEQ ID NO: 855462 - DNA, 25 bp, Homo sapien
agatggcccgtctgcggcacagaca

SEQ ID NO: 855463 - DNA, 25 bp, Homo sapien
cgaatgcggatcctaggaaataggg

SEQ ID NO: 855464 - DNA, 25 bp, Homo sapien
agcaggaacggcagaggtccatgca

SEQ ID NO: 855465 - DNA, 25 bp, Homo sapien
acaagaggcgtgttaaagaggccca

SEQ ID NO: 855466 - DNA, 25 bp, Homo sapien
tcctgggcagccctagcagtgggtc

SEQ ID NO: 855467 - DNA, 25 bp, Homo sapien
agggtctgccgagagctgcccacct

SEQ ID NO: 855468 - DNA, 25 bp, Homo sapien
gaagagaaaacaagaggcgtgttaa

SEQ ID NO: 855469 - DNA, 25 bp, Homo sapien
ccaccttgcactcggcagccttctt

SEQ ID NO: 855470 - DNA, 25 bp, Homo sapien
gtccaccttgcactcggcagccttc

SEQ ID NO: 855471 - DNA, 25 bp, Homo sapien
tccaccttgcactcggcagccttct

SEQ ID NO: 855472 - DNA, 25 bp, Homo sapien
gaggtctgatcagaaaccaggagcc

SEQ ID NO: 855473 - DNA, 25 bp, Homo sapien
gcatgaggaggtcacgatgtcgtca

SEQ ID NO: 855474 - DNA, 25 bp, Homo sapien
tctcctgggccactttgagcaaagc

SEQ ID NO: 855475 - DNA, 25 bp, Homo sapien
gtatagacggccaggagtagacgct

SEQ ID NO: 855476 - DNA, 25 bp, Homo sapien
agggacttgccgctccgctttagca

SEQ ID NO: 855477 - DNA, 25 bp, Homo sapien
gagcgtcacatacttcttcttccac

SEQ ID NO: 855478 - DNA, 25 bp, Homo sapien
gttcagggacttgccgctccgcttt

SEQ ID NO: 855479 - DNA, 25 bp, Homo sapien
cccgttgtcacagagcgtcacatac

SEQ ID NO: 855480 - DNA, 25 bp, Homo sapien
tcttccacatccaagacaccccttg

SEQ ID NO: 855481 - DNA, 25 bp, Homo sapien
cacatccaagacaccccttgccact

SEQ ID NO: 855482 - DNA, 25 bp, Homo sapien
tccacatccaagacaccccttgcca

SEQ ID NO: 855483 - DNA, 25 bp, Homo sapien
ttccacatccaagacaccccttgcc

SEQ ID NO: 855484 - DNA, 25 bp, Homo sapien
ctcagcccagagttctgtcggagcc

SEQ ID NO: 855485 - DNA, 25 bp, Homo sapien
gctcagcccagagttctgtcggagc

SEQ ID NO: 855486 - DNA, 25 bp, Homo sapien
ggctcagcccagagttctgtcggag

SEQ ID NO: 855487 - DNA, 25 bp, Homo sapien
aggctcagcccagagttctgtcgga

SEQ ID NO: 855488 - DNA, 25 bp, Homo sapien
aatttaattgatgttgcagatagaa

SEQ ID NO: 855489 - DNA, 25 bp, Homo sapien
ttgtgtgaatggctccgctggctgc

SEQ ID NO: 855490 - DNA, 25 bp, Homo sapien
gaattaacagaaggtgattgtgtga

SEQ ID NO: 855491 - DNA, 25 bp, Homo sapien
tcagggctggcccacgaactcatct

SEQ ID NO: 855492 - DNA, 25 bp, Homo sapien
agccccggattccacgccctcgtgc

SEQ ID NO: 855493 - DNA, 25 bp, Homo sapien
cgtttccctccgtcagcagaacggg

SEQ ID NO: 855494 - DNA, 25 bp, Homo sapien
gtgcccgggcaaccctggagcctgg

SEQ ID NO: 855495 - DNA, 25 bp, Homo sapien
gcagcgtttccctccgtcagcagaa

SEQ ID NO: 855496 - DNA, 25 bp, Homo sapien
ctcgatctccacggtgctcaaagca

SEQ ID NO: 855497 - DNA, 25 bp, Homo sapien
tcgatctccacggtgctcaaagcag

SEQ ID NO: 855498 - DNA, 25 bp, Homo sapien
cgatctccacggtgctcaaagcagc

SEQ ID NO: 855499 - DNA, 25 bp, Homo sapien
tgtgttactccgctccacggacagc

SEQ ID NO: 855500 - DNA, 25 bp, Homo sapien
ctggcactttcaccgttgtccgcag

SEQ ID NO: 855501 - DNA, 25 bp, Homo sapien
tctccttgccgtggatgttctgcat

SEQ ID NO: 855502 - DNA, 25 bp, Homo sapien
caccgttgtccgcagcaggtcaatc

SEQ ID NO: 855503 - DNA, 25 bp, Homo sapien
tgggggaaagcaatcgggagccagg

SEQ ID NO: 855504 - DNA, 25 bp, Homo sapien
gtgtggaaggacggaccctggaaga

SEQ ID NO: 855505 - DNA, 25 bp, Homo sapien
cttgggggaaagcaatcgggagcca

SEQ ID NO: 855506 - DNA, 25 bp, Homo sapien
aaagcaatcgggagccaggggctct

SEQ ID NO: 855507 - DNA, 25 bp, Homo sapien
ggcccagggaacatgagatccaatg

SEQ ID NO: 855508 - DNA, 25 bp, Homo sapien
ctgtgctgccaagcgctgactgctg

SEQ ID NO: 855509 - DNA, 25 bp, Homo sapien
tccaatggtctaggacaacactggg

SEQ ID NO: 855510 - DNA, 25 bp, Homo sapien
gacctgtgctgccaagcgctgactg

SEQ ID NO: 855511 - DNA, 25 bp, Homo sapien
ggacagcgtcttctcgtttcccttg

SEQ ID NO: 855512 - DNA, 25 bp, Homo sapien
acagcgtcttctcgtttcccttgct

SEQ ID NO: 855513 - DNA, 25 bp, Homo sapien
ggagcgagggcacggggctgtctcc

SEQ ID NO: 855514 - DNA, 25 bp, Homo sapien
gctcccaggtgagggatgtcaggga

SEQ ID NO: 855515 - DNA, 25 bp, Homo sapien
gctgggtgggcaccgtccgcgagct

SEQ ID NO: 855516 - DNA, 25 bp, Homo sapien
gagggtcggtgtcggcgtcggcatg

SEQ ID NO: 855517 - DNA, 25 bp, Homo sapien
tcggcatgcggcagcgggacgcggg

SEQ ID NO: 855518 - DNA, 25 bp, Homo sapien
ggtgggcaccgtccgcgagctcctg

SEQ ID NO: 855519 - DNA, 25 bp, Homo sapien
tgagatgttaacatcgcccggtgag

SEQ ID NO: 855520 - DNA, 25 bp, Homo sapien
agatgttaacatcgcccggtgagtg

SEQ ID NO: 855521 - DNA, 25 bp, Homo sapien
atcgcccggtgagtgagagacatgt

SEQ ID NO: 855522 - DNA, 25 bp, Homo sapien
taacatcgcccggtgagtgagagac

SEQ ID NO: 855523 - DNA, 25 bp, Homo sapien
tgagttggaactccgagaacctaag

SEQ ID NO: 855524 - DNA, 25 bp, Homo sapien
tattagtaattatcctgttgggctg

SEQ ID NO: 855525 - DNA, 25 bp, Homo sapien
ttaatctttcgtttcccatcaggga

SEQ ID NO: 855526 - DNA, 25 bp, Homo sapien
gaaatggccccaggcggtctaagaa

SEQ ID NO: 855527 - DNA, 25 bp, Homo sapien
tccaacttgtggaacgagctgggtg

SEQ ID NO: 855528 - DNA, 25 bp, Homo sapien
gggaggattctcaaagatactatcc

SEQ ID NO: 855529 - DNA, 25 bp, Homo sapien
ccatcgccgcagtgctccttgaggg

SEQ ID NO: 855530 - DNA, 25 bp, Homo sapien
tatgccatttgcttcgcctcagctt

SEQ ID NO: 855531 - DNA, 25 bp, Homo sapien
aaacggagcaggagcgctggtgcag

SEQ ID NO: 855532 - DNA, 25 bp, Homo sapien
gtcggcgctggaaacggagcaggag

SEQ ID NO: 855533 - DNA, 25 bp, Homo sapien
gagtgcagggatgcgctgctggccg

SEQ ID NO: 855534 - DNA, 25 bp, Homo sapien
ccgagctgctgagggggcgctcaga

SEQ ID NO: 855535 - DNA, 25 bp, Homo sapien
ctgatggggatgcgggagccaccac

SEQ ID NO: 855536 - DNA, 25 bp, Homo sapien
atggggatgcgggagccaccaccag

SEQ ID NO: 855537 - DNA, 25 bp, Homo sapien
gggatgcgggagccaccaccagcgc

SEQ ID NO: 855538 - DNA, 25 bp, Homo sapien
tggggatgcgggagccaccaccagc

SEQ ID NO: 855539 - DNA, 25 bp, Homo sapien
agtcctgccaactgtagctgggcca

SEQ ID NO: 855540 - DNA, 25 bp, Homo sapien
gagaataggaaacttaggcagagca

SEQ ID NO: 855541 - DNA, 25 bp, Homo sapien
gaattagaaacaatcagggagctgc

SEQ ID NO: 855542 - DNA, 25 bp, Homo sapien
gacggacacctctctctaggcgagg

SEQ ID NO: 855543 - DNA, 25 bp, Homo sapien
actgagtacctcagctgggccactg

SEQ ID NO: 855544 - DNA, 25 bp, Homo sapien
ctgagtacctcagctgggccactgg

SEQ ID NO: 855545 - DNA, 25 bp, Homo sapien
ggaactgagtacctcagctgggcca

SEQ ID NO: 855546 - DNA, 25 bp, Homo sapien
ctggaactgagtacctcagctgggc

SEQ ID NO: 855547 - DNA, 25 bp, Homo sapien
cttcttccggttggagtggggagat

SEQ ID NO: 855548 - DNA, 25 bp, Homo sapien
cttcagtagcactgctggggccgtc

SEQ ID NO: 855549 - DNA, 25 bp, Homo sapien
tcagtagcactgctggggccgtctg

SEQ ID NO: 855550 - DNA, 25 bp, Homo sapien
tcctccggtgcttcttccggttgga

SEQ ID NO: 855551 - DNA, 25 bp, Homo sapien
gactgtgaacccaagcaatgtggtg

SEQ ID NO: 855552 - DNA, 25 bp, Homo sapien
gagaccccacgctgtaagtactaag

SEQ ID NO: 855553 - DNA, 25 bp, Homo sapien
caggtcctgcccgaacatcttagag

SEQ ID NO: 855554 - DNA, 25 bp, Homo sapien
cacaggtgcctgtggtaaggcccca

SEQ ID NO: 855555 - DNA, 25 bp, Homo sapien
gcagccgcctcattttgcagctcat

SEQ ID NO: 855556 - DNA, 25 bp, Homo sapien
tcattttgcagctcattaaacccaa

SEQ ID NO: 855557 - DNA, 25 bp, Homo sapien
caatattcctgacggcgtcagcgtg

SEQ ID NO: 855558 - DNA, 25 bp, Homo sapien
tcattaaacccaatattcctgacgg

SEQ ID NO: 855559 - DNA, 25 bp, Homo sapien
gggatgcaagatcttggcacccctg

SEQ ID NO: 855560 - DNA, 25 bp, Homo sapien
ggccagagtaaacctgcaagactag

SEQ ID NO: 855561 - DNA, 25 bp, Homo sapien
ttctcattcctaaccacctgtggag

SEQ ID NO: 855562 - DNA, 25 bp, Homo sapien
actgccgggaatgggtgtgaaacca

SEQ ID NO: 855563 - DNA, 25 bp, Homo sapien
tggcaagtgtcctcccctagaccct

SEQ ID NO: 855564 - DNA, 25 bp, Homo sapien
ctgctccactggcaagtgtcctccc

SEQ ID NO: 855565 - DNA, 25 bp, Homo sapien
gctatcgccacaactccactcacta

SEQ ID NO: 855566 - DNA, 25 bp, Homo sapien
tccactggcaagtgtcctcccctag

SEQ ID NO: 855567 - DNA, 25 bp, Homo sapien
ctggcctgcgtgcacacccagggca

SEQ ID NO: 855568 - DNA, 25 bp, Homo sapien
tggcctgcgtgcacacccagggcat

SEQ ID NO: 855569 - DNA, 25 bp, Homo sapien
gttgggggggtgtttatgccatcag

SEQ ID NO: 855570 - DNA, 25 bp, Homo sapien
ttgaagcctcgaagtgccacgtctg

SEQ ID NO: 855571 - DNA, 25 bp, Homo sapien
acaaattcaaacgactcctctgcct

SEQ ID NO: 855572 - DNA, 25 bp, Homo sapien
ttggcactgcggcagccttgcaggc

SEQ ID NO: 855573 - DNA, 25 bp, Homo sapien
acgtctgcccagtgagggacaccac

SEQ ID NO: 855574 - DNA, 25 bp, Homo sapien
ggtgcggacggcctgcacagccaga

SEQ ID NO: 855575 - DNA, 25 bp, Homo sapien
cacagccagagctgcgttctggttc

SEQ ID NO: 855576 - DNA, 25 bp, Homo sapien
gcatcgcagtcgatacaaaagctgt

SEQ ID NO: 855577 - DNA, 25 bp, Homo sapien
tgttgccgcggacggtgcggacggc

SEQ ID NO: 855578 - DNA, 25 bp, Homo sapien
gtgtcggtggatgcctgagcactca

SEQ ID NO: 855579 - DNA, 25 bp, Homo sapien
ccagtcatcgaggtcaagggagcgc

SEQ ID NO: 855580 - DNA, 25 bp, Homo sapien
gcttggagtagccacccaaggcccc

SEQ ID NO: 855581 - DNA, 25 bp, Homo sapien
caatgcacatcagggcacccaggtt

SEQ ID NO: 855582 - DNA, 25 bp, Homo sapien
gggcccgttgttgtgaggcgcctga

SEQ ID NO: 855583 - DNA, 25 bp, Homo sapien
tgtgaggcgcctgagtgacaggcac

SEQ ID NO: 855584 - DNA, 25 bp, Homo sapien
aagggcccgttgttgtgaggcgcct

SEQ ID NO: 855585 - DNA, 25 bp, Homo sapien
agaaagggcccgttgttgtgaggcg

SEQ ID NO: 855586 - DNA, 25 bp, Homo sapien
accaacagccgcaggtcatcttcca

SEQ ID NO: 855587 - DNA, 25 bp, Homo sapien
gacaacgttggccatggcactggag

SEQ ID NO: 855588 - DNA, 25 bp, Homo sapien
tgagcagctgcgtgaagacaacgtt

SEQ ID NO: 855589 - DNA, 25 bp, Homo sapien
agagcttctgttcatacttggcccg

SEQ ID NO: 855590 - DNA, 25 bp, Homo sapien
tcaagatgtctgcacactcctggct

SEQ ID NO: 855591 - DNA, 25 bp, Homo sapien
gggtaggcgctaagccacagccctc

SEQ ID NO: 855592 - DNA, 25 bp, Homo sapien
ggttggtgccattggcaggctctct

SEQ ID NO: 855593 - DNA, 25 bp, Homo sapien
tgccggcccggcgagcatatgccag

SEQ ID NO: 855594 - DNA, 25 bp, Homo sapien
gggaggagggtctttgggccatgga

SEQ ID NO: 855595 - DNA, 25 bp, Homo sapien
ttggcttcgtcctctcagcatgtcc

SEQ ID NO: 855596 - DNA, 25 bp, Homo sapien
taatttccttggcttcgtcctctca

SEQ ID NO: 855597 - DNA, 25 bp, Homo sapien
tcctgtcccttttcaatggcacctt

SEQ ID NO: 855598 - DNA, 25 bp, Homo sapien
caccttagggcagagggctaaatcc

SEQ ID NO: 855599 - DNA, 25 bp, Homo sapien
aggagggagaggtcctgctcccctc

SEQ ID NO: 855600 - DNA, 25 bp, Homo sapien
taggaggcagggatctggaggaggg

SEQ ID NO: 855601 - DNA, 25 bp, Homo sapien
ggaggagggagaggtcctgctcccc

SEQ ID NO: 855602 - DNA, 25 bp, Homo sapien
gagggagaggtcctgctcccctctc

SEQ ID NO: 855603 - DNA, 25 bp, Homo sapien
ctttcatccagcacccccaacttgg

SEQ ID NO: 855604 - DNA, 25 bp, Homo sapien
ggatgaaggcgtgtgaggggctggc

SEQ ID NO: 855605 - DNA, 25 bp, Homo sapien
tcacccctcgtctctttcatccagc

SEQ ID NO: 855606 - DNA, 25 bp, Homo sapien
ccaacttggtgccgtcctcttcctg

SEQ ID NO: 855607 - DNA, 25 bp, Homo sapien
cataaatattccaatgtacaaagtt

SEQ ID NO: 855608 - DNA, 25 bp, Homo sapien
caaagcccaggcacaagtcagtcta

SEQ ID NO: 855609 - DNA, 25 bp, Homo sapien
ctagaaaggctacctgacggctggg

SEQ ID NO: 855610 - DNA, 25 bp, Homo sapien
caagggctaccagcaatgtgggtcc

SEQ ID NO: 855611 - DNA, 25 bp, Homo sapien
cattctggccagtacagggtgtggc

SEQ ID NO: 855612 - DNA, 25 bp, Homo sapien
tccgactgtaagctcatcaccttgg

SEQ ID NO: 855613 - DNA, 25 bp, Homo sapien
caaaacccgtctttatgtgcctgga

SEQ ID NO: 855614 - DNA, 25 bp, Homo sapien
aatgaaccgggcatagtagcatgtg

SEQ ID NO: 855615 - DNA, 25 bp, Homo sapien
gctgctctgataagaggaggctcac

SEQ ID NO: 855616 - DNA, 25 bp, Homo sapien
tatttagcagtgtaacttttagacc

SEQ ID NO: 855617 - DNA, 25 bp, Homo sapien
agacctgcgtgacatctacaaagcg

SEQ ID NO: 855618 - DNA, 25 bp, Homo sapien
caggaccttcgtcctggtcagtttt

SEQ ID NO: 855619 - DNA, 25 bp, Homo sapien
tttggagctccggaccaggaccttc

SEQ ID NO: 855620 - DNA, 25 bp, Homo sapien
tgtgagccctctacctgggttcggg

SEQ ID NO: 855621 - DNA, 25 bp, Homo sapien
tcaccaagaggacccacaacgtgtg

SEQ ID NO: 855622 - DNA, 25 bp, Homo sapien
tctgggaactaacagctgctaacct

SEQ ID NO: 855623 - DNA, 25 bp, Homo sapien
cactctcttacctacagctggacag

SEQ ID NO: 855624 - DNA, 25 bp, Homo sapien
tgattggctggtgagccggccgcac

SEQ ID NO: 855625 - DNA, 25 bp, Homo sapien
cgaggccgtgattggctggtgagcc

SEQ ID NO: 855626 - DNA, 25 bp, Homo sapien
ccgcacgcggaggatcctaaggagc

SEQ ID NO: 855627 - DNA, 25 bp, Homo sapien
ggaggatcctaaggagcagctctgt

SEQ ID NO: 855628 - DNA, 25 bp, Homo sapien
ccatttctctttccctgtttcttct

SEQ ID NO: 855629 - DNA, 25 bp, Homo sapien
ctttccctgtttcttctcccctcat

SEQ ID NO: 855630 - DNA, 25 bp, Homo sapien
cattttcccatttctctttccctgt

SEQ ID NO: 855631 - DNA, 25 bp, Homo sapien
ccattttcccatttctctttccctg

SEQ ID NO: 855632 - DNA, 25 bp, Homo sapien
cggaggccgcgccagagacagcatc

SEQ ID NO: 855633 - DNA, 25 bp, Homo sapien
gccagagacagcatcgaggccgcga

SEQ ID NO: 855634 - DNA, 25 bp, Homo sapien
cccagtgcccgctgaggcgccggct

SEQ ID NO: 855635 - DNA, 25 bp, Homo sapien
agacagcatcgaggccgcgagcgca

SEQ ID NO: 855636 - DNA, 25 bp, Homo sapien
tcctgggaacgcaaacagaagcgcg

SEQ ID NO: 855637 - DNA, 25 bp, Homo sapien
caactgtgaaggtgtcggaactaac

SEQ ID NO: 855638 - DNA, 25 bp, Homo sapien
gcctcagtgggcctttccggaagaa

SEQ ID NO: 855639 - DNA, 25 bp, Homo sapien
taagttctgcccacccgaatgaggt

SEQ ID NO: 855640 - DNA, 25 bp, Homo sapien
tgccccaggggcacagcctcaagga

SEQ ID NO: 855641 - DNA, 25 bp, Homo sapien
tgggtgccccaggggcacagcctca

SEQ ID NO: 855642 - DNA, 25 bp, Homo sapien
ggtgccccaggggcacagcctcaag

SEQ ID NO: 855643 - DNA, 25 bp, Homo sapien
ccaggtgggtgccccaggggcacag

SEQ ID NO: 855644 - DNA, 25 bp, Homo sapien
cagccctaagatgaggggaagcgct

SEQ ID NO: 855645 - DNA, 25 bp, Homo sapien
ccgcagcagagccaacagggagctc

SEQ ID NO: 855646 - DNA, 25 bp, Homo sapien
agatgaggggaagcgctggccgcag

SEQ ID NO: 855647 - DNA, 25 bp, Homo sapien
gagccaacagggagctcagtcgcat

SEQ ID NO: 855648 - DNA, 25 bp, Homo sapien
ggatccaggaaacccgcaggaggct

SEQ ID NO: 855649 - DNA, 25 bp, Homo sapien
ctggatccaggaaacccgcaggagg

SEQ ID NO: 855650 - DNA, 25 bp, Homo sapien
tccaggaaacccgcaggaggctcag

SEQ ID NO: 855651 - DNA, 25 bp, Homo sapien
atccaggaaacccgcaggaggctca

SEQ ID NO: 855652 - DNA, 25 bp, Homo sapien
gcctcgacacagggatcttctccct

SEQ ID NO: 855653 - DNA, 25 bp, Homo sapien
agcctcgacacagggatcttctccc

SEQ ID NO: 855654 - DNA, 25 bp, Homo sapien
ctcgacacagggatcttctccctcc

SEQ ID NO: 855655 - DNA, 25 bp, Homo sapien
cctcgacacagggatcttctccctc

SEQ ID NO: 855656 - DNA, 25 bp, Homo sapien
cactttggtctagccgagctctgga

SEQ ID NO: 855657 - DNA, 25 bp, Homo sapien
caatccggggtttgaagtcttcatc

SEQ ID NO: 855658 - DNA, 25 bp, Homo sapien
tcatcactttggtctagccgagctc

SEQ ID NO: 855659 - DNA, 25 bp, Homo sapien
ggtctagccgagctctggaatctgg

SEQ ID NO: 855660 - DNA, 25 bp, Homo sapien
aagtgatgggccaccgtacggttca

SEQ ID NO: 855661 - DNA, 25 bp, Homo sapien
gcaggagactccgtgacaacaggta

SEQ ID NO: 855662 - DNA, 25 bp, Homo sapien
tctgcccggcctaagtacaggtctt

SEQ ID NO: 855663 - DNA, 25 bp, Homo sapien
cagagagtcaatgaggcagcgtcca

SEQ ID NO: 855664 - DNA, 25 bp, Homo sapien
gtaggcaactaaggacactctcggc

SEQ ID NO: 855665 - DNA, 25 bp, Homo sapien
cactagcttatcagggactgggact

SEQ ID NO: 855666 - DNA, 25 bp, Homo sapien
tcagtgcattgcttacaggctagcc

SEQ ID NO: 855667 - DNA, 25 bp, Homo sapien
tctccagcacaagaaacagggcagc

SEQ ID NO: 855668 - DNA, 25 bp, Homo sapien
tccaactccagagcgctgaagcgtt

SEQ ID NO: 855669 - DNA, 25 bp, Homo sapien
gttcaaatgagcgatactgctgccc

SEQ ID NO: 855670 - DNA, 25 bp, Homo sapien
ctgaagcgtttgtggagccggtaca

SEQ ID NO: 855671 - DNA, 25 bp, Homo sapien
tacatgagggtaccttcggagacag

SEQ ID NO: 855672 - DNA, 25 bp, Homo sapien
tgccattatacagggcctagcccag

SEQ ID NO: 855673 - DNA, 25 bp, Homo sapien
tattctgtctgaacactgtgcggag

SEQ ID NO: 855674 - DNA, 25 bp, Homo sapien
gacaggcactattgaggaggagcta

SEQ ID NO: 855675 - DNA, 25 bp, Homo sapien
cattcaagttgtgctgggagcttac

SEQ ID NO: 855676 - DNA, 25 bp, Homo sapien
tcaacacttagtgaggggtcccttg

SEQ ID NO: 855677 - DNA, 25 bp, Homo sapien
tgagctctgtcctaactccatcaac

SEQ ID NO: 855678 - DNA, 25 bp, Homo sapien
aatgcacctcacattagtgccagct

SEQ ID NO: 855679 - DNA, 25 bp, Homo sapien
tctgagattcaaacagctgagctct

SEQ ID NO: 855680 - DNA, 25 bp, Homo sapien
catagggcataggtaggatttccac

SEQ ID NO: 855681 - DNA, 25 bp, Homo sapien
gaagcgccgatagccgttgagcagt

SEQ ID NO: 855682 - DNA, 25 bp, Homo sapien
gatagcgccgattgagctgctccag

SEQ ID NO: 855683 - DNA, 25 bp, Homo sapien
aatgcatgttctcgtggctccagga

SEQ ID NO: 855684 - DNA, 25 bp, Homo sapien
gtagtcagcgttgtagaagcagccc

SEQ ID NO: 855685 - DNA, 25 bp, Homo sapien
tctacggcccgaaagaggtggagcc

SEQ ID NO: 855686 - DNA, 25 bp, Homo sapien
cggcagcggtggtagagttcttcac

SEQ ID NO: 855687 - DNA, 25 bp, Homo sapien
ctaagtgctattggcctgctcctgc

SEQ ID NO: 855688 - DNA, 25 bp, Homo sapien
tgaggcagacaaaggaaaggtaatg

SEQ ID NO: 855689 - DNA, 25 bp, Homo sapien
cagcaacaattctctatctgtccac

SEQ ID NO: 855690 - DNA, 25 bp, Homo sapien
cagacaaaggaaaggtaatgaggtt

SEQ ID NO: 855691 - DNA, 25 bp, Homo sapien
attctctatctgtccaccatcttgc

SEQ ID NO: 855692 - DNA, 25 bp, Homo sapien
ggcagaagacatgtttaataacatt

SEQ ID NO: 855693 - DNA, 25 bp, Homo sapien
gaagacatgtttaataacattttca

SEQ ID NO: 855694 - DNA, 25 bp, Homo sapien
gacatgtttaataacattttcatat

SEQ ID NO: 855695 - DNA, 25 bp, Homo sapien
gcagaagacatgtttaataacattt

SEQ ID NO: 855696 - DNA, 25 bp, Homo sapien
caaaaataagcagcacgacggaact

SEQ ID NO: 855697 - DNA, 25 bp, Homo sapien
gagcagtcgctggttgtgcgcaaca

SEQ ID NO: 855698 - DNA, 25 bp, Homo sapien
ctctaaagatccagcagcgcaggca

SEQ ID NO: 855699 - DNA, 25 bp, Homo sapien
gcgcaacacctaggagcccaaaaat

SEQ ID NO: 855700 - DNA, 25 bp, Homo sapien
ggtgaagagggagactcagggagta

SEQ ID NO: 855701 - DNA, 25 bp, Homo sapien
gacctcaaggtgaagagggagactc

SEQ ID NO: 855702 - DNA, 25 bp, Homo sapien
ggacctcaaggtgaagagggagact

SEQ ID NO: 855703 - DNA, 25 bp, Homo sapien
caaggtgaagagggagactcaggga

SEQ ID NO: 855704 - DNA, 25 bp, Homo sapien
gatacataagcaggctgacccaggg

SEQ ID NO: 855705 - DNA, 25 bp, Homo sapien
cctatcttgtcagccataccggtgg

SEQ ID NO: 855706 - DNA, 25 bp, Homo sapien
tgtccccggctgaagttttctgaga

SEQ ID NO: 855707 - DNA, 25 bp, Homo sapien
tagttcactgacttctcacggcagc

SEQ ID NO: 855708 - DNA, 25 bp, Homo sapien
aaaataaatacagcagataaacctg

SEQ ID NO: 855709 - DNA, 25 bp, Homo sapien
ttaaaaataaatacagcagataaac

SEQ ID NO: 855710 - DNA, 25 bp, Homo sapien
taaaaataaatacagcagataaacc

SEQ ID NO: 855711 - DNA, 25 bp, Homo sapien
aataaatacagcagataaacctgag

SEQ ID NO: 855712 - DNA, 25 bp, Homo sapien
gggctccccgtacatgggcagcccc

SEQ ID NO: 855713 - DNA, 25 bp, Homo sapien
tctggagcccggatgccccaccagg

SEQ ID NO: 855714 - DNA, 25 bp, Homo sapien
cccgggctccccgtacatgggcagc

SEQ ID NO: 855715 - DNA, 25 bp, Homo sapien
ccagcgccccgggatgccgtctgga

SEQ ID NO: 855716 - DNA, 25 bp, Homo sapien
tgtcgtggagggaggcacacataca

SEQ ID NO: 855717 - DNA, 25 bp, Homo sapien
cacatacagggcgtctgtctgcacg

SEQ ID NO: 855718 - DNA, 25 bp, Homo sapien
gcgcacggaggctgtcgtggaggga

SEQ ID NO: 855719 - DNA, 25 bp, Homo sapien
ccagaaatagcctctcacagagctg

SEQ ID NO: 855720 - DNA, 25 bp, Homo sapien
gaagccacaaggctgccccccagat

SEQ ID NO: 855721 - DNA, 25 bp, Homo sapien
ccccagatccctggcagccaacatc

SEQ ID NO: 855722 - DNA, 25 bp, Homo sapien
gccaacatctggatgcagccagcat

SEQ ID NO: 855723 - DNA, 25 bp, Homo sapien
tccctggcagccaacatctggatgc

SEQ ID NO: 855724 - DNA, 25 bp, Homo sapien
cctcttaagggccagttggatcctc

SEQ ID NO: 855725 - DNA, 25 bp, Homo sapien
ccgagggcaccgcttggctatgtcg

SEQ ID NO: 855726 - DNA, 25 bp, Homo sapien
ggccagttggatcctccaagttctc

SEQ ID NO: 855727 - DNA, 25 bp, Homo sapien
tccaaacctagcaccaagtggcacc

SEQ ID NO: 855728 - DNA, 25 bp, Homo sapien
tcgcttgtacccgtcatgccatttg

SEQ ID NO: 855729 - DNA, 25 bp, Homo sapien
catttgtgatgagcctgccgctgaa

SEQ ID NO: 855730 - DNA, 25 bp, Homo sapien
caagtccgggagataaggcagatga

SEQ ID NO: 855731 - DNA, 25 bp, Homo sapien
tgtttggcagcaggatcatccaagt

SEQ ID NO: 855732 - DNA, 25 bp, Homo sapien
acagaggagcccaaggaggcacagc

SEQ ID NO: 855733 - DNA, 25 bp, Homo sapien
cttcacagaggagcccaaggaggca

SEQ ID NO: 855734 - DNA, 25 bp, Homo sapien
tgagacccacagcaccccatgccag

SEQ ID NO: 855735 - DNA, 25 bp, Homo sapien
ggaggcacagcccctgagacccaca

SEQ ID NO: 855736 - DNA, 25 bp, Homo sapien
tgtgagaccatcttcacagcactca

SEQ ID NO: 855737 - DNA, 25 bp, Homo sapien
tggcctacaatcatgctctcctctt

SEQ ID NO: 855738 - DNA, 25 bp, Homo sapien
actcaccctgggcttcgggatggcc

SEQ ID NO: 855739 - DNA, 25 bp, Homo sapien
cctggtatggtggcttcttgtgtga

SEQ ID NO: 855740 - DNA, 25 bp, Homo sapien
ttcaagaacagctgccacaaacaca

SEQ ID NO: 855741 - DNA, 25 bp, Homo sapien
gattcaagaacagctgccacaaaca

SEQ ID NO: 855742 - DNA, 25 bp, Homo sapien
attcaagaacagctgccacaaacac

SEQ ID NO: 855743 - DNA, 25 bp, Homo sapien
agattcaagaacagctgccacaaac

SEQ ID NO: 855744 - DNA, 25 bp, Homo sapien
gaatgctggccacagggtaagcagc

SEQ ID NO: 855745 - DNA, 25 bp, Homo sapien
ggagatgatctgtgtcctaaaacag

SEQ ID NO: 855746 - DNA, 25 bp, Homo sapien
aaacagactcgtctagaagaggaat

SEQ ID NO: 855747 - DNA, 25 bp, Homo sapien
cctaaaacagactcgtctagaagag

SEQ ID NO: 855748 - DNA, 25 bp, Homo sapien
tcccatgtgaacctttttcccagac

SEQ ID NO: 855749 - DNA, 25 bp, Homo sapien
tgtgaacctttttcccagactgaag

SEQ ID NO: 855750 - DNA, 25 bp, Homo sapien
tcccagactgaagatcgttctggga

SEQ ID NO: 855751 - DNA, 25 bp, Homo sapien
cccagactgaagatcgttctgggaa

SEQ ID NO: 855752 - DNA, 25 bp, Homo sapien
cctggcaacagggtgggtactggca

SEQ ID NO: 855753 - DNA, 25 bp, Homo sapien
cagggcctcaaggtatgtggagccc

SEQ ID NO: 855754 - DNA, 25 bp, Homo sapien
tcaaggtatgtggagcccagtccct

SEQ ID NO: 855755 - DNA, 25 bp, Homo sapien
gagagcagccttgacaattgggcac

SEQ ID NO: 855756 - DNA, 25 bp, Homo sapien
tccttaggtcctgcctctcaaagcc

SEQ ID NO: 855757 - DNA, 25 bp, Homo sapien
tgtccttaggtcctgcctctcaaag

SEQ ID NO: 855758 - DNA, 25 bp, Homo sapien
gtccttaggtcctgcctctcaaagc

SEQ ID NO: 855759 - DNA, 25 bp, Homo sapien
aggtgctgaaagtcttccggaagcg

SEQ ID NO: 855760 - DNA, 25 bp, Homo sapien
agagctttgcctgccggtgccccat

SEQ ID NO: 855761 - DNA, 25 bp, Homo sapien
gagggaccatcaggaatagagtggg

SEQ ID NO: 855762 - DNA, 25 bp, Homo sapien
tctgtggggatatttgagggaccat

SEQ ID NO: 855763 - DNA, 25 bp, Homo sapien
tggcagctgctgtctcatcaatttc

SEQ ID NO: 855764 - DNA, 25 bp, Homo sapien
ggcagctgctgtctcatcaatttcc

SEQ ID NO: 855765 - DNA, 25 bp, Homo sapien
cagctgctgtctcatcaatttcctc

SEQ ID NO: 855766 - DNA, 25 bp, Homo sapien
gatggcagctgctgtctcatcaatt

SEQ ID NO: 855767 - DNA, 25 bp, Homo sapien
tcgtgacctgtcatccacacagagg

SEQ ID NO: 855768 - DNA, 25 bp, Homo sapien
cacaaagctcttgttgaaacggtgt

SEQ ID NO: 855769 - DNA, 25 bp, Homo sapien
aaaagcagggccctagcgagttgct

SEQ ID NO: 855770 - DNA, 25 bp, Homo sapien
ggaccccgccatcgtcaagtcgtga

SEQ ID NO: 855771 - DNA, 25 bp, Homo sapien
acacgggcagttcccacagatgcca

SEQ ID NO: 855772 - DNA, 25 bp, Homo sapien
gaattgcacgctggcgggcagtcct

SEQ ID NO: 855773 - DNA, 25 bp, Homo sapien
agcgggtgcagagggacccattcct

SEQ ID NO: 855774 - DNA, 25 bp, Homo sapien
ctggaagcgggtgcagagggaccca

SEQ ID NO: 855775 - DNA, 25 bp, Homo sapien
gaagtgtgaaaccacgtgcaaaagc

SEQ ID NO: 855776 - DNA, 25 bp, Homo sapien
tgagaagtgtgaaaccacgtgcaaa

SEQ ID NO: 855777 - DNA, 25 bp, Homo sapien
gtgtgaaaccacgtgcaaaagcttc

SEQ ID NO: 855778 - DNA, 25 bp, Homo sapien
attgagaagtgtgaaaccacgtgca

SEQ ID NO: 855779 - DNA, 25 bp, Homo sapien
gtgggagggagcttcggagacacgg

SEQ ID NO: 855780 - DNA, 25 bp, Homo sapien
tgctgcccacgattggcaaggaggt

SEQ ID NO: 855781 - DNA, 25 bp, Homo sapien
gcctgaggaacgtggctgctgccca

SEQ ID NO: 855782 - DNA, 25 bp, Homo sapien
agggagcttcggagacacggcccct

SEQ ID NO: 855783 - DNA, 25 bp, Homo sapien
ccaaaggagtagtacagaggagtcc

SEQ ID NO: 855784 - DNA, 25 bp, Homo sapien
gctgctgcagcgtctaagtgattta

SEQ ID NO: 855785 - DNA, 25 bp, Homo sapien
acagaattgctgtcatcaggacggc

SEQ ID NO: 855786 - DNA, 25 bp, Homo sapien
cctcatgtagccgatttttagtggg

SEQ ID NO: 855787 - DNA, 25 bp, Homo sapien
cgcttggaaagagggttgtgggcgg

SEQ ID NO: 855788 - DNA, 25 bp, Homo sapien
ccgcttggaaagagggttgtgggcg

SEQ ID NO: 855789 - DNA, 25 bp, Homo sapien
gccgccgctgtcgccttcgcgccgc

SEQ ID NO: 855790 - DNA, 25 bp, Homo sapien
ccgccgctgtcgccttcgcgccgcc

SEQ ID NO: 855791 - DNA, 25 bp, Homo sapien
gccgcgaccagcagagtgcccggat

SEQ ID NO: 855792 - DNA, 25 bp, Homo sapien
ctgcgccacgccactcccgccgcga

SEQ ID NO: 855793 - DNA, 25 bp, Homo sapien
accagcagagtgcccggatgcggca

SEQ ID NO: 855794 - DNA, 25 bp, Homo sapien
cactcccgccgcgaccagcagagtg

SEQ ID NO: 855795 - DNA, 25 bp, Homo sapien
gaggctggggtcgaggacactcggc

SEQ ID NO: 855796 - DNA, 25 bp, Homo sapien
aaccggggcgccaagcagtgctgct

SEQ ID NO: 855797 - DNA, 25 bp, Homo sapien
gctggggtcgaggacactcggccgc

SEQ ID NO: 855798 - DNA, 25 bp, Homo sapien
gtcgaggacactcggccgccgtgtc

SEQ ID NO: 855799 - DNA, 25 bp, Homo sapien
cccgcggccgctccacccctggcca

SEQ ID NO: 855800 - DNA, 25 bp, Homo sapien
ggccaggagaggtgcccagtcggac

SEQ ID NO: 855801 - DNA, 25 bp, Homo sapien
gccccgcggccgctccacccctggc

SEQ ID NO: 855802 - DNA, 25 bp, Homo sapien
ccctggccaggagaggtgcccagtc

SEQ ID NO: 855803 - DNA, 25 bp, Homo sapien
caaagttgaatcctgtcttccctta

SEQ ID NO: 855804 - DNA, 25 bp, Homo sapien
tgtatatggaggtttccaaagttga

SEQ ID NO: 855805 - DNA, 25 bp, Homo sapien
taaaaactgggtcaattttgcttga

SEQ ID NO: 855806 - DNA, 25 bp, Homo sapien
aaactgggtcaattttgcttgaaga

SEQ ID NO: 855807 - DNA, 25 bp, Homo sapien
aattgccttgcaacgtatttcttct

SEQ ID NO: 855808 - DNA, 25 bp, Homo sapien
catttcctgttccacgctcaattgc

SEQ ID NO: 855809 - DNA, 25 bp, Homo sapien
aacacctcgattgtagcaattcccg

SEQ ID NO: 855810 - DNA, 25 bp, Homo sapien
aattcccgttgttctataattgtca

SEQ ID NO: 855811 - DNA, 25 bp, Homo sapien
ggatataaactgagttcactgttaa

SEQ ID NO: 855812 - DNA, 25 bp, Homo sapien
agaggggccgtctcacacagctgga

SEQ ID NO: 855813 - DNA, 25 bp, Homo sapien
aaagctgacggcagaggatataaac

SEQ ID NO: 855814 - DNA, 25 bp, Homo sapien
tgcctgcctagaagtctactgaaca

SEQ ID NO: 855815 - DNA, 25 bp, Homo sapien
gtgatgtgcaatcgggtctccaaca

SEQ ID NO: 855816 - DNA, 25 bp, Homo sapien
tgccagtgatgtgcaatcgggtctc

SEQ ID NO: 855817 - DNA, 25 bp, Homo sapien
tgtgcaatcgggtctccaacaagtt

SEQ ID NO: 855818 - DNA, 25 bp, Homo sapien
tgcaatcgggtctccaacaagtttt

SEQ ID NO: 855819 - DNA, 25 bp, Homo sapien
tacctatcttaagaggacgctcaca

SEQ ID NO: 855820 - DNA, 25 bp, Homo sapien
tgtaaaaaggcccagagcacctagg

SEQ ID NO: 855821 - DNA, 25 bp, Homo sapien
taggacacagagcacacagatactt

SEQ ID NO: 855822 - DNA, 25 bp, Homo sapien
catatgataggcatggagttcccac

SEQ ID NO: 855823 - DNA, 25 bp, Homo sapien
caccgtgctgaaggtcatagcaagc

SEQ ID NO: 855824 - DNA, 25 bp, Homo sapien
gataaaacaccgtgctgaaggtcat

SEQ ID NO: 855825 - DNA, 25 bp, Homo sapien
aaaacaccgtgctgaaggtcatagc

SEQ ID NO: 855826 - DNA, 25 bp, Homo sapien
cgtgctgaaggtcatagcaagctat

SEQ ID NO: 855827 - DNA, 25 bp, Homo sapien
ctgatgtagaccaaagaaggaaatg

SEQ ID NO: 855828 - DNA, 25 bp, Homo sapien
atacacccgctagctagccctggag

SEQ ID NO: 855829 - DNA, 25 bp, Homo sapien
gatgtagaccaaagaaggaaatgag

SEQ ID NO: 855830 - DNA, 25 bp, Homo sapien
tcagctgaagaaatacacccgctag

SEQ ID NO: 855831 - DNA, 25 bp, Homo sapien
atgccacttcctgaatccacccctg

SEQ ID NO: 855832 - DNA, 25 bp, Homo sapien
tagcgggggctgatccacagggtct

SEQ ID NO: 855833 - DNA, 25 bp, Homo sapien
tcttctacgcatgtgtgttgcatgc

SEQ ID NO: 855834 - DNA, 25 bp, Homo sapien
acagggtcttctacgcatgtgtgtt

SEQ ID NO: 855835 - DNA, 25 bp, Homo sapien
taaagccatcttactagacggctat

SEQ ID NO: 855836 - DNA, 25 bp, Homo sapien
tgcacatccggagaaaatctaccta

SEQ ID NO: 855837 - DNA, 25 bp, Homo sapien
aacaggaagccctagttgcacatcc

SEQ ID NO: 855838 - DNA, 25 bp, Homo sapien
agaccacagtgctgtagatccatgt

SEQ ID NO: 855839 - DNA, 25 bp, Homo sapien
ccaggatttcaactgactgactcac

SEQ ID NO: 855840 - DNA, 25 bp, Homo sapien
cccaggatttcaactgactgactca

SEQ ID NO: 855841 - DNA, 25 bp, Homo sapien
caaaattgcgatttattatccatta

SEQ ID NO: 855842 - DNA, 25 bp, Homo sapien
gaaaacaaaattgcgatttattatc

SEQ ID NO: 855843 - DNA, 25 bp, Homo sapien
acaaaattgcgatttattatccatt

SEQ ID NO: 855844 - DNA, 25 bp, Homo sapien
aacaaaattgcgatttattatccat

SEQ ID NO: 855845 - DNA, 25 bp, Homo sapien
cttgaagtccaaaggtttcagctat

SEQ ID NO: 855846 - DNA, 25 bp, Homo sapien
ttgaagtccaaaggtttcagctatt

SEQ ID NO: 855847 - DNA, 25 bp, Homo sapien
tctagtcctctcttggtcctctgaa

SEQ ID NO: 855848 - DNA, 25 bp, Homo sapien
ttgttttagttcaagcaccatcgct

SEQ ID NO: 855849 - DNA, 25 bp, Homo sapien
ctctaactggaagtttttcctcgcg

SEQ ID NO: 855850 - DNA, 25 bp, Homo sapien
tttcctcgcgtcctcttcagattgt

SEQ ID NO: 855851 - DNA, 25 bp, Homo sapien
tagctatgtctaagtacggtgtcat

SEQ ID NO: 855852 - DNA, 25 bp, Homo sapien
atctgcctgtctggttagctatgtc

SEQ ID NO: 855853 - DNA, 25 bp, Homo sapien
gtctaagtacggtgtcatttctgga

SEQ ID NO: 855854 - DNA, 25 bp, Homo sapien
tgggggaattctgattgatctgcct

SEQ ID NO: 855855 - DNA, 25 bp, Homo sapien
agaaatatttgtcagcgtccaacag

SEQ ID NO: 855856 - DNA, 25 bp, Homo sapien
tgcccttctcatgatatcccatagc

SEQ ID NO: 855857 - DNA, 25 bp, Homo sapien
gatatcccatagctaacataagggc

SEQ ID NO: 855858 - DNA, 25 bp, Homo sapien
gacatggcaaggctattccatattc

SEQ ID NO: 855859 - DNA, 25 bp, Homo sapien
tagtctgggccatcttccttaaagc

SEQ ID NO: 855860 - DNA, 25 bp, Homo sapien
ccactgttgtagatgaaagtctgca

SEQ ID NO: 855861 - DNA, 25 bp, Homo sapien
ggtgttcaccaagtacaaaagcgcc

SEQ ID NO: 855862 - DNA, 25 bp, Homo sapien
ggaaagttccgactagcaacatagc

SEQ ID NO: 855863 - DNA, 25 bp, Homo sapien
catggtgatgtgcacctgtggtgat

SEQ ID NO: 855864 - DNA, 25 bp, Homo sapien
gtgatgtgcacctgtggtgatgtgc

SEQ ID NO: 855865 - DNA, 25 bp, Homo sapien
tggtgatgtgcacctgtggtgatgt

SEQ ID NO: 855866 - DNA, 25 bp, Homo sapien
gatgtgcacctgtggtgatgtgcac

SEQ ID NO: 855867 - DNA, 25 bp, Homo sapien
tatacaaattgtacctccacatata

SEQ ID NO: 855868 - DNA, 25 bp, Homo sapien
tcctatacaaattgtacctccacat

SEQ ID NO: 855869 - DNA, 25 bp, Homo sapien
ggtgatagtgaagcaactcatttat

SEQ ID NO: 855870 - DNA, 25 bp, Homo sapien
tttggagggtgatagtgaagcaact

SEQ ID NO: 855871 - DNA, 25 bp, Homo sapien
gaagactctatttgacgccctgtga

SEQ ID NO: 855872 - DNA, 25 bp, Homo sapien
tagtgctgaggcaacacccttctga

SEQ ID NO: 855873 - DNA, 25 bp, Homo sapien
caaagactagcagggtcaggtcaaa

SEQ ID NO: 855874 - DNA, 25 bp, Homo sapien
gaagactcaaaagggctcctctgaa

SEQ ID NO: 855875 - DNA, 25 bp, Homo sapien
tgttccaggcggaagtaacaccaca

SEQ ID NO: 855876 - DNA, 25 bp, Homo sapien
ttttatgtggaccagtctctgatga

SEQ ID NO: 855877 - DNA, 25 bp, Homo sapien
ctctgatgattttctccgtaacaat

SEQ ID NO: 855878 - DNA, 25 bp, Homo sapien
taacaccacactatatccagctgga

SEQ ID NO: 855879 - DNA, 25 bp, Homo sapien
gaaatggactcaacgagacataaga

SEQ ID NO: 855880 - DNA, 25 bp, Homo sapien
taacaggaataaacacaaatgctag

SEQ ID NO: 855881 - DNA, 25 bp, Homo sapien
ctttaacaggaataaacacaaatgc

SEQ ID NO: 855882 - DNA, 25 bp, Homo sapien
aacgagacataagatgaattccagg

SEQ ID NO: 855883 - DNA, 25 bp, Homo sapien
ttgaagtaagtagagtcttagaaac

SEQ ID NO: 855884 - DNA, 25 bp, Homo sapien
cttgaagtaagtagagtcttagaaa

SEQ ID NO: 855885 - DNA, 25 bp, Homo sapien
atttccactgtgatagtttcggatc

SEQ ID NO: 855886 - DNA, 25 bp, Homo sapien
catttccactgtgatagtttcggat

SEQ ID NO: 855887 - DNA, 25 bp, Homo sapien
tttccactgtgatagtttcggatcc

SEQ ID NO: 855888 - DNA, 25 bp, Homo sapien
taaaccccaactgcaacaaattgtc

SEQ ID NO: 855889 - DNA, 25 bp, Homo sapien
tctgcggttggtaatatgagtggcc

SEQ ID NO: 855890 - DNA, 25 bp, Homo sapien
gatggatcaatatatagctctttaa

SEQ ID NO: 855891 - DNA, 25 bp, Homo sapien
tatgagtggccgcatgatccacgtt

SEQ ID NO: 855892 - DNA, 25 bp, Homo sapien
tctttcatacccaagagagctaggg

SEQ ID NO: 855893 - DNA, 25 bp, Homo sapien
tcctggttattaacactcctgtggg

SEQ ID NO: 855894 - DNA, 25 bp, Homo sapien
ccaagagagctagggcatgtgaaag

SEQ ID NO: 855895 - DNA, 25 bp, Homo sapien
ccttcccaatctggagtaataaaga

SEQ ID NO: 855896 - DNA, 25 bp, Homo sapien
cagtgacaggttcaaggctgcccaa

SEQ ID NO: 855897 - DNA, 25 bp, Homo sapien
ccctgaatgggctaaggtggcaacc

SEQ ID NO: 855898 - DNA, 25 bp, Homo sapien
tctgggacacagattatggcccttg

SEQ ID NO: 855899 - DNA, 25 bp, Homo sapien
tgaatgaatcacctaaccctgagac

SEQ ID NO: 855900 - DNA, 25 bp, Homo sapien
ccaagttagggactgagatttcaca

SEQ ID NO: 855901 - DNA, 25 bp, Homo sapien
tcgcccagggattcaagttaaaatg

SEQ ID NO: 855902 - DNA, 25 bp, Homo sapien
tgaggcctgtcattccattcggaac

SEQ ID NO: 855903 - DNA, 25 bp, Homo sapien
cagcaaagtcccatcccaagttagg

SEQ ID NO: 855904 - DNA, 25 bp, Homo sapien
gcgtgcgtggagtagcccatccctt

SEQ ID NO: 855905 - DNA, 25 bp, Homo sapien
tgctgggccgcgtgcgtggagtagc

SEQ ID NO: 855906 - DNA, 25 bp, Homo sapien
tgatgttctcgaggcggcgtctttt

SEQ ID NO: 855907 - DNA, 25 bp, Homo sapien
tcgaggcggcgtcttttcttctctt

SEQ ID NO: 855908 - DNA, 25 bp, Homo sapien
tcatccaagttcccgctggctgcgt

SEQ ID NO: 855909 - DNA, 25 bp, Homo sapien
agggcctcatccaagttcccgctgg

SEQ ID NO: 855910 - DNA, 25 bp, Homo sapien
caagttcccgctggctgcgtggagt

SEQ ID NO: 855911 - DNA, 25 bp, Homo sapien
ttcagggcctcatccaagttcccgc

SEQ ID NO: 855912 - DNA, 25 bp, Homo sapien
tggacaggcaccacgttttggagcc

SEQ ID NO: 855913 - DNA, 25 bp, Homo sapien
aacctgcccttcagatccggatgac

SEQ ID NO: 855914 - DNA, 25 bp, Homo sapien
cagaaaccctacacaaagtcctggc

SEQ ID NO: 855915 - DNA, 25 bp, Homo sapien
aggacccactgctcagggacaaggc

SEQ ID NO: 855916 - DNA, 25 bp, Homo sapien
atttaaccaccacatctgaggattg

SEQ ID NO: 855917 - DNA, 25 bp, Homo sapien
cggttgtcggtttcaggattggaat

SEQ ID NO: 855918 - DNA, 25 bp, Homo sapien
ggattggaatcatttaaccaccaca

SEQ ID NO: 855919 - DNA, 25 bp, Homo sapien
gttgtcggtttcaggattggaatca

SEQ ID NO: 855920 - DNA, 25 bp, Homo sapien
cagcttcggccacgagtgcatcaaa

SEQ ID NO: 855921 - DNA, 25 bp, Homo sapien
aggcaggcttcctccgttgtgagca

SEQ ID NO: 855922 - DNA, 25 bp, Homo sapien
gggcggccagctggacgttgcctct

SEQ ID NO: 855923 - DNA, 25 bp, Homo sapien
tgaacactctcagcgcagcttcggc

SEQ ID NO: 855924 - DNA, 25 bp, Homo sapien
taggataggtactctgcaataataa

SEQ ID NO: 855925 - DNA, 25 bp, Homo sapien
ttccagtatctcattgacggcctct

SEQ ID NO: 855926 - DNA, 25 bp, Homo sapien
ttccagagttgagtcaagatagtct

SEQ ID NO: 855927 - DNA, 25 bp, Homo sapien
tcaagatagtcttcctcatgctctg

SEQ ID NO: 855928 - DNA, 25 bp, Homo sapien
ctttgttgctgacttcctattttct

SEQ ID NO: 855929 - DNA, 25 bp, Homo sapien
tctttgttgctgacttcctattttc

SEQ ID NO: 855930 - DNA, 25 bp, Homo sapien
ttgttgctgacttcctattttctac

SEQ ID NO: 855931 - DNA, 25 bp, Homo sapien
tttctttgttgctgacttcctattt

SEQ ID NO: 855932 - DNA, 25 bp, Homo sapien
taagagcataaaacactggcgtccc

SEQ ID NO: 855933 - DNA, 25 bp, Homo sapien
gaagattcccatcagtccaaactgg

SEQ ID NO: 855934 - DNA, 25 bp, Homo sapien
catttgctgcgacctggtgtggccc

SEQ ID NO: 855935 - DNA, 25 bp, Homo sapien
gacggttactgctggagccgacaca

SEQ ID NO: 855936 - DNA, 25 bp, Homo sapien
tcaaggacacctgaccagttgtgca

SEQ ID NO: 855937 - DNA, 25 bp, Homo sapien
ggacaggagctacccataggacata

SEQ ID NO: 855938 - DNA, 25 bp, Homo sapien
caaggacagggtaaggccgtgatca

SEQ ID NO: 855939 - DNA, 25 bp, Homo sapien
cactgtcgccttgctatgaatgaag

SEQ ID NO: 855940 - DNA, 25 bp, Homo sapien
tccccatccctgacctggcgaaagg

SEQ ID NO: 855941 - DNA, 25 bp, Homo sapien
gacctggcgaaaggcctagtcctgg

SEQ ID NO: 855942 - DNA, 25 bp, Homo sapien
gccactgaacctggttattttggca

SEQ ID NO: 855943 - DNA, 25 bp, Homo sapien
cccacgaaactgggcctttcctgct

SEQ ID NO: 855944 - DNA, 25 bp, Homo sapien
caagcttttgggtgggtcttatgca

SEQ ID NO: 855945 - DNA, 25 bp, Homo sapien
tttggtgaccctcacggctgcttgt

SEQ ID NO: 855946 - DNA, 25 bp, Homo sapien
tactgatacgctcaacttgcaaaag

SEQ ID NO: 855947 - DNA, 25 bp, Homo sapien
actgtggcccattttgctaggattg

SEQ ID NO: 855948 - DNA, 25 bp, Homo sapien
gctcatcccggcacactagcggaag

SEQ ID NO: 855949 - DNA, 25 bp, Homo sapien
cactagcggaagagcgcttgtctgg

SEQ ID NO: 855950 - DNA, 25 bp, Homo sapien
tgcagagcagggtgcggccgggatc

SEQ ID NO: 855951 - DNA, 25 bp, Homo sapien
cagacccctttctagaagtccagcc

SEQ ID NO: 855952 - DNA, 25 bp, Homo sapien
ctaatggaaaccagccgccgggcgc

SEQ ID NO: 855953 - DNA, 25 bp, Homo sapien
aagtcggcgccggaactgccctaat

SEQ ID NO: 855954 - DNA, 25 bp, Homo sapien
gggtccattagaggcgccccaggcc

SEQ ID NO: 855955 - DNA, 25 bp, Homo sapien
gtccccagcgaagtcggcgccggaa

SEQ ID NO: 855956 - DNA, 25 bp, Homo sapien
acaccgcagtttcacacctggatgt

SEQ ID NO: 855957 - DNA, 25 bp, Homo sapien
gccacaccgcagtttcacacctgga

SEQ ID NO: 855958 - DNA, 25 bp, Homo sapien
tgaggttcaccggttcctaagagga

SEQ ID NO: 855959 - DNA, 25 bp, Homo sapien
ctggaggccacaccgcagtttcaca

SEQ ID NO: 855960 - DNA, 25 bp, Homo sapien
gtggactgcaggctcccaagatgat

SEQ ID NO: 855961 - DNA, 25 bp, Homo sapien
gatgatggcgctggcgcttctgaac

SEQ ID NO: 855962 - DNA, 25 bp, Homo sapien
cgcttctgaacgctctgcctgctgg

SEQ ID NO: 855963 - DNA, 25 bp, Homo sapien
taaggtcagcggtgtgtggactgca

SEQ ID NO: 855964 - DNA, 25 bp, Homo sapien
gggaattcggtgctgttttccaatc

SEQ ID NO: 855965 - DNA, 25 bp, Homo sapien
ggggcaatttcccagaggagagtct

SEQ ID NO: 855966 - DNA, 25 bp, Homo sapien
ttgtactcctgttagatctgggggc

SEQ ID NO: 855967 - DNA, 25 bp, Homo sapien
cagaggagagtctgtaatctacgac

SEQ ID NO: 855968 - DNA, 25 bp, Homo sapien
taagtacccaaactatgaagatgat

SEQ ID NO: 855969 - DNA, 25 bp, Homo sapien
acagtaagtacccaaactatgaaga

SEQ ID NO: 855970 - DNA, 25 bp, Homo sapien
tacccaaactatgaagatgatgacc

SEQ ID NO: 855971 - DNA, 25 bp, Homo sapien
cagtaagtacccaaactatgaagat

SEQ ID NO: 855972 - DNA, 25 bp, Homo sapien
ggtagcaaggtcttctcccgggagc

SEQ ID NO: 855973 - DNA, 25 bp, Homo sapien
tcagggcttcccgttttctctcgac

SEQ ID NO: 855974 - DNA, 25 bp, Homo sapien
caccgtgcttgtgagagtctgcagg

SEQ ID NO: 855975 - DNA, 25 bp, Homo sapien
gttttctctcgactgccttgggcct

SEQ ID NO: 855976 - DNA, 25 bp, Homo sapien
gaaaaactgattgtattggcacttg

SEQ ID NO: 855977 - DNA, 25 bp, Homo sapien
taaagttgaacaatgctaagttggg

SEQ ID NO: 855978 - DNA, 25 bp, Homo sapien
tgtcatcactttcataccatcataa

SEQ ID NO: 855979 - DNA, 25 bp, Homo sapien
tttattgaatactgcaccaaaagtg

SEQ ID NO: 855980 - DNA, 25 bp, Homo sapien
taacgatgtcatgttctgataaacc

SEQ ID NO: 855981 - DNA, 25 bp, Homo sapien
gcatctatgtcattagtggtacaga

SEQ ID NO: 855982 - DNA, 25 bp, Homo sapien
cagatgctccttgagtgattaacga

SEQ ID NO: 855983 - DNA, 25 bp, Homo sapien
gcctaacttgtggaacatcattgct

SEQ ID NO: 855984 - DNA, 25 bp, Homo sapien
tgtgggcaggtatttctgcaactgg

SEQ ID NO: 855985 - DNA, 25 bp, Homo sapien
tgacttcagactttcagtgactgag

SEQ ID NO: 855986 - DNA, 25 bp, Homo sapien
tatttaagtcgacactccttctgct

SEQ ID NO: 855987 - DNA, 25 bp, Homo sapien
tctctgcgaggttcatctttggctc

SEQ ID NO: 855988 - DNA, 25 bp, Homo sapien
tttgtcagatacgtgattttctccc

SEQ ID NO: 855989 - DNA, 25 bp, Homo sapien
cggtctttcattgttgaattgtagg

SEQ ID NO: 855990 - DNA, 25 bp, Homo sapien
acgtgattttctcccatcatatggg

SEQ ID NO: 855991 - DNA, 25 bp, Homo sapien
tatgttctggattgtagacctttgt

SEQ ID NO: 855992 - DNA, 25 bp, Homo sapien
tgccagacggtcacatagcagctgc

SEQ ID NO: 855993 - DNA, 25 bp, Homo sapien
gcacctcactctttgtcatggcgga

SEQ ID NO: 855994 - DNA, 25 bp, Homo sapien
ttaatcattcgagggactgccagac

SEQ ID NO: 855995 - DNA, 25 bp, Homo sapien
tagttaatctactcatgggctgatg

SEQ ID NO: 855996 - DNA, 25 bp, Homo sapien
caccaacattgcatgagtgttacaa

SEQ ID NO: 855997 - DNA, 25 bp, Homo sapien
ccctctgtagggattggtccattct

SEQ ID NO: 855998 - DNA, 25 bp, Homo sapien
catcagtggagtcatacattggtct

SEQ ID NO: 855999 - DNA, 25 bp, Homo sapien
accatgttgtagaatgcatcagtgc

SEQ ID NO: 856000 - DNA, 25 bp, Homo sapien
ctggggccctcggccggcgctgcag

SEQ ID NO: 856001 - DNA, 25 bp, Homo sapien
gctggggccctcggccggcgctgca

SEQ ID NO: 856002 - DNA, 25 bp, Homo sapien
tgcctgccggcggccacgacgccag

SEQ ID NO: 856003 - DNA, 25 bp, Homo sapien
cggcggccacgacgccagggcacaa

SEQ ID NO: 856004 - DNA, 25 bp, Homo sapien
ggccacgacgccagggcacaagctg

SEQ ID NO: 856005 - DNA, 25 bp, Homo sapien
tgccggcggccacgacgccagggca

SEQ ID NO: 856006 - DNA, 25 bp, Homo sapien
aacctcgctggctttcagggtggga

SEQ ID NO: 856007 - DNA, 25 bp, Homo sapien
gaatccgatgacccccggagcactg

SEQ ID NO: 856008 - DNA, 25 bp, Homo sapien
tcatttacccgaacctcgctggctt

SEQ ID NO: 856009 - DNA, 25 bp, Homo sapien
ttacccgaacctcgctggctttcag

SEQ ID NO: 856010 - DNA, 25 bp, Homo sapien
cagggtccccgtgagtttctgcagc

SEQ ID NO: 856011 - DNA, 25 bp, Homo sapien
gagtttctgcagcttcacgagtgcc

SEQ ID NO: 856012 - DNA, 25 bp, Homo sapien
tgggtggctccggaatcctgcagtg

SEQ ID NO: 856013 - DNA, 25 bp, Homo sapien
cagcttcacgagtgcccatgattgt

SEQ ID NO: 856014 - DNA, 25 bp, Homo sapien
tgactgaaatgctccgtggtcggga

SEQ ID NO: 856015 - DNA, 25 bp, Homo sapien
gagatgattgagaacagccttgcct

SEQ ID NO: 856016 - DNA, 25 bp, Homo sapien
gagaggcattgttcgcccttgctca

SEQ ID NO: 856017 - DNA, 25 bp, Homo sapien
tagcttagctcgatgtccgtgtcag

SEQ ID NO: 856018 - DNA, 25 bp, Homo sapien
gaagagaagccttgtcctgagtttc

SEQ ID NO: 856019 - DNA, 25 bp, Homo sapien
taaaatagctgcaaacctcagtcct

SEQ ID NO: 856020 - DNA, 25 bp, Homo sapien
tgaccgtggactccctgcgcagtgg

SEQ ID NO: 856021 - DNA, 25 bp, Homo sapien
tcctttgtgctacttgatgtggctt

SEQ ID NO: 856022 - DNA, 25 bp, Homo sapien
ggtgatcagttatgaagaagggaaa

SEQ ID NO: 856023 - DNA, 25 bp, Homo sapien
ataagaaagacctgcatatggaaag

SEQ ID NO: 856024 - DNA, 25 bp, Homo sapien
aataagaaagacctgcatatggaaa

SEQ ID NO: 856025 - DNA, 25 bp, Homo sapien
aaacctgcagttgagagatgtgaga

SEQ ID NO: 856026 - DNA, 25 bp, Homo sapien
tcataaaacccctgtagaattgctc

SEQ ID NO: 856027 - DNA, 25 bp, Homo sapien
ggagtagatctctcctatctgaggc

SEQ ID NO: 856028 - DNA, 25 bp, Homo sapien
tacttcaccgtacctttgtcgcctg

SEQ ID NO: 856029 - DNA, 25 bp, Homo sapien
tagttctgcagggcgcacaggtgca

SEQ ID NO: 856030 - DNA, 25 bp, Homo sapien
ttgtgagtggtgttatagttctgca

SEQ ID NO: 856031 - DNA, 25 bp, Homo sapien
ttatagttctgcagggcgcacaggt

SEQ ID NO: 856032 - DNA, 25 bp, Homo sapien
tgttgtgagtggtgttatagttctg

SEQ ID NO: 856033 - DNA, 25 bp, Homo sapien
aaggttcctcaagccaggacctacg

SEQ ID NO: 856034 - DNA, 25 bp, Homo sapien
ggttcctcaagccaggacctacgca

SEQ ID NO: 856035 - DNA, 25 bp, Homo sapien
gttcctcaagccaggacctacgcac

SEQ ID NO: 856036 - DNA, 25 bp, Homo sapien
tgaaggttcctcaagccaggaccta

SEQ ID NO: 856037 - DNA, 25 bp, Homo sapien
ctggatggcggtttactcctgcctt

SEQ ID NO: 856038 - DNA, 25 bp, Homo sapien
aggactggatggcggtttactcctg

SEQ ID NO: 856039 - DNA, 25 bp, Homo sapien
gactggatggcggtttactcctgcc

SEQ ID NO: 856040 - DNA, 25 bp, Homo sapien
gatggcggtttactcctgccttaat

SEQ ID NO: 856041 - DNA, 25 bp, Homo sapien
tcatcaaagtatcgttctattgatt

SEQ ID NO: 856042 - DNA, 25 bp, Homo sapien
aaacagtactttcgcgtgtcctggg

SEQ ID NO: 856043 - DNA, 25 bp, Homo sapien
agttagagaattttctccttttctg

SEQ ID NO: 856044 - DNA, 25 bp, Homo sapien
ttagagaattttctccttttctgtg

SEQ ID NO: 856045 - DNA, 25 bp, Homo sapien
ctttggagttagagaattttctcct

SEQ ID NO: 856046 - DNA, 25 bp, Homo sapien
tagagaattttctccttttctgtgc

SEQ ID NO: 856047 - DNA, 25 bp, Homo sapien
aaccgagacccgtcttgcattttat

SEQ ID NO: 856048 - DNA, 25 bp, Homo sapien
tttcacaaaccgagacccgtcttgc

SEQ ID NO: 856049 - DNA, 25 bp, Homo sapien
cggtactgcaggatacctccaattc

SEQ ID NO: 856050 - DNA, 25 bp, Homo sapien
tctactcggtactgcaggatacctc

SEQ ID NO: 856051 - DNA, 25 bp, Homo sapien
gcggacaccagaactgacgaggctc

SEQ ID NO: 856052 - DNA, 25 bp, Homo sapien
ttcggccgtcggtgacgcttagtca

SEQ ID NO: 856053 - DNA, 25 bp, Homo sapien
ttgaattaacgcagactccatgctt

SEQ ID NO: 856054 - DNA, 25 bp, Homo sapien
gaggctcgccctgtttttaatgaaa

SEQ ID NO: 856055 - DNA, 25 bp, Homo sapien
gcctcctgcacacaaacgtgcttag

SEQ ID NO: 856056 - DNA, 25 bp, Homo sapien
agtgggcggtggtcgctccccatca

SEQ ID NO: 856057 - DNA, 25 bp, Homo sapien
tgcttagaacaggaaccctgttggg

SEQ ID NO: 856058 - DNA, 25 bp, Homo sapien
aacagagaacggtcaggcagctgca

SEQ ID NO: 856059 - DNA, 25 bp, Homo sapien
ccgggccctgcacttgtggccgact

SEQ ID NO: 856060 - DNA, 25 bp, Homo sapien
tgccctttgggccaatggggaagaa

SEQ ID NO: 856061 - DNA, 25 bp, Homo sapien
ggccctgcacttgtggccgacttgc

SEQ ID NO: 856062 - DNA, 25 bp, Homo sapien
tgcacttgtggccgacttgcctgag

SEQ ID NO: 856063 - DNA, 25 bp, Homo sapien
cttcctttcctgctgtccccgtcct

SEQ ID NO: 856064 - DNA, 25 bp, Homo sapien
tcagatcagcttccttcctttcctg

SEQ ID NO: 856065 - DNA, 25 bp, Homo sapien
cctttcctgctgtccccgtcctcac

SEQ ID NO: 856066 - DNA, 25 bp, Homo sapien
tccttcctttcctgctgtccccgtc

SEQ ID NO: 856067 - DNA, 25 bp, Homo sapien
ttgtcaggctacaactaacaaaggc

SEQ ID NO: 856068 - DNA, 25 bp, Homo sapien
ctcttccagcgaagggttggcattt

SEQ ID NO: 856069 - DNA, 25 bp, Homo sapien
ctggtaccctcttccagcgaagggt

SEQ ID NO: 856070 - DNA, 25 bp, Homo sapien
aaggcgtggctgtggtgagcgtgct

SEQ ID NO: 856071 - DNA, 25 bp, Homo sapien
gatttgtcaaaaagttgtaatttga

SEQ ID NO: 856072 - DNA, 25 bp, Homo sapien
tgaaacaacaccgagcttgaatgtg

SEQ ID NO: 856073 - DNA, 25 bp, Homo sapien
gcgtgtgaaacaacaccgagcttga

SEQ ID NO: 856074 - DNA, 25 bp, Homo sapien
gggcgcacgcgtgtgaaacaacacc

SEQ ID NO: 856075 - DNA, 25 bp, Homo sapien
gaaacatagagggaacgtcactggc

SEQ ID NO: 856076 - DNA, 25 bp, Homo sapien
gacctttgccatcggcgtctaggaa

SEQ ID NO: 856077 - DNA, 25 bp, Homo sapien
tctttgcaggtccatcggctggtgg

SEQ ID NO: 856078 - DNA, 25 bp, Homo sapien
tgtcggacattctgcaagccctgat

SEQ ID NO: 856079 - DNA, 25 bp, Homo sapien
tttgctttggtagccaacggtgtcc

SEQ ID NO: 856080 - DNA, 25 bp, Homo sapien
ttgctttggtagccaacggtgtccg

SEQ ID NO: 856081 - DNA, 25 bp, Homo sapien
tgctttggtagccaacggtgtccga

SEQ ID NO: 856082 - DNA, 25 bp, Homo sapien
ctttgctttggtagccaacggtgtc

SEQ ID NO: 856083 - DNA, 25 bp, Homo sapien
ttttttttgagtagtgagtgagaag

SEQ ID NO: 856084 - DNA, 25 bp, Homo sapien
tttttttttgagtagtgagtgagaa

SEQ ID NO: 856085 - DNA, 25 bp, Homo sapien
tgcccatctcggggggcctcccaga

SEQ ID NO: 856086 - DNA, 25 bp, Homo sapien
gtttttttttgagtagtgagtgaga

SEQ ID NO: 856087 - DNA, 25 bp, Homo sapien
agcagtaagccagccatctttttca

SEQ ID NO: 856088 - DNA, 25 bp, Homo sapien
ttgcttggtgggcttcactgaagag

SEQ ID NO: 856089 - DNA, 25 bp, Homo sapien
gagcagtaagccagccatctttttc

SEQ ID NO: 856090 - DNA, 25 bp, Homo sapien
gcttggtgggcttcactgaagagca

SEQ ID NO: 856091 - DNA, 25 bp, Homo sapien
tgttatgacatcgttccaaccagtt

SEQ ID NO: 856092 - DNA, 25 bp, Homo sapien
tgaggtcacacaagtgttatgacat

SEQ ID NO: 856093 - DNA, 25 bp, Homo sapien
cgttccaaccagttcaaagcttgtt

SEQ ID NO: 856094 - DNA, 25 bp, Homo sapien
cacaagtgttatgacatcgttccaa

SEQ ID NO: 856095 - DNA, 25 bp, Homo sapien
cctgggctgatgcataagctttgag

SEQ ID NO: 856096 - DNA, 25 bp, Homo sapien
ctgatgcataagctttgagggtgga

SEQ ID NO: 856097 - DNA, 25 bp, Homo sapien
cataagctttgagggtggataaccg

SEQ ID NO: 856098 - DNA, 25 bp, Homo sapien
tgcataagctttgagggtggataac

SEQ ID NO: 856099 - DNA, 25 bp, Homo sapien
tgtgtgttctcaggtgatccagtgc

SEQ ID NO: 856100 - DNA, 25 bp, Homo sapien
ctgtgtgttctcaggtgatccagtg

SEQ ID NO: 856101 - DNA, 25 bp, Homo sapien
tgtgttctcaggtgatccagtgctc

SEQ ID NO: 856102 - DNA, 25 bp, Homo sapien
tgttctcaggtgatccagtgctcac

SEQ ID NO: 856103 - DNA, 25 bp, Homo sapien
ctcatatttcaacatctctgcccca

SEQ ID NO: 856104 - DNA, 25 bp, Homo sapien
gccccaggacattctttggcaactg

SEQ ID NO: 856105 - DNA, 25 bp, Homo sapien
tagaaatgacgggggtgatgtccca

SEQ ID NO: 856106 - DNA, 25 bp, Homo sapien
aactgggcttgtgggtagaaatgac

SEQ ID NO: 856107 - DNA, 25 bp, Homo sapien
tatggagcgggtgcctccgtgtgat

SEQ ID NO: 856108 - DNA, 25 bp, Homo sapien
gagcgggtgcctccgtgtgatgatg

SEQ ID NO: 856109 - DNA, 25 bp, Homo sapien
gcctccgtgtgatgatgagaatgaa

SEQ ID NO: 856110 - DNA, 25 bp, Homo sapien
tatggagcgtgtgcctccgtgtgtg

SEQ ID NO: 856111 - DNA, 25 bp, Homo sapien
tattcttctttagcaactcccttgc

SEQ ID NO: 856112 - DNA, 25 bp, Homo sapien
tttagcaactcccttgcataataat

SEQ ID NO: 856113 - DNA, 25 bp, Homo sapien
tcttctttagcaactcccttgcata

SEQ ID NO: 856114 - DNA, 25 bp, Homo sapien
tcatattcttctttagcaactccct

SEQ ID NO: 856115 - DNA, 25 bp, Homo sapien
tccaggtgatgagaaaccagggact

SEQ ID NO: 856116 - DNA, 25 bp, Homo sapien
cactgggatggctatggccaggact

SEQ ID NO: 856117 - DNA, 25 bp, Homo sapien
ttccaatttcttacgtctccaggtg

SEQ ID NO: 856118 - DNA, 25 bp, Homo sapien
tcaggaacagcttccagagtgcatt

SEQ ID NO: 856119 - DNA, 25 bp, Homo sapien
caagcaagcgtgaagaaggaacagg

SEQ ID NO: 856120 - DNA, 25 bp, Homo sapien
ctccaagcaagcgtgaagaaggaac

SEQ ID NO: 856121 - DNA, 25 bp, Homo sapien
gcagacagcagaggctgggaccaca

SEQ ID NO: 856122 - DNA, 25 bp, Homo sapien
aggaacagggcagacagcagaggct

SEQ ID NO: 856123 - DNA, 25 bp, Homo sapien
ggaagggagtgtctgccaccggctg

SEQ ID NO: 856124 - DNA, 25 bp, Homo sapien
gggtggcgtcagatgatgtgttgag

SEQ ID NO: 856125 - DNA, 25 bp, Homo sapien
gaagggagtgtctgccaccggctgc

SEQ ID NO: 856126 - DNA, 25 bp, Homo sapien
tgatgtgttgagtcaacagaacccc

SEQ ID NO: 856127 - DNA, 25 bp, Homo sapien
agacaaccactagagctcacgatcc

SEQ ID NO: 856128 - DNA, 25 bp, Homo sapien
ggaggcagacaaccactagagctca

SEQ ID NO: 856129 - DNA, 25 bp, Homo sapien
ggcagacaaccactagagctcacga

SEQ ID NO: 856130 - DNA, 25 bp, Homo sapien
gcagacaaccactagagctcacgat

SEQ ID NO: 856131 - DNA, 25 bp, Homo sapien
cattttttatcatggccctgaactc

SEQ ID NO: 856132 - DNA, 25 bp, Homo sapien
cagaattgttgttgccatcgagggg

SEQ ID NO: 856133 - DNA, 25 bp, Homo sapien
cagcaattcaggtgtgatgctgtca

SEQ ID NO: 856134 - DNA, 25 bp, Homo sapien
tctattaaaaacactagcagcaatt

SEQ ID NO: 856135 - DNA, 25 bp, Homo sapien
ttgggtctccttatggccgccttgg

SEQ ID NO: 856136 - DNA, 25 bp, Homo sapien
tgttcggacctgtgccaagagccgc

SEQ ID NO: 856137 - DNA, 25 bp, Homo sapien
caagagccgctgtagagaagactca

SEQ ID NO: 856138 - DNA, 25 bp, Homo sapien
catcaggctttctgcatgttcggac

SEQ ID NO: 856139 - DNA, 25 bp, Homo sapien
ctctcgtgggcctagcgtggctgct

SEQ ID NO: 856140 - DNA, 25 bp, Homo sapien
tcaaggtgcagccattgcatagaac

SEQ ID NO: 856141 - DNA, 25 bp, Homo sapien
tagaaccctctcgtgggcctagcgt

SEQ ID NO: 856142 - DNA, 25 bp, Homo sapien
cattgcatagaaccctctcgtgggc

SEQ ID NO: 856143 - DNA, 25 bp, Homo sapien
tttgcaggtggacagtcagcatgtt

SEQ ID NO: 856144 - DNA, 25 bp, Homo sapien
tgccccgtctgggttgggccgagag

SEQ ID NO: 856145 - DNA, 25 bp, Homo sapien
tctgtgcgtcctcccctgccccgtc

SEQ ID NO: 856146 - DNA, 25 bp, Homo sapien
gcctttgcaggtggacagtcagcat

SEQ ID NO: 856147 - DNA, 25 bp, Homo sapien
tggatgggaggatggcggcatgtgg

SEQ ID NO: 856148 - DNA, 25 bp, Homo sapien
tgaacagatacacgaagggcaaggc

SEQ ID NO: 856149 - DNA, 25 bp, Homo sapien
gcggatgggaggacggctctccggg

SEQ ID NO: 856150 - DNA, 25 bp, Homo sapien
ggaggacggcgggtcgcggatggga

SEQ ID NO: 856151 - DNA, 25 bp, Homo sapien
ccaccgctgagctggttgcaagata

SEQ ID NO: 856152 - DNA, 25 bp, Homo sapien
ggggctttctgtctgcacttccact

SEQ ID NO: 856153 - DNA, 25 bp, Homo sapien
ggctttctgtctgcacttccactgc

SEQ ID NO: 856154 - DNA, 25 bp, Homo sapien
caccgctgagctggttgcaagatac

SEQ ID NO: 856155 - DNA, 25 bp, Homo sapien
tgtatgataagttggaccagggctg

SEQ ID NO: 856156 - DNA, 25 bp, Homo sapien
gagcggtgggtctctgtgactacct

SEQ ID NO: 856157 - DNA, 25 bp, Homo sapien
ggaagcggaagttatagcccagctc

SEQ ID NO: 856158 - DNA, 25 bp, Homo sapien
tcataaagtcccacttgcccaagaa

SEQ ID NO: 856159 - DNA, 25 bp, Homo sapien
cctcggaggctccaaaacacccagg

SEQ ID NO: 856160 - DNA, 25 bp, Homo sapien
ctcggaggctccaaaacacccaggc

SEQ ID NO: 856161 - DNA, 25 bp, Homo sapien
catatgctgcttctctgtacctggc

SEQ ID NO: 856162 - DNA, 25 bp, Homo sapien
ggcccatgtagacactgaacgctta

SEQ ID NO: 856163 - DNA, 25 bp, Homo sapien
ctgtacctggcccatgtagacactg

SEQ ID NO: 856164 - DNA, 25 bp, Homo sapien
atatgctgcttctctgtacctggcc

SEQ ID NO: 856165 - DNA, 25 bp, Homo sapien
gctgatgaggtctgaatactggggc

SEQ ID NO: 856166 - DNA, 25 bp, Homo sapien
gagcagactccagaaaaacgtgact

SEQ ID NO: 856167 - DNA, 25 bp, Homo sapien
tgagcagactccagaaaaacgtgac

SEQ ID NO: 856168 - DNA, 25 bp, Homo sapien
cagactccagaaaaacgtgactcat

SEQ ID NO: 856169 - DNA, 25 bp, Homo sapien
tgccggcatcactggtggtccaggg

SEQ ID NO: 856170 - DNA, 25 bp, Homo sapien
tggctgccggcatcactggtggtcc

SEQ ID NO: 856171 - DNA, 25 bp, Homo sapien
gctgccggcatcactggtggtccag

SEQ ID NO: 856172 - DNA, 25 bp, Homo sapien
tgtggctgccggcatcactggtggt

SEQ ID NO: 856173 - DNA, 25 bp, Homo sapien
tgtgggactgtaccgatggtgcaga

SEQ ID NO: 856174 - DNA, 25 bp, Homo sapien
tgtaccgatggtgcagaggcgagac

SEQ ID NO: 856175 - DNA, 25 bp, Homo sapien
atgacctgtacgtgagtcattttac

SEQ ID NO: 856176 - DNA, 25 bp, Homo sapien
acctgtacgtgagtcattttactcc

SEQ ID NO: 856177 - DNA, 25 bp, Homo sapien
atgtctgtttacatctgagttcact

SEQ ID NO: 856178 - DNA, 25 bp, Homo sapien
gaatgtctgtttacatctgagttca

SEQ ID NO: 856179 - DNA, 25 bp, Homo sapien
aatgtctgtttacatctgagttcac

SEQ ID NO: 856180 - DNA, 25 bp, Homo sapien
ttgggacagccgctcagcctggagc

SEQ ID NO: 856181 - DNA, 25 bp, Homo sapien
cacagtccacatcttgggacagccg

SEQ ID NO: 856182 - DNA, 25 bp, Homo sapien
tgggacagccgctcagcctggagcc

SEQ ID NO: 856183 - DNA, 25 bp, Homo sapien
tccacatcttgggacagccgctcag

SEQ ID NO: 856184 - DNA, 25 bp, Homo sapien
tggagatgcgtgtaggggatcctgc

SEQ ID NO: 856185 - DNA, 25 bp, Homo sapien
gagatgcgtgtaggggatcctgctg

SEQ ID NO: 856186 - DNA, 25 bp, Homo sapien
ggagatgcgtgtaggggatcctgct

SEQ ID NO: 856187 - DNA, 25 bp, Homo sapien
cctggagatgcgtgtaggggatcct

SEQ ID NO: 856188 - DNA, 25 bp, Homo sapien
ccgacaattaaggcgagctggtagc

SEQ ID NO: 856189 - DNA, 25 bp, Homo sapien
cagtttaatggacgttttcagttgg

SEQ ID NO: 856190 - DNA, 25 bp, Homo sapien
acaattaaggcgagctggtagcgag

SEQ ID NO: 856191 - DNA, 25 bp, Homo sapien
tggtagcgaggggatggattcagtt

SEQ ID NO: 856192 - DNA, 25 bp, Homo sapien
acccgtgtgctcgactctgtgccgg

SEQ ID NO: 856193 - DNA, 25 bp, Homo sapien
agcaacccgtgtgctcgactctgtg

SEQ ID NO: 856194 - DNA, 25 bp, Homo sapien
catcaagagcaacccgtgtgctcga

SEQ ID NO: 856195 - DNA, 25 bp, Homo sapien
ccaagacatcaagagcaacccgtgt

SEQ ID NO: 856196 - DNA, 25 bp, Homo sapien
tgttagggctcgtcaggtgacacag

SEQ ID NO: 856197 - DNA, 25 bp, Homo sapien
tcagctgcaaatgggtgttagggct

SEQ ID NO: 856198 - DNA, 25 bp, Homo sapien
tgacacaggcagcagctatagccct

SEQ ID NO: 856199 - DNA, 25 bp, Homo sapien
cctggacggcatcagccagaccagg

SEQ ID NO: 856200 - DNA, 25 bp, Homo sapien
cagtctggaggacacgacaggttcc

SEQ ID NO: 856201 - DNA, 25 bp, Homo sapien
atgctggccggtggcatctggagcc

SEQ ID NO: 856202 - DNA, 25 bp, Homo sapien
catgcagagtgtccgcgcccgtcag

SEQ ID NO: 856203 - DNA, 25 bp, Homo sapien
ctggctggtctttatgcatcgctgc

SEQ ID NO: 856204 - DNA, 25 bp, Homo sapien
tgtgtatcccatgtccagcgcaatt

SEQ ID NO: 856205 - DNA, 25 bp, Homo sapien
aaatgagtacattaggaggcctggc

SEQ ID NO: 856206 - DNA, 25 bp, Homo sapien
ccacctcaaagtcctcaggttacag

SEQ ID NO: 856207 - DNA, 25 bp, Homo sapien
aattctgaacccaggtggacacaag

SEQ ID NO: 856208 - DNA, 25 bp, Homo sapien
gcacatggagtattccaggattctt

SEQ ID NO: 856209 - DNA, 25 bp, Homo sapien
gaaaaagcacatggagtattccagg

SEQ ID NO: 856210 - DNA, 25 bp, Homo sapien
tattccaggattcttaatataggca

SEQ ID NO: 856211 - DNA, 25 bp, Homo sapien
tgcatgaaaaagcacatggagtatt

SEQ ID NO: 856212 - DNA, 25 bp, Homo sapien
aagtatgaccgtcacccacagcaca

SEQ ID NO: 856213 - DNA, 25 bp, Homo sapien
gaataaagtatgaccgtcacccaca

SEQ ID NO: 856214 - DNA, 25 bp, Homo sapien
taaagtatgaccgtcacccacagca

SEQ ID NO: 856215 - DNA, 25 bp, Homo sapien
agagaataaagtatgaccgtcaccc

SEQ ID NO: 856216 - DNA, 25 bp, Homo sapien
tctacgctgggttctggaaggcgca

SEQ ID NO: 856217 - DNA, 25 bp, Homo sapien
gaatcattcttcctacctccgtggc

SEQ ID NO: 856218 - DNA, 25 bp, Homo sapien
gccatttcagctcgtaggttgggaa

SEQ ID NO: 856219 - DNA, 25 bp, Homo sapien
cccgatctgataggtgtaacacgcc

SEQ ID NO: 856220 - DNA, 25 bp, Homo sapien
tcaaagcccgacttgatctatgaga

SEQ ID NO: 856221 - DNA, 25 bp, Homo sapien
gacttgatctatgagaaccatctcc

SEQ ID NO: 856222 - DNA, 25 bp, Homo sapien
ttctcaaagcccgacttgatctatg

SEQ ID NO: 856223 - DNA, 25 bp, Homo sapien
gcccgacttgatctatgagaaccat

SEQ ID NO: 856224 - DNA, 25 bp, Homo sapien
cgcgcagccatctgtcgtggttcgc

SEQ ID NO: 856225 - DNA, 25 bp, Homo sapien
tcaggccgcgcagccatctgtcgtg

SEQ ID NO: 856226 - DNA, 25 bp, Homo sapien
gccgcgcagccatctgtcgtggttc

SEQ ID NO: 856227 - DNA, 25 bp, Homo sapien
aggccgcgcagccatctgtcgtggt

SEQ ID NO: 856228 - DNA, 25 bp, Homo sapien
tgcaagctgcgttggccaagtcaca

SEQ ID NO: 856229 - DNA, 25 bp, Homo sapien
gaaggtctactagggtccacttgcc

SEQ ID NO: 856230 - DNA, 25 bp, Homo sapien
taaataagataacagacgcttggcg

SEQ ID NO: 856231 - DNA, 25 bp, Homo sapien
tttaagccccggaagaccaatgtga

SEQ ID NO: 856232 - DNA, 25 bp, Homo sapien
tggtcttcctcgatcgtaaatttcc

SEQ ID NO: 856233 - DNA, 25 bp, Homo sapien
gatcgtaaatttccttctcggtgcc

SEQ ID NO: 856234 - DNA, 25 bp, Homo sapien
ggcatgtccgtatggtcttcctcga

SEQ ID NO: 856235 - DNA, 25 bp, Homo sapien
gtcactgggcatgtccgtatggtct

SEQ ID NO: 856236 - DNA, 25 bp, Homo sapien
ccctctccgccacctggggtcccat

SEQ ID NO: 856237 - DNA, 25 bp, Homo sapien
tgtcacacatggacagggtctgccc

SEQ ID NO: 856238 - DNA, 25 bp, Homo sapien
cccatggtggttctgctactgccac

SEQ ID NO: 856239 - DNA, 25 bp, Homo sapien
acatggacagggtctgccctctccg

SEQ ID NO: 856240 - DNA, 25 bp, Homo sapien
aacaattgaagaaggctgggctagc

SEQ ID NO: 856241 - DNA, 25 bp, Homo sapien
aatccagcgttgatggcgttacgga

SEQ ID NO: 856242 - DNA, 25 bp, Homo sapien
gggaggcttgattctgtgcatctga

SEQ ID NO: 856243 - DNA, 25 bp, Homo sapien
ccttccgtaagccagaggctgtctg

SEQ ID NO: 856244 - DNA, 25 bp, Homo sapien
cagccgcttgttgcgctgccttggg

SEQ ID NO: 856245 - DNA, 25 bp, Homo sapien
tgcgctgtcttaggccagcccatgc

SEQ ID NO: 856246 - DNA, 25 bp, Homo sapien
accaagaccgttgcctgcgctgtct

SEQ ID NO: 856247 - DNA, 25 bp, Homo sapien
agtttgctgcagtcccgtcaatggg

SEQ ID NO: 856248 - DNA, 25 bp, Homo sapien
gatgcttaagcctgtccctcttgaa

SEQ ID NO: 856249 - DNA, 25 bp, Homo sapien
atgacggaagtcaaaggagcccacg

SEQ ID NO: 856250 - DNA, 25 bp, Homo sapien
gggccccaagcatcaaaatgacgga

SEQ ID NO: 856251 - DNA, 25 bp, Homo sapien
ccggcgtgaatagcgagtccttcct

SEQ ID NO: 856252 - DNA, 25 bp, Homo sapien
ggtgttccgagtagagtgtgccctg

SEQ ID NO: 856253 - DNA, 25 bp, Homo sapien
ccaggccacggagcggtgttccgag

SEQ ID NO: 856254 - DNA, 25 bp, Homo sapien
tgttccgagtagagtgtgccctgca

SEQ ID NO: 856255 - DNA, 25 bp, Homo sapien
gtgttccgagtagagtgtgccctgc

SEQ ID NO: 856256 - DNA, 25 bp, Homo sapien
cagacagtggctcctgcttatcagg

SEQ ID NO: 856257 - DNA, 25 bp, Homo sapien
gaaaatggggcttcccaagtgccaa

SEQ ID NO: 856258 - DNA, 25 bp, Homo sapien
ttgaaggtggcgctcatctccagac

SEQ ID NO: 856259 - DNA, 25 bp, Homo sapien
agttccttctgttgaaggtggcgct

SEQ ID NO: 856260 - DNA, 25 bp, Homo sapien
ccttggaggcacgtaggctctggca

SEQ ID NO: 856261 - DNA, 25 bp, Homo sapien
gttccaaggtgagatcacaccccag

SEQ ID NO: 856262 - DNA, 25 bp, Homo sapien
tggagacccctggacaaagagttgc

SEQ ID NO: 856263 - DNA, 25 bp, Homo sapien
aggaacaacagcaccaagacggagg

SEQ ID NO: 856264 - DNA, 25 bp, Homo sapien
ctactgtgtttccttcgttgcttct

SEQ ID NO: 856265 - DNA, 25 bp, Homo sapien
gtctactgtgtttccttcgttgctt

SEQ ID NO: 856266 - DNA, 25 bp, Homo sapien
tctactgtgtttccttcgttgcttc

SEQ ID NO: 856267 - DNA, 25 bp, Homo sapien
tactgtgtttccttcgttgcttcta

SEQ ID NO: 856268 - DNA, 25 bp, Homo sapien
ctctgaggacgatggagccttctgc

SEQ ID NO: 856269 - DNA, 25 bp, Homo sapien
tggctcaagcaggccacagacgagg

SEQ ID NO: 856270 - DNA, 25 bp, Homo sapien
catttttgtcgctgccaggagaggg

SEQ ID NO: 856271 - DNA, 25 bp, Homo sapien
aagcaggccacagacgaggagaaga

SEQ ID NO: 856272 - DNA, 25 bp, Homo sapien
ccatttttgtcgctgccaggagagg

SEQ ID NO: 856273 - DNA, 25 bp, Homo sapien
attagtaacagccttggtgatcttg

SEQ ID NO: 856274 - DNA, 25 bp, Homo sapien
gagcaggtattcttccctcctgacc

SEQ ID NO: 856275 - DNA, 25 bp, Homo sapien
ccaggtgggtcacatatgaaagagc

SEQ ID NO: 856276 - DNA, 25 bp, Homo sapien
tggggttgcccgttgagctgcggcc

SEQ ID NO: 856277 - DNA, 25 bp, Homo sapien
tcctgaccccttatggggccgtgca

SEQ ID NO: 856278 - DNA, 25 bp, Homo sapien
gacagcagccctgatggcgtggagg

SEQ ID NO: 856279 - DNA, 25 bp, Homo sapien
cacaagcatccagctggtccgtgtg

SEQ ID NO: 856280 - DNA, 25 bp, Homo sapien
gatagagatgcatagatactctgca

SEQ ID NO: 856281 - DNA, 25 bp, Homo sapien
aggttcaagtcaagctccttggagg

SEQ ID NO: 856282 - DNA, 25 bp, Homo sapien
aatgatcagcccttgcctaattgca

SEQ ID NO: 856283 - DNA, 25 bp, Homo sapien
gaaagcagtagactttgggctgcag

SEQ ID NO: 856284 - DNA, 25 bp, Homo sapien
cactggttagtgtctctggagccct

SEQ ID NO: 856285 - DNA, 25 bp, Homo sapien
tgttgcctgcaaaaattacactggt

SEQ ID NO: 856286 - DNA, 25 bp, Homo sapien
caagtgctccacactgtgcattctg

SEQ ID NO: 856287 - DNA, 25 bp, Homo sapien
gtgctccacactgtgcattctgcat

SEQ ID NO: 856288 - DNA, 25 bp, Homo sapien
ctttatggtccctccaagtgctcca

SEQ ID NO: 856289 - DNA, 25 bp, Homo sapien
tccaagtgctccacactgtgcattc

SEQ ID NO: 856290 - DNA, 25 bp, Homo sapien
tgggggcagaattcgtgttccgttc

SEQ ID NO: 856291 - DNA, 25 bp, Homo sapien
gggggcagaattcgtgttccgttca

SEQ ID NO: 856292 - DNA, 25 bp, Homo sapien
ggggcagaattcgtgttccgttcat

SEQ ID NO: 856293 - DNA, 25 bp, Homo sapien
ctgggggcagaattcgtgttccgtt

SEQ ID NO: 856294 - DNA, 25 bp, Homo sapien
cgagacaaggcctagggtgcccgtc

SEQ ID NO: 856295 - DNA, 25 bp, Homo sapien
ggggcgagacaaggcctagggtgcc

SEQ ID NO: 856296 - DNA, 25 bp, Homo sapien
ggcgagacaaggcctagggtgcccg

SEQ ID NO: 856297 - DNA, 25 bp, Homo sapien
agacaaggcctagggtgcccgtcag

SEQ ID NO: 856298 - DNA, 25 bp, Homo sapien
aaaactccccttgagtcactgaggc

SEQ ID NO: 856299 - DNA, 25 bp, Homo sapien
aaggtgttgccgcagctttccgcct

SEQ ID NO: 856300 - DNA, 25 bp, Homo sapien
cattccctgggcatcacaggacgat

SEQ ID NO: 856301 - DNA, 25 bp, Homo sapien
tcgatgccagccttgcagaggagca

SEQ ID NO: 856302 - DNA, 25 bp, Homo sapien
gaagcgcggttatggacaccaagaa

SEQ ID NO: 856303 - DNA, 25 bp, Homo sapien
cggaagtccccacgaggtggcttca

SEQ ID NO: 856304 - DNA, 25 bp, Homo sapien
gagcggcggcaagaaaaatgccagc

SEQ ID NO: 856305 - DNA, 25 bp, Homo sapien
ccccgaggagtttcgcagaatcaac

SEQ ID NO: 856306 - DNA, 25 bp, Homo sapien
gattacatttatgcacgaacgggct

SEQ ID NO: 856307 - DNA, 25 bp, Homo sapien
gactgatttgcctacgagggttccg

SEQ ID NO: 856308 - DNA, 25 bp, Homo sapien
cacttgggcacaggcataggaggct

SEQ ID NO: 856309 - DNA, 25 bp, Homo sapien
agctggtttattctgcggccgagga

SEQ ID NO: 856310 - DNA, 25 bp, Homo sapien
gcgtgtttcaaagggtagggcacac

SEQ ID NO: 856311 - DNA, 25 bp, Homo sapien
tctctgggcgggttcgagtgcgcgc

SEQ ID NO: 856312 - DNA, 25 bp, Homo sapien
agaagcacgtgctacttcgcgcgca

SEQ ID NO: 856313 - DNA, 25 bp, Homo sapien
ggagactgtgggcttcctcgctgcc

SEQ ID NO: 856314 - DNA, 25 bp, Homo sapien
ggatccactgcgcaaaccttgatga

SEQ ID NO: 856315 - DNA, 25 bp, Homo sapien
actgcgcaaaccttgatgaacctga

SEQ ID NO: 856316 - DNA, 25 bp, Homo sapien
cgcggatccactgcgcaaaccttga

SEQ ID NO: 856317 - DNA, 25 bp, Homo sapien
gtggctagaccctgctcgcacccag

SEQ ID NO: 856318 - DNA, 25 bp, Homo sapien
caatatcttgagcattcagtgggac

SEQ ID NO: 856319 - DNA, 25 bp, Homo sapien
tttcaaatgagaagcgccatcgcgg

SEQ ID NO: 856320 - DNA, 25 bp, Homo sapien
gatggctgcttggttgctaaaccca

SEQ ID NO: 856321 - DNA, 25 bp, Homo sapien
gaaatcctctagcaagaagccagcc

SEQ ID NO: 856322 - DNA, 25 bp, Homo sapien
aggacttccttatggttgactggca

SEQ ID NO: 856323 - DNA, 25 bp, Homo sapien
tccaaagtacttcttggatttcacg

SEQ ID NO: 856324 - DNA, 25 bp, Homo sapien
cgatgaggacttccttatggttgac

SEQ ID NO: 856325 - DNA, 25 bp, Homo sapien
tcttggatttcacgatgaggacttc

SEQ ID NO: 856326 - DNA, 25 bp, Homo sapien
cttggtgaacagtttgcaccagctt

SEQ ID NO: 856327 - DNA, 25 bp, Homo sapien
aacatcttggtgaacagtttgcacc

SEQ ID NO: 856328 - DNA, 25 bp, Homo sapien
catcttggtgaacagtttgcaccag

SEQ ID NO: 856329 - DNA, 25 bp, Homo sapien
gaacatcttggtgaacagtttgcac

SEQ ID NO: 856330 - DNA, 25 bp, Homo sapien
ccccaagcaaggacagggcagggtg

SEQ ID NO: 856331 - DNA, 25 bp, Homo sapien
cagagccagcccactcctccctttc

SEQ ID NO: 856332 - DNA, 25 bp, Homo sapien
ctgtccccaagcaaggacagggcag

SEQ ID NO: 856333 - DNA, 25 bp, Homo sapien
agcccagagccagcccactcctccc

SEQ ID NO: 856334 - DNA, 25 bp, Homo sapien
cagaacctctcttgggtccttcaca

SEQ ID NO: 856335 - DNA, 25 bp, Homo sapien
ccttgactgacagcccagaacctct

SEQ ID NO: 856336 - DNA, 25 bp, Homo sapien
gggggtctggcatccttgactgaca

SEQ ID NO: 856337 - DNA, 25 bp, Homo sapien
gggagaatcacaatgcaggcacttg

SEQ ID NO: 856338 - DNA, 25 bp, Homo sapien
tggggggtgacgcagcggggggtca

SEQ ID NO: 856339 - DNA, 25 bp, Homo sapien
gccacagccttggtggtgtggaggt

SEQ ID NO: 856340 - DNA, 25 bp, Homo sapien
ctgccacagccttggtggtgtggag

SEQ ID NO: 856341 - DNA, 25 bp, Homo sapien
tgacgcagcggggggtcacagccat

SEQ ID NO: 856342 - DNA, 25 bp, Homo sapien
tgggtggtctcagagatgacgccac

SEQ ID NO: 856343 - DNA, 25 bp, Homo sapien
gtctcagagatgacgccacagccat

SEQ ID NO: 856344 - DNA, 25 bp, Homo sapien
tcagggaatgaggttggaggaggat

SEQ ID NO: 856345 - DNA, 25 bp, Homo sapien
agagatgacgccacagccatggcgg

SEQ ID NO: 856346 - DNA, 25 bp, Homo sapien
ttgcacagaagctgtgctcatcttc

SEQ ID NO: 856347 - DNA, 25 bp, Homo sapien
tgtatgtgcggccacacagagtact

SEQ ID NO: 856348 - DNA, 25 bp, Homo sapien
ccaattgtagtgtatgtgcggccac

SEQ ID NO: 856349 - DNA, 25 bp, Homo sapien
ttttgaacaccacgaatctgtgtgt

SEQ ID NO: 856350 - DNA, 25 bp, Homo sapien
acgaaaaatatagggtcagaggcac

SEQ ID NO: 856351 - DNA, 25 bp, Homo sapien
tcgtcacccctgaacgtcgtcaaag

SEQ ID NO: 856352 - DNA, 25 bp, Homo sapien
gcatttctgaatcctgacgctggga

SEQ ID NO: 856353 - DNA, 25 bp, Homo sapien
tatgtgaccagtgccggtagcggct

SEQ ID NO: 856354 - DNA, 25 bp, Homo sapien
tatgacgagggaggaaccacgtggg

SEQ ID NO: 856355 - DNA, 25 bp, Homo sapien
cctgctcttgcttactctctctcac

SEQ ID NO: 856356 - DNA, 25 bp, Homo sapien
atatgacgagggaggaaccacgtgg

SEQ ID NO: 856357 - DNA, 25 bp, Homo sapien
tgacgagggaggaaccacgtgggag

SEQ ID NO: 856358 - DNA, 25 bp, Homo sapien
ataagttccgataactcaacaccat

SEQ ID NO: 856359 - DNA, 25 bp, Homo sapien
ttccgataactcaacaccatcgggc

SEQ ID NO: 856360 - DNA, 25 bp, Homo sapien
agttccgataactcaacaccatcgg

SEQ ID NO: 856361 - DNA, 25 bp, Homo sapien
cgataactcaacaccatcgggccag

SEQ ID NO: 856362 - DNA, 25 bp, Homo sapien
caaactggcttagagacttcactag

SEQ ID NO: 856363 - DNA, 25 bp, Homo sapien
gaattctacaggtaagtctttcacc

SEQ ID NO: 856364 - DNA, 25 bp, Homo sapien
taggaagatgtgtcctccgccatcc

SEQ ID NO: 856365 - DNA, 25 bp, Homo sapien
ctccgccatcccagaattctacagg

SEQ ID NO: 856366 - DNA, 25 bp, Homo sapien
aagcgtgggcccggggctggggctg

SEQ ID NO: 856367 - DNA, 25 bp, Homo sapien
ctcaaagcgtgggcccggggctggg

SEQ ID NO: 856368 - DNA, 25 bp, Homo sapien
atctcaaagcgtgggcccggggctg

SEQ ID NO: 856369 - DNA, 25 bp, Homo sapien
catctcaaagcgtgggcccggggct

SEQ ID NO: 856370 - DNA, 25 bp, Homo sapien
gtactcaaagggcagtacagtcccc

SEQ ID NO: 856371 - DNA, 25 bp, Homo sapien
ccttgagataattgcattggctgct

SEQ ID NO: 856372 - DNA, 25 bp, Homo sapien
gctgctttgtaactgatgaattttc

SEQ ID NO: 856373 - DNA, 25 bp, Homo sapien
gggtctgtgccgaatgaactgagag

SEQ ID NO: 856374 - DNA, 25 bp, Homo sapien
agaaaaccatgttcagttattttct

SEQ ID NO: 856375 - DNA, 25 bp, Homo sapien
ttcttcactaaaagatgcagaattc

SEQ ID NO: 856376 - DNA, 25 bp, Homo sapien
cgatgtaagaggtgtgtgattggcc

SEQ ID NO: 856377 - DNA, 25 bp, Homo sapien
caagagatcgatgtaagaggtgtgt

SEQ ID NO: 856378 - DNA, 25 bp, Homo sapien
gattttagggctaagccaccctcca

SEQ ID NO: 856379 - DNA, 25 bp, Homo sapien
gcccctggcatactgtggctgatat

SEQ ID NO: 856380 - DNA, 25 bp, Homo sapien
tgcttgttaaaatctcactggctgt

SEQ ID NO: 856381 - DNA, 25 bp, Homo sapien
gaattttctggttggtgcgcttgac

SEQ ID NO: 856382 - DNA, 25 bp, Homo sapien
gatctgctccgaataaagttttcca

SEQ ID NO: 856383 - DNA, 25 bp, Homo sapien
ttagtcgaatagtcttcttcctggg

SEQ ID NO: 856384 - DNA, 25 bp, Homo sapien
gaacttgacctagtatgatggttgc

SEQ ID NO: 856385 - DNA, 25 bp, Homo sapien
gttgctaatggtccaggaaaatggg

SEQ ID NO: 856386 - DNA, 25 bp, Homo sapien
ggactctggagagcgcaagctgcct

SEQ ID NO: 856387 - DNA, 25 bp, Homo sapien
gactctggagagcgcaagctgcctg

SEQ ID NO: 856388 - DNA, 25 bp, Homo sapien
aggctcttcctctgattgaacctac

SEQ ID NO: 856389 - DNA, 25 bp, Homo sapien
aaatctagcattttcaaaggtccat

SEQ ID NO: 856390 - DNA, 25 bp, Homo sapien
gtaaatctagcattttcaaaggtcc

SEQ ID NO: 856391 - DNA, 25 bp, Homo sapien
tagcattttcaaaggtccatttttc

SEQ ID NO: 856392 - DNA, 25 bp, Homo sapien
tctagcattttcaaaggtccatttt

SEQ ID NO: 856393 - DNA, 25 bp, Homo sapien
agagctgtccagatcccaaatgtca

SEQ ID NO: 856394 - DNA, 25 bp, Homo sapien
acatagactttgctttatcttcatc

SEQ ID NO: 856395 - DNA, 25 bp, Homo sapien
ccaaatgtcaaggacccatagaata

SEQ ID NO: 856396 - DNA, 25 bp, Homo sapien
catgattatggtgcaaatatatgaa

SEQ ID NO: 856397 - DNA, 25 bp, Homo sapien
gcccaagcttctactgataatcaca

SEQ ID NO: 856398 - DNA, 25 bp, Homo sapien
tctactgataatcacattaaatcca

SEQ ID NO: 856399 - DNA, 25 bp, Homo sapien
tggcacttctctttcgatgcccaag

SEQ ID NO: 856400 - DNA, 25 bp, Homo sapien
ttctctttcgatgcccaagcttcta

SEQ ID NO: 856401 - DNA, 25 bp, Homo sapien
aattatggtaataaggtgacagtac

SEQ ID NO: 856402 - DNA, 25 bp, Homo sapien
ctaaatgccttggatgttgtgtcat

SEQ ID NO: 856403 - DNA, 25 bp, Homo sapien
ttatggtaataaggtgacagtacat

SEQ ID NO: 856404 - DNA, 25 bp, Homo sapien
gtgtcatctcgttcaaacacttctc

SEQ ID NO: 856405 - DNA, 25 bp, Homo sapien
aatgctggcagtcgggaggcgggct

SEQ ID NO: 856406 - DNA, 25 bp, Homo sapien
aatgacaatgctggcagtcgggagg

SEQ ID NO: 856407 - DNA, 25 bp, Homo sapien
tgacaatgctggcagtcgggaggcg

SEQ ID NO: 856408 - DNA, 25 bp, Homo sapien
tggcagtcgggaggcgggctgggta

SEQ ID NO: 856409 - DNA, 25 bp, Homo sapien
gcgtgaggttcgtgacactggacat

SEQ ID NO: 856410 - DNA, 25 bp, Homo sapien
tgtggcgtgaggttcgtgacactgg

SEQ ID NO: 856411 - DNA, 25 bp, Homo sapien
aatagtgtggcgtgaggttcgtgac

SEQ ID NO: 856412 - DNA, 25 bp, Homo sapien
aagaaaatagtgtggcgtgaggttc

SEQ ID NO: 856413 - DNA, 25 bp, Homo sapien
tctttcatggaattcctagatcatc

SEQ ID NO: 856414 - DNA, 25 bp, Homo sapien
gaattcctagatcatctcattttcc

SEQ ID NO: 856415 - DNA, 25 bp, Homo sapien
ggtctgattccgcttctttcatgga

SEQ ID NO: 856416 - DNA, 25 bp, Homo sapien
ttaactgcagttggtctgattccgc

SEQ ID NO: 856417 - DNA, 25 bp, Homo sapien
gatggctgtctatcacccaggaaga

SEQ ID NO: 856418 - DNA, 25 bp, Homo sapien
ccttgcagaggcataactgggtgat

SEQ ID NO: 856419 - DNA, 25 bp, Homo sapien
cactctaagaactcgatcctgctgg

SEQ ID NO: 856420 - DNA, 25 bp, Homo sapien
gataagacaccagttacgtctccaa

SEQ ID NO: 856421 - DNA, 25 bp, Homo sapien
ctgcatagctgcacttgcaggcctg

SEQ ID NO: 856422 - DNA, 25 bp, Homo sapien
aaagtgggacgccatgagccaggcc

SEQ ID NO: 856423 - DNA, 25 bp, Homo sapien
agggaaaagtgggacgccatgagcc

SEQ ID NO: 856424 - DNA, 25 bp, Homo sapien
cagggatacaggctgcatagctgca

SEQ ID NO: 856425 - DNA, 25 bp, Homo sapien
ggaacaggttcatggtaatcccagc

SEQ ID NO: 856426 - DNA, 25 bp, Homo sapien
cagaggtctaaattcctaagtccca

SEQ ID NO: 856427 - DNA, 25 bp, Homo sapien
gaggtctaaattcctaagtcccagc

SEQ ID NO: 856428 - DNA, 25 bp, Homo sapien
gaacaggaacaggttcatggtaatc

SEQ ID NO: 856429 - DNA, 25 bp, Homo sapien
tgggaaagttatcgaaccacgagag

SEQ ID NO: 856430 - DNA, 25 bp, Homo sapien
gttatcgaaccacgagagtcttagt

SEQ ID NO: 856431 - DNA, 25 bp, Homo sapien
cgaaccacgagagtcttagtttcct

SEQ ID NO: 856432 - DNA, 25 bp, Homo sapien
gctcttgggaaagttatcgaaccac

SEQ ID NO: 856433 - DNA, 25 bp, Homo sapien
gagaagctccaatcagccttgctcg

SEQ ID NO: 856434 - DNA, 25 bp, Homo sapien
tccaatcagccttgctcgaatcagc

SEQ ID NO: 856435 - DNA, 25 bp, Homo sapien
ggtgatagtctagtttttctttcaa

SEQ ID NO: 856436 - DNA, 25 bp, Homo sapien
agtttccaggtgatagtctagtttt

SEQ ID NO: 856437 - DNA, 25 bp, Homo sapien
ctgggagtgtgctgctcggatgtcc

SEQ ID NO: 856438 - DNA, 25 bp, Homo sapien
caggggacggatttgagtgcttccc

SEQ ID NO: 856439 - DNA, 25 bp, Homo sapien
tgggatccctctgaatggctcttgg

SEQ ID NO: 856440 - DNA, 25 bp, Homo sapien
ctgctcggatgtcccttcacaagaa

SEQ ID NO: 856441 - DNA, 25 bp, Homo sapien
tcaagccatctgattgcaacattct

SEQ ID NO: 856442 - DNA, 25 bp, Homo sapien
gcatctcaggcggtttccttcatgc

SEQ ID NO: 856443 - DNA, 25 bp, Homo sapien
tgccctgcaggtacggcacagcatt

SEQ ID NO: 856444 - DNA, 25 bp, Homo sapien
ctcctgcaacctgtgggagacttca

SEQ ID NO: 856445 - DNA, 25 bp, Homo sapien
tactccagagttctatcatcaatga

SEQ ID NO: 856446 - DNA, 25 bp, Homo sapien
attggtttagtagatccttctggtc

SEQ ID NO: 856447 - DNA, 25 bp, Homo sapien
caatcaaaagttccccttacaagag

SEQ ID NO: 856448 - DNA, 25 bp, Homo sapien
aagaggagagggcttatactccaga

SEQ ID NO: 856449 - DNA, 25 bp, Homo sapien
aatccatatccttgtcatactgtcc

SEQ ID NO: 856450 - DNA, 25 bp, Homo sapien
cattaaaataatgccgacgtatagc

SEQ ID NO: 856451 - DNA, 25 bp, Homo sapien
cgacgtatagcaaaaattcctccag

SEQ ID NO: 856452 - DNA, 25 bp, Homo sapien
tatccttgtcatactgtccaatttc

SEQ ID NO: 856453 - DNA, 25 bp, Homo sapien
ggggattataaagagttggcctcca

SEQ ID NO: 856454 - DNA, 25 bp, Homo sapien
gggattataaagagttggcctccac

SEQ ID NO: 856455 - DNA, 25 bp, Homo sapien
tttgtttcttactgatatgtcctac

SEQ ID NO: 856456 - DNA, 25 bp, Homo sapien
tgatgattgtagaaggttttccagt

SEQ ID NO: 856457 - DNA, 25 bp, Homo sapien
ctgatgattgtagaaggttttccag

SEQ ID NO: 856458 - DNA, 25 bp, Homo sapien
ttttccagtttgtttcttactgata

SEQ ID NO: 856459 - DNA, 25 bp, Homo sapien
cagtcttaggtagttatgtgtcata

SEQ ID NO: 856460 - DNA, 25 bp, Homo sapien
ccaaacgtgcaccagtcttaggtag

SEQ ID NO: 856461 - DNA, 25 bp, Homo sapien
tatattcatccagccaaacgtgcac

SEQ ID NO: 856462 - DNA, 25 bp, Homo sapien
tccagccaaacgtgcaccagtctta

SEQ ID NO: 856463 - DNA, 25 bp, Homo sapien
gacttgcaacccagtcgtttcctta

SEQ ID NO: 856464 - DNA, 25 bp, Homo sapien
aagacattatccaaataccactgaa

SEQ ID NO: 856465 - DNA, 25 bp, Homo sapien
tcgcgaatatttccgtaggtgacat

SEQ ID NO: 856466 - DNA, 25 bp, Homo sapien
ccttaactcaacacgctcgcgaata

SEQ ID NO: 856467 - DNA, 25 bp, Homo sapien
tattaatgaaagtgatttgttttcc

SEQ ID NO: 856468 - DNA, 25 bp, Homo sapien
ttattaatgaaagtgatttgttttc

SEQ ID NO: 856469 - DNA, 25 bp, Homo sapien
ctttattaatgaaagtgatttgttt

SEQ ID NO: 856470 - DNA, 25 bp, Homo sapien
cctttattaatgaaagtgatttgtt

SEQ ID NO: 856471 - DNA, 25 bp, Homo sapien
gatgttccaaacttacactcttgtg

SEQ ID NO: 856472 - DNA, 25 bp, Homo sapien
tttcacgtaattccacgatgttcca

SEQ ID NO: 856473 - DNA, 25 bp, Homo sapien
taattgcatttcacgtaattccacg

SEQ ID NO: 856474 - DNA, 25 bp, Homo sapien
cgtaattccacgatgttccaaactt

SEQ ID NO: 856475 - DNA, 25 bp, Homo sapien
gaagtactttggacatctgagaatg

SEQ ID NO: 856476 - DNA, 25 bp, Homo sapien
tgtgtttacacaggacagacaagtc

SEQ ID NO: 856477 - DNA, 25 bp, Homo sapien
ccatcaccagcgtaaaaccaacagt

SEQ ID NO: 856478 - DNA, 25 bp, Homo sapien
tgtctaactccaaagatgccaaaga

SEQ ID NO: 856479 - DNA, 25 bp, Homo sapien
cagccccagtccgacccgcaggagc

SEQ ID NO: 856480 - DNA, 25 bp, Homo sapien
cacagccccagtccgacccgcagga

SEQ ID NO: 856481 - DNA, 25 bp, Homo sapien
gccccagtccgacccgcaggagcgg

SEQ ID NO: 856482 - DNA, 25 bp, Homo sapien
agccccagtccgacccgcaggagcg

SEQ ID NO: 856483 - DNA, 25 bp, Homo sapien
cgcagcccaggatcgccgccttctg

SEQ ID NO: 856484 - DNA, 25 bp, Homo sapien
agcccaggatcgccgccttctggga

SEQ ID NO: 856485 - DNA, 25 bp, Homo sapien
gcagcccaggatcgccgccttctgg

SEQ ID NO: 856486 - DNA, 25 bp, Homo sapien
cccgcagcccaggatcgccgccttc

SEQ ID NO: 856487 - DNA, 25 bp, Homo sapien
ttaggcagagtagatctcaaaatat

SEQ ID NO: 856488 - DNA, 25 bp, Homo sapien
ggcagagtagatctcaaaatatagt

SEQ ID NO: 856489 - DNA, 25 bp, Homo sapien
taggcagagtagatctcaaaatata

SEQ ID NO: 856490 - DNA, 25 bp, Homo sapien
cagagtagatctcaaaatatagtat

SEQ ID NO: 856491 - DNA, 25 bp, Homo sapien
cagtatcaccagcatatgcctgtat

SEQ ID NO: 856492 - DNA, 25 bp, Homo sapien
tctgtaaatctaaggctacgctaaa

SEQ ID NO: 856493 - DNA, 25 bp, Homo sapien
tattgcagtggctcagaaccgaacc

SEQ ID NO: 856494 - DNA, 25 bp, Homo sapien
tggtatcctgcatgagagccttagc

SEQ ID NO: 856495 - DNA, 25 bp, Homo sapien
taattgacatgctacatcgtaactg

SEQ ID NO: 856496 - DNA, 25 bp, Homo sapien
ttgacatgctacatcgtaactgaca

SEQ ID NO: 856497 - DNA, 25 bp, Homo sapien
catgctacatcgtaactgacagaat

SEQ ID NO: 856498 - DNA, 25 bp, Homo sapien
aagtataattgacatgctacatcgt

SEQ ID NO: 856499 - DNA, 25 bp, Homo sapien
aggaatgaaactagcctcccacctc

SEQ ID NO: 856500 - DNA, 25 bp, Homo sapien
agaggaatgaaactagcctcccacc

SEQ ID NO: 856501 - DNA, 25 bp, Homo sapien
tatcttcaatagatgatactgggaa

SEQ ID NO: 856502 - DNA, 25 bp, Homo sapien
agtatcttcaatagatgatactggg

SEQ ID NO: 856503 - DNA, 25 bp, Homo sapien
cagtctcaggaggtgcgagacccac

SEQ ID NO: 856504 - DNA, 25 bp, Homo sapien
ggaactccaccaggcactaaggtaa

SEQ ID NO: 856505 - DNA, 25 bp, Homo sapien
acttctgtgggctttacctccagga

SEQ ID NO: 856506 - DNA, 25 bp, Homo sapien
aactgccagagccataagctggtgc

SEQ ID NO: 856507 - DNA, 25 bp, Homo sapien
caaggtggtgacttcgctttcagct

SEQ ID NO: 856508 - DNA, 25 bp, Homo sapien
gaaagcgaaagctaccaggcagggt

SEQ ID NO: 856509 - DNA, 25 bp, Homo sapien
gaactgagctaacagggcaaactgt

SEQ ID NO: 856510 - DNA, 25 bp, Homo sapien
tttgaaatccttactactccggtga

SEQ ID NO: 856511 - DNA, 25 bp, Homo sapien
tactcaggccattatcggaagcaca

SEQ ID NO: 856512 - DNA, 25 bp, Homo sapien
aaggccagggctattttctaaacag

SEQ ID NO: 856513 - DNA, 25 bp, Homo sapien
catttcaaagagtgcaggctaggta

SEQ ID NO: 856514 - DNA, 25 bp, Homo sapien
caaatagccgggcaaaagcggccct

SEQ ID NO: 856515 - DNA, 25 bp, Homo sapien
agtagcagctctcgctcactataga

SEQ ID NO: 856516 - DNA, 25 bp, Homo sapien
cagtgaataagggatggtagaggct

SEQ ID NO: 856517 - DNA, 25 bp, Homo sapien
tcaacactttgaatgaatgcccaag

SEQ ID NO: 856518 - DNA, 25 bp, Homo sapien
ggtagaggctgttattcttcaacac

SEQ ID NO: 856519 - DNA, 25 bp, Homo sapien
tatgcaatgtcactctacagatgat

SEQ ID NO: 856520 - DNA, 25 bp, Homo sapien
gaaatgctttttgtagtcgtcctct

SEQ ID NO: 856521 - DNA, 25 bp, Homo sapien
taaactaggaacacagtagaagatc

SEQ ID NO: 856522 - DNA, 25 bp, Homo sapien
taacagaggtcatagtccacaccag

SEQ ID NO: 856523 - DNA, 25 bp, Homo sapien
gctcacccaatttacattccggcat

SEQ ID NO: 856524 - DNA, 25 bp, Homo sapien
caaactatttaggtcgcaaaggact

SEQ ID NO: 856525 - DNA, 25 bp, Homo sapien
aactgttgttaatatctaaaatgct

SEQ ID NO: 856526 - DNA, 25 bp, Homo sapien
ccggcatcatcatcagattagcctg

SEQ ID NO: 856527 - DNA, 25 bp, Homo sapien
catggtataccttctatgcaggttc

SEQ ID NO: 856528 - DNA, 25 bp, Homo sapien
ggttcatttagcaatacccagcaaa

SEQ ID NO: 856529 - DNA, 25 bp, Homo sapien
ttacttccagtaatctaaaccacag

SEQ ID NO: 856530 - DNA, 25 bp, Homo sapien
aaaaatacactatctactctttgac

SEQ ID NO: 856531 - DNA, 25 bp, Homo sapien
aagacctgacaaagactgaacctcc

SEQ ID NO: 856532 - DNA, 25 bp, Homo sapien
gaggaaatcctactgctacttaagc

SEQ ID NO: 856533 - DNA, 25 bp, Homo sapien
gaccccagtcccaaagaaagtcata

SEQ ID NO: 856534 - DNA, 25 bp, Homo sapien
taccaggcacagagaagagtgtcag

SEQ ID NO: 856535 - DNA, 25 bp, Homo sapien
tagacacttcagtatactttaaacc

SEQ ID NO: 856536 - DNA, 25 bp, Homo sapien
catccaccaaatacagaatcactgt

SEQ ID NO: 856537 - DNA, 25 bp, Homo sapien
ttcagtatactttaaaccatccacc

SEQ ID NO: 856538 - DNA, 25 bp, Homo sapien
aataaatatgttagacacttcagta

SEQ ID NO: 856539 - DNA, 25 bp, Homo sapien
tagcatagctgaagggccattgtca

SEQ ID NO: 856540 - DNA, 25 bp, Homo sapien
ctagcatagctgaagggccattgtc

SEQ ID NO: 856541 - DNA, 25 bp, Homo sapien
atagctgaagggccattgtcaattt

SEQ ID NO: 856542 - DNA, 25 bp, Homo sapien
gcatagctgaagggccattgtcaat

SEQ ID NO: 856543 - DNA, 25 bp, Homo sapien
gtccaggtcgcagatgtaaaaaggc

SEQ ID NO: 856544 - DNA, 25 bp, Homo sapien
gaaataccgaactgtgacacttccc

SEQ ID NO: 856545 - DNA, 25 bp, Homo sapien
tgtaaaaaggcacccataacagaaa

SEQ ID NO: 856546 - DNA, 25 bp, Homo sapien
caaaactgtccaggtcgcagatgta

SEQ ID NO: 856547 - DNA, 25 bp, Homo sapien
tcttctggatcttcaacacgactgt

SEQ ID NO: 856548 - DNA, 25 bp, Homo sapien
gaactgtggctcgagcactcgactt

SEQ ID NO: 856549 - DNA, 25 bp, Homo sapien
cagaccccttgacgggcacattctt

SEQ ID NO: 856550 - DNA, 25 bp, Homo sapien
tcgacttgggcctcgagtgaaacgg

SEQ ID NO: 856551 - DNA, 25 bp, Homo sapien
catgtttctgatagcccaagtctct

SEQ ID NO: 856552 - DNA, 25 bp, Homo sapien
gcggtcactgataagcatattaaaa

SEQ ID NO: 856553 - DNA, 25 bp, Homo sapien
ccaagtctctcaactcttgatcgcg

SEQ ID NO: 856554 - DNA, 25 bp, Homo sapien
cacatctctgtggtagcccaagcgg

SEQ ID NO: 856555 - DNA, 25 bp, Homo sapien
tttgcaaatccgataaggcacatac

SEQ ID NO: 856556 - DNA, 25 bp, Homo sapien
gcaagtgtttcatgcagcactcatg

SEQ ID NO: 856557 - DNA, 25 bp, Homo sapien
catgtccagccgaataaagactttt

SEQ ID NO: 856558 - DNA, 25 bp, Homo sapien
ggaagagagggtacataaaaatgtg

SEQ ID NO: 856559 - DNA, 25 bp, Homo sapien
gagttctttttaccaaaatcactgc

SEQ ID NO: 856560 - DNA, 25 bp, Homo sapien
gataaagatgaggaaattctgacat

SEQ ID NO: 856561 - DNA, 25 bp, Homo sapien
aagataaagatgaggaaattctgac

SEQ ID NO: 856562 - DNA, 25 bp, Homo sapien
ctgtaaagataaagatgaggaaatt

SEQ ID NO: 856563 - DNA, 25 bp, Homo sapien
gtaaagataaagatgaggaaattct

SEQ ID NO: 856564 - DNA, 25 bp, Homo sapien
tgctggcgtgcggtctatgacactg

SEQ ID NO: 856565 - DNA, 25 bp, Homo sapien
tatgacactgtgcactgtccgaagc

SEQ ID NO: 856566 - DNA, 25 bp, Homo sapien
tccacaaggatgatctcatgaagca

SEQ ID NO: 856567 - DNA, 25 bp, Homo sapien
gcaaggcagaaaacgcttcattata

SEQ ID NO: 856568 - DNA, 25 bp, Homo sapien
caactggataaaggtacataggccg

SEQ ID NO: 856569 - DNA, 25 bp, Homo sapien
tgtgactgcacgtgtaggatcccca

SEQ ID NO: 856570 - DNA, 25 bp, Homo sapien
gaaggcttggagctatgcagaccag

SEQ ID NO: 856571 - DNA, 25 bp, Homo sapien
gaaaaagtcactggcatacacctgt

SEQ ID NO: 856572 - DNA, 25 bp, Homo sapien
gaaaataaagtcccacaattattca

SEQ ID NO: 856573 - DNA, 25 bp, Homo sapien
gccgcgccaatcattctccctcgaa

SEQ ID NO: 856574 - DNA, 25 bp, Homo sapien
caacccctcacgctttgtatttctt

SEQ ID NO: 856575 - DNA, 25 bp, Homo sapien
ctgtcgcgtgggccgcgccaatcat

SEQ ID NO: 856576 - DNA, 25 bp, Homo sapien
tcgaatcaacccctcacgctttgta

SEQ ID NO: 856577 - DNA, 25 bp, Homo sapien
ggcgttatgaacaggtctttcccaa

SEQ ID NO: 856578 - DNA, 25 bp, Homo sapien
tactagtaacaacggagacttgctc

SEQ ID NO: 856579 - DNA, 25 bp, Homo sapien
gagggatgcactccgcactaagagt

SEQ ID NO: 856580 - DNA, 25 bp, Homo sapien
tcagggagaccaattacacataggt

SEQ ID NO: 856581 - DNA, 25 bp, Homo sapien
tacctgcaatatcacatgcctaaca

SEQ ID NO: 856582 - DNA, 25 bp, Homo sapien
gtcactgctagggaatatccccacc

SEQ ID NO: 856583 - DNA, 25 bp, Homo sapien
tcaaaattttttcgccatgtccatg

SEQ ID NO: 856584 - DNA, 25 bp, Homo sapien
catgtccatgccctacctgcaatat

SEQ ID NO: 856585 - DNA, 25 bp, Homo sapien
tgcaaactggcttgcttcggacaga

SEQ ID NO: 856586 - DNA, 25 bp, Homo sapien
tgtctgtaaacagcctgaagggtgg

SEQ ID NO: 856587 - DNA, 25 bp, Homo sapien
caatgatgcccgtgaatcagtccca

SEQ ID NO: 856588 - DNA, 25 bp, Homo sapien
caatcacaattgcttcgaggagaaa

SEQ ID NO: 856589 - DNA, 25 bp, Homo sapien
taactatggatgatggctgccacac

SEQ ID NO: 856590 - DNA, 25 bp, Homo sapien
catacgcgcgactcttgaaaaaact

SEQ ID NO: 856591 - DNA, 25 bp, Homo sapien
tacaaccacccgtccaatgggatga

SEQ ID NO: 856592 - DNA, 25 bp, Homo sapien
tcactgccggtggtcaacaaggacg

SEQ ID NO: 856593 - DNA, 25 bp, Homo sapien
gtcctcacggatggcggccagcaag

SEQ ID NO: 856594 - DNA, 25 bp, Homo sapien
gcgtgtcggcgctgatgatgtcaat

SEQ ID NO: 856595 - DNA, 25 bp, Homo sapien
gcagccacatcacattcacttcaca

SEQ ID NO: 856596 - DNA, 25 bp, Homo sapien
caatcactgggcacaccacggtgtg

SEQ ID NO: 856597 - DNA, 25 bp, Homo sapien
ctagctcagaaagggggacaagatc

SEQ ID NO: 856598 - DNA, 25 bp, Homo sapien
tccctccgctcgtcctagctcagaa

SEQ ID NO: 856599 - DNA, 25 bp, Homo sapien
tccgctcgtcctagctcagaaaggg

SEQ ID NO: 856600 - DNA, 25 bp, Homo sapien
tcccatttgaagtgcagtccccagt

SEQ ID NO: 856601 - DNA, 25 bp, Homo sapien
gctaataatatgctagtatctggca

SEQ ID NO: 856602 - DNA, 25 bp, Homo sapien
tatctggcatacgaaggctactttt

SEQ ID NO: 856603 - DNA, 25 bp, Homo sapien
tatccagtatcagagaatgagccag

SEQ ID NO: 856604 - DNA, 25 bp, Homo sapien
tgagccaggccatacaactgaattt

SEQ ID NO: 856605 - DNA, 25 bp, Homo sapien
tccatgccactatcatactgtccaa

SEQ ID NO: 856606 - DNA, 25 bp, Homo sapien
caaacctccagccattgttggtgac

SEQ ID NO: 856607 - DNA, 25 bp, Homo sapien
catactgtccaagttcatggaaata

SEQ ID NO: 856608 - DNA, 25 bp, Homo sapien
ggaaatactgtctgttcatggcaaa

SEQ ID NO: 856609 - DNA, 25 bp, Homo sapien
tggccagaagcaaaaacaggtgtta

SEQ ID NO: 856610 - DNA, 25 bp, Homo sapien
ctggccagaagcaaaaacaggtgtt

SEQ ID NO: 856611 - DNA, 25 bp, Homo sapien
agcaaaaacaggtgttaacagttgc

SEQ ID NO: 856612 - DNA, 25 bp, Homo sapien
aaacaggtgttaacagttgcctcat

SEQ ID NO: 856613 - DNA, 25 bp, Homo sapien
tgtgtcatggtgtcctggccttcgg

SEQ ID NO: 856614 - DNA, 25 bp, Homo sapien
ggaaaatgtgtcctactctagagca

SEQ ID NO: 856615 - DNA, 25 bp, Homo sapien
tgtgccagccgcaaagagttgtgtg

SEQ ID NO: 856616 - DNA, 25 bp, Homo sapien
ccttcgggagatccatatggtcgcc

SEQ ID NO: 856617 - DNA, 25 bp, Homo sapien
gtcattccagcacaagctacatgtc

SEQ ID NO: 856618 - DNA, 25 bp, Homo sapien
ttactgtgcacttccttattcatct

SEQ ID NO: 856619 - DNA, 25 bp, Homo sapien
tctgttgacatttccctcacggtgt

SEQ ID NO: 856620 - DNA, 25 bp, Homo sapien
cacggtgtgaaaaattactgtgcac

SEQ ID NO: 856621 - DNA, 25 bp, Homo sapien
cgtatatatgagatcagtgggtctc

SEQ ID NO: 856622 - DNA, 25 bp, Homo sapien
gaatcaatgaaacaggcgtatatat

SEQ ID NO: 856623 - DNA, 25 bp, Homo sapien
catcgatgttcttaaaaattacgga

SEQ ID NO: 856624 - DNA, 25 bp, Homo sapien
tcaaactcgtgagtctcagtcatcg

SEQ ID NO: 856625 - DNA, 25 bp, Homo sapien
gagattttttacacgattaagtcca

SEQ ID NO: 856626 - DNA, 25 bp, Homo sapien
tatagagattttttacacgattaag

SEQ ID NO: 856627 - DNA, 25 bp, Homo sapien
acacgattaagtccattactaacaa

SEQ ID NO: 856628 - DNA, 25 bp, Homo sapien
gattaagtccattactaacaatgat

SEQ ID NO: 856629 - DNA, 25 bp, Homo sapien
ctgcatctctgggtatacattatcc

SEQ ID NO: 856630 - DNA, 25 bp, Homo sapien
tttggcgtgggacccagatatctgc

SEQ ID NO: 856631 - DNA, 25 bp, Homo sapien
cgtcttcaggtcaggtcttaaggaa

SEQ ID NO: 856632 - DNA, 25 bp, Homo sapien
cacacgctcactgatattgccatag

SEQ ID NO: 856633 - DNA, 25 bp, Homo sapien
tatgcatgctacactggagagacac

SEQ ID NO: 856634 - DNA, 25 bp, Homo sapien
tccggaggtacgaattccaaggctc

SEQ ID NO: 856635 - DNA, 25 bp, Homo sapien
tggtaagcgatcaactacatgggca

SEQ ID NO: 856636 - DNA, 25 bp, Homo sapien
ggatgattttatggccggaccccta

SEQ ID NO: 856637 - DNA, 25 bp, Homo sapien
acaggccttaagcaccacgagacct

SEQ ID NO: 856638 - DNA, 25 bp, Homo sapien
ctgatttgggtcactgtagtcacag

SEQ ID NO: 856639 - DNA, 25 bp, Homo sapien
gggtcactgtagtcacaggccttaa

SEQ ID NO: 856640 - DNA, 25 bp, Homo sapien
accacgagacctcccttctgacttg

SEQ ID NO: 856641 - DNA, 25 bp, Homo sapien
gctgtgagccccgaggtgtcactca

SEQ ID NO: 856642 - DNA, 25 bp, Homo sapien
tccttgcggacactggctgtgagcc

SEQ ID NO: 856643 - DNA, 25 bp, Homo sapien
gatgtcctcaggagtgactggcagc

SEQ ID NO: 856644 - DNA, 25 bp, Homo sapien
gcagcagcttccctacactggaagc

SEQ ID NO: 856645 - DNA, 25 bp, Homo sapien
gactgaggtgtcatctaaggccact

SEQ ID NO: 856646 - DNA, 25 bp, Homo sapien
aattctgtagtgcttcccttggcca

SEQ ID NO: 856647 - DNA, 25 bp, Homo sapien
taacgcaacactacacagaaatggg

SEQ ID NO: 856648 - DNA, 25 bp, Homo sapien
caactaaaatgctctatgacgacga

SEQ ID NO: 856649 - DNA, 25 bp, Homo sapien
gacatatctagacaaaggagactat

SEQ ID NO: 856650 - DNA, 25 bp, Homo sapien
agccgtggcgggtctgatgagcgag

SEQ ID NO: 856651 - DNA, 25 bp, Homo sapien
gacccgtggcatttcatgagccgtg

SEQ ID NO: 856652 - DNA, 25 bp, Homo sapien
tgagcgagtctctgacatatctaga

SEQ ID NO: 856653 - DNA, 25 bp, Homo sapien
cagagcccttctgacccaggggatc

SEQ ID NO: 856654 - DNA, 25 bp, Homo sapien
gccatcgcagatcgccatggcgaca

SEQ ID NO: 856655 - DNA, 25 bp, Homo sapien
cgacacctggtatagccgattgttt

SEQ ID NO: 856656 - DNA, 25 bp, Homo sapien
aggcactgtccaaccgacacctggt

SEQ ID NO: 856657 - DNA, 25 bp, Homo sapien
cacaccggaggcaacgcctgatgaa

SEQ ID NO: 856658 - DNA, 25 bp, Homo sapien
gcctgatgaagcaacgttcccacca

SEQ ID NO: 856659 - DNA, 25 bp, Homo sapien
agagctcccgtctctgtcagacacg

SEQ ID NO: 856660 - DNA, 25 bp, Homo sapien
tcttcacccgtggacactcagagct

SEQ ID NO: 856661 - DNA, 25 bp, Homo sapien
tatacgtatatcacaccttgctcaa

SEQ ID NO: 856662 - DNA, 25 bp, Homo sapien
ccataaggtattgggaagtgtgcta

SEQ ID NO: 856663 - DNA, 25 bp, Homo sapien
gctataaaacttccaagtactgctt

SEQ ID NO: 856664 - DNA, 25 bp, Homo sapien
gatggaagctaaagtcattgagact

SEQ ID NO: 856665 - DNA, 25 bp, Homo sapien
ctggtgggaactgagtttctcaaca

SEQ ID NO: 856666 - DNA, 25 bp, Homo sapien
tggtgggaactgagtttctcaacat

SEQ ID NO: 856667 - DNA, 25 bp, Homo sapien
ggacttggccttgatcgtcttctgt

SEQ ID NO: 856668 - DNA, 25 bp, Homo sapien
tttggtcctctcatgtcactctcct

SEQ ID NO: 856669 - DNA, 25 bp, Homo sapien
ctgtatttggtcctctcatgtcact

SEQ ID NO: 856670 - DNA, 25 bp, Homo sapien
tgtatttggtcctctcatgtcactc

SEQ ID NO: 856671 - DNA, 25 bp, Homo sapien
tatttggtcctctcatgtcactctc

SEQ ID NO: 856672 - DNA, 25 bp, Homo sapien
tggtgtccatctcgacctgcaggat

SEQ ID NO: 856673 - DNA, 25 bp, Homo sapien
ccgatgcgaattccagccaccttag

SEQ ID NO: 856674 - DNA, 25 bp, Homo sapien
tcaggagtaagtttccacgggccga

SEQ ID NO: 856675 - DNA, 25 bp, Homo sapien
caaagtcagaaaactgtcctaggtg

SEQ ID NO: 856676 - DNA, 25 bp, Homo sapien
ctgggcgccccgaatactcagtggg

SEQ ID NO: 856677 - DNA, 25 bp, Homo sapien
gtctttacccttggccgagtccagc

SEQ ID NO: 856678 - DNA, 25 bp, Homo sapien
ttttccgacgagtctgacagcgtct

SEQ ID NO: 856679 - DNA, 25 bp, Homo sapien
cactcctaaggcatggcccttcggg

SEQ ID NO: 856680 - DNA, 25 bp, Homo sapien
gggaccgcaggcgtgtgctaccgcg

SEQ ID NO: 856681 - DNA, 25 bp, Homo sapien
ggaccgcaggcgtgtgctaccgcgc

SEQ ID NO: 856682 - DNA, 25 bp, Homo sapien
gaccgcaggcgtgtgctaccgcgcc

SEQ ID NO: 856683 - DNA, 25 bp, Homo sapien
tgatgaaaccgtatctgttgcttac

SEQ ID NO: 856684 - DNA, 25 bp, Homo sapien
ttgatgaaaccgtatctgttgctta

SEQ ID NO: 856685 - DNA, 25 bp, Homo sapien
gttgatgaaaccgtatctgttgctt

SEQ ID NO: 856686 - DNA, 25 bp, Homo sapien
ctgttgatgaaaccgtatctgttgc

SEQ ID NO: 856687 - DNA, 25 bp, Homo sapien
ggttctccttcacggcagtctgatg

SEQ ID NO: 856688 - DNA, 25 bp, Homo sapien
ccctcaacatcggactccgcggcct

SEQ ID NO: 856689 - DNA, 25 bp, Homo sapien
tcacggcagtctgatgaacacacat

SEQ ID NO: 856690 - DNA, 25 bp, Homo sapien
ggccctggaacacttgccgccgcct

SEQ ID NO: 856691 - DNA, 25 bp, Homo sapien
ttctggtgattctgccggtgacggc

SEQ ID NO: 856692 - DNA, 25 bp, Homo sapien
tacggtggccgcaggtttactgcct

SEQ ID NO: 856693 - DNA, 25 bp, Homo sapien
gaggtcccgcgtctgcagtggttac

SEQ ID NO: 856694 - DNA, 25 bp, Homo sapien
cttccgttccccacggaggattctg

SEQ ID NO: 856695 - DNA, 25 bp, Homo sapien
tagggttttctgtgcgaccgcgtcg

SEQ ID NO: 856696 - DNA, 25 bp, Homo sapien
tatctggtcagtggacgaaaagcaa

SEQ ID NO: 856697 - DNA, 25 bp, Homo sapien
gaccgcgtcggtaatcgaagttgcg

SEQ ID NO: 856698 - DNA, 25 bp, Homo sapien
cagcctggagcgaggaattctcagc

SEQ ID NO: 856699 - DNA, 25 bp, Homo sapien
taaggaatgaacattggtccgttgc

SEQ ID NO: 856700 - DNA, 25 bp, Homo sapien
gctgttaactaacctgcaggctact

SEQ ID NO: 856701 - DNA, 25 bp, Homo sapien
cccgtttgcctgatgttaactgtgg

SEQ ID NO: 856702 - DNA, 25 bp, Homo sapien
tttctgttccaggacgcggctcagg

SEQ ID NO: 856703 - DNA, 25 bp, Homo sapien
tgcacaatgtgctccgtgctccagc

SEQ ID NO: 856704 - DNA, 25 bp, Homo sapien
ggaggctccttcaagcgttcaggac

SEQ ID NO: 856705 - DNA, 25 bp, Homo sapien
agtagaccgacggtgcccgtttgca

SEQ ID NO: 856706 - DNA, 25 bp, Homo sapien
ggtaaatatcagcaaagcaaggttc

SEQ ID NO: 856707 - DNA, 25 bp, Homo sapien
tttaggttaaagcagcgccaggagg

SEQ ID NO: 856708 - DNA, 25 bp, Homo sapien
tatgcttacagctgcaggactctgg

SEQ ID NO: 856709 - DNA, 25 bp, Homo sapien
gaggcgattcaacacaccattggaa

SEQ ID NO: 856710 - DNA, 25 bp, Homo sapien
gaagcagcgttcctgaagtggccga

SEQ ID NO: 856711 - DNA, 25 bp, Homo sapien
caatgtgtatctggcacggtctcgg

SEQ ID NO: 856712 - DNA, 25 bp, Homo sapien
gaactcgccgtgtgtctctgctagg

SEQ ID NO: 856713 - DNA, 25 bp, Homo sapien
gcatcgtgaccttccgtctgagaaa

SEQ ID NO: 856714 - DNA, 25 bp, Homo sapien
gactagaagcagcagtgtcacctgg

SEQ ID NO: 856715 - DNA, 25 bp, Homo sapien
gctatgccaataggcgctgccgcta

SEQ ID NO: 856716 - DNA, 25 bp, Homo sapien
catcgtgcaacgaggagaacgggac

SEQ ID NO: 856717 - DNA, 25 bp, Homo sapien
catacctttcgcgtgggtagcctca

SEQ ID NO: 856718 - DNA, 25 bp, Homo sapien
tatgttcagcgtgatgaggtgcgac

SEQ ID NO: 856719 - DNA, 25 bp, Homo sapien
aacagtaatagttttgcagaagcaa

SEQ ID NO: 856720 - DNA, 25 bp, Homo sapien
cagtaatagttttgcagaagcaata

SEQ ID NO: 856721 - DNA, 25 bp, Homo sapien
ttatcaacagtaatagttttgcaga

SEQ ID NO: 856722 - DNA, 25 bp, Homo sapien
tcaacagtaatagttttgcagaagc

SEQ ID NO: 856723 - DNA, 25 bp, Homo sapien
tgctgccctaggctcaacgatctgg

SEQ ID NO: 856724 - DNA, 25 bp, Homo sapien
gctcatcgtataggtgctgcccaga

SEQ ID NO: 856725 - DNA, 25 bp, Homo sapien
tattgttaaatccaaccagcagctc

SEQ ID NO: 856726 - DNA, 25 bp, Homo sapien
cccagtgtggctctgagctgattca

SEQ ID NO: 856727 - DNA, 25 bp, Homo sapien
ccgaagtggagaataatctgtccca

SEQ ID NO: 856728 - DNA, 25 bp, Homo sapien
tcccttagtagatgatcgctagcca

SEQ ID NO: 856729 - DNA, 25 bp, Homo sapien
gaacgccgtcgtggaagagagttta

SEQ ID NO: 856730 - DNA, 25 bp, Homo sapien
gaagttgctatatcagagaacgccg

SEQ ID NO: 856731 - DNA, 25 bp, Homo sapien
tgcaaaaatggttggtacccctcga

SEQ ID NO: 856732 - DNA, 25 bp, Homo sapien
tatgcacgacccttgttgacacctg

SEQ ID NO: 856733 - DNA, 25 bp, Homo sapien
gcaaaaggccctatagcagctggaa

SEQ ID NO: 856734 - DNA, 25 bp, Homo sapien
catatcaaggccaacatctcaggac

SEQ ID NO: 856735 - DNA, 25 bp, Homo sapien
ttaagactgattggatatttttcct

SEQ ID NO: 856736 - DNA, 25 bp, Homo sapien
taatgatacgtttcaaatatccaga

SEQ ID NO: 856737 - DNA, 25 bp, Homo sapien
ctttaatgatacgtttcaaatatcc

SEQ ID NO: 856738 - DNA, 25 bp, Homo sapien
ttttaagactgattggatatttttc

SEQ ID NO: 856739 - DNA, 25 bp, Homo sapien
gacccacaacatgaagattccctag

SEQ ID NO: 856740 - DNA, 25 bp, Homo sapien
ctgctaggctaaatcagtgaatcct

SEQ ID NO: 856741 - DNA, 25 bp, Homo sapien
catggtatcagacaaactaggattg

SEQ ID NO: 856742 - DNA, 25 bp, Homo sapien
tactttgtcctagaccctgcatcca

SEQ ID NO: 856743 - DNA, 25 bp, Homo sapien
tgcaacaattaacagaggccttgtg

SEQ ID NO: 856744 - DNA, 25 bp, Homo sapien
tggatctcctgtaatagtatggctc

SEQ ID NO: 856745 - DNA, 25 bp, Homo sapien
cagtgatcatccttagtatctgcac

SEQ ID NO: 856746 - DNA, 25 bp, Homo sapien
aagtattggtcaactctgtattgcc

SEQ ID NO: 856747 - DNA, 25 bp, Homo sapien
gagagatttgagacattgagtgaga

SEQ ID NO: 856748 - DNA, 25 bp, Homo sapien
aacattgtttcattggaccatggga

SEQ ID NO: 856749 - DNA, 25 bp, Homo sapien
gaccatgggaaggttgttgctaatc

SEQ ID NO: 856750 - DNA, 25 bp, Homo sapien
gctaatcttcagtggagtaacttca

SEQ ID NO: 856751 - DNA, 25 bp, Homo sapien
aaatcagaatctagtcctgagcggg

SEQ ID NO: 856752 - DNA, 25 bp, Homo sapien
tacagaccaggtatagtgcctgagg

SEQ ID NO: 856753 - DNA, 25 bp, Homo sapien
tgttcatacttggactttgaaggcc

SEQ ID NO: 856754 - DNA, 25 bp, Homo sapien
tctggatgtgtacttctgtaacgct

SEQ ID NO: 856755 - DNA, 25 bp, Homo sapien
tcttttatgttctcaggtctctgtc

SEQ ID NO: 856756 - DNA, 25 bp, Homo sapien
ggtatcttatattatccctcagagg

SEQ ID NO: 856757 - DNA, 25 bp, Homo sapien
tattcttgcctcatgggtatcttat

SEQ ID NO: 856758 - DNA, 25 bp, Homo sapien
tacttagtctgttaattccaaattg

SEQ ID NO: 856759 - DNA, 25 bp, Homo sapien
tctcacacaaccataaggtgatgtg

SEQ ID NO: 856760 - DNA, 25 bp, Homo sapien
taatagcaatggaatgggaggccat

SEQ ID NO: 856761 - DNA, 25 bp, Homo sapien
caaccataaggtgatgtgtcagtag

SEQ ID NO: 856762 - DNA, 25 bp, Homo sapien
gaaggacggctcagtatatctcaca

SEQ ID NO: 856763 - DNA, 25 bp, Homo sapien
gagtgagtgagccacttgattacct

SEQ ID NO: 856764 - DNA, 25 bp, Homo sapien
tagggtccatatgaacagaaagcag

SEQ ID NO: 856765 - DNA, 25 bp, Homo sapien
aagccgatgtaaaggctctgggtga

SEQ ID NO: 856766 - DNA, 25 bp, Homo sapien
aagaaagagtgttgtggagaccaac

SEQ ID NO: 856767 - DNA, 25 bp, Homo sapien
ctttcagatctgttacttggtagtt

SEQ ID NO: 856768 - DNA, 25 bp, Homo sapien
tcaataaagtgggaaagaagatgag

SEQ ID NO: 856769 - DNA, 25 bp, Homo sapien
ccctacctgtagtctttcaataaag

SEQ ID NO: 856770 - DNA, 25 bp, Homo sapien
catgtataggcctgggcgatatagt

SEQ ID NO: 856771 - DNA, 25 bp, Homo sapien
ggagatagcccttggaatccaaggt

SEQ ID NO: 856772 - DNA, 25 bp, Homo sapien
gcttttaagcttagtcttcctgggc

SEQ ID NO: 856773 - DNA, 25 bp, Homo sapien
ccttcagggtgaggcgttcagagcc

SEQ ID NO: 856774 - DNA, 25 bp, Homo sapien
cttggaatccaaggtgcggtttagc

SEQ ID NO: 856775 - DNA, 25 bp, Homo sapien
tatggcagggttacctctgttacta

SEQ ID NO: 856776 - DNA, 25 bp, Homo sapien
ttatggcagggttacctctgttact

SEQ ID NO: 856777 - DNA, 25 bp, Homo sapien
atggcagggttacctctgttactat

SEQ ID NO: 856778 - DNA, 25 bp, Homo sapien
gaaggaagagtacttgtcctccaag

SEQ ID NO: 856779 - DNA, 25 bp, Homo sapien
cttgaaggaagagtacttgtcctcc

SEQ ID NO: 856780 - DNA, 25 bp, Homo sapien
tgaaggaagagtacttgtcctccaa

SEQ ID NO: 856781 - DNA, 25 bp, Homo sapien
aggaagagtacttgtcctccaagat

SEQ ID NO: 856782 - DNA, 25 bp, Homo sapien
tgcattttgtaagcaccttggagcc

SEQ ID NO: 856783 - DNA, 25 bp, Homo sapien
caggagccggcacctttcaggattt

SEQ ID NO: 856784 - DNA, 25 bp, Homo sapien
ttggagccactatcaaatgctgtga

SEQ ID NO: 856785 - DNA, 25 bp, Homo sapien
cctttacccctttcagcgatgtgca

SEQ ID NO: 856786 - DNA, 25 bp, Homo sapien
aaccattgctatagttggtacagaa

SEQ ID NO: 856787 - DNA, 25 bp, Homo sapien
tattagagcacgtagcctaaaacca

SEQ ID NO: 856788 - DNA, 25 bp, Homo sapien
taaaattggtaatacgagttctcac

SEQ ID NO: 856789 - DNA, 25 bp, Homo sapien
tagttgatacaccatttaagggcct

SEQ ID NO: 856790 - DNA, 25 bp, Homo sapien
cctgggcctgccaaggtgctagtat

SEQ ID NO: 856791 - DNA, 25 bp, Homo sapien
tgggcctgccaaggtgctagtatta

SEQ ID NO: 856792 - DNA, 25 bp, Homo sapien
gggcctgccaaggtgctagtattat

SEQ ID NO: 856793 - DNA, 25 bp, Homo sapien
cacctgggcctgccaaggtgctagt

SEQ ID NO: 856794 - DNA, 25 bp, Homo sapien
attagcttggcatggtgacgtgtgc

SEQ ID NO: 856795 - DNA, 25 bp, Homo sapien
tggccaatgtgatgaaaccccctct

SEQ ID NO: 856796 - DNA, 25 bp, Homo sapien
ggaggctgaggctgaggtcaggagt

SEQ ID NO: 856797 - DNA, 25 bp, Homo sapien
gccaatgtgatgaaaccccctctct

SEQ ID NO: 856798 - DNA, 25 bp, Homo sapien
tgagtagcacactgtcactgttagt

SEQ ID NO: 856799 - DNA, 25 bp, Homo sapien
tagattgatgctcatgccacatgga

SEQ ID NO: 856800 - DNA, 25 bp, Homo sapien
gagtgaatgtacactgagaaagcca

SEQ ID NO: 856801 - DNA, 25 bp, Homo sapien
gttattttcattagacaggacagag

SEQ ID NO: 856802 - DNA, 25 bp, Homo sapien
ttaggcaattgtagagcagggcagc

SEQ ID NO: 856803 - DNA, 25 bp, Homo sapien
gcagggcagcacactacggttttac

SEQ ID NO: 856804 - DNA, 25 bp, Homo sapien
cacctcaggccagtacagaatatta

SEQ ID NO: 856805 - DNA, 25 bp, Homo sapien
cggttttactctagtcacctcaggc

SEQ ID NO: 856806 - DNA, 25 bp, Homo sapien
tctgtgtctgaggaatcggcaaact

SEQ ID NO: 856807 - DNA, 25 bp, Homo sapien
agcaaacagctaattccaactcttc

SEQ ID NO: 856808 - DNA, 25 bp, Homo sapien
gcagaagtggataacagcaaacagc

SEQ ID NO: 856809 - DNA, 25 bp, Homo sapien
caactcttcagcgatctgtgtctga

SEQ ID NO: 856810 - DNA, 25 bp, Homo sapien
tagttttagtaggaagcaagcatga

SEQ ID NO: 856811 - DNA, 25 bp, Homo sapien
gtcaggaggcagacttctttcaaaa

SEQ ID NO: 856812 - DNA, 25 bp, Homo sapien
caggcgtgatcgcatgtgccttgta

SEQ ID NO: 856813 - DNA, 25 bp, Homo sapien
tgattaaagcatagagggagaaggc

SEQ ID NO: 856814 - DNA, 25 bp, Homo sapien
tcatctatcagtttccgacagtggg

SEQ ID NO: 856815 - DNA, 25 bp, Homo sapien
cagtgggatgttaatatctctctaa

SEQ ID NO: 856816 - DNA, 25 bp, Homo sapien
tatcattatgacagtttaagccatt

SEQ ID NO: 856817 - DNA, 25 bp, Homo sapien
gcttgctcaatgtgttgtccaaata

SEQ ID NO: 856818 - DNA, 25 bp, Homo sapien
ctccataatggcatgtgaattattt

SEQ ID NO: 856819 - DNA, 25 bp, Homo sapien
tctctattttctttgaagcagccat

SEQ ID NO: 856820 - DNA, 25 bp, Homo sapien
ttctctattttctttgaagcagcca

SEQ ID NO: 856821 - DNA, 25 bp, Homo sapien
tgtgaattattttgtcattctctat

SEQ ID NO: 856822 - DNA, 25 bp, Homo sapien
ctgatgggcggcggcggccgggccg

SEQ ID NO: 856823 - DNA, 25 bp, Homo sapien
tgatgggcggcggcggccgggccga

SEQ ID NO: 856824 - DNA, 25 bp, Homo sapien
ctccatagctgatgggcggcggcgg

SEQ ID NO: 856825 - DNA, 25 bp, Homo sapien
tgggcggcggcggccgggccgaagc

SEQ ID NO: 856826 - DNA, 25 bp, Homo sapien
cttgcgatcgtgcccgccaggcgcc

SEQ ID NO: 856827 - DNA, 25 bp, Homo sapien
cccgttggctcgcagcgccagctcg

SEQ ID NO: 856828 - DNA, 25 bp, Homo sapien
ccaggcgccggcccgttggctcgca

SEQ ID NO: 856829 - DNA, 25 bp, Homo sapien
cgccggcccgttggctcgcagcgcc

SEQ ID NO: 856830 - DNA, 25 bp, Homo sapien
caactggcgctggccattgaggagc

SEQ ID NO: 856831 - DNA, 25 bp, Homo sapien
tcaggtgaggcaagggtgcggccgg

SEQ ID NO: 856832 - DNA, 25 bp, Homo sapien
gcaactggcgctggccattgaggag

SEQ ID NO: 856833 - DNA, 25 bp, Homo sapien
ggtgcggccggggctgcaactggcg

SEQ ID NO: 856834 - DNA, 25 bp, Homo sapien
tctgctgagtagaaaagcttcctca

SEQ ID NO: 856835 - DNA, 25 bp, Homo sapien
cgtgctgtcaacatcaaaacacact

SEQ ID NO: 856836 - DNA, 25 bp, Homo sapien
cctcagctctgagtgggagaccatc

SEQ ID NO: 856837 - DNA, 25 bp, Homo sapien
aacacactgcatctgctgagtagaa

SEQ ID NO: 856838 - DNA, 25 bp, Homo sapien
tgttggttccttcttctctgatgac

SEQ ID NO: 856839 - DNA, 25 bp, Homo sapien
tttggattgtccacctgtatagtct

SEQ ID NO: 856840 - DNA, 25 bp, Homo sapien
gattgtccacctgtatagtcttttt

SEQ ID NO: 856841 - DNA, 25 bp, Homo sapien
ctttggattgtccacctgtatagtc

SEQ ID NO: 856842 - DNA, 25 bp, Homo sapien
tgtccacctgtatagtctttttaat

SEQ ID NO: 856843 - DNA, 25 bp, Homo sapien
tactatcaatgtaatcgataagagg

SEQ ID NO: 856844 - DNA, 25 bp, Homo sapien
gacgtctgttcactcgtgattctgc

SEQ ID NO: 856845 - DNA, 25 bp, Homo sapien
ctgacgtctgttcactcgtgattct

SEQ ID NO: 856846 - DNA, 25 bp, Homo sapien
gtaatcgataagaggctgccagcaa

SEQ ID NO: 856847 - DNA, 25 bp, Homo sapien
aacaacactgcaccctgctattagg

SEQ ID NO: 856848 - DNA, 25 bp, Homo sapien
caacactgcaccctgctattaggca

SEQ ID NO: 856849 - DNA, 25 bp, Homo sapien
ataaacaacactgcaccctgctatt

SEQ ID NO: 856850 - DNA, 25 bp, Homo sapien
aacactgcaccctgctattaggcat

SEQ ID NO: 856851 - DNA, 25 bp, Homo sapien
tggcaataagttggatgataatcac

SEQ ID NO: 856852 - DNA, 25 bp, Homo sapien
tcactttttcatgcgaacgcttcat

SEQ ID NO: 856853 - DNA, 25 bp, Homo sapien
tggcattcctctggtataagtgtgt

SEQ ID NO: 856854 - DNA, 25 bp, Homo sapien
tctatttctggaaaatcatatatct

SEQ ID NO: 856855 - DNA, 25 bp, Homo sapien
cacagcaagaggtaaacagtccttt

SEQ ID NO: 856856 - DNA, 25 bp, Homo sapien
cagcaagaggtaaacagtcctttac

SEQ ID NO: 856857 - DNA, 25 bp, Homo sapien
acagcaagaggtaaacagtccttta

SEQ ID NO: 856858 - DNA, 25 bp, Homo sapien
gtgtgtgtttttatcagcatatttc

SEQ ID NO: 856859 - DNA, 25 bp, Homo sapien
aggatactgccttcctttgaccctt

SEQ ID NO: 856860 - DNA, 25 bp, Homo sapien
tgagtgtgtgtttttatcagcatat

SEQ ID NO: 856861 - DNA, 25 bp, Homo sapien
attttcaacttcagcagcaccccaa

SEQ ID NO: 856862 - DNA, 25 bp, Homo sapien
tgtgccagagggctcttagtcagct

SEQ ID NO: 856863 - DNA, 25 bp, Homo sapien
ttagctgcatactcccttctttctt

SEQ ID NO: 856864 - DNA, 25 bp, Homo sapien
tgccagagggctcttagtcagctgc

SEQ ID NO: 856865 - DNA, 25 bp, Homo sapien
tatcttcttcattttagctgcatac

SEQ ID NO: 856866 - DNA, 25 bp, Homo sapien
ttcattagctcacggcgccactgga

SEQ ID NO: 856867 - DNA, 25 bp, Homo sapien
agctcacggcgccactggagctcag

SEQ ID NO: 856868 - DNA, 25 bp, Homo sapien
tctttttcattagctcacggcgcca

SEQ ID NO: 856869 - DNA, 25 bp, Homo sapien
tcacggcgccactggagctcagctt

SEQ ID NO: 856870 - DNA, 25 bp, Homo sapien
attggtctttagttttgcttctttg

SEQ ID NO: 856871 - DNA, 25 bp, Homo sapien
tagttttgcttctttgtactgtctt

SEQ ID NO: 856872 - DNA, 25 bp, Homo sapien
tctttagttttgcttctttgtactg

SEQ ID NO: 856873 - DNA, 25 bp, Homo sapien
tttagttttgcttctttgtactgtc

SEQ ID NO: 856874 - DNA, 25 bp, Homo sapien
catgtatccattaccaaattgttgt

SEQ ID NO: 856875 - DNA, 25 bp, Homo sapien
ctctttacatttatactagacttaa

SEQ ID NO: 856876 - DNA, 25 bp, Homo sapien
tatatcatgtatccattaccaaatt

SEQ ID NO: 856877 - DNA, 25 bp, Homo sapien
ctgatttaggtaccaccattacagt

SEQ ID NO: 856878 - DNA, 25 bp, Homo sapien
actgcagtccagtttgggcagcaga

SEQ ID NO: 856879 - DNA, 25 bp, Homo sapien
ccactgcagtccagtttgggcagca

SEQ ID NO: 856880 - DNA, 25 bp, Homo sapien
gcagtccagtttgggcagcagagtg

SEQ ID NO: 856881 - DNA, 25 bp, Homo sapien
tgcagtccagtttgggcagcagagt

SEQ ID NO: 856882 - DNA, 25 bp, Homo sapien
cccgccattcgtgctacccctcctt

SEQ ID NO: 856883 - DNA, 25 bp, Homo sapien
ccattcgtgctacccctccttcctt

SEQ ID NO: 856884 - DNA, 25 bp, Homo sapien
ctgcccgccattcgtgctacccctc

SEQ ID NO: 856885 - DNA, 25 bp, Homo sapien
ccacctgcccgccattcgtgctacc

SEQ ID NO: 856886 - DNA, 25 bp, Homo sapien
caactgttggtgactaatgcctaga

SEQ ID NO: 856887 - DNA, 25 bp, Homo sapien
tcaataccaggtttatccccgatgt

SEQ ID NO: 856888 - DNA, 25 bp, Homo sapien
tgtaactgttcatatgggaaaggca

SEQ ID NO: 856889 - DNA, 25 bp, Homo sapien
ccagtttccagtgtaatcagtaggt

SEQ ID NO: 856890 - DNA, 25 bp, Homo sapien
ctgaggaagctaaggctcagagtga

SEQ ID NO: 856891 - DNA, 25 bp, Homo sapien
tctgtagggtctgtgcttttattta

SEQ ID NO: 856892 - DNA, 25 bp, Homo sapien
ttgggagaactatatgttataacca

SEQ ID NO: 856893 - DNA, 25 bp, Homo sapien
tgaagtaaagactactattgtccct

SEQ ID NO: 856894 - DNA, 25 bp, Homo sapien
ttaatgtaggtgcagttcagtaatg

SEQ ID NO: 856895 - DNA, 25 bp, Homo sapien
gcagttcagtaatgattgaaatgaa

SEQ ID NO: 856896 - DNA, 25 bp, Homo sapien
tatattgtgattaatgtaggtgcag

SEQ ID NO: 856897 - DNA, 25 bp, Homo sapien
catcatgtaactgtcagtataaagg

SEQ ID NO: 856898 - DNA, 25 bp, Homo sapien
tacttcttttaggatagaggatgaa

SEQ ID NO: 856899 - DNA, 25 bp, Homo sapien
taaatatggaccagcataatgaaga

SEQ ID NO: 856900 - DNA, 25 bp, Homo sapien
gatgaaaaagagtgtagcctccagc

SEQ ID NO: 856901 - DNA, 25 bp, Homo sapien
aaaaaagttcgtgtaggccgagcat

SEQ ID NO: 856902 - DNA, 25 bp, Homo sapien
ggtgtaaggattcagtggtgaacca

SEQ ID NO: 856903 - DNA, 25 bp, Homo sapien
tgtggtactgtactgagtgtgtctg

SEQ ID NO: 856904 - DNA, 25 bp, Homo sapien
gaatcacgtgcttaatttgccaagg

SEQ ID NO: 856905 - DNA, 25 bp, Homo sapien
tatggaacaatatttcaacggtgag

SEQ ID NO: 856906 - DNA, 25 bp, Homo sapien
aatggtcttttgctgaagagagata

SEQ ID NO: 856907 - DNA, 25 bp, Homo sapien
taggaggtgttttgcgtgtttataa

SEQ ID NO: 856908 - DNA, 25 bp, Homo sapien
tcaaactggactagaccaaaaacta

SEQ ID NO: 856909 - DNA, 25 bp, Homo sapien
tataaaagcgagtactggctgggtg

SEQ ID NO: 856910 - DNA, 25 bp, Homo sapien
ttccttcatgttatatagactgttg

SEQ ID NO: 856911 - DNA, 25 bp, Homo sapien
tctctgcagtttatatcagaacttt

SEQ ID NO: 856912 - DNA, 25 bp, Homo sapien
tgatgtaccaagcagtaacttttgt

SEQ ID NO: 856913 - DNA, 25 bp, Homo sapien
ttctctgctagttatctctgcagtt

SEQ ID NO: 856914 - DNA, 25 bp, Homo sapien
gggagtaaagagtatagaacaagga

SEQ ID NO: 856915 - DNA, 25 bp, Homo sapien
tagtgaaaggggagtaaagagtata

SEQ ID NO: 856916 - DNA, 25 bp, Homo sapien
ggaatttgatcggtaactgacagtg

SEQ ID NO: 856917 - DNA, 25 bp, Homo sapien
gatcggtaactgacagtgaaccatc

SEQ ID NO: 856918 - DNA, 25 bp, Homo sapien
tgaagaggagagtaaaagcatgctc

SEQ ID NO: 856919 - DNA, 25 bp, Homo sapien
tatgctaacgctgtgctttttaaaa

SEQ ID NO: 856920 - DNA, 25 bp, Homo sapien
gtttttgacctcagcatggtgagga

SEQ ID NO: 856921 - DNA, 25 bp, Homo sapien
gctaacctttgactattctctttaa

SEQ ID NO: 856922 - DNA, 25 bp, Homo sapien
tacagacatgaaacaccgcacctgg

SEQ ID NO: 856923 - DNA, 25 bp, Homo sapien
agacatgaaacaccgcacctggccc

SEQ ID NO: 856924 - DNA, 25 bp, Homo sapien
actgcaggcacgtactaccatgcct

SEQ ID NO: 856925 - DNA, 25 bp, Homo sapien
tgcaggcacgtactaccatgcctga

SEQ ID NO: 856926 - DNA, 25 bp, Homo sapien
tcggggccggcctcgcaaagatggc

SEQ ID NO: 856927 - DNA, 25 bp, Homo sapien
gcctcgcaaagatggcgcttcccct

SEQ ID NO: 856928 - DNA, 25 bp, Homo sapien
cctcggggccggcctcgcaaagatg

SEQ ID NO: 856929 - DNA, 25 bp, Homo sapien
ggccggcctcgcaaagatggcgctt

SEQ ID NO: 856930 - DNA, 25 bp, Homo sapien
gcttctgaaagcctgtacctcagag

SEQ ID NO: 856931 - DNA, 25 bp, Homo sapien
gcagcgtgctgtcgagaaatgtttc

SEQ ID NO: 856932 - DNA, 25 bp, Homo sapien
tacctcagagtaggcttgatgttcc

SEQ ID NO: 856933 - DNA, 25 bp, Homo sapien
tctggagactccatttggttcaggc

SEQ ID NO: 856934 - DNA, 25 bp, Homo sapien
ccaggcgccatcttccttctagctg

SEQ ID NO: 856935 - DNA, 25 bp, Homo sapien
tcatgtattcatcaaagcctttgtt

SEQ ID NO: 856936 - DNA, 25 bp, Homo sapien
agcctttgttgtccaccaggcgcca

SEQ ID NO: 856937 - DNA, 25 bp, Homo sapien
cttctagctgctgaactgtggccat

SEQ ID NO: 856938 - DNA, 25 bp, Homo sapien
ggcgacatggttcatgacacgctcc

SEQ ID NO: 856939 - DNA, 25 bp, Homo sapien
acaggcgacatggttcatgacacgc

SEQ ID NO: 856940 - DNA, 25 bp, Homo sapien
cgacatggttcatgacacgctccac

SEQ ID NO: 856941 - DNA, 25 bp, Homo sapien
caggcgacatggttcatgacacgct

SEQ ID NO: 856942 - DNA, 25 bp, Homo sapien
tcctgtccaaagtgatgatggaatc

SEQ ID NO: 856943 - DNA, 25 bp, Homo sapien
cctgtccaaagtgatgatggaatct

SEQ ID NO: 856944 - DNA, 25 bp, Homo sapien
gaagatgttagcacagaccagcgct

SEQ ID NO: 856945 - DNA, 25 bp, Homo sapien
ttccgtcagcagaaccacgaaggct

SEQ ID NO: 856946 - DNA, 25 bp, Homo sapien
ggtgtgcctgtacattcccattcaa

SEQ ID NO: 856947 - DNA, 25 bp, Homo sapien
cttgtccgccagtgtgagggtctcc

SEQ ID NO: 856948 - DNA, 25 bp, Homo sapien
ctaaattgagctagatcagcaggac

SEQ ID NO: 856949 - DNA, 25 bp, Homo sapien
tttgtcttcttagagtcaggattcc

SEQ ID NO: 856950 - DNA, 25 bp, Homo sapien
aagcatgcgacccttgtcttctcca

SEQ ID NO: 856951 - DNA, 25 bp, Homo sapien
agaagcatgcgacccttgtcttctc

SEQ ID NO: 856952 - DNA, 25 bp, Homo sapien
cacagaagcatgcgacccttgtctt

SEQ ID NO: 856953 - DNA, 25 bp, Homo sapien
acagaagcatgcgacccttgtcttc

SEQ ID NO: 856954 - DNA, 25 bp, Homo sapien
aactccttcacctcagcttacaggt

SEQ ID NO: 856955 - DNA, 25 bp, Homo sapien
ctccttcacctcagcttacaggtgt

SEQ ID NO: 856956 - DNA, 25 bp, Homo sapien
actccttcacctcagcttacaggtg

SEQ ID NO: 856957 - DNA, 25 bp, Homo sapien
tccttcacctcagcttacaggtgtg

SEQ ID NO: 856958 - DNA, 25 bp, Homo sapien
cacgctgcaggcgttggacagatcc

SEQ ID NO: 856959 - DNA, 25 bp, Homo sapien
gacagatccggctttactgagtcca

SEQ ID NO: 856960 - DNA, 25 bp, Homo sapien
caatgcgtcaccttgttagggaaag

SEQ ID NO: 856961 - DNA, 25 bp, Homo sapien
tccacgggcacaaaacggtggctcc

SEQ ID NO: 856962 - DNA, 25 bp, Homo sapien
ttctactggcatctgacttctcatg

SEQ ID NO: 856963 - DNA, 25 bp, Homo sapien
ttttctactggcatctgacttctca

SEQ ID NO: 856964 - DNA, 25 bp, Homo sapien
tttttctactggcatctgacttctc

SEQ ID NO: 856965 - DNA, 25 bp, Homo sapien
gtgtctttttctactggcatctgac

SEQ ID NO: 856966 - DNA, 25 bp, Homo sapien
cttcacatgtaaggataagggtcat

SEQ ID NO: 856967 - DNA, 25 bp, Homo sapien
catcttcacatgtaaggataagggt

SEQ ID NO: 856968 - DNA, 25 bp, Homo sapien
tcttcacatgtaaggataagggtca

SEQ ID NO: 856969 - DNA, 25 bp, Homo sapien
cacatcttcacatgtaaggataagg

SEQ ID NO: 856970 - DNA, 25 bp, Homo sapien
taaactctctctgcggtaatgccac

SEQ ID NO: 856971 - DNA, 25 bp, Homo sapien
ggcatagtgccaggcctccaattaa

SEQ ID NO: 856972 - DNA, 25 bp, Homo sapien
tcctggaggataacgatgtcttagc

SEQ ID NO: 856973 - DNA, 25 bp, Homo sapien
agaagggcctcagtatagcggtgaa

SEQ ID NO: 856974 - DNA, 25 bp, Homo sapien
ccactctaaccagccgcaaggtaaa

SEQ ID NO: 856975 - DNA, 25 bp, Homo sapien
tcaccgaattcgaaccactctaacc

SEQ ID NO: 856976 - DNA, 25 bp, Homo sapien
gaaccactctaaccagccgcaaggt

SEQ ID NO: 856977 - DNA, 25 bp, Homo sapien
gaattcgaaccactctaaccagccg

SEQ ID NO: 856978 - DNA, 25 bp, Homo sapien
ttcctagagacccacagccgggatt

SEQ ID NO: 856979 - DNA, 25 bp, Homo sapien
ggtgtacaacaaatgcgccaacatg

SEQ ID NO: 856980 - DNA, 25 bp, Homo sapien
catgataacgatgggaggaacaacc

SEQ ID NO: 856981 - DNA, 25 bp, Homo sapien
ccgggattccacgtgtaggtgtaca

SEQ ID NO: 856982 - DNA, 25 bp, Homo sapien
cagtcatcgtgctcgggaactacag

SEQ ID NO: 856983 - DNA, 25 bp, Homo sapien
cccagtcatcgtgctcgggaactac

SEQ ID NO: 856984 - DNA, 25 bp, Homo sapien
cacccagtcatcgtgctcgggaact

SEQ ID NO: 856985 - DNA, 25 bp, Homo sapien
aacacccagtcatcgtgctcgggaa

SEQ ID NO: 856986 - DNA, 25 bp, Homo sapien
gtggccaaagctgcatagaccggca

SEQ ID NO: 856987 - DNA, 25 bp, Homo sapien
ctgtaaacagtacccagtggccaaa

SEQ ID NO: 856988 - DNA, 25 bp, Homo sapien
cacaaaatagtgcatagcctgtcac

SEQ ID NO: 856989 - DNA, 25 bp, Homo sapien
gggagtcctcctgttcacaaaatag

SEQ ID NO: 856990 - DNA, 25 bp, Homo sapien
ttttggccatgggtatgccctcaga

SEQ ID NO: 856991 - DNA, 25 bp, Homo sapien
tcatctagaggactgagactgcaca

SEQ ID NO: 856992 - DNA, 25 bp, Homo sapien
ccttgattacgctagctgtcagcag

SEQ ID NO: 856993 - DNA, 25 bp, Homo sapien
tttatcaggcaagacattccaaggg

SEQ ID NO: 856994 - DNA, 25 bp, Homo sapien
tagaggcatgatccaccacgcctga

SEQ ID NO: 856995 - DNA, 25 bp, Homo sapien
tggcctcgaacctctgacctcgtga

SEQ ID NO: 856996 - DNA, 25 bp, Homo sapien
gcctcgaacctctgacctcgtgatc

SEQ ID NO: 856997 - DNA, 25 bp, Homo sapien
gattagaggcatgatccaccacgcc

SEQ ID NO: 856998 - DNA, 25 bp, Homo sapien
ccctgtccaggtctgctgacctctg

SEQ ID NO: 856999 - DNA, 25 bp, Homo sapien
gacctctggtgatggccaatgccat

SEQ ID NO: 857000 - DNA, 25 bp, Homo sapien
tggccctgtccaggtctgctgacct

SEQ ID NO: 857001 - DNA, 25 bp, Homo sapien
ctgacctctggtgatggccaatgcc

SEQ ID NO: 857002 - DNA, 25 bp, Homo sapien
catctcgctagtccctgctgtgaca

SEQ ID NO: 857003 - DNA, 25 bp, Homo sapien
agtgccttccccattgtctgaaagg

SEQ ID NO: 857004 - DNA, 25 bp, Homo sapien
aaaggtgcacggcaaggtcaaatga

SEQ ID NO: 857005 - DNA, 25 bp, Homo sapien
cagcatctcgctagtccctgctgtg

SEQ ID NO: 857006 - DNA, 25 bp, Homo sapien
tcagtggtgatgtcaaacagcccag

SEQ ID NO: 857007 - DNA, 25 bp, Homo sapien
tctcagtggtgatgtcaaacagccc

SEQ ID NO: 857008 - DNA, 25 bp, Homo sapien
ctcagtggtgatgtcaaacagccca

SEQ ID NO: 857009 - DNA, 25 bp, Homo sapien
tgcaaatgttcctcctgaataatct

SEQ ID NO: 857010 - DNA, 25 bp, Homo sapien
gaccttgcccgaccgaatacgtata

SEQ ID NO: 857011 - DNA, 25 bp, Homo sapien
tatgtatccactccatgctgtagcc

SEQ ID NO: 857012 - DNA, 25 bp, Homo sapien
gctgtagccttggttcataccctca

SEQ ID NO: 857013 - DNA, 25 bp, Homo sapien
ctcccttgtgtccaaagacacttaa

SEQ ID NO: 857014 - DNA, 25 bp, Homo sapien
ccttgtgtccaaagacacttaatgg

SEQ ID NO: 857015 - DNA, 25 bp, Homo sapien
cccttgtgtccaaagacacttaatg

SEQ ID NO: 857016 - DNA, 25 bp, Homo sapien
tcccttgtgtccaaagacacttaat

SEQ ID NO: 857017 - DNA, 25 bp, Homo sapien
gtggcagaaagttccacccgggaca

SEQ ID NO: 857018 - DNA, 25 bp, Homo sapien
cagaaagttccacccgggacagcgt

SEQ ID NO: 857019 - DNA, 25 bp, Homo sapien
ggacagcgtggtcatcgaaggtcca

SEQ ID NO: 857020 - DNA, 25 bp, Homo sapien
agcgtggtcatcgaaggtccaggca

SEQ ID NO: 857021 - DNA, 25 bp, Homo sapien
ggctgcctgggtgaaaggtccttgt

SEQ ID NO: 857022 - DNA, 25 bp, Homo sapien
tactactgatatggtcgagaaggtc

SEQ ID NO: 857023 - DNA, 25 bp, Homo sapien
ttttaattgcatagacaggtaaccc

SEQ ID NO: 857024 - DNA, 25 bp, Homo sapien
gaaggtctctgcaataatcacatat

SEQ ID NO: 857025 - DNA, 25 bp, Homo sapien
gacaggtaaccctactactgatatg

SEQ ID NO: 857026 - DNA, 25 bp, Homo sapien
agtttttgctcattgagtttaccag

SEQ ID NO: 857027 - DNA, 25 bp, Homo sapien
gtttttgctcattgagtttaccagc

SEQ ID NO: 857028 - DNA, 25 bp, Homo sapien
ttttgctcattgagtttaccagcaa

SEQ ID NO: 857029 - DNA, 25 bp, Homo sapien
tgctcattgagtttaccagcaaatt

SEQ ID NO: 857030 - DNA, 25 bp, Homo sapien
ccatcccggatttgtttgatgggag

SEQ ID NO: 857031 - DNA, 25 bp, Homo sapien
tttatacagtagttcctggtaagta

SEQ ID NO: 857032 - DNA, 25 bp, Homo sapien
ttatacagtagttcctggtaagtaa

SEQ ID NO: 857033 - DNA, 25 bp, Homo sapien
ttccatcccggatttgtttgatggg

SEQ ID NO: 857034 - DNA, 25 bp, Homo sapien
ggcgattctttacttccttacatac

SEQ ID NO: 857035 - DNA, 25 bp, Homo sapien
tccaggcgattctttacttccttac

SEQ ID NO: 857036 - DNA, 25 bp, Homo sapien
caggcgattctttacttccttacat

SEQ ID NO: 857037 - DNA, 25 bp, Homo sapien
agatatatgatagtccaggcgattc

SEQ ID NO: 857038 - DNA, 25 bp, Homo sapien
ctttgccagaagctttaggtcttca

SEQ ID NO: 857039 - DNA, 25 bp, Homo sapien
tctttgccagaagctttaggtcttc

SEQ ID NO: 857040 - DNA, 25 bp, Homo sapien
ccagaagctttaggtcttcaatgca

SEQ ID NO: 857041 - DNA, 25 bp, Homo sapien
tgccagaagctttaggtcttcaatg

SEQ ID NO: 857042 - DNA, 25 bp, Homo sapien
cagatccatcattctgggtggcaca

SEQ ID NO: 857043 - DNA, 25 bp, Homo sapien
ttctgatcggctccatctctgacct

SEQ ID NO: 857044 - DNA, 25 bp, Homo sapien
gatccatcattctgggtggcacaga

SEQ ID NO: 857045 - DNA, 25 bp, Homo sapien
tctgatcggctccatctctgacctg

SEQ ID NO: 857046 - DNA, 25 bp, Homo sapien
cccgagagcgccccgtcgccgtccg

SEQ ID NO: 857047 - DNA, 25 bp, Homo sapien
gagagcgccccgtcgccgtccgctc

SEQ ID NO: 857048 - DNA, 25 bp, Homo sapien
cagcgtctcccgcgagccgccgcag

SEQ ID NO: 857049 - DNA, 25 bp, Homo sapien
agcccgagagcgccccgtcgccgtc

SEQ ID NO: 857050 - DNA, 25 bp, Homo sapien
gtgccacagtccaccacgcagggag

SEQ ID NO: 857051 - DNA, 25 bp, Homo sapien
cacagtccaccacgcagggaggcag

SEQ ID NO: 857052 - DNA, 25 bp, Homo sapien
ggtgccacagtccaccacgcaggga

SEQ ID NO: 857053 - DNA, 25 bp, Homo sapien
agtccaccacgcagggaggcaggga

SEQ ID NO: 857054 - DNA, 25 bp, Homo sapien
aagatacgacaattagcacagtggt

SEQ ID NO: 857055 - DNA, 25 bp, Homo sapien
ggttgagtcggtatttattcaattg

SEQ ID NO: 857056 - DNA, 25 bp, Homo sapien
gagccctcactgattcatctttcag

SEQ ID NO: 857057 - DNA, 25 bp, Homo sapien
caggaaattttgctatggcatgtta

SEQ ID NO: 857058 - DNA, 25 bp, Homo sapien
cggaaggaccaatatttgcaagagg

SEQ ID NO: 857059 - DNA, 25 bp, Homo sapien
aggaccaatatttgcaagagggatg

SEQ ID NO: 857060 - DNA, 25 bp, Homo sapien
gaaggaccaatatttgcaagaggga

SEQ ID NO: 857061 - DNA, 25 bp, Homo sapien
agcggaaggaccaatatttgcaaga

SEQ ID NO: 857062 - DNA, 25 bp, Homo sapien
gcctgcgtagccaagcttggtatac

SEQ ID NO: 857063 - DNA, 25 bp, Homo sapien
tgttgcctgcgtagccaagcttggt

SEQ ID NO: 857064 - DNA, 25 bp, Homo sapien
gggctcagtgttgcctgcgtagcca

SEQ ID NO: 857065 - DNA, 25 bp, Homo sapien
tcagtgttgcctgcgtagccaagct

SEQ ID NO: 857066 - DNA, 25 bp, Homo sapien
cattcatatgcaggatcttaaaaag

SEQ ID NO: 857067 - DNA, 25 bp, Homo sapien
aacgacgtgacaacagttaatgacg

SEQ ID NO: 857068 - DNA, 25 bp, Homo sapien
caagagatctagcatacaacgacgt

SEQ ID NO: 857069 - DNA, 25 bp, Homo sapien
gagtacgtgttatgtgctctcacca

SEQ ID NO: 857070 - DNA, 25 bp, Homo sapien
ctttgtagcatatgtaggtttatcg

SEQ ID NO: 857071 - DNA, 25 bp, Homo sapien
aggtcatcaactcccctcaacactc

SEQ ID NO: 857072 - DNA, 25 bp, Homo sapien
tggtcaactacctttgctgactctc

SEQ ID NO: 857073 - DNA, 25 bp, Homo sapien
gtttatcgatggcttcatctcctat

SEQ ID NO: 857074 - DNA, 25 bp, Homo sapien
cataagatcccagtcttcaatgatt

SEQ ID NO: 857075 - DNA, 25 bp, Homo sapien
tcttcaatgattccatgtcgtatcg

SEQ ID NO: 857076 - DNA, 25 bp, Homo sapien
atgaacctttccataagatcccagt

SEQ ID NO: 857077 - DNA, 25 bp, Homo sapien
caatgattccatgtcgtatcggcca

SEQ ID NO: 857078 - DNA, 25 bp, Homo sapien
taatggtcctcaggttcagctcgaa

SEQ ID NO: 857079 - DNA, 25 bp, Homo sapien
ataatggtcctcaggttcagctcga

SEQ ID NO: 857080 - DNA, 25 bp, Homo sapien
aataatggtcctcaggttcagctcg

SEQ ID NO: 857081 - DNA, 25 bp, Homo sapien
aaataatggtcctcaggttcagctc

SEQ ID NO: 857082 - DNA, 25 bp, Homo sapien
caactgtacatgctccaaaaacaca

SEQ ID NO: 857083 - DNA, 25 bp, Homo sapien
ctgtacatgctccaaaaacacaaca

SEQ ID NO: 857084 - DNA, 25 bp, Homo sapien
aaccaactgtacatgctccaaaaac

SEQ ID NO: 857085 - DNA, 25 bp, Homo sapien
ccaaccaactgtacatgctccaaaa

SEQ ID NO: 857086 - DNA, 25 bp, Homo sapien
tgattacagcaggaaggagatagtt

SEQ ID NO: 857087 - DNA, 25 bp, Homo sapien
ctgattacagcaggaaggagatagt

SEQ ID NO: 857088 - DNA, 25 bp, Homo sapien
actgattacagcaggaaggagatag

SEQ ID NO: 857089 - DNA, 25 bp, Homo sapien
tctgttttctggtgtattgagtgga

SEQ ID NO: 857090 - DNA, 25 bp, Homo sapien
ctgttttctggtgtattgagtggag

SEQ ID NO: 857091 - DNA, 25 bp, Homo sapien
tctccgctgtcaatgactatccccg

SEQ ID NO: 857092 - DNA, 25 bp, Homo sapien
cgctgtcaatgactatccccgttaa

SEQ ID NO: 857093 - DNA, 25 bp, Homo sapien
tccgctgtcaatgactatccccgtt

SEQ ID NO: 857094 - DNA, 25 bp, Homo sapien
catctccgctgtcaatgactatccc

SEQ ID NO: 857095 - DNA, 25 bp, Homo sapien
atcgggatgtgtttgatgcagcttc

SEQ ID NO: 857096 - DNA, 25 bp, Homo sapien
gggatgtgtttgatgcagcttccaa

SEQ ID NO: 857097 - DNA, 25 bp, Homo sapien
cgggatgtgtttgatgcagcttcca

SEQ ID NO: 857098 - DNA, 25 bp, Homo sapien
tcgggatgtgtttgatgcagcttcc

SEQ ID NO: 857099 - DNA, 25 bp, Homo sapien
ttgaatgaaatacgtaatatctcta

SEQ ID NO: 857100 - DNA, 25 bp, Homo sapien
tgttgaatgaaatacgtaatatctc

SEQ ID NO: 857101 - DNA, 25 bp, Homo sapien
gttgaatgaaatacgtaatatctct

SEQ ID NO: 857102 - DNA, 25 bp, Homo sapien
tgaatgaaatacgtaatatctctac

SEQ ID NO: 857103 - DNA, 25 bp, Homo sapien
gaatctttcgtaaccaacgtctata

SEQ ID NO: 857104 - DNA, 25 bp, Homo sapien
tctggttgatcgcattgatacccgt

SEQ ID NO: 857105 - DNA, 25 bp, Homo sapien
cttctggttgatcgcattgataccc

SEQ ID NO: 857106 - DNA, 25 bp, Homo sapien
tctttcgtaaccaacgtctataaca

SEQ ID NO: 857107 - DNA, 25 bp, Homo sapien
tattacttcatcaacaacatctgag

SEQ ID NO: 857108 - DNA, 25 bp, Homo sapien
tgagatggactccataaagtctggg

SEQ ID NO: 857109 - DNA, 25 bp, Homo sapien
cttatacagcgggcgccgcacatcg

SEQ ID NO: 857110 - DNA, 25 bp, Homo sapien
tacagcgggcgccgcacatcgatgg

SEQ ID NO: 857111 - DNA, 25 bp, Homo sapien
gtaaaagttatccatcattccaccc

SEQ ID NO: 857112 - DNA, 25 bp, Homo sapien
agtaaaagttatccatcattccacc

SEQ ID NO: 857113 - DNA, 25 bp, Homo sapien
aagtaaaagttatccatcattccac

SEQ ID NO: 857114 - DNA, 25 bp, Homo sapien
tcaatccctttgctatagcaggatg

SEQ ID NO: 857115 - DNA, 25 bp, Homo sapien
ataactcatttaccctgcaacaggc

SEQ ID NO: 857116 - DNA, 25 bp, Homo sapien
tgcttcacaaacttcatgaagagtt

SEQ ID NO: 857117 - DNA, 25 bp, Homo sapien
gcaacaggcttctctagtttaaaat

SEQ ID NO: 857118 - DNA, 25 bp, Homo sapien
acccagcttaacatgacttcctaaa

SEQ ID NO: 857119 - DNA, 25 bp, Homo sapien
atgacttcctaaaatcagattctga

SEQ ID NO: 857120 - DNA, 25 bp, Homo sapien
ggtgtccctttgtcgctaaggctgg

SEQ ID NO: 857121 - DNA, 25 bp, Homo sapien
cctgcacccagcttaacatgacttc

SEQ ID NO: 857122 - DNA, 25 bp, Homo sapien
tggtacaatcctaactccctgtagc

SEQ ID NO: 857123 - DNA, 25 bp, Homo sapien
ggctggtttccagctcctggtctta

SEQ ID NO: 857124 - DNA, 25 bp, Homo sapien
tggtttccagctcctggtcttaagc

SEQ ID NO: 857125 - DNA, 25 bp, Homo sapien
cagtggtacaatcctaactccctgt

SEQ ID NO: 857126 - DNA, 25 bp, Homo sapien
gaagacatcaccaggccgctcgcag

SEQ ID NO: 857127 - DNA, 25 bp, Homo sapien
tctgtgaagacatcaccaggccgct

SEQ ID NO: 857128 - DNA, 25 bp, Homo sapien
ctgtgaagacatcaccaggccgctc

SEQ ID NO: 857129 - DNA, 25 bp, Homo sapien
gtgaagacatcaccaggccgctcgc

SEQ ID NO: 857130 - DNA, 25 bp, Homo sapien
actccccccgctgtctggtgctggg

SEQ ID NO: 857131 - DNA, 25 bp, Homo sapien
agcgagagtggagggtggaatacag

SEQ ID NO: 857132 - DNA, 25 bp, Homo sapien
cagagcgagagtggagggtggaata

SEQ ID NO: 857133 - DNA, 25 bp, Homo sapien
ctgccagagcgagagtggagggtgg

SEQ ID NO: 857134 - DNA, 25 bp, Homo sapien
tgccagagcgagagtggagggtgga

SEQ ID NO: 857135 - DNA, 25 bp, Homo sapien
acagcagaagtttcaggggacaagg

SEQ ID NO: 857136 - DNA, 25 bp, Homo sapien
ccgacagcagaagtttcaggggaca

SEQ ID NO: 857137 - DNA, 25 bp, Homo sapien
gccgccgacagcagaagtttcaggg

SEQ ID NO: 857138 - DNA, 25 bp, Homo sapien
cgccgccgacagcagaagtttcagg

SEQ ID NO: 857139 - DNA, 25 bp, Homo sapien
ggcaaaaatttcttagctagcacat

SEQ ID NO: 857140 - DNA, 25 bp, Homo sapien
tgggttaagacgaacaactgcaact

SEQ ID NO: 857141 - DNA, 25 bp, Homo sapien
taattgatatccatggagtgagagg

SEQ ID NO: 857142 - DNA, 25 bp, Homo sapien
caaacagtgctatgcatatgtggtc

SEQ ID NO: 857143 - DNA, 25 bp, Homo sapien
aatactggcaagattcgggatggcc

SEQ ID NO: 857144 - DNA, 25 bp, Homo sapien
tcagcgtggccacagacagtgaact

SEQ ID NO: 857145 - DNA, 25 bp, Homo sapien
caagtcacttcaggagtggcatcca

SEQ ID NO: 857146 - DNA, 25 bp, Homo sapien
caccgtgaaacgtcatgggagctcc

SEQ ID NO: 857147 - DNA, 25 bp, Homo sapien
gctacttcatccgtgtatattggat

SEQ ID NO: 857148 - DNA, 25 bp, Homo sapien
cttcatccgtgtatattggatatac

SEQ ID NO: 857149 - DNA, 25 bp, Homo sapien
gtgtatattggatatactttcctgc

SEQ ID NO: 857150 - DNA, 25 bp, Homo sapien
ttcagctacttcatccgtgtatatt

SEQ ID NO: 857151 - DNA, 25 bp, Homo sapien
cttggcccaccgcagtgtaggagag

SEQ ID NO: 857152 - DNA, 25 bp, Homo sapien
ttttccaggctaagattcctccagc

SEQ ID NO: 857153 - DNA, 25 bp, Homo sapien
ggtctcctaacagcccatatgtcag

SEQ ID NO: 857154 - DNA, 25 bp, Homo sapien
caagacgactgtcgaagacgcgggt

SEQ ID NO: 857155 - DNA, 25 bp, Homo sapien
tagaataagcctcaactgacccctg

SEQ ID NO: 857156 - DNA, 25 bp, Homo sapien
gctctctcatgattggccacgctgg

SEQ ID NO: 857157 - DNA, 25 bp, Homo sapien
cacgctggccgatgatattctggag

SEQ ID NO: 857158 - DNA, 25 bp, Homo sapien
gtctagggaccatcaaccacagctg

SEQ ID NO: 857159 - DNA, 25 bp, Homo sapien
gaagccaccagtgacctcgtcttcc

SEQ ID NO: 857160 - DNA, 25 bp, Homo sapien
gacctcgtcttccacctgggatctg

SEQ ID NO: 857161 - DNA, 25 bp, Homo sapien
tgctccaattctaccgagtgtctgt

SEQ ID NO: 857162 - DNA, 25 bp, Homo sapien
tgtctgtatagagaaatttcacctc

SEQ ID NO: 857163 - DNA, 25 bp, Homo sapien
tatgttagctcttcccgagttcctg

SEQ ID NO: 857164 - DNA, 25 bp, Homo sapien
tccttcaaggagtcaaaaagcccta

SEQ ID NO: 857165 - DNA, 25 bp, Homo sapien
gggactagtgtatctcctgattgaa

SEQ ID NO: 857166 - DNA, 25 bp, Homo sapien
gcacccactggaggtcttgaatcat

SEQ ID NO: 857167 - DNA, 25 bp, Homo sapien
aaatccctctgcagtcggcgtccga

SEQ ID NO: 857168 - DNA, 25 bp, Homo sapien
tctgcagtcggcgtccgaaatccct

SEQ ID NO: 857169 - DNA, 25 bp, Homo sapien
gaaatccctgaacatggtggagcct

SEQ ID NO: 857170 - DNA, 25 bp, Homo sapien
tcggcgtccgaaatccctgaacatg

SEQ ID NO: 857171 - DNA, 25 bp, Homo sapien
tgtgatgcgtgaccacctggacctc

SEQ ID NO: 857172 - DNA, 25 bp, Homo sapien
cgtagcgctgcatgtgatgcgtgac

SEQ ID NO: 857173 - DNA, 25 bp, Homo sapien
ggagcctccgaaccacacggcgtag

SEQ ID NO: 857174 - DNA, 25 bp, Homo sapien
agcatggagcctccgaaccacacgg

SEQ ID NO: 857175 - DNA, 25 bp, Homo sapien
cacagagccctcgagagagggactt

SEQ ID NO: 857176 - DNA, 25 bp, Homo sapien
cagagccctcgagagagggacttac

SEQ ID NO: 857177 - DNA, 25 bp, Homo sapien
ctcaaccgagagcacaggaatggag

SEQ ID NO: 857178 - DNA, 25 bp, Homo sapien
tcgtagacagtatttacccaaactc

SEQ ID NO: 857179 - DNA, 25 bp, Homo sapien
acatgactccaaagacggggttgtg

SEQ ID NO: 857180 - DNA, 25 bp, Homo sapien
tgggcccgtactcttcatagtcctt

SEQ ID NO: 857181 - DNA, 25 bp, Homo sapien
gatgctgggcccgtactcttcatag

SEQ ID NO: 857182 - DNA, 25 bp, Homo sapien
gggttgtggcggcagatgctgggcc

SEQ ID NO: 857183 - DNA, 25 bp, Homo sapien
ccgacgtcgctatttacagaacggc

SEQ ID NO: 857184 - DNA, 25 bp, Homo sapien
cagaacggcggccttctctgggttc

SEQ ID NO: 857185 - DNA, 25 bp, Homo sapien
gcaatgcaagcacgctgctgggcag

SEQ ID NO: 857186 - DNA, 25 bp, Homo sapien
tgttccccaacgtgacaccatcgaa

SEQ ID NO: 857187 - DNA, 25 bp, Homo sapien
gacctaacgattttgcgccattttc

SEQ ID NO: 857188 - DNA, 25 bp, Homo sapien
tttgtcagctagcagctcggaggag

SEQ ID NO: 857189 - DNA, 25 bp, Homo sapien
tctcctgggacctaacgattttgcg

SEQ ID NO: 857190 - DNA, 25 bp, Homo sapien
cagcggtcggcacacggataaatgg

SEQ ID NO: 857191 - DNA, 25 bp, Homo sapien
gtatttcatccaacactcaccgaca

SEQ ID NO: 857192 - DNA, 25 bp, Homo sapien
cgtgcttagtatcagccagttgtac

SEQ ID NO: 857193 - DNA, 25 bp, Homo sapien
taaaaactttggattacagcactcc

SEQ ID NO: 857194 - DNA, 25 bp, Homo sapien
gcttttattacaatggtgcaaggaa

SEQ ID NO: 857195 - DNA, 25 bp, Homo sapien
caagcaccaggtgccttctgcgttt

SEQ ID NO: 857196 - DNA, 25 bp, Homo sapien
tcttctacagaccccacttcaggag

SEQ ID NO: 857197 - DNA, 25 bp, Homo sapien
ttcctccctctgtaagcgatgcggt

SEQ ID NO: 857198 - DNA, 25 bp, Homo sapien
tgcagttggtcaacgcaagcaccag

SEQ ID NO: 857199 - DNA, 25 bp, Homo sapien
tgtcattggtgcattggtaaaggag

SEQ ID NO: 857200 - DNA, 25 bp, Homo sapien
gggttcccaagataagcaccatacg

SEQ ID NO: 857201 - DNA, 25 bp, Homo sapien
gggacacaggtgtcattggtgcatt

SEQ ID NO: 857202 - DNA, 25 bp, Homo sapien
tccaggacgtcagtccagcgaggga

SEQ ID NO: 857203 - DNA, 25 bp, Homo sapien
agcctgtctggcacaatcgtaattt

SEQ ID NO: 857204 - DNA, 25 bp, Homo sapien
gcacttgattaaccccacaagcctg

SEQ ID NO: 857205 - DNA, 25 bp, Homo sapien
taagctttgcacttgattaacccca

SEQ ID NO: 857206 - DNA, 25 bp, Homo sapien
tgattaaccccacaagcctgtctgg

SEQ ID NO: 857207 - DNA, 25 bp, Homo sapien
cacgggcctttgtggtttgtgatga

SEQ ID NO: 857208 - DNA, 25 bp, Homo sapien
ctgtacttcctctcacgggcctttg

SEQ ID NO: 857209 - DNA, 25 bp, Homo sapien
tgatatagcatgactctggaaccca

SEQ ID NO: 857210 - DNA, 25 bp, Homo sapien
tgagtttcctggcaccctgtacttc

SEQ ID NO: 857211 - DNA, 25 bp, Homo sapien
tgactgtaaatcaacccggacctga

SEQ ID NO: 857212 - DNA, 25 bp, Homo sapien
ccccgggaaacgatgctgttcataa

SEQ ID NO: 857213 - DNA, 25 bp, Homo sapien
taagttacgtagagtgtggcaatca

SEQ ID NO: 857214 - DNA, 25 bp, Homo sapien
gcactaaattacagaggacactccc

SEQ ID NO: 857215 - DNA, 25 bp, Homo sapien
ccgactctgcgatctggtctggagg

SEQ ID NO: 857216 - DNA, 25 bp, Homo sapien
tggccccgactctgcgatctggtct

SEQ ID NO: 857217 - DNA, 25 bp, Homo sapien
agtggccccgactctgaggtctggt

SEQ ID NO: 857218 - DNA, 25 bp, Homo sapien
tgcagtggccccgactctgaggtct

SEQ ID NO: 857219 - DNA, 25 bp, Homo sapien
tttcggacccatcagagaacggtgc

SEQ ID NO: 857220 - DNA, 25 bp, Homo sapien
tcggccccaaatgctcaggacttga

SEQ ID NO: 857221 - DNA, 25 bp, Homo sapien
cagggaggctcgcatgcttgatatt

SEQ ID NO: 857222 - DNA, 25 bp, Homo sapien
taccaggagcattgagggtacccgt

SEQ ID NO: 857223 - DNA, 25 bp, Homo sapien
tcctcatgtataaaaggacgatgag

SEQ ID NO: 857224 - DNA, 25 bp, Homo sapien
agtcatatgcgagtcagcctgtttc

SEQ ID NO: 857225 - DNA, 25 bp, Homo sapien
gatgcactgtggaggcaagctgtgg

SEQ ID NO: 857226 - DNA, 25 bp, Homo sapien
gctgtgggtacgctgtgtggtcgcc

SEQ ID NO: 857227 - DNA, 25 bp, Homo sapien
tgttttggttcgacaggcatcggca

SEQ ID NO: 857228 - DNA, 25 bp, Homo sapien
cagtaagcattcaaaccagccggta

SEQ ID NO: 857229 - DNA, 25 bp, Homo sapien
caagagcggcttctttcctcgcagt

SEQ ID NO: 857230 - DNA, 25 bp, Homo sapien
tacatgtgaggcacgtagatccaca

SEQ ID NO: 857231 - DNA, 25 bp, Homo sapien
cacagaggaaggagacaatgaaatc

SEQ ID NO: 857232 - DNA, 25 bp, Homo sapien
tttattggaaagttctgtgtgtcag

SEQ ID NO: 857233 - DNA, 25 bp, Homo sapien
tcactcatcacttttcacagaggaa

SEQ ID NO: 857234 - DNA, 25 bp, Homo sapien
tctgtgtgtcaggaatgcacttcat

SEQ ID NO: 857235 - DNA, 25 bp, Homo sapien
ggtcccggggcacgagctcctctag

SEQ ID NO: 857236 - DNA, 25 bp, Homo sapien
cctctaggccagttgcacagcatgc

SEQ ID NO: 857237 - DNA, 25 bp, Homo sapien
gctcctctaggccagttgcacagca

SEQ ID NO: 857238 - DNA, 25 bp, Homo sapien
cgagctcctctaggccagttgcaca

SEQ ID NO: 857239 - DNA, 25 bp, Homo sapien
ggaatgaagctgtgtcatcagggca

SEQ ID NO: 857240 - DNA, 25 bp, Homo sapien
tgggcgctcaagctttgctccttgc

SEQ ID NO: 857241 - DNA, 25 bp, Homo sapien
tttgtggctgggcgctcaagctttg

SEQ ID NO: 857242 - DNA, 25 bp, Homo sapien
aatgaagctgtgtcatcagggcacc

SEQ ID NO: 857243 - DNA, 25 bp, Homo sapien
tctgacacttcttgttcttgagtga

SEQ ID NO: 857244 - DNA, 25 bp, Homo sapien
aaagcttcctcacccagtacataag

SEQ ID NO: 857245 - DNA, 25 bp, Homo sapien
gttccaaaagcttcctcacccagta

SEQ ID NO: 857246 - DNA, 25 bp, Homo sapien
gattggctggtcagtaccaggaacc

SEQ ID NO: 857247 - DNA, 25 bp, Homo sapien
aatggacgcagattgggcatcattg

SEQ ID NO: 857248 - DNA, 25 bp, Homo sapien
gaattggtgagattaatggacgcag

SEQ ID NO: 857249 - DNA, 25 bp, Homo sapien
ccacaagggtggaattggtgagatt

SEQ ID NO: 857250 - DNA, 25 bp, Homo sapien
tcatctccacaagggtggaattggt

SEQ ID NO: 857251 - DNA, 25 bp, Homo sapien
gctcgccctcactgggttttagctt

SEQ ID NO: 857252 - DNA, 25 bp, Homo sapien
tctgctcgccctcactgggttttag

SEQ ID NO: 857253 - DNA, 25 bp, Homo sapien
caggaaacatggattcaaaccctgt

SEQ ID NO: 857254 - DNA, 25 bp, Homo sapien
actttctcaactggatggcaggaaa

SEQ ID NO: 857255 - DNA, 25 bp, Homo sapien
aaaaaagtattggtgagccatttgt

SEQ ID NO: 857256 - DNA, 25 bp, Homo sapien
aaagtttccttcaaactctctggct

SEQ ID NO: 857257 - DNA, 25 bp, Homo sapien
aggcggtacgtggtgactcaaatct

SEQ ID NO: 857258 - DNA, 25 bp, Homo sapien
taaaaagcattggtgaggcggtacg

SEQ ID NO: 857259 - DNA, 25 bp, Homo sapien
agctgatgaattgtgggcccctggc

SEQ ID NO: 857260 - DNA, 25 bp, Homo sapien
ccaccatgactggccgagaaacaaa

SEQ ID NO: 857261 - DNA, 25 bp, Homo sapien
cacgcattaggtattgagaaacaat

SEQ ID NO: 857262 - DNA, 25 bp, Homo sapien
gactggccgagaaacaaatctttta

SEQ ID NO: 857263 - DNA, 25 bp, Homo sapien
ggaaaagctggcgtccacgcaggac

SEQ ID NO: 857264 - DNA, 25 bp, Homo sapien
acgcaggacagcggctctctgcaaa

SEQ ID NO: 857265 - DNA, 25 bp, Homo sapien
cgtaacggctcgacatcagactggg

SEQ ID NO: 857266 - DNA, 25 bp, Homo sapien
aagacacattccagccgtaacggct

SEQ ID NO: 857267 - DNA, 25 bp, Homo sapien
aagagactgatgtggactcacatga

SEQ ID NO: 857268 - DNA, 25 bp, Homo sapien
tggactcacatgagttccagagctg

SEQ ID NO: 857269 - DNA, 25 bp, Homo sapien
tgatgtggactcacatgagttccag

SEQ ID NO: 857270 - DNA, 25 bp, Homo sapien
caggtgttactattctgactccagt

SEQ ID NO: 857271 - DNA, 25 bp, Homo sapien
gcaacactggtgtaagacaagtcag

SEQ ID NO: 857272 - DNA, 25 bp, Homo sapien
tctgtgatgtaaaaccttggaggag

SEQ ID NO: 857273 - DNA, 25 bp, Homo sapien
taaaaccttggaggagatagatgaa

SEQ ID NO: 857274 - DNA, 25 bp, Homo sapien
tgtaagacaagtcagtggccccaag

SEQ ID NO: 857275 - DNA, 25 bp, Homo sapien
ttggtgcagagttgattgacagctg

SEQ ID NO: 857276 - DNA, 25 bp, Homo sapien
attgccccgaacacaggggccttgg

SEQ ID NO: 857277 - DNA, 25 bp, Homo sapien
gacattgccccgaacacaggggcct

SEQ ID NO: 857278 - DNA, 25 bp, Homo sapien
ttacaccgacattgccccgaacaca

SEQ ID NO: 857279 - DNA, 25 bp, Homo sapien
ttttcatgacaaacgatgcaacaag

SEQ ID NO: 857280 - DNA, 25 bp, Homo sapien
taggcactgaaattctaatacctca

SEQ ID NO: 857281 - DNA, 25 bp, Homo sapien
aacgatgcaacaagagcccaaaatg

SEQ ID NO: 857282 - DNA, 25 bp, Homo sapien
agcatattaggcactgaaattctaa

SEQ ID NO: 857283 - DNA, 25 bp, Homo sapien
acagctctcctctccgctataactc

SEQ ID NO: 857284 - DNA, 25 bp, Homo sapien
ctacatattatcggaaataccaaag

SEQ ID NO: 857285 - DNA, 25 bp, Homo sapien
ttatcggaaataccaaaggcacagc

SEQ ID NO: 857286 - DNA, 25 bp, Homo sapien
agctctcctctccgctataactcac

SEQ ID NO: 857287 - DNA, 25 bp, Homo sapien
aaaatggcttcctctaggcgtgcga

SEQ ID NO: 857288 - DNA, 25 bp, Homo sapien
tgtaagccgtttgacatgaagagtg

SEQ ID NO: 857289 - DNA, 25 bp, Homo sapien
cgttcgccatcagcttttgacaaag

SEQ ID NO: 857290 - DNA, 25 bp, Homo sapien
gcacgtttgaactgatcgttcgcca

SEQ ID NO: 857291 - DNA, 25 bp, Homo sapien
tggggcttcacaagcccgtctctct

SEQ ID NO: 857292 - DNA, 25 bp, Homo sapien
cttcacaagcccgtctctcttcttc

SEQ ID NO: 857293 - DNA, 25 bp, Homo sapien
ggcttcacaagcccgtctctcttct

SEQ ID NO: 857294 - DNA, 25 bp, Homo sapien
tctggggcttcacaagcccgtctct

SEQ ID NO: 857295 - DNA, 25 bp, Homo sapien
aaacaggatctgcatgcccccaaga

SEQ ID NO: 857296 - DNA, 25 bp, Homo sapien
gactctacttgagctgtgttattca

SEQ ID NO: 857297 - DNA, 25 bp, Homo sapien
aagaagctccaaaattgcagcagtt

SEQ ID NO: 857298 - DNA, 25 bp, Homo sapien
catttttgtttgcaacacaagactc

SEQ ID NO: 857299 - DNA, 25 bp, Homo sapien
tgcagtttgtgtaatgctggcagcg

SEQ ID NO: 857300 - DNA, 25 bp, Homo sapien
gagaaagctgatgagcaaagatcag

SEQ ID NO: 857301 - DNA, 25 bp, Homo sapien
gcagccttgagtagcctctgagaaa

SEQ ID NO: 857302 - DNA, 25 bp, Homo sapien
gatcagctgtgtcgtttgcagtttg

SEQ ID NO: 857303 - DNA, 25 bp, Homo sapien
ggcattgacttcgttatactttggg

SEQ ID NO: 857304 - DNA, 25 bp, Homo sapien
accgttggctgagcattccccggag

SEQ ID NO: 857305 - DNA, 25 bp, Homo sapien
tatactttgggttgtacgtgtgcat

SEQ ID NO: 857306 - DNA, 25 bp, Homo sapien
gcattccccggaggcattgacttcg

SEQ ID NO: 857307 - DNA, 25 bp, Homo sapien
cttctccataaggtgagagtccctg

SEQ ID NO: 857308 - DNA, 25 bp, Homo sapien
cacctgtcttctccataaggtgaga

SEQ ID NO: 857309 - DNA, 25 bp, Homo sapien
cctgtcttctccataaggtgagagt

SEQ ID NO: 857310 - DNA, 25 bp, Homo sapien
tgtcttctccataaggtgagagtcc

SEQ ID NO: 857311 - DNA, 25 bp, Homo sapien
tcattcttctgtgacccgacaagct

SEQ ID NO: 857312 - DNA, 25 bp, Homo sapien
tcccacatgttgaaagtgccatccc

SEQ ID NO: 857313 - DNA, 25 bp, Homo sapien
ttcttccttccggagatatagcaaa

SEQ ID NO: 857314 - DNA, 25 bp, Homo sapien
tagcaaagctcttcccagcatacct

SEQ ID NO: 857315 - DNA, 25 bp, Homo sapien
tgctgcgcggcagtgtggctgagtg

SEQ ID NO: 857316 - DNA, 25 bp, Homo sapien
ctgctgcgcggcagtgtggctgagt

SEQ ID NO: 857317 - DNA, 25 bp, Homo sapien
gccctgctgcgcggcagtgtggctg

SEQ ID NO: 857318 - DNA, 25 bp, Homo sapien
cctgctgcgcggcagtgtggctgag

SEQ ID NO: 857319 - DNA, 25 bp, Homo sapien
gagtgcccagagacggctccagcag

SEQ ID NO: 857320 - DNA, 25 bp, Homo sapien
ctgctccccgtgagcaacgccagct

SEQ ID NO: 857321 - DNA, 25 bp, Homo sapien
cacacggtgctactggaggtcggcc

SEQ ID NO: 857322 - DNA, 25 bp, Homo sapien
tgagcacttggcagtggcacacggt

SEQ ID NO: 857323 - DNA, 25 bp, Homo sapien
gggctggcgaaggaggtaaggccac

SEQ ID NO: 857324 - DNA, 25 bp, Homo sapien
tcccatcaaatgtcaaagtcgtgct

SEQ ID NO: 857325 - DNA, 25 bp, Homo sapien
cctctggttgtctcacgcccttggg

SEQ ID NO: 857326 - DNA, 25 bp, Homo sapien
caatagcgcatgctcatcctccagg

SEQ ID NO: 857327 - DNA, 25 bp, Homo sapien
cagccgccatgccctctaatatgca

SEQ ID NO: 857328 - DNA, 25 bp, Homo sapien
agccgccatgccctctaatatgcat

SEQ ID NO: 857329 - DNA, 25 bp, Homo sapien
ttctgcatcaggtccacaatgcagc

SEQ ID NO: 857330 - DNA, 25 bp, Homo sapien
gcagccgccatgccctctaatatgc

SEQ ID NO: 857331 - DNA, 25 bp, Homo sapien
aggacaaactacagctctgagggaa

SEQ ID NO: 857332 - DNA, 25 bp, Homo sapien
agctgaggacaaactacagctctga

SEQ ID NO: 857333 - DNA, 25 bp, Homo sapien
cactggatcactatggagaccttga

SEQ ID NO: 857334 - DNA, 25 bp, Homo sapien
gatcactatggagaccttgaaacag

SEQ ID NO: 857335 - DNA, 25 bp, Homo sapien
ggtctttgccttcggtgaatctgtg

SEQ ID NO: 857336 - DNA, 25 bp, Homo sapien
tccctttggtctttgccttcggtga

SEQ ID NO: 857337 - DNA, 25 bp, Homo sapien
tctttgccttcggtgaatctgtgga

SEQ ID NO: 857338 - DNA, 25 bp, Homo sapien
tttggtctttgccttcggtgaatct

SEQ ID NO: 857339 - DNA, 25 bp, Homo sapien
cttgtttcaatggactcttcatgcc

SEQ ID NO: 857340 - DNA, 25 bp, Homo sapien
tcatgccagagatcaaggttttttt

SEQ ID NO: 857341 - DNA, 25 bp, Homo sapien
ttctttgtggggcatgaaacagcat

SEQ ID NO: 857342 - DNA, 25 bp, Homo sapien
aaacagcattgtcactttctccaag

SEQ ID NO: 857343 - DNA, 25 bp, Homo sapien
cacttcatcagggaaccagcagaaa

SEQ ID NO: 857344 - DNA, 25 bp, Homo sapien
gccagggcctggctttcacagaagc

SEQ ID NO: 857345 - DNA, 25 bp, Homo sapien
gggcctggctttcacagaagcaaaa

SEQ ID NO: 857346 - DNA, 25 bp, Homo sapien
tgcacttcatcagggaaccagcaga

SEQ ID NO: 857347 - DNA, 25 bp, Homo sapien
tcacattatgtgaataattcgtggg

SEQ ID NO: 857348 - DNA, 25 bp, Homo sapien
cactgggtaaatagcccacaaatcc

SEQ ID NO: 857349 - DNA, 25 bp, Homo sapien
ggagctttgttgtctcactgggtaa

SEQ ID NO: 857350 - DNA, 25 bp, Homo sapien
ctgtctgaatggagctttgttgtct

SEQ ID NO: 857351 - DNA, 25 bp, Homo sapien
ccgacacagctgcatgagggtgtgc

SEQ ID NO: 857352 - DNA, 25 bp, Homo sapien
tgttgagaaagacagtcgtgcacag

SEQ ID NO: 857353 - DNA, 25 bp, Homo sapien
tttccttacgtggagagcaagaggc

SEQ ID NO: 857354 - DNA, 25 bp, Homo sapien
tgtgccgtggacctggaacatttcc

SEQ ID NO: 857355 - DNA, 25 bp, Homo sapien
tattgtctcgcatctggtgtctgca

SEQ ID NO: 857356 - DNA, 25 bp, Homo sapien
gaaggacatggaagcatggacccaa

SEQ ID NO: 857357 - DNA, 25 bp, Homo sapien
tggacgaagaaactgtccccagtgg

SEQ ID NO: 857358 - DNA, 25 bp, Homo sapien
catggacccaagaccaaaggtggac

SEQ ID NO: 857359 - DNA, 25 bp, Homo sapien
gtccagtcacagtgccggcctttcc

SEQ ID NO: 857360 - DNA, 25 bp, Homo sapien
cacagtgccggcctttccccttgtc

SEQ ID NO: 857361 - DNA, 25 bp, Homo sapien
ctcctcctcttctcggaaggcagag

SEQ ID NO: 857362 - DNA, 25 bp, Homo sapien
gtcacagtgccggcctttccccttg

SEQ ID NO: 857363 - DNA, 25 bp, Homo sapien
ggcctcggcacgagacagccagcat

SEQ ID NO: 857364 - DNA, 25 bp, Homo sapien
aggtggctccctccggagatgtcca

SEQ ID NO: 857365 - DNA, 25 bp, Homo sapien
agttctgtgatctggcgcggggcct

SEQ ID NO: 857366 - DNA, 25 bp, Homo sapien
ctggcgcggggcctcggcacgagac

SEQ ID NO: 857367 - DNA, 25 bp, Homo sapien
caagtggcattggtgatactgctaa

SEQ ID NO: 857368 - DNA, 25 bp, Homo sapien
tcctttatcgtagctgactccctgc

SEQ ID NO: 857369 - DNA, 25 bp, Homo sapien
tgctaaatgggctatccagagctag

SEQ ID NO: 857370 - DNA, 25 bp, Homo sapien
taggagaagtctctcaaaacaggct

SEQ ID NO: 857371 - DNA, 25 bp, Homo sapien
tggcctagcttctggcccatctcag

SEQ ID NO: 857372 - DNA, 25 bp, Homo sapien
gtttggcacagtggcctagcttctg

SEQ ID NO: 857373 - DNA, 25 bp, Homo sapien
ttgaacagttagaggtcatcgtagg

SEQ ID NO: 857374 - DNA, 25 bp, Homo sapien
gagagatgtgtgactctactttcac

SEQ ID NO: 857375 - DNA, 25 bp, Homo sapien
catctccaggcagaaacaggcctgc

SEQ ID NO: 857376 - DNA, 25 bp, Homo sapien
tctaagtcttggttcccaatgtcca

SEQ ID NO: 857377 - DNA, 25 bp, Homo sapien
ggaagacaaatgctcagacaaagac

SEQ ID NO: 857378 - DNA, 25 bp, Homo sapien
attctctccacgtgccctttctaag

SEQ ID NO: 857379 - DNA, 25 bp, Homo sapien
tgtaatttcaattggcacatgtatg

SEQ ID NO: 857380 - DNA, 25 bp, Homo sapien
ggcacatgtatgttagctcatcctt

SEQ ID NO: 857381 - DNA, 25 bp, Homo sapien
tatgttagctcatccttaggagctg

SEQ ID NO: 857382 - DNA, 25 bp, Homo sapien
taggagctgttgagtattgacgcac

SEQ ID NO: 857383 - DNA, 25 bp, Homo sapien
aatggtcccatttacaagggcctgc

SEQ ID NO: 857384 - DNA, 25 bp, Homo sapien
tcccatttacaagggcctgctacga

SEQ ID NO: 857385 - DNA, 25 bp, Homo sapien
ggtcccatttacaagggcctgctac

SEQ ID NO: 857386 - DNA, 25 bp, Homo sapien
caatggtcccatttacaagggcctg

SEQ ID NO: 857387 - DNA, 25 bp, Homo sapien
tgctgctactgtgcacacgggaaag

SEQ ID NO: 857388 - DNA, 25 bp, Homo sapien
tttgcatgcagtaaaggcccatggt

SEQ ID NO: 857389 - DNA, 25 bp, Homo sapien
ccatggtgccttagggtctcaagca

SEQ ID NO: 857390 - DNA, 25 bp, Homo sapien
taaaggttctatgcacagtagctgc

SEQ ID NO: 857391 - DNA, 25 bp, Homo sapien
tagcaagacagataacaaccacctg

SEQ ID NO: 857392 - DNA, 25 bp, Homo sapien
gttgtacacaggcttagttgaggca

SEQ ID NO: 857393 - DNA, 25 bp, Homo sapien
tattgggagatactgttccctggca

SEQ ID NO: 857394 - DNA, 25 bp, Homo sapien
tcaggcgttcctagaagaaggtcat

SEQ ID NO: 857395 - DNA, 25 bp, Homo sapien
tcttgccgttaatcctgtccggggc

SEQ ID NO: 857396 - DNA, 25 bp, Homo sapien
tctcttgccgttaatcctgtccggg

SEQ ID NO: 857397 - DNA, 25 bp, Homo sapien
cctctcttgccgttaatcctgtccg

SEQ ID NO: 857398 - DNA, 25 bp, Homo sapien
ctctcttgccgttaatcctgtccgg

SEQ ID NO: 857399 - DNA, 25 bp, Homo sapien
tgtctgaagtagccgatccgaggct

SEQ ID NO: 857400 - DNA, 25 bp, Homo sapien
gaagtagccgatccgaggctccagg

SEQ ID NO: 857401 - DNA, 25 bp, Homo sapien
tgaagtagccgatccgaggctccag

SEQ ID NO: 857402 - DNA, 25 bp, Homo sapien
ttgctgccaggtcgcagttgctgca

SEQ ID NO: 857403 - DNA, 25 bp, Homo sapien
catttcgtccggttacttgctgcca

SEQ ID NO: 857404 - DNA, 25 bp, Homo sapien
ggccgacgctaggtgagtacccctc

SEQ ID NO: 857405 - DNA, 25 bp, Homo sapien
tccagtccaattcggccgacgctag

SEQ ID NO: 857406 - DNA, 25 bp, Homo sapien
tgacaggcaggtggacgacacagga

SEQ ID NO: 857407 - DNA, 25 bp, Homo sapien
aggcaggtggacgacacaggaggca

SEQ ID NO: 857408 - DNA, 25 bp, Homo sapien
acaggcaggtggacgacacaggagg

SEQ ID NO: 857409 - DNA, 25 bp, Homo sapien
gcaggtggacgacacaggaggcagc

SEQ ID NO: 857410 - DNA, 25 bp, Homo sapien
tgagcaagggccatgtgcagggcac

SEQ ID NO: 857411 - DNA, 25 bp, Homo sapien
tgtgagcaagggccatgtgcagggc

SEQ ID NO: 857412 - DNA, 25 bp, Homo sapien
gtgagcaagggccatgtgcagggca

SEQ ID NO: 857413 - DNA, 25 bp, Homo sapien
ctgtgagcaagggccatgtgcaggg

SEQ ID NO: 857414 - DNA, 25 bp, Homo sapien
tctgagatccaaaagcaccggccct

SEQ ID NO: 857415 - DNA, 25 bp, Homo sapien
aagcaccggccctgggtcataacag

SEQ ID NO: 857416 - DNA, 25 bp, Homo sapien
agatccaaaagcaccggccctgggt

SEQ ID NO: 857417 - DNA, 25 bp, Homo sapien
aaagcaccggccctgggtcataaca

SEQ ID NO: 857418 - DNA, 25 bp, Homo sapien
aaaagaatgtccttgctgctccacc

SEQ ID NO: 857419 - DNA, 25 bp, Homo sapien
aaagaatgtccttgctgctccaccc

SEQ ID NO: 857420 - DNA, 25 bp, Homo sapien
aagaatgtccttgctgctccaccca

SEQ ID NO: 857421 - DNA, 25 bp, Homo sapien
agataaaacctgagtgactccccca

SEQ ID NO: 857422 - DNA, 25 bp, Homo sapien
agtaaaagataaaacctgagtgact

SEQ ID NO: 857423 - DNA, 25 bp, Homo sapien
ataaaacctgagtgactcccccagt

SEQ ID NO: 857424 - DNA, 25 bp, Homo sapien
taaaagataaaacctgagtgactcc

SEQ ID NO: 857425 - DNA, 25 bp, Homo sapien
tgcatccttgacttcgctgccacgg

SEQ ID NO: 857426 - DNA, 25 bp, Homo sapien
tgtcacaggataccatctttaagga

SEQ ID NO: 857427 - DNA, 25 bp, Homo sapien
tgccacggcattcatcatgttcact

SEQ ID NO: 857428 - DNA, 25 bp, Homo sapien
cacaggataccatctttaaggaagg

SEQ ID NO: 857429 - DNA, 25 bp, Homo sapien
gagtgacattgtggaactcaccccg

SEQ ID NO: 857430 - DNA, 25 bp, Homo sapien
taggattcatgttgcagacaggacc

SEQ ID NO: 857431 - DNA, 25 bp, Homo sapien
catggccagggtgcagttgaacaag

SEQ ID NO: 857432 - DNA, 25 bp, Homo sapien
gcctgctgggtgcactaaacctctt

SEQ ID NO: 857433 - DNA, 25 bp, Homo sapien
tacaagtatacaaggtattgacaag

SEQ ID NO: 857434 - DNA, 25 bp, Homo sapien
tcttttccagaccagagcacctaac

SEQ ID NO: 857435 - DNA, 25 bp, Homo sapien
tcataggaatgtatctagtaaatca

SEQ ID NO: 857436 - DNA, 25 bp, Homo sapien
tgaatagaagggcatgaatacatca

SEQ ID NO: 857437 - DNA, 25 bp, Homo sapien
gatagccacgctaaggcgagtgtaa

SEQ ID NO: 857438 - DNA, 25 bp, Homo sapien
ctaaggcgagtgtaaaagccagcag

SEQ ID NO: 857439 - DNA, 25 bp, Homo sapien
gacaaagatagccacgctaaggcga

SEQ ID NO: 857440 - DNA, 25 bp, Homo sapien
cacgctaaggcgagtgtaaaagcca

SEQ ID NO: 857441 - DNA, 25 bp, Homo sapien
taggtgccaggagataatgaaatac

SEQ ID NO: 857442 - DNA, 25 bp, Homo sapien
tttatgcccattgagcgaggctggc

SEQ ID NO: 857443 - DNA, 25 bp, Homo sapien
aaggagaagacttgcagagcctctg

SEQ ID NO: 857444 - DNA, 25 bp, Homo sapien
cccagcctcgggaatgagaaaggag

SEQ ID NO: 857445 - DNA, 25 bp, Homo sapien
cttcgtaggaacatctgaggagaca

SEQ ID NO: 857446 - DNA, 25 bp, Homo sapien
ttacttcttcgtaggaacatctgag

SEQ ID NO: 857447 - DNA, 25 bp, Homo sapien
ttcttcgtaggaacatctgaggaga

SEQ ID NO: 857448 - DNA, 25 bp, Homo sapien
acttcttcgtaggaacatctgagga

SEQ ID NO: 857449 - DNA, 25 bp, Homo sapien
gagatagtttacttcttcgagatag

SEQ ID NO: 857450 - DNA, 25 bp, Homo sapien
ttgagacttctcagagatagtttac

SEQ ID NO: 857451 - DNA, 25 bp, Homo sapien
tgtctctccagaataaagttcaaca

SEQ ID NO: 857452 - DNA, 25 bp, Homo sapien
ttcctgtctctccagaataaagttc

SEQ ID NO: 857453 - DNA, 25 bp, Homo sapien
tgccatcccagtcagtcttaagagc

SEQ ID NO: 857454 - DNA, 25 bp, Homo sapien
tgagaaatgtgccacgtgaaggaac

SEQ ID NO: 857455 - DNA, 25 bp, Homo sapien
tgtcgaaggccggttaaagtgcatt

SEQ ID NO: 857456 - DNA, 25 bp, Homo sapien
aatgcggagcccacggtttctgtga

SEQ ID NO: 857457 - DNA, 25 bp, Homo sapien
tctacccttgttcaaatatcctgaa

SEQ ID NO: 857458 - DNA, 25 bp, Homo sapien
cttgttcaaatatcctgaagcaaca

SEQ ID NO: 857459 - DNA, 25 bp, Homo sapien
tacccttgttcaaatatcctgaagc

SEQ ID NO: 857460 - DNA, 25 bp, Homo sapien
tccttctacccttgttcaaatatcc

SEQ ID NO: 857461 - DNA, 25 bp, Homo sapien
gcattccatactcctccatgtgaca

SEQ ID NO: 857462 - DNA, 25 bp, Homo sapien
atgtctgcattccatactcctccat

SEQ ID NO: 857463 - DNA, 25 bp, Homo sapien
tgtctgcattccatactcctccatg

SEQ ID NO: 857464 - DNA, 25 bp, Homo sapien
tctgcattccatactcctccatgtg

SEQ ID NO: 857465 - DNA, 25 bp, Homo sapien
gaggaagcctgaggggtacctgaga

SEQ ID NO: 857466 - DNA, 25 bp, Homo sapien
gggtacctgagagggaccctgcaaa

SEQ ID NO: 857467 - DNA, 25 bp, Homo sapien
tgagagggaccctgcaaatctcaaa

SEQ ID NO: 857468 - DNA, 25 bp, Homo sapien
tacctgagagggaccctgcaaatct

SEQ ID NO: 857469 - DNA, 25 bp, Homo sapien
cagcagatgccctcggtaagcaggg

SEQ ID NO: 857470 - DNA, 25 bp, Homo sapien
aggtgccgggagctgatttcctcag

SEQ ID NO: 857471 - DNA, 25 bp, Homo sapien
cacgtccctgttgcatcttgtacat

SEQ ID NO: 857472 - DNA, 25 bp, Homo sapien
cattagatcataaaccaggtgccgg

SEQ ID NO: 857473 - DNA, 25 bp, Homo sapien
ggtgagtggtctgcacgatgtctga

SEQ ID NO: 857474 - DNA, 25 bp, Homo sapien
tctctactaggattgacagaaccat

SEQ ID NO: 857475 - DNA, 25 bp, Homo sapien
cctcgctcttgtttgagagcagcca

SEQ ID NO: 857476 - DNA, 25 bp, Homo sapien
gctgctggccgacacaccagaggtg

SEQ ID NO: 857477 - DNA, 25 bp, Homo sapien
tagccagcatgacctctgattccct

SEQ ID NO: 857478 - DNA, 25 bp, Homo sapien
tgtagattcataagggcaaggaaat

SEQ ID NO: 857479 - DNA, 25 bp, Homo sapien
tctctctttgtagattcataagggc

SEQ ID NO: 857480 - DNA, 25 bp, Homo sapien
ttttcttgcttaggatgaggggcca

SEQ ID NO: 857481 - DNA, 25 bp, Homo sapien
gactttgtctcctgtacatagcatt

SEQ ID NO: 857482 - DNA, 25 bp, Homo sapien
catagcattcgctctgtatcttcaa

SEQ ID NO: 857483 - DNA, 25 bp, Homo sapien
tccaaaggggagactacagtgaaaa

SEQ ID NO: 857484 - DNA, 25 bp, Homo sapien
cagcaggcgacagcccacatttggt

SEQ ID NO: 857485 - DNA, 25 bp, Homo sapien
gcacacatacccatgcaggtgacac

SEQ ID NO: 857486 - DNA, 25 bp, Homo sapien
tctttgccgatgctgctgtctcttt

SEQ ID NO: 857487 - DNA, 25 bp, Homo sapien
ttatgatgggtctttgccgatgctg

SEQ ID NO: 857488 - DNA, 25 bp, Homo sapien
agcacacatacccatgcaggtgaca

SEQ ID NO: 857489 - DNA, 25 bp, Homo sapien
aagcccagggagcccgagaggaaca

SEQ ID NO: 857490 - DNA, 25 bp, Homo sapien
aacagtggcagaggggacacgccaa

SEQ ID NO: 857491 - DNA, 25 bp, Homo sapien
agtggcagaggggacacgccaagca

SEQ ID NO: 857492 - DNA, 25 bp, Homo sapien
gagcccgagaggaacagtggcagag

SEQ ID NO: 857493 - DNA, 25 bp, Homo sapien
gaaggctggtatttttcgagtccga

SEQ ID NO: 857494 - DNA, 25 bp, Homo sapien
caaggtcaagggtttctgtcttagc

SEQ ID NO: 857495 - DNA, 25 bp, Homo sapien
cattgtcacagaatacatgaaggaa

SEQ ID NO: 857496 - DNA, 25 bp, Homo sapien
tcttagcagcctctaaggcgagcgc

SEQ ID NO: 857497 - DNA, 25 bp, Homo sapien
ggcctgatgagaacataccccgtga

SEQ ID NO: 857498 - DNA, 25 bp, Homo sapien
gcctgttgtgcagaagggaccatca

SEQ ID NO: 857499 - DNA, 25 bp, Homo sapien
gggaccatcaagctcacggcctgat

SEQ ID NO: 857500 - DNA, 25 bp, Homo sapien
taccccgtgatgtactggccggtct

SEQ ID NO: 857501 - DNA, 25 bp, Homo sapien
gaaagcctttatgaggagctggaga

SEQ ID NO: 857502 - DNA, 25 bp, Homo sapien
tctttggagacaagcactggttccc

SEQ ID NO: 857503 - DNA, 25 bp, Homo sapien
aaaccccacaatcttgttgtcatgg

SEQ ID NO: 857504 - DNA, 25 bp, Homo sapien
aagagagccaaagctgacgccaagg

SEQ ID NO: 857505 - DNA, 25 bp, Homo sapien
gcaaatccataggaagaggagcctc

SEQ ID NO: 857506 - DNA, 25 bp, Homo sapien
gccctgacctccttgaagcaaatcc

SEQ ID NO: 857507 - DNA, 25 bp, Homo sapien
ccctgacctccttgaagcaaatcca

SEQ ID NO: 857508 - DNA, 25 bp, Homo sapien
gtctttctgggtgtgcttaagcctc

SEQ ID NO: 857509 - DNA, 25 bp, Homo sapien
tgtagatgaccactgggtctttctg

SEQ ID NO: 857510 - DNA, 25 bp, Homo sapien
cctgtagatgaccactgggtctttc

SEQ ID NO: 857511 - DNA, 25 bp, Homo sapien
ctcacaccattgtatggaggacagt

SEQ ID NO: 857512 - DNA, 25 bp, Homo sapien
catgcaggtactgtgttatggtctc

SEQ ID NO: 857513 - DNA, 25 bp, Homo sapien
gcaggtactgtgttatggtctccct

SEQ ID NO: 857514 - DNA, 25 bp, Homo sapien
tttacatgcaggtactgtgttatgg

SEQ ID NO: 857515 - DNA, 25 bp, Homo sapien
cctccttggtttcctaagcttgagc

SEQ ID NO: 857516 - DNA, 25 bp, Homo sapien
cgttaaattccaccccttccatgca

SEQ ID NO: 857517 - DNA, 25 bp, Homo sapien
tgtgattttcaaagccaacgttaaa

SEQ ID NO: 857518 - DNA, 25 bp, Homo sapien
tcacatttggttccaccttttcaaa

SEQ ID NO: 857519 - DNA, 25 bp, Homo sapien
ccttttcaaatgttatgtgattttc

SEQ ID NO: 857520 - DNA, 25 bp, Homo sapien
aattgtccattagtgtattcataag

SEQ ID NO: 857521 - DNA, 25 bp, Homo sapien
tttaaattgtccattagtgtattca

SEQ ID NO: 857522 - DNA, 25 bp, Homo sapien
ccattagtgtattcataagggagca

SEQ ID NO: 857523 - DNA, 25 bp, Homo sapien
tattcataagggagcatatgctttt

SEQ ID NO: 857524 - DNA, 25 bp, Homo sapien
ctcatggatggcgtgggccatctct

SEQ ID NO: 857525 - DNA, 25 bp, Homo sapien
ccgtcttcataatttaaggttaatg

SEQ ID NO: 857526 - DNA, 25 bp, Homo sapien
aaggttaatgtagttttgatatgcc

SEQ ID NO: 857527 - DNA, 25 bp, Homo sapien
gtagttttgatatgcccccaccaaa

SEQ ID NO: 857528 - DNA, 25 bp, Homo sapien
cacgtagtaaggatgcaacagtttg

SEQ ID NO: 857529 - DNA, 25 bp, Homo sapien
gccccacgtagtaaggatgcaacag

SEQ ID NO: 857530 - DNA, 25 bp, Homo sapien
cccacgtagtaaggatgcaacagtt

SEQ ID NO: 857531 - DNA, 25 bp, Homo sapien
gctgccccacgtagtaaggatgcaa

SEQ ID NO: 857532 - DNA, 25 bp, Homo sapien
cactgcacaggcgaaagagagacag

SEQ ID NO: 857533 - DNA, 25 bp, Homo sapien
cccgggaaacagttcaggacgctca

SEQ ID NO: 857534 - DNA, 25 bp, Homo sapien
ggactaggctctttcctgcgcaagg

SEQ ID NO: 857535 - DNA, 25 bp, Homo sapien
cagaagcgggagcaaacccaaaagg

SEQ ID NO: 857536 - DNA, 25 bp, Homo sapien
gtggagggtggcgacagaggtgcgc

SEQ ID NO: 857537 - DNA, 25 bp, Homo sapien
ctaccttcaaaacttcctaggcgcg

SEQ ID NO: 857538 - DNA, 25 bp, Homo sapien
caaaacttcctaggcgcgtggaggg

SEQ ID NO: 857539 - DNA, 25 bp, Homo sapien
tggcgacagaggtgcgcgcctcggg

SEQ ID NO: 857540 - DNA, 25 bp, Homo sapien
attggagactcctgcggtttgattc

SEQ ID NO: 857541 - DNA, 25 bp, Homo sapien
ttggagactcctgcggtttgattca

SEQ ID NO: 857542 - DNA, 25 bp, Homo sapien
tattggagactcctgcggtttgatt

SEQ ID NO: 857543 - DNA, 25 bp, Homo sapien
tcaactccgaacaagtagatagtgt

SEQ ID NO: 857544 - DNA, 25 bp, Homo sapien
gatattgtgggctaatacatgcccc

SEQ ID NO: 857545 - DNA, 25 bp, Homo sapien
tactcaaatcatagtgagaacagag

SEQ ID NO: 857546 - DNA, 25 bp, Homo sapien
tatctgccaagtgaatccaatatca

SEQ ID NO: 857547 - DNA, 25 bp, Homo sapien
tcttcaaaagtcattgttggctggg

SEQ ID NO: 857548 - DNA, 25 bp, Homo sapien
tggaagcagggaaatatttgcagaa

SEQ ID NO: 857549 - DNA, 25 bp, Homo sapien
agcacttgcctaacttaaaggtatt

SEQ ID NO: 857550 - DNA, 25 bp, Homo sapien
catatggttatccacattgcaagca

SEQ ID NO: 857551 - DNA, 25 bp, Homo sapien
tgttcaaccttggtgtgtatctagg

SEQ ID NO: 857552 - DNA, 25 bp, Homo sapien
gagtgcttgttcaaccttggtgtgt

SEQ ID NO: 857553 - DNA, 25 bp, Homo sapien
gcttgttcaaccttggtgtgtatct

SEQ ID NO: 857554 - DNA, 25 bp, Homo sapien
tggtgtgtatctaggaggagacaga

SEQ ID NO: 857555 - DNA, 25 bp, Homo sapien
taaataccgacagaattccaagtaa

SEQ ID NO: 857556 - DNA, 25 bp, Homo sapien
tattccttaaataccgacagaattc

SEQ ID NO: 857557 - DNA, 25 bp, Homo sapien
ttcatagaaacgacgtcttgctctg

SEQ ID NO: 857558 - DNA, 25 bp, Homo sapien
ctaggattgcgggtgcatatcacca

SEQ ID NO: 857559 - DNA, 25 bp, Homo sapien
gcagcagagtggtggtctatacaag

SEQ ID NO: 857560 - DNA, 25 bp, Homo sapien
ggcgttaaaaatcccaggctgcagt

SEQ ID NO: 857561 - DNA, 25 bp, Homo sapien
tctatacaagtatcgcacatggcgt

SEQ ID NO: 857562 - DNA, 25 bp, Homo sapien
taagactagtaacaacacagagcgg

SEQ ID NO: 857563 - DNA, 25 bp, Homo sapien
tcccgctctccctctaccgctgtac

SEQ ID NO: 857564 - DNA, 25 bp, Homo sapien
ccctctaccgctgtacacctgctgt

SEQ ID NO: 857565 - DNA, 25 bp, Homo sapien
ctccctctaccgctgtacacctgct

SEQ ID NO: 857566 - DNA, 25 bp, Homo sapien
gctctccctctaccgctgtacacct

SEQ ID NO: 857567 - DNA, 25 bp, Homo sapien
ccaaaaaagtttagcaattgccttg

SEQ ID NO: 857568 - DNA, 25 bp, Homo sapien
tagcaattgccttgagccatcttgc

SEQ ID NO: 857569 - DNA, 25 bp, Homo sapien
gaggatttccctcttgtgcagtgca

SEQ ID NO: 857570 - DNA, 25 bp, Homo sapien
tctgttgccacttaatagcttaggg

SEQ ID NO: 857571 - DNA, 25 bp, Homo sapien
tgcctgcgttatacagcctgtgacc

SEQ ID NO: 857572 - DNA, 25 bp, Homo sapien
ggtctgcaaacaatcgcctcatggg

SEQ ID NO: 857573 - DNA, 25 bp, Homo sapien
tctctggtctttggcccgaggtctg

SEQ ID NO: 857574 - DNA, 25 bp, Homo sapien
tagtttctctaaggtctacagtgac

SEQ ID NO: 857575 - DNA, 25 bp, Homo sapien
ggtataattgctaaggaccagagct

SEQ ID NO: 857576 - DNA, 25 bp, Homo sapien
gggcatggctaatagtaagcattca

SEQ ID NO: 857577 - DNA, 25 bp, Homo sapien
gaccagagctttggtactggattat

SEQ ID NO: 857578 - DNA, 25 bp, Homo sapien
gcaccttgtcgctcatcatgctgta

SEQ ID NO: 857579 - DNA, 25 bp, Homo sapien
cagaggctgcacaaaattactccca

SEQ ID NO: 857580 - DNA, 25 bp, Homo sapien
tatacgggtatcttgcattgcctca

SEQ ID NO: 857581 - DNA, 25 bp, Homo sapien
tgtgtaacctgataaacagaggctg

SEQ ID NO: 857582 - DNA, 25 bp, Homo sapien
catttctgatgacggtatacgggta

SEQ ID NO: 857583 - DNA, 25 bp, Homo sapien
ctcttggctgcctgcgggatctgac

SEQ ID NO: 857584 - DNA, 25 bp, Homo sapien
gcccacggctctccctaccctggaa

SEQ ID NO: 857585 - DNA, 25 bp, Homo sapien
ttgtttctttggctcgctcttggct

SEQ ID NO: 857586 - DNA, 25 bp, Homo sapien
ctgcctgcgggatctgaccccgaag

SEQ ID NO: 857587 - DNA, 25 bp, Homo sapien
gggcggcgacgccaggggaggcgtg

SEQ ID NO: 857588 - DNA, 25 bp, Homo sapien
gcgcgcgcgccaggttttctgtctg

SEQ ID NO: 857589 - DNA, 25 bp, Homo sapien
cgcgcgcgcgccaggttttctgtct

SEQ ID NO: 857590 - DNA, 25 bp, Homo sapien
gcggtgcggggtgcagcggtcgccg

SEQ ID NO: 857591 - DNA, 25 bp, Homo sapien
aggcggtgcggggtgcagcggtcgc

SEQ ID NO: 857592 - DNA, 25 bp, Homo sapien
ggcggtgcggggtgcagcggtcgcc

SEQ ID NO: 857593 - DNA, 25 bp, Homo sapien
caggcggtgcggggtgcagcggtcg

SEQ ID NO: 857594 - DNA, 25 bp, Homo sapien
tgcgagcaacagcgcggcggcacgc

SEQ ID NO: 857595 - DNA, 25 bp, Homo sapien
ctgcgagcaacagcgcggcggcacg

SEQ ID NO: 857596 - DNA, 25 bp, Homo sapien
cgagcaacagcgcggcggcacgcac

SEQ ID NO: 857597 - DNA, 25 bp, Homo sapien
gcgagcaacagcgcggcggcacgca

SEQ ID NO: 857598 - DNA, 25 bp, Homo sapien
gcgtgtccaccgagctcggcgccag

SEQ ID NO: 857599 - DNA, 25 bp, Homo sapien
agggcgagaggcagctctgactgcg

SEQ ID NO: 857600 - DNA, 25 bp, Homo sapien
tgactgcgcgcgtgtccaccgagct

SEQ ID NO: 857601 - DNA, 25 bp, Homo sapien
gcagctctgactgcgcgcgtgtcca

SEQ ID NO: 857602 - DNA, 25 bp, Homo sapien
gggagggaggaagaggctgcgagcc

SEQ ID NO: 857603 - DNA, 25 bp, Homo sapien
gagggaggaagaggctgcgagccca

SEQ ID NO: 857604 - DNA, 25 bp, Homo sapien
taaacaaaaagccaggagccaggga

SEQ ID NO: 857605 - DNA, 25 bp, Homo sapien
aacaaaaagccaggagccagggagg

SEQ ID NO: 857606 - DNA, 25 bp, Homo sapien
tcagcggatcccaatagcaatcaac

SEQ ID NO: 857607 - DNA, 25 bp, Homo sapien
aacttaatccattgtcctggtgagg

SEQ ID NO: 857608 - DNA, 25 bp, Homo sapien
cctgcccgtgtctttactcagcgga

SEQ ID NO: 857609 - DNA, 25 bp, Homo sapien
gattaaagtagactggactggctga

SEQ ID NO: 857610 - DNA, 25 bp, Homo sapien
tcccctgcatcttagcggtcttgat

SEQ ID NO: 857611 - DNA, 25 bp, Homo sapien
tcttagcggtcttgatcatggcctt

SEQ ID NO: 857612 - DNA, 25 bp, Homo sapien
tgcatcttagcggtcttgatcatgg

SEQ ID NO: 857613 - DNA, 25 bp, Homo sapien
cggtcttgatcatggccttttcctt

SEQ ID NO: 857614 - DNA, 25 bp, Homo sapien
caaaagtccctcaaccctcagtcct

SEQ ID NO: 857615 - DNA, 25 bp, Homo sapien
aggagacagggcccagttgctgact

SEQ ID NO: 857616 - DNA, 25 bp, Homo sapien
caccaaaagtccctcaaccctcagt

SEQ ID NO: 857617 - DNA, 25 bp, Homo sapien
ttgcattgaatgagacccatccagc

SEQ ID NO: 857618 - DNA, 25 bp, Homo sapien
gtcacacagttatgccaagggctcc

SEQ ID NO: 857619 - DNA, 25 bp, Homo sapien
catcatgttctagagctttggagca

SEQ ID NO: 857620 - DNA, 25 bp, Homo sapien
ccccttactcagatggagacgtaca

SEQ ID NO: 857621 - DNA, 25 bp, Homo sapien
ttgaatcattactactgcaggacat

SEQ ID NO: 857622 - DNA, 25 bp, Homo sapien
acatttgaatcattactactgcagg

SEQ ID NO: 857623 - DNA, 25 bp, Homo sapien
aggtacatttgaatcattactactg

SEQ ID NO: 857624 - DNA, 25 bp, Homo sapien
catttgaatcattactactgcagga

SEQ ID NO: 857625 - DNA, 25 bp, Homo sapien
gcactctccaaaatgcacagctggg

SEQ ID NO: 857626 - DNA, 25 bp, Homo sapien
ttgctgggcctgacgtgcaaagccg

SEQ ID NO: 857627 - DNA, 25 bp, Homo sapien
cagatcaatagtgcccttgggttgc

SEQ ID NO: 857628 - DNA, 25 bp, Homo sapien
tcctgttcccatgcagtaggcagag

SEQ ID NO: 857629 - DNA, 25 bp, Homo sapien
gactgtagacacgtatgttcatgga

SEQ ID NO: 857630 - DNA, 25 bp, Homo sapien
ggatccaccgatgactaaatgagca

SEQ ID NO: 857631 - DNA, 25 bp, Homo sapien
ggagatcacagggatcgcgccattg

SEQ ID NO: 857632 - DNA, 25 bp, Homo sapien
gatcctccccgctaagatgaaggaa

SEQ ID NO: 857633 - DNA, 25 bp, Homo sapien
tcttgttgaatgaacagatctctga

SEQ ID NO: 857634 - DNA, 25 bp, Homo sapien
tcaattcttgttgaatgaacagatc

SEQ ID NO: 857635 - DNA, 25 bp, Homo sapien
gttgaatgaacagatctctgagttc

SEQ ID NO: 857636 - DNA, 25 bp, Homo sapien
tgaatgaacagatctctgagttcac

SEQ ID NO: 857637 - DNA, 25 bp, Homo sapien
gaagttgtctactttccagctgagg

SEQ ID NO: 857638 - DNA, 25 bp, Homo sapien
tgagggcacatgactaacgctaggg

SEQ ID NO: 857639 - DNA, 25 bp, Homo sapien
tgtgccacgctgacatgagaagttg

SEQ ID NO: 857640 - DNA, 25 bp, Homo sapien
gatgggcacagcgttatgtcaggac

SEQ ID NO: 857641 - DNA, 25 bp, Homo sapien
gccactttgatgatgctccttacga

SEQ ID NO: 857642 - DNA, 25 bp, Homo sapien
ccactttgatgatgctccttacgat

SEQ ID NO: 857643 - DNA, 25 bp, Homo sapien
ccatggctgtgtcagtttgttcaca

SEQ ID NO: 857644 - DNA, 25 bp, Homo sapien
tcagggacctgctgagttcatgtgt

SEQ ID NO: 857645 - DNA, 25 bp, Homo sapien
catggcattcgtgggtcacaggcag

SEQ ID NO: 857646 - DNA, 25 bp, Homo sapien
ggcagctctagcaccccgaggctgt

SEQ ID NO: 857647 - DNA, 25 bp, Homo sapien
ccaaaggtcacccaagtgatggagt

SEQ ID NO: 857648 - DNA, 25 bp, Homo sapien
tataccaaaggtcacccaagtgatg

SEQ ID NO: 857649 - DNA, 25 bp, Homo sapien
taccaaaggtcacccaagtgatgga

SEQ ID NO: 857650 - DNA, 25 bp, Homo sapien
tttataccaaaggtcacccaagtga

SEQ ID NO: 857651 - DNA, 25 bp, Homo sapien
gttttgggtatcaaccaacaggtga

SEQ ID NO: 857652 - DNA, 25 bp, Homo sapien
tgcaaattcttgtaagtcgcaagga

SEQ ID NO: 857653 - DNA, 25 bp, Homo sapien
ccaacaggtgaagtgtgcagtttaa

SEQ ID NO: 857654 - DNA, 25 bp, Homo sapien
gaggatgtcatgaagaagctttctt

SEQ ID NO: 857655 - DNA, 25 bp, Homo sapien
cacagcagatgctcatttgcctaag

SEQ ID NO: 857656 - DNA, 25 bp, Homo sapien
ttacttggaccgatttccatgaaca

SEQ ID NO: 857657 - DNA, 25 bp, Homo sapien
gcagatgctcatttgcctaagtggg

SEQ ID NO: 857658 - DNA, 25 bp, Homo sapien
tggaccgatttccatgaacacagca

SEQ ID NO: 857659 - DNA, 25 bp, Homo sapien
gaaattcgcattttatgtcgggaaa

SEQ ID NO: 857660 - DNA, 25 bp, Homo sapien
cctcttcagcttggaaattcgcatt

SEQ ID NO: 857661 - DNA, 25 bp, Homo sapien
tgtcgggaaaagttaaactgctcca

SEQ ID NO: 857662 - DNA, 25 bp, Homo sapien
tgggctctagatccgctcctcttca

SEQ ID NO: 857663 - DNA, 25 bp, Homo sapien
aaggaaatgagggctgggctctgtg

SEQ ID NO: 857664 - DNA, 25 bp, Homo sapien
gaaatgagggctgggctctgtgagg

SEQ ID NO: 857665 - DNA, 25 bp, Homo sapien
aaatgagggctgggctctgtgaggt

SEQ ID NO: 857666 - DNA, 25 bp, Homo sapien
ctgcaaggaaatgagggctgggctc

SEQ ID NO: 857667 - DNA, 25 bp, Homo sapien
catgcaagcccttgattgagtcata

SEQ ID NO: 857668 - DNA, 25 bp, Homo sapien
ccttgattgagtcataagaaaagca

SEQ ID NO: 857669 - DNA, 25 bp, Homo sapien
caagcccttgattgagtcataagaa

SEQ ID NO: 857670 - DNA, 25 bp, Homo sapien
gcccttgattgagtcataagaaaag

SEQ ID NO: 857671 - DNA, 25 bp, Homo sapien
cacgaaaaagtagcagagggatctc

SEQ ID NO: 857672 - DNA, 25 bp, Homo sapien
tagcagagggatctcggaatcatca

SEQ ID NO: 857673 - DNA, 25 bp, Homo sapien
tctcggaatcatcaggcagcctctg

SEQ ID NO: 857674 - DNA, 25 bp, Homo sapien
ctaagacgcatgaggcacgaaaaag

SEQ ID NO: 857675 - DNA, 25 bp, Homo sapien
tttccttcacctgcaaacaccttcc

SEQ ID NO: 857676 - DNA, 25 bp, Homo sapien
ttttccttcacctgcaaacaccttc

SEQ ID NO: 857677 - DNA, 25 bp, Homo sapien
cttttccttcacctgcaaacacctt

SEQ ID NO: 857678 - DNA, 25 bp, Homo sapien
tgctttgcgtccagatgcacctgtg

SEQ ID NO: 857679 - DNA, 25 bp, Homo sapien
tctgcagagtagctctcgccagggc

SEQ ID NO: 857680 - DNA, 25 bp, Homo sapien
tgccgtgagctgtcctagggaagac

SEQ ID NO: 857681 - DNA, 25 bp, Homo sapien
caactgtgcgtgttggcgagttcca

SEQ ID NO: 857682 - DNA, 25 bp, Homo sapien
agcaaggctgatcagttatttgcac

SEQ ID NO: 857683 - DNA, 25 bp, Homo sapien
cgcctgtaaattcctggacagcaag

SEQ ID NO: 857684 - DNA, 25 bp, Homo sapien
acgcctgtaaattcctggacagcaa

SEQ ID NO: 857685 - DNA, 25 bp, Homo sapien
acagcaaggctgatcagttatttgc

SEQ ID NO: 857686 - DNA, 25 bp, Homo sapien
gggcggtactgaacatccatctgct

SEQ ID NO: 857687 - DNA, 25 bp, Homo sapien
ccttggctcggtcacaggactcttg

SEQ ID NO: 857688 - DNA, 25 bp, Homo sapien
tataggaccacaatccaaaggaatc

SEQ ID NO: 857689 - DNA, 25 bp, Homo sapien
gctccatccggtacttttgcagctg

SEQ ID NO: 857690 - DNA, 25 bp, Homo sapien
ggccttcctcaaaccgcactactgt

SEQ ID NO: 857691 - DNA, 25 bp, Homo sapien
tcatgatgctcgtccatctcctatc

SEQ ID NO: 857692 - DNA, 25 bp, Homo sapien
agccctgagtttcgctgtctctttt

SEQ ID NO: 857693 - DNA, 25 bp, Homo sapien
ccagtctcccttctgaatggtgatt

SEQ ID NO: 857694 - DNA, 25 bp, Homo sapien
ttttggagagctagtcatccattca

SEQ ID NO: 857695 - DNA, 25 bp, Homo sapien
tttggagagctagtcatccattcag

SEQ ID NO: 857696 - DNA, 25 bp, Homo sapien
tggagagctagtcatccattcaggc

SEQ ID NO: 857697 - DNA, 25 bp, Homo sapien
ttggagagctagtcatccattcagg

SEQ ID NO: 857698 - DNA, 25 bp, Homo sapien
tatcagtctttctagtgtgactttc

SEQ ID NO: 857699 - DNA, 25 bp, Homo sapien
cttatcagtctttctagtgtgactt

SEQ ID NO: 857700 - DNA, 25 bp, Homo sapien
acctcaagggtctgaaaacttatca

SEQ ID NO: 857701 - DNA, 25 bp, Homo sapien
caacctcaagggtctgaaaacttat

SEQ ID NO: 857702 - DNA, 25 bp, Homo sapien
gaagcttttcaacgccacgagaggg

SEQ ID NO: 857703 - DNA, 25 bp, Homo sapien
tgtgaaagattctccaacaactgag

SEQ ID NO: 857704 - DNA, 25 bp, Homo sapien
atgattcgtctttgattccaccctc

SEQ ID NO: 857705 - DNA, 25 bp, Homo sapien
catcccatctgtcactacgtcagga

SEQ ID NO: 857706 - DNA, 25 bp, Homo sapien
gctgctgtcctgtcaggctgaagtt

SEQ ID NO: 857707 - DNA, 25 bp, Homo sapien
acagtggctcctaggagctcctgga

SEQ ID NO: 857708 - DNA, 25 bp, Homo sapien
cagtggctcctaggagctcctggag

SEQ ID NO: 857709 - DNA, 25 bp, Homo sapien
gtcctgtcaggctgaagttagatgc

SEQ ID NO: 857710 - DNA, 25 bp, Homo sapien
cgaggtcagctaatggactagtcac

SEQ ID NO: 857711 - DNA, 25 bp, Homo sapien
gcaacaatgtgacaacggaccaact

SEQ ID NO: 857712 - DNA, 25 bp, Homo sapien
cactgatgttaggttggacacgagc

SEQ ID NO: 857713 - DNA, 25 bp, Homo sapien
tgaacagccctgtgttcgacgagcc

SEQ ID NO: 857714 - DNA, 25 bp, Homo sapien
taaataggcccaacaagtgctttgt

SEQ ID NO: 857715 - DNA, 25 bp, Homo sapien
caatgtgcccgatcctttgcagatg

SEQ ID NO: 857716 - DNA, 25 bp, Homo sapien
tttgccttggacagaaaaagcccac

SEQ ID NO: 857717 - DNA, 25 bp, Homo sapien
tttaagacggtcaggctccaatgtg

SEQ ID NO: 857718 - DNA, 25 bp, Homo sapien
tttatccctagtgcactgaatatgc

SEQ ID NO: 857719 - DNA, 25 bp, Homo sapien
aaatgaaggaccattctagcttggg

SEQ ID NO: 857720 - DNA, 25 bp, Homo sapien
ctgtgtgttcagcaaaggctggccg

SEQ ID NO: 857721 - DNA, 25 bp, Homo sapien
gacacattggccactttatccctag

SEQ ID NO: 857722 - DNA, 25 bp, Homo sapien
tctgctgggtcctccgatggtgact

SEQ ID NO: 857723 - DNA, 25 bp, Homo sapien
ctgctgggtcctccgatggtgactg

SEQ ID NO: 857724 - DNA, 25 bp, Homo sapien
ctgggtcctccgatggtgactgacc

SEQ ID NO: 857725 - DNA, 25 bp, Homo sapien
gctgggtcctccgatggtgactgac

SEQ ID NO: 857726 - DNA, 25 bp, Homo sapien
cggagctccgcggactggtccactc

SEQ ID NO: 857727 - DNA, 25 bp, Homo sapien
agacccccggagctccgcggactgg

SEQ ID NO: 857728 - DNA, 25 bp, Homo sapien
cacacacccctggagcattcagacc

SEQ ID NO: 857729 - DNA, 25 bp, Homo sapien
ggagcattcagacccccggagctcc

SEQ ID NO: 857730 - DNA, 25 bp, Homo sapien
actttctgatgggtcgcaaccagga

SEQ ID NO: 857731 - DNA, 25 bp, Homo sapien
caaaccagaggacagtggtatccac

SEQ ID NO: 857732 - DNA, 25 bp, Homo sapien
gcaggcaaaccagaggacagtggta

SEQ ID NO: 857733 - DNA, 25 bp, Homo sapien
tttctgatgggtcgcaaccaggagg

SEQ ID NO: 857734 - DNA, 25 bp, Homo sapien
ctgcttcccgcacacgttggcaagg

SEQ ID NO: 857735 - DNA, 25 bp, Homo sapien
agctggagtccggcttctggcatac

SEQ ID NO: 857736 - DNA, 25 bp, Homo sapien
aggaagctggagtccggcttctggc

SEQ ID NO: 857737 - DNA, 25 bp, Homo sapien
tggggtcctgcttcccgcacacgtt

SEQ ID NO: 857738 - DNA, 25 bp, Homo sapien
gggcggggctggccactgcgaggct

SEQ ID NO: 857739 - DNA, 25 bp, Homo sapien
ggcaaaactgtctgagggcggggat

SEQ ID NO: 857740 - DNA, 25 bp, Homo sapien
ggtggggcttagaagggccagagcc

SEQ ID NO: 857741 - DNA, 25 bp, Homo sapien
gcagggggcgggactgcctgagggt

SEQ ID NO: 857742 - DNA, 25 bp, Homo sapien
gggcttgctgggggactggctctgg

SEQ ID NO: 857743 - DNA, 25 bp, Homo sapien
taagagattcactctggctggagga

SEQ ID NO: 857744 - DNA, 25 bp, Homo sapien
gagattcactctggctggaggaggc

SEQ ID NO: 857745 - DNA, 25 bp, Homo sapien
ttcactctggctggaggaggcccac

SEQ ID NO: 857746 - DNA, 25 bp, Homo sapien
gattcactctggctggaggaggccc

SEQ ID NO: 857747 - DNA, 25 bp, Homo sapien
ggctgcgtgctccagactggtccct

SEQ ID NO: 857748 - DNA, 25 bp, Homo sapien
ctgcgtgctccagactggtcccttg

SEQ ID NO: 857749 - DNA, 25 bp, Homo sapien
ggactgtgaattactcaggatggct

SEQ ID NO: 857750 - DNA, 25 bp, Homo sapien
tggactgtgaattactcaggatggc

SEQ ID NO: 857751 - DNA, 25 bp, Homo sapien
ctcctggaacatcagtgtgtggact

SEQ ID NO: 857752 - DNA, 25 bp, Homo sapien
tcctggaacatcagtgtgtggactc

SEQ ID NO: 857753 - DNA, 25 bp, Homo sapien
cctggaacatcagtgtgtggactca

SEQ ID NO: 857754 - DNA, 25 bp, Homo sapien
catctgatagcctggaattgacatg

SEQ ID NO: 857755 - DNA, 25 bp, Homo sapien
ggctctccatagtgatctgatggca

SEQ ID NO: 857756 - DNA, 25 bp, Homo sapien
tctgatggcagtgggtaggacggat

SEQ ID NO: 857757 - DNA, 25 bp, Homo sapien
aattctgtgattaaactgacaatga

SEQ ID NO: 857758 - DNA, 25 bp, Homo sapien
ttgctggtggaagagacctccactt

SEQ ID NO: 857759 - DNA, 25 bp, Homo sapien
gttgagcacacctgtggacattcag

SEQ ID NO: 857760 - DNA, 25 bp, Homo sapien
cagctgaatttagcagttgagcaca

SEQ ID NO: 857761 - DNA, 25 bp, Homo sapien
tccacttgttgagccctttttgtga

SEQ ID NO: 857762 - DNA, 25 bp, Homo sapien
tgaccgggatctgatggaggctcag

SEQ ID NO: 857763 - DNA, 25 bp, Homo sapien
ttgaaagggacttggatgacagctg

SEQ ID NO: 857764 - DNA, 25 bp, Homo sapien
tctgtcccttgtacactcctagtga

SEQ ID NO: 857765 - DNA, 25 bp, Homo sapien
cagctgacaatctgtcccttgtaca

SEQ ID NO: 857766 - DNA, 25 bp, Homo sapien
cactaatggctcaaaatgaagtggc

SEQ ID NO: 857767 - DNA, 25 bp, Homo sapien
gatgctcttggcttaacatcctcca

SEQ ID NO: 857768 - DNA, 25 bp, Homo sapien
tctaactgcacgtttgtacccacta

SEQ ID NO: 857769 - DNA, 25 bp, Homo sapien
tgtgtagaaagggaaacacttgtgc

SEQ ID NO: 857770 - DNA, 25 bp, Homo sapien
cgaggagggacaatcacttagaacc

SEQ ID NO: 857771 - DNA, 25 bp, Homo sapien
gcaaatggaagcacaggatcaccct

SEQ ID NO: 857772 - DNA, 25 bp, Homo sapien
ggttgcaaatcaccctgctgtggct

SEQ ID NO: 857773 - DNA, 25 bp, Homo sapien
taatgacagggccatacagatcagg

SEQ ID NO: 857774 - DNA, 25 bp, Homo sapien
tgggtgttacaccaagccctgtggt

SEQ ID NO: 857775 - DNA, 25 bp, Homo sapien
tgcatgtgggtgttacaccaagccc

SEQ ID NO: 857776 - DNA, 25 bp, Homo sapien
gaatgatgctattccccggcagctc

SEQ ID NO: 857777 - DNA, 25 bp, Homo sapien
ctgtggtcctccgttggtggaatga

SEQ ID NO: 857778 - DNA, 25 bp, Homo sapien
ttttgtgacttcctgtcctcgtcca

SEQ ID NO: 857779 - DNA, 25 bp, Homo sapien
aggctgtagaaggttcttcctcctg

SEQ ID NO: 857780 - DNA, 25 bp, Homo sapien
caggctgtagaaggttcttcctcct

SEQ ID NO: 857781 - DNA, 25 bp, Homo sapien
ggctgtagaaggttcttcctcctgg

SEQ ID NO: 857782 - DNA, 25 bp, Homo sapien
acaagccccgctgctcggactccat

SEQ ID NO: 857783 - DNA, 25 bp, Homo sapien
agcatgcagatctcacactcacggg

SEQ ID NO: 857784 - DNA, 25 bp, Homo sapien
actcacggggagacaagccccgctg

SEQ ID NO: 857785 - DNA, 25 bp, Homo sapien
ggagacaagccccgctgctcggact

SEQ ID NO: 857786 - DNA, 25 bp, Homo sapien
gagctagccgtgtgggatgaattat

SEQ ID NO: 857787 - DNA, 25 bp, Homo sapien
aaatttttcccctgaagcgatggtg

SEQ ID NO: 857788 - DNA, 25 bp, Homo sapien
cagaagacggccaagtgcttttcaa

SEQ ID NO: 857789 - DNA, 25 bp, Homo sapien
cacaagaatgggactagcgccctta

SEQ ID NO: 857790 - DNA, 25 bp, Homo sapien
accatgcagtggtctgtggactgca

SEQ ID NO: 857791 - DNA, 25 bp, Homo sapien
agcaccatgcagtggtctgtggact

SEQ ID NO: 857792 - DNA, 25 bp, Homo sapien
ccatgcagtggtctgtggactgcat

SEQ ID NO: 857793 - DNA, 25 bp, Homo sapien
aagcaccatgcagtggtctgtggac

SEQ ID NO: 857794 - DNA, 25 bp, Homo sapien
gaagaaaggaagagggcttgccaca

SEQ ID NO: 857795 - DNA, 25 bp, Homo sapien
atgtgggcaagtccctgcgtgtcag

SEQ ID NO: 857796 - DNA, 25 bp, Homo sapien
taggcaccagcgtgcacatcgatga

SEQ ID NO: 857797 - DNA, 25 bp, Homo sapien
cagggacccacaggcgtgtcatgaa

SEQ ID NO: 857798 - DNA, 25 bp, Homo sapien
ggatggtgtggtcggagctgctcag

SEQ ID NO: 857799 - DNA, 25 bp, Homo sapien
gaggatggtgtggtcggagctgctc

SEQ ID NO: 857800 - DNA, 25 bp, Homo sapien
aggatggtgtggtcggagctgctca

SEQ ID NO: 857801 - DNA, 25 bp, Homo sapien
taatttttgacataaggcaatttct

SEQ ID NO: 857802 - DNA, 25 bp, Homo sapien
cccaactcacacctggtgccctcac

SEQ ID NO: 857803 - DNA, 25 bp, Homo sapien
gaaccatgatgagcgatttctgata

SEQ ID NO: 857804 - DNA, 25 bp, Homo sapien
atttctgatatttaggtgaaatcag

SEQ ID NO: 857805 - DNA, 25 bp, Homo sapien
tcagcatcacggctgtaagaacaag

SEQ ID NO: 857806 - DNA, 25 bp, Homo sapien
caatcgtacttccagaaaaagggca

SEQ ID NO: 857807 - DNA, 25 bp, Homo sapien
gacatcagagttagagttggcacgc

SEQ ID NO: 857808 - DNA, 25 bp, Homo sapien
taatgcccagggtatgatgtgcccg

SEQ ID NO: 857809 - DNA, 25 bp, Homo sapien
tatggcaagtgactaccaaagcggc

SEQ ID NO: 857810 - DNA, 25 bp, Homo sapien
ggtgctacatcgttaacaacagtgc

SEQ ID NO: 857811 - DNA, 25 bp, Homo sapien
gctgctctgactggtggctactgag

SEQ ID NO: 857812 - DNA, 25 bp, Homo sapien
gatattaacatgattctggagtctg

SEQ ID NO: 857813 - DNA, 25 bp, Homo sapien
taccagtgacgggaaggtgctacat

SEQ ID NO: 857814 - DNA, 25 bp, Homo sapien
tggagagctccacaagttgactagc

SEQ ID NO: 857815 - DNA, 25 bp, Homo sapien
tactgcaccgaacactgagaaaagc

SEQ ID NO: 857816 - DNA, 25 bp, Homo sapien
gacggaagagttctacagtgctatc

SEQ ID NO: 857817 - DNA, 25 bp, Homo sapien
cacagattcggtgacttttagctca

SEQ ID NO: 857818 - DNA, 25 bp, Homo sapien
taacccagcaatacccaaattacat

SEQ ID NO: 857819 - DNA, 25 bp, Homo sapien
ttacatcattgatgcagacccattt

SEQ ID NO: 857820 - DNA, 25 bp, Homo sapien
tgtgctcctgtataacccagcaata

SEQ ID NO: 857821 - DNA, 25 bp, Homo sapien
tacccaaattacatcattgatgcag

SEQ ID NO: 857822 - DNA, 25 bp, Homo sapien
tcctctgcagcgcacccataatcat

SEQ ID NO: 857823 - DNA, 25 bp, Homo sapien
tttgtgccccgaatttgtgctctga

SEQ ID NO: 857824 - DNA, 25 bp, Homo sapien
cattaactcagtcctctgcagcgca

SEQ ID NO: 857825 - DNA, 25 bp, Homo sapien
ctgatgggattccattaactcagtc

SEQ ID NO: 857826 - DNA, 25 bp, Homo sapien
gcctctagtttggactcattgcttt

SEQ ID NO: 857827 - DNA, 25 bp, Homo sapien
aaaaatcttccgtgcctctagtttg

SEQ ID NO: 857828 - DNA, 25 bp, Homo sapien
gactttcatgaacttaattctcctg

SEQ ID NO: 857829 - DNA, 25 bp, Homo sapien
tcatgaacttaattctcctgaatcc

SEQ ID NO: 857830 - DNA, 25 bp, Homo sapien
tactctgattttgtaccttagcaga

SEQ ID NO: 857831 - DNA, 25 bp, Homo sapien
tatgcaatttggcagaagaactctg

SEQ ID NO: 857832 - DNA, 25 bp, Homo sapien
gaacatatgcaatttggcagaagaa

SEQ ID NO: 857833 - DNA, 25 bp, Homo sapien
ttgtggcttatctgagatactctga

SEQ ID NO: 857834 - DNA, 25 bp, Homo sapien
caaaggcaaagatatggtcaaacta

SEQ ID NO: 857835 - DNA, 25 bp, Homo sapien
ttcagatgctgtttcgcccttgaac

SEQ ID NO: 857836 - DNA, 25 bp, Homo sapien
taagtttcatgtcaggaagaaggta

SEQ ID NO: 857837 - DNA, 25 bp, Homo sapien
tgtttcgcccttgaactgatgttta

SEQ ID NO: 857838 - DNA, 25 bp, Homo sapien
aaatggataaagatagggtcagtca

SEQ ID NO: 857839 - DNA, 25 bp, Homo sapien
caggctttgacttcaaagcaacagc

SEQ ID NO: 857840 - DNA, 25 bp, Homo sapien
gggtcagtcaaatgcaacgtctttt

SEQ ID NO: 857841 - DNA, 25 bp, Homo sapien
gcccagaggcattctcaggctttga

SEQ ID NO: 857842 - DNA, 25 bp, Homo sapien
caatgatcgtttccacagtgcttcc

SEQ ID NO: 857843 - DNA, 25 bp, Homo sapien
tttgaccataaccatgttgttctcc

SEQ ID NO: 857844 - DNA, 25 bp, Homo sapien
tgttctccaaaacgtcttagttcat

SEQ ID NO: 857845 - DNA, 25 bp, Homo sapien
tgtccctggtgatcatttgaccata

SEQ ID NO: 857846 - DNA, 25 bp, Homo sapien
aaagagcgagcgtctgaaagatgca

SEQ ID NO: 857847 - DNA, 25 bp, Homo sapien
ttgcaccttgcacactgaacgcggt

SEQ ID NO: 857848 - DNA, 25 bp, Homo sapien
tcaaggatgatccagatggagcgcc

SEQ ID NO: 857849 - DNA, 25 bp, Homo sapien
tggagcgccctttacccaaattgaa

SEQ ID NO: 857850 - DNA, 25 bp, Homo sapien
atctcccaggactgcctaaggctcc

SEQ ID NO: 857851 - DNA, 25 bp, Homo sapien
tgagacccgaccctgcccattccgc

SEQ ID NO: 857852 - DNA, 25 bp, Homo sapien
ttccgggtttccatgcctgtttcca

SEQ ID NO: 857853 - DNA, 25 bp, Homo sapien
gaggtagggcgttggcttcatctcc

SEQ ID NO: 857854 - DNA, 25 bp, Homo sapien
tcgcgagtctccgctggcgactctg

SEQ ID NO: 857855 - DNA, 25 bp, Homo sapien
taaagcgagggaaatgcctaggccc

SEQ ID NO: 857856 - DNA, 25 bp, Homo sapien
tattttgctttctctccggttccca

SEQ ID NO: 857857 - DNA, 25 bp, Homo sapien
cacgtacggcctaatcaaagagatt

SEQ ID NO: 857858 - DNA, 25 bp, Homo sapien
gtgaacctctggtacagcgaagcca

SEQ ID NO: 857859 - DNA, 25 bp, Homo sapien
tgaacctctggtacagcgaagccat

SEQ ID NO: 857860 - DNA, 25 bp, Homo sapien
catcgctccgcgcctggtactggaa

SEQ ID NO: 857861 - DNA, 25 bp, Homo sapien
ctccgcgcctggtactggaaccggg

SEQ ID NO: 857862 - DNA, 25 bp, Homo sapien
gtcaccatcgctccgcgcctggtac

SEQ ID NO: 857863 - DNA, 25 bp, Homo sapien
caggaggtgactcgcctccgggggc

SEQ ID NO: 857864 - DNA, 25 bp, Homo sapien
ggaacgtaaggcgaattccagatcc

SEQ ID NO: 857865 - DNA, 25 bp, Homo sapien
aacgtaaggcgaattccagatccca

SEQ ID NO: 857866 - DNA, 25 bp, Homo sapien
ccagggaacgtaaggcgaattccag

SEQ ID NO: 857867 - DNA, 25 bp, Homo sapien
cgtaaggcgaattccagatcccagc

SEQ ID NO: 857868 - DNA, 25 bp, Homo sapien
gggcaacattgcaactctccatgct

SEQ ID NO: 857869 - DNA, 25 bp, Homo sapien
agggcaacattgcaactctccatgc

SEQ ID NO: 857870 - DNA, 25 bp, Homo sapien
ggcaacattgcaactctccatgctc

SEQ ID NO: 857871 - DNA, 25 bp, Homo sapien
acccagtccctgaggaaaacctgag

SEQ ID NO: 857872 - DNA, 25 bp, Homo sapien
gggcctctatgccactgatgtccgt

SEQ ID NO: 857873 - DNA, 25 bp, Homo sapien
tgccactgatgtccgtggaacacag

SEQ ID NO: 857874 - DNA, 25 bp, Homo sapien
gaaaacctgagtccaactcagggcc

SEQ ID NO: 857875 - DNA, 25 bp, Homo sapien
taacactgatgtatctcaggcctct

SEQ ID NO: 857876 - DNA, 25 bp, Homo sapien
tggcccatgggtaattcacttattg

SEQ ID NO: 857877 - DNA, 25 bp, Homo sapien
cagagggccgtctttgtttacagtg

SEQ ID NO: 857878 - DNA, 25 bp, Homo sapien
gacagcatgtatattagaggcaagc

SEQ ID NO: 857879 - DNA, 25 bp, Homo sapien
ccctgattgagacgttttgtttgct

SEQ ID NO: 857880 - DNA, 25 bp, Homo sapien
gcaaaccctgattgagacgttttgt

SEQ ID NO: 857881 - DNA, 25 bp, Homo sapien
ccctggcaaaccctgattgagacgt

SEQ ID NO: 857882 - DNA, 25 bp, Homo sapien
tggcaaaccctgattgagacgtttt

SEQ ID NO: 857883 - DNA, 25 bp, Homo sapien
aaaacaccacacttgcgtgcaagag

SEQ ID NO: 857884 - DNA, 25 bp, Homo sapien
aacaaacgggcacaggttccaggct

SEQ ID NO: 857885 - DNA, 25 bp, Homo sapien
tcagcacagcctaataacccttggt

SEQ ID NO: 857886 - DNA, 25 bp, Homo sapien
tgtgcaatgaaaaacaccacacttg

SEQ ID NO: 857887 - DNA, 25 bp, Homo sapien
aagcccttgggctcattagcatggt

SEQ ID NO: 857888 - DNA, 25 bp, Homo sapien
agcccttgggctcattagcatggtg

SEQ ID NO: 857889 - DNA, 25 bp, Homo sapien
agcccaagcccttgggctcattagc

SEQ ID NO: 857890 - DNA, 25 bp, Homo sapien
ccaagcccttgggctcattagcatg

SEQ ID NO: 857891 - DNA, 25 bp, Homo sapien
tgtggcttccgacagttgctttcct

SEQ ID NO: 857892 - DNA, 25 bp, Homo sapien
ggcctgtggcttccgacagttgctt

SEQ ID NO: 857893 - DNA, 25 bp, Homo sapien
ggcttccgacagttgctttccttca

SEQ ID NO: 857894 - DNA, 25 bp, Homo sapien
cctgtggcttccgacagttgctttc

SEQ ID NO: 857895 - DNA, 25 bp, Homo sapien
cagacaaccatacccgtgggaagag

SEQ ID NO: 857896 - DNA, 25 bp, Homo sapien
caaccatacccgtgggaagagccat

SEQ ID NO: 857897 - DNA, 25 bp, Homo sapien
ctgtgccagacaaccatacccgtgg

SEQ ID NO: 857898 - DNA, 25 bp, Homo sapien
gtgccagacaaccatacccgtggga

SEQ ID NO: 857899 - DNA, 25 bp, Homo sapien
agtcacagtcgtcatgtctcacagt

SEQ ID NO: 857900 - DNA, 25 bp, Homo sapien
ggagggtggatgaaccctggattct

SEQ ID NO: 857901 - DNA, 25 bp, Homo sapien
agttgctggcaggaactgcgtgagc

SEQ ID NO: 857902 - DNA, 25 bp, Homo sapien
aactgcgtgagcgtgtgggtccccc

SEQ ID NO: 857903 - DNA, 25 bp, Homo sapien
aggagcaaaggagacgacaggagga

SEQ ID NO: 857904 - DNA, 25 bp, Homo sapien
ggagcaaaggagacgacaggaggaa

SEQ ID NO: 857905 - DNA, 25 bp, Homo sapien
gaggagcaaaggagacgacaggagg

SEQ ID NO: 857906 - DNA, 25 bp, Homo sapien
gtatagaaaagtactcgtccttgag

SEQ ID NO: 857907 - DNA, 25 bp, Homo sapien
tcttgtgtaaaggtaagtatagaaa

SEQ ID NO: 857908 - DNA, 25 bp, Homo sapien
tgggcacggccgacacttaagtgaa

SEQ ID NO: 857909 - DNA, 25 bp, Homo sapien
tgtgatcacagatataggtccaggg

SEQ ID NO: 857910 - DNA, 25 bp, Homo sapien
caggagttggctagatattttaaca

SEQ ID NO: 857911 - DNA, 25 bp, Homo sapien
catgttctttcgtgtgtcaagcgaa

SEQ ID NO: 857912 - DNA, 25 bp, Homo sapien
tcaagcgaaaacacagttgctatgg

SEQ ID NO: 857913 - DNA, 25 bp, Homo sapien
cactaagtgctttgttgagctctaa

SEQ ID NO: 857914 - DNA, 25 bp, Homo sapien
caagaataggtagcgcaggtgggcc

SEQ ID NO: 857915 - DNA, 25 bp, Homo sapien
caggaacatcgaagggtccatctgg

SEQ ID NO: 857916 - DNA, 25 bp, Homo sapien
gccatcgtgcagttgtaaatactag

SEQ ID NO: 857917 - DNA, 25 bp, Homo sapien
tgtgtttgcaacacaaattctaagt

SEQ ID NO: 857918 - DNA, 25 bp, Homo sapien
ctattctccttcagaacttccatgt

SEQ ID NO: 857919 - DNA, 25 bp, Homo sapien
gccaacgcacccaaggcatcttttt

SEQ ID NO: 857920 - DNA, 25 bp, Homo sapien
aattaaggagccatgatatttgttc

SEQ ID NO: 857921 - DNA, 25 bp, Homo sapien
aaggagccatgatatttgttctgaa

SEQ ID NO: 857922 - DNA, 25 bp, Homo sapien
agccaacgcacccaaggcatctttt

SEQ ID NO: 857923 - DNA, 25 bp, Homo sapien
aatccctggagctcaatgctgtaag

SEQ ID NO: 857924 - DNA, 25 bp, Homo sapien
tatgagcccctatccttacatggag

SEQ ID NO: 857925 - DNA, 25 bp, Homo sapien
tgagcaaggcccctaggagatctgt

SEQ ID NO: 857926 - DNA, 25 bp, Homo sapien
tggaggctcccacaatagggccatt

SEQ ID NO: 857927 - DNA, 25 bp, Homo sapien
cagcagcagcatgagtggccactga

SEQ ID NO: 857928 - DNA, 25 bp, Homo sapien
gctcagccttttcaccagaatgtca

SEQ ID NO: 857929 - DNA, 25 bp, Homo sapien
tgtttgctcagccttttcaccagaa

SEQ ID NO: 857930 - DNA, 25 bp, Homo sapien
agcagcagcatgagtggccactgaa

SEQ ID NO: 857931 - DNA, 25 bp, Homo sapien
tgggttgtcagtgagctccatcgca

SEQ ID NO: 857932 - DNA, 25 bp, Homo sapien
tgcctgggttgtcagtgagctccat

SEQ ID NO: 857933 - DNA, 25 bp, Homo sapien
agtgagctccatcgcacccttcatt

SEQ ID NO: 857934 - DNA, 25 bp, Homo sapien
ttgtcagtgagctccatcgcaccct

SEQ ID NO: 857935 - DNA, 25 bp, Homo sapien
caggcaaggcggagaccaaaagaac

SEQ ID NO: 857936 - DNA, 25 bp, Homo sapien
caaggcggagaccaaaagaaccctg

SEQ ID NO: 857937 - DNA, 25 bp, Homo sapien
ggccccaggcaaggcggagaccaaa

SEQ ID NO: 857938 - DNA, 25 bp, Homo sapien
ccccaggcaaggcggagaccaaaag

SEQ ID NO: 857939 - DNA, 25 bp, Homo sapien
ttcttcaggggtttagtgccctcca

SEQ ID NO: 857940 - DNA, 25 bp, Homo sapien
acaatcataacacgcccacacaggg

SEQ ID NO: 857941 - DNA, 25 bp, Homo sapien
tccttgttctacaatcataacacgc

SEQ ID NO: 857942 - DNA, 25 bp, Homo sapien
acactgagtactggagggtcccctc

SEQ ID NO: 857943 - DNA, 25 bp, Homo sapien
ttgacttgtgtgactgcccacactt

SEQ ID NO: 857944 - DNA, 25 bp, Homo sapien
cttgacttgtgtgactgcccacact

SEQ ID NO: 857945 - DNA, 25 bp, Homo sapien
ctccttcctccactcctgcctcatg

SEQ ID NO: 857946 - DNA, 25 bp, Homo sapien
tctccttcctccactcctgcctcat

SEQ ID NO: 857947 - DNA, 25 bp, Homo sapien
tccttcctccactcctgcctcatgc

SEQ ID NO: 857948 - DNA, 25 bp, Homo sapien
ctctccttcctccactcctgcctca

SEQ ID NO: 857949 - DNA, 25 bp, Homo sapien
gccctcagtgggccatattacaggg

SEQ ID NO: 857950 - DNA, 25 bp, Homo sapien
tctgagctctatgaagtaccctcac

SEQ ID NO: 857951 - DNA, 25 bp, Homo sapien
ggttgcctttgagggcacaaaggca

SEQ ID NO: 857952 - DNA, 25 bp, Homo sapien
ctttgagggcacaaaggcatttgtc

SEQ ID NO: 857953 - DNA, 25 bp, Homo sapien
catgagctgatgagtggcagaaggg

SEQ ID NO: 857954 - DNA, 25 bp, Homo sapien
ggaggatgggcagagggaggagagt

SEQ ID NO: 857955 - DNA, 25 bp, Homo sapien
ggaggaggaggatgggcagagggag

SEQ ID NO: 857956 - DNA, 25 bp, Homo sapien
ctgatggtcagagggaggaggagga

SEQ ID NO: 857957 - DNA, 25 bp, Homo sapien
tgatggtcagagggaggaggaggat

SEQ ID NO: 857958 - DNA, 25 bp, Homo sapien
aaaacagtgcccgaggatctgtccc

SEQ ID NO: 857959 - DNA, 25 bp, Homo sapien
cactccacggctgctggtatgagga

SEQ ID NO: 857960 - DNA, 25 bp, Homo sapien
ttgccagtccaggtgtccgaccctt

SEQ ID NO: 857961 - DNA, 25 bp, Homo sapien
gatacgattctgatttttcggacag

SEQ ID NO: 857962 - DNA, 25 bp, Homo sapien
tggacctgcaggtgtattggctgtc

SEQ ID NO: 857963 - DNA, 25 bp, Homo sapien
gggtggacctgcaggtgtattggct

SEQ ID NO: 857964 - DNA, 25 bp, Homo sapien
gacctgcaggtgtattggctgtcag

SEQ ID NO: 857965 - DNA, 25 bp, Homo sapien
acctgcaggtgtattggctgtcagc

SEQ ID NO: 857966 - DNA, 25 bp, Homo sapien
ttggatccccactgggatgggaaac

SEQ ID NO: 857967 - DNA, 25 bp, Homo sapien
ggacatgctttggatccccactggg

SEQ ID NO: 857968 - DNA, 25 bp, Homo sapien
ccaggacatgctttggatccccact

SEQ ID NO: 857969 - DNA, 25 bp, Homo sapien
ccaatgcccaggacatgctttggat

SEQ ID NO: 857970 - DNA, 25 bp, Homo sapien
gctctaggtctctaaattaacagtc

SEQ ID NO: 857971 - DNA, 25 bp, Homo sapien
gtacctcttgttcagcaacaatgca

SEQ ID NO: 857972 - DNA, 25 bp, Homo sapien
tagaagaacccctccaagatctgaa

SEQ ID NO: 857973 - DNA, 25 bp, Homo sapien
gcaatcatctcatattggtttaacc

SEQ ID NO: 857974 - DNA, 25 bp, Homo sapien
gggtgaagcaaaagctccagagtgt

SEQ ID NO: 857975 - DNA, 25 bp, Homo sapien
tgaagcaaaagctccagagtgtgcc

SEQ ID NO: 857976 - DNA, 25 bp, Homo sapien
ctgggtgaagcaaaagctccagagt

SEQ ID NO: 857977 - DNA, 25 bp, Homo sapien
ggtgaagcaaaagctccagagtgtg

SEQ ID NO: 857978 - DNA, 25 bp, Homo sapien
gttccactcaacactagcaacatac

SEQ ID NO: 857979 - DNA, 25 bp, Homo sapien
caggtgtcgagtttgactccgtacc

SEQ ID NO: 857980 - DNA, 25 bp, Homo sapien
cactcaacactagcaacatacagat

SEQ ID NO: 857981 - DNA, 25 bp, Homo sapien
acagattccaggtgttaaattccac

SEQ ID NO: 857982 - DNA, 25 bp, Homo sapien
gctcagtagagagcgggcctgagct

SEQ ID NO: 857983 - DNA, 25 bp, Homo sapien
gaaggctcagtagagagcgggcctg

SEQ ID NO: 857984 - DNA, 25 bp, Homo sapien
gtggaaggctcagtagagagcgggc

SEQ ID NO: 857985 - DNA, 25 bp, Homo sapien
aaggctcagtagagagcgggcctga

SEQ ID NO: 857986 - DNA, 25 bp, Homo sapien
caccagttctgatgtcggtggaaca

SEQ ID NO: 857987 - DNA, 25 bp, Homo sapien
tatcagccttggttatcatcaccgc

SEQ ID NO: 857988 - DNA, 25 bp, Homo sapien
tcaaagaggcccatatggagccact

SEQ ID NO: 857989 - DNA, 25 bp, Homo sapien
tagcatgcatcctagctcaacgaat

SEQ ID NO: 857990 - DNA, 25 bp, Homo sapien
aggggaattctgatgatgagtcacc

SEQ ID NO: 857991 - DNA, 25 bp, Homo sapien
tgtgagtttatgcagagccacagcc

SEQ ID NO: 857992 - DNA, 25 bp, Homo sapien
gaaaggggaattctgatgatgagtc

SEQ ID NO: 857993 - DNA, 25 bp, Homo sapien
tcctgtgagtttatgcagagccaca

SEQ ID NO: 857994 - DNA, 25 bp, Homo sapien
tccttgaaggcagatcttagaacct

SEQ ID NO: 857995 - DNA, 25 bp, Homo sapien
attgtccgtcgttctctccatgagg

SEQ ID NO: 857996 - DNA, 25 bp, Homo sapien
ttagaacctgatcagtgcccagcag

SEQ ID NO: 857997 - DNA, 25 bp, Homo sapien
tctatccggtgttgtggtgacctaa

SEQ ID NO: 857998 - DNA, 25 bp, Homo sapien
gcccctgtcagagaaatgcacgatg

SEQ ID NO: 857999 - DNA, 25 bp, Homo sapien
gaccgctaagtttggctactcagaa

SEQ ID NO: 858000 - DNA, 25 bp, Homo sapien
taaaggctaaatgctgaccgctaag

SEQ ID NO: 858001 - DNA, 25 bp, Homo sapien
cagatgcctccgcaaatagtgcagg

SEQ ID NO: 858002 - DNA, 25 bp, Homo sapien
agagtaaccaatggctgaacacgac

SEQ ID NO: 858003 - DNA, 25 bp, Homo sapien
gacttcaccgtgcagcacagagtaa

SEQ ID NO: 858004 - DNA, 25 bp, Homo sapien
tgcttaccaacaaccacagacttca

SEQ ID NO: 858005 - DNA, 25 bp, Homo sapien
cttcaccgtgcagcacagagtaacc

SEQ ID NO: 858006 - DNA, 25 bp, Homo sapien
ggaagcaacgtgatgcccagggatt

SEQ ID NO: 858007 - DNA, 25 bp, Homo sapien
cagtgtcggaagcaacgtgatgccc

SEQ ID NO: 858008 - DNA, 25 bp, Homo sapien
tgcccagggattcttgcagcagaca

SEQ ID NO: 858009 - DNA, 25 bp, Homo sapien
acagaccagtgtcggaagcaacgtg

SEQ ID NO: 858010 - DNA, 25 bp, Homo sapien
gtgtgccccttgcagctgctaggac

SEQ ID NO: 858011 - DNA, 25 bp, Homo sapien
gctgctaggacgtctgtgggactca

SEQ ID NO: 858012 - DNA, 25 bp, Homo sapien
aatctgttcactccgggcactttgg

SEQ ID NO: 858013 - DNA, 25 bp, Homo sapien
ttggaagcattcatacctgccggtc

SEQ ID NO: 858014 - DNA, 25 bp, Homo sapien
ttgttcagtaagttgatttgtatcc

SEQ ID NO: 858015 - DNA, 25 bp, Homo sapien
tgttcagtaagttgatttgtatcct

SEQ ID NO: 858016 - DNA, 25 bp, Homo sapien
tttgttcagtaagttgatttgtatc

SEQ ID NO: 858017 - DNA, 25 bp, Homo sapien
caggtacggaatgttggagccagaa

SEQ ID NO: 858018 - DNA, 25 bp, Homo sapien
cttcaggtacggaatgttggagcca

SEQ ID NO: 858019 - DNA, 25 bp, Homo sapien
gtacggaatgttggagccagaagag

SEQ ID NO: 858020 - DNA, 25 bp, Homo sapien
tcaggtacggaatgttggagccaga

SEQ ID NO: 858021 - DNA, 25 bp, Homo sapien
tgacattgagaaagagccattagca

SEQ ID NO: 858022 - DNA, 25 bp, Homo sapien
ctgacattgagaaagagccattagc

SEQ ID NO: 858023 - DNA, 25 bp, Homo sapien
gacattgagaaagagccattagcat

SEQ ID NO: 858024 - DNA, 25 bp, Homo sapien
tgaccacaagacgatctgcatcgtg

SEQ ID NO: 858025 - DNA, 25 bp, Homo sapien
ttccactcccggtctttacgcgtga

SEQ ID NO: 858026 - DNA, 25 bp, Homo sapien
ccagaagagtcaagagaaccaccgt

SEQ ID NO: 858027 - DNA, 25 bp, Homo sapien
tcatggcctttggatctgctgaggt

SEQ ID NO: 858028 - DNA, 25 bp, Homo sapien
tcctggagcggcccttgtaaccgtc

SEQ ID NO: 858029 - DNA, 25 bp, Homo sapien
ctggagcggcccttgtaaccgtcca

SEQ ID NO: 858030 - DNA, 25 bp, Homo sapien
tggagcggcccttgtaaccgtccat

SEQ ID NO: 858031 - DNA, 25 bp, Homo sapien
gctcctggagcggcccttgtaaccg

SEQ ID NO: 858032 - DNA, 25 bp, Homo sapien
attccagctgtagcagatctaacag

SEQ ID NO: 858033 - DNA, 25 bp, Homo sapien
acattccagctgtagcagatctaac

SEQ ID NO: 858034 - DNA, 25 bp, Homo sapien
cattccagctgtagcagatctaaca

SEQ ID NO: 858035 - DNA, 25 bp, Homo sapien
cactgttccggtaggagctggccat

SEQ ID NO: 858036 - DNA, 25 bp, Homo sapien
tgtcgcttgcttggtgctcagttgg

SEQ ID NO: 858037 - DNA, 25 bp, Homo sapien
tatgtattaggatatgtcgcttgct

SEQ ID NO: 858038 - DNA, 25 bp, Homo sapien
gatatgtcgcttgcttggtgctcag

SEQ ID NO: 858039 - DNA, 25 bp, Homo sapien
gcacacatcgcacatatgtattagg

SEQ ID NO: 858040 - DNA, 25 bp, Homo sapien
taagaggaagcaactgtaaagcaga

SEQ ID NO: 858041 - DNA, 25 bp, Homo sapien
gattgctatggaaaatcggcgcctt

SEQ ID NO: 858042 - DNA, 25 bp, Homo sapien
ggatatattgtaacagctcctctga

SEQ ID NO: 858043 - DNA, 25 bp, Homo sapien
gatgaccaggcaggtaaatgcacgt

SEQ ID NO: 858044 - DNA, 25 bp, Homo sapien
tgcaacacaccactgcgcaggtggc

SEQ ID NO: 858045 - DNA, 25 bp, Homo sapien
cactctgtgcctgacactgatcatg

SEQ ID NO: 858046 - DNA, 25 bp, Homo sapien
gacattgttcctggatgcaacacac

SEQ ID NO: 858047 - DNA, 25 bp, Homo sapien
aatggtgaggatgcccatgccactc

SEQ ID NO: 858048 - DNA, 25 bp, Homo sapien
tctgttcaactttccagggggcatt

SEQ ID NO: 858049 - DNA, 25 bp, Homo sapien
taatgcatatttggcccatttgaag

SEQ ID NO: 858050 - DNA, 25 bp, Homo sapien
ccagggggcattttgtccacggatg

SEQ ID NO: 858051 - DNA, 25 bp, Homo sapien
agcaatctctgttcaactttccagg

SEQ ID NO: 858052 - DNA, 25 bp, Homo sapien
ctgtcaaagcagtttagttcctcac

SEQ ID NO: 858053 - DNA, 25 bp, Homo sapien
cacaggagctgtcaaagcagtttag

SEQ ID NO: 858054 - DNA, 25 bp, Homo sapien
caggagctgtcaaagcagtttagtt

SEQ ID NO: 858055 - DNA, 25 bp, Homo sapien
gagctgtcaaagcagtttagttcct

SEQ ID NO: 858056 - DNA, 25 bp, Homo sapien
ggagaggaggccgatgatgataatg

SEQ ID NO: 858057 - DNA, 25 bp, Homo sapien
ggggagaggaggccgatgatgataa

SEQ ID NO: 858058 - DNA, 25 bp, Homo sapien
gagaggaggccgatgatgataatgg

SEQ ID NO: 858059 - DNA, 25 bp, Homo sapien
agaggaggccgatgatgataatggg

SEQ ID NO: 858060 - DNA, 25 bp, Homo sapien
tcgcaggtctgagcagcgtcccttc

SEQ ID NO: 858061 - DNA, 25 bp, Homo sapien
ggctcgcaggtctgagcagcgtccc

SEQ ID NO: 858062 - DNA, 25 bp, Homo sapien
agtctcaggtttgccgtgtgttcac

SEQ ID NO: 858063 - DNA, 25 bp, Homo sapien
ttccaatgagtctcaggtttgccgt

SEQ ID NO: 858064 - DNA, 25 bp, Homo sapien
cagtgtatatacatgatccccagag

SEQ ID NO: 858065 - DNA, 25 bp, Homo sapien
cctggaggccggatctctgctgtga

SEQ ID NO: 858066 - DNA, 25 bp, Homo sapien
taaaagacctcatggcggaggagtg

SEQ ID NO: 858067 - DNA, 25 bp, Homo sapien
ggtcctcatcactcaaagaagggaa

SEQ ID NO: 858068 - DNA, 25 bp, Homo sapien
accaagagaggccacggctgctcca

SEQ ID NO: 858069 - DNA, 25 bp, Homo sapien
acaagggccgaggaccggcaaagat

SEQ ID NO: 858070 - DNA, 25 bp, Homo sapien
ccggcaaagatcttgatgagagcca

SEQ ID NO: 858071 - DNA, 25 bp, Homo sapien
agccacggtgctggttgatagaggc

SEQ ID NO: 858072 - DNA, 25 bp, Homo sapien
cacagaggttcggagaacaagggcc

SEQ ID NO: 858073 - DNA, 25 bp, Homo sapien
cacaggcttagagatgccagaggag

SEQ ID NO: 858074 - DNA, 25 bp, Homo sapien
gtggtgcacaggcttagagatgcca

SEQ ID NO: 858075 - DNA, 25 bp, Homo sapien
agagatgccagaggaggttgctaat

SEQ ID NO: 858076 - DNA, 25 bp, Homo sapien
caaggggaatgggtggtgcacaggc

SEQ ID NO: 858077 - DNA, 25 bp, Homo sapien
gagctgttatgacccccgatgagca

SEQ ID NO: 858078 - DNA, 25 bp, Homo sapien
tatgacccccgatgagcaatatgtc

SEQ ID NO: 858079 - DNA, 25 bp, Homo sapien
aaaggttgctttgcgagctgttatg

SEQ ID NO: 858080 - DNA, 25 bp, Homo sapien
caagagcatattcaaggacaggaat

SEQ ID NO: 858081 - DNA, 25 bp, Homo sapien
cccttaggtgataatgagaggcaca

SEQ ID NO: 858082 - DNA, 25 bp, Homo sapien
aaaacctgcttcaacatggaaccct

SEQ ID NO: 858083 - DNA, 25 bp, Homo sapien
cacaaaggaatgctgcagaaagaca

SEQ ID NO: 858084 - DNA, 25 bp, Homo sapien
ggaaccctccagtagcctttatgta

SEQ ID NO: 858085 - DNA, 25 bp, Homo sapien
tgtaggaaacgatgatgataattca

SEQ ID NO: 858086 - DNA, 25 bp, Homo sapien
gtaggaaacgatgatgataattcat

SEQ ID NO: 858087 - DNA, 25 bp, Homo sapien
tgactgcagttgcacgagggccact

SEQ ID NO: 858088 - DNA, 25 bp, Homo sapien
cccggtactggtgaaaaggtcagca

SEQ ID NO: 858089 - DNA, 25 bp, Homo sapien
gagtaaacagtttccgcagaccaat

SEQ ID NO: 858090 - DNA, 25 bp, Homo sapien
taaatgcgcatttcttccccggtac

SEQ ID NO: 858091 - DNA, 25 bp, Homo sapien
gcagggcgctgtgacaagcccacag

SEQ ID NO: 858092 - DNA, 25 bp, Homo sapien
gcatgaaaggcctcaagacaaggct

SEQ ID NO: 858093 - DNA, 25 bp, Homo sapien
taacaccacgtcaattcataatggg

SEQ ID NO: 858094 - DNA, 25 bp, Homo sapien
tcataatggggaggtttagattcag

SEQ ID NO: 858095 - DNA, 25 bp, Homo sapien
gctgcaggtctggattacgtctaca

SEQ ID NO: 858096 - DNA, 25 bp, Homo sapien
gtgccaagagcgctggctgaaccca

SEQ ID NO: 858097 - DNA, 25 bp, Homo sapien
catttggaatcatgctcccaggtgc

SEQ ID NO: 858098 - DNA, 25 bp, Homo sapien
gctgaacccacactgcttggaccat

SEQ ID NO: 858099 - DNA, 25 bp, Homo sapien
taggagccctatggtaagatctgtc

SEQ ID NO: 858100 - DNA, 25 bp, Homo sapien
agaatgcagctgttcactgggccca

SEQ ID NO: 858101 - DNA, 25 bp, Homo sapien
aaaagaggaccgaccagaatgcagc

SEQ ID NO: 858102 - DNA, 25 bp, Homo sapien
tgggcacgtgcttacagaacctcaa

SEQ ID NO: 858103 - DNA, 25 bp, Homo sapien
tagaagagaggatcatcatacaccc

SEQ ID NO: 858104 - DNA, 25 bp, Homo sapien
ctcaaagccacgagctcctgaaggc

SEQ ID NO: 858105 - DNA, 25 bp, Homo sapien
tctattcctggaactggcccttccg

SEQ ID NO: 858106 - DNA, 25 bp, Homo sapien
tagtccttggaccaagcatgagctc

SEQ ID NO: 858107 - DNA, 25 bp, Homo sapien
tcacatataggacaggttcccacga

SEQ ID NO: 858108 - DNA, 25 bp, Homo sapien
tcccacgaatgaagatgagctgtct

SEQ ID NO: 858109 - DNA, 25 bp, Homo sapien
caggttcccacgaatgaagatgagc

SEQ ID NO: 858110 - DNA, 25 bp, Homo sapien
gctggcactgattccctgggtaata

SEQ ID NO: 858111 - DNA, 25 bp, Homo sapien
gctttaacatatatatgaggtttat

SEQ ID NO: 858112 - DNA, 25 bp, Homo sapien
acagcaataacgaacttgtaaagtc

SEQ ID NO: 858113 - DNA, 25 bp, Homo sapien
tttaagctttaacatatatatgagg

SEQ ID NO: 858114 - DNA, 25 bp, Homo sapien
caataacgaacttgtaaagtccact

SEQ ID NO: 858115 - DNA, 25 bp, Homo sapien
gggtgtcctcagacatctcattctc

SEQ ID NO: 858116 - DNA, 25 bp, Homo sapien
acgagctggcagagggtgtcctcag

SEQ ID NO: 858117 - DNA, 25 bp, Homo sapien
ggatcctctctcagacacgagctgg

SEQ ID NO: 858118 - DNA, 25 bp, Homo sapien
atcctctctcagacacgagctggca

SEQ ID NO: 858119 - DNA, 25 bp, Homo sapien
aataaagtgactgctagaggaaaga

SEQ ID NO: 858120 - DNA, 25 bp, Homo sapien
cagcccttgtgtaacttttgattca

SEQ ID NO: 858121 - DNA, 25 bp, Homo sapien
gatataaacagtcgatgaacacaca

SEQ ID NO: 858122 - DNA, 25 bp, Homo sapien
gtaatagcctactgctgacaggaag

SEQ ID NO: 858123 - DNA, 25 bp, Homo sapien
caagtggtcaaacctcactgtctat

SEQ ID NO: 858124 - DNA, 25 bp, Homo sapien
acataatgactgagaatgagctggc

SEQ ID NO: 858125 - DNA, 25 bp, Homo sapien
tattgaattacctactgtgcagcaa

SEQ ID NO: 858126 - DNA, 25 bp, Homo sapien
catgacctgccagaatgggatcttt

SEQ ID NO: 858127 - DNA, 25 bp, Homo sapien
tgaacctatgaacagctccttcctg

SEQ ID NO: 858128 - DNA, 25 bp, Homo sapien
attgaaaatccaagagtgacttctg

SEQ ID NO: 858129 - DNA, 25 bp, Homo sapien
aagttaaaagagactgagcaatcac

SEQ ID NO: 858130 - DNA, 25 bp, Homo sapien
agagactgagcaatcacatgcaaag

SEQ ID NO: 858131 - DNA, 25 bp, Homo sapien
gacaggtccctttgttgtttcagag

SEQ ID NO: 858132 - DNA, 25 bp, Homo sapien
gactggataacatttcaaaggtgcc

SEQ ID NO: 858133 - DNA, 25 bp, Homo sapien
agggtgtgtacatgtcaacgtcaga

SEQ ID NO: 858134 - DNA, 25 bp, Homo sapien
caaatcagaaatggtaggtagcaag

SEQ ID NO: 858135 - DNA, 25 bp, Homo sapien
tccataagcctgagtgaagtcaaca

SEQ ID NO: 858136 - DNA, 25 bp, Homo sapien
tggagatgtgcaggaaacggtccca

SEQ ID NO: 858137 - DNA, 25 bp, Homo sapien
tgcagaaggcaaccactgctaggcc

SEQ ID NO: 858138 - DNA, 25 bp, Homo sapien
aactgaatgcctgactgagatgctc

SEQ ID NO: 858139 - DNA, 25 bp, Homo sapien
tccctctgtttactcattatgacca

SEQ ID NO: 858140 - DNA, 25 bp, Homo sapien
cagggcttgtttctattgactgttg

SEQ ID NO: 858141 - DNA, 25 bp, Homo sapien
tgttgttttccttgatcatgggtct

SEQ ID NO: 858142 - DNA, 25 bp, Homo sapien
aaaggcatttaatctcagggcttgt

SEQ ID NO: 858143 - DNA, 25 bp, Homo sapien
gatttcccctgacaagtcaattcca

SEQ ID NO: 858144 - DNA, 25 bp, Homo sapien
tcttggccagattgctctcagactc

SEQ ID NO: 858145 - DNA, 25 bp, Homo sapien
catgatcatttggtgcataccctca

SEQ ID NO: 858146 - DNA, 25 bp, Homo sapien
catttcccaatgtatgtgatttccc

SEQ ID NO: 858147 - DNA, 25 bp, Homo sapien
tcctgatgaacaccagtgctttgtc

SEQ ID NO: 858148 - DNA, 25 bp, Homo sapien
tagtttcctgatgaacaccagtgct

SEQ ID NO: 858149 - DNA, 25 bp, Homo sapien
cccattagtttcctgatgaacacca

SEQ ID NO: 858150 - DNA, 25 bp, Homo sapien
gatgaacaccagtgctttgtcataa

SEQ ID NO: 858151 - DNA, 25 bp, Homo sapien
tttgtgttcgtatcatagccagcag

SEQ ID NO: 858152 - DNA, 25 bp, Homo sapien
cctggttcaccactgaacaggagga

SEQ ID NO: 858153 - DNA, 25 bp, Homo sapien
tcatatgctattcccagaggcagtg

SEQ ID NO: 858154 - DNA, 25 bp, Homo sapien
gcagttctaaacaaggtgagtgacc

SEQ ID NO: 858155 - DNA, 25 bp, Homo sapien
tcatgcagactgatcgttttccgtg

SEQ ID NO: 858156 - DNA, 25 bp, Homo sapien
tccgtgacggcgtccagtttccatt

SEQ ID NO: 858157 - DNA, 25 bp, Homo sapien
cagactgatcgttttccgtgacggc

SEQ ID NO: 858158 - DNA, 25 bp, Homo sapien
gatcgttttccgtgacggcgtccag

SEQ ID NO: 858159 - DNA, 25 bp, Homo sapien
ggaattgcctcttgcaacaaacttc

SEQ ID NO: 858160 - DNA, 25 bp, Homo sapien
acttctttgactgccccagcggccc

SEQ ID NO: 858161 - DNA, 25 bp, Homo sapien
ttttctcccatcacaattacctcca

SEQ ID NO: 858162 - DNA, 25 bp, Homo sapien
tcccatcacaattacctccacttct

SEQ ID NO: 858163 - DNA, 25 bp, Homo sapien
ctcgtcagcgtgttagcgtggtcag

SEQ ID NO: 858164 - DNA, 25 bp, Homo sapien
gcgtgttagcgtggtcagtggccat

SEQ ID NO: 858165 - DNA, 25 bp, Homo sapien
gtcagcgtgttagcgtggtcagtgg

SEQ ID NO: 858166 - DNA, 25 bp, Homo sapien
cagcgtgttagcgtggtcagtggcc

SEQ ID NO: 858167 - DNA, 25 bp, Homo sapien
aactgcacaaggatcccatcagcca

SEQ ID NO: 858168 - DNA, 25 bp, Homo sapien
actgcacaaggatcccatcagccag

SEQ ID NO: 858169 - DNA, 25 bp, Homo sapien
cagagaagagccttgattcccaagt

SEQ ID NO: 858170 - DNA, 25 bp, Homo sapien
gctatttgatttggagccggagggg

SEQ ID NO: 858171 - DNA, 25 bp, Homo sapien
agagaagagccttgattcccaagtt

SEQ ID NO: 858172 - DNA, 25 bp, Homo sapien
agctatttgatttggagccggaggg

SEQ ID NO: 858173 - DNA, 25 bp, Homo sapien
gacttagcaagttggtcgctggcca

SEQ ID NO: 858174 - DNA, 25 bp, Homo sapien
cacgagggcatgtgaaccaacagca

SEQ ID NO: 858175 - DNA, 25 bp, Homo sapien
gcaagcaaagtcttccacgagggca

SEQ ID NO: 858176 - DNA, 25 bp, Homo sapien
cgggactcctctcaacttactgtgg

SEQ ID NO: 858177 - DNA, 25 bp, Homo sapien
gaacagattgcattactggggccca

SEQ ID NO: 858178 - DNA, 25 bp, Homo sapien
taataagctgagatgagactggtcc

SEQ ID NO: 858179 - DNA, 25 bp, Homo sapien
cccagtgttcagaaggtgaacagat

SEQ ID NO: 858180 - DNA, 25 bp, Homo sapien
taggacaagacaacggggatcccag

SEQ ID NO: 858181 - DNA, 25 bp, Homo sapien
taagcaagctcttggttgctgcatt

SEQ ID NO: 858182 - DNA, 25 bp, Homo sapien
gctgcattctctggtctgaatgtcc

SEQ ID NO: 858183 - DNA, 25 bp, Homo sapien
ctgcattctctggtctgaatgtccc

SEQ ID NO: 858184 - DNA, 25 bp, Homo sapien
ctaagcaagctcttggttgctgcat

SEQ ID NO: 858185 - DNA, 25 bp, Homo sapien
gcaggatttgtccaaaccccggcaa

SEQ ID NO: 858186 - DNA, 25 bp, Homo sapien
actgagcaggatttgtccaaacccc

SEQ ID NO: 858187 - DNA, 25 bp, Homo sapien
cagcatgaagaatgaaacccgttgt

SEQ ID NO: 858188 - DNA, 25 bp, Homo sapien
gcatgaagaatgaaacccgttgtat

SEQ ID NO: 858189 - DNA, 25 bp, Homo sapien
gagaatagatggcaatgacagagaa

SEQ ID NO: 858190 - DNA, 25 bp, Homo sapien
tggagaatagatggcaatgacagag

SEQ ID NO: 858191 - DNA, 25 bp, Homo sapien
cttggagaatagatggcaatgacag

SEQ ID NO: 858192 - DNA, 25 bp, Homo sapien
agaatagatggcaatgacagagaac

SEQ ID NO: 858193 - DNA, 25 bp, Homo sapien
gagctggtcgtctccacaagccaag

SEQ ID NO: 858194 - DNA, 25 bp, Homo sapien
ctaatctcagaagtgtggccgagct

SEQ ID NO: 858195 - DNA, 25 bp, Homo sapien
gatttgacaagagccccttctgctg

SEQ ID NO: 858196 - DNA, 25 bp, Homo sapien
tctattcctcagctcccctgttgat

SEQ ID NO: 858197 - DNA, 25 bp, Homo sapien
gatcctgccccatcgcctctagtat

SEQ ID NO: 858198 - DNA, 25 bp, Homo sapien
aactctccggacacattcaggatgg

SEQ ID NO: 858199 - DNA, 25 bp, Homo sapien
tctcctccctggattttctactctg

SEQ ID NO: 858200 - DNA, 25 bp, Homo sapien
atctcaggacaaccttccctccagg

SEQ ID NO: 858201 - DNA, 25 bp, Homo sapien
tttagtattatcgtctgcccagaaa

SEQ ID NO: 858202 - DNA, 25 bp, Homo sapien
tgtcagcgtaacaaaggcaggtatt

SEQ ID NO: 858203 - DNA, 25 bp, Homo sapien
tgcaagccgtccttttcaaacaggg

SEQ ID NO: 858204 - DNA, 25 bp, Homo sapien
taaatgtcctctagaatgtcagcgt

SEQ ID NO: 858205 - DNA, 25 bp, Homo sapien
ggcactgcagtgtgtccatgtgtaa

SEQ ID NO: 858206 - DNA, 25 bp, Homo sapien
tatcattgagagaacatgttgacca

SEQ ID NO: 858207 - DNA, 25 bp, Homo sapien
cttccagactcaaaacaaggtactg

SEQ ID NO: 858208 - DNA, 25 bp, Homo sapien
caaggtactggcaacatgagcaaca

SEQ ID NO: 858209 - DNA, 25 bp, Homo sapien
caagttttattcagagataactgga

SEQ ID NO: 858210 - DNA, 25 bp, Homo sapien
acaagttttattcagagataactgg

SEQ ID NO: 858211 - DNA, 25 bp, Homo sapien
ggaatgcaacttccctttttgcaat

SEQ ID NO: 858212 - DNA, 25 bp, Homo sapien
cacaagttttattcagagataactg

SEQ ID NO: 858213 - DNA, 25 bp, Homo sapien
tatggtaaaacatggtcaattggac

SEQ ID NO: 858214 - DNA, 25 bp, Homo sapien
ctctgtgcaaccttctaaggacaag

SEQ ID NO: 858215 - DNA, 25 bp, Homo sapien
tctaaggacaagatgagaatatggt

SEQ ID NO: 858216 - DNA, 25 bp, Homo sapien
tgtggcctgaccaaacaacagccaa

SEQ ID NO: 858217 - DNA, 25 bp, Homo sapien
cactgccgtgctgtcttcagtggcc

SEQ ID NO: 858218 - DNA, 25 bp, Homo sapien
gatgtttccactgccgtgctgtctt

SEQ ID NO: 858219 - DNA, 25 bp, Homo sapien
atccccaagaaaccctctggagttg

SEQ ID NO: 858220 - DNA, 25 bp, Homo sapien
cctctggagttgtcccctgtctggg

SEQ ID NO: 858221 - DNA, 25 bp, Homo sapien
ggcagcgtgacagatgccttgttta

SEQ ID NO: 858222 - DNA, 25 bp, Homo sapien
tcctgccaccagatgaccttggcga

SEQ ID NO: 858223 - DNA, 25 bp, Homo sapien
acaggttggccctcgatggcacggc

SEQ ID NO: 858224 - DNA, 25 bp, Homo sapien
ttttaacggctccaggtgacatttc

SEQ ID NO: 858225 - DNA, 25 bp, Homo sapien
gaatccaggtcacggcagagtggct

SEQ ID NO: 858226 - DNA, 25 bp, Homo sapien
gagttcagccatttatatatacggg

SEQ ID NO: 858227 - DNA, 25 bp, Homo sapien
gctggtagcttgcatggttcggcca

SEQ ID NO: 858228 - DNA, 25 bp, Homo sapien
cagaaaagaggccaactagacatgc

SEQ ID NO: 858229 - DNA, 25 bp, Homo sapien
agcaccggaggcaggcagcttttct

SEQ ID NO: 858230 - DNA, 25 bp, Homo sapien
tctaaggaaagtgcaatcagccagt

SEQ ID NO: 858231 - DNA, 25 bp, Homo sapien
caccggagcagtcagttagtgggta

SEQ ID NO: 858232 - DNA, 25 bp, Homo sapien
tcaaccaggacctcaagggtgtttg

SEQ ID NO: 858233 - DNA, 25 bp, Homo sapien
caccagagtccaagcggtaaggtaa

SEQ ID NO: 858234 - DNA, 25 bp, Homo sapien
tctgacggcgagttgggagccacca

SEQ ID NO: 858235 - DNA, 25 bp, Homo sapien
taactgcttagcaaccggcaagtgg

SEQ ID NO: 858236 - DNA, 25 bp, Homo sapien
agcagcagagagaggatccgaagca

SEQ ID NO: 858237 - DNA, 25 bp, Homo sapien
tgctgcacggatttccccgaagcgc

SEQ ID NO: 858238 - DNA, 25 bp, Homo sapien
tgctgctgcacggatttccccgaag

SEQ ID NO: 858239 - DNA, 25 bp, Homo sapien
gctgctgcacggatttccccgaagc

SEQ ID NO: 858240 - DNA, 25 bp, Homo sapien
ctgcacggatttccccgaagcgctt

SEQ ID NO: 858241 - DNA, 25 bp, Homo sapien
aataacgctacaattcccgatgagg

SEQ ID NO: 858242 - DNA, 25 bp, Homo sapien
caggttttagaactctggatccaca

SEQ ID NO: 858243 - DNA, 25 bp, Homo sapien
acgcggctccccatgcaaattgaca

SEQ ID NO: 858244 - DNA, 25 bp, Homo sapien
tagatcagtgagtgccaaacacagg

SEQ ID NO: 858245 - DNA, 25 bp, Homo sapien
cactctcggctgtgaataccttgtc

SEQ ID NO: 858246 - DNA, 25 bp, Homo sapien
gagaacactgccaattgaggtaatg

SEQ ID NO: 858247 - DNA, 25 bp, Homo sapien
gaattgccaatgtcgtctctctggc

SEQ ID NO: 858248 - DNA, 25 bp, Homo sapien
gagacagtccctgcgtactgagaac

SEQ ID NO: 858249 - DNA, 25 bp, Homo sapien
tacacagtatccctagagtacccat

SEQ ID NO: 858250 - DNA, 25 bp, Homo sapien
aataagcttggcttgaatacaagga

SEQ ID NO: 858251 - DNA, 25 bp, Homo sapien
gcctgttttccacgcttaagcattg

SEQ ID NO: 858252 - DNA, 25 bp, Homo sapien
ctttgaggcagaaataagcttggct

SEQ ID NO: 858253 - DNA, 25 bp, Homo sapien
acatacaaacttggcacaatgcttt

SEQ ID NO: 858254 - DNA, 25 bp, Homo sapien
gatgagacgccgtgcatcttctgcc

SEQ ID NO: 858255 - DNA, 25 bp, Homo sapien
tctgagatgagacgccgtgcatctt

SEQ ID NO: 858256 - DNA, 25 bp, Homo sapien
tgagacgccgtgcatcttctgcctg

SEQ ID NO: 858257 - DNA, 25 bp, Homo sapien
gtgtatctgagatgagacgccgtgc

SEQ ID NO: 858258 - DNA, 25 bp, Homo sapien
tggaccaagagccctccagggagaa

SEQ ID NO: 858259 - DNA, 25 bp, Homo sapien
agatggaccaagagccctccaggga

SEQ ID NO: 858260 - DNA, 25 bp, Homo sapien
accaagagccctccagggagaatgg

SEQ ID NO: 858261 - DNA, 25 bp, Homo sapien
aagatggaccaagagccctccaggg

SEQ ID NO: 858262 - DNA, 25 bp, Homo sapien
tgtggctgcgttctccataccccgc

SEQ ID NO: 858263 - DNA, 25 bp, Homo sapien
gctgctatcaccactcctctcatgc

SEQ ID NO: 858264 - DNA, 25 bp, Homo sapien
tatcaccactcctctcatgctagtc

SEQ ID NO: 858265 - DNA, 25 bp, Homo sapien
cagtgttgcgggacctggtgcctcc

SEQ ID NO: 858266 - DNA, 25 bp, Homo sapien
gctccgctgagaggaccgtaaagcc

SEQ ID NO: 858267 - DNA, 25 bp, Homo sapien
ttttagtaaacaccagctccgctga

SEQ ID NO: 858268 - DNA, 25 bp, Homo sapien
tgcttaacgcgtgccaaagaagaaa

SEQ ID NO: 858269 - DNA, 25 bp, Homo sapien
ccactggccaaactactgtatgaaa

SEQ ID NO: 858270 - DNA, 25 bp, Homo sapien
ctttcatcagtctcttcttctgcca

SEQ ID NO: 858271 - DNA, 25 bp, Homo sapien
tctcttcttctgccatgtcatggtt

SEQ ID NO: 858272 - DNA, 25 bp, Homo sapien
atcagtctcttcttctgccatgtca

SEQ ID NO: 858273 - DNA, 25 bp, Homo sapien
gtctcttcttctgccatgtcatggt

SEQ ID NO: 858274 - DNA, 25 bp, Homo sapien
gatcttcccagaccagtaggatgcc

SEQ ID NO: 858275 - DNA, 25 bp, Homo sapien
ggatcttcccagaccagtaggatgc

SEQ ID NO: 858276 - DNA, 25 bp, Homo sapien
atcttcccagaccagtaggatgcct

SEQ ID NO: 858277 - DNA, 25 bp, Homo sapien
aaaatacccattcttctaatgctgc

SEQ ID NO: 858278 - DNA, 25 bp, Homo sapien
aaatacccattcttctaatgctgcc

SEQ ID NO: 858279 - DNA, 25 bp, Homo sapien
atacccattcttctaatgctgccct

SEQ ID NO: 858280 - DNA, 25 bp, Homo sapien
aatacccattcttctaatgctgccc

SEQ ID NO: 858281 - DNA, 25 bp, Homo sapien
taggtcagctattcattgttcatgg

SEQ ID NO: 858282 - DNA, 25 bp, Homo sapien
aaaattcgctaattgccttcccatg

SEQ ID NO: 858283 - DNA, 25 bp, Homo sapien
tgtctagatggtaaagcctcaagct

SEQ ID NO: 858284 - DNA, 25 bp, Homo sapien
cattaatgaaacaggcatatccatg

SEQ ID NO: 858285 - DNA, 25 bp, Homo sapien
ttcctgatgtcatcaccagtgcagg

SEQ ID NO: 858286 - DNA, 25 bp, Homo sapien
aagttatgccttgctgatgttgacc

SEQ ID NO: 858287 - DNA, 25 bp, Homo sapien
gaccttcaggtggagacttttccga

SEQ ID NO: 858288 - DNA, 25 bp, Homo sapien
tgcattccagcaggtaactatccag

SEQ ID NO: 858289 - DNA, 25 bp, Homo sapien
agattcctgtgcttggcatacatcg

SEQ ID NO: 858290 - DNA, 25 bp, Homo sapien
catcgcagtagtcggctgacttcat

SEQ ID NO: 858291 - DNA, 25 bp, Homo sapien
tgtgcttggcatacatcgcagtagt

SEQ ID NO: 858292 - DNA, 25 bp, Homo sapien
cttggcatacatcgcagtagtcggc

SEQ ID NO: 858293 - DNA, 25 bp, Homo sapien
aataaaaagtccagtggggagccag

SEQ ID NO: 858294 - DNA, 25 bp, Homo sapien
caataaaaagtccagtggggagcca

SEQ ID NO: 858295 - DNA, 25 bp, Homo sapien
gtccagtggggagccaggaggctcg

SEQ ID NO: 858296 - DNA, 25 bp, Homo sapien
cagtggggagccaggaggctcgtac

SEQ ID NO: 858297 - DNA, 25 bp, Homo sapien
aggtgtctgttgcagggattcaggg

SEQ ID NO: 858298 - DNA, 25 bp, Homo sapien
gcattcaggacagcgggatgcaggg

SEQ ID NO: 858299 - DNA, 25 bp, Homo sapien
aatcgctctagaggccatcccacgg

SEQ ID NO: 858300 - DNA, 25 bp, Homo sapien
agggattcagggaggaatcgctcta

SEQ ID NO: 858301 - DNA, 25 bp, Homo sapien
gcatcataaaaccaggacgacggcc

SEQ ID NO: 858302 - DNA, 25 bp, Homo sapien
gacggcccttgataacttcctcctg

SEQ ID NO: 858303 - DNA, 25 bp, Homo sapien
tgtgatccgacaacatgaaagcagg

SEQ ID NO: 858304 - DNA, 25 bp, Homo sapien
catagccatgattagcgagcaccag

SEQ ID NO: 858305 - DNA, 25 bp, Homo sapien
aaaaggcttgcgttggtctgctcca

SEQ ID NO: 858306 - DNA, 25 bp, Homo sapien
atttacaaagttggcgggcgtcata

SEQ ID NO: 858307 - DNA, 25 bp, Homo sapien
tgagaggtcaccagaatcatttgga

SEQ ID NO: 858308 - DNA, 25 bp, Homo sapien
ccaatggctgagtagtttaaacaac

SEQ ID NO: 858309 - DNA, 25 bp, Homo sapien
tgcacaggtatgatctcctcccacc

SEQ ID NO: 858310 - DNA, 25 bp, Homo sapien
caactgggattcacctggtgtgcac

SEQ ID NO: 858311 - DNA, 25 bp, Homo sapien
gcacaggtatgatctcctcccacct

SEQ ID NO: 858312 - DNA, 25 bp, Homo sapien
aactgggattcacctggtgtgcaca

SEQ ID NO: 858313 - DNA, 25 bp, Homo sapien
tgcccagcccactaacacatgttta

SEQ ID NO: 858314 - DNA, 25 bp, Homo sapien
gactagaatgttttacacctaggaa

SEQ ID NO: 858315 - DNA, 25 bp, Homo sapien
gaataatcaacatgccctcgacggt

SEQ ID NO: 858316 - DNA, 25 bp, Homo sapien
tgttttgcaaatcgatgcgaactca

SEQ ID NO: 858317 - DNA, 25 bp, Homo sapien
tccagtctcgaccatcaaatgagga

SEQ ID NO: 858318 - DNA, 25 bp, Homo sapien
accagtgtgcaccaacgctcttagc

SEQ ID NO: 858319 - DNA, 25 bp, Homo sapien
gtctcacagacacctgagcttgggt

SEQ ID NO: 858320 - DNA, 25 bp, Homo sapien
taagatgccattggatgccacaatg

SEQ ID NO: 858321 - DNA, 25 bp, Homo sapien
cattcaagtgtctgcccaagttcag

SEQ ID NO: 858322 - DNA, 25 bp, Homo sapien
tctgaatgttctcaatcccagtgac

SEQ ID NO: 858323 - DNA, 25 bp, Homo sapien
ccaagttcagcctcctcccacaaat

SEQ ID NO: 858324 - DNA, 25 bp, Homo sapien
cacaaatcttttctgaatgttctca

SEQ ID NO: 858325 - DNA, 25 bp, Homo sapien
tacataaggtgagggagccgtgaac

SEQ ID NO: 858326 - DNA, 25 bp, Homo sapien
ccgacatcgcctgtgactttcaaaa

SEQ ID NO: 858327 - DNA, 25 bp, Homo sapien
caggtgctctgggattgctgatatc

SEQ ID NO: 858328 - DNA, 25 bp, Homo sapien
ttatcattgtgtgaggttcctgggc

SEQ ID NO: 858329 - DNA, 25 bp, Homo sapien
cccagagttggatgcacaggagctt

SEQ ID NO: 858330 - DNA, 25 bp, Homo sapien
ttcattttcgccacgtgcagacagc

SEQ ID NO: 858331 - DNA, 25 bp, Homo sapien
tgcacccctgaatggactgtcacgg

SEQ ID NO: 858332 - DNA, 25 bp, Homo sapien
gagaaaggcgtgattgcccagtgct

SEQ ID NO: 858333 - DNA, 25 bp, Homo sapien
caaaagaccagaagtgtaaaacagg

SEQ ID NO: 858334 - DNA, 25 bp, Homo sapien
ataaagagctgtcctttacaccccg

SEQ ID NO: 858335 - DNA, 25 bp, Homo sapien
tacaccccgaggtattgagaaccaa

SEQ ID NO: 858336 - DNA, 25 bp, Homo sapien
ttgagaaccaaaagaccagaagtgt

SEQ ID NO: 858337 - DNA, 25 bp, Homo sapien
aacaatgcaaaacttcaaaagattt

SEQ ID NO: 858338 - DNA, 25 bp, Homo sapien
gtataacaatgcaaaacttcaaaag

SEQ ID NO: 858339 - DNA, 25 bp, Homo sapien
tataacaatgcaaaacttcaaaaga

SEQ ID NO: 858340 - DNA, 25 bp, Homo sapien
ctgtataacaatgcaaaacttcaaa

SEQ ID NO: 858341 - DNA, 25 bp, Homo sapien
gtcactcggattgggcggcattgaa

SEQ ID NO: 858342 - DNA, 25 bp, Homo sapien
tgaggtcgtcgagtgagatgaagtc

SEQ ID NO: 858343 - DNA, 25 bp, Homo sapien
cagaggccagggaatagtcaggtga

SEQ ID NO: 858344 - DNA, 25 bp, Homo sapien
tgagatgaagtcactcggattgggc

SEQ ID NO: 858345 - DNA, 25 bp, Homo sapien
cctgcttggtctagatagtatgtgc

SEQ ID NO: 858346 - DNA, 25 bp, Homo sapien
tagtatgtgctaaagggtttcaggt

SEQ ID NO: 858347 - DNA, 25 bp, Homo sapien
gagttgcttcaatctagagtgggtc

SEQ ID NO: 858348 - DNA, 25 bp, Homo sapien
aatataacatgtaccacctgcttgg

SEQ ID NO: 858349 - DNA, 25 bp, Homo sapien
caaaaggatgctaccaaagccagag

SEQ ID NO: 858350 - DNA, 25 bp, Homo sapien
tactgtaaacaaggttctttgctgg

SEQ ID NO: 858351 - DNA, 25 bp, Homo sapien
gaacttaagtgaacaacactaacag

SEQ ID NO: 858352 - DNA, 25 bp, Homo sapien
ctttgctggctgacttaggagaaac

SEQ ID NO: 858353 - DNA, 25 bp, Homo sapien
gaaggtaaccttccagcgtgttgaa

SEQ ID NO: 858354 - DNA, 25 bp, Homo sapien
tattttggaaacaccctggagcaca

SEQ ID NO: 858355 - DNA, 25 bp, Homo sapien
gagaacgcattctgcacaggacttg

SEQ ID NO: 858356 - DNA, 25 bp, Homo sapien
caaactgcgcttcaaaattcgaggg

SEQ ID NO: 858357 - DNA, 25 bp, Homo sapien
cctgtcaggaagaccatgagttaat

SEQ ID NO: 858358 - DNA, 25 bp, Homo sapien
aaatgttagggctgcacaaattacc

SEQ ID NO: 858359 - DNA, 25 bp, Homo sapien
taatctaagacgactcaatacctcc

SEQ ID NO: 858360 - DNA, 25 bp, Homo sapien
aaaatccatacccaatcctgtcagg

SEQ ID NO: 858361 - DNA, 25 bp, Homo sapien
aacaatgaagtatgaggccgggcga

SEQ ID NO: 858362 - DNA, 25 bp, Homo sapien
gaatgttcacgggtctcaaagagga

SEQ ID NO: 858363 - DNA, 25 bp, Homo sapien
gagcaggccctgatcaaaaacgtgg

SEQ ID NO: 858364 - DNA, 25 bp, Homo sapien
tgaagtcgcacataccaggaacaag

SEQ ID NO: 858365 - DNA, 25 bp, Homo sapien
tgggcagtgtccaccacgtcctcca

SEQ ID NO: 858366 - DNA, 25 bp, Homo sapien
ccctcttcccctgggcagtgtccac

SEQ ID NO: 858367 - DNA, 25 bp, Homo sapien
tgcgggtgcccctcttcccctgggc

SEQ ID NO: 858368 - DNA, 25 bp, Homo sapien
gggcagtgtccaccacgtcctccat

SEQ ID NO: 858369 - DNA, 25 bp, Homo sapien
gatgatttcacgatcaaccaaagcc

SEQ ID NO: 858370 - DNA, 25 bp, Homo sapien
tatgtcccttagctaaaggcagagg

SEQ ID NO: 858371 - DNA, 25 bp, Homo sapien
gaatgttccgggtacacatcccatg

SEQ ID NO: 858372 - DNA, 25 bp, Homo sapien
taagtctggccttacgcagctaaag

SEQ ID NO: 858373 - DNA, 25 bp, Homo sapien
ttgccttgcttgctacctttatcag

SEQ ID NO: 858374 - DNA, 25 bp, Homo sapien
tatcagactttgtgccttatgaaga

SEQ ID NO: 858375 - DNA, 25 bp, Homo sapien
gactttgtgccttatgaagaggaga

SEQ ID NO: 858376 - DNA, 25 bp, Homo sapien
ctaagttggagacgatttttgaacg

SEQ ID NO: 858377 - DNA, 25 bp, Homo sapien
tgaatccaacccaactaggattaaa

SEQ ID NO: 858378 - DNA, 25 bp, Homo sapien
tccaattcctctgcggagggttact

SEQ ID NO: 858379 - DNA, 25 bp, Homo sapien
gaccagaatgacaagcagtgcaatt

SEQ ID NO: 858380 - DNA, 25 bp, Homo sapien
ctggtgtcagaagtatgaccgaggt

SEQ ID NO: 858381 - DNA, 25 bp, Homo sapien
aggtgacgatcaaggagcagatgac

SEQ ID NO: 858382 - DNA, 25 bp, Homo sapien
ccctgtgggagaggcctaaaccttg

SEQ ID NO: 858383 - DNA, 25 bp, Homo sapien
agttctcagctcctagccgggatca

SEQ ID NO: 858384 - DNA, 25 bp, Homo sapien
ttacgtggactctaagcttcatggg

SEQ ID NO: 858385 - DNA, 25 bp, Homo sapien
tctggcacttagcatggagttctca

SEQ ID NO: 858386 - DNA, 25 bp, Homo sapien
taaaacatcaattgtgcataactgg

SEQ ID NO: 858387 - DNA, 25 bp, Homo sapien
cctttggaactaagatcaccttgaa

SEQ ID NO: 858388 - DNA, 25 bp, Homo sapien
tactccaggacaagatgccttgttg

SEQ ID NO: 858389 - DNA, 25 bp, Homo sapien
ggtgataattagactgtactccagg

SEQ ID NO: 858390 - DNA, 25 bp, Homo sapien
taacatctcatccatacacaaaaac

SEQ ID NO: 858391 - DNA, 25 bp, Homo sapien
gcagattgttcaccatatgaatcca

SEQ ID NO: 858392 - DNA, 25 bp, Homo sapien
ttaaaaccaggtagcacgtctgcaa

SEQ ID NO: 858393 - DNA, 25 bp, Homo sapien
atgaatccataggtcagagctgaga

SEQ ID NO: 858394 - DNA, 25 bp, Homo sapien
ggctgttacgctttttggactgttg

SEQ ID NO: 858395 - DNA, 25 bp, Homo sapien
caatgtctggtggtatgtctgtttc

SEQ ID NO: 858396 - DNA, 25 bp, Homo sapien
cttgaccttgacagaaccatttgcc

SEQ ID NO: 858397 - DNA, 25 bp, Homo sapien
gctaactgaggtgcatatgtctgtg

SEQ ID NO: 858398 - DNA, 25 bp, Homo sapien
cactgaagagatcttctacagtgac

SEQ ID NO: 858399 - DNA, 25 bp, Homo sapien
tatccacttagcctcggggtcatga

SEQ ID NO: 858400 - DNA, 25 bp, Homo sapien
tccacttagcctcggggtcatgaat

SEQ ID NO: 858401 - DNA, 25 bp, Homo sapien
cacttatccacttagcctcggggtc

SEQ ID NO: 858402 - DNA, 25 bp, Homo sapien
tacacgaacatacagtgaacacgaa

SEQ ID NO: 858403 - DNA, 25 bp, Homo sapien
atgcagcgggtgtacacgaacatac

SEQ ID NO: 858404 - DNA, 25 bp, Homo sapien
acaagtgcttgcatttgctgatgca

SEQ ID NO: 858405 - DNA, 25 bp, Homo sapien
cttgcatttgctgatgcagcgggtg

SEQ ID NO: 858406 - DNA, 25 bp, Homo sapien
ggtattcatgcacccaaacatcacg

SEQ ID NO: 858407 - DNA, 25 bp, Homo sapien
catgcacccaaacatcacgtggagg

SEQ ID NO: 858408 - DNA, 25 bp, Homo sapien
tattcatgcacccaaacatcacgtg

SEQ ID NO: 858409 - DNA, 25 bp, Homo sapien
ttcatgcacccaaacatcacgtgga

SEQ ID NO: 858410 - DNA, 25 bp, Homo sapien
gagtggactgatgccaagtctgcca

SEQ ID NO: 858411 - DNA, 25 bp, Homo sapien
ctccaaccctccgagtggactgatg

SEQ ID NO: 858412 - DNA, 25 bp, Homo sapien
gtgccggagtagagcctcggtcctt

SEQ ID NO: 858413 - DNA, 25 bp, Homo sapien
gctgctgggcttgagtccagccctc

SEQ ID NO: 858414 - DNA, 25 bp, Homo sapien
ttgcaattattgcttccgctgctgc

SEQ ID NO: 858415 - DNA, 25 bp, Homo sapien
caattcctgttgcaattattgcttc

SEQ ID NO: 858416 - DNA, 25 bp, Homo sapien
atgatactgtcttttgagttcttcc

SEQ ID NO: 858417 - DNA, 25 bp, Homo sapien
ctgctgctggcgctaaatgatactg

SEQ ID NO: 858418 - DNA, 25 bp, Homo sapien
tggatgtagccacgggctgcactaa

SEQ ID NO: 858419 - DNA, 25 bp, Homo sapien
ccacgggctgcactaatgagctggg

SEQ ID NO: 858420 - DNA, 25 bp, Homo sapien
ggctgcgtgctttggatgtagccac

SEQ ID NO: 858421 - DNA, 25 bp, Homo sapien
cacagcacttctgctgtgaccttca

SEQ ID NO: 858422 - DNA, 25 bp, Homo sapien
gtctgtcttctcctcacactcatgg

SEQ ID NO: 858423 - DNA, 25 bp, Homo sapien
gcagaaacgccctgagggtctgtct

SEQ ID NO: 858424 - DNA, 25 bp, Homo sapien
ggcctgcagaaacgccctgagggtc

SEQ ID NO: 858425 - DNA, 25 bp, Homo sapien
gaggggcctgcagaaacgccctgag

SEQ ID NO: 858426 - DNA, 25 bp, Homo sapien
gtttcccagcacacatttccaagtt

SEQ ID NO: 858427 - DNA, 25 bp, Homo sapien
cacactgtgggttcaaaggagcttg

SEQ ID NO: 858428 - DNA, 25 bp, Homo sapien
gaaggcctcgatcctgtttcccagc

SEQ ID NO: 858429 - DNA, 25 bp, Homo sapien
gcacaggcgttaggtctgttctcct

SEQ ID NO: 858430 - DNA, 25 bp, Homo sapien
accgtccatggtagccgttattctg

SEQ ID NO: 858431 - DNA, 25 bp, Homo sapien
tagccgttattctgctgttgaccag

SEQ ID NO: 858432 - DNA, 25 bp, Homo sapien
aaatccaggaccacacatagaaccg

SEQ ID NO: 858433 - DNA, 25 bp, Homo sapien
ggaccacacatagaaccgtccatgg

SEQ ID NO: 858434 - DNA, 25 bp, Homo sapien
ggtattgagcttttgggttgtaatg

SEQ ID NO: 858435 - DNA, 25 bp, Homo sapien
gaatatggtattgagcttttgggtt

SEQ ID NO: 858436 - DNA, 25 bp, Homo sapien
tatggtattgagcttttgggttgta

SEQ ID NO: 858437 - DNA, 25 bp, Homo sapien
aatatggtattgagcttttgggttg

SEQ ID NO: 858438 - DNA, 25 bp, Homo sapien
gatgctgagtctggcctcttgtaga

SEQ ID NO: 858439 - DNA, 25 bp, Homo sapien
tctggcctcttgtagatgaacaacc

SEQ ID NO: 858440 - DNA, 25 bp, Homo sapien
ctatacatctcatagatgctgagtc

SEQ ID NO: 858441 - DNA, 25 bp, Homo sapien
agatgaacaaccaagatttcaagca

SEQ ID NO: 858442 - DNA, 25 bp, Homo sapien
gtatttgtttcaacattccacagtc

SEQ ID NO: 858443 - DNA, 25 bp, Homo sapien
tatttgtttcaacattccacagtct

SEQ ID NO: 858444 - DNA, 25 bp, Homo sapien
tgttctctgtagatgaattctgtat

SEQ ID NO: 858445 - DNA, 25 bp, Homo sapien
tgaacacagtgtttgaagcggtggc

SEQ ID NO: 858446 - DNA, 25 bp, Homo sapien
ggcctccaggagtaaccacgtgata

SEQ ID NO: 858447 - DNA, 25 bp, Homo sapien
tcagtaatggaatggcggcctcagc

SEQ ID NO: 858448 - DNA, 25 bp, Homo sapien
tatcttataactgcagcgaccaagg

SEQ ID NO: 858449 - DNA, 25 bp, Homo sapien
tgagttctccctgaaatcaacaaac

SEQ ID NO: 858450 - DNA, 25 bp, Homo sapien
cactgccatggttaggtgtgattcc

SEQ ID NO: 858451 - DNA, 25 bp, Homo sapien
ccccgatgggtgctacagatgagtt

SEQ ID NO: 858452 - DNA, 25 bp, Homo sapien
gcttgtgaccatgccaggttaggtg

SEQ ID NO: 858453 - DNA, 25 bp, Homo sapien
catactctctatctggagatatttc

SEQ ID NO: 858454 - DNA, 25 bp, Homo sapien
tattttgtaggcagtaaaggataat

SEQ ID NO: 858455 - DNA, 25 bp, Homo sapien
taatgagatattagaataaagaaac

SEQ ID NO: 858456 - DNA, 25 bp, Homo sapien
caattattttgtaggcagtaaagga

SEQ ID NO: 858457 - DNA, 25 bp, Homo sapien
gtaggcagtaaaggataatactcac

SEQ ID NO: 858458 - DNA, 25 bp, Homo sapien
tcctcgctgatgctcgctgcaggtg

SEQ ID NO: 858459 - DNA, 25 bp, Homo sapien
gctcctcgctgatgctcgctgcagg

SEQ ID NO: 858460 - DNA, 25 bp, Homo sapien
cctcgctgatgctcgctgcaggtgt

SEQ ID NO: 858461 - DNA, 25 bp, Homo sapien
agctcctcgctgatgctcgctgcag

SEQ ID NO: 858462 - DNA, 25 bp, Homo sapien
ggtctactccagttatgccaagggt

SEQ ID NO: 858463 - DNA, 25 bp, Homo sapien
tcagactgtttccaccaggacgagg

SEQ ID NO: 858464 - DNA, 25 bp, Homo sapien
taattatcctcaggacatgcccgtg

SEQ ID NO: 858465 - DNA, 25 bp, Homo sapien
gggttttgccaggatcactacatct

SEQ ID NO: 858466 - DNA, 25 bp, Homo sapien
catggggaagacactcatactgttc

SEQ ID NO: 858467 - DNA, 25 bp, Homo sapien
ggggtataacatggggaagacactc

SEQ ID NO: 858468 - DNA, 25 bp, Homo sapien
taacatggggaagacactcatactg

SEQ ID NO: 858469 - DNA, 25 bp, Homo sapien
gggaagacactcatactgttcccca

SEQ ID NO: 858470 - DNA, 25 bp, Homo sapien
gtggccagcacagattgaagaagtg

SEQ ID NO: 858471 - DNA, 25 bp, Homo sapien
ctgattggcactgagaaaggtcacc

SEQ ID NO: 858472 - DNA, 25 bp, Homo sapien
ctgtggtccccgtgggtgtgcacgg

SEQ ID NO: 858473 - DNA, 25 bp, Homo sapien
tgtgcacgggtatgggagcccactc

SEQ ID NO: 858474 - DNA, 25 bp, Homo sapien
tcaaagtcccttggagtgcggggac

SEQ ID NO: 858475 - DNA, 25 bp, Homo sapien
tcggaaaaccgtcagcagtgctgtg

SEQ ID NO: 858476 - DNA, 25 bp, Homo sapien
ggcgtcccgagcgacgtggcaaaca

SEQ ID NO: 858477 - DNA, 25 bp, Homo sapien
cattgccaggatgggcgtcccgagc

SEQ ID NO: 858478 - DNA, 25 bp, Homo sapien
cgagcgacgtggcaaacactccttt

SEQ ID NO: 858479 - DNA, 25 bp, Homo sapien
gcgacgtggcaaacactcctttcac

SEQ ID NO: 858480 - DNA, 25 bp, Homo sapien
tgagctgagtaatcgtagcgactgg

SEQ ID NO: 858481 - DNA, 25 bp, Homo sapien
gcacaggatcgtccactagaggcag

SEQ ID NO: 858482 - DNA, 25 bp, Homo sapien
ttaaattgaaatcaggaagacattt

SEQ ID NO: 858483 - DNA, 25 bp, Homo sapien
tgagaggccgatgaatagcacagga

SEQ ID NO: 858484 - DNA, 25 bp, Homo sapien
caagctggcaatgctgtgctgtatc

SEQ ID NO: 858485 - DNA, 25 bp, Homo sapien
cgagacatagtcacgcaggcagtga

SEQ ID NO: 858486 - DNA, 25 bp, Homo sapien
gccacactcgtatgacaatggacag

SEQ ID NO: 858487 - DNA, 25 bp, Homo sapien
gtatccattgactgccgagacatag

SEQ ID NO: 858488 - DNA, 25 bp, Homo sapien
cactcggttgctctctggcccgaaa

SEQ ID NO: 858489 - DNA, 25 bp, Homo sapien
tgtagctgctgtgcattatccccgg

SEQ ID NO: 858490 - DNA, 25 bp, Homo sapien
gggtgagcagatgcgatgcctcaca

SEQ ID NO: 858491 - DNA, 25 bp, Homo sapien
tctctggcccgaaatctgcctgtag

SEQ ID NO: 858492 - DNA, 25 bp, Homo sapien
gcatctctgagaacaggccatttga

SEQ ID NO: 858493 - DNA, 25 bp, Homo sapien
gaagaagacacagtcggccaacatc

SEQ ID NO: 858494 - DNA, 25 bp, Homo sapien
catttgaaccagtggagggtccctc

SEQ ID NO: 858495 - DNA, 25 bp, Homo sapien
gtattcacgagggtccattgctgca

SEQ ID NO: 858496 - DNA, 25 bp, Homo sapien
ggaggcagggcacccatgtcctcat

SEQ ID NO: 858497 - DNA, 25 bp, Homo sapien
cctggaggcagggcacccatgtcct

SEQ ID NO: 858498 - DNA, 25 bp, Homo sapien
cttgtctgtaccagcagagagcaca

SEQ ID NO: 858499 - DNA, 25 bp, Homo sapien
caggcccttgtctgtaccagcagag

SEQ ID NO: 858500 - DNA, 25 bp, Homo sapien
gtgttcatggcattagtttggtaat

SEQ ID NO: 858501 - DNA, 25 bp, Homo sapien
tgtgttcatggcattagtttggtaa

SEQ ID NO: 858502 - DNA, 25 bp, Homo sapien
atgtgttcatggcattagtttggta

SEQ ID NO: 858503 - DNA, 25 bp, Homo sapien
gagatgggatgaattgtgggaagga

SEQ ID NO: 858504 - DNA, 25 bp, Homo sapien
ggagatgggatgaattgtgggaagg

SEQ ID NO: 858505 - DNA, 25 bp, Homo sapien
ctgggagatgggatgaattgtggga

SEQ ID NO: 858506 - DNA, 25 bp, Homo sapien
tgggagatgggatgaattgtgggaa

SEQ ID NO: 858507 - DNA, 25 bp, Homo sapien
gcatatactggctccaaatccaaaa

SEQ ID NO: 858508 - DNA, 25 bp, Homo sapien
ttttcttgctcgatttactgtcttc

SEQ ID NO: 858509 - DNA, 25 bp, Homo sapien
gactcattcgtaattctgctccaga

SEQ ID NO: 858510 - DNA, 25 bp, Homo sapien
gctgctgactcattcgtaattctgc

SEQ ID NO: 858511 - DNA, 25 bp, Homo sapien
gcctttgtattttgttttgtcagac

SEQ ID NO: 858512 - DNA, 25 bp, Homo sapien
tactgcctttgtattttgttttgtc

SEQ ID NO: 858513 - DNA, 25 bp, Homo sapien
tgcctttgtattttgttttgtcaga

SEQ ID NO: 858514 - DNA, 25 bp, Homo sapien
actgcctttgtattttgttttgtca

SEQ ID NO: 858515 - DNA, 25 bp, Homo sapien
ctgatgcggaagttgaaggatgatg

SEQ ID NO: 858516 - DNA, 25 bp, Homo sapien
gatgcggaagttgaaggatgatgga

SEQ ID NO: 858517 - DNA, 25 bp, Homo sapien
gcggaagttgaaggatgatggaaaa

SEQ ID NO: 858518 - DNA, 25 bp, Homo sapien
aagttgaaggatgatggaaaacttc

SEQ ID NO: 858519 - DNA, 25 bp, Homo sapien
ctgatggtccagtgaactgtaagtc

SEQ ID NO: 858520 - DNA, 25 bp, Homo sapien
ggctgatggtccagtgaactgtaag

SEQ ID NO: 858521 - DNA, 25 bp, Homo sapien
gctgatggtccagtgaactgtaagt

SEQ ID NO: 858522 - DNA, 25 bp, Homo sapien
tagacagtcccctaggagacagaaa

SEQ ID NO: 858523 - DNA, 25 bp, Homo sapien
gagtccgagaagatcaatcaaacag

SEQ ID NO: 858524 - DNA, 25 bp, Homo sapien
gaagttccgttaggtgctagatggc

SEQ ID NO: 858525 - DNA, 25 bp, Homo sapien
tactctgataaccttgaggagtccg

SEQ ID NO: 858526 - DNA, 25 bp, Homo sapien
gacgtaatatccagtatacgagtgt

SEQ ID NO: 858527 - DNA, 25 bp, Homo sapien
taatatccagtatacgagtgttgat

SEQ ID NO: 858528 - DNA, 25 bp, Homo sapien
tatccagtatacgagtgttgatata

SEQ ID NO: 858529 - DNA, 25 bp, Homo sapien
tcaggacgtaatatccagtatacga

SEQ ID NO: 858530 - DNA, 25 bp, Homo sapien
tcaggggcgctgtgttcagtgacat

SEQ ID NO: 858531 - DNA, 25 bp, Homo sapien
ggaagaattgagcaggttgagcaac

SEQ ID NO: 858532 - DNA, 25 bp, Homo sapien
caggttgagcaacgccgcttcaggg

SEQ ID NO: 858533 - DNA, 25 bp, Homo sapien
atttctcatcaatggccttatgaca

SEQ ID NO: 858534 - DNA, 25 bp, Homo sapien
gatcctcagacttagagctccgggc

SEQ ID NO: 858535 - DNA, 25 bp, Homo sapien
ctagatcctcagacttagagctccg

SEQ ID NO: 858536 - DNA, 25 bp, Homo sapien
tcctcagacttagagctccgggctg

SEQ ID NO: 858537 - DNA, 25 bp, Homo sapien
ctcagacttagagctccgggctgtg

SEQ ID NO: 858538 - DNA, 25 bp, Homo sapien
agacgaactggggagtgaactgcaa

SEQ ID NO: 858539 - DNA, 25 bp, Homo sapien
tttagcccacggaaggggagatctc

SEQ ID NO: 858540 - DNA, 25 bp, Homo sapien
tatcattaacagctaactgcttggg

SEQ ID NO: 858541 - DNA, 25 bp, Homo sapien
gagatctcatcgaggtagggtgcag

SEQ ID NO: 858542 - DNA, 25 bp, Homo sapien
ctgacacaattagggccccgcggca

SEQ ID NO: 858543 - DNA, 25 bp, Homo sapien
tcttctgactcatttggccctagct

SEQ ID NO: 858544 - DNA, 25 bp, Homo sapien
aattagggccccgcggcactgcaaa

SEQ ID NO: 858545 - DNA, 25 bp, Homo sapien
actcatttggccctagctccggcat

SEQ ID NO: 858546 - DNA, 25 bp, Homo sapien
agctccgactcagggagtttgccca

SEQ ID NO: 858547 - DNA, 25 bp, Homo sapien
tttctgaagccgttcgctggtatca

SEQ ID NO: 858548 - DNA, 25 bp, Homo sapien
gaagccgttcgctggtatcagctcc

SEQ ID NO: 858549 - DNA, 25 bp, Homo sapien
tctgaagccgttcgctggtatcagc

SEQ ID NO: 858550 - DNA, 25 bp, Homo sapien
tgactgcgtgaacactagggccaac

SEQ ID NO: 858551 - DNA, 25 bp, Homo sapien
tgcgtgaacactagggccaacacgc

SEQ ID NO: 858552 - DNA, 25 bp, Homo sapien
catgactgcgtgaacactagggcca

SEQ ID NO: 858553 - DNA, 25 bp, Homo sapien
gccaacacgccatggtgattcacca

SEQ ID NO: 858554 - DNA, 25 bp, Homo sapien
tggtgggtccagactttgaggatcc

SEQ ID NO: 858555 - DNA, 25 bp, Homo sapien
gccccatcctgcatactgaagtttt

SEQ ID NO: 858556 - DNA, 25 bp, Homo sapien
cagctgttggcctttagggccccat

SEQ ID NO: 858557 - DNA, 25 bp, Homo sapien
gcattgctgacttctggtgggtcca

SEQ ID NO: 858558 - DNA, 25 bp, Homo sapien
agatagctgatagaaaccgagaagg

SEQ ID NO: 858559 - DNA, 25 bp, Homo sapien
aggccagctcggcagtgagaaccag

SEQ ID NO: 858560 - DNA, 25 bp, Homo sapien
gtgggagccctcatcttagaaatag

SEQ ID NO: 858561 - DNA, 25 bp, Homo sapien
cccagcagttttgccaatttgagaa

SEQ ID NO: 858562 - DNA, 25 bp, Homo sapien
tggacctccagacagcatgctgcaa

SEQ ID NO: 858563 - DNA, 25 bp, Homo sapien
gtgtaggaggtcacatggttaggac

SEQ ID NO: 858564 - DNA, 25 bp, Homo sapien
agctggacctccagacagcacgctg

SEQ ID NO: 858565 - DNA, 25 bp, Homo sapien
gtagcccggaacacctgtgtaggag

SEQ ID NO: 858566 - DNA, 25 bp, Homo sapien
ctccctccacaggacgagaaacagg

SEQ ID NO: 858567 - DNA, 25 bp, Homo sapien
aggcgaccggaaaagcctccaaatg

SEQ ID NO: 858568 - DNA, 25 bp, Homo sapien
atgggacttggaagccctggcctga

SEQ ID NO: 858569 - DNA, 25 bp, Homo sapien
acaggagcaacttctcgtgggcagg

SEQ ID NO: 858570 - DNA, 25 bp, Homo sapien
atgtttattacgtttgccaccttat

SEQ ID NO: 858571 - DNA, 25 bp, Homo sapien
caaagatcactaatcccagataacc

SEQ ID NO: 858572 - DNA, 25 bp, Homo sapien
tatataggcacagttagtggctccc

SEQ ID NO: 858573 - DNA, 25 bp, Homo sapien
cagttagtggctcccaaaacaatta

SEQ ID NO: 858574 - DNA, 25 bp, Homo sapien
tctgaataatgatggtctttgccct

SEQ ID NO: 858575 - DNA, 25 bp, Homo sapien
ggagctccttgtctggttcatccat

SEQ ID NO: 858576 - DNA, 25 bp, Homo sapien
cctggaggagctccttgtctggttc

SEQ ID NO: 858577 - DNA, 25 bp, Homo sapien
ttctgaataatgatggtctttgccc

SEQ ID NO: 858578 - DNA, 25 bp, Homo sapien
gcccctgatgggtgcttcaaagcag

SEQ ID NO: 858579 - DNA, 25 bp, Homo sapien
tgtatgcttggtccacacatggccc

SEQ ID NO: 858580 - DNA, 25 bp, Homo sapien
aggccaaccttcctgaacagtatgc

SEQ ID NO: 858581 - DNA, 25 bp, Homo sapien
gactcaggcagagccggaatgtatg

SEQ ID NO: 858582 - DNA, 25 bp, Homo sapien
accaagctgtcatctggcagcagtg

SEQ ID NO: 858583 - DNA, 25 bp, Homo sapien
caggagcagcatataatataaaggg

SEQ ID NO: 858584 - DNA, 25 bp, Homo sapien
atccaggagcagcatataatataaa

SEQ ID NO: 858585 - DNA, 25 bp, Homo sapien
ccacatttgatcaggcatgcacctg

SEQ ID NO: 858586 - DNA, 25 bp, Homo sapien
ataccacatttgatcaggcatgcac

SEQ ID NO: 858587 - DNA, 25 bp, Homo sapien
cgtgtcattagtctgggcaaggatt

SEQ ID NO: 858588 - DNA, 25 bp, Homo sapien
ggaaatacttcgtgtcattagtctg

SEQ ID NO: 858589 - DNA, 25 bp, Homo sapien
cagtggaaatacttcgtgtcattag

SEQ ID NO: 858590 - DNA, 25 bp, Homo sapien
tacttcgtgtcattagtctgggcaa

SEQ ID NO: 858591 - DNA, 25 bp, Homo sapien
gaagcaatgtccactcaagcacaag

SEQ ID NO: 858592 - DNA, 25 bp, Homo sapien
tcttttcagagcaatgacaatcggc

SEQ ID NO: 858593 - DNA, 25 bp, Homo sapien
gaagactccgtttcccatttctgct

SEQ ID NO: 858594 - DNA, 25 bp, Homo sapien
ggccttcacgttgatgctgaagcaa

SEQ ID NO: 858595 - DNA, 25 bp, Homo sapien
tctgtggcctcaacccaactgtggc

SEQ ID NO: 858596 - DNA, 25 bp, Homo sapien
ctgcatctgcaatggattctgtggc

SEQ ID NO: 858597 - DNA, 25 bp, Homo sapien
ctgtggcctcaacccaactgtggca

SEQ ID NO: 858598 - DNA, 25 bp, Homo sapien
gatgtcagaagctcacactcatgag

SEQ ID NO: 858599 - DNA, 25 bp, Homo sapien
cagacatggcagctgcgtcagcagc

SEQ ID NO: 858600 - DNA, 25 bp, Homo sapien
catgagacccatacagaagaaccag

SEQ ID NO: 858601 - DNA, 25 bp, Homo sapien
agttttgtcgtcagctgcccggtga

SEQ ID NO: 858602 - DNA, 25 bp, Homo sapien
tgtttcccgacatgtgcacagtagt

SEQ ID NO: 858603 - DNA, 25 bp, Homo sapien
gcacagtagtagatattgttttcaa

SEQ ID NO: 858604 - DNA, 25 bp, Homo sapien
cactgaggccattgtaaatcacacc

SEQ ID NO: 858605 - DNA, 25 bp, Homo sapien
accttccttgccagtggagaccaca

SEQ ID NO: 858606 - DNA, 25 bp, Homo sapien
gctggggacatctccgggcacacca

SEQ ID NO: 858607 - DNA, 25 bp, Homo sapien
gggacatctccgggcacaccatttc

SEQ ID NO: 858608 - DNA, 25 bp, Homo sapien
tggggacatctccgggcacaccatt

SEQ ID NO: 858609 - DNA, 25 bp, Homo sapien
ggacatctccgggcacaccatttct

SEQ ID NO: 858610 - DNA, 25 bp, Homo sapien
agaggctcagggattgcaccccagg

SEQ ID NO: 858611 - DNA, 25 bp, Homo sapien
gctcagggattgcaccccaggcaga

SEQ ID NO: 858612 - DNA, 25 bp, Homo sapien
cagaggctcagggattgcaccccag

SEQ ID NO: 858613 - DNA, 25 bp, Homo sapien
aggctcagggattgcaccccaggca

SEQ ID NO: 858614 - DNA, 25 bp, Homo sapien
tctcagccattttctggtcagagcc

SEQ ID NO: 858615 - DNA, 25 bp, Homo sapien
actgaacttctaccaaacagcttct

SEQ ID NO: 858616 - DNA, 25 bp, Homo sapien
tctggtcagagccaactgaacttct

SEQ ID NO: 858617 - DNA, 25 bp, Homo sapien
gagccaactgaacttctaccaaaca

SEQ ID NO: 858618 - DNA, 25 bp, Homo sapien
gatttaaagtttggcactgaggcag

SEQ ID NO: 858619 - DNA, 25 bp, Homo sapien
ctggatttaaagtttggcactgagg

SEQ ID NO: 858620 - DNA, 25 bp, Homo sapien
ggatttaaagtttggcactgaggca

SEQ ID NO: 858621 - DNA, 25 bp, Homo sapien
atttaaagtttggcactgaggcagc

SEQ ID NO: 858622 - DNA, 25 bp, Homo sapien
cagaaactcccagtggcacgatgag

SEQ ID NO: 858623 - DNA, 25 bp, Homo sapien
ttgagatcccaaatacccttacagg

SEQ ID NO: 858624 - DNA, 25 bp, Homo sapien
cctttgcccgtaagtcccagaggct

SEQ ID NO: 858625 - DNA, 25 bp, Homo sapien
atcagagatgccagcggaggccaga

SEQ ID NO: 858626 - DNA, 25 bp, Homo sapien
gggacacagggccgcttgtcaccat

SEQ ID NO: 858627 - DNA, 25 bp, Homo sapien
gaggatccaggatgtgtggacaact

SEQ ID NO: 858628 - DNA, 25 bp, Homo sapien
tcagctgcacgccatgggacacagg

SEQ ID NO: 858629 - DNA, 25 bp, Homo sapien
caggatgtgtggacaactggctgca

SEQ ID NO: 858630 - DNA, 25 bp, Homo sapien
gagtcatggttataggcacgtccgt

SEQ ID NO: 858631 - DNA, 25 bp, Homo sapien
aactgggcttgcaggacaaggcctc

SEQ ID NO: 858632 - DNA, 25 bp, Homo sapien
tggacaccgtgagcaaaaggcatcg

SEQ ID NO: 858633 - DNA, 25 bp, Homo sapien
ggaaatacccaaatgcagcaagcct

SEQ ID NO: 858634 - DNA, 25 bp, Homo sapien
tctttcccgtcctatgctctctcac

SEQ ID NO: 858635 - DNA, 25 bp, Homo sapien
caccctcgctcagtaaagcctccat

SEQ ID NO: 858636 - DNA, 25 bp, Homo sapien
atccctctctttcccgtcctatgct

SEQ ID NO: 858637 - DNA, 25 bp, Homo sapien
tatgctctctcaccctcgctcagta

SEQ ID NO: 858638 - DNA, 25 bp, Homo sapien
gagcgagggtgttcatctacggata

SEQ ID NO: 858639 - DNA, 25 bp, Homo sapien
gtattttccgtcctatgcttcctca

SEQ ID NO: 858640 - DNA, 25 bp, Homo sapien
ggcctttcagattggatggagcctt

SEQ ID NO: 858641 - DNA, 25 bp, Homo sapien
ctgtaaagacccatgtcagcggcca

SEQ ID NO: 858642 - DNA, 25 bp, Homo sapien
gacatcatgtctacacttcaatagg

SEQ ID NO: 858643 - DNA, 25 bp, Homo sapien
cggagaagcggcctgctccggcaca

SEQ ID NO: 858644 - DNA, 25 bp, Homo sapien
acggtgcacacgctctgagcctggg

SEQ ID NO: 858645 - DNA, 25 bp, Homo sapien
tgggatgtggttgctacggagaagc

SEQ ID NO: 858646 - DNA, 25 bp, Homo sapien
gagaaaagagtgttttgccttccca

SEQ ID NO: 858647 - DNA, 25 bp, Homo sapien
gttttgccttcccacgcactcagtg

SEQ ID NO: 858648 - DNA, 25 bp, Homo sapien
gtgttttgccttcccacgcactcag

SEQ ID NO: 858649 - DNA, 25 bp, Homo sapien
aaagagtgttttgccttcccacgca

SEQ ID NO: 858650 - DNA, 25 bp, Homo sapien
tcttggatgcggatggagggacagc

SEQ ID NO: 858651 - DNA, 25 bp, Homo sapien
cacagtcacagatgtccgcatgccg

SEQ ID NO: 858652 - DNA, 25 bp, Homo sapien
ggcatgggcatcctccacagtcaca

SEQ ID NO: 858653 - DNA, 25 bp, Homo sapien
cacagatgtccgcatgccgcttctt

SEQ ID NO: 858654 - DNA, 25 bp, Homo sapien
atgacaaccccagtgtgcacctgtg

SEQ ID NO: 858655 - DNA, 25 bp, Homo sapien
tgtctcccatgacaaccccagtgtg

SEQ ID NO: 858656 - DNA, 25 bp, Homo sapien
tgtccgggtctcaaaacatcctatc

SEQ ID NO: 858657 - DNA, 25 bp, Homo sapien
cgggtctcaaaacatcctatcaagt

SEQ ID NO: 858658 - DNA, 25 bp, Homo sapien
cactatcatgggaaacctcttcatt

SEQ ID NO: 858659 - DNA, 25 bp, Homo sapien
gcttctactgacagagttacctcac

SEQ ID NO: 858660 - DNA, 25 bp, Homo sapien
gacagagttacctcactatcatggg

SEQ ID NO: 858661 - DNA, 25 bp, Homo sapien
tcactatcatgggaaacctcttcat

SEQ ID NO: 858662 - DNA, 25 bp, Homo sapien
gaagatggcaaaagttgtatccaga

SEQ ID NO: 858663 - DNA, 25 bp, Homo sapien
agaaagatacatccggggacagtcg

SEQ ID NO: 858664 - DNA, 25 bp, Homo sapien
aatggctgcttctctcttgaagatg

SEQ ID NO: 858665 - DNA, 25 bp, Homo sapien
tcagccccaggtaggatctgggctg

SEQ ID NO: 858666 - DNA, 25 bp, Homo sapien
aggcgagtctcgtgccatccggaga

SEQ ID NO: 858667 - DNA, 25 bp, Homo sapien
ccagtgtgcgatgtgtgtcttcaaa

SEQ ID NO: 858668 - DNA, 25 bp, Homo sapien
ggaatcattgatggcggcgtaggcg

SEQ ID NO: 858669 - DNA, 25 bp, Homo sapien
ccggtgtaagttgggagctccatga

SEQ ID NO: 858670 - DNA, 25 bp, Homo sapien
tcatctccagatcatgggtgggtcc

SEQ ID NO: 858671 - DNA, 25 bp, Homo sapien
caataacgtgtagggaaatgctggg

SEQ ID NO: 858672 - DNA, 25 bp, Homo sapien
catgggtgggtccatttaagccaat

SEQ ID NO: 858673 - DNA, 25 bp, Homo sapien
ctcatccgtggatcatcaggcggca

SEQ ID NO: 858674 - DNA, 25 bp, Homo sapien
gctgataccccagtgaccagttgtc

SEQ ID NO: 858675 - DNA, 25 bp, Homo sapien
tcattaaacctctagagccacaggc

SEQ ID NO: 858676 - DNA, 25 bp, Homo sapien
tgctgggggccaggttcattaaacc

SEQ ID NO: 858677 - DNA, 25 bp, Homo sapien
ttgggctgataccccagtgaccagt

SEQ ID NO: 858678 - DNA, 25 bp, Homo sapien
ttcaactctccaaaccagcgcacac

SEQ ID NO: 858679 - DNA, 25 bp, Homo sapien
tcaattcaactctccaaaccagcgc

SEQ ID NO: 858680 - DNA, 25 bp, Homo sapien
aattcaactctccaaaccagcgcac

SEQ ID NO: 858681 - DNA, 25 bp, Homo sapien
caattcaactctccaaaccagcgca

SEQ ID NO: 858682 - DNA, 25 bp, Homo sapien
ggtgtcatgggcagtgcatattggg

SEQ ID NO: 858683 - DNA, 25 bp, Homo sapien
agaaggctgagtttcgcatcagggt

SEQ ID NO: 858684 - DNA, 25 bp, Homo sapien
atggaggtgtcatgggcagtgcata

SEQ ID NO: 858685 - DNA, 25 bp, Homo sapien
agtttcgcatcagggtcagcatgga

SEQ ID NO: 858686 - DNA, 25 bp, Homo sapien
gtgactctgccttggcaaaccttgt

SEQ ID NO: 858687 - DNA, 25 bp, Homo sapien
caaaccttgtccagtgtttcagtgt

SEQ ID NO: 858688 - DNA, 25 bp, Homo sapien
gcccagtgactctgccttggcaaac

SEQ ID NO: 858689 - DNA, 25 bp, Homo sapien
tctgccttggcaaaccttgtccagt

SEQ ID NO: 858690 - DNA, 25 bp, Homo sapien
tgactgtactcagaaggcactgctg

SEQ ID NO: 858691 - DNA, 25 bp, Homo sapien
catacagggacatcattggcaccac

SEQ ID NO: 858692 - DNA, 25 bp, Homo sapien
cacatctcgtgtcatacagggacat

SEQ ID NO: 858693 - DNA, 25 bp, Homo sapien
gtgtctgcatgggtgacacatctcg

SEQ ID NO: 858694 - DNA, 25 bp, Homo sapien
agaatcctgtgctgcgggaatggct

SEQ ID NO: 858695 - DNA, 25 bp, Homo sapien
tcagcgagccgcaataatgccacac

SEQ ID NO: 858696 - DNA, 25 bp, Homo sapien
ccactgctcagcgagccgcaataat

SEQ ID NO: 858697 - DNA, 25 bp, Homo sapien
tgtgctgcgggaatggctgcccact

SEQ ID NO: 858698 - DNA, 25 bp, Homo sapien
tgaaatctggcttataaagaatctg

SEQ ID NO: 858699 - DNA, 25 bp, Homo sapien
gacacagccagcctgcgagcttctg

SEQ ID NO: 858700 - DNA, 25 bp, Homo sapien
cagcctgcgagcttctgaaatctgg

SEQ ID NO: 858701 - DNA, 25 bp, Homo sapien
aatctggcttataaagaatctgcac

SEQ ID NO: 858702 - DNA, 25 bp, Homo sapien
tggaaacgccaaacacagcatgagc

SEQ ID NO: 858703 - DNA, 25 bp, Homo sapien
ccccgcacgacagaagccaggggac

SEQ ID NO: 858704 - DNA, 25 bp, Homo sapien
gcaggacccccgcacgacagaagcc

SEQ ID NO: 858705 - DNA, 25 bp, Homo sapien
ctggaaacgccaaacacagcatgag

SEQ ID NO: 858706 - DNA, 25 bp, Homo sapien
ggttcagccaggtcacggcgacctt

SEQ ID NO: 858707 - DNA, 25 bp, Homo sapien
ggcccacttcaccatggtgatgtag

SEQ ID NO: 858708 - DNA, 25 bp, Homo sapien
gtgaggatggacacgttctgcgccc

SEQ ID NO: 858709 - DNA, 25 bp, Homo sapien
cccgtggtggcgtcgcagagggtga

SEQ ID NO: 858710 - DNA, 25 bp, Homo sapien
agggctgagacgactctggcgccac

SEQ ID NO: 858711 - DNA, 25 bp, Homo sapien
tcgggcgcgtctgaccatcggttct

SEQ ID NO: 858712 - DNA, 25 bp, Homo sapien
ttcggtcgggtctgcggcagcgcct

SEQ ID NO: 858713 - DNA, 25 bp, Homo sapien
tggcaattcacggatgggttcggtc

SEQ ID NO: 858714 - DNA, 25 bp, Homo sapien
tgtctgtggagccaggcctcacttt

SEQ ID NO: 858715 - DNA, 25 bp, Homo sapien
aggcctcactttcatcctcgtgttt

SEQ ID NO: 858716 - DNA, 25 bp, Homo sapien
tggagccaggcctcactttcatcct

SEQ ID NO: 858717 - DNA, 25 bp, Homo sapien
gccaggcctcactttcatcctcgtg

SEQ ID NO: 858718 - DNA, 25 bp, Homo sapien
aagtgggcctggcatagggcctcct

SEQ ID NO: 858719 - DNA, 25 bp, Homo sapien
cacaaagtgggcctggcatagggcc

SEQ ID NO: 858720 - DNA, 25 bp, Homo sapien
aaacacaaagtgggcctggcatagg

SEQ ID NO: 858721 - DNA, 25 bp, Homo sapien
ctcctcctgttcaaacacaaagtgg

SEQ ID NO: 858722 - DNA, 25 bp, Homo sapien
tctgttcttgcaccgggtccttgga

SEQ ID NO: 858723 - DNA, 25 bp, Homo sapien
ttcttgcaccgggtccttggaagat

SEQ ID NO: 858724 - DNA, 25 bp, Homo sapien
ttggaagatcggtggacctaagcag

SEQ ID NO: 858725 - DNA, 25 bp, Homo sapien
tgcaccgggtccttggaagatcggt

SEQ ID NO: 858726 - DNA, 25 bp, Homo sapien
tcaaggagcttcacacgaatgcggg

SEQ ID NO: 858727 - DNA, 25 bp, Homo sapien
gaaagtttccatccgtgaacaccaa

SEQ ID NO: 858728 - DNA, 25 bp, Homo sapien
gaacaccaattagttggttgcgaga

SEQ ID NO: 858729 - DNA, 25 bp, Homo sapien
ctaatggtaaataaaccccagctgg

SEQ ID NO: 858730 - DNA, 25 bp, Homo sapien
cgaggacaccgtgatgtgatagaat

SEQ ID NO: 858731 - DNA, 25 bp, Homo sapien
gacgaggacaccgtgatgtgataga

SEQ ID NO: 858732 - DNA, 25 bp, Homo sapien
ctgggacgaggacaccgtgatgtga

SEQ ID NO: 858733 - DNA, 25 bp, Homo sapien
ggacaccgtgatgtgatagaatttc

SEQ ID NO: 858734 - DNA, 25 bp, Homo sapien
ggctaggatcttggtcacgtcccag

SEQ ID NO: 858735 - DNA, 25 bp, Homo sapien
actggatgttgtcgttgctgctgtt

SEQ ID NO: 858736 - DNA, 25 bp, Homo sapien
cccttctcatcgtaggctaggatct

SEQ ID NO: 858737 - DNA, 25 bp, Homo sapien
atggactggatgttgtcgttgctgc

SEQ ID NO: 858738 - DNA, 25 bp, Homo sapien
ctgtagagttgtcgtctccgaggca

SEQ ID NO: 858739 - DNA, 25 bp, Homo sapien
tgtagagttgtcgtctccgaggcag

SEQ ID NO: 858740 - DNA, 25 bp, Homo sapien
tagagttgtcgtctccgaggcaggt

SEQ ID NO: 858741 - DNA, 25 bp, Homo sapien
gagttgtcgtctccgaggcaggtcc

SEQ ID NO: 858742 - DNA, 25 bp, Homo sapien
gaaggaagcgctgaagtaggtgcag

SEQ ID NO: 858743 - DNA, 25 bp, Homo sapien
gcactgcctgttgaagttgcccacc

SEQ ID NO: 858744 - DNA, 25 bp, Homo sapien
ggcactgcctgttgaagttgcccac

SEQ ID NO: 858745 - DNA, 25 bp, Homo sapien
ttctgcggattttcaagattttaga

SEQ ID NO: 858746 - DNA, 25 bp, Homo sapien
ctgagcttgtgttgagcaagaggct

SEQ ID NO: 858747 - DNA, 25 bp, Homo sapien
cctgttctgcggattttcaagattt

SEQ ID NO: 858748 - DNA, 25 bp, Homo sapien
gttctgcggattttcaagattttag

SEQ ID NO: 858749 - DNA, 25 bp, Homo sapien
gactggggcactaatgttatatttc

SEQ ID NO: 858750 - DNA, 25 bp, Homo sapien
cggggactggggcactaatgttata

SEQ ID NO: 858751 - DNA, 25 bp, Homo sapien
acgttgcggggactggggcactaat

SEQ ID NO: 858752 - DNA, 25 bp, Homo sapien
taacgttgcggggactggggcacta

SEQ ID NO: 858753 - DNA, 25 bp, Homo sapien
attatgttttgcagcgagaggatgt

SEQ ID NO: 858754 - DNA, 25 bp, Homo sapien
tgttttgcagcgagaggatgtagga

SEQ ID NO: 858755 - DNA, 25 bp, Homo sapien
tatgttttgcagcgagaggatgtag

SEQ ID NO: 858756 - DNA, 25 bp, Homo sapien
ttatgttttgcagcgagaggatgta

SEQ ID NO: 858757 - DNA, 25 bp, Homo sapien
atttccttcccaggcgctcggtctg

SEQ ID NO: 858758 - DNA, 25 bp, Homo sapien
ttggctatactctcgtccaggtggg

SEQ ID NO: 858759 - DNA, 25 bp, Homo sapien
tgcagtggtgccctgttggctatac

SEQ ID NO: 858760 - DNA, 25 bp, Homo sapien
tgaatgcggattctgatgccaggtg

SEQ ID NO: 858761 - DNA, 25 bp, Homo sapien
cggtcagtcatttccctctcatcta

SEQ ID NO: 858762 - DNA, 25 bp, Homo sapien
aatcggtcagtcatttccctctcat

SEQ ID NO: 858763 - DNA, 25 bp, Homo sapien
atcggtcagtcatttccctctcatc

SEQ ID NO: 858764 - DNA, 25 bp, Homo sapien
tcggtcagtcatttccctctcatct

SEQ ID NO: 858765 - DNA, 25 bp, Homo sapien
tttcttggaagacaatttatgcgtg

SEQ ID NO: 858766 - DNA, 25 bp, Homo sapien
aataagtgacaaatatcccttttct

SEQ ID NO: 858767 - DNA, 25 bp, Homo sapien
ctgactgacagctggtagaataagt

SEQ ID NO: 858768 - DNA, 25 bp, Homo sapien
gacagatgctcacgtcggtgacgaa

SEQ ID NO: 858769 - DNA, 25 bp, Homo sapien
ctgcatgggtcagagcccaggggaa

SEQ ID NO: 858770 - DNA, 25 bp, Homo sapien
tgcatgggtcagagcccaggggaaa

SEQ ID NO: 858771 - DNA, 25 bp, Homo sapien
catgggtcagagcccaggggaaaca

SEQ ID NO: 858772 - DNA, 25 bp, Homo sapien
atgggtcagagcccaggggaaacat

SEQ ID NO: 858773 - DNA, 25 bp, Homo sapien
tggtccttgtggaggcatactgaca

SEQ ID NO: 858774 - DNA, 25 bp, Homo sapien
ggtccttgtggaggcatactgacat

SEQ ID NO: 858775 - DNA, 25 bp, Homo sapien
gaagatggtccttgtggaggcatac

SEQ ID NO: 858776 - DNA, 25 bp, Homo sapien
gatggtccttgtggaggcatactga

SEQ ID NO: 858777 - DNA, 25 bp, Homo sapien
ggagaaggttcacaactacagccat

SEQ ID NO: 858778 - DNA, 25 bp, Homo sapien
acggtgagaggcaagaacagagtcc

SEQ ID NO: 858779 - DNA, 25 bp, Homo sapien
cctggagaaggttcacaactacagc

SEQ ID NO: 858780 - DNA, 25 bp, Homo sapien
agagtccgtggtagagaatcctgga

SEQ ID NO: 858781 - DNA, 25 bp, Homo sapien
ctgacgttggggcagggtggcttct

SEQ ID NO: 858782 - DNA, 25 bp, Homo sapien
gcagggtggcttctgagggtgaagg

SEQ ID NO: 858783 - DNA, 25 bp, Homo sapien
agggtgaaggagggcacccactcac

SEQ ID NO: 858784 - DNA, 25 bp, Homo sapien
tctgagggtgaaggagggcacccac

SEQ ID NO: 858785 - DNA, 25 bp, Homo sapien
ctctccacagtggacgactggtcgt

SEQ ID NO: 858786 - DNA, 25 bp, Homo sapien
tgactgctattgaaagcccttggtg

SEQ ID NO: 858787 - DNA, 25 bp, Homo sapien
tcgtggattggtgtggattcatcct

SEQ ID NO: 858788 - DNA, 25 bp, Homo sapien
gcatctggctcctgactgctattga

SEQ ID NO: 858789 - DNA, 25 bp, Homo sapien
gagggtagcgacttccattctcagc

SEQ ID NO: 858790 - DNA, 25 bp, Homo sapien
gcgacttccattctcagctatctgt

SEQ ID NO: 858791 - DNA, 25 bp, Homo sapien
tgtgtcctgagggtagcgacttcca

SEQ ID NO: 858792 - DNA, 25 bp, Homo sapien
tctcagctatctgtaaggtgggaga

SEQ ID NO: 858793 - DNA, 25 bp, Homo sapien
ccagagatgagaattccgtggtcag

SEQ ID NO: 858794 - DNA, 25 bp, Homo sapien
caacatttgccatggtcatgggaaa

SEQ ID NO: 858795 - DNA, 25 bp, Homo sapien
ccgacaaagaggttctggtctaagt

SEQ ID NO: 858796 - DNA, 25 bp, Homo sapien
tggtgtctgcctgtaccgacaaaga

SEQ ID NO: 858797 - DNA, 25 bp, Homo sapien
atagcaagtgtcacactgagttgca

SEQ ID NO: 858798 - DNA, 25 bp, Homo sapien
gaagaaagtgccataagtaccaata

SEQ ID NO: 858799 - DNA, 25 bp, Homo sapien
gccataagtaccaataatagcaagt

SEQ ID NO: 858800 - DNA, 25 bp, Homo sapien
gctgcaggtatttctcccgtgtgct

SEQ ID NO: 858801 - DNA, 25 bp, Homo sapien
ctggccagtgcccatccacaggtcc

SEQ ID NO: 858802 - DNA, 25 bp, Homo sapien
agtgcccatccacaggtccagatga

SEQ ID NO: 858803 - DNA, 25 bp, Homo sapien
tgcccatccacaggtccagatgagc

SEQ ID NO: 858804 - DNA, 25 bp, Homo sapien
ccatccacaggtccagatgagctga

SEQ ID NO: 858805 - DNA, 25 bp, Homo sapien
tctgttgtgttgtgcaccgtcacca

SEQ ID NO: 858806 - DNA, 25 bp, Homo sapien
ttgtgcaccgtcaccataggaacac

SEQ ID NO: 858807 - DNA, 25 bp, Homo sapien
ttgtgttgtgcaccgtcaccatagg

SEQ ID NO: 858808 - DNA, 25 bp, Homo sapien
tcttatctgttgtgttgtgcaccgt

SEQ ID NO: 858809 - DNA, 25 bp, Homo sapien
ggagacacggagtcacctctgtccc

SEQ ID NO: 858810 - DNA, 25 bp, Homo sapien
tccccagacctaggggaactgcgga

SEQ ID NO: 858811 - DNA, 25 bp, Homo sapien
ctggagacacggagtcacctctgtc

SEQ ID NO: 858812 - DNA, 25 bp, Homo sapien
aactgcggacccgggccatgaagtt

SEQ ID NO: 858813 - DNA, 25 bp, Homo sapien
cctccagttctcctggagcttgaag

SEQ ID NO: 858814 - DNA, 25 bp, Homo sapien
agtaccaccacagagataggaatca

SEQ ID NO: 858815 - DNA, 25 bp, Homo sapien
ccacagagataggaatcagggagcc

SEQ ID NO: 858816 - DNA, 25 bp, Homo sapien
atcagggagccgctgatgctcgatg

SEQ ID NO: 858817 - DNA, 25 bp, Homo sapien
tcagtgcattttgtttggggaagac

SEQ ID NO: 858818 - DNA, 25 bp, Homo sapien
catccaagatgcaccagtttgacag

SEQ ID NO: 858819 - DNA, 25 bp, Homo sapien
gaagcaccaggcacctgccttctca

SEQ ID NO: 858820 - DNA, 25 bp, Homo sapien
aagatgcaccagtttgacagacaaa

SEQ ID NO: 858821 - DNA, 25 bp, Homo sapien
cacaccacgaacaagatgctgctgg

SEQ ID NO: 858822 - DNA, 25 bp, Homo sapien
ggaggctctgatgtggtccaaccac

SEQ ID NO: 858823 - DNA, 25 bp, Homo sapien
tgtcggctgcctgatatgcacatcc

SEQ ID NO: 858824 - DNA, 25 bp, Homo sapien
gcccaaaggctgatgtgtgaagtgc

SEQ ID NO: 858825 - DNA, 25 bp, Homo sapien
tcatctcaatgggagtgcaggccgg

SEQ ID NO: 858826 - DNA, 25 bp, Homo sapien
caggccgggcatcgctctggatttg

SEQ ID NO: 858827 - DNA, 25 bp, Homo sapien
gagctgcaggtgtgactgcttctgc

SEQ ID NO: 858828 - DNA, 25 bp, Homo sapien
ctgagaacgagctgcaggtgtgact

SEQ ID NO: 858829 - DNA, 25 bp, Homo sapien
ctggctcggatggaccccgggggtg

SEQ ID NO: 858830 - DNA, 25 bp, Homo sapien
tctcttccctgtgacgtggaaggct

SEQ ID NO: 858831 - DNA, 25 bp, Homo sapien
cttccctgtgacgtggaaggcttct

SEQ ID NO: 858832 - DNA, 25 bp, Homo sapien
ggggctcccacaggtttaacagcca

SEQ ID NO: 858833 - DNA, 25 bp, Homo sapien
gcatctcttccctgtgacgtggaag

SEQ ID NO: 858834 - DNA, 25 bp, Homo sapien
cacgtctctaagtgggcctgccttt

SEQ ID NO: 858835 - DNA, 25 bp, Homo sapien
ccacacgtcgagttggcatccacgt

SEQ ID NO: 858836 - DNA, 25 bp, Homo sapien
gctgcattgcaagccacaccgcaat

SEQ ID NO: 858837 - DNA, 25 bp, Homo sapien
catctggcgttgcttcatggaccca

SEQ ID NO: 858838 - DNA, 25 bp, Homo sapien
tgagcaaaaactacttgaggacaga

SEQ ID NO: 858839 - DNA, 25 bp, Homo sapien
gatgcagccatgttaagacctaggg

SEQ ID NO: 858840 - DNA, 25 bp, Homo sapien
ggcatgacttggcaaggtcccctca

SEQ ID NO: 858841 - DNA, 25 bp, Homo sapien
tgtgggtcttaggtagaaacttgcc

SEQ ID NO: 858842 - DNA, 25 bp, Homo sapien
agtttccggatctgagagttctggt

SEQ ID NO: 858843 - DNA, 25 bp, Homo sapien
cagtttccggatctgagagttctgg

SEQ ID NO: 858844 - DNA, 25 bp, Homo sapien
gtttccggatctgagagttctggtt

SEQ ID NO: 858845 - DNA, 25 bp, Homo sapien
gcgtcacacgcacaggttttggtat

SEQ ID NO: 858846 - DNA, 25 bp, Homo sapien
acaggttttggtatgattcttccca

SEQ ID NO: 858847 - DNA, 25 bp, Homo sapien
tccgtggcgtcacacgcacaggttt

SEQ ID NO: 858848 - DNA, 25 bp, Homo sapien
cagaggtttttgttctccgtggcgt

SEQ ID NO: 858849 - DNA, 25 bp, Homo sapien
caatgtccctgtattccactttagg

SEQ ID NO: 858850 - DNA, 25 bp, Homo sapien
cactttaggcatctgtcggtcattt

SEQ ID NO: 858851 - DNA, 25 bp, Homo sapien
catctgtcggtcatttatggccttc

SEQ ID NO: 858852 - DNA, 25 bp, Homo sapien
tgtattccactttaggcatctgtcg

SEQ ID NO: 858853 - DNA, 25 bp, Homo sapien
gatgactgcactgtgtcacagccca

SEQ ID NO: 858854 - DNA, 25 bp, Homo sapien
tgactgcactgtgtcacagcccacg

SEQ ID NO: 858855 - DNA, 25 bp, Homo sapien
gcactgtgtcacagcccacgttttc

SEQ ID NO: 858856 - DNA, 25 bp, Homo sapien
ctgcactgtgtcacagcccacgttt

SEQ ID NO: 858857 - DNA, 25 bp, Homo sapien
gtgtcggtgaaggttgctggcttca

SEQ ID NO: 858858 - DNA, 25 bp, Homo sapien
tgggtggtgtcggtgaaggttgctg

SEQ ID NO: 858859 - DNA, 25 bp, Homo sapien
tggtgtcggtgaaggttgctggctt

SEQ ID NO: 858860 - DNA, 25 bp, Homo sapien
tagtgggtggtgtcggtgaaggttg

SEQ ID NO: 858861 - DNA, 25 bp, Homo sapien
caggagcttggtcccttggaagccg

SEQ ID NO: 858862 - DNA, 25 bp, Homo sapien
ccgtggctgctcaccatcaccgtct

SEQ ID NO: 858863 - DNA, 25 bp, Homo sapien
ctgccacggccgtcacactttacca

SEQ ID NO: 858864 - DNA, 25 bp, Homo sapien
tcccagctcacctcgaacttctcag

SEQ ID NO: 858865 - DNA, 25 bp, Homo sapien
taacggtgatgatcatggtcgcggc

SEQ ID NO: 858866 - DNA, 25 bp, Homo sapien
tgcccataacggtgatgatcatggt

SEQ ID NO: 858867 - DNA, 25 bp, Homo sapien
gctcccctgcccataacggtgatga

SEQ ID NO: 858868 - DNA, 25 bp, Homo sapien
ccctgcccataacggtgatgatcat

SEQ ID NO: 858869 - DNA, 25 bp, Homo sapien
actggtgtcagacggacccacttgg

SEQ ID NO: 858870 - DNA, 25 bp, Homo sapien
gcctgcacctgtctcactggtggca

SEQ ID NO: 858871 - DNA, 25 bp, Homo sapien
acactggtgtcagacggacccactt

SEQ ID NO: 858872 - DNA, 25 bp, Homo sapien
ggtgtcagacggacccacttggtct

SEQ ID NO: 858873 - DNA, 25 bp, Homo sapien
agggtgctgcgactttcccctgggc

SEQ ID NO: 858874 - DNA, 25 bp, Homo sapien
agccaagtgtcgaaggggagcctga

SEQ ID NO: 858875 - DNA, 25 bp, Homo sapien
caggcagagccaagtgtcgaagggg

SEQ ID NO: 858876 - DNA, 25 bp, Homo sapien
gcctgagggtgctgcgactttcccc

SEQ ID NO: 858877 - DNA, 25 bp, Homo sapien
cagcagcaggacgcctgcaggctgt

SEQ ID NO: 858878 - DNA, 25 bp, Homo sapien
aaccagcagcaggacgcctgcaggc

SEQ ID NO: 858879 - DNA, 25 bp, Homo sapien
ctcaaccagcagcaggacgcctgca

SEQ ID NO: 858880 - DNA, 25 bp, Homo sapien
gcagcaggacgcctgcaggctgtgg

SEQ ID NO: 858881 - DNA, 25 bp, Homo sapien
tggcagcagccgcttggtgctctgg

SEQ ID NO: 858882 - DNA, 25 bp, Homo sapien
atgagcttcctgctacggcccagcc

SEQ ID NO: 858883 - DNA, 25 bp, Homo sapien
ttgctgggaccttgccccgcattgt

SEQ ID NO: 858884 - DNA, 25 bp, Homo sapien
agagggattcttcccatgagcttcc

SEQ ID NO: 858885 - DNA, 25 bp, Homo sapien
ggccacgcgcgtcctgtcaatgtac

SEQ ID NO: 858886 - DNA, 25 bp, Homo sapien
cacgcgcgtcctgtcaatgtactgc

SEQ ID NO: 858887 - DNA, 25 bp, Homo sapien
aatgtactgctccttcagcatcgtc

SEQ ID NO: 858888 - DNA, 25 bp, Homo sapien
gtcctgtcaatgtactgctccttca

SEQ ID NO: 858889 - DNA, 25 bp, Homo sapien
ccactgcacatgattctgagggagg

SEQ ID NO: 858890 - DNA, 25 bp, Homo sapien
tcaggctcagcgtctctttatggca

SEQ ID NO: 858891 - DNA, 25 bp, Homo sapien
ttagggcgcaagtcctggtctgcac

SEQ ID NO: 858892 - DNA, 25 bp, Homo sapien
gatgaggaagccgtactgcaacgca

SEQ ID NO: 858893 - DNA, 25 bp, Homo sapien
aggtgaatgtctggccttgattttc

SEQ ID NO: 858894 - DNA, 25 bp, Homo sapien
tttgaagtctgttattggagagaga

SEQ ID NO: 858895 - DNA, 25 bp, Homo sapien
gagtttgaagtctgttattggagag

SEQ ID NO: 858896 - DNA, 25 bp, Homo sapien
agagtttgaagtctgttattggaga

SEQ ID NO: 858897 - DNA, 25 bp, Homo sapien
tgctctgttgtcaagtccatggagg

SEQ ID NO: 858898 - DNA, 25 bp, Homo sapien
ctcgtatgctctgttgtcaagtcca

SEQ ID NO: 858899 - DNA, 25 bp, Homo sapien
ctctgttgtcaagtccatggaggcc

SEQ ID NO: 858900 - DNA, 25 bp, Homo sapien
tatgctctgttgtcaagtccatgga

SEQ ID NO: 858901 - DNA, 25 bp, Homo sapien
ctctgaaaatgcagtgctgcctcgg

SEQ ID NO: 858902 - DNA, 25 bp, Homo sapien
agggagctgactccctggttggact

SEQ ID NO: 858903 - DNA, 25 bp, Homo sapien
actctgaaaatgcagtgctgcctcg

SEQ ID NO: 858904 - DNA, 25 bp, Homo sapien
gctgactccctggttggactcagtt

SEQ ID NO: 858905 - DNA, 25 bp, Homo sapien
cccggagaaccgggatgccttatat

SEQ ID NO: 858906 - DNA, 25 bp, Homo sapien
gggagccaggtgttctgcttggaaa

SEQ ID NO: 858907 - DNA, 25 bp, Homo sapien
tgagaaggtaggtgaagtgtattga

SEQ ID NO: 858908 - DNA, 25 bp, Homo sapien
gcagggagccaggtgttctgcttgg

SEQ ID NO: 858909 - DNA, 25 bp, Homo sapien
agactcgatgggctaccttggtcat

SEQ ID NO: 858910 - DNA, 25 bp, Homo sapien
catcggcagtgggatgaatgatcag

SEQ ID NO: 858911 - DNA, 25 bp, Homo sapien
tgggatgaatgatcaggaactgctg

SEQ ID NO: 858912 - DNA, 25 bp, Homo sapien
gctgttcttccagcgcggagactcg

SEQ ID NO: 858913 - DNA, 25 bp, Homo sapien
gttgtgtaatgagttctgctgtgtg

SEQ ID NO: 858914 - DNA, 25 bp, Homo sapien
ttcccctaattagttgtgtaatgag

SEQ ID NO: 858915 - DNA, 25 bp, Homo sapien
attagttgtgtaatgagttctgctg

SEQ ID NO: 858916 - DNA, 25 bp, Homo sapien
taagctgtaattagcctttccccta

SEQ ID NO: 858917 - DNA, 25 bp, Homo sapien
taagaaaacgttgagcatgtgctga

SEQ ID NO: 858918 - DNA, 25 bp, Homo sapien
tgctgcagtagaaggccctgaacac

SEQ ID NO: 858919 - DNA, 25 bp, Homo sapien
ggctgaagtacagagcggagctatc

SEQ ID NO: 858920 - DNA, 25 bp, Homo sapien
tccatgaaaggaatgtcttgctcca

SEQ ID NO: 858921 - DNA, 25 bp, Homo sapien
ctccgcagcgggatagccccagcca

SEQ ID NO: 858922 - DNA, 25 bp, Homo sapien
cccactctccgcagcgggatagccc

SEQ ID NO: 858923 - DNA, 25 bp, Homo sapien
actctccgcagcgggatagccccag

SEQ ID NO: 858924 - DNA, 25 bp, Homo sapien
cgcagcgggatagccccagccacac

SEQ ID NO: 858925 - DNA, 25 bp, Homo sapien
cacttgatgctgttgtggacgggcc

SEQ ID NO: 858926 - DNA, 25 bp, Homo sapien
caggacatcctgctagtgcgtagta

SEQ ID NO: 858927 - DNA, 25 bp, Homo sapien
cattcatgttggacctgaagagacc

SEQ ID NO: 858928 - DNA, 25 bp, Homo sapien
tacctgttccaccaaaggagcagaa

SEQ ID NO: 858929 - DNA, 25 bp, Homo sapien
gggagttgcccacatgaacacatac

SEQ ID NO: 858930 - DNA, 25 bp, Homo sapien
ggagttgcccacatgaacacataca

SEQ ID NO: 858931 - DNA, 25 bp, Homo sapien
tggggagttgcccacatgaacacat

SEQ ID NO: 858932 - DNA, 25 bp, Homo sapien
cttggggagttgcccacatgaacac

SEQ ID NO: 858933 - DNA, 25 bp, Homo sapien
cctggggggttcagctcgccccata

SEQ ID NO: 858934 - DNA, 25 bp, Homo sapien
ctggggggttcagctcgccccatat

SEQ ID NO: 858935 - DNA, 25 bp, Homo sapien
ggtcctgctccctgatacccatgga

SEQ ID NO: 858936 - DNA, 25 bp, Homo sapien
tctgtgaaggcctttgctgtgccca

SEQ ID NO: 858937 - DNA, 25 bp, Homo sapien
gtgtctgtgaaggcctttgctgtgc

SEQ ID NO: 858938 - DNA, 25 bp, Homo sapien
ctccagatgcatggggtgtctgtga

SEQ ID NO: 858939 - DNA, 25 bp, Homo sapien
tagtacaagaggatatgggcaggaa

SEQ ID NO: 858940 - DNA, 25 bp, Homo sapien
tatgacactagactgcctcttcctg

SEQ ID NO: 858941 - DNA, 25 bp, Homo sapien
caggtacacatgactacgtccggct

SEQ ID NO: 858942 - DNA, 25 bp, Homo sapien
gctgtcattaggctatgatatgtca

SEQ ID NO: 858943 - DNA, 25 bp, Homo sapien
ggtttgctaaccatgccactcctga

SEQ ID NO: 858944 - DNA, 25 bp, Homo sapien
tggacatgcaccacccattcgtgaa

SEQ ID NO: 858945 - DNA, 25 bp, Homo sapien
cagaaggtgtggagtttagtgaaac

SEQ ID NO: 858946 - DNA, 25 bp, Homo sapien
gagaaattactctcccaggtatacg

SEQ ID NO: 858947 - DNA, 25 bp, Homo sapien
cgtcctctttcgctgtgactgtcag

SEQ ID NO: 858948 - DNA, 25 bp, Homo sapien
tacagatgctgtttgaggctggagc

SEQ ID NO: 858949 - DNA, 25 bp, Homo sapien
aagaagttgatgatggaccggtaca

SEQ ID NO: 858950 - DNA, 25 bp, Homo sapien
gatcctgaagcattccacgaagaag

SEQ ID NO: 858951 - DNA, 25 bp, Homo sapien
catcaagcgcaaagtctacacgtgg

SEQ ID NO: 858952 - DNA, 25 bp, Homo sapien
ccatggaggccgtgagtgatgaccc

SEQ ID NO: 858953 - DNA, 25 bp, Homo sapien
gagccacgtttgtgcttagagcgac

SEQ ID NO: 858954 - DNA, 25 bp, Homo sapien
gacacacatgctatggaacacccgg

SEQ ID NO: 858955 - DNA, 25 bp, Homo sapien
gaaatatacactgggaacaccggct

SEQ ID NO: 858956 - DNA, 25 bp, Homo sapien
ctagagtccagatcggccacagtgt

SEQ ID NO: 858957 - DNA, 25 bp, Homo sapien
taacggacgttcagagctcatgtgg

SEQ ID NO: 858958 - DNA, 25 bp, Homo sapien
cagtcatgtagcactcggatcggtc

SEQ ID NO: 858959 - DNA, 25 bp, Homo sapien
cgagcgtctgttgggtttgcgccca

SEQ ID NO: 858960 - DNA, 25 bp, Homo sapien
cagtcataggttcgattaggatccc

SEQ ID NO: 858961 - DNA, 25 bp, Homo sapien
tctggtcttcgcctccaggtggaag

SEQ ID NO: 858962 - DNA, 25 bp, Homo sapien
gtgtagcacatggactgcccacact

SEQ ID NO: 858963 - DNA, 25 bp, Homo sapien
ccccaggttccagccgtggtgactg

SEQ ID NO: 858964 - DNA, 25 bp, Homo sapien
ccagacacatgggaccatcctccac

SEQ ID NO: 858965 - DNA, 25 bp, Homo sapien
ctccacctcggagccctccacagcc

SEQ ID NO: 858966 - DNA, 25 bp, Homo sapien
caggttccagccgtggtgactggca

SEQ ID NO: 858967 - DNA, 25 bp, Homo sapien
gagctgatttctgcggctcccgctg

SEQ ID NO: 858968 - DNA, 25 bp, Homo sapien
actagttccttcgaagcctgtgcgc

SEQ ID NO: 858969 - DNA, 25 bp, Homo sapien
gcacgcgactctctccgagctgatt

SEQ ID NO: 858970 - DNA, 25 bp, Homo sapien
ccacacggacaaaagctgctgctct

SEQ ID NO: 858971 - DNA, 25 bp, Homo sapien
tgaaatatggaaatcctcccacacg

SEQ ID NO: 858972 - DNA, 25 bp, Homo sapien
ccacacgagtttgtagtagcgctgc

SEQ ID NO: 858973 - DNA, 25 bp, Homo sapien
tgagcccctctcttgggtgtccccg

SEQ ID NO: 858974 - DNA, 25 bp, Homo sapien
gtagtagcgctgcatgagcccctct

SEQ ID NO: 858975 - DNA, 25 bp, Homo sapien
gagagtccttttccagccatacaca

SEQ ID NO: 858976 - DNA, 25 bp, Homo sapien
ctggaggtgactgagatggccccac

SEQ ID NO: 858977 - DNA, 25 bp, Homo sapien
gaagggcttgccctcttccattggg

SEQ ID NO: 858978 - DNA, 25 bp, Homo sapien
tatatatagctaggtagggaacaca

SEQ ID NO: 858979 - DNA, 25 bp, Homo sapien
actgacttcaccagacatacgggcg

SEQ ID NO: 858980 - DNA, 25 bp, Homo sapien
aagtaggcttctgtggactcctgcc

SEQ ID NO: 858981 - DNA, 25 bp, Homo sapien
gctttaaggcaggagtttcgcgtca

SEQ ID NO: 858982 - DNA, 25 bp, Homo sapien
cagtgggactgatattgaagccgcc

SEQ ID NO: 858983 - DNA, 25 bp, Homo sapien
tgcctgaagacggatcctccaaaag

SEQ ID NO: 858984 - DNA, 25 bp, Homo sapien
gaactcagctgtcatgaatcgcctc

SEQ ID NO: 858985 - DNA, 25 bp, Homo sapien
cggatcctccaaaaggaactcagct

SEQ ID NO: 858986 - DNA, 25 bp, Homo sapien
tcatgaatcgcctccccaggaatct

SEQ ID NO: 858987 - DNA, 25 bp, Homo sapien
tgatgatcgctaagaggaacatggt

SEQ ID NO: 858988 - DNA, 25 bp, Homo sapien
agagggcttgatgcatggtacatga

SEQ ID NO: 858989 - DNA, 25 bp, Homo sapien
ctagtgtcatgagctttccccagca

SEQ ID NO: 858990 - DNA, 25 bp, Homo sapien
tttgtagttcttcgagtggcacgcc

SEQ ID NO: 858991 - DNA, 25 bp, Homo sapien
aatctggccacctgctatttttgga

SEQ ID NO: 858992 - DNA, 25 bp, Homo sapien
ttggaaaattatagtccctgggcca

SEQ ID NO: 858993 - DNA, 25 bp, Homo sapien
gaaataaaatgctaatgcgacccag

SEQ ID NO: 858994 - DNA, 25 bp, Homo sapien
tttgtcgatcagtgctctagccagg

SEQ ID NO: 858995 - DNA, 25 bp, Homo sapien
gtagtcaaaagaaattgtcccagag

SEQ ID NO: 858996 - DNA, 25 bp, Homo sapien
tgtcccagagtaagcccagatgttg

SEQ ID NO: 858997 - DNA, 25 bp, Homo sapien
cacaaaagaacaggcaagtatggcc

SEQ ID NO: 858998 - DNA, 25 bp, Homo sapien
ctatctatctatgttggaccagcaa

SEQ ID NO: 858999 - DNA, 25 bp, Homo sapien
atgtgtccccgaagagtttctctcg

SEQ ID NO: 859000 - DNA, 25 bp, Homo sapien
gtgtccccgaagagtttctctcgcc

SEQ ID NO: 859001 - DNA, 25 bp, Homo sapien
catgtgtccccgaagagtttctctc

SEQ ID NO: 859002 - DNA, 25 bp, Homo sapien
cacatgtgtccccgaagagtttctc

SEQ ID NO: 859003 - DNA, 25 bp, Homo sapien
cgtgcatgtcgactcctgcggtgcg

SEQ ID NO: 859004 - DNA, 25 bp, Homo sapien
tggcgtctaggctgccgtgcatgtc

SEQ ID NO: 859005 - DNA, 25 bp, Homo sapien
gctgctgcgcttccttcacatgctc

SEQ ID NO: 859006 - DNA, 25 bp, Homo sapien
aactgatggcgtctaggctgccgtg

SEQ ID NO: 859007 - DNA, 25 bp, Homo sapien
ggatgatgaatgttggaacccttgg

SEQ ID NO: 859008 - DNA, 25 bp, Homo sapien
tcaagggtgtctctgaaactggatg

SEQ ID NO: 859009 - DNA, 25 bp, Homo sapien
cagagcgactggtttgaatgggtaa

SEQ ID NO: 859010 - DNA, 25 bp, Homo sapien
tgaaagtcgttttcctcaacaagcc

SEQ ID NO: 859011 - DNA, 25 bp, Homo sapien
cctgcaggtataagtaggagtcagc

SEQ ID NO: 859012 - DNA, 25 bp, Homo sapien
ttagaattgcagaggtcactacctg

SEQ ID NO: 859013 - DNA, 25 bp, Homo sapien
tgggcctcagttctggccgcatggt

SEQ ID NO: 859014 - DNA, 25 bp, Homo sapien
taaaggacatttcagctattgctgg

SEQ ID NO: 859015 - DNA, 25 bp, Homo sapien
tctagttggaatgaggcttggtgca

SEQ ID NO: 859016 - DNA, 25 bp, Homo sapien
agtaaaatttgcctcagtcccagaa

SEQ ID NO: 859017 - DNA, 25 bp, Homo sapien
gaagaccttgatatcactgagagaa

SEQ ID NO: 859018 - DNA, 25 bp, Homo sapien
gagcttgctgtattccataccgcca

SEQ ID NO: 859019 - DNA, 25 bp, Homo sapien
gaatgatacccatccttgccgagtt

SEQ ID NO: 859020 - DNA, 25 bp, Homo sapien
tcagtggacctttccttaagcaggg

SEQ ID NO: 859021 - DNA, 25 bp, Homo sapien
taaggcgcagaggtcagaatgatac

SEQ ID NO: 859022 - DNA, 25 bp, Homo sapien
tgaccagtgtcaacctcagtggacc

SEQ ID NO: 859023 - DNA, 25 bp, Homo sapien
tgtgcacgcacagcagtggatctct

SEQ ID NO: 859024 - DNA, 25 bp, Homo sapien
gatgttcacaatgcagagttcgttc

SEQ ID NO: 859025 - DNA, 25 bp, Homo sapien
gtggatctctaactaaagtgtctgt

SEQ ID NO: 859026 - DNA, 25 bp, Homo sapien
tggagtgctcactcaaacgctggac

SEQ ID NO: 859027 - DNA, 25 bp, Homo sapien
agaggcataggtacgtttccccgct

SEQ ID NO: 859028 - DNA, 25 bp, Homo sapien
ccagaggcataggtacgtttccccg

SEQ ID NO: 859029 - DNA, 25 bp, Homo sapien
tcatttatgccgagaatattttgcc

SEQ ID NO: 859030 - DNA, 25 bp, Homo sapien
ccgagaatattttgccagaggcata

SEQ ID NO: 859031 - DNA, 25 bp, Homo sapien
attcagcgttcggtcactgagaaac

SEQ ID NO: 859032 - DNA, 25 bp, Homo sapien
tcagcgttcggtcactgagaaactc

SEQ ID NO: 859033 - DNA, 25 bp, Homo sapien
cacattcagcgttcggtcactgaga

SEQ ID NO: 859034 - DNA, 25 bp, Homo sapien
atcacattcagcgttcggtcactga

SEQ ID NO: 859035 - DNA, 25 bp, Homo sapien
agtggagtccgccagcgagtccgtc

SEQ ID NO: 859036 - DNA, 25 bp, Homo sapien
gtagagtggagtccgccagcgagtc

SEQ ID NO: 859037 - DNA, 25 bp, Homo sapien
gtgggtagagtggagtccgccagcg

SEQ ID NO: 859038 - DNA, 25 bp, Homo sapien
agtccgccagcgagtccgtcattgc

SEQ ID NO: 859039 - DNA, 25 bp, Homo sapien
ccaagcagccatctttccggaagct

SEQ ID NO: 859040 - DNA, 25 bp, Homo sapien
gaggaaaggtgttatccaagcagcc

SEQ ID NO: 859041 - DNA, 25 bp, Homo sapien
caatcgtagagtgtgcaggaggaaa

SEQ ID NO: 859042 - DNA, 25 bp, Homo sapien
tttccactatgaaggcaatcgtaga

SEQ ID NO: 859043 - DNA, 25 bp, Homo sapien
ttttaggcaaaatatttttacatca

SEQ ID NO: 859044 - DNA, 25 bp, Homo sapien
taggcaaaatatttttacatcacac

SEQ ID NO: 859045 - DNA, 25 bp, Homo sapien
ttaggcaaaatatttttacatcaca

SEQ ID NO: 859046 - DNA, 25 bp, Homo sapien
tatattttcatttaattttaggcaa

SEQ ID NO: 859047 - DNA, 25 bp, Homo sapien
ttgtcaaaaatctcagggcagaatc

SEQ ID NO: 859048 - DNA, 25 bp, Homo sapien
aaaatctcagggcagaatctatgag

SEQ ID NO: 859049 - DNA, 25 bp, Homo sapien
aatctcagggcagaatctatgagaa

SEQ ID NO: 859050 - DNA, 25 bp, Homo sapien
tcaaaaatctcagggcagaatctat

SEQ ID NO: 859051 - DNA, 25 bp, Homo sapien
agtaattggttaagaggcatgttca

SEQ ID NO: 859052 - DNA, 25 bp, Homo sapien
cgcttacttcgtactattgtcagta

SEQ ID NO: 859053 - DNA, 25 bp, Homo sapien
taataaatctttagaggacatcgct

SEQ ID NO: 859054 - DNA, 25 bp, Homo sapien
tagataagtgttagaacagctagga

SEQ ID NO: 859055 - DNA, 25 bp, Homo sapien
cttggacattgccactggaggtctt

SEQ ID NO: 859056 - DNA, 25 bp, Homo sapien
tggacattgccactggaggtcttcc

SEQ ID NO: 859057 - DNA, 25 bp, Homo sapien
ttggacattgccactggaggtcttc

SEQ ID NO: 859058 - DNA, 25 bp, Homo sapien
ggacattgccactggaggtcttcct

SEQ ID NO: 859059 - DNA, 25 bp, Homo sapien
tgatttggtgggaagtgcgcctcca

SEQ ID NO: 859060 - DNA, 25 bp, Homo sapien
tgggctcaccctgcatcccatttac

SEQ ID NO: 859061 - DNA, 25 bp, Homo sapien
ctgggctcaccctgcatcccattta

SEQ ID NO: 859062 - DNA, 25 bp, Homo sapien
taccaggtgatttggtgggaagtgc

SEQ ID NO: 859063 - DNA, 25 bp, Homo sapien
tttccagatgagcagaactacattc

SEQ ID NO: 859064 - DNA, 25 bp, Homo sapien
ctacattctccgagatgctgaggca

SEQ ID NO: 859065 - DNA, 25 bp, Homo sapien
ggtcacacttgccacacttcacgtg

SEQ ID NO: 859066 - DNA, 25 bp, Homo sapien
tatgggcgagaattttgtgggtcac

SEQ ID NO: 859067 - DNA, 25 bp, Homo sapien
tggtgacatttaaatatccgaaggc

SEQ ID NO: 859068 - DNA, 25 bp, Homo sapien
cgaaggctgtacaggtaaatgtagc

SEQ ID NO: 859069 - DNA, 25 bp, Homo sapien
taaatgtagctgtaatattatgtac

SEQ ID NO: 859070 - DNA, 25 bp, Homo sapien
ggttaattaccactgatctaggaga

SEQ ID NO: 859071 - DNA, 25 bp, Homo sapien
gaagcttgtctttctaggactggag

SEQ ID NO: 859072 - DNA, 25 bp, Homo sapien
agcagctatgggaagagggttcata

SEQ ID NO: 859073 - DNA, 25 bp, Homo sapien
aattgattatgagccaaatgactcc

SEQ ID NO: 859074 - DNA, 25 bp, Homo sapien
gattttaacctgagatctgcgggct

SEQ ID NO: 859075 - DNA, 25 bp, Homo sapien
tcttgtcaaccccagtttgccaatc

SEQ ID NO: 859076 - DNA, 25 bp, Homo sapien
tattatgctgtatggttggtaggaa

SEQ ID NO: 859077 - DNA, 25 bp, Homo sapien
aatacatagcccacaaatcctaaaa

SEQ ID NO: 859078 - DNA, 25 bp, Homo sapien
gtatatattattgggtttgagctgc

SEQ ID NO: 859079 - DNA, 25 bp, Homo sapien
tctgtcatgatgtggttgctcctgc

SEQ ID NO: 859080 - DNA, 25 bp, Homo sapien
ggccgttggtgaacagatccctgca

SEQ ID NO: 859081 - DNA, 25 bp, Homo sapien
ccgcgcccggtggtgttttctctat

SEQ ID NO: 859082 - DNA, 25 bp, Homo sapien
ggtgatctcacacaagttcttcaga

SEQ ID NO: 859083 - DNA, 25 bp, Homo sapien
gggcaacacccagctttagagatct

SEQ ID NO: 859084 - DNA, 25 bp, Homo sapien
ctccatcggctgcttttgggcaaca

SEQ ID NO: 859085 - DNA, 25 bp, Homo sapien
gaaagcgggtctgtaatgttccagc

SEQ ID NO: 859086 - DNA, 25 bp, Homo sapien
tgaaaattagtttgccaagcagcca

SEQ ID NO: 859087 - DNA, 25 bp, Homo sapien
aaagacactggaagctctagcgaca

SEQ ID NO: 859088 - DNA, 25 bp, Homo sapien
taaaacgtgtgcttgagcagagcca

SEQ ID NO: 859089 - DNA, 25 bp, Homo sapien
tcttattagtataggccaggaacca

SEQ ID NO: 859090 - DNA, 25 bp, Homo sapien
tgaacgtgcaaacaaggaatggcct

SEQ ID NO: 859091 - DNA, 25 bp, Homo sapien
tacatgccaagagagcgtgtaggct

SEQ ID NO: 859092 - DNA, 25 bp, Homo sapien
cctttggaaggacatgtgcaatgca

SEQ ID NO: 859093 - DNA, 25 bp, Homo sapien
ggtctagaacccagctcagagatag

SEQ ID NO: 859094 - DNA, 25 bp, Homo sapien
ttttagtgtcatgtcggccagcagg

SEQ ID NO: 859095 - DNA, 25 bp, Homo sapien
tggcaggtgccaaatatacgggtta

SEQ ID NO: 859096 - DNA, 25 bp, Homo sapien
tgatagtgacagagatgacctaaaa

SEQ ID NO: 859097 - DNA, 25 bp, Homo sapien
tacgggttatctatgccgcagcaac

SEQ ID NO: 859098 - DNA, 25 bp, Homo sapien
tgtaattctgtgtgagccttgaggt

SEQ ID NO: 859099 - DNA, 25 bp, Homo sapien
aacagccgggacacccaatcccact

SEQ ID NO: 859100 - DNA, 25 bp, Homo sapien
aggaggccgcagaaccgctcccgct

SEQ ID NO: 859101 - DNA, 25 bp, Homo sapien
tcaggtactactccaggtccggccg

SEQ ID NO: 859102 - DNA, 25 bp, Homo sapien
ggtccggccgcactcgcggccactg

SEQ ID NO: 859103 - DNA, 25 bp, Homo sapien
tgtagtattaacctgttgagcgcgg

SEQ ID NO: 859104 - DNA, 25 bp, Homo sapien
gaaaggctgcgttcatcatcatggc

SEQ ID NO: 859105 - DNA, 25 bp, Homo sapien
caacttccggtcgtgcaggtgtctt

SEQ ID NO: 859106 - DNA, 25 bp, Homo sapien
cgtgaccattagaatcgccgctgtg

SEQ ID NO: 859107 - DNA, 25 bp, Homo sapien
agacactgcgggtctgtctcagatt

SEQ ID NO: 859108 - DNA, 25 bp, Homo sapien
tgattttctgcttggcagaagtgac

SEQ ID NO: 859109 - DNA, 25 bp, Homo sapien
cacagttttacgactaggtaatagt

SEQ ID NO: 859110 - DNA, 25 bp, Homo sapien
gactaggtaatagtccgataatcac

SEQ ID NO: 859111 - DNA, 25 bp, Homo sapien
cattgcatgctgatcaacgaaccaa

SEQ ID NO: 859112 - DNA, 25 bp, Homo sapien
tgttaaattagtgtaccgcagagta

SEQ ID NO: 859113 - DNA, 25 bp, Homo sapien
ggtttcctgattacaaagggtgtca

SEQ ID NO: 859114 - DNA, 25 bp, Homo sapien
taaagcctggaaagtgatctaatct

SEQ ID NO: 859115 - DNA, 25 bp, Homo sapien
tagttttccgacactgaatagctac

SEQ ID NO: 859116 - DNA, 25 bp, Homo sapien
tgacgggatctttcctgcagagaag

SEQ ID NO: 859117 - DNA, 25 bp, Homo sapien
gaagcagtgctcctttgagttcgca

SEQ ID NO: 859118 - DNA, 25 bp, Homo sapien
gaatagctacatgacactggtggca

SEQ ID NO: 859119 - DNA, 25 bp, Homo sapien
gacttatcacgcagttcttgggcac

SEQ ID NO: 859120 - DNA, 25 bp, Homo sapien
cacatagtacgctgtttggcttaaa

SEQ ID NO: 859121 - DNA, 25 bp, Homo sapien
aaatcgaagatgaaggtggtggcca

SEQ ID NO: 859122 - DNA, 25 bp, Homo sapien
tcttgggcactcaacgtcagttaca

SEQ ID NO: 859123 - DNA, 25 bp, Homo sapien
cagtcgcttgttgcgtgttgttccc

SEQ ID NO: 859124 - DNA, 25 bp, Homo sapien
ggatgtgtgaccaaactggccaccc

SEQ ID NO: 859125 - DNA, 25 bp, Homo sapien
tgtaggattacagttcctgccctgt

SEQ ID NO: 859126 - DNA, 25 bp, Homo sapien
tgtgtgcaaattgtttaactgggaa

SEQ ID NO: 859127 - DNA, 25 bp, Homo sapien
ttaactccgtgctagggaagccagt

SEQ ID NO: 859128 - DNA, 25 bp, Homo sapien
tgttcaggaggacttaaggcggcca

SEQ ID NO: 859129 - DNA, 25 bp, Homo sapien
ttggccccaatttcctgctagtgag

SEQ ID NO: 859130 - DNA, 25 bp, Homo sapien
tgtgcccagagccaatccggatgtt

SEQ ID NO: 859131 - DNA, 25 bp, Homo sapien
gagaataagcactccgaagaccgag

SEQ ID NO: 859132 - DNA, 25 bp, Homo sapien
acagcttcggatatgggtgagacgc

SEQ ID NO: 859133 - DNA, 25 bp, Homo sapien
tcatgacgttggagacgcacttgcg

SEQ ID NO: 859134 - DNA, 25 bp, Homo sapien
ggtccagggctatggccgtcacgtt

SEQ ID NO: 859135 - DNA, 25 bp, Homo sapien
tctacatgtatagagtctttttgca

SEQ ID NO: 859136 - DNA, 25 bp, Homo sapien
tttgctgttgtttgtctacatgtat

SEQ ID NO: 859137 - DNA, 25 bp, Homo sapien
ttgctgttgtttgtctacatgtata

SEQ ID NO: 859138 - DNA, 25 bp, Homo sapien
tgtctacatgtatagagtctttttg

SEQ ID NO: 859139 - DNA, 25 bp, Homo sapien
tcattaagaggaccaaaaacagtgg

SEQ ID NO: 859140 - DNA, 25 bp, Homo sapien
gataatcacggagatctctcctgca

SEQ ID NO: 859141 - DNA, 25 bp, Homo sapien
caatctggataatcacggagatctc

SEQ ID NO: 859142 - DNA, 25 bp, Homo sapien
gatgaaacttcatcattaagaggac

SEQ ID NO: 859143 - DNA, 25 bp, Homo sapien
taaaatgtgctgcagcccttgttca

SEQ ID NO: 859144 - DNA, 25 bp, Homo sapien
aataaaatgtgctgcagcccttgtt

SEQ ID NO: 859145 - DNA, 25 bp, Homo sapien
ataaaatgtgctgcagcccttgttc

SEQ ID NO: 859146 - DNA, 25 bp, Homo sapien
ctgcaataagtaggatctgcttcca

SEQ ID NO: 859147 - DNA, 25 bp, Homo sapien
tactagagatgctgttcacactggg

SEQ ID NO: 859148 - DNA, 25 bp, Homo sapien
tggaggcttatcacactggtcacat

SEQ ID NO: 859149 - DNA, 25 bp, Homo sapien
tatactggaaacaccatggattctg

SEQ ID NO: 859150 - DNA, 25 bp, Homo sapien
cactgtgaatgctggtcaccctgat

SEQ ID NO: 859151 - DNA, 25 bp, Homo sapien
gtaagtcccctctataatgttagaa

SEQ ID NO: 859152 - DNA, 25 bp, Homo sapien
tttcctctggcataaagctcctact

SEQ ID NO: 859153 - DNA, 25 bp, Homo sapien
tctggcataaagctcctactgctgt

SEQ ID NO: 859154 - DNA, 25 bp, Homo sapien
taagtcccctctataatgttagaac

SEQ ID NO: 859155 - DNA, 25 bp, Homo sapien
tggggctgtttggcagagtccttca

SEQ ID NO: 859156 - DNA, 25 bp, Homo sapien
ggggctgtttggcagagtccttcac

SEQ ID NO: 859157 - DNA, 25 bp, Homo sapien
ctggggctgtttggcagagtccttc

SEQ ID NO: 859158 - DNA, 25 bp, Homo sapien
gaagttcttgaaggcgctgttgtag

SEQ ID NO: 859159 - DNA, 25 bp, Homo sapien
gactgatgagctcggtgagaaagaa

SEQ ID NO: 859160 - DNA, 25 bp, Homo sapien
acgaacacgccaatgaggatgccca

SEQ ID NO: 859161 - DNA, 25 bp, Homo sapien
ttgttgaaagccgtatagatcaggg

SEQ ID NO: 859162 - DNA, 25 bp, Homo sapien
tttgcgggcaaagaccatgactgtc

SEQ ID NO: 859163 - DNA, 25 bp, Homo sapien
gaagtagttaccctcagtgcctgtt

SEQ ID NO: 859164 - DNA, 25 bp, Homo sapien
tcagagacatagcagaccacaggca

SEQ ID NO: 859165 - DNA, 25 bp, Homo sapien
gacaatgtcgatcaccatgccagag

SEQ ID NO: 859166 - DNA, 25 bp, Homo sapien
gtcttaatctgtaataggcaggcag

SEQ ID NO: 859167 - DNA, 25 bp, Homo sapien
acaatcctagttcccactgctcagt

SEQ ID NO: 859168 - DNA, 25 bp, Homo sapien
agacagcaacccctgagcaccattt

SEQ ID NO: 859169 - DNA, 25 bp, Homo sapien
ttgagcagcttatcacaatcctagt

SEQ ID NO: 859170 - DNA, 25 bp, Homo sapien
tcactctggggtgggcatcgcccca

SEQ ID NO: 859171 - DNA, 25 bp, Homo sapien
ccttgtctctcccagtgcaacccca

SEQ ID NO: 859172 - DNA, 25 bp, Homo sapien
gtgtcaacagtcatggggacctgga

SEQ ID NO: 859173 - DNA, 25 bp, Homo sapien
tctggggtgggcatcgccccatctc

SEQ ID NO: 859174 - DNA, 25 bp, Homo sapien
atccaagttccatagcagcccaacc

SEQ ID NO: 859175 - DNA, 25 bp, Homo sapien
cgctgtggtagatgcagccgcagaa

SEQ ID NO: 859176 - DNA, 25 bp, Homo sapien
tctgcaccgtcagcatccccagggt

SEQ ID NO: 859177 - DNA, 25 bp, Homo sapien
ccaacccctcgctgtggtagatgca

SEQ ID NO: 859178 - DNA, 25 bp, Homo sapien
caaatccaaagggatgagctcagcc

SEQ ID NO: 859179 - DNA, 25 bp, Homo sapien
tcctaccagtgttgggagtgtggcc

SEQ ID NO: 859180 - DNA, 25 bp, Homo sapien
taaatactcacatgcggacacacgg

SEQ ID NO: 859181 - DNA, 25 bp, Homo sapien
tcagcctagaaagagccacagatgc

SEQ ID NO: 859182 - DNA, 25 bp, Homo sapien
ttgttagcgagcttcaaattaatga

SEQ ID NO: 859183 - DNA, 25 bp, Homo sapien
gtgctgttgttagcgagcttcaaat

SEQ ID NO: 859184 - DNA, 25 bp, Homo sapien
ctgttgttagcgagcttcaaattaa

SEQ ID NO: 859185 - DNA, 25 bp, Homo sapien
cgtgctgttgttagcgagcttcaaa

SEQ ID NO: 859186 - DNA, 25 bp, Homo sapien
gatggcattggtggctttaatgttg

SEQ ID NO: 859187 - DNA, 25 bp, Homo sapien
tggcagcacgacagtttgctgttgg

SEQ ID NO: 859188 - DNA, 25 bp, Homo sapien
tggtggctttaatgttggctctgct

SEQ ID NO: 859189 - DNA, 25 bp, Homo sapien
gctggcagcacgacagtttgctgtt

SEQ ID NO: 859190 - DNA, 25 bp, Homo sapien
tgcctcaaaatcttccaaggaccaa

SEQ ID NO: 859191 - DNA, 25 bp, Homo sapien
cattatctcagcttcggtgcctggg

SEQ ID NO: 859192 - DNA, 25 bp, Homo sapien
gggcataaacaggacctaccgccat

SEQ ID NO: 859193 - DNA, 25 bp, Homo sapien
ggacctaccgccatattgtttgttg

SEQ ID NO: 859194 - DNA, 25 bp, Homo sapien
cgccatattgtttgttgtcctccta

SEQ ID NO: 859195 - DNA, 25 bp, Homo sapien
tacgccccggagatggagacattga

SEQ ID NO: 859196 - DNA, 25 bp, Homo sapien
aattgtgcgcgttccgtgagcagca

SEQ ID NO: 859197 - DNA, 25 bp, Homo sapien
gtgttggaagcagaaatacgccccg

SEQ ID NO: 859198 - DNA, 25 bp, Homo sapien
gggtcccacgctgagaaacagaatt

SEQ ID NO: 859199 - DNA, 25 bp, Homo sapien
gcattgcaggacaccattgagatgc

SEQ ID NO: 859200 - DNA, 25 bp, Homo sapien
tgcattgcaggacaccattgagatg

SEQ ID NO: 859201 - DNA, 25 bp, Homo sapien
gtgcattgcaggacaccattgagat

SEQ ID NO: 859202 - DNA, 25 bp, Homo sapien
tgtgcattgcaggacaccattgaga

SEQ ID NO: 859203 - DNA, 25 bp, Homo sapien
tttcggaagcatggaggaggatccc

SEQ ID NO: 859204 - DNA, 25 bp, Homo sapien
cggactgaggaaatggtgctaccac

SEQ ID NO: 859205 - DNA, 25 bp, Homo sapien
gctcagagcctcattcacatatttg

SEQ ID NO: 859206 - DNA, 25 bp, Homo sapien
gaattcgttgctatgccttctccaa

SEQ ID NO: 859207 - DNA, 25 bp, Homo sapien
gaatgccccccagagacatttggaa

SEQ ID NO: 859208 - DNA, 25 bp, Homo sapien
tgagcctattttgcccatcctgttt

SEQ ID NO: 859209 - DNA, 25 bp, Homo sapien
cgctggaaatattccccaaatgcag

SEQ ID NO: 859210 - DNA, 25 bp, Homo sapien
acttgagcctattttgcccatcctg

SEQ ID NO: 859211 - DNA, 25 bp, Homo sapien
taacagcaatcaaagcccgctggaa

SEQ ID NO: 859212 - DNA, 25 bp, Homo sapien
catctctcccaaagcctgccctcca

SEQ ID NO: 859213 - DNA, 25 bp, Homo sapien
gccctgcccatctctcccaaagcct

SEQ ID NO: 859214 - DNA, 25 bp, Homo sapien
gcccatctctcccaaagcctgccct

SEQ ID NO: 859215 - DNA, 25 bp, Homo sapien
cctgcccatctctcccaaagcctgc

SEQ ID NO: 859216 - DNA, 25 bp, Homo sapien
ttcgaatgacctgcggctgcagtga

SEQ ID NO: 859217 - DNA, 25 bp, Homo sapien
gacacagttgaggatttgcccatgc

SEQ ID NO: 859218 - DNA, 25 bp, Homo sapien
cagttgaggatttgcccatgccagc

SEQ ID NO: 859219 - DNA, 25 bp, Homo sapien
attgtgaattcgaatgacctgcggc

SEQ ID NO: 859220 - DNA, 25 bp, Homo sapien
gctcttgctagagggtccaattctc

SEQ ID NO: 859221 - DNA, 25 bp, Homo sapien
tgagcccagtcgtgttggtgcccat

SEQ ID NO: 859222 - DNA, 25 bp, Homo sapien
gctgccacttcatgatgacaagtga

SEQ ID NO: 859223 - DNA, 25 bp, Homo sapien
gttggtgcccatctgactcctaggg

SEQ ID NO: 859224 - DNA, 25 bp, Homo sapien
ggttgagcccttgatgggttgagcc

SEQ ID NO: 859225 - DNA, 25 bp, Homo sapien
ttgagcccttgatgggttgagccct

SEQ ID NO: 859226 - DNA, 25 bp, Homo sapien
atgggttgagcccttgatgggttga

SEQ ID NO: 859227 - DNA, 25 bp, Homo sapien
gcccttgatgggttgagcccttcca

SEQ ID NO: 859228 - DNA, 25 bp, Homo sapien
agaattcgaattctcacgggagcct

SEQ ID NO: 859229 - DNA, 25 bp, Homo sapien
tgcagaattcgaattctcacgggag

SEQ ID NO: 859230 - DNA, 25 bp, Homo sapien
gatgtcctcctgcagaattcgaatt

SEQ ID NO: 859231 - DNA, 25 bp, Homo sapien
ctgcctcgatgtcctcctgcagaat

SEQ ID NO: 859232 - DNA, 25 bp, Homo sapien
tttgtccccggatctgtaagtagaa

SEQ ID NO: 859233 - DNA, 25 bp, Homo sapien
tgggtaaactttgcagacttgggac

SEQ ID NO: 859234 - DNA, 25 bp, Homo sapien
ggtgggctcaaattcagaactatca

SEQ ID NO: 859235 - DNA, 25 bp, Homo sapien
aactgagccctcgagaaggtgggct

SEQ ID NO: 859236 - DNA, 25 bp, Homo sapien
gcttgctagaggatgcctccagctc

SEQ ID NO: 859237 - DNA, 25 bp, Homo sapien
tgcaggcatccaaaacacgtggctt

SEQ ID NO: 859238 - DNA, 25 bp, Homo sapien
cgtggcttgctagaggatgcctcca

SEQ ID NO: 859239 - DNA, 25 bp, Homo sapien
caaaacacgtggcttgctagaggat

SEQ ID NO: 859240 - DNA, 25 bp, Homo sapien
gatgctcggtcccacagtttgcagc

SEQ ID NO: 859241 - DNA, 25 bp, Homo sapien
cagctaggccaatgggatgctcggt

SEQ ID NO: 859242 - DNA, 25 bp, Homo sapien
ccaatgggatgctcggtcccacagt

SEQ ID NO: 859243 - DNA, 25 bp, Homo sapien
gtggccccagctaggccaatgggat

SEQ ID NO: 859244 - DNA, 25 bp, Homo sapien
taggtgtagattggacatttttgcc

SEQ ID NO: 859245 - DNA, 25 bp, Homo sapien
tggtaagaggacctagatcatcctt

SEQ ID NO: 859246 - DNA, 25 bp, Homo sapien
tgccattctcttttgcggtggtaag

SEQ ID NO: 859247 - DNA, 25 bp, Homo sapien
gatcatcctttgaagtaattatcct

SEQ ID NO: 859248 - DNA, 25 bp, Homo sapien
tcactcctgtgaccactgctgtgaa

SEQ ID NO: 859249 - DNA, 25 bp, Homo sapien
aacgtcactcctgtgaccactgctg

SEQ ID NO: 859250 - DNA, 25 bp, Homo sapien
ttgacccggcctatctgcagacagg

SEQ ID NO: 859251 - DNA, 25 bp, Homo sapien
tgtgaaggtccacccaggcttgacc

SEQ ID NO: 859252 - DNA, 25 bp, Homo sapien
cccctctgtaaaggtgagtgttgaa

SEQ ID NO: 859253 - DNA, 25 bp, Homo sapien
ccccctctgtaaaggtgagtgttga

SEQ ID NO: 859254 - DNA, 25 bp, Homo sapien
gtgttgaatcgtcttttggttgtgg

SEQ ID NO: 859255 - DNA, 25 bp, Homo sapien
aggtgagtgttgaatcgtcttttgg

SEQ ID NO: 859256 - DNA, 25 bp, Homo sapien
tgcaggtgctaagacgacaacttca

SEQ ID NO: 859257 - DNA, 25 bp, Homo sapien
tcagtctaggaggagattggcccca

SEQ ID NO: 859258 - DNA, 25 bp, Homo sapien
ccttcaaagtgcaccttctgggact

SEQ ID NO: 859259 - DNA, 25 bp, Homo sapien
cagaattaggattaggaacccaggc

SEQ ID NO: 859260 - DNA, 25 bp, Homo sapien
cctcttcaacggagtgtgcagcttt

SEQ ID NO: 859261 - DNA, 25 bp, Homo sapien
tcaaggggtgacatatgtcacaacc

SEQ ID NO: 859262 - DNA, 25 bp, Homo sapien
ctagtcagccagatcgccaaataaa

SEQ ID NO: 859263 - DNA, 25 bp, Homo sapien
cctggggatcaaggggtgacatatg

SEQ ID NO: 859264 - DNA, 25 bp, Homo sapien
gtcaaagcatacttcagaatggcca

SEQ ID NO: 859265 - DNA, 25 bp, Homo sapien
gcagtgtcaaagcatacttcagaat

SEQ ID NO: 859266 - DNA, 25 bp, Homo sapien
tgtccagatagaagtggatccactt

SEQ ID NO: 859267 - DNA, 25 bp, Homo sapien
catttgttgtcactctaaagttgag

SEQ ID NO: 859268 - DNA, 25 bp, Homo sapien
tgtgtaaaatctgaaggtgaagctg

SEQ ID NO: 859269 - DNA, 25 bp, Homo sapien
cacttttgttcagctcaccaggcag

SEQ ID NO: 859270 - DNA, 25 bp, Homo sapien
ctcccaaggctttccgcgaggctgt

SEQ ID NO: 859271 - DNA, 25 bp, Homo sapien
caggatgattaggacgccccatgct

SEQ ID NO: 859272 - DNA, 25 bp, Homo sapien
gttcgccatggcctgcatatcccag

SEQ ID NO: 859273 - DNA, 25 bp, Homo sapien
ctctgtcccgatggcatggagcacg

SEQ ID NO: 859274 - DNA, 25 bp, Homo sapien
cctctggctcgcctggcttctcagc

SEQ ID NO: 859275 - DNA, 25 bp, Homo sapien
gaacccatgcctctggctcgcctgg

SEQ ID NO: 859276 - DNA, 25 bp, Homo sapien
tgtcagcaccttgccgtgcagagcc

SEQ ID NO: 859277 - DNA, 25 bp, Homo sapien
cttgtcagcaccttgccgtgcagag

SEQ ID NO: 859278 - DNA, 25 bp, Homo sapien
aagcataagattccagccggaaagg

SEQ ID NO: 859279 - DNA, 25 bp, Homo sapien
caaagcataagattccagccggaaa

SEQ ID NO: 859280 - DNA, 25 bp, Homo sapien
ctgacaaagcataagattccagccg

SEQ ID NO: 859281 - DNA, 25 bp, Homo sapien
gacaaagcataagattccagccgga

SEQ ID NO: 859282 - DNA, 25 bp, Homo sapien
ggcagccaggagatgtcaccactgt

SEQ ID NO: 859283 - DNA, 25 bp, Homo sapien
tctttgtggcccttgtgctttgagc

SEQ ID NO: 859284 - DNA, 25 bp, Homo sapien
cttctttgtggcccttgtgctttga

SEQ ID NO: 859285 - DNA, 25 bp, Homo sapien
ttctttgtggcccttgtgctttgag

SEQ ID NO: 859286 - DNA, 25 bp, Homo sapien
tgggagcacggcagaagctgttgtc

SEQ ID NO: 859287 - DNA, 25 bp, Homo sapien
tgggagcacgggtgtccaagcccat

SEQ ID NO: 859288 - DNA, 25 bp, Homo sapien
gcctcccgataggcagggctctggc

SEQ ID NO: 859289 - DNA, 25 bp, Homo sapien
tgctgaggcctagaagtcttgggca

SEQ ID NO: 859290 - DNA, 25 bp, Homo sapien
gaggcatggcattgtcttcgtgtct

SEQ ID NO: 859291 - DNA, 25 bp, Homo sapien
aggcatggcattgtcttcgtgtctg

SEQ ID NO: 859292 - DNA, 25 bp, Homo sapien
ggaggcatggcattgtcttcgtgtc

SEQ ID NO: 859293 - DNA, 25 bp, Homo sapien
caaactgggagatggtcctgattac

SEQ ID NO: 859294 - DNA, 25 bp, Homo sapien
ggagatggtcctgattaccacggag

SEQ ID NO: 859295 - DNA, 25 bp, Homo sapien
cagaaggaatccggttcccaaactg

SEQ ID NO: 859296 - DNA, 25 bp, Homo sapien
gattaccacggagcaattaagcaag

SEQ ID NO: 859297 - DNA, 25 bp, Homo sapien
cttttaaatcagagatgggggagtc

SEQ ID NO: 859298 - DNA, 25 bp, Homo sapien
taaatcagagatgggggagtcaggc

SEQ ID NO: 859299 - DNA, 25 bp, Homo sapien
tttaaatcagagatgggggagtcag

SEQ ID NO: 859300 - DNA, 25 bp, Homo sapien
aaatcagagatgggggagtcaggcc

SEQ ID NO: 859301 - DNA, 25 bp, Homo sapien
ccaggaagcacttcagatgttttct

SEQ ID NO: 859302 - DNA, 25 bp, Homo sapien
tgtgtccaggaagcacttcagatgt

SEQ ID NO: 859303 - DNA, 25 bp, Homo sapien
tgggttcttgcagaaacttcctaac

SEQ ID NO: 859304 - DNA, 25 bp, Homo sapien
aacttcctaacaggtgtgtccagga

SEQ ID NO: 859305 - DNA, 25 bp, Homo sapien
acctgaaacagtcgggctgcagtcg

SEQ ID NO: 859306 - DNA, 25 bp, Homo sapien
gggtggcgactttgtctcactttct

SEQ ID NO: 859307 - DNA, 25 bp, Homo sapien
acgccagctcgtaaactccagggtg

SEQ ID NO: 859308 - DNA, 25 bp, Homo sapien
tcaagctcctctcgtgacgaggacg

SEQ ID NO: 859309 - DNA, 25 bp, Homo sapien
ttccagaatgttcctcctgtgcctt

SEQ ID NO: 859310 - DNA, 25 bp, Homo sapien
gacggattgcagatcttttggccgc

SEQ ID NO: 859311 - DNA, 25 bp, Homo sapien
ggtagctctactcaacccatgacgg

SEQ ID NO: 859312 - DNA, 25 bp, Homo sapien
gcaggacctcagtaaagacttgtgg

SEQ ID NO: 859313 - DNA, 25 bp, Homo sapien
ttcacaaatttgtcccgagccgctc

SEQ ID NO: 859314 - DNA, 25 bp, Homo sapien
tggcttgcgtctgcggctgagaaat

SEQ ID NO: 859315 - DNA, 25 bp, Homo sapien
cagtctctcaccgagcgctatgcgt

SEQ ID NO: 859316 - DNA, 25 bp, Homo sapien
gagaaatcctttcaaacgcacgcct

SEQ ID NO: 859317 - DNA, 25 bp, Homo sapien
cgagcgctatgcgtggcttgcgtct

SEQ ID NO: 859318 - DNA, 25 bp, Homo sapien
cggttggtcaccagatcctggcagt

SEQ ID NO: 859319 - DNA, 25 bp, Homo sapien
ctgtccctgacatccggttggtcac

SEQ ID NO: 859320 - DNA, 25 bp, Homo sapien
gatcctggcagttgaaagtcattct

SEQ ID NO: 859321 - DNA, 25 bp, Homo sapien
aagtcattctcaagtccagccccac

SEQ ID NO: 859322 - DNA, 25 bp, Homo sapien
ttctttccaaataggtcggcgctgc

SEQ ID NO: 859323 - DNA, 25 bp, Homo sapien
tctttccaaataggtcggcgctgcc

SEQ ID NO: 859324 - DNA, 25 bp, Homo sapien
ctttccaaataggtcggcgctgcct

SEQ ID NO: 859325 - DNA, 25 bp, Homo sapien
tcttctttccaaataggtcggcgct

SEQ ID NO: 859326 - DNA, 25 bp, Homo sapien
catccatcatgtatttgtcttgtgc

SEQ ID NO: 859327 - DNA, 25 bp, Homo sapien
catcgcattggaaaggagcgggtac

SEQ ID NO: 859328 - DNA, 25 bp, Homo sapien
aagtcagcataagagcagctccctg

SEQ ID NO: 859329 - DNA, 25 bp, Homo sapien
gagcgggtacaggaatcatccatca

SEQ ID NO: 859330 - DNA, 25 bp, Homo sapien
gggcgattcccgcggcagcagcggg

SEQ ID NO: 859331 - DNA, 25 bp, Homo sapien
tgtgggcgattcccgcggcagcagc

SEQ ID NO: 859332 - DNA, 25 bp, Homo sapien
cagcggggccgttgatgaggctgct

SEQ ID NO: 859333 - DNA, 25 bp, Homo sapien
tgggggtgcatgaggttcggtttca

SEQ ID NO: 859334 - DNA, 25 bp, Homo sapien
gaagtgagcgagtccttcaaaggag

SEQ ID NO: 859335 - DNA, 25 bp, Homo sapien
gaagactaagacgtctctgtctgcc

SEQ ID NO: 859336 - DNA, 25 bp, Homo sapien
tgaaagccgacaacaaaggcacctt

SEQ ID NO: 859337 - DNA, 25 bp, Homo sapien
caactccaccacgaagactaagacg

SEQ ID NO: 859338 - DNA, 25 bp, Homo sapien
atctggtgggcacgtggtcctgctg

SEQ ID NO: 859339 - DNA, 25 bp, Homo sapien
gcatctggtgggcacgtggtcctgc

SEQ ID NO: 859340 - DNA, 25 bp, Homo sapien
catctggtgggcacgtggtcctgct

SEQ ID NO: 859341 - DNA, 25 bp, Homo sapien
tacaggagcggacatttcaatcctt

SEQ ID NO: 859342 - DNA, 25 bp, Homo sapien
acagcactggccgtctgcgtggcca

SEQ ID NO: 859343 - DNA, 25 bp, Homo sapien
aattactgataaacgtcctacctgt

SEQ ID NO: 859344 - DNA, 25 bp, Homo sapien
tggccgtctgcgtggccaattccac

SEQ ID NO: 859345 - DNA, 25 bp, Homo sapien
cttctgttccctggaaagcaaagcc

SEQ ID NO: 859346 - DNA, 25 bp, Homo sapien
gctcctaattttgccgtatgtgaaa

SEQ ID NO: 859347 - DNA, 25 bp, Homo sapien
agctcctaattttgccgtatgtgaa

SEQ ID NO: 859348 - DNA, 25 bp, Homo sapien
tatctacttctgttccctggaaagc

SEQ ID NO: 859349 - DNA, 25 bp, Homo sapien
tagctggtctcagcaagtggcgtcc

SEQ ID NO: 859350 - DNA, 25 bp, Homo sapien
gtctcagcaagtggcgtccatcgtg

SEQ ID NO: 859351 - DNA, 25 bp, Homo sapien
acctagctggtctcagcaagtggcg

SEQ ID NO: 859352 - DNA, 25 bp, Homo sapien
cctgacctagctggtctcagcaagt

SEQ ID NO: 859353 - DNA, 25 bp, Homo sapien
gagggcaaggaacacttggcccgcc

SEQ ID NO: 859354 - DNA, 25 bp, Homo sapien
tacggggatgagggcaaggaacact

SEQ ID NO: 859355 - DNA, 25 bp, Homo sapien
gatgagggcaaggaacacttggccc

SEQ ID NO: 859356 - DNA, 25 bp, Homo sapien
gggatgagggcaaggaacacttggc

SEQ ID NO: 859357 - DNA, 25 bp, Homo sapien
aataatccgttgttccacgtgggtg

SEQ ID NO: 859358 - DNA, 25 bp, Homo sapien
tacacagtgctagtcccgtggctgg

SEQ ID NO: 859359 - DNA, 25 bp, Homo sapien
tttctcgtcgccaaagtaagccctg

SEQ ID NO: 859360 - DNA, 25 bp, Homo sapien
cattgttctgcactggctctctagg

SEQ ID NO: 859361 - DNA, 25 bp, Homo sapien
cagaggcaatgggctggggatgttc

SEQ ID NO: 859362 - DNA, 25 bp, Homo sapien
agaggcaatgggctggggatgttct

SEQ ID NO: 859363 - DNA, 25 bp, Homo sapien
tgccaggggcctgtgttcctacgcc

SEQ ID NO: 859364 - DNA, 25 bp, Homo sapien
tgtgcatctgcaactgccaggggcc

SEQ ID NO: 859365 - DNA, 25 bp, Homo sapien
ttctgtgcatctgcaactgccaggg

SEQ ID NO: 859366 - DNA, 25 bp, Homo sapien
gcatctgcaactgccaggggcctgt

SEQ ID NO: 859367 - DNA, 25 bp, Homo sapien
taaagatctcgtgttcttcttgacc

SEQ ID NO: 859368 - DNA, 25 bp, Homo sapien
aactccacttgctaaagatctcgtg

SEQ ID NO: 859369 - DNA, 25 bp, Homo sapien
tcttcttgacccagttccaatacca

SEQ ID NO: 859370 - DNA, 25 bp, Homo sapien
ttgtcgcaactccacttgctaaaga

SEQ ID NO: 859371 - DNA, 25 bp, Homo sapien
ctgcgggacagccccagcatggggc

SEQ ID NO: 859372 - DNA, 25 bp, Homo sapien
agcatggggcagtcccaacgtggcc

SEQ ID NO: 859373 - DNA, 25 bp, Homo sapien
gccccagcatggggcagtcccaacg

SEQ ID NO: 859374 - DNA, 25 bp, Homo sapien
cccagcatggggcagtcccaacgtg

SEQ ID NO: 859375 - DNA, 25 bp, Homo sapien
ccttcatcgggaaacacggagttct

SEQ ID NO: 859376 - DNA, 25 bp, Homo sapien
catcgggaaacacggagttcttggg

SEQ ID NO: 859377 - DNA, 25 bp, Homo sapien
aacacggagttcttggggagctctg

SEQ ID NO: 859378 - DNA, 25 bp, Homo sapien
tcatcgggaaacacggagttcttgg

SEQ ID NO: 859379 - DNA, 25 bp, Homo sapien
acactgtgtccctgctatatcaggt

SEQ ID NO: 859380 - DNA, 25 bp, Homo sapien
gacactgtgtccctgctatatcagg

SEQ ID NO: 859381 - DNA, 25 bp, Homo sapien
cacggagcaccggcaccttgggcat

SEQ ID NO: 859382 - DNA, 25 bp, Homo sapien
atcctcacggagcaccggcaccttg

SEQ ID NO: 859383 - DNA, 25 bp, Homo sapien
cctgtgaagcacacggcaggctcgg

SEQ ID NO: 859384 - DNA, 25 bp, Homo sapien
gctcgggagatgtccatagtgggcc

SEQ ID NO: 859385 - DNA, 25 bp, Homo sapien
caggttactgccaggacatttcagc

SEQ ID NO: 859386 - DNA, 25 bp, Homo sapien
aggttactgccaggacatttcagct

SEQ ID NO: 859387 - DNA, 25 bp, Homo sapien
tcaggttactgccaggacatttcag

SEQ ID NO: 859388 - DNA, 25 bp, Homo sapien
ggttactgccaggacatttcagctg

SEQ ID NO: 859389 - DNA, 25 bp, Homo sapien
tgggtctcacgttactcccgtggag

SEQ ID NO: 859390 - DNA, 25 bp, Homo sapien
ttaaaatgagacgtggccttcctgg

SEQ ID NO: 859391 - DNA, 25 bp, Homo sapien
tggagcatccaactcttgtctaggc

SEQ ID NO: 859392 - DNA, 25 bp, Homo sapien
catccattgaagctccccggagatt

SEQ ID NO: 859393 - DNA, 25 bp, Homo sapien
tcatgaagatcttcactcagcgcag

SEQ ID NO: 859394 - DNA, 25 bp, Homo sapien
gtattcatgaagatcttcactcagc

SEQ ID NO: 859395 - DNA, 25 bp, Homo sapien
tgaagatcttcactcagcgcagcat

SEQ ID NO: 859396 - DNA, 25 bp, Homo sapien
tattcatgaagatcttcactcagcg

SEQ ID NO: 859397 - DNA, 25 bp, Homo sapien
ctgagggcatgagcaggaaggacat

SEQ ID NO: 859398 - DNA, 25 bp, Homo sapien
ctggccacacatcccaaaagcaggg

SEQ ID NO: 859399 - DNA, 25 bp, Homo sapien
agtcggcagctcagtacttcctgca

SEQ ID NO: 859400 - DNA, 25 bp, Homo sapien
agtggcagtcggcagctcagtactt

SEQ ID NO: 859401 - DNA, 25 bp, Homo sapien
cctgtgattctgtggagtggcagtc

SEQ ID NO: 859402 - DNA, 25 bp, Homo sapien
ggctgccgtccagggacccaggttc

SEQ ID NO: 859403 - DNA, 25 bp, Homo sapien
gcaggcccaggctgccgtccaggga

SEQ ID NO: 859404 - DNA, 25 bp, Homo sapien
tcagggcagagtcctccttgtggcc

SEQ ID NO: 859405 - DNA, 25 bp, Homo sapien
gctgggatctgccactttcagggca

SEQ ID NO: 859406 - DNA, 25 bp, Homo sapien
tgctgtttctctctgctcgaaaagc

SEQ ID NO: 859407 - DNA, 25 bp, Homo sapien
tttctctctgctcgaaaagcctcca

SEQ ID NO: 859408 - DNA, 25 bp, Homo sapien
gctgtttctctctgctcgaaaagcc

SEQ ID NO: 859409 - DNA, 25 bp, Homo sapien
tgtttctctctgctcgaaaagcctc

SEQ ID NO: 859410 - DNA, 25 bp, Homo sapien
ttgagacccataggatccagcatcg

SEQ ID NO: 859411 - DNA, 25 bp, Homo sapien
ccgtaaggccctctgttgagaccca

SEQ ID NO: 859412 - DNA, 25 bp, Homo sapien
aggccctctgttgagacccatagga

SEQ ID NO: 859413 - DNA, 25 bp, Homo sapien
ctgttgagacccataggatccagca

SEQ ID NO: 859414 - DNA, 25 bp, Homo sapien
ccaggactgtgaggacgtgcgtttc

SEQ ID NO: 859415 - DNA, 25 bp, Homo sapien
ccgagatgcggtggttcagcccatg

SEQ ID NO: 859416 - DNA, 25 bp, Homo sapien
tgttgagcctcccattcgtggttgg

SEQ ID NO: 859417 - DNA, 25 bp, Homo sapien
ggagcaagtctcgtctcaagaccgt

SEQ ID NO: 859418 - DNA, 25 bp, Homo sapien
tacagcatctgagaggaggttggat

SEQ ID NO: 859419 - DNA, 25 bp, Homo sapien
gaagcgagggagaagaccatcattg

SEQ ID NO: 859420 - DNA, 25 bp, Homo sapien
tgtcaaacaaaatcaggaagcgagg

SEQ ID NO: 859421 - DNA, 25 bp, Homo sapien
ggctgtgctgatagaaacgccgtca

SEQ ID NO: 859422 - DNA, 25 bp, Homo sapien
attttactcttgaagggacctcacg

SEQ ID NO: 859423 - DNA, 25 bp, Homo sapien
acatctctgttaggttccgtcttcc

SEQ ID NO: 859424 - DNA, 25 bp, Homo sapien
tgtatcgtgcttatcaattctaaga

SEQ ID NO: 859425 - DNA, 25 bp, Homo sapien
ggacctcacggtttagttgccagca

SEQ ID NO: 859426 - DNA, 25 bp, Homo sapien
tatggaggtccagcgtgtggacctt

SEQ ID NO: 859427 - DNA, 25 bp, Homo sapien
tgctccaaatgtggtcctggtatgg

SEQ ID NO: 859428 - DNA, 25 bp, Homo sapien
gagtcgcattggaggctgacacctg

SEQ ID NO: 859429 - DNA, 25 bp, Homo sapien
ggaccttttatcattgcactgctgc

SEQ ID NO: 859430 - DNA, 25 bp, Homo sapien
cctgggctggcgacaaggactctaa

SEQ ID NO: 859431 - DNA, 25 bp, Homo sapien
gtgcggtgttcgtgacttccccttg

SEQ ID NO: 859432 - DNA, 25 bp, Homo sapien
actgtgcggtgttcgtgacttcccc

SEQ ID NO: 859433 - DNA, 25 bp, Homo sapien
ggactgtgcggtgttcgtgacttcc

SEQ ID NO: 859434 - DNA, 25 bp, Homo sapien
gacggctgtagctctttcggatacg

SEQ ID NO: 859435 - DNA, 25 bp, Homo sapien
gctctttcggatacggaagaatcat

SEQ ID NO: 859436 - DNA, 25 bp, Homo sapien
agcacaggacggctgtagctctttc

SEQ ID NO: 859437 - DNA, 25 bp, Homo sapien
ggtggcctctgtactgaacaggctg

SEQ ID NO: 859438 - DNA, 25 bp, Homo sapien
gagtctggccccatgaagaaatgca

SEQ ID NO: 859439 - DNA, 25 bp, Homo sapien
tggcctctgagtcgtaggtagagat

SEQ ID NO: 859440 - DNA, 25 bp, Homo sapien
ccgaccaagatgtcccgtgggaatg

SEQ ID NO: 859441 - DNA, 25 bp, Homo sapien
tgtcactgcgttcccaatgtgtgtt

SEQ ID NO: 859442 - DNA, 25 bp, Homo sapien
gagtcgtataaagcgctgacagcag

SEQ ID NO: 859443 - DNA, 25 bp, Homo sapien
gcagataaaatcgagaccacagcct

SEQ ID NO: 859444 - DNA, 25 bp, Homo sapien
tcagagcctacatccgagtcgtata

SEQ ID NO: 859445 - DNA, 25 bp, Homo sapien
caatggcgggcttgcatccttgggt

SEQ ID NO: 859446 - DNA, 25 bp, Homo sapien
cgggagcctcggcacggactgcggg

SEQ ID NO: 859447 - DNA, 25 bp, Homo sapien
tggccggctgcgagtgggcggccgc

SEQ ID NO: 859448 - DNA, 25 bp, Homo sapien
tcggcacggactgcggggcgcgtgg

SEQ ID NO: 859449 - DNA, 25 bp, Homo sapien
gggcccgagcgggactggccggctg

SEQ ID NO: 859450 - DNA, 25 bp, Homo sapien
cgcgggtttatatggcgggccgcgg

SEQ ID NO: 859451 - DNA, 25 bp, Homo sapien
cgccggctctccgaacggaggcggg

SEQ ID NO: 859452 - DNA, 25 bp, Homo sapien
ggcgcgcgggtttatatggcgggcc

SEQ ID NO: 859453 - DNA, 25 bp, Homo sapien
cccgccggctctccgaacggaggcg

SEQ ID NO: 859454 - DNA, 25 bp, Homo sapien
cggctgctgcgcgaccaaagcccgc

SEQ ID NO: 859455 - DNA, 25 bp, Homo sapien
ctccggggaggaccggctgctgcgc

SEQ ID NO: 859456 - DNA, 25 bp, Homo sapien
tgcgcgaccaaagcccgcccgcgac

SEQ ID NO: 859457 - DNA, 25 bp, Homo sapien
agcccgcccgcgacccctatcccag

SEQ ID NO: 859458 - DNA, 25 bp, Homo sapien
ggtcacacgcgtccaagaggcgctt

SEQ ID NO: 859459 - DNA, 25 bp, Homo sapien
cggtcacacgcgtccaagaggcgct

SEQ ID NO: 859460 - DNA, 25 bp, Homo sapien
agaagtggtcgtgcaatctgggcat

SEQ ID NO: 859461 - DNA, 25 bp, Homo sapien
gctccagaagtggtcgtgcaatctg

SEQ ID NO: 859462 - DNA, 25 bp, Homo sapien
tccagaagtggtcgtgcaatctggg

SEQ ID NO: 859463 - DNA, 25 bp, Homo sapien
cagctccagaagtggtcgtgcaatc

SEQ ID NO: 859464 - DNA, 25 bp, Homo sapien
tcatcgcagcactgcggcccctggg

SEQ ID NO: 859465 - DNA, 25 bp, Homo sapien
ggcccggacacggaaacgttgatca

SEQ ID NO: 859466 - DNA, 25 bp, Homo sapien
acggaaacgttgatcatctccccaa

SEQ ID NO: 859467 - DNA, 25 bp, Homo sapien
cggacacggaaacgttgatcatctc

SEQ ID NO: 859468 - DNA, 25 bp, Homo sapien
ctaggaccaccccaaccgagaagag

SEQ ID NO: 859469 - DNA, 25 bp, Homo sapien
ccaaccgagaagagcacgaggctcc

SEQ ID NO: 859470 - DNA, 25 bp, Homo sapien
agatggtggcgatcacctcctcggg

SEQ ID NO: 859471 - DNA, 25 bp, Homo sapien
tcctctgcaacaggcgatgatgcca

SEQ ID NO: 859472 - DNA, 25 bp, Homo sapien
gctgtcccgcagcagggagggaccc

SEQ ID NO: 859473 - DNA, 25 bp, Homo sapien
tgtcccgcagcagggagggacccac

SEQ ID NO: 859474 - DNA, 25 bp, Homo sapien
cagctgctgtcccgcagcagggagg

SEQ ID NO: 859475 - DNA, 25 bp, Homo sapien
gctgctgtcccgcagcagggaggga

SEQ ID NO: 859476 - DNA, 25 bp, Homo sapien
caatctgtggatagttccagtttca

SEQ ID NO: 859477 - DNA, 25 bp, Homo sapien
cacagcacctgcttgaacagccaat

SEQ ID NO: 859478 - DNA, 25 bp, Homo sapien
atttctctaaatcccaagactggag

SEQ ID NO: 859479 - DNA, 25 bp, Homo sapien
ttcagagagctgtggcccgaacccg

SEQ ID NO: 859480 - DNA, 25 bp, Homo sapien
gggcggctggcgcgggatgacagct

SEQ ID NO: 859481 - DNA, 25 bp, Homo sapien
ggcggctggcgcgggatgacagctg

SEQ ID NO: 859482 - DNA, 25 bp, Homo sapien
cggctggcgcgggatgacagctggg

SEQ ID NO: 859483 - DNA, 25 bp, Homo sapien
gcggctggcgcgggatgacagctgg

SEQ ID NO: 859484 - DNA, 25 bp, Homo sapien
tctacagagctctaacagttcaggg

SEQ ID NO: 859485 - DNA, 25 bp, Homo sapien
tcagcgacccggcaaaaggaagtgc

SEQ ID NO: 859486 - DNA, 25 bp, Homo sapien
gaagtgctgagaagttgctcccctg

SEQ ID NO: 859487 - DNA, 25 bp, Homo sapien
tgtaggcggtttggcttcagaccac

SEQ ID NO: 859488 - DNA, 25 bp, Homo sapien
aatactgaaggctaaactatttcat

SEQ ID NO: 859489 - DNA, 25 bp, Homo sapien
cctagaaacccttgaggatccaatt

SEQ ID NO: 859490 - DNA, 25 bp, Homo sapien
atatgagagtatgagaaattgtcca

SEQ ID NO: 859491 - DNA, 25 bp, Homo sapien
aattaactttacttcactatagctt

SEQ ID NO: 859492 - DNA, 25 bp, Homo sapien
cactggcgtggttaatgccaacaaa

SEQ ID NO: 859493 - DNA, 25 bp, Homo sapien
gatacaggggtacagtaggccaaca

SEQ ID NO: 859494 - DNA, 25 bp, Homo sapien
tctccgaggtgactgtcgatacagg

SEQ ID NO: 859495 - DNA, 25 bp, Homo sapien
tgctatgcagcgcatgacactggcc

SEQ ID NO: 859496 - DNA, 25 bp, Homo sapien
tggacgtagcacagaaaattaagga

SEQ ID NO: 859497 - DNA, 25 bp, Homo sapien
tctggacgtagcacagaaaattaag

SEQ ID NO: 859498 - DNA, 25 bp, Homo sapien
ggacgtagcacagaaaattaaggat

SEQ ID NO: 859499 - DNA, 25 bp, Homo sapien
acgtagcacagaaaattaaggatac

SEQ ID NO: 859500 - DNA, 25 bp, Homo sapien
gggtaggtaccaccatcatgtctgt

SEQ ID NO: 859501 - DNA, 25 bp, Homo sapien
tactgtgaagtcatcgatagcccca

SEQ ID NO: 859502 - DNA, 25 bp, Homo sapien
taagatcacctgaaatctccctgcc

SEQ ID NO: 859503 - DNA, 25 bp, Homo sapien
tgccatcactgagtcaaaaacttaa

SEQ ID NO: 859504 - DNA, 25 bp, Homo sapien
gaaaagctatggtgatccccagccc

SEQ ID NO: 859505 - DNA, 25 bp, Homo sapien
caaggccacttctggaacgatcaaa

SEQ ID NO: 859506 - DNA, 25 bp, Homo sapien
gaaactgcgtgatcagcgtagctag

SEQ ID NO: 859507 - DNA, 25 bp, Homo sapien
gatagggctgctaaagtcaaggaca

SEQ ID NO: 859508 - DNA, 25 bp, Homo sapien
tggagcgagaaaagaaactgtacct

SEQ ID NO: 859509 - DNA, 25 bp, Homo sapien
tgtaccttagcagtcaatttcacct

SEQ ID NO: 859510 - DNA, 25 bp, Homo sapien
tacattaagttatggatagcagcat

SEQ ID NO: 859511 - DNA, 25 bp, Homo sapien
gcagaacgcatatcaaccatccaat

SEQ ID NO: 859512 - DNA, 25 bp, Homo sapien
agaaaaatatacaagggagccaaga

SEQ ID NO: 859513 - DNA, 25 bp, Homo sapien
gagccaagaacgaatatagaggaaa

SEQ ID NO: 859514 - DNA, 25 bp, Homo sapien
ccgtgacgcctcctgagaaaaatat

SEQ ID NO: 859515 - DNA, 25 bp, Homo sapien
ccaccgtgacgcctcctgagaaaaa

SEQ ID NO: 859516 - DNA, 25 bp, Homo sapien
gtcactcaagtctgaaccagaatat

SEQ ID NO: 859517 - DNA, 25 bp, Homo sapien
aattcaactcctcacagaagggtat

SEQ ID NO: 859518 - DNA, 25 bp, Homo sapien
tcaactcctcacagaagggtatcag

SEQ ID NO: 859519 - DNA, 25 bp, Homo sapien
gaaacagccaagtggtcttcaaatt

SEQ ID NO: 859520 - DNA, 25 bp, Homo sapien
gtggtcttcaaattcaactcctcac

SEQ ID NO: 859521 - DNA, 25 bp, Homo sapien
taattagtcaatctggttgaggaca

SEQ ID NO: 859522 - DNA, 25 bp, Homo sapien
ccagttttaagatacgagaacatcc

SEQ ID NO: 859523 - DNA, 25 bp, Homo sapien
gagcacagcagggattacttaatga

SEQ ID NO: 859524 - DNA, 25 bp, Homo sapien
taacagcaccaacctatcaaacaga

SEQ ID NO: 859525 - DNA, 25 bp, Homo sapien
agtcatgagtctgggttgagtcacc

SEQ ID NO: 859526 - DNA, 25 bp, Homo sapien
ccttcagcaatgacggagattactc

SEQ ID NO: 859527 - DNA, 25 bp, Homo sapien
tactactatgaccaggcacctcagg

SEQ ID NO: 859528 - DNA, 25 bp, Homo sapien
tgagtcacccaggtatgccagttac

SEQ ID NO: 859529 - DNA, 25 bp, Homo sapien
cctgcaaaattaggataattctctg

SEQ ID NO: 859530 - DNA, 25 bp, Homo sapien
taagtaggtcctaacatgggaaaga

SEQ ID NO: 859531 - DNA, 25 bp, Homo sapien
gaaattacgctgctgaggcccttat

SEQ ID NO: 859532 - DNA, 25 bp, Homo sapien
caacaagattgagaggtgggacatg

SEQ ID NO: 859533 - DNA, 25 bp, Homo sapien
tcaatcactatggggcttttcagga

SEQ ID NO: 859534 - DNA, 25 bp, Homo sapien
atcactatggggcttttcaggaaca

SEQ ID NO: 859535 - DNA, 25 bp, Homo sapien
caatcactatggggcttttcaggaa

SEQ ID NO: 859536 - DNA, 25 bp, Homo sapien
aatcactatggggcttttcaggaac

SEQ ID NO: 859537 - DNA, 25 bp, Homo sapien
tctcagaatcggtggttttgaagac

SEQ ID NO: 859538 - DNA, 25 bp, Homo sapien
cttccttgctctcagaatcggtggt

SEQ ID NO: 859539 - DNA, 25 bp, Homo sapien
tgctctcagaatcggtggttttgaa

SEQ ID NO: 859540 - DNA, 25 bp, Homo sapien
tccttgctctcagaatcggtggttt

SEQ ID NO: 859541 - DNA, 25 bp, Homo sapien
tgaaatcgaatacttgggaagctgc

SEQ ID NO: 859542 - DNA, 25 bp, Homo sapien
caggagtcatttgtacagtcagccc

SEQ ID NO: 859543 - DNA, 25 bp, Homo sapien
gggaagacttcagggtaagtcatca

SEQ ID NO: 859544 - DNA, 25 bp, Homo sapien
tccctattctagactaggtgaagag

SEQ ID NO: 859545 - DNA, 25 bp, Homo sapien
ccacgggaggaatgacaagcagttg

SEQ ID NO: 859546 - DNA, 25 bp, Homo sapien
caatatatcgcagtgtgggaaccaa

SEQ ID NO: 859547 - DNA, 25 bp, Homo sapien
cactgacacaaaactgcgggttggt

SEQ ID NO: 859548 - DNA, 25 bp, Homo sapien
tgtctacacaaactgccacgggagg

SEQ ID NO: 859549 - DNA, 25 bp, Homo sapien
tctaagcttccattctgctgactgg

SEQ ID NO: 859550 - DNA, 25 bp, Homo sapien
gctgctttcatctaataacttctgg

SEQ ID NO: 859551 - DNA, 25 bp, Homo sapien
ggtgtaacacgaaaggaacttcaca

SEQ ID NO: 859552 - DNA, 25 bp, Homo sapien
aaagaccagcgctcacaggcaagtt

SEQ ID NO: 859553 - DNA, 25 bp, Homo sapien
ccgtccttgggttgtgatggtgtcc

SEQ ID NO: 859554 - DNA, 25 bp, Homo sapien
gagaggcctttgttcgatcgactga

SEQ ID NO: 859555 - DNA, 25 bp, Homo sapien
tccgattggactcttaaatggttcc

SEQ ID NO: 859556 - DNA, 25 bp, Homo sapien
tgctgagctaaaccccttgcagagg

SEQ ID NO: 859557 - DNA, 25 bp, Homo sapien
tgaacctgctcacggccgaggcagg

SEQ ID NO: 859558 - DNA, 25 bp, Homo sapien
tggagagggcgccttgcatcgggaa

SEQ ID NO: 859559 - DNA, 25 bp, Homo sapien
gccgggacgcagacttccagaagct

SEQ ID NO: 859560 - DNA, 25 bp, Homo sapien
tttctcgccctcctgaacctgctca

SEQ ID NO: 859561 - DNA, 25 bp, Homo sapien
ctgaaatggaggaaagcgcgccccc

SEQ ID NO: 859562 - DNA, 25 bp, Homo sapien
tgaaatggaggaaagcgcgccccca

SEQ ID NO: 859563 - DNA, 25 bp, Homo sapien
cacggccccgcgtaatgaattcgtc

SEQ ID NO: 859564 - DNA, 25 bp, Homo sapien
gattgcggaggacgtgacacttgac

SEQ ID NO: 859565 - DNA, 25 bp, Homo sapien
gcgaggacgcaaacaccattgaggg

SEQ ID NO: 859566 - DNA, 25 bp, Homo sapien
gctccgccgtgcagaacgaactgtt

SEQ ID NO: 859567 - DNA, 25 bp, Homo sapien
tgtgcgcgcgtctctggacgagacc

SEQ ID NO: 859568 - DNA, 25 bp, Homo sapien
accaatttctccatcgcgcagccat

SEQ ID NO: 859569 - DNA, 25 bp, Homo sapien
ccctgggcgtgtcgcgtgtgcgcgg

SEQ ID NO: 859570 - DNA, 25 bp, Homo sapien
catccccgcggacgacgtttgaaag

SEQ ID NO: 859571 - DNA, 25 bp, Homo sapien
atttaaaatctcttggcagagactt

SEQ ID NO: 859572 - DNA, 25 bp, Homo sapien
cacaaaatccgcaggcaacacaatt

SEQ ID NO: 859573 - DNA, 25 bp, Homo sapien
tcttggcagagacttccggaagtgc

SEQ ID NO: 859574 - DNA, 25 bp, Homo sapien
cttccggaagtgcttcctcccttct

SEQ ID NO: 859575 - DNA, 25 bp, Homo sapien
aatcacaactcctttatcagctggg

SEQ ID NO: 859576 - DNA, 25 bp, Homo sapien
gtgagccgtgggactccaatgcctg

SEQ ID NO: 859577 - DNA, 25 bp, Homo sapien
ccttcctttgcaaccgtgaagggct

SEQ ID NO: 859578 - DNA, 25 bp, Homo sapien
ttgcaaccgtgaagggctcgctgct

SEQ ID NO: 859579 - DNA, 25 bp, Homo sapien
tattttgctgtaactctgcacttaa

SEQ ID NO: 859580 - DNA, 25 bp, Homo sapien
tgtaactctgcacttaatctgatga

SEQ ID NO: 859581 - DNA, 25 bp, Homo sapien
cttattttgctgtaactctgcactt

SEQ ID NO: 859582 - DNA, 25 bp, Homo sapien
ttgctgtaactctgcacttaatctg

SEQ ID NO: 859583 - DNA, 25 bp, Homo sapien
gcaggtgcagccggcaggacacagt

SEQ ID NO: 859584 - DNA, 25 bp, Homo sapien
caggtgcagccggcaggacacagtg

SEQ ID NO: 859585 - DNA, 25 bp, Homo sapien
ccgccgcgcttccacgcacgcacac

SEQ ID NO: 859586 - DNA, 25 bp, Homo sapien
acacgcacgctcacgctcatgcaca

SEQ ID NO: 859587 - DNA, 25 bp, Homo sapien
gcacgcacactcacagtcacgctcg

SEQ ID NO: 859588 - DNA, 25 bp, Homo sapien
agtcacgctcgtgcacactcgcacg

SEQ ID NO: 859589 - DNA, 25 bp, Homo sapien
cgcgcggtgcccagcgcgcgccagg

SEQ ID NO: 859590 - DNA, 25 bp, Homo sapien
cccatcaagtcctctcggagcccgc

SEQ ID NO: 859591 - DNA, 25 bp, Homo sapien
gcgcggtgcccagcgcgcgccaggg

SEQ ID NO: 859592 - DNA, 25 bp, Homo sapien
gtggctttgggatgctgcacctctg

SEQ ID NO: 859593 - DNA, 25 bp, Homo sapien
gctttgggatgctgcacctctgagc

SEQ ID NO: 859594 - DNA, 25 bp, Homo sapien
tgagagccacatggcgaaggcagag

SEQ ID NO: 859595 - DNA, 25 bp, Homo sapien
tgggatgctgcacctctgagcccag

SEQ ID NO: 859596 - DNA, 25 bp, Homo sapien
cagagatcacaggagggatgctgtc

SEQ ID NO: 859597 - DNA, 25 bp, Homo sapien
gatcacaggagggatgctgtcactg

SEQ ID NO: 859598 - DNA, 25 bp, Homo sapien
tcacaggagggatgctgtcactgag

SEQ ID NO: 859599 - DNA, 25 bp, Homo sapien
ctgacagagatcacaggagggatgc

SEQ ID NO: 859600 - DNA, 25 bp, Homo sapien
caatcgtctggtggggggcaacgct

SEQ ID NO: 859601 - DNA, 25 bp, Homo sapien
agagctcaggaacccggttactaga

SEQ ID NO: 859602 - DNA, 25 bp, Homo sapien
cgaaggctcactgaggccggctgca

SEQ ID NO: 859603 - DNA, 25 bp, Homo sapien
tgagggcagcagccaatcgtctggt

SEQ ID NO: 859604 - DNA, 25 bp, Homo sapien
tacgtatggaggatctggcttgtgt

SEQ ID NO: 859605 - DNA, 25 bp, Homo sapien
ggtccatgttcctgggaagcaagcc

SEQ ID NO: 859606 - DNA, 25 bp, Homo sapien
tctgggagcccctctacgtatggag

SEQ ID NO: 859607 - DNA, 25 bp, Homo sapien
cacccatgcctgtcgtgctctggga

SEQ ID NO: 859608 - DNA, 25 bp, Homo sapien
ccaggaacatggctggtcttgccat

SEQ ID NO: 859609 - DNA, 25 bp, Homo sapien
tccaggaacatggctggtcttgcca

SEQ ID NO: 859610 - DNA, 25 bp, Homo sapien
gactgtctgagttgcttctgacgat

SEQ ID NO: 859611 - DNA, 25 bp, Homo sapien
tctgagttgcttctgacgatttgcc

SEQ ID NO: 859612 - DNA, 25 bp, Homo sapien
gttgcttctgacgatttgccggcca

SEQ ID NO: 859613 - DNA, 25 bp, Homo sapien
ctctggactgtctgagttgcttctg

SEQ ID NO: 859614 - DNA, 25 bp, Homo sapien
gcctgccgcctccctgtgcctcctc

SEQ ID NO: 859615 - DNA, 25 bp, Homo sapien
cctccctgtgcctcctctggctctg

SEQ ID NO: 859616 - DNA, 25 bp, Homo sapien
gccgcctccctgtgcctcctctggc

SEQ ID NO: 859617 - DNA, 25 bp, Homo sapien
atctgcctgccgcctccctgtgcct

SEQ ID NO: 859618 - DNA, 25 bp, Homo sapien
gaagggcatcattcggcctcctgag

SEQ ID NO: 859619 - DNA, 25 bp, Homo sapien
tttagtcagacgcaaggacacctgc

SEQ ID NO: 859620 - DNA, 25 bp, Homo sapien
tcttcaccagctagaaaacccaggt

SEQ ID NO: 859621 - DNA, 25 bp, Homo sapien
caacaacgagttaagcatctgggca

SEQ ID NO: 859622 - DNA, 25 bp, Homo sapien
cctatttcataatcggtggccgtca

SEQ ID NO: 859623 - DNA, 25 bp, Homo sapien
tggccgtcaccgctgtattgctact

SEQ ID NO: 859624 - DNA, 25 bp, Homo sapien
tattgctactcacgttgcagccttc

SEQ ID NO: 859625 - DNA, 25 bp, Homo sapien
cgctgtatccctgtgtcctatttca

SEQ ID NO: 859626 - DNA, 25 bp, Homo sapien
tgcttaagccacaagttgaacagtc

SEQ ID NO: 859627 - DNA, 25 bp, Homo sapien
tagacttctgtagtcaggcaaagaa

SEQ ID NO: 859628 - DNA, 25 bp, Homo sapien
gaatggtgccgactctttccaaggc

SEQ ID NO: 859629 - DNA, 25 bp, Homo sapien
aaaacccactttcatgccagctggg

SEQ ID NO: 859630 - DNA, 25 bp, Homo sapien
gagtctccggacttgatcaagcgcc

SEQ ID NO: 859631 - DNA, 25 bp, Homo sapien
tctgccaggcagatgcgagtctccg

SEQ ID NO: 859632 - DNA, 25 bp, Homo sapien
agggtgtgcacacccgatgccacct

SEQ ID NO: 859633 - DNA, 25 bp, Homo sapien
ggacttgatcaagcgccctctaggg

SEQ ID NO: 859634 - DNA, 25 bp, Homo sapien
tgggcttcaagtccagtgattcgga

SEQ ID NO: 859635 - DNA, 25 bp, Homo sapien
tgattcggaaggatgacagtaaccc

SEQ ID NO: 859636 - DNA, 25 bp, Homo sapien
aggatgacagtaacccgtgtgggaa

SEQ ID NO: 859637 - DNA, 25 bp, Homo sapien
gccatgcactggttctttgacgtcc

SEQ ID NO: 859638 - DNA, 25 bp, Homo sapien
gtcacttaaataacaaatggcaatt

SEQ ID NO: 859639 - DNA, 25 bp, Homo sapien
ctttgtcacttaaataacaaatggc

SEQ ID NO: 859640 - DNA, 25 bp, Homo sapien
ttgtcacttaaataacaaatggcaa

SEQ ID NO: 859641 - DNA, 25 bp, Homo sapien
tcacttaaataacaaatggcaattg

SEQ ID NO: 859642 - DNA, 25 bp, Homo sapien
agatccttctggtcccggaggtgag

SEQ ID NO: 859643 - DNA, 25 bp, Homo sapien
aatcctaatggccatgtatcttcca

SEQ ID NO: 859644 - DNA, 25 bp, Homo sapien
gaggtgagaatcctaatggccatgt

SEQ ID NO: 859645 - DNA, 25 bp, Homo sapien
gatccttctggtcccggaggtgaga

SEQ ID NO: 859646 - DNA, 25 bp, Homo sapien
gagcccagccgcctctgacacgtct

SEQ ID NO: 859647 - DNA, 25 bp, Homo sapien
gccgcctctgacacgtctcctggca

SEQ ID NO: 859648 - DNA, 25 bp, Homo sapien
cagccgcctctgacacgtctcctgg

SEQ ID NO: 859649 - DNA, 25 bp, Homo sapien
gcctctgacacgtctcctggcacat

SEQ ID NO: 859650 - DNA, 25 bp, Homo sapien
actgcccaggatatcacaggccacc

SEQ ID NO: 859651 - DNA, 25 bp, Homo sapien
ctgcccaggatatcacaggccacca

SEQ ID NO: 859652 - DNA, 25 bp, Homo sapien
gcacccaaactgagtgcactgccca

SEQ ID NO: 859653 - DNA, 25 bp, Homo sapien
agcacccaaactgagtgcactgccc

SEQ ID NO: 859654 - DNA, 25 bp, Homo sapien
tctgaggctggtcagcttaagtctc

SEQ ID NO: 859655 - DNA, 25 bp, Homo sapien
ggctggtcagcttaagtctcatctt

SEQ ID NO: 859656 - DNA, 25 bp, Homo sapien
tggaagtctcgtctgaggctggtca

SEQ ID NO: 859657 - DNA, 25 bp, Homo sapien
ttggctggaagtctcgtctgaggct

SEQ ID NO: 859658 - DNA, 25 bp, Homo sapien
ccagaaacttccccagggagtgcat

SEQ ID NO: 859659 - DNA, 25 bp, Homo sapien
ggggtgttcgggattcctgtggctg

SEQ ID NO: 859660 - DNA, 25 bp, Homo sapien
atcccgcagggcgacaggacttgct

SEQ ID NO: 859661 - DNA, 25 bp, Homo sapien
agctctgtgtggaacgaggagtccc

SEQ ID NO: 859662 - DNA, 25 bp, Homo sapien
catccgatgatgctcctgggcggag

SEQ ID NO: 859663 - DNA, 25 bp, Homo sapien
gagccctctcttggttgttggtcaa

SEQ ID NO: 859664 - DNA, 25 bp, Homo sapien
gctttaacttcttgatccaagaaga

SEQ ID NO: 859665 - DNA, 25 bp, Homo sapien
ggctttaacttcttgatccaagaag

SEQ ID NO: 859666 - DNA, 25 bp, Homo sapien
cggctttaacttcttgatccaagaa

SEQ ID NO: 859667 - DNA, 25 bp, Homo sapien
tttaacttcttgatccaagaagaac

SEQ ID NO: 859668 - DNA, 25 bp, Homo sapien
gggaacacgtgctcagccccggtgc

SEQ ID NO: 859669 - DNA, 25 bp, Homo sapien
gaacacgtgctcagccccggtgctg

SEQ ID NO: 859670 - DNA, 25 bp, Homo sapien
ctgacgttgtcttggagaaggccca

SEQ ID NO: 859671 - DNA, 25 bp, Homo sapien
agttcagcaggcctgacgttgtctt

SEQ ID NO: 859672 - DNA, 25 bp, Homo sapien
ctaagtcaagaacctggcccgtcat

SEQ ID NO: 859673 - DNA, 25 bp, Homo sapien
gcacaggtttagaatatccccttcc

SEQ ID NO: 859674 - DNA, 25 bp, Homo sapien
tgggttcatgcacaggtttagaata

SEQ ID NO: 859675 - DNA, 25 bp, Homo sapien
tcatgcacaggtttagaatatcccc

SEQ ID NO: 859676 - DNA, 25 bp, Homo sapien
acagctttgtctgggttcatgcaca

SEQ ID NO: 859677 - DNA, 25 bp, Homo sapien
gcagcagggcctgcgttgatcatgt

SEQ ID NO: 859678 - DNA, 25 bp, Homo sapien
tgccttgcgtgactgatggcagcag

SEQ ID NO: 859679 - DNA, 25 bp, Homo sapien
ttgatcatgtaaacagcttcctcag

SEQ ID NO: 859680 - DNA, 25 bp, Homo sapien
tcctcagaaacacccttcgagttca

SEQ ID NO: 859681 - DNA, 25 bp, Homo sapien
catgcttagcgatccgaaagagcgg

SEQ ID NO: 859682 - DNA, 25 bp, Homo sapien
taggtggacacgcacaggaagatcg

SEQ ID NO: 859683 - DNA, 25 bp, Homo sapien
tgagctgccgagatacaaagggact

SEQ ID NO: 859684 - DNA, 25 bp, Homo sapien
tgtcttaaacgcagagctggcgcgc

SEQ ID NO: 859685 - DNA, 25 bp, Homo sapien
ttggtgatgcggtgcgggtgctggt

SEQ ID NO: 859686 - DNA, 25 bp, Homo sapien
ggtgctggtggttgccgggcgcctg

SEQ ID NO: 859687 - DNA, 25 bp, Homo sapien
ccgccgctgcttcgccaggcttggg

SEQ ID NO: 859688 - DNA, 25 bp, Homo sapien
ggtgtccgcttcgcccgggctgcta

SEQ ID NO: 859689 - DNA, 25 bp, Homo sapien
gggagcccgagcccaagagctgctc

SEQ ID NO: 859690 - DNA, 25 bp, Homo sapien
ctccgcaccgctcgcgccgccttcg

SEQ ID NO: 859691 - DNA, 25 bp, Homo sapien
ccgggcgcacatggcgggttctgcc

SEQ ID NO: 859692 - DNA, 25 bp, Homo sapien
tctgccggggctctcgggagcccga

SEQ ID NO: 859693 - DNA, 25 bp, Homo sapien
tccgagtagcgcgtacagtagaccc

SEQ ID NO: 859694 - DNA, 25 bp, Homo sapien
cggcttgcgagctgtccgagtccga

SEQ ID NO: 859695 - DNA, 25 bp, Homo sapien
agcgagagcgtcttggagccgcctt

SEQ ID NO: 859696 - DNA, 25 bp, Homo sapien
tttcttggcgccaccgtgcagcgag

SEQ ID NO: 859697 - DNA, 25 bp, Homo sapien
cccgcggcgagccgggacgcgtggt

SEQ ID NO: 859698 - DNA, 25 bp, Homo sapien
ggacgcgtggtccccgcgggctcac

SEQ ID NO: 859699 - DNA, 25 bp, Homo sapien
ctccccgcggcgagccgggacgcgt

SEQ ID NO: 859700 - DNA, 25 bp, Homo sapien
cgcggcgagccgggacgcgtggtcc

SEQ ID NO: 859701 - DNA, 25 bp, Homo sapien
tgagagtgtgcacttccgggcccat

SEQ ID NO: 859702 - DNA, 25 bp, Homo sapien
ctgagttggaagatcgtagggaagg

SEQ ID NO: 859703 - DNA, 25 bp, Homo sapien
agtctgtaccccctagcgaatcagt

SEQ ID NO: 859704 - DNA, 25 bp, Homo sapien
cccctagcgaatcagtcctgccgct

SEQ ID NO: 859705 - DNA, 25 bp, Homo sapien
ttccccgagcacagccgggataacc

SEQ ID NO: 859706 - DNA, 25 bp, Homo sapien
taaccggatggtaggacaagtctgg

SEQ ID NO: 859707 - DNA, 25 bp, Homo sapien
ggcctcgccttttcttccccgagca

SEQ ID NO: 859708 - DNA, 25 bp, Homo sapien
cacagccgggataaccggatggtag

SEQ ID NO: 859709 - DNA, 25 bp, Homo sapien
tccctgtgtgcatcctcctgagtcc

SEQ ID NO: 859710 - DNA, 25 bp, Homo sapien
ttccctgtgtgcatcctcctgagtc

SEQ ID NO: 859711 - DNA, 25 bp, Homo sapien
gttgcccgtggccttcttgatcttg

SEQ ID NO: 859712 - DNA, 25 bp, Homo sapien
gctgctccgtcaggtacctgttggt

SEQ ID NO: 859713 - DNA, 25 bp, Homo sapien
gatctgtgactcgttgaggctcagc

SEQ ID NO: 859714 - DNA, 25 bp, Homo sapien
ccctgtgccatgaggtgcacggcca

SEQ ID NO: 859715 - DNA, 25 bp, Homo sapien
gaactgtggactcaaacacgcctgg

SEQ ID NO: 859716 - DNA, 25 bp, Homo sapien
ttaaggcaaagagcgaagttcaccc

SEQ ID NO: 859717 - DNA, 25 bp, Homo sapien
ttgtttagcgcggactgagacctgg

SEQ ID NO: 859718 - DNA, 25 bp, Homo sapien
gatgtatgcacacggttgggccctt

SEQ ID NO: 859719 - DNA, 25 bp, Homo sapien
tgccccacccgctaggcgcccagct

SEQ ID NO: 859720 - DNA, 25 bp, Homo sapien
gcccagctccccccgacggcgccag

SEQ ID NO: 859721 - DNA, 25 bp, Homo sapien
ccgacggcgccaggcacaaaggcca

SEQ ID NO: 859722 - DNA, 25 bp, Homo sapien
tgtgtccaacttccgcctgccccac

SEQ ID NO: 859723 - DNA, 25 bp, Homo sapien
tatggcagggatggacattcccgag

SEQ ID NO: 859724 - DNA, 25 bp, Homo sapien
tggcagggatggacattcccgagtc

SEQ ID NO: 859725 - DNA, 25 bp, Homo sapien
aaaaatatggcagggatggacattc

SEQ ID NO: 859726 - DNA, 25 bp, Homo sapien
aattgtgtgcttacagtagtgacag

SEQ ID NO: 859727 - DNA, 25 bp, Homo sapien
ttcacatgcatgtcgtcggtgctgg

SEQ ID NO: 859728 - DNA, 25 bp, Homo sapien
aagttcacatgcatgtcgtcggtgc

SEQ ID NO: 859729 - DNA, 25 bp, Homo sapien
tcacccttgcagattacgaggcaag

SEQ ID NO: 859730 - DNA, 25 bp, Homo sapien
gattacgaggcaagttcacatgcat

SEQ ID NO: 859731 - DNA, 25 bp, Homo sapien
agcatgttctgagcgtgttctgaat

SEQ ID NO: 859732 - DNA, 25 bp, Homo sapien
gtgttctgaatgtgttccgagcctg

SEQ ID NO: 859733 - DNA, 25 bp, Homo sapien
gagcctgttctgagcgtgttgagtg

SEQ ID NO: 859734 - DNA, 25 bp, Homo sapien
tccgagcctgttctgagcgtgttga

SEQ ID NO: 859735 - DNA, 25 bp, Homo sapien
tgtccagtgggagctcggcgttgct

SEQ ID NO: 859736 - DNA, 25 bp, Homo sapien
tgagggctgaaggaccaagcgaaca

SEQ ID NO: 859737 - DNA, 25 bp, Homo sapien
tgtatccctgtatcgcctcccggag

SEQ ID NO: 859738 - DNA, 25 bp, Homo sapien
ctgaaggaccaagcgaacagcctct

SEQ ID NO: 859739 - DNA, 25 bp, Homo sapien
aagaatgattctctgcccttcccgg

SEQ ID NO: 859740 - DNA, 25 bp, Homo sapien
acggagccatggtgaacagagtcac

SEQ ID NO: 859741 - DNA, 25 bp, Homo sapien
cccgggcctccgcgacggagccatg

SEQ ID NO: 859742 - DNA, 25 bp, Homo sapien
agaatgattctctgcccttcccggg

SEQ ID NO: 859743 - DNA, 25 bp, Homo sapien
tccagaataaatagcaggcgttggg

SEQ ID NO: 859744 - DNA, 25 bp, Homo sapien
ggcatagagtcctgatgaatgtcct

SEQ ID NO: 859745 - DNA, 25 bp, Homo sapien
ttgagatggcctggctcagatccct

SEQ ID NO: 859746 - DNA, 25 bp, Homo sapien
acagtcccctgaaggcatagagtcc

SEQ ID NO: 859747 - DNA, 25 bp, Homo sapien
caggcctgcgatcacatctccctgc

SEQ ID NO: 859748 - DNA, 25 bp, Homo sapien
tccacgttgtccctccagctttgcc

SEQ ID NO: 859749 - DNA, 25 bp, Homo sapien
cactgactctcaatgcacccgaatg

SEQ ID NO: 859750 - DNA, 25 bp, Homo sapien
tcaatgcacccgaatgagtctgggc

SEQ ID NO: 859751 - DNA, 25 bp, Homo sapien
gttgaggagcctcattgtcccccat

SEQ ID NO: 859752 - DNA, 25 bp, Homo sapien
caagggctaccctggaacagttgag

SEQ ID NO: 859753 - DNA, 25 bp, Homo sapien
tttccttctgaagccgtagccttct

SEQ ID NO: 859754 - DNA, 25 bp, Homo sapien
tcggatttgcctgcaagggctaccc

SEQ ID NO: 859755 - DNA, 25 bp, Homo sapien
ctgtagcagtcctggtgtagaggaa

SEQ ID NO: 859756 - DNA, 25 bp, Homo sapien
agaggaagaatttcagcctcgcccg

SEQ ID NO: 859757 - DNA, 25 bp, Homo sapien
agagaaaccaaacaacctcctgtag

SEQ ID NO: 859758 - DNA, 25 bp, Homo sapien
aagaatttcagcctcgcccgaggcc

SEQ ID NO: 859759 - DNA, 25 bp, Homo sapien
aattgtaagtgtgtgaagacagcac

SEQ ID NO: 859760 - DNA, 25 bp, Homo sapien
gagaaatcgctccttgctccttagt

SEQ ID NO: 859761 - DNA, 25 bp, Homo sapien
tattaattgtaagtgtgtgaagaca

SEQ ID NO: 859762 - DNA, 25 bp, Homo sapien
tttccggttcctggagaaatcgctc

SEQ ID NO: 859763 - DNA, 25 bp, Homo sapien
ggcactcactccaaggcctccgccg

SEQ ID NO: 859764 - DNA, 25 bp, Homo sapien
agcacgaggcattcggggtccccga

SEQ ID NO: 859765 - DNA, 25 bp, Homo sapien
gcccagcgtcgtggctgcggcagag

SEQ ID NO: 859766 - DNA, 25 bp, Homo sapien
gcagaccatggaaccggcactcact

SEQ ID NO: 859767 - DNA, 25 bp, Homo sapien
tcagcgcgcatggacttggtggtgg

SEQ ID NO: 859768 - DNA, 25 bp, Homo sapien
ctgtctcagcgcgcatggacttggt

SEQ ID NO: 859769 - DNA, 25 bp, Homo sapien
tctcagcgcgcatggacttggtggt

SEQ ID NO: 859770 - DNA, 25 bp, Homo sapien
tgtctcagcgcgcatggacttggtg

SEQ ID NO: 859771 - DNA, 25 bp, Homo sapien
ttcccgctgggcaatggaatggaac

SEQ ID NO: 859772 - DNA, 25 bp, Homo sapien
ctggagaagcgcttcccgctgggca

SEQ ID NO: 859773 - DNA, 25 bp, Homo sapien
tcggcactggagaagcgcttcccgc

SEQ ID NO: 859774 - DNA, 25 bp, Homo sapien
cactgtcggcactggagaagcgctt

SEQ ID NO: 859775 - DNA, 25 bp, Homo sapien
aagggcactgatgaactaccttcat

SEQ ID NO: 859776 - DNA, 25 bp, Homo sapien
tttcattgtctgatagaagtcatct

SEQ ID NO: 859777 - DNA, 25 bp, Homo sapien
ggcactgatgaactaccttcatgcc

SEQ ID NO: 859778 - DNA, 25 bp, Homo sapien
ttcattgtctgatagaagtcatctt

SEQ ID NO: 859779 - DNA, 25 bp, Homo sapien
ccagcccgggccatcgcgcggctgc

SEQ ID NO: 859780 - DNA, 25 bp, Homo sapien
gtgggggacgcgcagccaagggcag

SEQ ID NO: 859781 - DNA, 25 bp, Homo sapien
gggggacgcgcagccaagggcagcc

SEQ ID NO: 859782 - DNA, 25 bp, Homo sapien
catcgcgcggctgcagcgtggggga

SEQ ID NO: 859783 - DNA, 25 bp, Homo sapien
gcgcccgtccgtgagccccttcctc

SEQ ID NO: 859784 - DNA, 25 bp, Homo sapien
ccgcctgggagatggggcgcccgtc

SEQ ID NO: 859785 - DNA, 25 bp, Homo sapien
tcccaaagaaagcagccgaggagcc

SEQ ID NO: 859786 - DNA, 25 bp, Homo sapien
ttcccaaagaaagcagccgaggagc

SEQ ID NO: 859787 - DNA, 25 bp, Homo sapien
aaagcccgcaaaggcccgggctgcg

SEQ ID NO: 859788 - DNA, 25 bp, Homo sapien
cgaggggtgctctttgacccgcgcc

SEQ ID NO: 859789 - DNA, 25 bp, Homo sapien
aaagggtccagctgaatcctcgccg

SEQ ID NO: 859790 - DNA, 25 bp, Homo sapien
cttgacctgtctagacggccccgaa

SEQ ID NO: 859791 - DNA, 25 bp, Homo sapien
tgcggttgtcatgcaaacttcctac

SEQ ID NO: 859792 - DNA, 25 bp, Homo sapien
gacaatggaggctggatagatcaac

SEQ ID NO: 859793 - DNA, 25 bp, Homo sapien
tcaacactgcagaaatcgagttcat

SEQ ID NO: 859794 - DNA, 25 bp, Homo sapien
ttcagcccctttcactgcggttgtc

SEQ ID NO: 859795 - DNA, 25 bp, Homo sapien
taacttccgattcgagtgcctgggc

SEQ ID NO: 859796 - DNA, 25 bp, Homo sapien
tctaaagggctagcgaatcacatca

SEQ ID NO: 859797 - DNA, 25 bp, Homo sapien
cgccgcgccgctgatgagatttgtg

SEQ ID NO: 859798 - DNA, 25 bp, Homo sapien
taaagtagggctatgggtatctccc

SEQ ID NO: 859799 - DNA, 25 bp, Homo sapien
tctggcaaagatggtatgaacctgg

SEQ ID NO: 859800 - DNA, 25 bp, Homo sapien
ccaggaagcactaggcaagcagcaa

SEQ ID NO: 859801 - DNA, 25 bp, Homo sapien
atggtgcgatgtcggtccaccacag

SEQ ID NO: 859802 - DNA, 25 bp, Homo sapien
gcctgcatccattctttccagtctg

SEQ ID NO: 859803 - DNA, 25 bp, Homo sapien
cagcccccgtgttgctccggtccct

SEQ ID NO: 859804 - DNA, 25 bp, Homo sapien
ccccgtgttgctccggtccctctgt

SEQ ID NO: 859805 - DNA, 25 bp, Homo sapien
tgttgctccggtccctctgtggcct

SEQ ID NO: 859806 - DNA, 25 bp, Homo sapien
ccgtgttgctccggtccctctgtgg

SEQ ID NO: 859807 - DNA, 25 bp, Homo sapien
gtactggctgggacaaatttgaaaa

SEQ ID NO: 859808 - DNA, 25 bp, Homo sapien
gtaggagaatatattacatgagcag

SEQ ID NO: 859809 - DNA, 25 bp, Homo sapien
gcgcaatgttctgatcaaccaaata

SEQ ID NO: 859810 - DNA, 25 bp, Homo sapien
tacatgagcagaagcgcaatgttct

SEQ ID NO: 859811 - DNA, 25 bp, Homo sapien
ctgtggagtcgacatggagggtgtt

SEQ ID NO: 859812 - DNA, 25 bp, Homo sapien
tgggcaccccgtcttgtttgagaat

SEQ ID NO: 859813 - DNA, 25 bp, Homo sapien
tccccgtccacgaaggcattgggca

SEQ ID NO: 859814 - DNA, 25 bp, Homo sapien
ccctgccagccgtttgttacacaaa

SEQ ID NO: 859815 - DNA, 25 bp, Homo sapien
tgttacacaaatcgctttctgaatt

SEQ ID NO: 859816 - DNA, 25 bp, Homo sapien
ccgagagctggcattgtcagagcta

SEQ ID NO: 859817 - DNA, 25 bp, Homo sapien
gagaaggaagcgtgacaatgaccga

SEQ ID NO: 859818 - DNA, 25 bp, Homo sapien
cacggcgtagcttaacctgggacag

SEQ ID NO: 859819 - DNA, 25 bp, Homo sapien
aacacacttgcccagaatgggcgag

SEQ ID NO: 859820 - DNA, 25 bp, Homo sapien
tcaaagatgggagtctctgacgctt

SEQ ID NO: 859821 - DNA, 25 bp, Homo sapien
gagtctctgacgctttgtggcagcg

SEQ ID NO: 859822 - DNA, 25 bp, Homo sapien
tttgtggcagcggagacagtgtcct

SEQ ID NO: 859823 - DNA, 25 bp, Homo sapien
tggcagcggagacagtgtcctgttc

SEQ ID NO: 859824 - DNA, 25 bp, Homo sapien
acatacagggcaggcatgtcagtgt

SEQ ID NO: 859825 - DNA, 25 bp, Homo sapien
taacccgctgcagtgcacatacagg

SEQ ID NO: 859826 - DNA, 25 bp, Homo sapien
cacatacagggcaggcatgtcagtg

SEQ ID NO: 859827 - DNA, 25 bp, Homo sapien
gcccctaacccgctgcagtgcacat

SEQ ID NO: 859828 - DNA, 25 bp, Homo sapien
tctccgtgccctttgcaatgtgctg

SEQ ID NO: 859829 - DNA, 25 bp, Homo sapien
ttgaagccctggcaccaatgctggg

SEQ ID NO: 859830 - DNA, 25 bp, Homo sapien
ggaacagctggcattaatactccat

SEQ ID NO: 859831 - DNA, 25 bp, Homo sapien
tgcttgcatactgaccaggcaaagg

SEQ ID NO: 859832 - DNA, 25 bp, Homo sapien
tctgcagttgaaatgctcccttcct

SEQ ID NO: 859833 - DNA, 25 bp, Homo sapien
aagcttctgctgttggtccggcaca

SEQ ID NO: 859834 - DNA, 25 bp, Homo sapien
ctgttggtccggcacagctcacctt

SEQ ID NO: 859835 - DNA, 25 bp, Homo sapien
agtgttcaaactgagaaggctctcc

SEQ ID NO: 859836 - DNA, 25 bp, Homo sapien
cggccatcctctcgggctatgcatt

SEQ ID NO: 859837 - DNA, 25 bp, Homo sapien
tcctctcgggctatgcatttctcct

SEQ ID NO: 859838 - DNA, 25 bp, Homo sapien
ggaaccttcacacccggctggcggc

SEQ ID NO: 859839 - DNA, 25 bp, Homo sapien
ttgtgctgattgctttggcctctgc

SEQ ID NO: 859840 - DNA, 25 bp, Homo sapien
cagggtttgacgctggcacttgacg

SEQ ID NO: 859841 - DNA, 25 bp, Homo sapien
agagccgggtgacgctcatccatgg

SEQ ID NO: 859842 - DNA, 25 bp, Homo sapien
gcacttgacggcaaggccacattct

SEQ ID NO: 859843 - DNA, 25 bp, Homo sapien
ccctccctacgatgggagagactct

SEQ ID NO: 859844 - DNA, 25 bp, Homo sapien
acagggagcgtccgggctcagggtg

SEQ ID NO: 859845 - DNA, 25 bp, Homo sapien
agggagcgtccgggctcagggtggg

SEQ ID NO: 859846 - DNA, 25 bp, Homo sapien
agcacagggagcgtccgggctcagg

SEQ ID NO: 859847 - DNA, 25 bp, Homo sapien
cacagggagcgtccgggctcagggt

SEQ ID NO: 859848 - DNA, 25 bp, Homo sapien
catcccgatgctcagggcatttggg

SEQ ID NO: 859849 - DNA, 25 bp, Homo sapien
tggtcctgctactgccatcccgatg

SEQ ID NO: 859850 - DNA, 25 bp, Homo sapien
ggtgtgcactacaaggggctctgcc

SEQ ID NO: 859851 - DNA, 25 bp, Homo sapien
catttggggatgctcgatgacaggt

SEQ ID NO: 859852 - DNA, 25 bp, Homo sapien
tgctcagatattcattgatcccttc

SEQ ID NO: 859853 - DNA, 25 bp, Homo sapien
tcccatagccgctcctgctggtggg

SEQ ID NO: 859854 - DNA, 25 bp, Homo sapien
caccacatgcgagctccttggaggg

SEQ ID NO: 859855 - DNA, 25 bp, Homo sapien
ctgcagctttggatggcttggttcc

SEQ ID NO: 859856 - DNA, 25 bp, Homo sapien
tgctgtgagtccatcatgggccctg

SEQ ID NO: 859857 - DNA, 25 bp, Homo sapien
gggcacagcggcgggcctggtcgat

SEQ ID NO: 859858 - DNA, 25 bp, Homo sapien
tgagtccatcatgggccctgatatc

SEQ ID NO: 859859 - DNA, 25 bp, Homo sapien
cctggtcgatgctgtgagtccatca

SEQ ID NO: 859860 - DNA, 25 bp, Homo sapien
tagaaccgcggacaccatctgacat

SEQ ID NO: 859861 - DNA, 25 bp, Homo sapien
ctccagatgtagggctctgagggtt

SEQ ID NO: 859862 - DNA, 25 bp, Homo sapien
ggctctgagggtttgaagcttagaa

SEQ ID NO: 859863 - DNA, 25 bp, Homo sapien
tttgaagcttagaaccgcggacacc

SEQ ID NO: 859864 - DNA, 25 bp, Homo sapien
cagaggtacagcacttgttagagtc

SEQ ID NO: 859865 - DNA, 25 bp, Homo sapien
aaattagtgatttgcctgaacaggc

SEQ ID NO: 859866 - DNA, 25 bp, Homo sapien
tctgcaccaggacgttgtcagaggt

SEQ ID NO: 859867 - DNA, 25 bp, Homo sapien
acttgttagagtcggtggcaccaca

SEQ ID NO: 859868 - DNA, 25 bp, Homo sapien
ctctgctgtcttttccgtggatttg

SEQ ID NO: 859869 - DNA, 25 bp, Homo sapien
gctgacttctcgaagtgctctgctg

SEQ ID NO: 859870 - DNA, 25 bp, Homo sapien
gtcttttccgtggatttgtctacat

SEQ ID NO: 859871 - DNA, 25 bp, Homo sapien
ttggctgacttctcgaagtgctctg

SEQ ID NO: 859872 - DNA, 25 bp, Homo sapien
cacttcctcgccaacacgtggtgtt

SEQ ID NO: 859873 - DNA, 25 bp, Homo sapien
ggacaccgccgcactgtttttcact

SEQ ID NO: 859874 - DNA, 25 bp, Homo sapien
ttgatagtagctatcctcttactag

SEQ ID NO: 859875 - DNA, 25 bp, Homo sapien
gctatcctcttactagtaaggtctg

SEQ ID NO: 859876 - DNA, 25 bp, Homo sapien
caggtgccagcacgctggaactcat

SEQ ID NO: 859877 - DNA, 25 bp, Homo sapien
tcaggatgtagggctctgcaggtgc

SEQ ID NO: 859878 - DNA, 25 bp, Homo sapien
ccacaggttgtatcaggatgtaggg

SEQ ID NO: 859879 - DNA, 25 bp, Homo sapien
gcaggtgccagcacgctggaactca

SEQ ID NO: 859880 - DNA, 25 bp, Homo sapien
caaacccataaacatacgcataaac

SEQ ID NO: 859881 - DNA, 25 bp, Homo sapien
cccataaacatacgcataaacacat

SEQ ID NO: 859882 - DNA, 25 bp, Homo sapien
cataaacatacgcataaacacatac

SEQ ID NO: 859883 - DNA, 25 bp, Homo sapien
taaacatacgcataaacacatacac

SEQ ID NO: 859884 - DNA, 25 bp, Homo sapien
cagaggaacggatatgaacacatgc

SEQ ID NO: 859885 - DNA, 25 bp, Homo sapien
cagacaggaacacataaagcacagg

SEQ ID NO: 859886 - DNA, 25 bp, Homo sapien
aaatgggaacgcatataggcaggaa

SEQ ID NO: 859887 - DNA, 25 bp, Homo sapien
tatgagcacacacggaaatgggaac

SEQ ID NO: 859888 - DNA, 25 bp, Homo sapien
gggccgatgaggttgatgtcctgtg

SEQ ID NO: 859889 - DNA, 25 bp, Homo sapien
tggtggccagttggatgccacagcc

SEQ ID NO: 859890 - DNA, 25 bp, Homo sapien
tgtggtgagctgaggcacgctgcag

SEQ ID NO: 859891 - DNA, 25 bp, Homo sapien
gcttccattctgaggtccagcacgg

SEQ ID NO: 859892 - DNA, 25 bp, Homo sapien
tggagaaccagtgaagtcgttctta

SEQ ID NO: 859893 - DNA, 25 bp, Homo sapien
tcttaacaaacctgagcgcaagcgt

SEQ ID NO: 859894 - DNA, 25 bp, Homo sapien
gaagtcgttcttaacaaacctgagc

SEQ ID NO: 859895 - DNA, 25 bp, Homo sapien
aaacctgagcgcaagcgtgttcctg

SEQ ID NO: 859896 - DNA, 25 bp, Homo sapien
tagcagctggtatggatacagcagc

SEQ ID NO: 859897 - DNA, 25 bp, Homo sapien
cagcagctgatctaggtgcagcagc

SEQ ID NO: 859898 - DNA, 25 bp, Homo sapien
ctggtctgggtatagcagctggtat

SEQ ID NO: 859899 - DNA, 25 bp, Homo sapien
tctgggtatagcagctggtatggat

SEQ ID NO: 859900 - DNA, 25 bp, Homo sapien
tataacgtgcggaagagacaaggaa

SEQ ID NO: 859901 - DNA, 25 bp, Homo sapien
gaaagtcctggcagtttgacattac

SEQ ID NO: 859902 - DNA, 25 bp, Homo sapien
aatcttggcgttgttggcttcttga

SEQ ID NO: 859903 - DNA, 25 bp, Homo sapien
ccacttagtataacgtgcggaagag

SEQ ID NO: 859904 - DNA, 25 bp, Homo sapien
ttacttataagtgagcatctctatc

SEQ ID NO: 859905 - DNA, 25 bp, Homo sapien
tgagcatctctatcggggcacactc

SEQ ID NO: 859906 - DNA, 25 bp, Homo sapien
cttataagtgagcatctctatcggg

SEQ ID NO: 859907 - DNA, 25 bp, Homo sapien
gagcatctctatcggggcacactca

SEQ ID NO: 859908 - DNA, 25 bp, Homo sapien
tagcctcgggggagcaagtgtgaga

SEQ ID NO: 859909 - DNA, 25 bp, Homo sapien
tgttgcgggacgctatggctttgaa

SEQ ID NO: 859910 - DNA, 25 bp, Homo sapien
ggacgctatggctttgaaggtgata

SEQ ID NO: 859911 - DNA, 25 bp, Homo sapien
ctgcacgtggagacccagggaatgc

SEQ ID NO: 859912 - DNA, 25 bp, Homo sapien
taaaaacagccagcgacaggagtgg

SEQ ID NO: 859913 - DNA, 25 bp, Homo sapien
gccaaggaccatagcgtgatccata

SEQ ID NO: 859914 - DNA, 25 bp, Homo sapien
aatttccaagccctcagtattgagc

SEQ ID NO: 859915 - DNA, 25 bp, Homo sapien
gaagatagccgcgtagacggccaag

SEQ ID NO: 859916 - DNA, 25 bp, Homo sapien
agaaagaaatgtcagagtcatcctt

SEQ ID NO: 859917 - DNA, 25 bp, Homo sapien
tcagagtcatcctttgtcccaattt

SEQ ID NO: 859918 - DNA, 25 bp, Homo sapien
gaaatgtcagagtcatcctttgtcc

SEQ ID NO: 859919 - DNA, 25 bp, Homo sapien
tacttctctgttattaatttcagtc

SEQ ID NO: 859920 - DNA, 25 bp, Homo sapien
gagcaactgtaactcacataccttt

SEQ ID NO: 859921 - DNA, 25 bp, Homo sapien
tggaacagacaccttacaaaagaag

SEQ ID NO: 859922 - DNA, 25 bp, Homo sapien
tatacatctacgagagtgactaaaa

SEQ ID NO: 859923 - DNA, 25 bp, Homo sapien
catctgtggccgataagcacatgaa

SEQ ID NO: 859924 - DNA, 25 bp, Homo sapien
catattttttgtctgctttttgatg

SEQ ID NO: 859925 - DNA, 25 bp, Homo sapien
agtgtctgttcatattttttgtctg

SEQ ID NO: 859926 - DNA, 25 bp, Homo sapien
tattttttgtctgctttttgatggg

SEQ ID NO: 859927 - DNA, 25 bp, Homo sapien
tgtctgttcatattttttgtctgct

SEQ ID NO: 859928 - DNA, 25 bp, Homo sapien
gactgctggccataggtcgattccg

SEQ ID NO: 859929 - DNA, 25 bp, Homo sapien
aacaaactaccgcaacatggccgcg

SEQ ID NO: 859930 - DNA, 25 bp, Homo sapien
gaagccgggcgcttcgcggtccaca

SEQ ID NO: 859931 - DNA, 25 bp, Homo sapien
gtgcaacgcaaacacgcggcagtca

SEQ ID NO: 859932 - DNA, 25 bp, Homo sapien
tgctcctccgctcgctcccagggcg

SEQ ID NO: 859933 - DNA, 25 bp, Homo sapien
cctccgctcgctcccagggcggccg

SEQ ID NO: 859934 - DNA, 25 bp, Homo sapien
tccggcgcctgctcctccgctcgct

SEQ ID NO: 859935 - DNA, 25 bp, Homo sapien
ctccggcgcctgctcctccgctcgc

SEQ ID NO: 859936 - DNA, 25 bp, Homo sapien
ttcgaatgaaaaccttctgcaccat

SEQ ID NO: 859937 - DNA, 25 bp, Homo sapien
tgtttcactttcacaatttcgaatg

SEQ ID NO: 859938 - DNA, 25 bp, Homo sapien
ctttcacaatttcgaatgaaaacct

SEQ ID NO: 859939 - DNA, 25 bp, Homo sapien
tgttgaagtactaaaacttgtttca

SEQ ID NO: 859940 - DNA, 25 bp, Homo sapien
ctttaaccatgattttgtgccacca

SEQ ID NO: 859941 - DNA, 25 bp, Homo sapien
ggtgccctgatttatgtagtactcc

SEQ ID NO: 859942 - DNA, 25 bp, Homo sapien
tcaccaatctcaccaggaaagtcct

SEQ ID NO: 859943 - DNA, 25 bp, Homo sapien
tgttatgttaaagtccaagcgtgtc

SEQ ID NO: 859944 - DNA, 25 bp, Homo sapien
tccgcgccaggcttatcaaactggt

SEQ ID NO: 859945 - DNA, 25 bp, Homo sapien
accgttccgcgccaggcttatcaaa

SEQ ID NO: 859946 - DNA, 25 bp, Homo sapien
tcttcttctccacgaccgttccgcg

SEQ ID NO: 859947 - DNA, 25 bp, Homo sapien
gcgccaggcttatcaaactggtcaa

SEQ ID NO: 859948 - DNA, 25 bp, Homo sapien
catggatgtcgtatcagtgatttgc

SEQ ID NO: 859949 - DNA, 25 bp, Homo sapien
aattctggggaaatcaatctcttgg

SEQ ID NO: 859950 - DNA, 25 bp, Homo sapien
ggaaatcaatctcttggaagcaaat

SEQ ID NO: 859951 - DNA, 25 bp, Homo sapien
taaatgattagaagccggctttctc

SEQ ID NO: 859952 - DNA, 25 bp, Homo sapien
ctttttgccagatagcaaatcttct

SEQ ID NO: 859953 - DNA, 25 bp, Homo sapien
agatagcaaatcttctccaagtaaa

SEQ ID NO: 859954 - DNA, 25 bp, Homo sapien
gccagatagcaaatcttctccaagt

SEQ ID NO: 859955 - DNA, 25 bp, Homo sapien
ttttgccagatagcaaatcttctcc

SEQ ID NO: 859956 - DNA, 25 bp, Homo sapien
gtgataacaaaacggactgcttaac

SEQ ID NO: 859957 - DNA, 25 bp, Homo sapien
tgtgataacaaaacggactgcttaa

SEQ ID NO: 859958 - DNA, 25 bp, Homo sapien
catcatttagctcttcatctgacaa

SEQ ID NO: 859959 - DNA, 25 bp, Homo sapien
cttcatctgacaaatccgactgatt

SEQ ID NO: 859960 - DNA, 25 bp, Homo sapien
tctgtcaactcagcttcgtggcctt

SEQ ID NO: 859961 - DNA, 25 bp, Homo sapien
tgtgataaaccagttcatcctctcc

SEQ ID NO: 859962 - DNA, 25 bp, Homo sapien
gccttcatactgtccttcttctggg

SEQ ID NO: 859963 - DNA, 25 bp, Homo sapien
cagattggtcgttagtgttgtcaga

SEQ ID NO: 859964 - DNA, 25 bp, Homo sapien
aaataacaagttccccatgatgcct

SEQ ID NO: 859965 - DNA, 25 bp, Homo sapien
gaaggcacgtgcctacattagcgaa

SEQ ID NO: 859966 - DNA, 25 bp, Homo sapien
cattagcgaaggattactagaacaa

SEQ ID NO: 859967 - DNA, 25 bp, Homo sapien
cagtgtctaactttaagagcataca

SEQ ID NO: 859968 - DNA, 25 bp, Homo sapien
ttttaatgtggaagagtaccgtgag

SEQ ID NO: 859969 - DNA, 25 bp, Homo sapien
gatctgtgccacctagtactaagtt

SEQ ID NO: 859970 - DNA, 25 bp, Homo sapien
tactaagttcacaggcagggccaat

SEQ ID NO: 859971 - DNA, 25 bp, Homo sapien
cagggccaatgttcatgacacggtt

SEQ ID NO: 859972 - DNA, 25 bp, Homo sapien
ttcctgctcttgcagcccttgttgc

SEQ ID NO: 859973 - DNA, 25 bp, Homo sapien
cttcctgctcttgcagcccttgttg

SEQ ID NO: 859974 - DNA, 25 bp, Homo sapien
cctgctcttgcagcccttgttgccc

SEQ ID NO: 859975 - DNA, 25 bp, Homo sapien
tcctgctcttgcagcccttgttgcc

SEQ ID NO: 859976 - DNA, 25 bp, Homo sapien
ccggaacaaaggacaggcagtgatt

SEQ ID NO: 859977 - DNA, 25 bp, Homo sapien
ggcagtgatttgctcgctttgctca

SEQ ID NO: 859978 - DNA, 25 bp, Homo sapien
caaaacctgcagctaaatgaaggac

SEQ ID NO: 859979 - DNA, 25 bp, Homo sapien
gttaccaaaacgctccctcaagtga

SEQ ID NO: 859980 - DNA, 25 bp, Homo sapien
cactttaaggttaggccatgattta

SEQ ID NO: 859981 - DNA, 25 bp, Homo sapien
gcatcacgagcacctttccaagtca

SEQ ID NO: 859982 - DNA, 25 bp, Homo sapien
gggagctgaagggaagaattctatc

SEQ ID NO: 859983 - DNA, 25 bp, Homo sapien
cagaactaagacaacacttggtata

SEQ ID NO: 859984 - DNA, 25 bp, Homo sapien
catctgagagcctaataattgttcc

SEQ ID NO: 859985 - DNA, 25 bp, Homo sapien
tccttctctctctagttacatctga

SEQ ID NO: 859986 - DNA, 25 bp, Homo sapien
tccttttgaagttccaatgtttcca

SEQ ID NO: 859987 - DNA, 25 bp, Homo sapien
tcagttttgaaacgtaatcgtccag

SEQ ID NO: 859988 - DNA, 25 bp, Homo sapien
gcaatactatggaggaagttgaaat

SEQ ID NO: 859989 - DNA, 25 bp, Homo sapien
agcaatactatggaggaagttgaaa

SEQ ID NO: 859990 - DNA, 25 bp, Homo sapien
aatactatggaggaagttgaaatga

SEQ ID NO: 859991 - DNA, 25 bp, Homo sapien
caatactatggaggaagttgaaatg

SEQ ID NO: 859992 - DNA, 25 bp, Homo sapien
ggacggcagccgcaattacctagtc

SEQ ID NO: 859993 - DNA, 25 bp, Homo sapien
gcaattacctagtcaaccttctttg

SEQ ID NO: 859994 - DNA, 25 bp, Homo sapien
atgagttttacagtaccataaacag

SEQ ID NO: 859995 - DNA, 25 bp, Homo sapien
gagttttacagtaccataaacagca

SEQ ID NO: 859996 - DNA, 25 bp, Homo sapien
aacactagctaaattgggacaacag

SEQ ID NO: 859997 - DNA, 25 bp, Homo sapien
gaagccttctcatatgcatgcagac

SEQ ID NO: 859998 - DNA, 25 bp, Homo sapien
gctttagggatacagaaaacatggg

SEQ ID NO: 859999 - DNA, 25 bp, Homo sapien
caaacacgtgtggagtgtccagcag

SEQ ID NO: 860000 - DNA, 25 bp, Homo sapien
tgtgttagttactttccgagagccc

SEQ ID NO: 860001 - DNA, 25 bp, Homo sapien
atgtgttagttactttccgagagcc

SEQ ID NO: 860002 - DNA, 25 bp, Homo sapien
tgttagttactttccgagagcccaa

SEQ ID NO: 860003 - DNA, 25 bp, Homo sapien
gtgttagttactttccgagagccca

SEQ ID NO: 860004 - DNA, 25 bp, Homo sapien
gtccttgtttatgctgtcgctccct

SEQ ID NO: 860005 - DNA, 25 bp, Homo sapien
accacgacacatcagcggacctcct

SEQ ID NO: 860006 - DNA, 25 bp, Homo sapien
cccgcctggagctgtagcgtccttg

SEQ ID NO: 860007 - DNA, 25 bp, Homo sapien
aggtctgtggtccttcatcctgccc

SEQ ID NO: 860008 - DNA, 25 bp, Homo sapien
tgttctgaagttctagggctactac

SEQ ID NO: 860009 - DNA, 25 bp, Homo sapien
gttctgaagttctagggctactaca

SEQ ID NO: 860010 - DNA, 25 bp, Homo sapien
tctgaagttctagggctactacaag

SEQ ID NO: 860011 - DNA, 25 bp, Homo sapien
gaagttctagggctactacaagaaa

SEQ ID NO: 860012 - DNA, 25 bp, Homo sapien
cagcttatgtcatcttagggcatca

SEQ ID NO: 860013 - DNA, 25 bp, Homo sapien
catcaggtcgctcattaattcctcc

SEQ ID NO: 860014 - DNA, 25 bp, Homo sapien
aggctttaggtagcaaggtccaaca

SEQ ID NO: 860015 - DNA, 25 bp, Homo sapien
tctctagaggctttaggtagcaagg

SEQ ID NO: 860016 - DNA, 25 bp, Homo sapien
tgagaaacagtaggtgacagcaaga

SEQ ID NO: 860017 - DNA, 25 bp, Homo sapien
gaaacagtaggtgacagcaagagga

SEQ ID NO: 860018 - DNA, 25 bp, Homo sapien
caagaggaacagtgctggggagacc

SEQ ID NO: 860019 - DNA, 25 bp, Homo sapien
aacagtaggtgacagcaagaggaac

SEQ ID NO: 860020 - DNA, 25 bp, Homo sapien
tgtggaggaattaaccttggagaat

SEQ ID NO: 860021 - DNA, 25 bp, Homo sapien
tggaggaattaaccttggagaatga

SEQ ID NO: 860022 - DNA, 25 bp, Homo sapien
gtggaggaattaaccttggagaatg

SEQ ID NO: 860023 - DNA, 25 bp, Homo sapien
ctgtggaggaattaaccttggagaa

SEQ ID NO: 860024 - DNA, 25 bp, Homo sapien
cggtggcggtggagggggagcctgg

SEQ ID NO: 860025 - DNA, 25 bp, Homo sapien
gcggcggtggcggtggagggggagc

SEQ ID NO: 860026 - DNA, 25 bp, Homo sapien
ctgaggcggcggtggcggtggaggg

SEQ ID NO: 860027 - DNA, 25 bp, Homo sapien
tgaggcggcggtggcggtggagggg

SEQ ID NO: 860028 - DNA, 25 bp, Homo sapien
gaggcatgtgcattccctgaggcgg

SEQ ID NO: 860029 - DNA, 25 bp, Homo sapien
gcgtgaccaccgtccctttgaagtg

SEQ ID NO: 860030 - DNA, 25 bp, Homo sapien
ggctgctgtggagtcacgggtggcg

SEQ ID NO: 860031 - DNA, 25 bp, Homo sapien
tgcgggtgctgcaccggaagcagcg

SEQ ID NO: 860032 - DNA, 25 bp, Homo sapien
tccattcattcaacggctactgcag

SEQ ID NO: 860033 - DNA, 25 bp, Homo sapien
caagtatgcgtgtgttcatgtctcc

SEQ ID NO: 860034 - DNA, 25 bp, Homo sapien
gctactgcaggagacgtaggcacca

SEQ ID NO: 860035 - DNA, 25 bp, Homo sapien
gctcagggccacctaagaggatgtg

SEQ ID NO: 860036 - DNA, 25 bp, Homo sapien
agactgacagcagttccaagttcag

SEQ ID NO: 860037 - DNA, 25 bp, Homo sapien
gactgacagcagttccaagttcagg

SEQ ID NO: 860038 - DNA, 25 bp, Homo sapien
gacagcagttccaagttcaggacaa

SEQ ID NO: 860039 - DNA, 25 bp, Homo sapien
ctgacagcagttccaagttcaggac

SEQ ID NO: 860040 - DNA, 25 bp, Homo sapien
tcatggtgagaaaaagctagctggt

SEQ ID NO: 860041 - DNA, 25 bp, Homo sapien
gaaagtgttgcctatctacctagca

SEQ ID NO: 860042 - DNA, 25 bp, Homo sapien
gacagataagggacatgcggcacta

SEQ ID NO: 860043 - DNA, 25 bp, Homo sapien
tgctaaatcacacgtgcgctttggg

SEQ ID NO: 860044 - DNA, 25 bp, Homo sapien
tctggggtcccacggcaggtctcgg

SEQ ID NO: 860045 - DNA, 25 bp, Homo sapien
gtcccacggcaggtctcggctggct

SEQ ID NO: 860046 - DNA, 25 bp, Homo sapien
ctggctcggaactggtagcaagggc

SEQ ID NO: 860047 - DNA, 25 bp, Homo sapien
ggggtcccacggcaggtctcggctg

SEQ ID NO: 860048 - DNA, 25 bp, Homo sapien
aactgcttcaaatagatacccaata

SEQ ID NO: 860049 - DNA, 25 bp, Homo sapien
tgggtaatggatctaataaaacttg

SEQ ID NO: 860050 - DNA, 25 bp, Homo sapien
actagcagataaactactccacaga

SEQ ID NO: 860051 - DNA, 25 bp, Homo sapien
gtcataattcataactacaagtcaa

SEQ ID NO: 860052 - DNA, 25 bp, Homo sapien
gctttgctaagccacaacaatgttg

SEQ ID NO: 860053 - DNA, 25 bp, Homo sapien
gggcatacggccatccataagaacc

SEQ ID NO: 860054 - DNA, 25 bp, Homo sapien
gcacctccagccaccaataagaaat

SEQ ID NO: 860055 - DNA, 25 bp, Homo sapien
gcgtactaagaagcacactgactca

SEQ ID NO: 860056 - DNA, 25 bp, Homo sapien
cattacttattctatgtagggctcc

SEQ ID NO: 860057 - DNA, 25 bp, Homo sapien
tagggctcctaataagcagtaaggt

SEQ ID NO: 860058 - DNA, 25 bp, Homo sapien
tatttgacaactatgtgctccctcc

SEQ ID NO: 860059 - DNA, 25 bp, Homo sapien
tagtcaattgggtatgaagctgcat

SEQ ID NO: 860060 - DNA, 25 bp, Homo sapien
tacccctggcctttgactaattagc

SEQ ID NO: 860061 - DNA, 25 bp, Homo sapien
tactgccgcagatgggaattcattg

SEQ ID NO: 860062 - DNA, 25 bp, Homo sapien
taccatgtgcccaaatgtggcccaa

SEQ ID NO: 860063 - DNA, 25 bp, Homo sapien
tgtttagctgctcgttactgccgca

SEQ ID NO: 860064 - DNA, 25 bp, Homo sapien
ttttattcaggacaacaccgcccag

SEQ ID NO: 860065 - DNA, 25 bp, Homo sapien
tagcaggtctcatgaagcgcacagt

SEQ ID NO: 860066 - DNA, 25 bp, Homo sapien
cacatgggaaagactgctaactgct

SEQ ID NO: 860067 - DNA, 25 bp, Homo sapien
tgctattggacagaagggagagctc

SEQ ID NO: 860068 - DNA, 25 bp, Homo sapien
gaacttccatgctgatagggtttgg

SEQ ID NO: 860069 - DNA, 25 bp, Homo sapien
tgcatctggccaagagaaattattt

SEQ ID NO: 860070 - DNA, 25 bp, Homo sapien
cccacgctgttctcataatggtatg

SEQ ID NO: 860071 - DNA, 25 bp, Homo sapien
ttagagaaggaccatgctgactggc

SEQ ID NO: 860072 - DNA, 25 bp, Homo sapien
tgcccacaaagcacagggagaggtg

SEQ ID NO: 860073 - DNA, 25 bp, Homo sapien
aaccagctgcccacaaagcacaggg

SEQ ID NO: 860074 - DNA, 25 bp, Homo sapien
gtaaaaccagctgcccacaaagcac

SEQ ID NO: 860075 - DNA, 25 bp, Homo sapien
gctgtaaaaccagctgcccacaaag

SEQ ID NO: 860076 - DNA, 25 bp, Homo sapien
attctcaacctggaagtactgcggc

SEQ ID NO: 860077 - DNA, 25 bp, Homo sapien
tctcaacctggaagtactgcggcat

SEQ ID NO: 860078 - DNA, 25 bp, Homo sapien
ttctcaacctggaagtactgcggca

SEQ ID NO: 860079 - DNA, 25 bp, Homo sapien
ctggctcatcagtgtcaatcagcag

SEQ ID NO: 860080 - DNA, 25 bp, Homo sapien
tgagcaccttctagtgattccacca

SEQ ID NO: 860081 - DNA, 25 bp, Homo sapien
tcactgcccaggataacttcacacc

SEQ ID NO: 860082 - DNA, 25 bp, Homo sapien
gaatcccatgaactggaatcactaa

SEQ ID NO: 860083 - DNA, 25 bp, Homo sapien
aactggtaaatctggctggcactag

SEQ ID NO: 860084 - DNA, 25 bp, Homo sapien
aggactgggtcacggagaaggagcc

SEQ ID NO: 860085 - DNA, 25 bp, Homo sapien
acgcactgggcgtgaggtgacagca

SEQ ID NO: 860086 - DNA, 25 bp, Homo sapien
gagccccgaggaacagctggcatga

SEQ ID NO: 860087 - DNA, 25 bp, Homo sapien
gaaagggtctcgatcctgaggcggg

SEQ ID NO: 860088 - DNA, 25 bp, Homo sapien
agaagaaagggtctcgatcctgagg

SEQ ID NO: 860089 - DNA, 25 bp, Homo sapien
ggtctcgatcctgaggcgggggtgg

SEQ ID NO: 860090 - DNA, 25 bp, Homo sapien
aagaaagggtctcgatcctgaggcg

SEQ ID NO: 860091 - DNA, 25 bp, Homo sapien
ctgttaagaagggtaggaggcggtg

SEQ ID NO: 860092 - DNA, 25 bp, Homo sapien
agatggctcgggaatcttggttcac

SEQ ID NO: 860093 - DNA, 25 bp, Homo sapien
gggacttcgctgttccagaaaaaga

SEQ ID NO: 860094 - DNA, 25 bp, Homo sapien
ttccagaaaaagatggctcgggaat

SEQ ID NO: 860095 - DNA, 25 bp, Homo sapien
gtccttgctgattaaatgctggtcc

SEQ ID NO: 860096 - DNA, 25 bp, Homo sapien
aggctggtcgtacgggccgctctct

SEQ ID NO: 860097 - DNA, 25 bp, Homo sapien
gactctgagtaggaacaggatggct

SEQ ID NO: 860098 - DNA, 25 bp, Homo sapien
ctgagtgaatggtagaggactctga

SEQ ID NO: 860099 - DNA, 25 bp, Homo sapien
tggttgccgacccaggctggctaaa

SEQ ID NO: 860100 - DNA, 25 bp, Homo sapien
tgccgacccaggctggctaaagtgc

SEQ ID NO: 860101 - DNA, 25 bp, Homo sapien
gttgccgacccaggctggctaaagt

SEQ ID NO: 860102 - DNA, 25 bp, Homo sapien
tgtggttgccgacccaggctggcta

SEQ ID NO: 860103 - DNA, 25 bp, Homo sapien
gtgtgtgggcagaaacggctgtcct

SEQ ID NO: 860104 - DNA, 25 bp, Homo sapien
tgtgtgtgggcagaaacggctgtcc

SEQ ID NO: 860105 - DNA, 25 bp, Homo sapien
tgtgtgggcagaaacggctgtcctg

SEQ ID NO: 860106 - DNA, 25 bp, Homo sapien
catgaaagggaaccgcatacagcac

SEQ ID NO: 860107 - DNA, 25 bp, Homo sapien
tgtcaacccatgaagcagaagccga

SEQ ID NO: 860108 - DNA, 25 bp, Homo sapien
gaaaggaactttcagcgataccaaa

SEQ ID NO: 860109 - DNA, 25 bp, Homo sapien
aaacccatgaagcagaagccggtcg

SEQ ID NO: 860110 - DNA, 25 bp, Homo sapien
ggttacaccgggcataatcacttca

SEQ ID NO: 860111 - DNA, 25 bp, Homo sapien
gagaaacaacagttcataaatggtt

SEQ ID NO: 860112 - DNA, 25 bp, Homo sapien
caccgggcataatcacttcaatcat

SEQ ID NO: 860113 - DNA, 25 bp, Homo sapien
ttcataaatggttacaccgggcata

SEQ ID NO: 860114 - DNA, 25 bp, Homo sapien
gggctggtgcggaggctggtgctgt

SEQ ID NO: 860115 - DNA, 25 bp, Homo sapien
ctgagacatcggcatcaaaggaggg

SEQ ID NO: 860116 - DNA, 25 bp, Homo sapien
gctgaggctgatgcggagggggcaa

SEQ ID NO: 860117 - DNA, 25 bp, Homo sapien
ctgttgctgaggttgctgaggctga

SEQ ID NO: 860118 - DNA, 25 bp, Homo sapien
gctgctgctggcctgaggctgagcg

SEQ ID NO: 860119 - DNA, 25 bp, Homo sapien
tgggggcactgcatccggctgctgc

SEQ ID NO: 860120 - DNA, 25 bp, Homo sapien
tgctgctggcctgaggctgagcggt

SEQ ID NO: 860121 - DNA, 25 bp, Homo sapien
atgccggagcccctggcgctggggg

SEQ ID NO: 860122 - DNA, 25 bp, Homo sapien
tctgccaccagagatcaacgggatt

SEQ ID NO: 860123 - DNA, 25 bp, Homo sapien
tacaccaggctgatctttagcaggt

SEQ ID NO: 860124 - DNA, 25 bp, Homo sapien
tccgaggtcccgcaggtcaaatatc

SEQ ID NO: 860125 - DNA, 25 bp, Homo sapien
tgccagaacgttttactcgagagga

SEQ ID NO: 860126 - DNA, 25 bp, Homo sapien
tcttctttaggttgagccacagggc

SEQ ID NO: 860127 - DNA, 25 bp, Homo sapien
tggtgacgcgctgacgataggtttc

SEQ ID NO: 860128 - DNA, 25 bp, Homo sapien
tgacggcgctatgggtaattcacgc

SEQ ID NO: 860129 - DNA, 25 bp, Homo sapien
tcatttctatcacgtgtgacggcgc

SEQ ID NO: 860130 - DNA, 25 bp, Homo sapien
ttcaggatttcttctcttaggcgtt

SEQ ID NO: 860131 - DNA, 25 bp, Homo sapien
tctttaagcgatataaccttgtttc

SEQ ID NO: 860132 - DNA, 25 bp, Homo sapien
tcttctatctttaagcgatataacc

SEQ ID NO: 860133 - DNA, 25 bp, Homo sapien
gccgtaactccttctgtttcaggat

SEQ ID NO: 860134 - DNA, 25 bp, Homo sapien
tccttgatactgcatgttggcactg

SEQ ID NO: 860135 - DNA, 25 bp, Homo sapien
ggcactggatggtacaaaattggat

SEQ ID NO: 860136 - DNA, 25 bp, Homo sapien
tctgcaggtttgatcgggagcactt

SEQ ID NO: 860137 - DNA, 25 bp, Homo sapien
tatgcagcggctgagtctgactttg

SEQ ID NO: 860138 - DNA, 25 bp, Homo sapien
tttcacgccaggctttgtgtcctgg

SEQ ID NO: 860139 - DNA, 25 bp, Homo sapien
tccttttcacgccaggctttgtgtc

SEQ ID NO: 860140 - DNA, 25 bp, Homo sapien
cagtccttttcacgccaggctttgt

SEQ ID NO: 860141 - DNA, 25 bp, Homo sapien
gggccggccctggatggacgccact

SEQ ID NO: 860142 - DNA, 25 bp, Homo sapien
ccacctgacagcttaatcaccctga

SEQ ID NO: 860143 - DNA, 25 bp, Homo sapien
cccacctgacagcttaatcaccctg

SEQ ID NO: 860144 - DNA, 25 bp, Homo sapien
cacctgacagcttaatcaccctgac

SEQ ID NO: 860145 - DNA, 25 bp, Homo sapien
gagaatgtatgcctgtcgtcaagcg

SEQ ID NO: 860146 - DNA, 25 bp, Homo sapien
aacatgctgcacaggcttgtggcca

SEQ ID NO: 860147 - DNA, 25 bp, Homo sapien
caaaggcggtcccatgaggttatga

SEQ ID NO: 860148 - DNA, 25 bp, Homo sapien
caacattctgctcagatgggcgaca

SEQ ID NO: 860149 - DNA, 25 bp, Homo sapien
tttatggaagaatcttctgcaatgg

SEQ ID NO: 860150 - DNA, 25 bp, Homo sapien
tgcaatggaaatctatctgcagtga

SEQ ID NO: 860151 - DNA, 25 bp, Homo sapien
taagactatatggtgggataaagaa

SEQ ID NO: 860152 - DNA, 25 bp, Homo sapien
gaatcttctgcaatggaaatctatc

SEQ ID NO: 860153 - DNA, 25 bp, Homo sapien
ggtttactctagaagcctatgttta

SEQ ID NO: 860154 - DNA, 25 bp, Homo sapien
caatgaatagcactgttatagggca

SEQ ID NO: 860155 - DNA, 25 bp, Homo sapien
catgaaaacaacagatgagagctac

SEQ ID NO: 860156 - DNA, 25 bp, Homo sapien
gcaatcgttgctagctggtttactc

SEQ ID NO: 860157 - DNA, 25 bp, Homo sapien
ctctacatcggccattgtaacaaac

SEQ ID NO: 860158 - DNA, 25 bp, Homo sapien
gcagccctctacatcggccattgta

SEQ ID NO: 860159 - DNA, 25 bp, Homo sapien
tggtagaaactggacccttcacttc

SEQ ID NO: 860160 - DNA, 25 bp, Homo sapien
tgtaacaaacagcaccagttctggt

SEQ ID NO: 860161 - DNA, 25 bp, Homo sapien
aaaccaagaaggcagcacgttgttc

SEQ ID NO: 860162 - DNA, 25 bp, Homo sapien
accaagaaggcagcacgttgttcag

SEQ ID NO: 860163 - DNA, 25 bp, Homo sapien
caagaaggcagcacgttgttcagtg

SEQ ID NO: 860164 - DNA, 25 bp, Homo sapien
tgaaaccaagaaggcagcacgttgt

SEQ ID NO: 860165 - DNA, 25 bp, Homo sapien
tgggtgaaaaaagccatcgctctct

SEQ ID NO: 860166 - DNA, 25 bp, Homo sapien
tgaaaaaagccatcgctctctcctc

SEQ ID NO: 860167 - DNA, 25 bp, Homo sapien
ccttctgggtgaaaaaagccatcgc

SEQ ID NO: 860168 - DNA, 25 bp, Homo sapien
tctgggtgaaaaaagccatcgctct

SEQ ID NO: 860169 - DNA, 25 bp, Homo sapien
ctggagggacaggcgagtgtgcgtg

SEQ ID NO: 860170 - DNA, 25 bp, Homo sapien
cgtggggccccgctggcagatgtgg

SEQ ID NO: 860171 - DNA, 25 bp, Homo sapien
gcgagtgtgcgtggggccccgctgg

SEQ ID NO: 860172 - DNA, 25 bp, Homo sapien
tggaggccccccctggtcagcgtca

SEQ ID NO: 860173 - DNA, 25 bp, Homo sapien
cttcttcgccgggtgaattccttgg

SEQ ID NO: 860174 - DNA, 25 bp, Homo sapien
cgtttccagggctgcgtgcgaggca

SEQ ID NO: 860175 - DNA, 25 bp, Homo sapien
accggccttcgcgtttccagggctg

SEQ ID NO: 860176 - DNA, 25 bp, Homo sapien
tccagggctgcgtgcgaggcaacaa

SEQ ID NO: 860177 - DNA, 25 bp, Homo sapien
ggctgcgtgcgaggcaacaagcagt

SEQ ID NO: 860178 - DNA, 25 bp, Homo sapien
tggtgacaacaaaggaaatacattc

SEQ ID NO: 860179 - DNA, 25 bp, Homo sapien
ctggtgacaacaaaggaaatacatt

SEQ ID NO: 860180 - DNA, 25 bp, Homo sapien
gcttgtttggcatcaggcgcccccg

SEQ ID NO: 860181 - DNA, 25 bp, Homo sapien
tccacagacaccacgcagggctggg

SEQ ID NO: 860182 - DNA, 25 bp, Homo sapien
ccactcctctgcctcgtccgtgcat

SEQ ID NO: 860183 - DNA, 25 bp, Homo sapien
catgggaccggccactcctctgcct

SEQ ID NO: 860184 - DNA, 25 bp, Homo sapien
aagtatgcacaacaggttatttgtc

SEQ ID NO: 860185 - DNA, 25 bp, Homo sapien
tattttaatatgaagtagccaacac

SEQ ID NO: 860186 - DNA, 25 bp, Homo sapien
tgtcttgggacacaactacccgtgg

SEQ ID NO: 860187 - DNA, 25 bp, Homo sapien
ttgaggcaaatgttctgatactaag

SEQ ID NO: 860188 - DNA, 25 bp, Homo sapien
gcaatggcaacaatgggcaccacag

SEQ ID NO: 860189 - DNA, 25 bp, Homo sapien
caacaatgggcaccacaggtggcac

SEQ ID NO: 860190 - DNA, 25 bp, Homo sapien
ggtgcgtggcaatggcaacaatggg

SEQ ID NO: 860191 - DNA, 25 bp, Homo sapien
gcgtggcaatggcaacaatgggcac

SEQ ID NO: 860192 - DNA, 25 bp, Homo sapien
tgactcgggagaagtcggtcactag

SEQ ID NO: 860193 - DNA, 25 bp, Homo sapien
gaggcttctgcactgcatctccgag

SEQ ID NO: 860194 - DNA, 25 bp, Homo sapien
gaaacacagatgacggtttcttgct

SEQ ID NO: 860195 - DNA, 25 bp, Homo sapien
tgctttcccgcaagaaacacagatg

SEQ ID NO: 860196 - DNA, 25 bp, Homo sapien
ggctgagatccgctctgcaaagggc

SEQ ID NO: 860197 - DNA, 25 bp, Homo sapien
ctccatggtgggctgagatccgctc

SEQ ID NO: 860198 - DNA, 25 bp, Homo sapien
ttccaccgagttcacagggcctcca

SEQ ID NO: 860199 - DNA, 25 bp, Homo sapien
gattcttctctgagcggtactctct

SEQ ID NO: 860200 - DNA, 25 bp, Homo sapien
aatactgcagcagagcttactgtga

SEQ ID NO: 860201 - DNA, 25 bp, Homo sapien
tactatactcaagtgagggcctgtc

SEQ ID NO: 860202 - DNA, 25 bp, Homo sapien
ctgtgagaactacaataatggacct

SEQ ID NO: 860203 - DNA, 25 bp, Homo sapien
caggcccagtggtgtacacctctag

SEQ ID NO: 860204 - DNA, 25 bp, Homo sapien
gttctctccgttcttccggcaacag

SEQ ID NO: 860205 - DNA, 25 bp, Homo sapien
ctctccgttcttccggcaacagcac

SEQ ID NO: 860206 - DNA, 25 bp, Homo sapien
tccgttcttccggcaacagcaccag

SEQ ID NO: 860207 - DNA, 25 bp, Homo sapien
ggttctctccgttcttccggcaaca

SEQ ID NO: 860208 - DNA, 25 bp, Homo sapien
ctttcttaagcctttaggatctaga

SEQ ID NO: 860209 - DNA, 25 bp, Homo sapien
tttcttaagcctttaggatctagag

SEQ ID NO: 860210 - DNA, 25 bp, Homo sapien
tagataatctactccaaaacagtgc

SEQ ID NO: 860211 - DNA, 25 bp, Homo sapien
cagttacatcttccaagcctagtgt

SEQ ID NO: 860212 - DNA, 25 bp, Homo sapien
ggtacccttggatagagacatctcc

SEQ ID NO: 860213 - DNA, 25 bp, Homo sapien
caggcggacatttggaacacactaa

SEQ ID NO: 860214 - DNA, 25 bp, Homo sapien
tgaacttagctatggctttccgttg

SEQ ID NO: 860215 - DNA, 25 bp, Homo sapien
tctgctgaaatgctaatgcgtgggc

SEQ ID NO: 860216 - DNA, 25 bp, Homo sapien
cgtgggctggctccttgaacttagc

SEQ ID NO: 860217 - DNA, 25 bp, Homo sapien
ccgttgctgaggaagcatctgtaaa

SEQ ID NO: 860218 - DNA, 25 bp, Homo sapien
aaagaaacgatcgacactaaccctg

SEQ ID NO: 860219 - DNA, 25 bp, Homo sapien
cggcaatcaacctaccaaggtggga

SEQ ID NO: 860220 - DNA, 25 bp, Homo sapien
gacactaaccctgcacatcggcaat

SEQ ID NO: 860221 - DNA, 25 bp, Homo sapien
tgcacatcggcaatcaacctaccaa

SEQ ID NO: 860222 - DNA, 25 bp, Homo sapien
tcactccacgatcagggccacattt

SEQ ID NO: 860223 - DNA, 25 bp, Homo sapien
tatgtgggacaaatctatcatatgc

SEQ ID NO: 860224 - DNA, 25 bp, Homo sapien
cacgatcagggccacatttatgtgg

SEQ ID NO: 860225 - DNA, 25 bp, Homo sapien
gccacatttatgtgggacaaatcta

SEQ ID NO: 860226 - DNA, 25 bp, Homo sapien
taaggtcaggctctcttgttaggac

SEQ ID NO: 860227 - DNA, 25 bp, Homo sapien
tgtgtacagcctaaggtcaggctct

SEQ ID NO: 860228 - DNA, 25 bp, Homo sapien
cttgaagaaattccacagtgtgtgt

SEQ ID NO: 860229 - DNA, 25 bp, Homo sapien
gaaattccacagtgtgtgtacagcc

SEQ ID NO: 860230 - DNA, 25 bp, Homo sapien
agaacagttacgcaggacagcggcc

SEQ ID NO: 860231 - DNA, 25 bp, Homo sapien
tcagttcggctcctctggaatcagg

SEQ ID NO: 860232 - DNA, 25 bp, Homo sapien
tgaagcaatctaacaccaactccag

SEQ ID NO: 860233 - DNA, 25 bp, Homo sapien
tagagtcagaccacaaagaacaatg

SEQ ID NO: 860234 - DNA, 25 bp, Homo sapien
tcttggaatgggacaggagctacca

SEQ ID NO: 860235 - DNA, 25 bp, Homo sapien
gatttaacaaacgtggccagaccag

SEQ ID NO: 860236 - DNA, 25 bp, Homo sapien
caaaacagaccttccagtggccatg

SEQ ID NO: 860237 - DNA, 25 bp, Homo sapien
tagttccagtacacaaaccacgggc

SEQ ID NO: 860238 - DNA, 25 bp, Homo sapien
ccgcggggcccggtccctgtgctgg

SEQ ID NO: 860239 - DNA, 25 bp, Homo sapien
cgtcactcaaagcccgcggggcccg

SEQ ID NO: 860240 - DNA, 25 bp, Homo sapien
cgcgtcactcaaagcccgcggggcc

SEQ ID NO: 860241 - DNA, 25 bp, Homo sapien
gcgtcactcaaagcccgcggggccc

SEQ ID NO: 860242 - DNA, 25 bp, Homo sapien
tacgtgacagacacagagttcaggg

SEQ ID NO: 860243 - DNA, 25 bp, Homo sapien
cattctacgtgacagacacagagtt

SEQ ID NO: 860244 - DNA, 25 bp, Homo sapien
tctttccaggtctttacattctacg

SEQ ID NO: 860245 - DNA, 25 bp, Homo sapien
tctttacattctacgtgacagacac

SEQ ID NO: 860246 - DNA, 25 bp, Homo sapien
tacctacccacgtccgggctctctc

SEQ ID NO: 860247 - DNA, 25 bp, Homo sapien
agcacagggtggacgtttggggagt

SEQ ID NO: 860248 - DNA, 25 bp, Homo sapien
ctgcatgtaaaaggcactggcagca

SEQ ID NO: 860249 - DNA, 25 bp, Homo sapien
gtaaaaggcactggcagcacagggt

SEQ ID NO: 860250 - DNA, 25 bp, Homo sapien
tgcagttccaactcggcttccgagg

SEQ ID NO: 860251 - DNA, 25 bp, Homo sapien
ggatgcaggccggtgctctcctcct

SEQ ID NO: 860252 - DNA, 25 bp, Homo sapien
tcaagccagggctccggtggtcttt

SEQ ID NO: 860253 - DNA, 25 bp, Homo sapien
cagtttggatctgcaccgaacacca

SEQ ID NO: 860254 - DNA, 25 bp, Homo sapien
cttccaaagattccggctggggcac

SEQ ID NO: 860255 - DNA, 25 bp, Homo sapien
tccggctggggcactatcctgggcc

SEQ ID NO: 860256 - DNA, 25 bp, Homo sapien
caaagattccggctggggcactatc

SEQ ID NO: 860257 - DNA, 25 bp, Homo sapien
aagattccggctggggcactatcct

SEQ ID NO: 860258 - DNA, 25 bp, Homo sapien
ccttcgatgctgatcaggtgtgagc

SEQ ID NO: 860259 - DNA, 25 bp, Homo sapien
tcgatgctgatcaggtgtgagctaa

SEQ ID NO: 860260 - DNA, 25 bp, Homo sapien
tgatcaggtgtgagctaaactgcca

SEQ ID NO: 860261 - DNA, 25 bp, Homo sapien
gctgatcaggtgtgagctaaactgc

SEQ ID NO: 860262 - DNA, 25 bp, Homo sapien
tgcttagagacactaggtacagggc

SEQ ID NO: 860263 - DNA, 25 bp, Homo sapien
cattcagggttgacggagccaagag

SEQ ID NO: 860264 - DNA, 25 bp, Homo sapien
tacagggcatcaagagggtgcagcc

SEQ ID NO: 860265 - DNA, 25 bp, Homo sapien
cgaggcgccgacttctcattcaggg

SEQ ID NO: 860266 - DNA, 25 bp, Homo sapien
ctgggccttggaagagttgcgctgc

SEQ ID NO: 860267 - DNA, 25 bp, Homo sapien
ttgggccgaatcgtctgagcaggct

SEQ ID NO: 860268 - DNA, 25 bp, Homo sapien
gtgctttgggccgaatcgtctgagc

SEQ ID NO: 860269 - DNA, 25 bp, Homo sapien
cttggaagagttgcgctgcatgagc

SEQ ID NO: 860270 - DNA, 25 bp, Homo sapien
tgtctgtgtcacatggcggtcgggc

SEQ ID NO: 860271 - DNA, 25 bp, Homo sapien
ggtccccttaaatctgagtggcaag

SEQ ID NO: 860272 - DNA, 25 bp, Homo sapien
caagcccacagtggcgagggccagt

SEQ ID NO: 860273 - DNA, 25 bp, Homo sapien
tgaggtcctcaggctacactggttg

SEQ ID NO: 860274 - DNA, 25 bp, Homo sapien
tgtgttccgttatcagcggccggca

SEQ ID NO: 860275 - DNA, 25 bp, Homo sapien
caagcagtttatccccaatgtggcc

SEQ ID NO: 860276 - DNA, 25 bp, Homo sapien
tcagggttaacatcagaagacaagc

SEQ ID NO: 860277 - DNA, 25 bp, Homo sapien
agttccatgggcgagatgctgctgc

SEQ ID NO: 860278 - DNA, 25 bp, Homo sapien
caagaactggtcttcgatgaaacca

SEQ ID NO: 860279 - DNA, 25 bp, Homo sapien
aatgccatgtaacccagaagccagc

SEQ ID NO: 860280 - DNA, 25 bp, Homo sapien
ggaggaatagggcttagtccacaaa

SEQ ID NO: 860281 - DNA, 25 bp, Homo sapien
tcttcgatgaaaccaggccaagcag

SEQ ID NO: 860282 - DNA, 25 bp, Homo sapien
gtgagctcacccaatcccgataaga

SEQ ID NO: 860283 - DNA, 25 bp, Homo sapien
cgtatggtgaccctggcccatgagg

SEQ ID NO: 860284 - DNA, 25 bp, Homo sapien
tttgggaaggttggtgcccacgcat

SEQ ID NO: 860285 - DNA, 25 bp, Homo sapien
tggacgaggagactgtgaaagcccc

SEQ ID NO: 860286 - DNA, 25 bp, Homo sapien
aacaatagccacgtacgtccacgat

SEQ ID NO: 860287 - DNA, 25 bp, Homo sapien
tcaacaatagccacgtacgtccacg

SEQ ID NO: 860288 - DNA, 25 bp, Homo sapien
acatgatcaacaatagccacgtacg

SEQ ID NO: 860289 - DNA, 25 bp, Homo sapien
tgatcaacaatagccacgtacgtcc

SEQ ID NO: 860290 - DNA, 25 bp, Homo sapien
ctcttggtgagaggcgaggaatgat

SEQ ID NO: 860291 - DNA, 25 bp, Homo sapien
cagggtgagaacacatctgaacagt

SEQ ID NO: 860292 - DNA, 25 bp, Homo sapien
gctcagccggttccagtcttctggg

SEQ ID NO: 860293 - DNA, 25 bp, Homo sapien
ggaatgatgctcagccggttccagt

SEQ ID NO: 860294 - DNA, 25 bp, Homo sapien
ctcctggcatgagctccacccctgc

SEQ ID NO: 860295 - DNA, 25 bp, Homo sapien
catgagctccacccctgccctgcac

SEQ ID NO: 860296 - DNA, 25 bp, Homo sapien
tggcatgagctccacccctgccctg

SEQ ID NO: 860297 - DNA, 25 bp, Homo sapien
tcctggcatgagctccacccctgcc

SEQ ID NO: 860298 - DNA, 25 bp, Homo sapien
aagcccaaacccgtccacagccacg

SEQ ID NO: 860299 - DNA, 25 bp, Homo sapien
ctaagcccaaacccgtccacagcca

SEQ ID NO: 860300 - DNA, 25 bp, Homo sapien
agcccaaacccgtccacagccacgt

SEQ ID NO: 860301 - DNA, 25 bp, Homo sapien
gcccaaacccgtccacagccacgtc

SEQ ID NO: 860302 - DNA, 25 bp, Homo sapien
caatgtcaaagatgtcagcccattc

SEQ ID NO: 860303 - DNA, 25 bp, Homo sapien
catccatcagatgtctgtggtgagc

SEQ ID NO: 860304 - DNA, 25 bp, Homo sapien
tcatccatcagatgtctgtggtgag

SEQ ID NO: 860305 - DNA, 25 bp, Homo sapien
tacggtcaagccacaggcacattac

SEQ ID NO: 860306 - DNA, 25 bp, Homo sapien
cacttgaagtatgcgggtctgttgg

SEQ ID NO: 860307 - DNA, 25 bp, Homo sapien
tgggaagcgacacagtctacttaga

SEQ ID NO: 860308 - DNA, 25 bp, Homo sapien
tctacttagagaccggatattatcc

SEQ ID NO: 860309 - DNA, 25 bp, Homo sapien
cacaattgggaccaccttcctgggt

SEQ ID NO: 860310 - DNA, 25 bp, Homo sapien
ctatgacacaattgggaccaccttc

SEQ ID NO: 860311 - DNA, 25 bp, Homo sapien
acctctgagaagttgcggttaagtg

SEQ ID NO: 860312 - DNA, 25 bp, Homo sapien
gggacctctgagaagttgcggttaa

SEQ ID NO: 860313 - DNA, 25 bp, Homo sapien
gctgggggctgttgagtcccccaga

SEQ ID NO: 860314 - DNA, 25 bp, Homo sapien
ttattctctgacgaacctccccgcg

SEQ ID NO: 860315 - DNA, 25 bp, Homo sapien
tattctctgacgaacctccccgcgc

SEQ ID NO: 860316 - DNA, 25 bp, Homo sapien
ccttattctctgacgaacctccccg

SEQ ID NO: 860317 - DNA, 25 bp, Homo sapien
agccttattctctgacgaacctccc

SEQ ID NO: 860318 - DNA, 25 bp, Homo sapien
gtgttcataccttaagcatctgagc

SEQ ID NO: 860319 - DNA, 25 bp, Homo sapien
aaagatttctctgcaacacatgatg

SEQ ID NO: 860320 - DNA, 25 bp, Homo sapien
tatgttttaactgtattgtagtcca

SEQ ID NO: 860321 - DNA, 25 bp, Homo sapien
taagtggtcaacagcattgtgtcta

SEQ ID NO: 860322 - DNA, 25 bp, Homo sapien
tccttgtggtcactgacgacacagg

SEQ ID NO: 860323 - DNA, 25 bp, Homo sapien
tgacgacacaggtggaggtacctcg

SEQ ID NO: 860324 - DNA, 25 bp, Homo sapien
tgtggtcactgacgacacaggtgga

SEQ ID NO: 860325 - DNA, 25 bp, Homo sapien
gtcactgacgacacaggtggaggta

SEQ ID NO: 860326 - DNA, 25 bp, Homo sapien
tccttgtggtcactgacgacacagg

SEQ ID NO: 860327 - DNA, 25 bp, Homo sapien
tggaggccctgttcggagccatcac

SEQ ID NO: 860328 - DNA, 25 bp, Homo sapien
tcactgacgacacaggtggaggtac

SEQ ID NO: 860329 - DNA, 25 bp, Homo sapien
cggtaacccgtgagtggaggccctg

SEQ ID NO: 860330 - DNA, 25 bp, Homo sapien
ggaagcagcaattttgcaggggtgg

SEQ ID NO: 860331 - DNA, 25 bp, Homo sapien
agcagcaattttgcaggggtggcct

SEQ ID NO: 860332 - DNA, 25 bp, Homo sapien
tgggaggaagcagcaattttgcagg

SEQ ID NO: 860333 - DNA, 25 bp, Homo sapien
cttgggaggaagcagcaattttgca

SEQ ID NO: 860334 - DNA, 25 bp, Homo sapien
tctgaatttgatccaagctcaaacc

SEQ ID NO: 860335 - DNA, 25 bp, Homo sapien
gaaagggggcctcttgatgccaccc

SEQ ID NO: 860336 - DNA, 25 bp, Homo sapien
caggtcacacgagagtttaatcaat

SEQ ID NO: 860337 - DNA, 25 bp, Homo sapien
cctctccctagagtcatggacaggt

SEQ ID NO: 860338 - DNA, 25 bp, Homo sapien
tctccactcatggactgtcatgaag

SEQ ID NO: 860339 - DNA, 25 bp, Homo sapien
aatcctgtactgctagtctgtgtcc

SEQ ID NO: 860340 - DNA, 25 bp, Homo sapien
tcagttccccaaatagtaactcaca

SEQ ID NO: 860341 - DNA, 25 bp, Homo sapien
taacttggctacagggctcacagcc

SEQ ID NO: 860342 - DNA, 25 bp, Homo sapien
actggatgggaatccgcatgcccat

SEQ ID NO: 860343 - DNA, 25 bp, Homo sapien
ggactggatgggaatccgcatgccc

SEQ ID NO: 860344 - DNA, 25 bp, Homo sapien
gactggatgggaatccgcatgccca

SEQ ID NO: 860345 - DNA, 25 bp, Homo sapien
ctccgtatgacccagcagtatgccg

SEQ ID NO: 860346 - DNA, 25 bp, Homo sapien
ccatgagtgaccagctccgtatgac

SEQ ID NO: 860347 - DNA, 25 bp, Homo sapien
ctccgtgtaatccagcagtgtgctg

SEQ ID NO: 860348 - DNA, 25 bp, Homo sapien
ccgtgagtgaccagctccgtgtaat

SEQ ID NO: 860349 - DNA, 25 bp, Homo sapien
tccatcacatccgtgtggtctgtga

SEQ ID NO: 860350 - DNA, 25 bp, Homo sapien
tcatccatcacatccgtgtggtctg

SEQ ID NO: 860351 - DNA, 25 bp, Homo sapien
catccgtgtggtctgtgatcttcat

SEQ ID NO: 860352 - DNA, 25 bp, Homo sapien
cacatccgtgtggtctgtgatcttc

SEQ ID NO: 860353 - DNA, 25 bp, Homo sapien
ccttcatatgttctggggccgcagt

SEQ ID NO: 860354 - DNA, 25 bp, Homo sapien
cccttcatatgttctggggccgcag

SEQ ID NO: 860355 - DNA, 25 bp, Homo sapien
tctgatgctctttggctgccagagc

SEQ ID NO: 860356 - DNA, 25 bp, Homo sapien
gcacagagcatcaggtgattttcca

SEQ ID NO: 860357 - DNA, 25 bp, Homo sapien
gcatcaggtgattttccagctccat

SEQ ID NO: 860358 - DNA, 25 bp, Homo sapien
cttgatcctctgatgctctttggct

SEQ ID NO: 860359 - DNA, 25 bp, Homo sapien
tggcattttccaggataggccgtag

SEQ ID NO: 860360 - DNA, 25 bp, Homo sapien
cattttccaggataggccgtagccc

SEQ ID NO: 860361 - DNA, 25 bp, Homo sapien
gcattttccaggataggccgtagcc

SEQ ID NO: 860362 - DNA, 25 bp, Homo sapien
cctggcattttccaggataggccgt

SEQ ID NO: 860363 - DNA, 25 bp, Homo sapien
gatttcagcagacatatccacatgc

SEQ ID NO: 860364 - DNA, 25 bp, Homo sapien
ccttcctctcaaacgtgttctcatt

SEQ ID NO: 860365 - DNA, 25 bp, Homo sapien
gaactccaggatttcagcagacata

SEQ ID NO: 860366 - DNA, 25 bp, Homo sapien
cgtgttctcattagagaactccagg

SEQ ID NO: 860367 - DNA, 25 bp, Homo sapien
aagcaggttccggaggatgccctct

SEQ ID NO: 860368 - DNA, 25 bp, Homo sapien
caaccgtcgtccacagtaagtagta

SEQ ID NO: 860369 - DNA, 25 bp, Homo sapien
cgtggttcaacccataagcagtgga

SEQ ID NO: 860370 - DNA, 25 bp, Homo sapien
tactcatggtccacgtgtctgcaag

SEQ ID NO: 860371 - DNA, 25 bp, Homo sapien
gattagctgtgtataactggcgacc

SEQ ID NO: 860372 - DNA, 25 bp, Homo sapien
tcaaagcagctcacgtagattccag

SEQ ID NO: 860373 - DNA, 25 bp, Homo sapien
caagagtaatcagcgagatgggccg

SEQ ID NO: 860374 - DNA, 25 bp, Homo sapien
gttgagtggctacgaaacatgacgc

SEQ ID NO: 860375 - DNA, 25 bp, Homo sapien
ttttgaggaatgaccatactggttt

SEQ ID NO: 860376 - DNA, 25 bp, Homo sapien
catcctaatggatgtcaggcgatat

SEQ ID NO: 860377 - DNA, 25 bp, Homo sapien
tgggtatgtaaccagaagtggcact

SEQ ID NO: 860378 - DNA, 25 bp, Homo sapien
tactggtttacatagtggccacacc

SEQ ID NO: 860379 - DNA, 25 bp, Homo sapien
gaagtatcacttcacctcagtcaga

SEQ ID NO: 860380 - DNA, 25 bp, Homo sapien
gaaacccttgttcaccattggcagg

SEQ ID NO: 860381 - DNA, 25 bp, Homo sapien
tatatttaaatctgcactcccatgc

SEQ ID NO: 860382 - DNA, 25 bp, Homo sapien
tggtagagaacactatggaggttcc

SEQ ID NO: 860383 - DNA, 25 bp, Homo sapien
tgtagaatcaaccttgcaccctggg

SEQ ID NO: 860384 - DNA, 25 bp, Homo sapien
aaaatcatgtgatcatttcaatact

SEQ ID NO: 860385 - DNA, 25 bp, Homo sapien
caagaacattaatagaactgagaac

SEQ ID NO: 860386 - DNA, 25 bp, Homo sapien
cagaacattaacagaatcaagaaca

SEQ ID NO: 860387 - DNA, 25 bp, Homo sapien
cccaggatcaacttctgctatgatg

SEQ ID NO: 860388 - DNA, 25 bp, Homo sapien
gatcaacttctgctatgatgccagt

SEQ ID NO: 860389 - DNA, 25 bp, Homo sapien
caggatcaacttctgctatgatgcc

SEQ ID NO: 860390 - DNA, 25 bp, Homo sapien
aacttctgctatgatgccagtcctc

SEQ ID NO: 860391 - DNA, 25 bp, Homo sapien
aggctaagacgtccatcctcaccag

SEQ ID NO: 860392 - DNA, 25 bp, Homo sapien
tccactcagcgtggaggctaagacg

SEQ ID NO: 860393 - DNA, 25 bp, Homo sapien
gtcttgccctcggagagatgccact

SEQ ID NO: 860394 - DNA, 25 bp, Homo sapien
acttcctggagggaacgtgctgaac

SEQ ID NO: 860395 - DNA, 25 bp, Homo sapien
gcgttcttgcccagacgtgtccaca

SEQ ID NO: 860396 - DNA, 25 bp, Homo sapien
cctgatgcgtccacatgggcgttct

SEQ ID NO: 860397 - DNA, 25 bp, Homo sapien
tgcccagacgtgtccacacgggcat

SEQ ID NO: 860398 - DNA, 25 bp, Homo sapien
gatgcgtccacatgggcgttcttgc

SEQ ID NO: 860399 - DNA, 25 bp, Homo sapien
ccacggtccacagtcccatcctcag

SEQ ID NO: 860400 - DNA, 25 bp, Homo sapien
tgcctctgggcacagaccgctgtgg

SEQ ID NO: 860401 - DNA, 25 bp, Homo sapien
acggtccacagtcccatcctcagca

SEQ ID NO: 860402 - DNA, 25 bp, Homo sapien
tgtgtcataaaaacgagcctggaga

SEQ ID NO: 860403 - DNA, 25 bp, Homo sapien
tataagtcagtttaggaacaaataa

SEQ ID NO: 860404 - DNA, 25 bp, Homo sapien
ttataagtcagtttaggaacaaata

SEQ ID NO: 860405 - DNA, 25 bp, Homo sapien
aagtcagtttaggaacaaataacag

SEQ ID NO: 860406 - DNA, 25 bp, Homo sapien
gccgtgccggtgcccgtgctgccct

SEQ ID NO: 860407 - DNA, 25 bp, Homo sapien
gtggccgtgccggtgcccgtgctgc

SEQ ID NO: 860408 - DNA, 25 bp, Homo sapien
cgtgccggtgcccgtgctgccctca

SEQ ID NO: 860409 - DNA, 25 bp, Homo sapien
tgtggccgtgccggtgcccgtgctg

SEQ ID NO: 860410 - DNA, 25 bp, Homo sapien
cttgagtggttaacttccctttgct

SEQ ID NO: 860411 - DNA, 25 bp, Homo sapien
aacacttaggtatggtgccgcatgg

SEQ ID NO: 860412 - DNA, 25 bp, Homo sapien
gagaaaacagcgtgagaaccttgag

SEQ ID NO: 860413 - DNA, 25 bp, Homo sapien
aataggtgaacccacagcatgtaca

SEQ ID NO: 860414 - DNA, 25 bp, Homo sapien
cacggtctgactccaactccatcta

SEQ ID NO: 860415 - DNA, 25 bp, Homo sapien
gcccaagtcgtgtcagagcccatgg

SEQ ID NO: 860416 - DNA, 25 bp, Homo sapien
tcttccactgcccaagtcgtgtcag

SEQ ID NO: 860417 - DNA, 25 bp, Homo sapien
tcttcctcacctccacggtctgact

SEQ ID NO: 860418 - DNA, 25 bp, Homo sapien
cacatacagtccctcaaacagaaag

SEQ ID NO: 860419 - DNA, 25 bp, Homo sapien
cttcacccacatacagtccctcaaa

SEQ ID NO: 860420 - DNA, 25 bp, Homo sapien
caaacagaaagggaactgtttccat

SEQ ID NO: 860421 - DNA, 25 bp, Homo sapien
atacagtccctcaaacagaaaggga

SEQ ID NO: 860422 - DNA, 25 bp, Homo sapien
tctcatcagtctcggggccgcaatg

SEQ ID NO: 860423 - DNA, 25 bp, Homo sapien
ttctgtcctttgataatttggtgtc

SEQ ID NO: 860424 - DNA, 25 bp, Homo sapien
tgtctcaggggcttctcatcagtct

SEQ ID NO: 860425 - DNA, 25 bp, Homo sapien
accaggtggtttctgtcctttgata

SEQ ID NO: 860426 - DNA, 25 bp, Homo sapien
tgcaataagggtcacaagcaccggc

SEQ ID NO: 860427 - DNA, 25 bp, Homo sapien
caccggcaggccataggaattccag

SEQ ID NO: 860428 - DNA, 25 bp, Homo sapien
catctcagggtttcctcgtctgact

SEQ ID NO: 860429 - DNA, 25 bp, Homo sapien
tcagggtttcctcgtctgactcggg

SEQ ID NO: 860430 - DNA, 25 bp, Homo sapien
cttcctgcagagtagcatcaccagc

SEQ ID NO: 860431 - DNA, 25 bp, Homo sapien
cctaccagtggccaatgccaccctc

SEQ ID NO: 860432 - DNA, 25 bp, Homo sapien
tccttcctgcagagtagcatcacca

SEQ ID NO: 860433 - DNA, 25 bp, Homo sapien
atcaccagccctaccagtggccaat

SEQ ID NO: 860434 - DNA, 25 bp, Homo sapien
acttgctataatgtgggtttccaca

SEQ ID NO: 860435 - DNA, 25 bp, Homo sapien
tgtgagctcacaaaccccacggctg

SEQ ID NO: 860436 - DNA, 25 bp, Homo sapien
cggctgctccagcttcattcacacc

SEQ ID NO: 860437 - DNA, 25 bp, Homo sapien
ggtctgcgggcataagtgcatgtca

SEQ ID NO: 860438 - DNA, 25 bp, Homo sapien
caccagacatcccaaagccggggct

SEQ ID NO: 860439 - DNA, 25 bp, Homo sapien
tgggcagggtttggccacgattctc

SEQ ID NO: 860440 - DNA, 25 bp, Homo sapien
tgaaaggcgatacaaccacatggcc

SEQ ID NO: 860441 - DNA, 25 bp, Homo sapien
gcttggagcaaatctggcttgcaca

SEQ ID NO: 860442 - DNA, 25 bp, Homo sapien
ttggccacgattctcagctgctcgg

SEQ ID NO: 860443 - DNA, 25 bp, Homo sapien
gatcttccaggtgagctgcttggat

SEQ ID NO: 860444 - DNA, 25 bp, Homo sapien
tgagctgcttggatgacttgattcc

SEQ ID NO: 860445 - DNA, 25 bp, Homo sapien
gctgcttggatgacttgattccaaa

SEQ ID NO: 860446 - DNA, 25 bp, Homo sapien
caggtgagctgcttggatgacttga

SEQ ID NO: 860447 - DNA, 25 bp, Homo sapien
aggaccaaccagagacccagcacgg

SEQ ID NO: 860448 - DNA, 25 bp, Homo sapien
agacccagcacggccccagctgcct

SEQ ID NO: 860449 - DNA, 25 bp, Homo sapien
ctaggaccaaccagagacccagcac

SEQ ID NO: 860450 - DNA, 25 bp, Homo sapien
acccagcacggccccagctgcctcc

SEQ ID NO: 860451 - DNA, 25 bp, Homo sapien
tgatggctacgatgggtgccttgag

SEQ ID NO: 860452 - DNA, 25 bp, Homo sapien
ctgatggctacgatgggtgccttga

SEQ ID NO: 860453 - DNA, 25 bp, Homo sapien
tgcatctgccgaaggttacttaggg

SEQ ID NO: 860454 - DNA, 25 bp, Homo sapien
actggcttgcaagtctaggggttac

SEQ ID NO: 860455 - DNA, 25 bp, Homo sapien
tctggtgcatctgccgaaggttact

SEQ ID NO: 860456 - DNA, 25 bp, Homo sapien
gctggactggcttgcaagtctaggg

SEQ ID NO: 860457 - DNA, 25 bp, Homo sapien
atgccctcctccgaggtcagctcct

SEQ ID NO: 860458 - DNA, 25 bp, Homo sapien
gctgttcctctaggttcaactcctc

SEQ ID NO: 860459 - DNA, 25 bp, Homo sapien
aaagacttgattagtgcctgcttcc

SEQ ID NO: 860460 - DNA, 25 bp, Homo sapien
tcaactcctccctagctccgtgtag

SEQ ID NO: 860461 - DNA, 25 bp, Homo sapien
ggtgatgcaagcaggtcctggaaga

SEQ ID NO: 860462 - DNA, 25 bp, Homo sapien
ctagtgaggaggtgatgcaagcagg

SEQ ID NO: 860463 - DNA, 25 bp, Homo sapien
tgtcctccgtcccacgtgagcagag

SEQ ID NO: 860464 - DNA, 25 bp, Homo sapien
ccaggagcagaggaggctagtgagg

SEQ ID NO: 860465 - DNA, 25 bp, Homo sapien
cggggcctcttccagaggtctctgc

SEQ ID NO: 860466 - DNA, 25 bp, Homo sapien
aaagcatgtgctccacgtaccggcc

SEQ ID NO: 860467 - DNA, 25 bp, Homo sapien
gcagcagaaagcatgtgctccacgt

SEQ ID NO: 860468 - DNA, 25 bp, Homo sapien
cgtcccaccagaccagcgccgatcc

SEQ ID NO: 860469 - DNA, 25 bp, Homo sapien
cagcccagagacatggacttcggca

SEQ ID NO: 860470 - DNA, 25 bp, Homo sapien
acacttgctggccttgagactgcag

SEQ ID NO: 860471 - DNA, 25 bp, Homo sapien
gaggccaggttccaattgctgcttg

SEQ ID NO: 860472 - DNA, 25 bp, Homo sapien
cttcggcagtgccttgagccaggga

SEQ ID NO: 860473 - DNA, 25 bp, Homo sapien
cccaggttcactgcggatgggcttg

SEQ ID NO: 860474 - DNA, 25 bp, Homo sapien
catgcagatcttgtcggcagcacaa

SEQ ID NO: 860475 - DNA, 25 bp, Homo sapien
gcacccatgcagatcttgtcggcag

SEQ ID NO: 860476 - DNA, 25 bp, Homo sapien
ctccagcggcatttgcggagcccag

SEQ ID NO: 860477 - DNA, 25 bp, Homo sapien
tggttctcgggtacatgccagggcc

SEQ ID NO: 860478 - DNA, 25 bp, Homo sapien
aatgtgacccctgcaaaccttcaga

SEQ ID NO: 860479 - DNA, 25 bp, Homo sapien
tcctgaacatcctcggtaagttggg

SEQ ID NO: 860480 - DNA, 25 bp, Homo sapien
ttttcaaggactagcaccgtgccag

SEQ ID NO: 860481 - DNA, 25 bp, Homo sapien
ctggctccacacaggtgaatgcagc

SEQ ID NO: 860482 - DNA, 25 bp, Homo sapien
agctgaggagcagctccacggctgc

SEQ ID NO: 860483 - DNA, 25 bp, Homo sapien
taggaagcagggagccctgttctgc

SEQ ID NO: 860484 - DNA, 25 bp, Homo sapien
aagtaggaagcagggagccctgttc

SEQ ID NO: 860485 - DNA, 25 bp, Homo sapien
tacgtccaggatgcaatgactaatg

SEQ ID NO: 860486 - DNA, 25 bp, Homo sapien
cttgcttctagtcttagggcaaact

SEQ ID NO: 860487 - DNA, 25 bp, Homo sapien
tctctctctgctacgtccaggatgc

SEQ ID NO: 860488 - DNA, 25 bp, Homo sapien
cttctagtcttagggcaaacttctc

SEQ ID NO: 860489 - DNA, 25 bp, Homo sapien
gagccaatcactatggccgggggca

SEQ ID NO: 860490 - DNA, 25 bp, Homo sapien
gcaggtgaatggagcctccgccgtc

SEQ ID NO: 860491 - DNA, 25 bp, Homo sapien
agaaggccccttgctgtagccctgt

SEQ ID NO: 860492 - DNA, 25 bp, Homo sapien
tccgccgtcgggatccgcagttctc

SEQ ID NO: 860493 - DNA, 25 bp, Homo sapien
agctctccccagaaagcagcaccac

SEQ ID NO: 860494 - DNA, 25 bp, Homo sapien
ctccccagaaagcagcaccaccacc

SEQ ID NO: 860495 - DNA, 25 bp, Homo sapien
tcagctctccccagaaagcagcacc

SEQ ID NO: 860496 - DNA, 25 bp, Homo sapien
ctctccccagaaagcagcaccacca

SEQ ID NO: 860497 - DNA, 25 bp, Homo sapien
ggccaagaggcggtgcttggagtca

SEQ ID NO: 860498 - DNA, 25 bp, Homo sapien
ctggccaagaggcggtgcttggagt

SEQ ID NO: 860499 - DNA, 25 bp, Homo sapien
gccaagaggcggtgcttggagtcat

SEQ ID NO: 860500 - DNA, 25 bp, Homo sapien
cgcaatctctcccacgtggcaacag

SEQ ID NO: 860501 - DNA, 25 bp, Homo sapien
gcagaagcttccctgtccgcaatct

SEQ ID NO: 860502 - DNA, 25 bp, Homo sapien
cagaggtcacggtctgagcagaagc

SEQ ID NO: 860503 - DNA, 25 bp, Homo sapien
agttctcatcatctggtagggccca

SEQ ID NO: 860504 - DNA, 25 bp, Homo sapien
aagcaacaatcttcatgtaacaacc

SEQ ID NO: 860505 - DNA, 25 bp, Homo sapien
tgtagtaagacatgatgaagcaaca

SEQ ID NO: 860506 - DNA, 25 bp, Homo sapien
gaagacatcttgtagtcaaacacat

SEQ ID NO: 860507 - DNA, 25 bp, Homo sapien
tcaaacacatatcgtgacagaaagt

SEQ ID NO: 860508 - DNA, 25 bp, Homo sapien
ctgagaagaaggtgccacgaggtat

SEQ ID NO: 860509 - DNA, 25 bp, Homo sapien
tcattttcccactgagaagaaggtg

SEQ ID NO: 860510 - DNA, 25 bp, Homo sapien
cactgagaagaaggtgccacgaggt

SEQ ID NO: 860511 - DNA, 25 bp, Homo sapien
cccactgagaagaaggtgccacgag

SEQ ID NO: 860512 - DNA, 25 bp, Homo sapien
ctgttgactcgactgcctgcagagg

SEQ ID NO: 860513 - DNA, 25 bp, Homo sapien
tcacctctgttgactcgactgcctg

SEQ ID NO: 860514 - DNA, 25 bp, Homo sapien
acctctgttgactcgactgcctgca

SEQ ID NO: 860515 - DNA, 25 bp, Homo sapien
aggcacaggggtgcttgcagcatcc

SEQ ID NO: 860516 - DNA, 25 bp, Homo sapien
tccgaagaaagagcgtgatatggta

SEQ ID NO: 860517 - DNA, 25 bp, Homo sapien
ggtatggcttcagtgtgaaagatct

SEQ ID NO: 860518 - DNA, 25 bp, Homo sapien
tctttctagcagctgtatgctgatg

SEQ ID NO: 860519 - DNA, 25 bp, Homo sapien
tatgctgatggagtggttcaagaag

SEQ ID NO: 860520 - DNA, 25 bp, Homo sapien
caacccggatcaagcagtaattggg

SEQ ID NO: 860521 - DNA, 25 bp, Homo sapien
tggctgcctggagcttgctgacaat

SEQ ID NO: 860522 - DNA, 25 bp, Homo sapien
agccaaaatgatgcgggcccggcgt

SEQ ID NO: 860523 - DNA, 25 bp, Homo sapien
gacaatctcatcgatccagagcaca

SEQ ID NO: 860524 - DNA, 25 bp, Homo sapien
tggactgtggctgctcgcgcatgaa

SEQ ID NO: 860525 - DNA, 25 bp, Homo sapien
ttcctcaaggacgtggctgcagcag

SEQ ID NO: 860526 - DNA, 25 bp, Homo sapien
tgacgggtttcctcaaggacgtggc

SEQ ID NO: 860527 - DNA, 25 bp, Homo sapien
ctgctgctcctgatttgacgggttt

SEQ ID NO: 860528 - DNA, 25 bp, Homo sapien
ctgccatgctggtcatggccaccat

SEQ ID NO: 860529 - DNA, 25 bp, Homo sapien
cggctcccccgaccattccttggca

SEQ ID NO: 860530 - DNA, 25 bp, Homo sapien
gctcccccgaccattccttggcatg

SEQ ID NO: 860531 - DNA, 25 bp, Homo sapien
gaggaaatgaaggtgccggctcccc

SEQ ID NO: 860532 - DNA, 25 bp, Homo sapien
tggctttcacacagcgcctctgagg

SEQ ID NO: 860533 - DNA, 25 bp, Homo sapien
gggacagatggtcccacgtggacag

SEQ ID NO: 860534 - DNA, 25 bp, Homo sapien
ggtcccatgtgcacagacggctttg

SEQ ID NO: 860535 - DNA, 25 bp, Homo sapien
cagacggctttgcttccttggcttt

SEQ ID NO: 860536 - DNA, 25 bp, Homo sapien
ccacgtggacagacggtcccatgtg

SEQ ID NO: 860537 - DNA, 25 bp, Homo sapien
gagtctagaaagaggcatgcagctg

SEQ ID NO: 860538 - DNA, 25 bp, Homo sapien
tggcatcacagggtagagtctagaa

SEQ ID NO: 860539 - DNA, 25 bp, Homo sapien
tctagaaagaggcatgcagctgagg

SEQ ID NO: 860540 - DNA, 25 bp, Homo sapien
catcacagggtagagtctagaaaga

SEQ ID NO: 860541 - DNA, 25 bp, Homo sapien
cgagaaggcggatcggaagtcacac

SEQ ID NO: 860542 - DNA, 25 bp, Homo sapien
tgtgtgctgctgactcgttcacgga

SEQ ID NO: 860543 - DNA, 25 bp, Homo sapien
tccaaagccacggacatgctgacgt

SEQ ID NO: 860544 - DNA, 25 bp, Homo sapien
tggtctctgtggacggatccgatct

SEQ ID NO: 860545 - DNA, 25 bp, Homo sapien
aagggcatccatggccgcttcctct

SEQ ID NO: 860546 - DNA, 25 bp, Homo sapien
gcaggcaatgcatgctgggtgcccc

SEQ ID NO: 860547 - DNA, 25 bp, Homo sapien
acagccacgtggagcgaccacgcag

SEQ ID NO: 860548 - DNA, 25 bp, Homo sapien
agggctaaggccacccaagaaggag

SEQ ID NO: 860549 - DNA, 25 bp, Homo sapien
atggctcctgaggccgtcagtttcc

SEQ ID NO: 860550 - DNA, 25 bp, Homo sapien
cctggtgctccgtgtgacacccgtt

SEQ ID NO: 860551 - DNA, 25 bp, Homo sapien
ccctgtgggagacatctggatggat

SEQ ID NO: 860552 - DNA, 25 bp, Homo sapien
atgtgacccggaggttggttgccat

SEQ ID NO: 860553 - DNA, 25 bp, Homo sapien
gacccctctccacgcaacggctgcg

SEQ ID NO: 860554 - DNA, 25 bp, Homo sapien
caggcggcagcgctgacgagcaacg

SEQ ID NO: 860555 - DNA, 25 bp, Homo sapien
agctgcgtgtgagctcggcggacag

SEQ ID NO: 860556 - DNA, 25 bp, Homo sapien
cagcgctgacgagcaacggctgcgt

SEQ ID NO: 860557 - DNA, 25 bp, Homo sapien
tgtgatatgcgggaagagaattctt

SEQ ID NO: 860558 - DNA, 25 bp, Homo sapien
ctgtgatatgcgggaagagaattct

SEQ ID NO: 860559 - DNA, 25 bp, Homo sapien
caggtcatcatcctgagccaagcat

SEQ ID NO: 860560 - DNA, 25 bp, Homo sapien
caggaattcgcaactggccttggaa

SEQ ID NO: 860561 - DNA, 25 bp, Homo sapien
cacggagtgcgtaatcttaaaggcc

SEQ ID NO: 860562 - DNA, 25 bp, Homo sapien
gagcccgttgtcctcctgttctaag

SEQ ID NO: 860563 - DNA, 25 bp, Homo sapien
gaaagtgactcgtgcctggacttga

SEQ ID NO: 860564 - DNA, 25 bp, Homo sapien
gagatgggtgtaacaattttgttcc

SEQ ID NO: 860565 - DNA, 25 bp, Homo sapien
ttgttcccgaagttgttaacagatg

SEQ ID NO: 860566 - DNA, 25 bp, Homo sapien
ttggagcccaatagatttgtaactt

SEQ ID NO: 860567 - DNA, 25 bp, Homo sapien
tcccgaagttgttaacagatgcaaa

SEQ ID NO: 860568 - DNA, 25 bp, Homo sapien
ctagccagggctagcattttccgtg

SEQ ID NO: 860569 - DNA, 25 bp, Homo sapien
ccagggctagcattttccgtgagaa

SEQ ID NO: 860570 - DNA, 25 bp, Homo sapien
ggctagcattttccgtgagaaaatg

SEQ ID NO: 860571 - DNA, 25 bp, Homo sapien
aaatgtttcctaaatgacaagccac

SEQ ID NO: 860572 - DNA, 25 bp, Homo sapien
ccctgttggctacatatcctgaatt

SEQ ID NO: 860573 - DNA, 25 bp, Homo sapien
tccctgttggctacatatcctgaat

SEQ ID NO: 860574 - DNA, 25 bp, Homo sapien
atcctgaatttagtgacaggacagt

SEQ ID NO: 860575 - DNA, 25 bp, Homo sapien
gacagtctccttgttcaaatttccc

SEQ ID NO: 860576 - DNA, 25 bp, Homo sapien
acctcgggacgacgcaatgaggaga

SEQ ID NO: 860577 - DNA, 25 bp, Homo sapien
gggtggtcacctcgggacgacgcaa

SEQ ID NO: 860578 - DNA, 25 bp, Homo sapien
aatgaggagaggagcacggaagcgc

SEQ ID NO: 860579 - DNA, 25 bp, Homo sapien
agcacggaagcgcagacggaggccg

SEQ ID NO: 860580 - DNA, 25 bp, Homo sapien
caaggcaaggtacccaagcagggct

SEQ ID NO: 860581 - DNA, 25 bp, Homo sapien
agggctgccggggcctgccgctcac

SEQ ID NO: 860582 - DNA, 25 bp, Homo sapien
tgcaaggcaaggtacccaagcaggg

SEQ ID NO: 860583 - DNA, 25 bp, Homo sapien
ggcaaggtacccaagcagggctgcc

SEQ ID NO: 860584 - DNA, 25 bp, Homo sapien
catattcacggagggtggtcagcct

SEQ ID NO: 860585 - DNA, 25 bp, Homo sapien
cctgaggtgtatgaaaaagatgccc

SEQ ID NO: 860586 - DNA, 25 bp, Homo sapien
taacagtcagattcgcagtgcagct

SEQ ID NO: 860587 - DNA, 25 bp, Homo sapien
cagtgacttgtgtgaatgccagaaa

SEQ ID NO: 860588 - DNA, 25 bp, Homo sapien
acaggcaacagcagactcagatgtt

SEQ ID NO: 860589 - DNA, 25 bp, Homo sapien
acctccatttaaccagcttcggcat

SEQ ID NO: 860590 - DNA, 25 bp, Homo sapien
gactcagatgtttctcgtccccaca

SEQ ID NO: 860591 - DNA, 25 bp, Homo sapien
atttaaccagcttcggcatggctgc

SEQ ID NO: 860592 - DNA, 25 bp, Homo sapien
gcgatgcctttgactgtgcccggtg

SEQ ID NO: 860593 - DNA, 25 bp, Homo sapien
gcctttgactgtgcccggtggtctc

SEQ ID NO: 860594 - DNA, 25 bp, Homo sapien
acagcgatgcctttgactgtgcccg

SEQ ID NO: 860595 - DNA, 25 bp, Homo sapien
aggacaccctgtggcatccggctct

SEQ ID NO: 860596 - DNA, 25 bp, Homo sapien
ggccaccatagcgtccaagcatcat

SEQ ID NO: 860597 - DNA, 25 bp, Homo sapien
tttgatctgtgtggccgtgcaggcc

SEQ ID NO: 860598 - DNA, 25 bp, Homo sapien
agacatctcagaaggacctgccgcg

SEQ ID NO: 860599 - DNA, 25 bp, Homo sapien
gacctgccgcgctgggctttggcca

SEQ ID NO: 860600 - DNA, 25 bp, Homo sapien
agaacactctggtctcgagctgcac

SEQ ID NO: 860601 - DNA, 25 bp, Homo sapien
taaaagttcttgcaggtcctacatg

SEQ ID NO: 860602 - DNA, 25 bp, Homo sapien
ctctggtctcgagctgcacccagtg

SEQ ID NO: 860603 - DNA, 25 bp, Homo sapien
tgccacctgcctccgtcgtccctga

SEQ ID NO: 860604 - DNA, 25 bp, Homo sapien
agcatggacggctgtaggaagccct

SEQ ID NO: 860605 - DNA, 25 bp, Homo sapien
agcagtgcgagtgtcttcagcagca

SEQ ID NO: 860606 - DNA, 25 bp, Homo sapien
cagcatggacggctgtaggaagccc

SEQ ID NO: 860607 - DNA, 25 bp, Homo sapien
acagcagtgcgagtgtcttcagcag

SEQ ID NO: 860608 - DNA, 25 bp, Homo sapien
agttcctgtctctatggctgtgcgg

SEQ ID NO: 860609 - DNA, 25 bp, Homo sapien
tcctgtctctatggctgtgcgggat

SEQ ID NO: 860610 - DNA, 25 bp, Homo sapien
gttcctgtctctatggctgtgcggg

SEQ ID NO: 860611 - DNA, 25 bp, Homo sapien
ccagttcctgtctctatggctgtgc

SEQ ID NO: 860612 - DNA, 25 bp, Homo sapien
cagtggcaagttgactgcactggat

SEQ ID NO: 860613 - DNA, 25 bp, Homo sapien
gcaagttgactgcactggattcctt

SEQ ID NO: 860614 - DNA, 25 bp, Homo sapien
actcagtggcaagttgactgcactg

SEQ ID NO: 860615 - DNA, 25 bp, Homo sapien
tggcaagttgactgcactggattcc

SEQ ID NO: 860616 - DNA, 25 bp, Homo sapien
acgttccccgcactggccgaggcca

SEQ ID NO: 860617 - DNA, 25 bp, Homo sapien
gtttgctgatgcaggccacgttccc

SEQ ID NO: 860618 - DNA, 25 bp, Homo sapien
cgtttgctgatgcaggccacgttcc

SEQ ID NO: 860619 - DNA, 25 bp, Homo sapien
aggccacaccgtgtcgtgatggtga

SEQ ID NO: 860620 - DNA, 25 bp, Homo sapien
cctttggagcatgaccagacctcac

SEQ ID NO: 860621 - DNA, 25 bp, Homo sapien
catcttcttctcttaacggctgcaa

SEQ ID NO: 860622 - DNA, 25 bp, Homo sapien
tatctctcctaaggcctatggtttc

SEQ ID NO: 860623 - DNA, 25 bp, Homo sapien
tctcttaacggctgcaaataaacat

SEQ ID NO: 860624 - DNA, 25 bp, Homo sapien
tcctaaggcctatggtttcctcgag

SEQ ID NO: 860625 - DNA, 25 bp, Homo sapien
aaaacgaggtctttgtgggctgcag

SEQ ID NO: 860626 - DNA, 25 bp, Homo sapien
gattaatacatgaggccacagagta

SEQ ID NO: 860627 - DNA, 25 bp, Homo sapien
ccacagagtacatgaggccattcag

SEQ ID NO: 860628 - DNA, 25 bp, Homo sapien
cagcacaagtcctgaagtgaaatca

SEQ ID NO: 860629 - DNA, 25 bp, Homo sapien
gaatgttgtcctgccggtcatcaca

SEQ ID NO: 860630 - DNA, 25 bp, Homo sapien
tcctgccggtcatcacagaaatcac

SEQ ID NO: 860631 - DNA, 25 bp, Homo sapien
gaaatcacagatgtctatggccatg

SEQ ID NO: 860632 - DNA, 25 bp, Homo sapien
cacagatgtctatggccatgacgat

SEQ ID NO: 860633 - DNA, 25 bp, Homo sapien
tgagagctcataattccagggccgg

SEQ ID NO: 860634 - DNA, 25 bp, Homo sapien
tctctgttgaacaccaagctgtctg

SEQ ID NO: 860635 - DNA, 25 bp, Homo sapien
tacatagccatgagacaaccatcgc

SEQ ID NO: 860636 - DNA, 25 bp, Homo sapien
gggcacaatcctggaagttttttca

SEQ ID NO: 860637 - DNA, 25 bp, Homo sapien
tgggaactgcaggatcatttagacc

SEQ ID NO: 860638 - DNA, 25 bp, Homo sapien
tctaggtaagaagtgaccatggtca

SEQ ID NO: 860639 - DNA, 25 bp, Homo sapien
cgctcaatagggtaggaagggtcta

SEQ ID NO: 860640 - DNA, 25 bp, Homo sapien
gtgaccatggtcaagaatttagctc

SEQ ID NO: 860641 - DNA, 25 bp, Homo sapien
gacataaatatcatccattagggcc

SEQ ID NO: 860642 - DNA, 25 bp, Homo sapien
gggttctgtctcagcgccatctgct

SEQ ID NO: 860643 - DNA, 25 bp, Homo sapien
ttctcgctgccgctcctaatgtgga

SEQ ID NO: 860644 - DNA, 25 bp, Homo sapien
tcagatggaagcttgtcaccgtggc

SEQ ID NO: 860645 - DNA, 25 bp, Homo sapien
aaggtctctaccgattccttgtaga

SEQ ID NO: 860646 - DNA, 25 bp, Homo sapien
ggtcctcgatcaaggtctctaccga

SEQ ID NO: 860647 - DNA, 25 bp, Homo sapien
cagcagctggaacgaggtcctcgat

SEQ ID NO: 860648 - DNA, 25 bp, Homo sapien
cttgtagactcaacttccggccctg

SEQ ID NO: 860649 - DNA, 25 bp, Homo sapien
tgatgtctcacctctcggaagggcc

SEQ ID NO: 860650 - DNA, 25 bp, Homo sapien
gagtcctgagctcctgtacgatgaa

SEQ ID NO: 860651 - DNA, 25 bp, Homo sapien
gactaaggtgggtccgtaactgtca

SEQ ID NO: 860652 - DNA, 25 bp, Homo sapien
catacaatgctgagttacatcgcga

SEQ ID NO: 860653 - DNA, 25 bp, Homo sapien
ggacgtcaaagtccgcgttggattg

SEQ ID NO: 860654 - DNA, 25 bp, Homo sapien
acgtcaaagtccgcgttggattgaa

SEQ ID NO: 860655 - DNA, 25 bp, Homo sapien
tcaaagtccgcgttggattgaatgt

SEQ ID NO: 860656 - DNA, 25 bp, Homo sapien
gtcaaagtccgcgttggattgaatg

SEQ ID NO: 860657 - DNA, 25 bp, Homo sapien
cacaagccctggcagtgaaactcca

SEQ ID NO: 860658 - DNA, 25 bp, Homo sapien
ggtcacttctcaaagattgcaggca

SEQ ID NO: 860659 - DNA, 25 bp, Homo sapien
tcttccaagctggtgcaccttgtca

SEQ ID NO: 860660 - DNA, 25 bp, Homo sapien
ggatgtaccagctacctttgccatg

SEQ ID NO: 860661 - DNA, 25 bp, Homo sapien
tgtaatcaacgcaagcttcagctcc

SEQ ID NO: 860662 - DNA, 25 bp, Homo sapien
gctgcccttgtcgttgacattctga

SEQ ID NO: 860663 - DNA, 25 bp, Homo sapien
cattactggctcttgaagggattct

SEQ ID NO: 860664 - DNA, 25 bp, Homo sapien
tgcgcatttgcattcgggtgctcag

SEQ ID NO: 860665 - DNA, 25 bp, Homo sapien
gtgattagcattagcattctgcatc

SEQ ID NO: 860666 - DNA, 25 bp, Homo sapien
cagcatgtgattagcattagcattc

SEQ ID NO: 860667 - DNA, 25 bp, Homo sapien
gcagcagcatgtgattagcattagc

SEQ ID NO: 860668 - DNA, 25 bp, Homo sapien
catgtgattagcattagcattctgc

SEQ ID NO: 860669 - DNA, 25 bp, Homo sapien
tagcattagcactggcgttggtggt

SEQ ID NO: 860670 - DNA, 25 bp, Homo sapien
attagtactagcattagcactggcg

SEQ ID NO: 860671 - DNA, 25 bp, Homo sapien
tactagcattagcactggcgttggt

SEQ ID NO: 860672 - DNA, 25 bp, Homo sapien
agcactggcgttggtggtactattg

SEQ ID NO: 860673 - DNA, 25 bp, Homo sapien
agggacgttgacaaaagctcttggc

SEQ ID NO: 860674 - DNA, 25 bp, Homo sapien
tcagcctgaacatccaggtgatgaa

SEQ ID NO: 860675 - DNA, 25 bp, Homo sapien
tgatgtctatgctgctctcagggac

SEQ ID NO: 860676 - DNA, 25 bp, Homo sapien
caattaaggaccttcgggaatcaag

SEQ ID NO: 860677 - DNA, 25 bp, Homo sapien
cagccagtgttgtgctcagttaacc

SEQ ID NO: 860678 - DNA, 25 bp, Homo sapien
tgaatgaggccaatccttccccaag

SEQ ID NO: 860679 - DNA, 25 bp, Homo sapien
catgcttggcatgtgataaacccta

SEQ ID NO: 860680 - DNA, 25 bp, Homo sapien
gcttcactggcgcaattctgtggcc

SEQ ID NO: 860681 - DNA, 25 bp, Homo sapien
ccagttggtgctgtgcttcatctac

SEQ ID NO: 860682 - DNA, 25 bp, Homo sapien
cagttggtgctgtgcttcatctacc

SEQ ID NO: 860683 - DNA, 25 bp, Homo sapien
ccctgaacttgaacttttgtctgct

SEQ ID NO: 860684 - DNA, 25 bp, Homo sapien
caggttggaggaatctttgcggttc

SEQ ID NO: 860685 - DNA, 25 bp, Homo sapien
gtacacatcatagcgtttccacaat

SEQ ID NO: 860686 - DNA, 25 bp, Homo sapien
tttcttagtgacagcgactgctgca

SEQ ID NO: 860687 - DNA, 25 bp, Homo sapien
cctcagacaggccacgtgttgaaag

SEQ ID NO: 860688 - DNA, 25 bp, Homo sapien
cacgtgttgaaagtctatgtctgaa

SEQ ID NO: 860689 - DNA, 25 bp, Homo sapien
cgtaatcccaggaaccccaagtcat

SEQ ID NO: 860690 - DNA, 25 bp, Homo sapien
tcatttttctttgcgtaatcccagg

SEQ ID NO: 860691 - DNA, 25 bp, Homo sapien
ccaacacgattatcttcacaaattt

SEQ ID NO: 860692 - DNA, 25 bp, Homo sapien
gccatccagggagaaacggcttcca

SEQ ID NO: 860693 - DNA, 25 bp, Homo sapien
ggagggggacttggacgtgacaggc

SEQ ID NO: 860694 - DNA, 25 bp, Homo sapien
acggcttccaggacgacccctgctg

SEQ ID NO: 860695 - DNA, 25 bp, Homo sapien
ggacttggacgtgacaggcagttct

SEQ ID NO: 860696 - DNA, 25 bp, Homo sapien
gagagcaccccaagagtaaccaagg

SEQ ID NO: 860697 - DNA, 25 bp, Homo sapien
ccaaggcagacagtggggagacgct

SEQ ID NO: 860698 - DNA, 25 bp, Homo sapien
gagcaccccaagagtaaccaaggaa

SEQ ID NO: 860699 - DNA, 25 bp, Homo sapien
gggagagcaccccaagagtaaccaa

SEQ ID NO: 860700 - DNA, 25 bp, Homo sapien
agaaacacgacggtttccaccatgt

SEQ ID NO: 860701 - DNA, 25 bp, Homo sapien
cacgacggtttccaccatgtagaca

SEQ ID NO: 860702 - DNA, 25 bp, Homo sapien
gaaacacgacggtttccaccatgta

SEQ ID NO: 860703 - DNA, 25 bp, Homo sapien
aacacgacggtttccaccatgtaga

SEQ ID NO: 860704 - DNA, 25 bp, Homo sapien
ccttcgcagttgaacacttttgcca

SEQ ID NO: 860705 - DNA, 25 bp, Homo sapien
cttcgcagttgaacacttttgccat

SEQ ID NO: 860706 - DNA, 25 bp, Homo sapien
caggtgcaggggtctcagcatgtcc

SEQ ID NO: 860707 - DNA, 25 bp, Homo sapien
gtgggctgacagacctgaagaatga

SEQ ID NO: 860708 - DNA, 25 bp, Homo sapien
acccagcatcagagagactatagga

SEQ ID NO: 860709 - DNA, 25 bp, Homo sapien
gaagttggggccgtgtgggctgaca

SEQ ID NO: 860710 - DNA, 25 bp, Homo sapien
gactgtgactgtgggatcctgtgtt

SEQ ID NO: 860711 - DNA, 25 bp, Homo sapien
tccttgtcctgattcccaccaggaa

SEQ ID NO: 860712 - DNA, 25 bp, Homo sapien
tgtgttgcttcatgtggttcccttc

SEQ ID NO: 860713 - DNA, 25 bp, Homo sapien
atgtccttgtcctgattcccaccag

SEQ ID NO: 860714 - DNA, 25 bp, Homo sapien
gaaggacgtaggctgtgtcaacaca

SEQ ID NO: 860715 - DNA, 25 bp, Homo sapien
tgtcaacacaagtacactggagctg

SEQ ID NO: 860716 - DNA, 25 bp, Homo sapien
catcactgcgtgaggttgaacccct

SEQ ID NO: 860717 - DNA, 25 bp, Homo sapien
aaagaggatgcagttccgggctgcc

SEQ ID NO: 860718 - DNA, 25 bp, Homo sapien
cagtgaaggcgtcgggaaagacagg

SEQ ID NO: 860719 - DNA, 25 bp, Homo sapien
gaaggcgtcgggaaagacagggctg

SEQ ID NO: 860720 - DNA, 25 bp, Homo sapien
gccagtgaaggcgtcgggaaagaca

SEQ ID NO: 860721 - DNA, 25 bp, Homo sapien
caggtgccagtgaaggcgtcgggaa

SEQ ID NO: 860722 - DNA, 25 bp, Homo sapien
caaaaccctcggaacacagcatctg

SEQ ID NO: 860723 - DNA, 25 bp, Homo sapien
ctgcaagttcccacaaaaccctcgg

SEQ ID NO: 860724 - DNA, 25 bp, Homo sapien
cccacaaaaccctcggaacacagca

SEQ ID NO: 860725 - DNA, 25 bp, Homo sapien
tgcaagttcccacaaaaccctcgga

SEQ ID NO: 860726 - DNA, 25 bp, Homo sapien
cctcacgggaaagatgtccatttcc

SEQ ID NO: 860727 - DNA, 25 bp, Homo sapien
catgctggatggcagagaaatctct

SEQ ID NO: 860728 - DNA, 25 bp, Homo sapien
atgagctgagcaggcgtaagacaac

SEQ ID NO: 860729 - DNA, 25 bp, Homo sapien
agcaggcgtaagacaacctggttac

SEQ ID NO: 860730 - DNA, 25 bp, Homo sapien
agctgagcaggcgtaagacaacctg

SEQ ID NO: 860731 - DNA, 25 bp, Homo sapien
tgagcaggcgtaagacaacctggtt

SEQ ID NO: 860732 - DNA, 25 bp, Homo sapien
catgcaataggtgctcacggagcag

SEQ ID NO: 860733 - DNA, 25 bp, Homo sapien
taggtgctcacggagcagtcatcag

SEQ ID NO: 860734 - DNA, 25 bp, Homo sapien
tgcaataggtgctcacggagcagtc

SEQ ID NO: 860735 - DNA, 25 bp, Homo sapien
gtgctcacggagcagtcatcagaca

SEQ ID NO: 860736 - DNA, 25 bp, Homo sapien
gacagggaccgccatccactgggcc

SEQ ID NO: 860737 - DNA, 25 bp, Homo sapien
gcaattctgtgataagcctgtcctt

SEQ ID NO: 860738 - DNA, 25 bp, Homo sapien
ctgggcaattctgtgataagcctgt

SEQ ID NO: 860739 - DNA, 25 bp, Homo sapien
attctgtgataagcctgtcctttcc

SEQ ID NO: 860740 - DNA, 25 bp, Homo sapien
gcattgcaaccaccgtggcctgtgg

SEQ ID NO: 860741 - DNA, 25 bp, Homo sapien
acatccaggcattgcaaccaccgtg

SEQ ID NO: 860742 - DNA, 25 bp, Homo sapien
cacggacagttttctctcaaggagc

SEQ ID NO: 860743 - DNA, 25 bp, Homo sapien
gagctcactccatacacagtcacag

SEQ ID NO: 860744 - DNA, 25 bp, Homo sapien
gaatgtagaagggcttccctgctgg

SEQ ID NO: 860745 - DNA, 25 bp, Homo sapien
cttgaatgtagaagggcttccctgc

SEQ ID NO: 860746 - DNA, 25 bp, Homo sapien
ttgaatgtagaagggcttccctgct

SEQ ID NO: 860747 - DNA, 25 bp, Homo sapien
tgaatgtagaagggcttccctgctg

SEQ ID NO: 860748 - DNA, 25 bp, Homo sapien
agtaggattttctggcttaactctg

SEQ ID NO: 860749 - DNA, 25 bp, Homo sapien
cagtaggattttctggcttaactct

SEQ ID NO: 860750 - DNA, 25 bp, Homo sapien
ctctttgcacagtttgaaacgtaca

SEQ ID NO: 860751 - DNA, 25 bp, Homo sapien
acaacttctgttgtgagtgtcccag

SEQ ID NO: 860752 - DNA, 25 bp, Homo sapien
tctgttgtgagtgtcccaggactgc

SEQ ID NO: 860753 - DNA, 25 bp, Homo sapien
agtttgaaacgtacaacttctgttg

SEQ ID NO: 860754 - DNA, 25 bp, Homo sapien
ggatgtggggtccagtcgctcctgc

SEQ ID NO: 860755 - DNA, 25 bp, Homo sapien
atgtggggtccagtcgctcctgcat

SEQ ID NO: 860756 - DNA, 25 bp, Homo sapien
gatgtggggtccagtcgctcctgca

SEQ ID NO: 860757 - DNA, 25 bp, Homo sapien
caggatgtggggtccagtcgctcct

SEQ ID NO: 860758 - DNA, 25 bp, Homo sapien
gattctgagaaaccggccagggatt

SEQ ID NO: 860759 - DNA, 25 bp, Homo sapien
tgcacattgaccacatccttggaga

SEQ ID NO: 860760 - DNA, 25 bp, Homo sapien
cattctctgcacgtgtggattctga

SEQ ID NO: 860761 - DNA, 25 bp, Homo sapien
caaagctcctctggtgactctaggg

SEQ ID NO: 860762 - DNA, 25 bp, Homo sapien
tcaaaatggcatcatcctcccagat

SEQ ID NO: 860763 - DNA, 25 bp, Homo sapien
caaaatggcatcatcctcccagatc

SEQ ID NO: 860764 - DNA, 25 bp, Homo sapien
ttagcgtgtacttagagtgcatctt

SEQ ID NO: 860765 - DNA, 25 bp, Homo sapien
tagcgtgtacttagagtgcatcttg

SEQ ID NO: 860766 - DNA, 25 bp, Homo sapien
cgtgtacttagagtgcatcttgctg

SEQ ID NO: 860767 - DNA, 25 bp, Homo sapien
gtacttagagtgcatcttgctgtgc

SEQ ID NO: 860768 - DNA, 25 bp, Homo sapien
ggtcgtttcctgggccaagatgtcc

SEQ ID NO: 860769 - DNA, 25 bp, Homo sapien
gtcgtttcctgggccaagatgtcca

SEQ ID NO: 860770 - DNA, 25 bp, Homo sapien
tcgtttcctgggccaagatgtccat

SEQ ID NO: 860771 - DNA, 25 bp, Homo sapien
cttcatcatcaaagaggtggtggct

SEQ ID NO: 860772 - DNA, 25 bp, Homo sapien
catcatcaaagaggtggtggctgct

SEQ ID NO: 860773 - DNA, 25 bp, Homo sapien
cattgcccttcatcatcaaagaggt

SEQ ID NO: 860774 - DNA, 25 bp, Homo sapien
tgcccttcatcatcaaagaggtggt

SEQ ID NO: 860775 - DNA, 25 bp, Homo sapien
tttgggggatgatttcataatattc

SEQ ID NO: 860776 - DNA, 25 bp, Homo sapien
taatattcttgttaaggatggaggc

SEQ ID NO: 860777 - DNA, 25 bp, Homo sapien
ggatggaggcagtcttacgcgacat

SEQ ID NO: 860778 - DNA, 25 bp, Homo sapien
ttcttgttaaggatggaggcagtct

SEQ ID NO: 860779 - DNA, 25 bp, Homo sapien
ggtgctaaatatcatcaggtgtctg

SEQ ID NO: 860780 - DNA, 25 bp, Homo sapien
tcatcaggtgtctgatgtgctgtaa

SEQ ID NO: 860781 - DNA, 25 bp, Homo sapien
tgctaaatatcatcaggtgtctgat

SEQ ID NO: 860782 - DNA, 25 bp, Homo sapien
gtgctaaatatcatcaggtgtctga

SEQ ID NO: 860783 - DNA, 25 bp, Homo sapien
tgcctcccgtgggatggaggcctct

SEQ ID NO: 860784 - DNA, 25 bp, Homo sapien
ctacagctgtgtaaggattctctgt

SEQ ID NO: 860785 - DNA, 25 bp, Homo sapien
tctctgtgagaacgctgcctcccgt

SEQ ID NO: 860786 - DNA, 25 bp, Homo sapien
gattctctgtgagaacgctgcctcc

SEQ ID NO: 860787 - DNA, 25 bp, Homo sapien
cttggttctcctgtttcccgtggct

SEQ ID NO: 860788 - DNA, 25 bp, Homo sapien
tcccgtggctgctgtgaatggccat

SEQ ID NO: 860789 - DNA, 25 bp, Homo sapien
cctgcctgcgagtcctggtctggac

SEQ ID NO: 860790 - DNA, 25 bp, Homo sapien
gcctgcgagtcctggtctggacctg

SEQ ID NO: 860791 - DNA, 25 bp, Homo sapien
tcactcttcccgacactcctcgtag

SEQ ID NO: 860792 - DNA, 25 bp, Homo sapien
cgtaggggctcagggacccattgaa

SEQ ID NO: 860793 - DNA, 25 bp, Homo sapien
ccgacactcctcgtaggggctcagg

SEQ ID NO: 860794 - DNA, 25 bp, Homo sapien
tcctcgtaggggctcagggacccat

SEQ ID NO: 860795 - DNA, 25 bp, Homo sapien
ccttctgaaggctgttgatgggtta

SEQ ID NO: 860796 - DNA, 25 bp, Homo sapien
tattgctacgatttttcttctagag

SEQ ID NO: 860797 - DNA, 25 bp, Homo sapien
gacatgtcttctaaaagtaggagca

SEQ ID NO: 860798 - DNA, 25 bp, Homo sapien
aaattgcatgagtcttattgctacg

SEQ ID NO: 860799 - DNA, 25 bp, Homo sapien
ttccagggagttttataatcttcca

SEQ ID NO: 860800 - DNA, 25 bp, Homo sapien
gaagtcctttacatggtttagacca

SEQ ID NO: 860801 - DNA, 25 bp, Homo sapien
cagggagttttataatcttccacca

SEQ ID NO: 860802 - DNA, 25 bp, Homo sapien
agtcctttacatggtttagaccatc

SEQ ID NO: 860803 - DNA, 25 bp, Homo sapien
ctgtgccagggcttgatcgaatttg

SEQ ID NO: 860804 - DNA, 25 bp, Homo sapien
ccagggcttgatcgaatttgatgaa

SEQ ID NO: 860805 - DNA, 25 bp, Homo sapien
caggtagccttagccaagaggccat

SEQ ID NO: 860806 - DNA, 25 bp, Homo sapien
aggtctcaggtagccttagccaaga

SEQ ID NO: 860807 - DNA, 25 bp, Homo sapien
ggtggtctttgattaatagatggcc

SEQ ID NO: 860808 - DNA, 25 bp, Homo sapien
caaacacacttgatttcaggacgaa

SEQ ID NO: 860809 - DNA, 25 bp, Homo sapien
ctgcgaagcagatcacaaacacact

SEQ ID NO: 860810 - DNA, 25 bp, Homo sapien
caggacgaatggctttctgataggt

SEQ ID NO: 860811 - DNA, 25 bp, Homo sapien
tcctgccttgagtccgcccaccccc

SEQ ID NO: 860812 - DNA, 25 bp, Homo sapien
ggctgagagtggcttgcacaggacc

SEQ ID NO: 860813 - DNA, 25 bp, Homo sapien
ggtggccctcggttagagactgccg

SEQ ID NO: 860814 - DNA, 25 bp, Homo sapien
aagggtggccctcggttagagactg

SEQ ID NO: 860815 - DNA, 25 bp, Homo sapien
gaatgcgatgcccacgggtagcaaa

SEQ ID NO: 860816 - DNA, 25 bp, Homo sapien
gcatcccgtggtcgacgatgtggaa

SEQ ID NO: 860817 - DNA, 25 bp, Homo sapien
tagatggacttttcaggagcagcaa

SEQ ID NO: 860818 - DNA, 25 bp, Homo sapien
gggtagcaaaccgtgacacacgcta

SEQ ID NO: 860819 - DNA, 25 bp, Homo sapien
tttcatgagagaatccatagttttc

SEQ ID NO: 860820 - DNA, 25 bp, Homo sapien
cattgtcttgccatttcgtctttga

SEQ ID NO: 860821 - DNA, 25 bp, Homo sapien
agttccttacgacctgctggcagca

SEQ ID NO: 860822 - DNA, 25 bp, Homo sapien
tcctgattttcattgggaacgcaaa

SEQ ID NO: 860823 - DNA, 25 bp, Homo sapien
aaactgatcgagctgcctgatttaa

SEQ ID NO: 860824 - DNA, 25 bp, Homo sapien
atcgagctgcctgatttaagtcaca

SEQ ID NO: 860825 - DNA, 25 bp, Homo sapien
gctggaaactgatcgagctgcctga

SEQ ID NO: 860826 - DNA, 25 bp, Homo sapien
tgatcgagctgcctgatttaagtca

SEQ ID NO: 860827 - DNA, 25 bp, Homo sapien
taacaggcgtaaagagtgacagccc

SEQ ID NO: 860828 - DNA, 25 bp, Homo sapien
catctgcagagaagacgtcccaatg

SEQ ID NO: 860829 - DNA, 25 bp, Homo sapien
gccagcaaatggaatcacaatgcct

SEQ ID NO: 860830 - DNA, 25 bp, Homo sapien
tgtagagtgtccgttagaatgcaca

SEQ ID NO: 860831 - DNA, 25 bp, Homo sapien
gatgctctagcaggagttgcagcca

SEQ ID NO: 860832 - DNA, 25 bp, Homo sapien
tgggactggccggtggatgaaactg

SEQ ID NO: 860833 - DNA, 25 bp, Homo sapien
gaagggagtccaggtgtccgctggg

SEQ ID NO: 860834 - DNA, 25 bp, Homo sapien
tgaaactgcggacatattcctggct

SEQ ID NO: 860835 - DNA, 25 bp, Homo sapien
taagcccagaggtccagattatgac

SEQ ID NO: 860836 - DNA, 25 bp, Homo sapien
aagcccagaggtccagattatgacc

SEQ ID NO: 860837 - DNA, 25 bp, Homo sapien
ctaagcccagaggtccagattatga

SEQ ID NO: 860838 - DNA, 25 bp, Homo sapien
agcccagaggtccagattatgaccc

SEQ ID NO: 860839 - DNA, 25 bp, Homo sapien
cacggtgtcgaggacctgctgatca

SEQ ID NO: 860840 - DNA, 25 bp, Homo sapien
gaagctaacagtcacatccaaggaa

SEQ ID NO: 860841 - DNA, 25 bp, Homo sapien
tgaacagcgggacaagcactttgct

SEQ ID NO: 860842 - DNA, 25 bp, Homo sapien
gaaaccgtcatgtgttcccagggcc

SEQ ID NO: 860843 - DNA, 25 bp, Homo sapien
gcttttccaggctgtacattctgta

SEQ ID NO: 860844 - DNA, 25 bp, Homo sapien
gtacattctgtactggtgccttctg

SEQ ID NO: 860845 - DNA, 25 bp, Homo sapien
caggctgtacattctgtactggtgc

SEQ ID NO: 860846 - DNA, 25 bp, Homo sapien
ttctcttggcattggcttttccagg

SEQ ID NO: 860847 - DNA, 25 bp, Homo sapien
gccctggctgaaccgcgatgtggat

SEQ ID NO: 860848 - DNA, 25 bp, Homo sapien
gggcaccctgtgaagtgctctgagt

SEQ ID NO: 860849 - DNA, 25 bp, Homo sapien
acaggactaatgcagaagcagctgg

SEQ ID NO: 860850 - DNA, 25 bp, Homo sapien
cagggacaggactaatgcagaagca

SEQ ID NO: 860851 - DNA, 25 bp, Homo sapien
gcgggccgggatgttttcacactgc

SEQ ID NO: 860852 - DNA, 25 bp, Homo sapien
ggcgggccgggatgttttcacactg

SEQ ID NO: 860853 - DNA, 25 bp, Homo sapien
gggccgggatgttttcacactgcca

SEQ ID NO: 860854 - DNA, 25 bp, Homo sapien
cgggccgggatgttttcacactgcc

SEQ ID NO: 860855 - DNA, 25 bp, Homo sapien
aatttcgtccaaagtctgcacctcg

SEQ ID NO: 860856 - DNA, 25 bp, Homo sapien
tcgtccaaagtctgcacctcggtgg

SEQ ID NO: 860857 - DNA, 25 bp, Homo sapien
ccaaagtctgcacctcggtggctga

SEQ ID NO: 860858 - DNA, 25 bp, Homo sapien
caaaagcaatttcgtccaaagtctg

SEQ ID NO: 860859 - DNA, 25 bp, Homo sapien
aatgggacctcattcggacaaaagg

SEQ ID NO: 860860 - DNA, 25 bp, Homo sapien
gcaaggtcagcatgctctacaggaa

SEQ ID NO: 860861 - DNA, 25 bp, Homo sapien
ccaaaattagtccacttggagccca

SEQ ID NO: 860862 - DNA, 25 bp, Homo sapien
cttgttggtcaatggcactgcctgg

SEQ ID NO: 860863 - DNA, 25 bp, Homo sapien
cctggtgggggcgagggtgttgcca

SEQ ID NO: 860864 - DNA, 25 bp, Homo sapien
ctggtgggggcgagggtgttgccaa

SEQ ID NO: 860865 - DNA, 25 bp, Homo sapien
agagaccctggtgggggcgagggtg

SEQ ID NO: 860866 - DNA, 25 bp, Homo sapien
gtcagagaccctggtgggggcgagg

SEQ ID NO: 860867 - DNA, 25 bp, Homo sapien
ggtgttctgtgcggccttcacctcc

SEQ ID NO: 860868 - DNA, 25 bp, Homo sapien
accatggcaggggtgagggtactct

SEQ ID NO: 860869 - DNA, 25 bp, Homo sapien
tgcacatccacgtcagggaccccgg

SEQ ID NO: 860870 - DNA, 25 bp, Homo sapien
gtacagcctgcacctccatgtcaga

SEQ ID NO: 860871 - DNA, 25 bp, Homo sapien
gtgtagcgccgtaaactatttccag

SEQ ID NO: 860872 - DNA, 25 bp, Homo sapien
tgagagtaagtgtagcgccgtaaac

SEQ ID NO: 860873 - DNA, 25 bp, Homo sapien
gtaaactatttccagctgaactcca

SEQ ID NO: 860874 - DNA, 25 bp, Homo sapien
cttctctgtgagagtaagtgtagcg

SEQ ID NO: 860875 - DNA, 25 bp, Homo sapien
gccccatgccaaaaaggacatagtt

SEQ ID NO: 860876 - DNA, 25 bp, Homo sapien
agcgtttttgggctgtggcaatcag

SEQ ID NO: 860877 - DNA, 25 bp, Homo sapien
tgtggatctcaaagaaccgagaaga

SEQ ID NO: 860878 - DNA, 25 bp, Homo sapien
gagcagaactgccatgctccggacg

SEQ ID NO: 860879 - DNA, 25 bp, Homo sapien
cccagagaggcactgctacgggttc

SEQ ID NO: 860880 - DNA, 25 bp, Homo sapien
gaggcactgctacgggttccagaca

SEQ ID NO: 860881 - DNA, 25 bp, Homo sapien
gagaggcactgctacgggttccaga

SEQ ID NO: 860882 - DNA, 25 bp, Homo sapien
cagagaggcactgctacgggttcca

SEQ ID NO: 860883 - DNA, 25 bp, Homo sapien
tgtccttgctctacgggctgggaag

SEQ ID NO: 860884 - DNA, 25 bp, Homo sapien
gggattccacgtcagctttcagctt

SEQ ID NO: 860885 - DNA, 25 bp, Homo sapien
agcggctcctggaaccgggattcca

SEQ ID NO: 860886 - DNA, 25 bp, Homo sapien
cttctgacggagagagccaagtagc

SEQ ID NO: 860887 - DNA, 25 bp, Homo sapien
gcagagagaaaaacctggtgtggat

SEQ ID NO: 860888 - DNA, 25 bp, Homo sapien
tgcagagagaaaaacctggtgtgga

SEQ ID NO: 860889 - DNA, 25 bp, Homo sapien
caggcagcaggaacgtctgacccag

SEQ ID NO: 860890 - DNA, 25 bp, Homo sapien
tcaggcagcaggaacgtctgaccca

SEQ ID NO: 860891 - DNA, 25 bp, Homo sapien
gagctaccaagccctggtccaaggc

SEQ ID NO: 860892 - DNA, 25 bp, Homo sapien
aaagaacctgttgatggtcttcaga

SEQ ID NO: 860893 - DNA, 25 bp, Homo sapien
tttccaaagaacctgttgatggtct

SEQ ID NO: 860894 - DNA, 25 bp, Homo sapien
ttctgtatccgtttctccagaagtt

SEQ ID NO: 860895 - DNA, 25 bp, Homo sapien
ttttctgtatccgtttctccagaag

SEQ ID NO: 860896 - DNA, 25 bp, Homo sapien
ataagtcgttggtgcctgtgaaaag

SEQ ID NO: 860897 - DNA, 25 bp, Homo sapien
ctgtgaaaaggagtgtgtaaattaa

SEQ ID NO: 860898 - DNA, 25 bp, Homo sapien
tgaaaaggagtgtgtaaattaaatc

SEQ ID NO: 860899 - DNA, 25 bp, Homo sapien
gtcgttggtgcctgtgaaaaggagt

SEQ ID NO: 860900 - DNA, 25 bp, Homo sapien
gctgccctccactttggcaaggaca

SEQ ID NO: 860901 - DNA, 25 bp, Homo sapien
catctacgtggctgaaaaatctctc

SEQ ID NO: 860902 - DNA, 25 bp, Homo sapien
taatctttgccatctacgtggctga

SEQ ID NO: 860903 - DNA, 25 bp, Homo sapien
ggcaaggacacaagccaggttcctg

SEQ ID NO: 860904 - DNA, 25 bp, Homo sapien
tcacaatttcccgatcctcgcatgg

SEQ ID NO: 860905 - DNA, 25 bp, Homo sapien
tccctactccttccactcttttcac

SEQ ID NO: 860906 - DNA, 25 bp, Homo sapien
tcttttcacaatttcccgatcctcg

SEQ ID NO: 860907 - DNA, 25 bp, Homo sapien
acaatttcccgatcctcgcatgggc

SEQ ID NO: 860908 - DNA, 25 bp, Homo sapien
ctgggatgacagtgaaattggacac

SEQ ID NO: 860909 - DNA, 25 bp, Homo sapien
ttctgggatgacagtgaaattggac

SEQ ID NO: 860910 - DNA, 25 bp, Homo sapien
gaaattggacacaacaattgtccat

SEQ ID NO: 860911 - DNA, 25 bp, Homo sapien
gacagtgaaattggacacaacaatt

SEQ ID NO: 860912 - DNA, 25 bp, Homo sapien
tcttgggttgaggtgatcgaactct

SEQ ID NO: 860913 - DNA, 25 bp, Homo sapien
tctttgtaaatagagctccccctcc

SEQ ID NO: 860914 - DNA, 25 bp, Homo sapien
gtacttgctaaaacgctccactctg

SEQ ID NO: 860915 - DNA, 25 bp, Homo sapien
taccgtggcttattcctgcagttcc

SEQ ID NO: 860916 - DNA, 25 bp, Homo sapien
tgtccaaagcagaaccgaaggaatt

SEQ ID NO: 860917 - DNA, 25 bp, Homo sapien
tacaggtattgtgcttggaagctac

SEQ ID NO: 860918 - DNA, 25 bp, Homo sapien
cgtggaggtgctcggcaagttcctc

SEQ ID NO: 860919 - DNA, 25 bp, Homo sapien
tctttgttggacgttggctgctcat

SEQ ID NO: 860920 - DNA, 25 bp, Homo sapien
tcatctttcgcagacaaagcaggct

SEQ ID NO: 860921 - DNA, 25 bp, Homo sapien
cttcacctgtttgcgcctggctttc

SEQ ID NO: 860922 - DNA, 25 bp, Homo sapien
gggccttgatctgcggcatgctcag

SEQ ID NO: 860923 - DNA, 25 bp, Homo sapien
cctttgcttaattgcaggtgatgat

SEQ ID NO: 860924 - DNA, 25 bp, Homo sapien
gcagacaccgcagccatcggcagca

SEQ ID NO: 860925 - DNA, 25 bp, Homo sapien
ggagggctcgtcatctgggagtgtc

SEQ ID NO: 860926 - DNA, 25 bp, Homo sapien
caatctgccgtgcatgcagggagcc

SEQ ID NO: 860927 - DNA, 25 bp, Homo sapien
ggctcgtcatctgggagtgtcagca

SEQ ID NO: 860928 - DNA, 25 bp, Homo sapien
agctcacattgattcttggtatcga

SEQ ID NO: 860929 - DNA, 25 bp, Homo sapien
tctggtacaaggagccaagccttct

SEQ ID NO: 860930 - DNA, 25 bp, Homo sapien
cttggtatcgatttccaaatatgaa

SEQ ID NO: 860931 - DNA, 25 bp, Homo sapien
tttcgaagcttctaaacagatctgg

SEQ ID NO: 860932 - DNA, 25 bp, Homo sapien
tactggcaagccaggagacccacat

SEQ ID NO: 860933 - DNA, 25 bp, Homo sapien
gttactggcaagccaggagacccac

SEQ ID NO: 860934 - DNA, 25 bp, Homo sapien
ctggcaagccaggagacccacatac

SEQ ID NO: 860935 - DNA, 25 bp, Homo sapien
ctgttactggcaagccaggagaccc

SEQ ID NO: 860936 - DNA, 25 bp, Homo sapien
ttccagagcttcagagaggtcgacg

SEQ ID NO: 860937 - DNA, 25 bp, Homo sapien
agagcttcagagaggtcgacggtga

SEQ ID NO: 860938 - DNA, 25 bp, Homo sapien
ccagagcttcagagaggtcgacggt

SEQ ID NO: 860939 - DNA, 25 bp, Homo sapien
ctttccagagcttcagagaggtcga

SEQ ID NO: 860940 - DNA, 25 bp, Homo sapien
gatgtgtgacctctccgtagcaagc

SEQ ID NO: 860941 - DNA, 25 bp, Homo sapien
cttcctcaaagagcagagtgtcggt

SEQ ID NO: 860942 - DNA, 25 bp, Homo sapien
ccgcagtagggccacaaacgtttat

SEQ ID NO: 860943 - DNA, 25 bp, Homo sapien
tgtcggtcacgttgcccgcagtagg

SEQ ID NO: 860944 - DNA, 25 bp, Homo sapien
caggcctgttccagagtgtggaagg

SEQ ID NO: 860945 - DNA, 25 bp, Homo sapien
aggcctgttccagagtgtggaaggc

SEQ ID NO: 860946 - DNA, 25 bp, Homo sapien
tcaggcctgttccagagtgtggaag

SEQ ID NO: 860947 - DNA, 25 bp, Homo sapien
ggtagcattcttcatgtccccggac

SEQ ID NO: 860948 - DNA, 25 bp, Homo sapien
acaggtagcattcttcatgtccccg

SEQ ID NO: 860949 - DNA, 25 bp, Homo sapien
acacaggtagcattcttcatgtccc

SEQ ID NO: 860950 - DNA, 25 bp, Homo sapien
tagcattcttcatgtccccggactc

SEQ ID NO: 860951 - DNA, 25 bp, Homo sapien
ggtgctctggtacctggaattctac

SEQ ID NO: 860952 - DNA, 25 bp, Homo sapien
ctccaggtgctctggtacctggaat

SEQ ID NO: 860953 - DNA, 25 bp, Homo sapien
gatttgagtgatggtactcaaaagg

SEQ ID NO: 860954 - DNA, 25 bp, Homo sapien
gtgatggtactcaaaaggctcacct

SEQ ID NO: 860955 - DNA, 25 bp, Homo sapien
gatgtctgtggttaccaaatgaatg

SEQ ID NO: 860956 - DNA, 25 bp, Homo sapien
tagggttgaaaagcataagatgtct

SEQ ID NO: 860957 - DNA, 25 bp, Homo sapien
tcactggatcagatacgtaaaccat

SEQ ID NO: 860958 - DNA, 25 bp, Homo sapien
gatcagatacgtaaaccatttaggg

SEQ ID NO: 860959 - DNA, 25 bp, Homo sapien
ccatgaacgtggtgactgcggccat

SEQ ID NO: 860960 - DNA, 25 bp, Homo sapien
cattgtgaatagcaccgccatgaac

SEQ ID NO: 860961 - DNA, 25 bp, Homo sapien
tcattatggctctgaagtccctctg

SEQ ID NO: 860962 - DNA, 25 bp, Homo sapien
gggtgtccaccaggccattacattc

SEQ ID NO: 860963 - DNA, 25 bp, Homo sapien
gtccttttaggaccttactgttgca

SEQ ID NO: 860964 - DNA, 25 bp, Homo sapien
cttttaggaccttactgttgcatcc

SEQ ID NO: 860965 - DNA, 25 bp, Homo sapien
tgtccttttaggaccttactgttgc

SEQ ID NO: 860966 - DNA, 25 bp, Homo sapien
ccttttaggaccttactgttgcatc

SEQ ID NO: 860967 - DNA, 25 bp, Homo sapien
tcagggtgtcgtatctctgcaaatg

SEQ ID NO: 860968 - DNA, 25 bp, Homo sapien
ggtagcccacacattgcttcacaga

SEQ ID NO: 860969 - DNA, 25 bp, Homo sapien
taccttatgaaatctggcacacctc

SEQ ID NO: 860970 - DNA, 25 bp, Homo sapien
tgttggctcacagcatggtctgatt

SEQ ID NO: 860971 - DNA, 25 bp, Homo sapien
gggcgactggtagcaccttgaagca

SEQ ID NO: 860972 - DNA, 25 bp, Homo sapien
acaaatgcacacacgcagcttgcgc

SEQ ID NO: 860973 - DNA, 25 bp, Homo sapien
taggagggagataggaagccaaaac

SEQ ID NO: 860974 - DNA, 25 bp, Homo sapien
ccctttcagcctgtgtagcatggaa

SEQ ID NO: 860975 - DNA, 25 bp, Homo sapien
ttctgtttttccactttcattatta

SEQ ID NO: 860976 - DNA, 25 bp, Homo sapien
ctgtttttccactttcattattaat

SEQ ID NO: 860977 - DNA, 25 bp, Homo sapien
ctgcatttacaacaattaataaatt

SEQ ID NO: 860978 - DNA, 25 bp, Homo sapien
gcatttacaacaattaataaattct

SEQ ID NO: 860979 - DNA, 25 bp, Homo sapien
ttataggccttggtggttacacggc

SEQ ID NO: 860980 - DNA, 25 bp, Homo sapien
gttacacggcccaattcatccaagg

SEQ ID NO: 860981 - DNA, 25 bp, Homo sapien
cccaattcatccaaggcagagcagg

SEQ ID NO: 860982 - DNA, 25 bp, Homo sapien
cttggtggttacacggcccaattca

SEQ ID NO: 860983 - DNA, 25 bp, Homo sapien
tgctgctgcactggcatagcggaat

SEQ ID NO: 860984 - DNA, 25 bp, Homo sapien
gctgcactggcatagcggaatctgt

SEQ ID NO: 860985 - DNA, 25 bp, Homo sapien
ctgctgcactggcatagcggaatct

SEQ ID NO: 860986 - DNA, 25 bp, Homo sapien
tgcactggcatagcggaatctgttt

SEQ ID NO: 860987 - DNA, 25 bp, Homo sapien
gctccagccaaacctcgcagagcca

SEQ ID NO: 860988 - DNA, 25 bp, Homo sapien
aagcaaacatgacgggtcggcggct

SEQ ID NO: 860989 - DNA, 25 bp, Homo sapien
ggctgcgcgcgggagaagcaaacat

SEQ ID NO: 860990 - DNA, 25 bp, Homo sapien
ctctcccacccgtgggcaggcctcg

SEQ ID NO: 860991 - DNA, 25 bp, Homo sapien
tggtaggatgtggagacagctgtag

SEQ ID NO: 860992 - DNA, 25 bp, Homo sapien
ctgtctgggctggtgagaaggtaga

SEQ ID NO: 860993 - DNA, 25 bp, Homo sapien
ctgcttttcctttcggctggtagga

SEQ ID NO: 860994 - DNA, 25 bp, Homo sapien
agagacagccatgcgcccagcatgg

SEQ ID NO: 860995 - DNA, 25 bp, Homo sapien
cagaagaggtaagtccctgaaataa

SEQ ID NO: 860996 - DNA, 25 bp, Homo sapien
agtaagtcaagggtcagaagaggta

SEQ ID NO: 860997 - DNA, 25 bp, Homo sapien
tcagggcttagcaagttggcaccga

SEQ ID NO: 860998 - DNA, 25 bp, Homo sapien
gggcttagcaagttggcaccgaagt

SEQ ID NO: 860999 - DNA, 25 bp, Homo sapien
agcccccgccaagttgttgtctgct

SEQ ID NO: 861000 - DNA, 25 bp, Homo sapien
cgccaagttgttgtctgcttctgtc

SEQ ID NO: 861001 - DNA, 25 bp, Homo sapien
ctggaaatgcgggaaggtctcctga

SEQ ID NO: 861002 - DNA, 25 bp, Homo sapien
cttctgtctggaaatgcgggaaggt

SEQ ID NO: 861003 - DNA, 25 bp, Homo sapien
gaagtagtgatttccagatgaattc

SEQ ID NO: 861004 - DNA, 25 bp, Homo sapien
agtagtgatttccagatgaattctc

SEQ ID NO: 861005 - DNA, 25 bp, Homo sapien
gagagcccacaatctacaggtaaat

SEQ ID NO: 861006 - DNA, 25 bp, Homo sapien
cccacaatctacaggtaaatcttct

SEQ ID NO: 861007 - DNA, 25 bp, Homo sapien
tgtcatcacgccctctgggcttagc

SEQ ID NO: 861008 - DNA, 25 bp, Homo sapien
catcacgccctctgggcttagcagt

SEQ ID NO: 861009 - DNA, 25 bp, Homo sapien
tctgacgcgttgtgggactcacagc

SEQ ID NO: 861010 - DNA, 25 bp, Homo sapien
gcttagcagtgtctgacgcgttgtg

SEQ ID NO: 861011 - DNA, 25 bp, Homo sapien
ggtaactgttacactctgggcttcc

SEQ ID NO: 861012 - DNA, 25 bp, Homo sapien
ccatatatccaggtccttcctcaaa

SEQ ID NO: 861013 - DNA, 25 bp, Homo sapien
aggtccttcctcaaacttggtgcca

SEQ ID NO: 861014 - DNA, 25 bp, Homo sapien
gtaactgttacactctgggcttcca

SEQ ID NO: 861015 - DNA, 25 bp, Homo sapien
ccagcgcccatgtggtcgtcctgac

SEQ ID NO: 861016 - DNA, 25 bp, Homo sapien
tcaaaggacgcattggactcagcct

SEQ ID NO: 861017 - DNA, 25 bp, Homo sapien
tgttgctcctccagtgacaggtcaa

SEQ ID NO: 861018 - DNA, 25 bp, Homo sapien
gaataccataagactgtcccgaagg

SEQ ID NO: 861019 - DNA, 25 bp, Homo sapien
tatgcaaacttgttgggcacaggca

SEQ ID NO: 861020 - DNA, 25 bp, Homo sapien
gttggaaattcactcccaataggag

SEQ ID NO: 861021 - DNA, 25 bp, Homo sapien
ttcactcccaataggagttccacgg

SEQ ID NO: 861022 - DNA, 25 bp, Homo sapien
tccacggcagacacatcgtgagtca

SEQ ID NO: 861023 - DNA, 25 bp, Homo sapien
caataggagttccacggcagacaca

SEQ ID NO: 861024 - DNA, 25 bp, Homo sapien
ccgcttgtacgtgttgaagatccag

SEQ ID NO: 861025 - DNA, 25 bp, Homo sapien
agtcctagtcttggaagccccaggg

SEQ ID NO: 861026 - DNA, 25 bp, Homo sapien
gtgtgggtgcgggtgatggaggctg

SEQ ID NO: 861027 - DNA, 25 bp, Homo sapien
gtgtgtggccggcagtcttggccag

SEQ ID NO: 861028 - DNA, 25 bp, Homo sapien
tgcattcggccacagagctcagatg

SEQ ID NO: 861029 - DNA, 25 bp, Homo sapien
tgcctcaccttgtaggggcgcctca

SEQ ID NO: 861030 - DNA, 25 bp, Homo sapien
gcctcaccttgcaggcgctgtccat

SEQ ID NO: 861031 - DNA, 25 bp, Homo sapien
cttgcaggggtgcctcaccttgtag

SEQ ID NO: 861032 - DNA, 25 bp, Homo sapien
ggtgcctcaccttgtaggggcgcct

SEQ ID NO: 861033 - DNA, 25 bp, Homo sapien
gctgagcggacaggaggcttcgagg

SEQ ID NO: 861034 - DNA, 25 bp, Homo sapien
ctgagcggacaggaggcttcgaggg

SEQ ID NO: 861035 - DNA, 25 bp, Homo sapien
gagcggacaggaggcttcgagggga

SEQ ID NO: 861036 - DNA, 25 bp, Homo sapien
ggctgagcggacaggaggcttcgag

SEQ ID NO: 861037 - DNA, 25 bp, Homo sapien
ctcgcgtggcctcgcagggggagcg

SEQ ID NO: 861038 - DNA, 25 bp, Homo sapien
tttccagcaagtctggggcctcttg

SEQ ID NO: 861039 - DNA, 25 bp, Homo sapien
cttgaggctggagcccgtctcccgt

SEQ ID NO: 861040 - DNA, 25 bp, Homo sapien
gtctcccgtctgcagcccggtgcgc

SEQ ID NO: 861041 - DNA, 25 bp, Homo sapien
gccacagttgaactttcaggttctg

SEQ ID NO: 861042 - DNA, 25 bp, Homo sapien
gaggggtgacggctggccacagttg

SEQ ID NO: 861043 - DNA, 25 bp, Homo sapien
agttgaactttcaggttctggcggg

SEQ ID NO: 861044 - DNA, 25 bp, Homo sapien
tgaactttcaggttctggcgggacg

SEQ ID NO: 861045 - DNA, 25 bp, Homo sapien
ggcccactcccaaattgtggttctg

SEQ ID NO: 861046 - DNA, 25 bp, Homo sapien
gcccagcgtttttgctgaccctaaa

SEQ ID NO: 861047 - DNA, 25 bp, Homo sapien
cagcgccaacgcaggaaagaccggg

SEQ ID NO: 861048 - DNA, 25 bp, Homo sapien
ttctgtgatgatacattcagcccag

SEQ ID NO: 861049 - DNA, 25 bp, Homo sapien
tgcggaggccgcgggttagcgggag

SEQ ID NO: 861050 - DNA, 25 bp, Homo sapien
cagttccaggttcacccggctgagc

SEQ ID NO: 861051 - DNA, 25 bp, Homo sapien
tattccgcgcccttttatgaaagcg

SEQ ID NO: 861052 - DNA, 25 bp, Homo sapien
gatgcggggtgcgggggtgacgccc

SEQ ID NO: 861053 - DNA, 25 bp, Homo sapien
tcttgtttcggttggaagtcgcaaa

SEQ ID NO: 861054 - DNA, 25 bp, Homo sapien
cttgtttcggttggaagtcgcaaag

SEQ ID NO: 861055 - DNA, 25 bp, Homo sapien
ctgcacccgttcgatgtagaggaca

SEQ ID NO: 861056 - DNA, 25 bp, Homo sapien
gcacccgttcgatgtagaggacata

SEQ ID NO: 861057 - DNA, 25 bp, Homo sapien
tgtaaacctggactactctgccaat

SEQ ID NO: 861058 - DNA, 25 bp, Homo sapien
aaacctggactactctgccaattgg

SEQ ID NO: 861059 - DNA, 25 bp, Homo sapien
tttctgttcaagaatctttttgcgg

SEQ ID NO: 861060 - DNA, 25 bp, Homo sapien
tgttcaagaatctttttgcggtcta

SEQ ID NO: 861061 - DNA, 25 bp, Homo sapien
ctttctgttcaagaatctttttgcg

SEQ ID NO: 861062 - DNA, 25 bp, Homo sapien
tctgttcaagaatctttttgcggtc

SEQ ID NO: 861063 - DNA, 25 bp, Homo sapien
tcctgcatcttctcaattgtttctt

SEQ ID NO: 861064 - DNA, 25 bp, Homo sapien
attcctgcatcttctcaattgtttc

SEQ ID NO: 861065 - DNA, 25 bp, Homo sapien
ttattcctgcatcttctcaattgtt

SEQ ID NO: 861066 - DNA, 25 bp, Homo sapien
cctgcatcttctcaattgtttcttc

SEQ ID NO: 861067 - DNA, 25 bp, Homo sapien
catgatgacatcattcctgtcaaca

SEQ ID NO: 861068 - DNA, 25 bp, Homo sapien
gaaacactgatgaaaacacttccga

SEQ ID NO: 861069 - DNA, 25 bp, Homo sapien
ctgtggcagacatatcatgatgaca

SEQ ID NO: 861070 - DNA, 25 bp, Homo sapien
caacattaaaatagtagtagagaaa

SEQ ID NO: 861071 - DNA, 25 bp, Homo sapien
tgaccagtgacttgatcagggctgg

SEQ ID NO: 861072 - DNA, 25 bp, Homo sapien
cgtgaccagtgacttgatcagggct

SEQ ID NO: 861073 - DNA, 25 bp, Homo sapien
cagtgacttgatcagggctggcgat

SEQ ID NO: 861074 - DNA, 25 bp, Homo sapien
agaaaatccaggcccgtgaccagtg

SEQ ID NO: 861075 - DNA, 25 bp, Homo sapien
tcggatgtttcctcgctgcacagac

SEQ ID NO: 861076 - DNA, 25 bp, Homo sapien
gagaacttaagtctggtccctcaca

SEQ ID NO: 861077 - DNA, 25 bp, Homo sapien
tgtcgcgagctagaactcttccccg

SEQ ID NO: 861078 - DNA, 25 bp, Homo sapien
ccgcgacgtaggtgttaggataaca

SEQ ID NO: 861079 - DNA, 25 bp, Homo sapien
ctggccgtttgcgtttggatgcagg

SEQ ID NO: 861080 - DNA, 25 bp, Homo sapien
tgcaggcccgggtgagccctgcgtg

SEQ ID NO: 861081 - DNA, 25 bp, Homo sapien
ccgtttgcgtttggatgcaggcccg

SEQ ID NO: 861082 - DNA, 25 bp, Homo sapien
caggcccgggtgagccctgcgtggc

SEQ ID NO: 861083 - DNA, 25 bp, Homo sapien
cgttcccgttccagggtctcgagcg

SEQ ID NO: 861084 - DNA, 25 bp, Homo sapien
ttcgctgcgctgttagtcgagggca

SEQ ID NO: 861085 - DNA, 25 bp, Homo sapien
ccggttgtttccctgcggtggctgt

SEQ ID NO: 861086 - DNA, 25 bp, Homo sapien
tggatccctttgcttctcgttgcgg

SEQ ID NO: 861087 - DNA, 25 bp, Homo sapien
cctcgtgtagtgagggccgagcccc

SEQ ID NO: 861088 - DNA, 25 bp, Homo sapien
gaggctcgcgcagcgggcgtttttg

SEQ ID NO: 861089 - DNA, 25 bp, Homo sapien
ctagacgcaggtgcgttcccgtcga

SEQ ID NO: 861090 - DNA, 25 bp, Homo sapien
gcgccggcttcgctgtagtccgcag

SEQ ID NO: 861091 - DNA, 25 bp, Homo sapien
cccgccccgcgcacggcgtcagcgt

SEQ ID NO: 861092 - DNA, 25 bp, Homo sapien
ccctgtccacaccacactgcgcatg

SEQ ID NO: 861093 - DNA, 25 bp, Homo sapien
actgcgcatgctcgccggcccccgc

SEQ ID NO: 861094 - DNA, 25 bp, Homo sapien
tactgcgcatgctcgccagccccgc

SEQ ID NO: 861095 - DNA, 25 bp, Homo sapien
atactgcgcatgctcgccagccccg

SEQ ID NO: 861096 - DNA, 25 bp, Homo sapien
tgcgcatgctcgccagccccgcccg

SEQ ID NO: 861097 - DNA, 25 bp, Homo sapien
actgcgcatgctcgccagccccgcc

SEQ ID NO: 861098 - DNA, 25 bp, Homo sapien
ctcctccgcgaacaccggaacccag

SEQ ID NO: 861099 - DNA, 25 bp, Homo sapien
tggccgcccaccgttgccgtagcaa

SEQ ID NO: 861100 - DNA, 25 bp, Homo sapien
agcaacgcccgcctccgcgctcgct

SEQ ID NO: 861101 - DNA, 25 bp, Homo sapien
ttccctcaggcaactccctggccgc

SEQ ID NO: 861102 - DNA, 25 bp, Homo sapien
ctcggaggaggcgaaagcgaggccg

SEQ ID NO: 861103 - DNA, 25 bp, Homo sapien
agctgcggccatcgccggcccggct

SEQ ID NO: 861104 - DNA, 25 bp, Homo sapien
ccgaatccatggaccccgcccgcct

SEQ ID NO: 861105 - DNA, 25 bp, Homo sapien
ggacggccctcaccccgaatccatg

SEQ ID NO: 861106 - DNA, 25 bp, Homo sapien
gctgcgcgccgctacgggacccgac

SEQ ID NO: 861107 - DNA, 25 bp, Homo sapien
aaggaggctgcgcgccgctacggga

SEQ ID NO: 861108 - DNA, 25 bp, Homo sapien
ccccgagtcccccaaggaggctgcg

SEQ ID NO: 861109 - DNA, 25 bp, Homo sapien
ccgagtcccccaaggaggctgcgcg

SEQ ID NO: 861110 - DNA, 25 bp, Homo sapien
tgaccgttttctgaggttccactca

SEQ ID NO: 861111 - DNA, 25 bp, Homo sapien
tgaaccccgctgaccgttttctgag

SEQ ID NO: 861112 - DNA, 25 bp, Homo sapien
ccgctgaccgttttctgaggttcca

SEQ ID NO: 861113 - DNA, 25 bp, Homo sapien
tctgaaccccgctgaccgttttctg

SEQ ID NO: 861114 - DNA, 25 bp, Homo sapien
ctacggtatcattaagttttagagt

SEQ ID NO: 861115 - DNA, 25 bp, Homo sapien
tcctacggtatcattaagttttaga

SEQ ID NO: 861116 - DNA, 25 bp, Homo sapien
cctacggtatcattaagttttagag

SEQ ID NO: 861117 - DNA, 25 bp, Homo sapien
ctgtgatgaggagaaatagaaagtt

SEQ ID NO: 861118 - DNA, 25 bp, Homo sapien
aatctaggaactggcacagaaggcc

SEQ ID NO: 861119 - DNA, 25 bp, Homo sapien
ggagtttgcacgtcctccccatgtg

SEQ ID NO: 861120 - DNA, 25 bp, Homo sapien
tgtttccctataacgctgatgagaa

SEQ ID NO: 861121 - DNA, 25 bp, Homo sapien
cttgttattcttgcttcaattccct

SEQ ID NO: 861122 - DNA, 25 bp, Homo sapien
tcttgttattcttgcttcaattccc

SEQ ID NO: 861123 - DNA, 25 bp, Homo sapien
gagacaacctttgaagtatctaaag

SEQ ID NO: 861124 - DNA, 25 bp, Homo sapien
ggattaatgagacaacctttgaagt

SEQ ID NO: 861125 - DNA, 25 bp, Homo sapien
tgccgcaaggattaatgagacaacc

SEQ ID NO: 861126 - DNA, 25 bp, Homo sapien
gcagggttgccgcaaggattaatga

SEQ ID NO: 861127 - DNA, 25 bp, Homo sapien
aggaaaagttgttgcttggctatca

SEQ ID NO: 861128 - DNA, 25 bp, Homo sapien
gaaaagttgttgcttggctatcaca

SEQ ID NO: 861129 - DNA, 25 bp, Homo sapien
aaagttgttgcttggctatcacaaa

SEQ ID NO: 861130 - DNA, 25 bp, Homo sapien
ttgttgcttggctatcacaaattct

SEQ ID NO: 861131 - DNA, 25 bp, Homo sapien
caagttatctttcttagatgagtga

SEQ ID NO: 861132 - DNA, 25 bp, Homo sapien
ttgtaaagcaactgcattgactgcc

SEQ ID NO: 861133 - DNA, 25 bp, Homo sapien
tacttgtgtcttagaatgatctgca

SEQ ID NO: 861134 - DNA, 25 bp, Homo sapien
gatctgcaactgaaagatttcgaag

SEQ ID NO: 861135 - DNA, 25 bp, Homo sapien
cggcggcggtttgggatcaagaaca

SEQ ID NO: 861136 - DNA, 25 bp, Homo sapien
tcaacggcggcggtttgggatcaag

SEQ ID NO: 861137 - DNA, 25 bp, Homo sapien
cggtttgggatcaagaacatattct

SEQ ID NO: 861138 - DNA, 25 bp, Homo sapien
cggcggtttgggatcaagaacatat

SEQ ID NO: 861139 - DNA, 25 bp, Homo sapien
ggtcatactggtttaaagttggctg

SEQ ID NO: 861140 - DNA, 25 bp, Homo sapien
actggtttaaagttggctgtacatc

SEQ ID NO: 861141 - DNA, 25 bp, Homo sapien
cctctggatgttgaccttatttgga

SEQ ID NO: 861142 - DNA, 25 bp, Homo sapien
ctggaacctctggatgttgacctta

SEQ ID NO: 861143 - DNA, 25 bp, Homo sapien
agaacatcgaatcccgtcactgtga

SEQ ID NO: 861144 - DNA, 25 bp, Homo sapien
catgagcttctggtttgagagggcc

SEQ ID NO: 861145 - DNA, 25 bp, Homo sapien
cagggtcagagtcatcaagacgtca

SEQ ID NO: 861146 - DNA, 25 bp, Homo sapien
gaaacattgctatgtggcacgtgac

SEQ ID NO: 861147 - DNA, 25 bp, Homo sapien
gaggcccaatgaggcccaacttctg

SEQ ID NO: 861148 - DNA, 25 bp, Homo sapien
tggaggcccaatgaggcccaacttc

SEQ ID NO: 861149 - DNA, 25 bp, Homo sapien
tggtggaggcccaatgaggcccaac

SEQ ID NO: 861150 - DNA, 25 bp, Homo sapien
ggtggaggcccaatgaggcccaact

SEQ ID NO: 861151 - DNA, 25 bp, Homo sapien
gggcatggttgcacggagtcccctt

SEQ ID NO: 861152 - DNA, 25 bp, Homo sapien
acggagtccccttgcaggagagagc

SEQ ID NO: 861153 - DNA, 25 bp, Homo sapien
tgaggacgaagctcgaattcttctt

SEQ ID NO: 861154 - DNA, 25 bp, Homo sapien
cttgcaggagagagcgctgtttcac

SEQ ID NO: 861155 - DNA, 25 bp, Homo sapien
cagctctgggcctcgtccctaggaa

SEQ ID NO: 861156 - DNA, 25 bp, Homo sapien
cttggaatcttaggctccagctctg

SEQ ID NO: 861157 - DNA, 25 bp, Homo sapien
tctgggcctcgtccctaggaaacag

SEQ ID NO: 861158 - DNA, 25 bp, Homo sapien
aagcttggaatcttaggctccagct

SEQ ID NO: 861159 - DNA, 25 bp, Homo sapien
caaacaaaactatttaatgagggtg

SEQ ID NO: 861160 - DNA, 25 bp, Homo sapien
tctgcacagccgcatggggcctgtt

SEQ ID NO: 861161 - DNA, 25 bp, Homo sapien
ctgactcaaatcacaaaaccactta

SEQ ID NO: 861162 - DNA, 25 bp, Homo sapien
ggcctgttgaacagaaacattcctt

SEQ ID NO: 861163 - DNA, 25 bp, Homo sapien
tgctttcatccttcccgcgctggga

SEQ ID NO: 861164 - DNA, 25 bp, Homo sapien
aagtttcccttagatgcgggcagtg

SEQ ID NO: 861165 - DNA, 25 bp, Homo sapien
tttagcacagcacaagtatatactc

SEQ ID NO: 861166 - DNA, 25 bp, Homo sapien
cagggaaacgctaagtaaataccat

SEQ ID NO: 861167 - DNA, 25 bp, Homo sapien
tacttaagagcgaaacaatgacaaa

SEQ ID NO: 861168 - DNA, 25 bp, Homo sapien
tttgtggaacacatgggagcatgaa

SEQ ID NO: 861169 - DNA, 25 bp, Homo sapien
tgtggaacacatgggagcatgaaag

SEQ ID NO: 861170 - DNA, 25 bp, Homo sapien
gaacacatgggagcatgaaagcagc

SEQ ID NO: 861171 - DNA, 25 bp, Homo sapien
tggaacacatgggagcatgaaagca

SEQ ID NO: 861172 - DNA, 25 bp, Homo sapien
gtgaacttttcaaaagcctgaagac

SEQ ID NO: 861173 - DNA, 25 bp, Homo sapien
ttgtgaacttttcaaaagcctgaag

SEQ ID NO: 861174 - DNA, 25 bp, Homo sapien
tcttatttgtgaacttttcaaaagc

SEQ ID NO: 861175 - DNA, 25 bp, Homo sapien
tatttgtgaacttttcaaaagcctg

SEQ ID NO: 861176 - DNA, 25 bp, Homo sapien
aggcgggccccatcgtgtatcactc

SEQ ID NO: 861177 - DNA, 25 bp, Homo sapien
ccatcgtgtatcactcgggtttgat

SEQ ID NO: 861178 - DNA, 25 bp, Homo sapien
acttgattctgaacaggcgggcccc

SEQ ID NO: 861179 - DNA, 25 bp, Homo sapien
cactcgggtttgatactggttcttt

SEQ ID NO: 861180 - DNA, 25 bp, Homo sapien
gttataagccctgtgctgtacaagg

SEQ ID NO: 861181 - DNA, 25 bp, Homo sapien
tgtcatagcctgatctgtgtctgct

SEQ ID NO: 861182 - DNA, 25 bp, Homo sapien
gactctatgtcaaccaatacttcag

SEQ ID NO: 861183 - DNA, 25 bp, Homo sapien
tgtgtctgcttagcgccaaacgggc

SEQ ID NO: 861184 - DNA, 25 bp, Homo sapien
ttctgtaccactttctaacaacaca

SEQ ID NO: 861185 - DNA, 25 bp, Homo sapien
tctgtgggaggtactgttttcctca

SEQ ID NO: 861186 - DNA, 25 bp, Homo sapien
atctgtgggaggtactgttttcctc

SEQ ID NO: 861187 - DNA, 25 bp, Homo sapien
gtttctgtaccactttctaacaaca

SEQ ID NO: 861188 - DNA, 25 bp, Homo sapien
ttaccacctctgttagccttcctga

SEQ ID NO: 861189 - DNA, 25 bp, Homo sapien
cagcatctcacccatttttaaaaag

SEQ ID NO: 861190 - DNA, 25 bp, Homo sapien
acccgcacggagaccatatctggag

SEQ ID NO: 861191 - DNA, 25 bp, Homo sapien
aagccctcaaagtgaagtaagtctc

SEQ ID NO: 861192 - DNA, 25 bp, Homo sapien
gtgcagcagatgtcttcatttacat

SEQ ID NO: 861193 - DNA, 25 bp, Homo sapien
ttcatttacatatagcccaggagat

SEQ ID NO: 861194 - DNA, 25 bp, Homo sapien
ttcattactatgagatgtgcagcag

SEQ ID NO: 861195 - DNA, 25 bp, Homo sapien
ctattttcattactatgagatgtgc

SEQ ID NO: 861196 - DNA, 25 bp, Homo sapien
tgagaatgaacacccgagacgaatg

SEQ ID NO: 861197 - DNA, 25 bp, Homo sapien
gaacacctgagcactgaacgctgaa

SEQ ID NO: 861198 - DNA, 25 bp, Homo sapien
taaaggaaggatgacgcaatcgtgc

SEQ ID NO: 861199 - DNA, 25 bp, Homo sapien
gcaatcgtgcatggcggtcctttac

SEQ ID NO: 861200 - DNA, 25 bp, Homo sapien
ggcatggacccatataggcacctac

SEQ ID NO: 861201 - DNA, 25 bp, Homo sapien
cagttcagcagataacacggtcact

SEQ ID NO: 861202 - DNA, 25 bp, Homo sapien
catacaggcatacaagcacataggg

SEQ ID NO: 861203 - DNA, 25 bp, Homo sapien
gcaagagttacatgataggatccct

SEQ ID NO: 861204 - DNA, 25 bp, Homo sapien
ctgagttgagaacctgagacccaca

SEQ ID NO: 861205 - DNA, 25 bp, Homo sapien
catgttatgcccagattaaactaga

SEQ ID NO: 861206 - DNA, 25 bp, Homo sapien
taggaaacctatagacaccgatgaa

SEQ ID NO: 861207 - DNA, 25 bp, Homo sapien
cttttctaaaggcatctgaggatga

SEQ ID NO: 861208 - DNA, 25 bp, Homo sapien
gggagctgacgctgacgtaccttta

SEQ ID NO: 861209 - DNA, 25 bp, Homo sapien
tggagaatcagccactgacagagag

SEQ ID NO: 861210 - DNA, 25 bp, Homo sapien
actggagtgcagaatcgagatggct

SEQ ID NO: 861211 - DNA, 25 bp, Homo sapien
gactttgttgaagccccagatttct

SEQ ID NO: 861212 - DNA, 25 bp, Homo sapien
agacttcaatatagctgaaaggatc

SEQ ID NO: 861213 - DNA, 25 bp, Homo sapien
ctgaaaggatctacattgtagcacg

SEQ ID NO: 861214 - DNA, 25 bp, Homo sapien
aaggatctacattgtagcacgacat

SEQ ID NO: 861215 - DNA, 25 bp, Homo sapien
cacaagacttcaatatagctgaaag

SEQ ID NO: 861216 - DNA, 25 bp, Homo sapien
atggaaagcgtgctgctgtggcact

SEQ ID NO: 861217 - DNA, 25 bp, Homo sapien
gaaaagccccgctgacgatggaaag

SEQ ID NO: 861218 - DNA, 25 bp, Homo sapien
taacagagagctcccgtgtagcaag

SEQ ID NO: 861219 - DNA, 25 bp, Homo sapien
ggcttcttgggaagtcagcctacaa

SEQ ID NO: 861220 - DNA, 25 bp, Homo sapien
aggatccgcatggtgaatgacaagt

SEQ ID NO: 861221 - DNA, 25 bp, Homo sapien
tcagctgccatagaacaggcactgt

SEQ ID NO: 861222 - DNA, 25 bp, Homo sapien
gagttggggaattgctcagctgcca

SEQ ID NO: 861223 - DNA, 25 bp, Homo sapien
ctgtgctagcctgatggtctggatg

SEQ ID NO: 861224 - DNA, 25 bp, Homo sapien
tacttggaagcctggtggaagctgc

SEQ ID NO: 861225 - DNA, 25 bp, Homo sapien
tgctgtggagactatgagctgcctt

SEQ ID NO: 861226 - DNA, 25 bp, Homo sapien
caaaaagatcgtgagacagcgcagg

SEQ ID NO: 861227 - DNA, 25 bp, Homo sapien
cacctgtgttttgggattagccgta

SEQ ID NO: 861228 - DNA, 25 bp, Homo sapien
ccagtgtcatctgaggcacgggtag

SEQ ID NO: 861229 - DNA, 25 bp, Homo sapien
cctacactagaaaggtctgagtcat

SEQ ID NO: 861230 - DNA, 25 bp, Homo sapien
tgtgaagagtgtaaagcaaaggaga

SEQ ID NO: 861231 - DNA, 25 bp, Homo sapien
tctgagtcattacagagtggccacc

SEQ ID NO: 861232 - DNA, 25 bp, Homo sapien
cgctctcgagcctgaccatctattt

SEQ ID NO: 861233 - DNA, 25 bp, Homo sapien
gggaagcgctctcgagcctgaccat

SEQ ID NO: 861234 - DNA, 25 bp, Homo sapien
gggcgggtaagctcacacctgagct

SEQ ID NO: 861235 - DNA, 25 bp, Homo sapien
aggttgcagggaagcgctctcgagc

SEQ ID NO: 861236 - DNA, 25 bp, Homo sapien
tcaatgttggtgttgtatgagcaca

SEQ ID NO: 861237 - DNA, 25 bp, Homo sapien
tatgagcacaggatgcggtggctga

SEQ ID NO: 861238 - DNA, 25 bp, Homo sapien
cactgatcgatttctgcaaagagct

SEQ ID NO: 861239 - DNA, 25 bp, Homo sapien
ttatggccaagcactgatcgatttc

SEQ ID NO: 861240 - DNA, 25 bp, Homo sapien
tccaactgctgaagaacacttcgat

SEQ ID NO: 861241 - DNA, 25 bp, Homo sapien
tctgtgatctcatggccacattttt

SEQ ID NO: 861242 - DNA, 25 bp, Homo sapien
cttccaactgctgaagaacacttcg

SEQ ID NO: 861243 - DNA, 25 bp, Homo sapien
ttctgtgatctcatggccacatttt

SEQ ID NO: 861244 - DNA, 25 bp, Homo sapien
tcctcgacctccccccacatgccac

SEQ ID NO: 861245 - DNA, 25 bp, Homo sapien
tccccaaagtgagtcctcgacctcc

SEQ ID NO: 861246 - DNA, 25 bp, Homo sapien
gctccccaaagtgagtcctcgacct

SEQ ID NO: 861247 - DNA, 25 bp, Homo sapien
ggctccccaaagtgagtcctcgacc

SEQ ID NO: 861248 - DNA, 25 bp, Homo sapien
agcaacatccaacaggaacttccag

SEQ ID NO: 861249 - DNA, 25 bp, Homo sapien
gcaacatccaacaggaacttccaga

SEQ ID NO: 861250 - DNA, 25 bp, Homo sapien
caacatccaacaggaacttccagaa

SEQ ID NO: 861251 - DNA, 25 bp, Homo sapien
catgggtcttcgaaacatgcggaag

SEQ ID NO: 861252 - DNA, 25 bp, Homo sapien
cacgcgggttagtttcatcacagca

SEQ ID NO: 861253 - DNA, 25 bp, Homo sapien
tgcgaaccatgtgccccgagacatg

SEQ ID NO: 861254 - DNA, 25 bp, Homo sapien
tacttaaactgaaatgcgaaccatg

SEQ ID NO: 861255 - DNA, 25 bp, Homo sapien
acgcgctgaccgccagcagcggaga

SEQ ID NO: 861256 - DNA, 25 bp, Homo sapien
gcagatggagcactcgtgggtctcc

SEQ ID NO: 861257 - DNA, 25 bp, Homo sapien
actcgtgggtctcccggcgcagagc

SEQ ID NO: 861258 - DNA, 25 bp, Homo sapien
gctgaccgccagcagcggagagagg

SEQ ID NO: 861259 - DNA, 25 bp, Homo sapien
gaacacatgtgagcaggacaggagg

SEQ ID NO: 861260 - DNA, 25 bp, Homo sapien
tagtgccagcagacacgcatggtgg

SEQ ID NO: 861261 - DNA, 25 bp, Homo sapien
gtgccagcagacacgcatggtggaa

SEQ ID NO: 861262 - DNA, 25 bp, Homo sapien
agtgccagcagacacgcatggtgga

SEQ ID NO: 861263 - DNA, 25 bp, Homo sapien
tcttctggtagcaggagcggcagag

SEQ ID NO: 861264 - DNA, 25 bp, Homo sapien
cttctggtagcaggagcggcagaga

SEQ ID NO: 861265 - DNA, 25 bp, Homo sapien
ttcttctggtagcaggagcggcaga

SEQ ID NO: 861266 - DNA, 25 bp, Homo sapien
ggctttaggacagactattagcgga

SEQ ID NO: 861267 - DNA, 25 bp, Homo sapien
caaaacgagtattaggaatggcaaa

SEQ ID NO: 861268 - DNA, 25 bp, Homo sapien
tgtcgttcagacactagctatatct

SEQ ID NO: 861269 - DNA, 25 bp, Homo sapien
ctaccaatagcttatttccctggga

SEQ ID NO: 861270 - DNA, 25 bp, Homo sapien
taacatttggacacactagtaattg

SEQ ID NO: 861271 - DNA, 25 bp, Homo sapien
tgtgaacatagatgcagcaccgact

SEQ ID NO: 861272 - DNA, 25 bp, Homo sapien
gatgcagcaccgactttttaaactt

SEQ ID NO: 861273 - DNA, 25 bp, Homo sapien
tacaaattgttagtctttgtttcta

SEQ ID NO: 861274 - DNA, 25 bp, Homo sapien
tgcagttcctgcacgccagtgaaag

SEQ ID NO: 861275 - DNA, 25 bp, Homo sapien
gaatacggaggccaaacgttctgag

SEQ ID NO: 861276 - DNA, 25 bp, Homo sapien
gtttctgactggatagggatgcacc

SEQ ID NO: 861277 - DNA, 25 bp, Homo sapien
cttccattggagctaggtcggaggc

SEQ ID NO: 861278 - DNA, 25 bp, Homo sapien
taaatgccgagtggtagaaactcct

SEQ ID NO: 861279 - DNA, 25 bp, Homo sapien
tgtgtcaaccatccactaggataga

SEQ ID NO: 861280 - DNA, 25 bp, Homo sapien
gcatatgccatttgaagcctccagc

SEQ ID NO: 861281 - DNA, 25 bp, Homo sapien
taggatagaataccgaaatctgtgc

SEQ ID NO: 861282 - DNA, 25 bp, Homo sapien
agacatatagaacagcgcattcttc

SEQ ID NO: 861283 - DNA, 25 bp, Homo sapien
catatagaacagcgcattcttctgt

SEQ ID NO: 861284 - DNA, 25 bp, Homo sapien
tatagaacagcgcattcttctgtag

SEQ ID NO: 861285 - DNA, 25 bp, Homo sapien
gacatatagaacagcgcattcttct

SEQ ID NO: 861286 - DNA, 25 bp, Homo sapien
tcagaacctagacctatcagtgcca

SEQ ID NO: 861287 - DNA, 25 bp, Homo sapien
gagacccgagaactccagattcacg

SEQ ID NO: 861288 - DNA, 25 bp, Homo sapien
agacggcgtcttctgccaccaagag

SEQ ID NO: 861289 - DNA, 25 bp, Homo sapien
gattcacgacattcctgtcccatgt

SEQ ID NO: 861290 - DNA, 25 bp, Homo sapien
tggtggtaatggacgggattgtttc

SEQ ID NO: 861291 - DNA, 25 bp, Homo sapien
tagaaatttagctgtggtgatggtg

SEQ ID NO: 861292 - DNA, 25 bp, Homo sapien
taatggacgggattgtttctggagt

SEQ ID NO: 861293 - DNA, 25 bp, Homo sapien
gtgatggtggtaatggacgggattg

SEQ ID NO: 861294 - DNA, 25 bp, Homo sapien
tgagattggcagaactgctcatcaa

SEQ ID NO: 861295 - DNA, 25 bp, Homo sapien
cggatttccccggttagatgagatt

SEQ ID NO: 861296 - DNA, 25 bp, Homo sapien
aagttcacggctctccaagaaactg

SEQ ID NO: 861297 - DNA, 25 bp, Homo sapien
tgatttggatttgcggatttccccg

SEQ ID NO: 861298 - DNA, 25 bp, Homo sapien
ttgatcaaagttattggctctgaag

SEQ ID NO: 861299 - DNA, 25 bp, Homo sapien
caaagttattggctctgaagttatt

SEQ ID NO: 861300 - DNA, 25 bp, Homo sapien
gttattggctctgaagttattctta

SEQ ID NO: 861301 - DNA, 25 bp, Homo sapien
ttattggctctgaagttattcttac

SEQ ID NO: 861302 - DNA, 25 bp, Homo sapien
gagtgttagtgaagaggccgaaata

SEQ ID NO: 861303 - DNA, 25 bp, Homo sapien
tttccccttactgttatggccatgg

SEQ ID NO: 861304 - DNA, 25 bp, Homo sapien
gcaggaagaccacgtgcactggagt

SEQ ID NO: 861305 - DNA, 25 bp, Homo sapien
tatggccatggaatatgagtaatca

SEQ ID NO: 861306 - DNA, 25 bp, Homo sapien
ccatgctagagagagccggcgctct

SEQ ID NO: 861307 - DNA, 25 bp, Homo sapien
tcttcagcggcacagtagagggctc

SEQ ID NO: 861308 - DNA, 25 bp, Homo sapien
gattacaatggacagttcttcagcg

SEQ ID NO: 861309 - DNA, 25 bp, Homo sapien
taatgctggattacaatggacagtt

SEQ ID NO: 861310 - DNA, 25 bp, Homo sapien
tcctctcctgttgtaagacgaagga

SEQ ID NO: 861311 - DNA, 25 bp, Homo sapien
taagacgaaggaatgttggtatgac

SEQ ID NO: 861312 - DNA, 25 bp, Homo sapien
taatgagtctgaatggtgctttggc

SEQ ID NO: 861313 - DNA, 25 bp, Homo sapien
tggtatgacaccagggcagtaagcc

SEQ ID NO: 861314 - DNA, 25 bp, Homo sapien
tcagtatatgcaagaatggagttga

SEQ ID NO: 861315 - DNA, 25 bp, Homo sapien
tttagctcagtatatgcaagaatgg

SEQ ID NO: 861316 - DNA, 25 bp, Homo sapien
catcttttagctcagtatatgcaag

SEQ ID NO: 861317 - DNA, 25 bp, Homo sapien
ggtacatcttttagctcagtatatg

SEQ ID NO: 861318 - DNA, 25 bp, Homo sapien
gtgggtaggttggtgcagaaggttg

SEQ ID NO: 861319 - DNA, 25 bp, Homo sapien
ctgtgggtaggttggtgcagaaggt

SEQ ID NO: 861320 - DNA, 25 bp, Homo sapien
tgtgggtaggttggtgcagaaggtt

SEQ ID NO: 861321 - DNA, 25 bp, Homo sapien
atgaagttgatgagctgacatggcc

SEQ ID NO: 861322 - DNA, 25 bp, Homo sapien
ctcttacaccattgaaggagctgtc

SEQ ID NO: 861323 - DNA, 25 bp, Homo sapien
tgacatggcctgatctcttacacca

SEQ ID NO: 861324 - DNA, 25 bp, Homo sapien
cttacaccattgaaggagctgtctt

SEQ ID NO: 861325 - DNA, 25 bp, Homo sapien
ctttcatttctgaagcaaattctac

SEQ ID NO: 861326 - DNA, 25 bp, Homo sapien
ttatctgacaaaaaagactttcatt

SEQ ID NO: 861327 - DNA, 25 bp, Homo sapien
gactttcatttctgaagcaaattct

SEQ ID NO: 861328 - DNA, 25 bp, Homo sapien
tcatttctgaagcaaattctacaca

SEQ ID NO: 861329 - DNA, 25 bp, Homo sapien
acagttcatcttgtgtacatatatt

SEQ ID NO: 861330 - DNA, 25 bp, Homo sapien
tgtccaagacttggaactgggcaaa

SEQ ID NO: 861331 - DNA, 25 bp, Homo sapien
caagacttggaactgggcaaaagag

SEQ ID NO: 861332 - DNA, 25 bp, Homo sapien
aaaaattgtccaagacttggaactg

SEQ ID NO: 861333 - DNA, 25 bp, Homo sapien
gaggaggagtctgactagtctccct

SEQ ID NO: 861334 - DNA, 25 bp, Homo sapien
ctgaggaggagtctgactagtctcc

SEQ ID NO: 861335 - DNA, 25 bp, Homo sapien
gaggagtctgactagtctccctcat

SEQ ID NO: 861336 - DNA, 25 bp, Homo sapien
ggaggagtctgactagtctccctca

SEQ ID NO: 861337 - DNA, 25 bp, Homo sapien
ttccgagtcacgggtggtttctgta

SEQ ID NO: 861338 - DNA, 25 bp, Homo sapien
tggcacagcacgtgcgaggggtttg

SEQ ID NO: 861339 - DNA, 25 bp, Homo sapien
cagcacgtgcgaggggtttgggttt

SEQ ID NO: 861340 - DNA, 25 bp, Homo sapien
ccgagtcacgggtggtttctgtatc

SEQ ID NO: 861341 - DNA, 25 bp, Homo sapien
tacattgaatgacaatagggtgatg

SEQ ID NO: 861342 - DNA, 25 bp, Homo sapien
ctaaaagtacattgaatgacaatag

SEQ ID NO: 861343 - DNA, 25 bp, Homo sapien
aaaagtacattgaatgacaataggg

SEQ ID NO: 861344 - DNA, 25 bp, Homo sapien
agtacattgaatgacaatagggtga

SEQ ID NO: 861345 - DNA, 25 bp, Homo sapien
tcgtagatccgtaatttataaacag

SEQ ID NO: 861346 - DNA, 25 bp, Homo sapien
tcagtgtactcgtagatccgtaatt

SEQ ID NO: 861347 - DNA, 25 bp, Homo sapien
ggtggtaaatcgacttcagtgtact

SEQ ID NO: 861348 - DNA, 25 bp, Homo sapien
tgtgccacctgtggtggtaaatcga

SEQ ID NO: 861349 - DNA, 25 bp, Homo sapien
cttcttccagggctgcgttgccttc

SEQ ID NO: 861350 - DNA, 25 bp, Homo sapien
ccagggctgcgttgccttctttctg

SEQ ID NO: 861351 - DNA, 25 bp, Homo sapien
atcaggactaaagccatgctgcctc

SEQ ID NO: 861352 - DNA, 25 bp, Homo sapien
agcatcaggactaaagccatgctgc

SEQ ID NO: 861353 - DNA, 25 bp, Homo sapien
aggaagagtaatctggtgtatagtc

SEQ ID NO: 861354 - DNA, 25 bp, Homo sapien
cctcaagaaaccagtaggaagagta

SEQ ID NO: 861355 - DNA, 25 bp, Homo sapien
aagagtaatctggtgtatagtcgtc

SEQ ID NO: 861356 - DNA, 25 bp, Homo sapien
catctcctcaagaaaccagtaggaa

SEQ ID NO: 861357 - DNA, 25 bp, Homo sapien
tgagcatgcttcgtattttgtggga

SEQ ID NO: 861358 - DNA, 25 bp, Homo sapien
ccggatacgatgtagataaaaggga

SEQ ID NO: 861359 - DNA, 25 bp, Homo sapien
tttattgagcctatgcctctggtct

SEQ ID NO: 861360 - DNA, 25 bp, Homo sapien
tacaggtttcagagggtataatttc

SEQ ID NO: 861361 - DNA, 25 bp, Homo sapien
agattggtgacattttgccccaccc

SEQ ID NO: 861362 - DNA, 25 bp, Homo sapien
gattggtgacattttgccccaccct

SEQ ID NO: 861363 - DNA, 25 bp, Homo sapien
agagattggtgacattttgccccac

SEQ ID NO: 861364 - DNA, 25 bp, Homo sapien
ataggctgggaggtttaggatgaaa

SEQ ID NO: 861365 - DNA, 25 bp, Homo sapien
ataatgatatggacagtggaatcca

SEQ ID NO: 861366 - DNA, 25 bp, Homo sapien
caaaaatgcagataatgatatggac

SEQ ID NO: 861367 - DNA, 25 bp, Homo sapien
tatggacagtggaatccaggcagag

SEQ ID NO: 861368 - DNA, 25 bp, Homo sapien
tggaaaagtttggatctccctagag

SEQ ID NO: 861369 - DNA, 25 bp, Homo sapien
gctcactgcattacaagtcatcatg

SEQ ID NO: 861370 - DNA, 25 bp, Homo sapien
aattgccagtgctcactgcattaca

SEQ ID NO: 861371 - DNA, 25 bp, Homo sapien
gccagtgctcactgcattacaagtc

SEQ ID NO: 861372 - DNA, 25 bp, Homo sapien
cagtgctcactgcattacaagtcat

SEQ ID NO: 861373 - DNA, 25 bp, Homo sapien
tgtgctctgcgggaggatgcttccc

SEQ ID NO: 861374 - DNA, 25 bp, Homo sapien
ttattcagcctgcatgtgcatgacc

SEQ ID NO: 861375 - DNA, 25 bp, Homo sapien
gattgccaccttgtaggctgtgact

SEQ ID NO: 861376 - DNA, 25 bp, Homo sapien
gcttcccagctatcaggattgccac

SEQ ID NO: 861377 - DNA, 25 bp, Homo sapien
tggctggttgagtctactccatctt

SEQ ID NO: 861378 - DNA, 25 bp, Homo sapien
ccctggctggttgagtctactccat

SEQ ID NO: 861379 - DNA, 25 bp, Homo sapien
cccagtacccctggctggttgagtc

SEQ ID NO: 861380 - DNA, 25 bp, Homo sapien
tacccctggctggttgagtctactc

SEQ ID NO: 861381 - DNA, 25 bp, Homo sapien
tcctgccctcctggcgcctcacgtt

SEQ ID NO: 861382 - DNA, 25 bp, Homo sapien
tgtcccggtcaacacctcctgccct

SEQ ID NO: 861383 - DNA, 25 bp, Homo sapien
gcgcctcacgtttccatccctcttt

SEQ ID NO: 861384 - DNA, 25 bp, Homo sapien
cttgtcccggtcaacacctcctgcc

SEQ ID NO: 861385 - DNA, 25 bp, Homo sapien
cgacggccggtgtcgtggtcgcggt

SEQ ID NO: 861386 - DNA, 25 bp, Homo sapien
gtcgtggtcgcggtacctgttccaa

SEQ ID NO: 861387 - DNA, 25 bp, Homo sapien
tacctgttccaacacggctcgcggg

SEQ ID NO: 861388 - DNA, 25 bp, Homo sapien
tcgcggtacctgttccaacacggct

SEQ ID NO: 861389 - DNA, 25 bp, Homo sapien
tattggttcacacgacctccagtgg

SEQ ID NO: 861390 - DNA, 25 bp, Homo sapien
gacttctgctagttcaagtggcaca

SEQ ID NO: 861391 - DNA, 25 bp, Homo sapien
gatacatgggtaggagtgcaactgc

SEQ ID NO: 861392 - DNA, 25 bp, Homo sapien
caagagcttttctaggatacatggg

SEQ ID NO: 861393 - DNA, 25 bp, Homo sapien
ccctctgggctcagcacgtcttgtt

SEQ ID NO: 861394 - DNA, 25 bp, Homo sapien
tcagcacgtcttgttctcctctttg

SEQ ID NO: 861395 - DNA, 25 bp, Homo sapien
ggctcagcacgtcttgttctcctct

SEQ ID NO: 861396 - DNA, 25 bp, Homo sapien
gttctcctctttgatctcgtgccat

SEQ ID NO: 861397 - DNA, 25 bp, Homo sapien
gcctgggctctcaggaggtaccact

SEQ ID NO: 861398 - DNA, 25 bp, Homo sapien
tcagtggattcactcccaacctgga

SEQ ID NO: 861399 - DNA, 25 bp, Homo sapien
cacttccaatcaaataccaagagga

SEQ ID NO: 861400 - DNA, 25 bp, Homo sapien
catgtgggagtaaccaggaaactct

SEQ ID NO: 861401 - DNA, 25 bp, Homo sapien
cccacaggatgaaccatgagggcgg

SEQ ID NO: 861402 - DNA, 25 bp, Homo sapien
cccccacaggatgaaccatgagggc

SEQ ID NO: 861403 - DNA, 25 bp, Homo sapien
acaggatgaaccatgagggcgggct

SEQ ID NO: 861404 - DNA, 25 bp, Homo sapien
ccacaggatgaaccatgagggcggg

SEQ ID NO: 861405 - DNA, 25 bp, Homo sapien
acggtgcctgcgtccaccacaggcc

SEQ ID NO: 861406 - DNA, 25 bp, Homo sapien
acggtgcctgcgtccaccacctgca

SEQ ID NO: 861407 - DNA, 25 bp, Homo sapien
cggtgcctgcgtccaccacaggcct

SEQ ID NO: 861408 - DNA, 25 bp, Homo sapien
tggtgcctgcgtccaccacaggcct

SEQ ID NO: 861409 - DNA, 25 bp, Homo sapien
tactgacaggtttcaccaggatggt

SEQ ID NO: 861410 - DNA, 25 bp, Homo sapien
ctactgacaggtttcaccaggatgg

SEQ ID NO: 861411 - DNA, 25 bp, Homo sapien
gacaatggaaacctgctgtctttca

SEQ ID NO: 861412 - DNA, 25 bp, Homo sapien
caccttgggttcacttgttagcacg

SEQ ID NO: 861413 - DNA, 25 bp, Homo sapien
tccgttgccaggaaagcgatgcttc

SEQ ID NO: 861414 - DNA, 25 bp, Homo sapien
ccctggtgcaatgtatgattaatct

SEQ ID NO: 861415 - DNA, 25 bp, Homo sapien
cactcccagcgaggtgactcgcagg

SEQ ID NO: 861416 - DNA, 25 bp, Homo sapien
ggtgactcgcaggaacatctttgtc

SEQ ID NO: 861417 - DNA, 25 bp, Homo sapien
ccctgtctcacaccagctcagtgca

SEQ ID NO: 861418 - DNA, 25 bp, Homo sapien
cagcgaggtgactcgcaggaacatc

SEQ ID NO: 861419 - DNA, 25 bp, Homo sapien
gcaaacatgaaccagcgcattgatg

SEQ ID NO: 861420 - DNA, 25 bp, Homo sapien
gcacacactagggtctgaagggcag

SEQ ID NO: 861421 - DNA, 25 bp, Homo sapien
gcatgaggagacctgcgtgagacat

SEQ ID NO: 861422 - DNA, 25 bp, Homo sapien
gaaagctctgccgatccgggagtgt

SEQ ID NO: 861423 - DNA, 25 bp, Homo sapien
tcaggctccgcgagggtgcgttctc

SEQ ID NO: 861424 - DNA, 25 bp, Homo sapien
tgttcccaagctgtcggctgccctc

SEQ ID NO: 861425 - DNA, 25 bp, Homo sapien
cttggtctgacggtgagtctttcag

SEQ ID NO: 861426 - DNA, 25 bp, Homo sapien
cggttgtactgagacgtctgcggac

SEQ ID NO: 861427 - DNA, 25 bp, Homo sapien
taggtgatgagctccccctcttttc

SEQ ID NO: 861428 - DNA, 25 bp, Homo sapien
ccctcttttccgtccaggagctgca

SEQ ID NO: 861429 - DNA, 25 bp, Homo sapien
ctctggtgaggtttgtaggtgatga

SEQ ID NO: 861430 - DNA, 25 bp, Homo sapien
tctgcggtggtccaggctgagtctc

SEQ ID NO: 861431 - DNA, 25 bp, Homo sapien
ccatggaagttgcatcaatgaatga

SEQ ID NO: 861432 - DNA, 25 bp, Homo sapien
tattgcttaaggaccatccatggaa

SEQ ID NO: 861433 - DNA, 25 bp, Homo sapien
tcagtaaaagtggagctgaccatcc

SEQ ID NO: 861434 - DNA, 25 bp, Homo sapien
ggagaggccgtccatcatttagtga

SEQ ID NO: 861435 - DNA, 25 bp, Homo sapien
tgcagccggcgtgctttccgcaggt

SEQ ID NO: 861436 - DNA, 25 bp, Homo sapien
tcctgccggtgaccgctggcttctt

SEQ ID NO: 861437 - DNA, 25 bp, Homo sapien
ggagcctcgccttccgaagtcgcgt

SEQ ID NO: 861438 - DNA, 25 bp, Homo sapien
gaagtcgcgtgcacgaactcctcca

SEQ ID NO: 861439 - DNA, 25 bp, Homo sapien
gtggcggctgcggagggtctggtct

SEQ ID NO: 861440 - DNA, 25 bp, Homo sapien
tctggtctttgcggtggcggccgtg

SEQ ID NO: 861441 - DNA, 25 bp, Homo sapien
gggtctggtctttgcggtggcggcc

SEQ ID NO: 861442 - DNA, 25 bp, Homo sapien
aagcgcccgtttccgggcagcggcg

SEQ ID NO: 861443 - DNA, 25 bp, Homo sapien
cagggctcccagaatatagtcaaga

SEQ ID NO: 861444 - DNA, 25 bp, Homo sapien
gaggcaacgctccagctttcggatc

SEQ ID NO: 861445 - DNA, 25 bp, Homo sapien
tgcgcttgttcaaaccgaggcaacg

SEQ ID NO: 861446 - DNA, 25 bp, Homo sapien
tagtcaagaccgtcgcgtgcaaagc

SEQ ID NO: 861447 - DNA, 25 bp, Homo sapien
cggggagtgtctgtccggcatcttc

SEQ ID NO: 861448 - DNA, 25 bp, Homo sapien
tttcggggagtgtctgtccggcatc

SEQ ID NO: 861449 - DNA, 25 bp, Homo sapien
ttcggggagtgtctgtccggcatct

SEQ ID NO: 861450 - DNA, 25 bp, Homo sapien
tcggggagtgtctgtccggcatctt

SEQ ID NO: 861451 - DNA, 25 bp, Homo sapien
tcctcactttcgtcctgggagtcac

SEQ ID NO: 861452 - DNA, 25 bp, Homo sapien
ctcactttcgtcctgggagtcactc

SEQ ID NO: 861453 - DNA, 25 bp, Homo sapien
tcctcctcactttcgtcctgggagt

SEQ ID NO: 861454 - DNA, 25 bp, Homo sapien
ctcttctgtatcctcgtcgtcgtcc

SEQ ID NO: 861455 - DNA, 25 bp, Homo sapien
gttatgtcaccgtcctccgaggaat

SEQ ID NO: 861456 - DNA, 25 bp, Homo sapien
ttatccgttatgtcaccgtcctccg

SEQ ID NO: 861457 - DNA, 25 bp, Homo sapien
tgtcaccgtcctccgaggaattttc

SEQ ID NO: 861458 - DNA, 25 bp, Homo sapien
cgtcctccgaggaattttcactctt

SEQ ID NO: 861459 - DNA, 25 bp, Homo sapien
gtagaccttttacatgtttcttcag

SEQ ID NO: 861460 - DNA, 25 bp, Homo sapien
agtagaccttttacatgtttcttca

SEQ ID NO: 861461 - DNA, 25 bp, Homo sapien
gccacactgaggcataccctggatt

SEQ ID NO: 861462 - DNA, 25 bp, Homo sapien
taagtctacagaaacatacgtgagg

SEQ ID NO: 861463 - DNA, 25 bp, Homo sapien
tgatatcccataggcagggtccagc

SEQ ID NO: 861464 - DNA, 25 bp, Homo sapien
catatgtacgtggaaggttactcac

SEQ ID NO: 861465 - DNA, 25 bp, Homo sapien
tcctttctgctgtgggccatgtaca

SEQ ID NO: 861466 - DNA, 25 bp, Homo sapien
gaggtcagggtgtcattcatgtcct

SEQ ID NO: 861467 - DNA, 25 bp, Homo sapien
caggcacccatgagagcggaggtca

SEQ ID NO: 861468 - DNA, 25 bp, Homo sapien
ggaagccatgttgggttcactcaac

SEQ ID NO: 861469 - DNA, 25 bp, Homo sapien
caatgagcgcttattgtgggccagc

SEQ ID NO: 861470 - DNA, 25 bp, Homo sapien
gacacaggaagactcggaggcacaa

SEQ ID NO: 861471 - DNA, 25 bp, Homo sapien
tgaccttaacgactggacacaggaa

SEQ ID NO: 861472 - DNA, 25 bp, Homo sapien
tctaagtgacacagaccgtgcgcgt

SEQ ID NO: 861473 - DNA, 25 bp, Homo sapien
ttctcggtacaggactgaaagcagc

SEQ ID NO: 861474 - DNA, 25 bp, Homo sapien
taactaaagtactgtaatgacttcc

SEQ ID NO: 861475 - DNA, 25 bp, Homo sapien
gaatgtttttctcggtacaggactg

SEQ ID NO: 861476 - DNA, 25 bp, Homo sapien
gcagctgacaccatcgtctttaaca

SEQ ID NO: 861477 - DNA, 25 bp, Homo sapien
agaatataagtaaaattcacgttgg

SEQ ID NO: 861478 - DNA, 25 bp, Homo sapien
ggtaaagttattcaagcacatcctg

SEQ ID NO: 861479 - DNA, 25 bp, Homo sapien
taactctgatgtggaaattttaaca

SEQ ID NO: 861480 - DNA, 25 bp, Homo sapien
gcacatcctgtacgttaactctgat

SEQ ID NO: 861481 - DNA, 25 bp, Homo sapien
gggaccagcaggtaaaccagacact

SEQ ID NO: 861482 - DNA, 25 bp, Homo sapien
gaccagcaggtaaaccagacactgc

SEQ ID NO: 861483 - DNA, 25 bp, Homo sapien
ctgatggggaccagcaggtaaacca

SEQ ID NO: 861484 - DNA, 25 bp, Homo sapien
tggggaccagcaggtaaaccagaca

SEQ ID NO: 861485 - DNA, 25 bp, Homo sapien
ggctcagccagtggtttgaggggca

SEQ ID NO: 861486 - DNA, 25 bp, Homo sapien
ctcagccagtggtttgaggggcact

SEQ ID NO: 861487 - DNA, 25 bp, Homo sapien
ttggctcagccagtggtttgagggg

SEQ ID NO: 861488 - DNA, 25 bp, Homo sapien
gccagtggtttgaggggcactgggc

SEQ ID NO: 861489 - DNA, 25 bp, Homo sapien
taaatgggcaatgacggtgaacagg

SEQ ID NO: 861490 - DNA, 25 bp, Homo sapien
tatagatggcatcgaacttcctcac

SEQ ID NO: 861491 - DNA, 25 bp, Homo sapien
tgaggagagactgtaccacgtggaa

SEQ ID NO: 861492 - DNA, 25 bp, Homo sapien
gtctggtcctgaaactcgctgcctg

SEQ ID NO: 861493 - DNA, 25 bp, Homo sapien
acatcgtctctagcataaaccgaat

SEQ ID NO: 861494 - DNA, 25 bp, Homo sapien
cagggccaacatcgtctctagcata

SEQ ID NO: 861495 - DNA, 25 bp, Homo sapien
gggccaacatcgtctctagcataaa

SEQ ID NO: 861496 - DNA, 25 bp, Homo sapien
ccaacatcgtctctagcataaaccg

SEQ ID NO: 861497 - DNA, 25 bp, Homo sapien
gcttctccacgggctcggggtcata

SEQ ID NO: 861498 - DNA, 25 bp, Homo sapien
ccaaaactagcggtaaactcagtgt

SEQ ID NO: 861499 - DNA, 25 bp, Homo sapien
tcactggcaattgggacggttagcc

SEQ ID NO: 861500 - DNA, 25 bp, Homo sapien
gtgtttgagagtccatcaccccaaa

SEQ ID NO: 861501 - DNA, 25 bp, Homo sapien
ggttagcctgtttggaaaaatgcca

SEQ ID NO: 861502 - DNA, 25 bp, Homo sapien
ggagacgcgaagctgcgtctcagaa

SEQ ID NO: 861503 - DNA, 25 bp, Homo sapien
tgcttctgcaggtgcgtatggtgac

SEQ ID NO: 861504 - DNA, 25 bp, Homo sapien
gtctgctccgcactcaagacactgt

SEQ ID NO: 861505 - DNA, 25 bp, Homo sapien
tatggtgactgttgtcgatcatcgg

SEQ ID NO: 861506 - DNA, 25 bp, Homo sapien
catttcagtgaccattcaagaacag

SEQ ID NO: 861507 - DNA, 25 bp, Homo sapien
tttcagtgaccattcaagaacagta

SEQ ID NO: 861508 - DNA, 25 bp, Homo sapien
ataaaccttgtacatttcagtgacc

SEQ ID NO: 861509 - DNA, 25 bp, Homo sapien
taaaccttgtacatttcagtgacca

SEQ ID NO: 861510 - DNA, 25 bp, Homo sapien
tcttcacttgtcattattgtgcaga

SEQ ID NO: 861511 - DNA, 25 bp, Homo sapien
ctgcttccgggcgagttctaggatc

SEQ ID NO: 861512 - DNA, 25 bp, Homo sapien
ccgggcgagttctaggatctttgaa

SEQ ID NO: 861513 - DNA, 25 bp, Homo sapien
ttcatcctctgcttccgggcgagtt

SEQ ID NO: 861514 - DNA, 25 bp, Homo sapien
taggaacatgacgactaacccagag

SEQ ID NO: 861515 - DNA, 25 bp, Homo sapien
gagatgcacgaatccaacagcgtga

SEQ ID NO: 861516 - DNA, 25 bp, Homo sapien
tacaaaggataagctagacccgctg

SEQ ID NO: 861517 - DNA, 25 bp, Homo sapien
ttttcggcaaaacggcaaggccaca

SEQ ID NO: 861518 - DNA, 25 bp, Homo sapien
ggttcctgctatggcgatgacttca

SEQ ID NO: 861519 - DNA, 25 bp, Homo sapien
tgtgcccggctgacaataaactgac

SEQ ID NO: 861520 - DNA, 25 bp, Homo sapien
taaactgactcaatcgtgtgtgccc

SEQ ID NO: 861521 - DNA, 25 bp, Homo sapien
tgtgtgcccttagagctggttcctg

SEQ ID NO: 861522 - DNA, 25 bp, Homo sapien
ctagccaggaaagcatagaagggat

SEQ ID NO: 861523 - DNA, 25 bp, Homo sapien
tattcacagaatttgctagccagga

SEQ ID NO: 861524 - DNA, 25 bp, Homo sapien
tctcctgctgatccttaagtccaag

SEQ ID NO: 861525 - DNA, 25 bp, Homo sapien
gcagcaatccatgagaacgtgaatg

SEQ ID NO: 861526 - DNA, 25 bp, Homo sapien
ctttgcaggtgggttgagccaggta

SEQ ID NO: 861527 - DNA, 25 bp, Homo sapien
aactcctttgcaggtgggttgagcc

SEQ ID NO: 861528 - DNA, 25 bp, Homo sapien
gggaactcctttgcaggtgggttga

SEQ ID NO: 861529 - DNA, 25 bp, Homo sapien
tcctttgcaggtgggttgagccagg

SEQ ID NO: 861530 - DNA, 25 bp, Homo sapien
cactgtgaaccgacgaggtgctcct

SEQ ID NO: 861531 - DNA, 25 bp, Homo sapien
acttccgctcccagtgaaggtggcc

SEQ ID NO: 861532 - DNA, 25 bp, Homo sapien
tcaagacttttagtggtggcctcac

SEQ ID NO: 861533 - DNA, 25 bp, Homo sapien
tcttgcctatagagcatagtcccaa

SEQ ID NO: 861534 - DNA, 25 bp, Homo sapien
aagtcccgaaatttgtcccatatgc

SEQ ID NO: 861535 - DNA, 25 bp, Homo sapien
aaattcgtagctggcaagttttcca

SEQ ID NO: 861536 - DNA, 25 bp, Homo sapien
cccatatgctgaactggaaagtcat

SEQ ID NO: 861537 - DNA, 25 bp, Homo sapien
gatgaaccaaattagagaaattcgt

SEQ ID NO: 861538 - DNA, 25 bp, Homo sapien
agggaaagcgattttgtcttcaaca

SEQ ID NO: 861539 - DNA, 25 bp, Homo sapien
aataaagttacactgatttagccaa

SEQ ID NO: 861540 - DNA, 25 bp, Homo sapien
ctaatggtcaggacatggagaaaaa

SEQ ID NO: 861541 - DNA, 25 bp, Homo sapien
cactgatttagccaactttttcaat

SEQ ID NO: 861542 - DNA, 25 bp, Homo sapien
ccaactttttcaatgatttgtaata

SEQ ID NO: 861543 - DNA, 25 bp, Homo sapien
tctgggtttgtccaattcactgaat

SEQ ID NO: 861544 - DNA, 25 bp, Homo sapien
ttccattaataggatacttaatact

SEQ ID NO: 861545 - DNA, 25 bp, Homo sapien
ccattaataggatacttaatacttt

SEQ ID NO: 861546 - DNA, 25 bp, Homo sapien
gggtttgtccaattcactgaattca

SEQ ID NO: 861547 - DNA, 25 bp, Homo sapien
tataaacacatgtcagggctgagct

SEQ ID NO: 861548 - DNA, 25 bp, Homo sapien
tcaatcctgggtatctcgcatagtg

SEQ ID NO: 861549 - DNA, 25 bp, Homo sapien
ctggaaaggaatcgtataaacacat

SEQ ID NO: 861550 - DNA, 25 bp, Homo sapien
ggcctctcctagatctcaatcctgg

SEQ ID NO: 861551 - DNA, 25 bp, Homo sapien
tgtgcgttctttagcaagaagtggc

SEQ ID NO: 861552 - DNA, 25 bp, Homo sapien
tctcagcacgttggcttcgtcggcg

SEQ ID NO: 861553 - DNA, 25 bp, Homo sapien
tgcagacacttcgttgcaaggtcag

SEQ ID NO: 861554 - DNA, 25 bp, Homo sapien
tgaaaagcttcaaaccctcacgtaa

SEQ ID NO: 861555 - DNA, 25 bp, Homo sapien
caaatctaccgaggcgtgaagcaca

SEQ ID NO: 861556 - DNA, 25 bp, Homo sapien
tataactgcaccctctagtggcctg

SEQ ID NO: 861557 - DNA, 25 bp, Homo sapien
tgaggccagcctgtataacatacgg

SEQ ID NO: 861558 - DNA, 25 bp, Homo sapien
cacaaactgccatagggtcgagcta

SEQ ID NO: 861559 - DNA, 25 bp, Homo sapien
cctaaatcatagagctaagtagcct

SEQ ID NO: 861560 - DNA, 25 bp, Homo sapien
caagaacacacttcacccgcataaa

SEQ ID NO: 861561 - DNA, 25 bp, Homo sapien
tttgaaacaattatacacttacaga

SEQ ID NO: 861562 - DNA, 25 bp, Homo sapien
tcacccgcataaacctctccaagtt

SEQ ID NO: 861563 - DNA, 25 bp, Homo sapien
ggcaacaaacagacagcgagacttt

SEQ ID NO: 861564 - DNA, 25 bp, Homo sapien
ctggcaacaaacagacagcgagact

SEQ ID NO: 861565 - DNA, 25 bp, Homo sapien
caacaaacagacagcgagactttgt

SEQ ID NO: 861566 - DNA, 25 bp, Homo sapien
tggcaacaaacagacagcgagactt

SEQ ID NO: 861567 - DNA, 25 bp, Homo sapien
aatcctagccaaagcaattaggtaa

SEQ ID NO: 861568 - DNA, 25 bp, Homo sapien
tgtgtctctaaacgttaacaacaaa

SEQ ID NO: 861569 - DNA, 25 bp, Homo sapien
aataggaaaggaagacgttctctgt

SEQ ID NO: 861570 - DNA, 25 bp, Homo sapien
gaccgaaaatcaataaatcctagcc

SEQ ID NO: 861571 - DNA, 25 bp, Homo sapien
atccagacagaaaatagacagcagt

SEQ ID NO: 861572 - DNA, 25 bp, Homo sapien
cagaaaatagacagcagtgcaataa

SEQ ID NO: 861573 - DNA, 25 bp, Homo sapien
cagacagaaaatagacagcagtgca

SEQ ID NO: 861574 - DNA, 25 bp, Homo sapien
gacagaaaatagacagcagtgcaat

SEQ ID NO: 861575 - DNA, 25 bp, Homo sapien
aaaagcctagttgttctggaacgtg

SEQ ID NO: 861576 - DNA, 25 bp, Homo sapien
ttatgaataaggctagagggaggac

SEQ ID NO: 861577 - DNA, 25 bp, Homo sapien
caatgccaggacagaaggagctaca

SEQ ID NO: 861578 - DNA, 25 bp, Homo sapien
ggcagcacgcagtaaaacatcataa

SEQ ID NO: 861579 - DNA, 25 bp, Homo sapien
ctcaatctcctagttttaagcactc

SEQ ID NO: 861580 - DNA, 25 bp, Homo sapien
gatctcaatctcctagttttaagca

SEQ ID NO: 861581 - DNA, 25 bp, Homo sapien
tttttgtgtagatgcggggcgggtc

SEQ ID NO: 861582 - DNA, 25 bp, Homo sapien
atctcctagttttaagcactcctcc

SEQ ID NO: 861583 - DNA, 25 bp, Homo sapien
gtctgaggcatctagcgctgcgcct

SEQ ID NO: 861584 - DNA, 25 bp, Homo sapien
gggttcatctaaggtgcccagagcg

SEQ ID NO: 861585 - DNA, 25 bp, Homo sapien
gctgcgcctcgacggttcagacggc

SEQ ID NO: 861586 - DNA, 25 bp, Homo sapien
tttgcacttgtgacccacgggcggt

SEQ ID NO: 861587 - DNA, 25 bp, Homo sapien
actgctaccaaagccggctcctgtg

SEQ ID NO: 861588 - DNA, 25 bp, Homo sapien
ccctgtttaacagggacactcagac

SEQ ID NO: 861589 - DNA, 25 bp, Homo sapien
taccaaagccggctcctgtggagag

SEQ ID NO: 861590 - DNA, 25 bp, Homo sapien
agaggaagcctcctgcgatgggccc

SEQ ID NO: 861591 - DNA, 25 bp, Homo sapien
taaggttcgacctgcagagctttgg

SEQ ID NO: 861592 - DNA, 25 bp, Homo sapien
ccaggttgagcctcggagtatccac

SEQ ID NO: 861593 - DNA, 25 bp, Homo sapien
ctccagggaccaaccaagtccggag

SEQ ID NO: 861594 - DNA, 25 bp, Homo sapien
gaaacaccacggtcttcagtgcgct

SEQ ID NO: 861595 - DNA, 25 bp, Homo sapien
ttgcaagactcacgtagcactgtgg

SEQ ID NO: 861596 - DNA, 25 bp, Homo sapien
ttgttcccgggttgcagagctgccg

SEQ ID NO: 861597 - DNA, 25 bp, Homo sapien
aacacattttccgtggaggctggag

SEQ ID NO: 861598 - DNA, 25 bp, Homo sapien
gttctaaaggagtgcctgggcgccc

SEQ ID NO: 861599 - DNA, 25 bp, Homo sapien
tactctgtgtgtgacggtggcttct

SEQ ID NO: 861600 - DNA, 25 bp, Homo sapien
ccagcccgggacatgaacactgttg

SEQ ID NO: 861601 - DNA, 25 bp, Homo sapien
cactctagtggctcgggaactgtcc

SEQ ID NO: 861602 - DNA, 25 bp, Homo sapien
ggcagattagcttcccaacccagtt

SEQ ID NO: 861603 - DNA, 25 bp, Homo sapien
gaagtttccggacacagttatgtgc

SEQ ID NO: 861604 - DNA, 25 bp, Homo sapien
gggagtccccggttcgcagatatat

SEQ ID NO: 861605 - DNA, 25 bp, Homo sapien
ggccgggccccttaatggagctgat

SEQ ID NO: 861606 - DNA, 25 bp, Homo sapien
cacgagcttgcgaagtcactgagca

SEQ ID NO: 861607 - DNA, 25 bp, Homo sapien
tccatgctgcgggattcattaccat

SEQ ID NO: 861608 - DNA, 25 bp, Homo sapien
ctggaactagacttgggtccaagat

SEQ ID NO: 861609 - DNA, 25 bp, Homo sapien
ccaagataactctggagggttgcca

SEQ ID NO: 861610 - DNA, 25 bp, Homo sapien
tcagatgtgtaatggatttctctcc

SEQ ID NO: 861611 - DNA, 25 bp, Homo sapien
taaggctcaggacgttccctgccat

SEQ ID NO: 861612 - DNA, 25 bp, Homo sapien
tggtaaggctcaggacgttccctgc

SEQ ID NO: 861613 - DNA, 25 bp, Homo sapien
tggcgccgatacttctgctcagagt

SEQ ID NO: 861614 - DNA, 25 bp, Homo sapien
ctgcctggcaggcacgggcctggcg

SEQ ID NO: 861615 - DNA, 25 bp, Homo sapien
gctcctcgtcctggtgaaggccagg

SEQ ID NO: 861616 - DNA, 25 bp, Homo sapien
tatcaacacggtcaggactggaagc

SEQ ID NO: 861617 - DNA, 25 bp, Homo sapien
aagccacggccaaggtgggaacaca

SEQ ID NO: 861618 - DNA, 25 bp, Homo sapien
gagagaggctcctcgtcctggtgaa

SEQ ID NO: 861619 - DNA, 25 bp, Homo sapien
taagcagcggctatagcagcaaagt

SEQ ID NO: 861620 - DNA, 25 bp, Homo sapien
gagcaccgccttgtagttgccggag

SEQ ID NO: 861621 - DNA, 25 bp, Homo sapien
aagccctactgtatgccagcgcgag

SEQ ID NO: 861622 - DNA, 25 bp, Homo sapien
gccgtgggtgcgctcatcgtcaata

SEQ ID NO: 861623 - DNA, 25 bp, Homo sapien
tcagctgcgtccagttttacacagg

SEQ ID NO: 861624 - DNA, 25 bp, Homo sapien
ctgggagggatgtcagctgcgtcca

SEQ ID NO: 861625 - DNA, 25 bp, Homo sapien
tgcgtccagttttacacaggtgtga

SEQ ID NO: 861626 - DNA, 25 bp, Homo sapien
gggatgtcagctgcgtccagtttta

SEQ ID NO: 861627 - DNA, 25 bp, Homo sapien
acgagcctcatgtggcagcccataa

SEQ ID NO: 861628 - DNA, 25 bp, Homo sapien
gcttttcacatcgtcctgagcaggc

SEQ ID NO: 861629 - DNA, 25 bp, Homo sapien
agcaggctacgggtggtgctttcct

SEQ ID NO: 861630 - DNA, 25 bp, Homo sapien
gctttcctgctcagaacgagcctca

SEQ ID NO: 861631 - DNA, 25 bp, Homo sapien
tcaacaaatggctacaactggcctg

SEQ ID NO: 861632 - DNA, 25 bp, Homo sapien
tggttggggaggtctcatattcatg

SEQ ID NO: 861633 - DNA, 25 bp, Homo sapien
acatggttggggaggtctcatattc

SEQ ID NO: 861634 - DNA, 25 bp, Homo sapien
gttggggaggtctcatattcatggc

SEQ ID NO: 861635 - DNA, 25 bp, Homo sapien
ggtctcatattcatggcagagggtg

SEQ ID NO: 861636 - DNA, 25 bp, Homo sapien
ttattcatgtagatctagcttcctt

SEQ ID NO: 861637 - DNA, 25 bp, Homo sapien
catcatcttgaaactgtagggccag

SEQ ID NO: 861638 - DNA, 25 bp, Homo sapien
tcacctgtgtaaagaatggagccgg

SEQ ID NO: 861639 - DNA, 25 bp, Homo sapien
catgtgcccgggaaaaagaaactca

SEQ ID NO: 861640 - DNA, 25 bp, Homo sapien
cacacaggtcatgtggagggatcca

SEQ ID NO: 861641 - DNA, 25 bp, Homo sapien
cacactggagcagcaagtgtccagg

SEQ ID NO: 861642 - DNA, 25 bp, Homo sapien
gtgagcaatgtagatttggacccca

SEQ ID NO: 861643 - DNA, 25 bp, Homo sapien
tgagcaatgtagatttggaccccag

SEQ ID NO: 861644 - DNA, 25 bp, Homo sapien
agtgagcaatgtagatttggacccc

SEQ ID NO: 861645 - DNA, 25 bp, Homo sapien
ctgggaccaccagtgagcaatgtag

SEQ ID NO: 861646 - DNA, 25 bp, Homo sapien
aacccggcgcttgcacctggaactg

SEQ ID NO: 861647 - DNA, 25 bp, Homo sapien
gaactgccgcctcgggagggaagat

SEQ ID NO: 861648 - DNA, 25 bp, Homo sapien
aagatggcggtcagccgtcagtgcg

SEQ ID NO: 861649 - DNA, 25 bp, Homo sapien
cagcgggcagcaaacccggcgcttg

SEQ ID NO: 861650 - DNA, 25 bp, Homo sapien
cggcaatactggaggggcggccctg

SEQ ID NO: 861651 - DNA, 25 bp, Homo sapien
ggcgggaggggcggcaatactggag

SEQ ID NO: 861652 - DNA, 25 bp, Homo sapien
ggcggcaatactggaggggcggccc

SEQ ID NO: 861653 - DNA, 25 bp, Homo sapien
cgggaggggcggcaatactggaggg

SEQ ID NO: 861654 - DNA, 25 bp, Homo sapien
ggctgggaggctctcggcgcccgcc

SEQ ID NO: 861655 - DNA, 25 bp, Homo sapien
gggcgggctgggaggctctcggcgc

SEQ ID NO: 861656 - DNA, 25 bp, Homo sapien
cgggctgggaggctctcggcgcccg

SEQ ID NO: 861657 - DNA, 25 bp, Homo sapien
ggcgggctgggaggctctcggcgcc

SEQ ID NO: 861658 - DNA, 25 bp, Homo sapien
cctggcagcctagcccatgtgcggg

SEQ ID NO: 861659 - DNA, 25 bp, Homo sapien
ctggcagcctagcccatgtgcgggc

SEQ ID NO: 861660 - DNA, 25 bp, Homo sapien
gcgtcttgaagtcgccttcgaagct

SEQ ID NO: 861661 - DNA, 25 bp, Homo sapien
aagggacaccttgggccgcgtcttg

SEQ ID NO: 861662 - DNA, 25 bp, Homo sapien
gctcgcgccgccaagggacaccttg

SEQ ID NO: 861663 - DNA, 25 bp, Homo sapien
accttgggccgcgtcttgaagtcgc

SEQ ID NO: 861664 - DNA, 25 bp, Homo sapien
aagaatatactgcaggacgcggagg

SEQ ID NO: 861665 - DNA, 25 bp, Homo sapien
tatcagtgtgtatcccgatgtcaga

SEQ ID NO: 861666 - DNA, 25 bp, Homo sapien
tgtacttgaaatcagatgaccccgt

SEQ ID NO: 861667 - DNA, 25 bp, Homo sapien
cagttaccaacaggtagcttcccag

SEQ ID NO: 861668 - DNA, 25 bp, Homo sapien
aaaatcattgactcctcttggtcca

SEQ ID NO: 861669 - DNA, 25 bp, Homo sapien
tcaaaatcattgactcctcttggtc

SEQ ID NO: 861670 - DNA, 25 bp, Homo sapien
cttcaaaatcattgactcctcttgg

SEQ ID NO: 861671 - DNA, 25 bp, Homo sapien
aaatcattgactcctcttggtccaa

SEQ ID NO: 861672 - DNA, 25 bp, Homo sapien
tcaagttttccacaattctttcctc

SEQ ID NO: 861673 - DNA, 25 bp, Homo sapien
ccacaattctttcctccacaatcat

SEQ ID NO: 861674 - DNA, 25 bp, Homo sapien
tttccacaattctttcctccacaat

SEQ ID NO: 861675 - DNA, 25 bp, Homo sapien
ttttccacaattctttcctccacaa

SEQ ID NO: 861676 - DNA, 25 bp, Homo sapien
tggagacctttaatcctaattctgt

SEQ ID NO: 861677 - DNA, 25 bp, Homo sapien
ggtagggggagactgtctttatcca

SEQ ID NO: 861678 - DNA, 25 bp, Homo sapien
tttatccattcaccgccaccaactg

SEQ ID NO: 861679 - DNA, 25 bp, Homo sapien
tcaccgccaccaactggtttaggaa

SEQ ID NO: 861680 - DNA, 25 bp, Homo sapien
ttcctgagtacgatgtaaaagagaa

SEQ ID NO: 861681 - DNA, 25 bp, Homo sapien
gagtacgatgtaaaagagaagcctt

SEQ ID NO: 861682 - DNA, 25 bp, Homo sapien
tacgatgtaaaagagaagccttttc

SEQ ID NO: 861683 - DNA, 25 bp, Homo sapien
cctgagtacgatgtaaaagagaagc

SEQ ID NO: 861684 - DNA, 25 bp, Homo sapien
ctctatagcctcgaataaatgactg

SEQ ID NO: 861685 - DNA, 25 bp, Homo sapien
ctatagcctcgaataaatgactgga

SEQ ID NO: 861686 - DNA, 25 bp, Homo sapien
tttctgtctctatagcctcgaataa

SEQ ID NO: 861687 - DNA, 25 bp, Homo sapien
tgtctctatagcctcgaataaatga

SEQ ID NO: 861688 - DNA, 25 bp, Homo sapien
attagcaatgggaaaagcgcccccg

SEQ ID NO: 861689 - DNA, 25 bp, Homo sapien
cacagcgatcaaatgcacttctttg

SEQ ID NO: 861690 - DNA, 25 bp, Homo sapien
gcgcccccggactgtgacaaggtag

SEQ ID NO: 861691 - DNA, 25 bp, Homo sapien
tgtgacaaggtagcacagcgatcaa

SEQ ID NO: 861692 - DNA, 25 bp, Homo sapien
tgtttgtaaaaaaacagaagctgcc

SEQ ID NO: 861693 - DNA, 25 bp, Homo sapien
tgtaaaaaaacagaagctgccttac

SEQ ID NO: 861694 - DNA, 25 bp, Homo sapien
ttgtttgtaaaaaaacagaagctgc

SEQ ID NO: 861695 - DNA, 25 bp, Homo sapien
caaacgttttgagtcttcattttgt

SEQ ID NO: 861696 - DNA, 25 bp, Homo sapien
tatctgaaataagcatgtaagtctc

SEQ ID NO: 861697 - DNA, 25 bp, Homo sapien
cagagagctgtgtttaattaagttc

SEQ ID NO: 861698 - DNA, 25 bp, Homo sapien
taagcatgtaagtctctcagatcca

SEQ ID NO: 861699 - DNA, 25 bp, Homo sapien
gaggctcatcaatctttttatctga

SEQ ID NO: 861700 - DNA, 25 bp, Homo sapien
tgtcatcattacagttttgcagcaa

SEQ ID NO: 861701 - DNA, 25 bp, Homo sapien
ctgtcatcattacagttttgcagca

SEQ ID NO: 861702 - DNA, 25 bp, Homo sapien
gtcatcattacagttttgcagcaac

SEQ ID NO: 861703 - DNA, 25 bp, Homo sapien
tgttcaatcactgacaccacatagc

SEQ ID NO: 861704 - DNA, 25 bp, Homo sapien
tgtgaatcatgtagtgcaaaatttg

SEQ ID NO: 861705 - DNA, 25 bp, Homo sapien
caggcaagtaagtattctcagacga

SEQ ID NO: 861706 - DNA, 25 bp, Homo sapien
aatacttcaagcattctcattggaa

SEQ ID NO: 861707 - DNA, 25 bp, Homo sapien
ggaactcgagataaatcagaatatt

SEQ ID NO: 861708 - DNA, 25 bp, Homo sapien
ccggacaggagttgtaagtaaagtg

SEQ ID NO: 861709 - DNA, 25 bp, Homo sapien
gcaaaatttttgctataggaactcg

SEQ ID NO: 861710 - DNA, 25 bp, Homo sapien
gagttgtaagtaaagtgcaatggtt

SEQ ID NO: 861711 - DNA, 25 bp, Homo sapien
tgtaaaaggtgctgccagaaactcc

SEQ ID NO: 861712 - DNA, 25 bp, Homo sapien
taagggaaaacggtctgcgcatctg

SEQ ID NO: 861713 - DNA, 25 bp, Homo sapien
tgcattcagaaagggctcgtaaggg

SEQ ID NO: 861714 - DNA, 25 bp, Homo sapien
tgcaagcgccggaatgatgaaatga

SEQ ID NO: 861715 - DNA, 25 bp, Homo sapien
caggagagactggtaactgagagag

SEQ ID NO: 861716 - DNA, 25 bp, Homo sapien
gcaggagagactggtaactgagaga

SEQ ID NO: 861717 - DNA, 25 bp, Homo sapien
cacccgcaaatacaccagcagccct

SEQ ID NO: 861718 - DNA, 25 bp, Homo sapien
ggtctgcagcacccgcaaatacacc

SEQ ID NO: 861719 - DNA, 25 bp, Homo sapien
actggctgagtcgtgacagctcgcg

SEQ ID NO: 861720 - DNA, 25 bp, Homo sapien
cagagtcactggctgagtcgtgaca

SEQ ID NO: 861721 - DNA, 25 bp, Homo sapien
cctcagagtcactggctgagtcgtg

SEQ ID NO: 861722 - DNA, 25 bp, Homo sapien
tcactggctgagtcgtgacagctcg

SEQ ID NO: 861723 - DNA, 25 bp, Homo sapien
gtgaagacctcctcgctcgcagagt

SEQ ID NO: 861724 - DNA, 25 bp, Homo sapien
tgctgcaccatcagcgtgtggcaga

SEQ ID NO: 861725 - DNA, 25 bp, Homo sapien
tatgtatgatactgacagtctgcca

SEQ ID NO: 861726 - DNA, 25 bp, Homo sapien
caggcattcctctgttatgtatgat

SEQ ID NO: 861727 - DNA, 25 bp, Homo sapien
cccagggaggaaggtatgttctctg

SEQ ID NO: 861728 - DNA, 25 bp, Homo sapien
aaaagagcagacaaaacttaagagg

SEQ ID NO: 861729 - DNA, 25 bp, Homo sapien
cagacaaaacttaagaggagagcaa

SEQ ID NO: 861730 - DNA, 25 bp, Homo sapien
ttaagaggagagcaattcccaggga

SEQ ID NO: 861731 - DNA, 25 bp, Homo sapien
tatgaaacgcttggacagtagaata

SEQ ID NO: 861732 - DNA, 25 bp, Homo sapien
ttttatgaaacgcttggacagtaga

SEQ ID NO: 861733 - DNA, 25 bp, Homo sapien
tgaaacgcttggacagtagaatatc

SEQ ID NO: 861734 - DNA, 25 bp, Homo sapien
tattttttatgaaacgcttggacag

SEQ ID NO: 861735 - DNA, 25 bp, Homo sapien
cggcatattcagacacgagtgttca

SEQ ID NO: 861736 - DNA, 25 bp, Homo sapien
catgtacgcatctgtctcggaaatc

SEQ ID NO: 861737 - DNA, 25 bp, Homo sapien
gaaaagccggttcttctacatactg

SEQ ID NO: 861738 - DNA, 25 bp, Homo sapien
ttccatgtcagggtacaaaggtctc

SEQ ID NO: 861739 - DNA, 25 bp, Homo sapien
tgctgaagctgacgaaggcaagtct

SEQ ID NO: 861740 - DNA, 25 bp, Homo sapien
gatgtgtctaacaacagctagtgga

SEQ ID NO: 861741 - DNA, 25 bp, Homo sapien
tcagagctaaagagcattcatcccc

SEQ ID NO: 861742 - DNA, 25 bp, Homo sapien
caagtgtactcatatttcccgggaa

SEQ ID NO: 861743 - DNA, 25 bp, Homo sapien
ttacattttctatcatatccaaggg

SEQ ID NO: 861744 - DNA, 25 bp, Homo sapien
ttttctatcatatccaagggttcaa

SEQ ID NO: 861745 - DNA, 25 bp, Homo sapien
tacattttctatcatatccaagggt

SEQ ID NO: 861746 - DNA, 25 bp, Homo sapien
tatcatatccaagggttcaaccttg

SEQ ID NO: 861747 - DNA, 25 bp, Homo sapien
agtaagctccttttgaatgttgtag

SEQ ID NO: 861748 - DNA, 25 bp, Homo sapien
cttccccttctttctcttgcgctta

SEQ ID NO: 861749 - DNA, 25 bp, Homo sapien
agcttccccttctttctcttgcgct

SEQ ID NO: 861750 - DNA, 25 bp, Homo sapien
tccccttctttctcttgcgcttatt

SEQ ID NO: 861751 - DNA, 25 bp, Homo sapien
ctcgacgaaggcagctcattttgtc

SEQ ID NO: 861752 - DNA, 25 bp, Homo sapien
tctcgacgaaggcagctcattttgt

SEQ ID NO: 861753 - DNA, 25 bp, Homo sapien
tccaggagggatgaacagtatttca

SEQ ID NO: 861754 - DNA, 25 bp, Homo sapien
taccagaactaccacaggatggaag

SEQ ID NO: 861755 - DNA, 25 bp, Homo sapien
tagaggaattcttctcaagacaagc

SEQ ID NO: 861756 - DNA, 25 bp, Homo sapien
tcataccaggagtgctaccagaact

SEQ ID NO: 861757 - DNA, 25 bp, Homo sapien
gatgaaagcctgacactgctagaag

SEQ ID NO: 861758 - DNA, 25 bp, Homo sapien
tacagtcttgtcctgaatttgcagc

SEQ ID NO: 861759 - DNA, 25 bp, Homo sapien
caaaaacttggaaggcttacacctg

SEQ ID NO: 861760 - DNA, 25 bp, Homo sapien
ccatgtgggaacagatgatgtgtcg

SEQ ID NO: 861761 - DNA, 25 bp, Homo sapien
gaatctattagatcattcagcccag

SEQ ID NO: 861762 - DNA, 25 bp, Homo sapien
cagtaagagcagaatctcaaacggg

SEQ ID NO: 861763 - DNA, 25 bp, Homo sapien
ggcaataagggtacatcactgaaaa

SEQ ID NO: 861764 - DNA, 25 bp, Homo sapien
gatgtttatcagtcacacgccatga

SEQ ID NO: 861765 - DNA, 25 bp, Homo sapien
gcacctggcctacttaacacgttta

SEQ ID NO: 861766 - DNA, 25 bp, Homo sapien
actgcacctggcctacttaacacgt

SEQ ID NO: 861767 - DNA, 25 bp, Homo sapien
tgcacctggcctacttaacacgttt

SEQ ID NO: 861768 - DNA, 25 bp, Homo sapien
ctgcacctggcctacttaacacgtt

SEQ ID NO: 861769 - DNA, 25 bp, Homo sapien
gatcatccgtgttgacatggaagat

SEQ ID NO: 861770 - DNA, 25 bp, Homo sapien
tgtgatcatccgtgttgacatggaa

SEQ ID NO: 861771 - DNA, 25 bp, Homo sapien
cctgtgatcatccgtgttgacatgg

SEQ ID NO: 861772 - DNA, 25 bp, Homo sapien
tgatcatccgtgttgacatggaaga

SEQ ID NO: 861773 - DNA, 25 bp, Homo sapien
agtactaggctaagtcagtttacca

SEQ ID NO: 861774 - DNA, 25 bp, Homo sapien
cctacctattacatactcagttaaa

SEQ ID NO: 861775 - DNA, 25 bp, Homo sapien
tacactgttctaatgtttgcagcag

SEQ ID NO: 861776 - DNA, 25 bp, Homo sapien
aattcaacaacagagtactaggcta

SEQ ID NO: 861777 - DNA, 25 bp, Homo sapien
gctgtaagtcctagcaatgcaagcc

SEQ ID NO: 861778 - DNA, 25 bp, Homo sapien
tgggaacgcattaatacactgtcag

SEQ ID NO: 861779 - DNA, 25 bp, Homo sapien
tgatgatacttctgcccactaaagc

SEQ ID NO: 861780 - DNA, 25 bp, Homo sapien
tgcaacttcaagatggtcaaaggtg

SEQ ID NO: 861781 - DNA, 25 bp, Homo sapien
ctgcaagctctttctataaagtcca

SEQ ID NO: 861782 - DNA, 25 bp, Homo sapien
tgcaagctctttctataaagtccat

SEQ ID NO: 861783 - DNA, 25 bp, Homo sapien
cagactctgtttcaaagaagtttaa

SEQ ID NO: 861784 - DNA, 25 bp, Homo sapien
ccagactctgtttcaaagaagttta

SEQ ID NO: 861785 - DNA, 25 bp, Homo sapien
tagtgaatgactaaacaaggagcta

SEQ ID NO: 861786 - DNA, 25 bp, Homo sapien
tctatgggatcaccgaagaattcgt

SEQ ID NO: 861787 - DNA, 25 bp, Homo sapien
aaagagtgggatgattcgactagaa

SEQ ID NO: 861788 - DNA, 25 bp, Homo sapien
gatatcacctgaagcaacggtacca

SEQ ID NO: 861789 - DNA, 25 bp, Homo sapien
gaaggcatcgagacaacattatcag

SEQ ID NO: 861790 - DNA, 25 bp, Homo sapien
caggcatgcatctcgaaggcatcga

SEQ ID NO: 861791 - DNA, 25 bp, Homo sapien
gagacaacattatcagctcttctaa

SEQ ID NO: 861792 - DNA, 25 bp, Homo sapien
aagccaacttgatgatccccaggca

SEQ ID NO: 861793 - DNA, 25 bp, Homo sapien
aaagtttgtacatttttcaatgtca

SEQ ID NO: 861794 - DNA, 25 bp, Homo sapien
catttttcaatgtcagtaaacaaaa

SEQ ID NO: 861795 - DNA, 25 bp, Homo sapien
tacatttttcaatgtcagtaaacaa

SEQ ID NO: 861796 - DNA, 25 bp, Homo sapien
tgtacatttttcaatgtcagtaaac

SEQ ID NO: 861797 - DNA, 25 bp, Homo sapien
tcaagtgccagatgacgcagcagct

SEQ ID NO: 861798 - DNA, 25 bp, Homo sapien
ccaggttctgaagtgcaataaatgt

SEQ ID NO: 861799 - DNA, 25 bp, Homo sapien
tccttcactacgtggtgatactgca

SEQ ID NO: 861800 - DNA, 25 bp, Homo sapien
catgacctcgttggaaaacaaccgt

SEQ ID NO: 861801 - DNA, 25 bp, Homo sapien
tcctcgtgtctctggacttcaacat

SEQ ID NO: 861802 - DNA, 25 bp, Homo sapien
ctcctcgtgtctctggacttcaaca

SEQ ID NO: 861803 - DNA, 25 bp, Homo sapien
ctcgtgtctctggacttcaacattt

SEQ ID NO: 861804 - DNA, 25 bp, Homo sapien
acattttcactagattggtgataac

SEQ ID NO: 861805 - DNA, 25 bp, Homo sapien
tattaaaaagatctttcaataacac

SEQ ID NO: 861806 - DNA, 25 bp, Homo sapien
gataaatattaaaaagatctttcaa

SEQ ID NO: 861807 - DNA, 25 bp, Homo sapien
taatgataaatattaaaaagatctt

SEQ ID NO: 861808 - DNA, 25 bp, Homo sapien
atattaaaaagatctttcaataaca

SEQ ID NO: 861809 - DNA, 25 bp, Homo sapien
taagagttagtaataaggtttatca

SEQ ID NO: 861810 - DNA, 25 bp, Homo sapien
cattactatttagtcatatgagtca

SEQ ID NO: 861811 - DNA, 25 bp, Homo sapien
tgatactgctatatgttccattaag

SEQ ID NO: 861812 - DNA, 25 bp, Homo sapien
cattaagaagttggcgtaagagtta

SEQ ID NO: 861813 - DNA, 25 bp, Homo sapien
aaaattaggtataagatctatctct

SEQ ID NO: 861814 - DNA, 25 bp, Homo sapien
aatactagacatatattaatactaa

SEQ ID NO: 861815 - DNA, 25 bp, Homo sapien
ctatctcttttaaatactagacata

SEQ ID NO: 861816 - DNA, 25 bp, Homo sapien
caaaatatttttcaacctcacaaag

SEQ ID NO: 861817 - DNA, 25 bp, Homo sapien
ctaacgtatcatactactgaatctg

SEQ ID NO: 861818 - DNA, 25 bp, Homo sapien
tttactaacgtatcatactactgaa

SEQ ID NO: 861819 - DNA, 25 bp, Homo sapien
tactaacgtatcatactactgaatc

SEQ ID NO: 861820 - DNA, 25 bp, Homo sapien
tttttactaacgtatcatactactg

SEQ ID NO: 861821 - DNA, 25 bp, Homo sapien
tgttagcacccttgcgaactcagag

SEQ ID NO: 861822 - DNA, 25 bp, Homo sapien
ttgctgtgaagcaaccccagcctgg

SEQ ID NO: 861823 - DNA, 25 bp, Homo sapien
tgaccagctagagacaggctcctaa

SEQ ID NO: 861824 - DNA, 25 bp, Homo sapien
cctagacatgcgctgcacctggagt

SEQ ID NO: 861825 - DNA, 25 bp, Homo sapien
ctagattttgctaattgcaccctca

SEQ ID NO: 861826 - DNA, 25 bp, Homo sapien
cagccacccttgcaatttttaatga

SEQ ID NO: 861827 - DNA, 25 bp, Homo sapien
tgtaaaatttcccataatctagatt

SEQ ID NO: 861828 - DNA, 25 bp, Homo sapien
tcaggtgatccacatacttcggtct

SEQ ID NO: 861829 - DNA, 25 bp, Homo sapien
cgccggaacctccacacatgtctgg

SEQ ID NO: 861830 - DNA, 25 bp, Homo sapien
ggatgctggcacatagagctgagtg

SEQ ID NO: 861831 - DNA, 25 bp, Homo sapien
ccgccggaacctccacacatgtctg

SEQ ID NO: 861832 - DNA, 25 bp, Homo sapien
tggatgctggcacatagagctgagt

SEQ ID NO: 861833 - DNA, 25 bp, Homo sapien
tggactgcagcgggcctatcctccc

SEQ ID NO: 861834 - DNA, 25 bp, Homo sapien
gtggactgcagcgggcctatcctcc

SEQ ID NO: 861835 - DNA, 25 bp, Homo sapien
ggtggactgcagcgggcctatcctc

SEQ ID NO: 861836 - DNA, 25 bp, Homo sapien
gactgcagcgggcctatcctcccca

SEQ ID NO: 861837 - DNA, 25 bp, Homo sapien
ctcagtaaccctgtgtcctagagaa

SEQ ID NO: 861838 - DNA, 25 bp, Homo sapien
cagtaaccctgtgtcctagagaact

SEQ ID NO: 861839 - DNA, 25 bp, Homo sapien
gtaaccctgtgtcctagagaactca

SEQ ID NO: 861840 - DNA, 25 bp, Homo sapien
taaccctgtgtcctagagaactcac

SEQ ID NO: 861841 - DNA, 25 bp, Homo sapien
caactactttggaagctacggcagg

SEQ ID NO: 861842 - DNA, 25 bp, Homo sapien
cacactggaatactgctgagcaaca

SEQ ID NO: 861843 - DNA, 25 bp, Homo sapien
tgcagcgtgctgaccaaaaggagcc

SEQ ID NO: 861844 - DNA, 25 bp, Homo sapien
tctgaatgcaaagccgtgcagccac

SEQ ID NO: 861845 - DNA, 25 bp, Homo sapien
ttgtactttcccctgcattcccact

SEQ ID NO: 861846 - DNA, 25 bp, Homo sapien
tactttcccctgcattcccactgac

SEQ ID NO: 861847 - DNA, 25 bp, Homo sapien
tcacttgtactttcccctgcattcc

SEQ ID NO: 861848 - DNA, 25 bp, Homo sapien
cacttgtactttcccctgcattccc

SEQ ID NO: 861849 - DNA, 25 bp, Homo sapien
cgttcctcaaatggaaccacaaaag

SEQ ID NO: 861850 - DNA, 25 bp, Homo sapien
caaaaggcaactctgtcaggacagc

SEQ ID NO: 861851 - DNA, 25 bp, Homo sapien
ctcagacacagacagcggcggggac

SEQ ID NO: 861852 - DNA, 25 bp, Homo sapien
ctgtcaggacagcaagctgtctttc

SEQ ID NO: 861853 - DNA, 25 bp, Homo sapien
tgctaatagtcaaggtatcaaatct

SEQ ID NO: 861854 - DNA, 25 bp, Homo sapien
gaaagctgtaaggttattagaaaca

SEQ ID NO: 861855 - DNA, 25 bp, Homo sapien
acaaggaaagctgtaaggttattag

SEQ ID NO: 861856 - DNA, 25 bp, Homo sapien
gaaataaatgctaatagtcaaggta

SEQ ID NO: 861857 - DNA, 25 bp, Homo sapien
cttatctgcataaatcaacctctga

SEQ ID NO: 861858 - DNA, 25 bp, Homo sapien
tgtcataagcatcttcataaatgta

SEQ ID NO: 861859 - DNA, 25 bp, Homo sapien
ttattgtgacattaattccatccag

SEQ ID NO: 861860 - DNA, 25 bp, Homo sapien
cttcttattgtgacattaattccat

SEQ ID NO: 861861 - DNA, 25 bp, Homo sapien
cattatggaacaagatgatggacac

SEQ ID NO: 861862 - DNA, 25 bp, Homo sapien
ttctaaaacaattccctagcctcca

SEQ ID NO: 861863 - DNA, 25 bp, Homo sapien
gcagggacaacaggggcacgctaac

SEQ ID NO: 861864 - DNA, 25 bp, Homo sapien
cgctaacacatccagataagctcac

SEQ ID NO: 861865 - DNA, 25 bp, Homo sapien
cattagtagtcttaaagaacccctg

SEQ ID NO: 861866 - DNA, 25 bp, Homo sapien
cggatccgctttttcaaatcaggct

SEQ ID NO: 861867 - DNA, 25 bp, Homo sapien
aaaataccaccaccatcaatgccag

SEQ ID NO: 861868 - DNA, 25 bp, Homo sapien
ttgagcaagtgcacacggatccgct

SEQ ID NO: 861869 - DNA, 25 bp, Homo sapien
gcctaggaagtagtaatgtctggca

SEQ ID NO: 861870 - DNA, 25 bp, Homo sapien
gaagtagtaatgtctggcaaaagaa

SEQ ID NO: 861871 - DNA, 25 bp, Homo sapien
gtagtaatgtctggcaaaagaatct

SEQ ID NO: 861872 - DNA, 25 bp, Homo sapien
gcattctgcctaggaagtagtaatg

SEQ ID NO: 861873 - DNA, 25 bp, Homo sapien
ttacactggatcagggaagacccca

SEQ ID NO: 861874 - DNA, 25 bp, Homo sapien
gcaatgttggacagagacactcagg

SEQ ID NO: 861875 - DNA, 25 bp, Homo sapien
ttaagaatgcgaataacaggccagg

SEQ ID NO: 861876 - DNA, 25 bp, Homo sapien
gcttctcaaaacaggcgactccatg

SEQ ID NO: 861877 - DNA, 25 bp, Homo sapien
gacacttacttagatccgagcaatg

SEQ ID NO: 861878 - DNA, 25 bp, Homo sapien
ttatccctgcttaacaaggctgcgg

SEQ ID NO: 861879 - DNA, 25 bp, Homo sapien
aatcaagaccatactgcataagggc

SEQ ID NO: 861880 - DNA, 25 bp, Homo sapien
cccagagtgttacgtgtacggtcaa

SEQ ID NO: 861881 - DNA, 25 bp, Homo sapien
tcctccaagtggcattaccggtaac

SEQ ID NO: 861882 - DNA, 25 bp, Homo sapien
ttttgcacccttgaaccaccgggca

SEQ ID NO: 861883 - DNA, 25 bp, Homo sapien
ttcaatctcatgcactgggcttgcg

SEQ ID NO: 861884 - DNA, 25 bp, Homo sapien
taccggtaactaagcccctctgatc

SEQ ID NO: 861885 - DNA, 25 bp, Homo sapien
gctcagtctcaaggtaccccacata

SEQ ID NO: 861886 - DNA, 25 bp, Homo sapien
tcatagtggcttccagcgatcgagc

SEQ ID NO: 861887 - DNA, 25 bp, Homo sapien
caatgatgccttcgatgataacaga

SEQ ID NO: 861888 - DNA, 25 bp, Homo sapien
ggaccgtggaggacacgtgcacatc

SEQ ID NO: 861889 - DNA, 25 bp, Homo sapien
tgagaccctggcactccataaagac

SEQ ID NO: 861890 - DNA, 25 bp, Homo sapien
ccagcatgcagagctgccgaggcct

SEQ ID NO: 861891 - DNA, 25 bp, Homo sapien
tccaactcggctttcacttcggaag

SEQ ID NO: 861892 - DNA, 25 bp, Homo sapien
gaaagcctgcagagattgcccttct

SEQ ID NO: 861893 - DNA, 25 bp, Homo sapien
ccaaggtggctacggcaaatgatca

SEQ ID NO: 861894 - DNA, 25 bp, Homo sapien
tattaaacccaatcctaagagagca

SEQ ID NO: 861895 - DNA, 25 bp, Homo sapien
gaccacctaggagcgaaatcgtgga

SEQ ID NO: 861896 - DNA, 25 bp, Homo sapien
caaatgatcacacactgcgagactg

SEQ ID NO: 861897 - DNA, 25 bp, Homo sapien
gagcaaattcttatacacctcaggg

SEQ ID NO: 861898 - DNA, 25 bp, Homo sapien
tggtgaatgtccacgtcggcactgg

SEQ ID NO: 861899 - DNA, 25 bp, Homo sapien
catcgtcttcgtagctcttcagaaa

SEQ ID NO: 861900 - DNA, 25 bp, Homo sapien
tgcgcctctcccaggtcattgttca

SEQ ID NO: 861901 - DNA, 25 bp, Homo sapien
gagatgctgctacttgctatacagg

SEQ ID NO: 861902 - DNA, 25 bp, Homo sapien
taaaatgtgcggaagtcaaacgctg

SEQ ID NO: 861903 - DNA, 25 bp, Homo sapien
taaccagatgggtaatgaacacacc

SEQ ID NO: 861904 - DNA, 25 bp, Homo sapien
aaatggacttccacacacaaggaga

SEQ ID NO: 861905 - DNA, 25 bp, Homo sapien
gaaccgagatgccatcactagactc

SEQ ID NO: 861906 - DNA, 25 bp, Homo sapien
caaaaacctgaaatggtccaatcag

SEQ ID NO: 861907 - DNA, 25 bp, Homo sapien
tagacagaacagtgtatgagctccc

SEQ ID NO: 861908 - DNA, 25 bp, Homo sapien
tctgagtgaaatacttgggccagaa

SEQ ID NO: 861909 - DNA, 25 bp, Homo sapien
ccaaggtgtcgtgactcaagtccaa

SEQ ID NO: 861910 - DNA, 25 bp, Homo sapien
cactcacacccgtctgagatgagga

SEQ ID NO: 861911 - DNA, 25 bp, Homo sapien
taaaattctctctcaggctaagcct

SEQ ID NO: 861912 - DNA, 25 bp, Homo sapien
tggaatccataaagccccacaagac

SEQ ID NO: 861913 - DNA, 25 bp, Homo sapien
tgaacgttcaacttaccagatctgc

SEQ ID NO: 861914 - DNA, 25 bp, Homo sapien
tcacaaatgtgctagagagcctgac

SEQ ID NO: 861915 - DNA, 25 bp, Homo sapien
taatattcccagagtaacagacaag

SEQ ID NO: 861916 - DNA, 25 bp, Homo sapien
tacagctgatggttataggagactc

SEQ ID NO: 861917 - DNA, 25 bp, Homo sapien
aaaatcctcaaagtatgataatagg

SEQ ID NO: 861918 - DNA, 25 bp, Homo sapien
tacaaaacgtaaggatctcaaaatc

SEQ ID NO: 861919 - DNA, 25 bp, Homo sapien
tgtgaacaagaatctaaatacgaaa

SEQ ID NO: 861920 - DNA, 25 bp, Homo sapien
taggacttgatgctttgtgaacaag

SEQ ID NO: 861921 - DNA, 25 bp, Homo sapien
tacgcaatccggttggcgctggtga

SEQ ID NO: 861922 - DNA, 25 bp, Homo sapien
tcgaggctgacgacattggcaaggc

SEQ ID NO: 861923 - DNA, 25 bp, Homo sapien
gttcagcctgtagtctgccaccaag

SEQ ID NO: 861924 - DNA, 25 bp, Homo sapien
tcaaacattcggagccactcgaggc

SEQ ID NO: 861925 - DNA, 25 bp, Homo sapien
tgtcccagaaagtcagcaggtaggg

SEQ ID NO: 861926 - DNA, 25 bp, Homo sapien
gtgacaagcgtgtcccagaaagtca

SEQ ID NO: 861927 - DNA, 25 bp, Homo sapien
tttcctgtgacaagcgtgtcccaga

SEQ ID NO: 861928 - DNA, 25 bp, Homo sapien
aagcctgttcatttcctgtgacaag

SEQ ID NO: 861929 - DNA, 25 bp, Homo sapien
gcttatgggaacttgtgcaccagaa

SEQ ID NO: 861930 - DNA, 25 bp, Homo sapien
aggtcctctaggcttatgggaactt

SEQ ID NO: 861931 - DNA, 25 bp, Homo sapien
ctaggcttatgggaacttgtgcacc

SEQ ID NO: 861932 - DNA, 25 bp, Homo sapien
gaacttgtgcaccagaaattaatac

SEQ ID NO: 861933 - DNA, 25 bp, Homo sapien
cagaaacaataactagcagtgataa

SEQ ID NO: 861934 - DNA, 25 bp, Homo sapien
gaaacaataactagcagtgataaca

SEQ ID NO: 861935 - DNA, 25 bp, Homo sapien
acaataactagcagtgataacatac

SEQ ID NO: 861936 - DNA, 25 bp, Homo sapien
tcagaaacaataactagcagtgata

SEQ ID NO: 861937 - DNA, 25 bp, Homo sapien
gggtcgagagcagcttgttacaaac

SEQ ID NO: 861938 - DNA, 25 bp, Homo sapien
agtgaacccttccacaactctccag

SEQ ID NO: 861939 - DNA, 25 bp, Homo sapien
cagcttgttacaaacttcagcagtt

SEQ ID NO: 861940 - DNA, 25 bp, Homo sapien
acaggatggtctgcagaatagcctc

SEQ ID NO: 861941 - DNA, 25 bp, Homo sapien
ccaaatgtacggtttgttcacaggc

SEQ ID NO: 861942 - DNA, 25 bp, Homo sapien
taaccctactgaatgttctgctgcc

SEQ ID NO: 861943 - DNA, 25 bp, Homo sapien
ccacaatgtgtaactatcatatgac

SEQ ID NO: 861944 - DNA, 25 bp, Homo sapien
tatgactaggttattgtgaacaaac

SEQ ID NO: 861945 - DNA, 25 bp, Homo sapien
aatgcaacgtgtggtcctggatcag

SEQ ID NO: 861946 - DNA, 25 bp, Homo sapien
cacaatccggttttgggtcgctcca

SEQ ID NO: 861947 - DNA, 25 bp, Homo sapien
cctgaagagctggtcacaacgtgac

SEQ ID NO: 861948 - DNA, 25 bp, Homo sapien
caaatttacagagttccgcagcgac

SEQ ID NO: 861949 - DNA, 25 bp, Homo sapien
cacatgggtcatgcttcaaactctg

SEQ ID NO: 861950 - DNA, 25 bp, Homo sapien
tggacgtgccactaaacccttctgg

SEQ ID NO: 861951 - DNA, 25 bp, Homo sapien
taccgataaaaagtcgtctgcacgc

SEQ ID NO: 861952 - DNA, 25 bp, Homo sapien
atttcttcacacacgaacctggacg

SEQ ID NO: 861953 - DNA, 25 bp, Homo sapien
gcattctgagtacatgagggcaata

SEQ ID NO: 861954 - DNA, 25 bp, Homo sapien
tgaatttcctacttggagacttaaa

SEQ ID NO: 861955 - DNA, 25 bp, Homo sapien
cactgaaatctgagtcaagggcacc

SEQ ID NO: 861956 - DNA, 25 bp, Homo sapien
tcataacgctaattgaatttcctac

SEQ ID NO: 861957 - DNA, 25 bp, Homo sapien
gctgattttccgggaaaaggctaga

SEQ ID NO: 861958 - DNA, 25 bp, Homo sapien
cataggtgcagatgtaagaggatgc

SEQ ID NO: 861959 - DNA, 25 bp, Homo sapien
gatataaagagatgtgagcattctg

SEQ ID NO: 861960 - DNA, 25 bp, Homo sapien
gaaaaggctagaactacgaagaagc

SEQ ID NO: 861961 - DNA, 25 bp, Homo sapien
ttaggacacgaagcatagcggctac

SEQ ID NO: 861962 - DNA, 25 bp, Homo sapien
tggtgttaggacacgaagcatagcg

SEQ ID NO: 861963 - DNA, 25 bp, Homo sapien
aaggtggtgttaggacacgaagcat

SEQ ID NO: 861964 - DNA, 25 bp, Homo sapien
gcctgggaaggtggcgttaggacag

SEQ ID NO: 861965 - DNA, 25 bp, Homo sapien
tgcttaacaggccgaacatgttggc

SEQ ID NO: 861966 - DNA, 25 bp, Homo sapien
ctctgtgcttaacaggccgaacatg

SEQ ID NO: 861967 - DNA, 25 bp, Homo sapien
cttaacaggccgaacatgttggctc

SEQ ID NO: 861968 - DNA, 25 bp, Homo sapien
ctgtgcttaacaggccgaacatgtt

SEQ ID NO: 861969 - DNA, 25 bp, Homo sapien
gtgtgtgtgtgtaacaggccaagca

SEQ ID NO: 861970 - DNA, 25 bp, Homo sapien
tgtgtgtgtgtgtaacaggccaagc

SEQ ID NO: 861971 - DNA, 25 bp, Homo sapien
tgtgtgtgtgtaacaggccaagcat

SEQ ID NO: 861972 - DNA, 25 bp, Homo sapien
cgtgtacacgaaactctctgagagg

SEQ ID NO: 861973 - DNA, 25 bp, Homo sapien
taaaaattacgtgaccaggagcagt

SEQ ID NO: 861974 - DNA, 25 bp, Homo sapien
gacttaatgcatgagacctatgggc

SEQ ID NO: 861975 - DNA, 25 bp, Homo sapien
gaggttcacagcatcacaacgaagg

SEQ ID NO: 861976 - DNA, 25 bp, Homo sapien
ctggttttcacagttgtgcaaatgt

SEQ ID NO: 861977 - DNA, 25 bp, Homo sapien
ggttttcacagttgtgcaaatgtat

SEQ ID NO: 861978 - DNA, 25 bp, Homo sapien
tggttttcacagttgtgcaaatgta

SEQ ID NO: 861979 - DNA, 25 bp, Homo sapien
tgagacggtgagcacattggacaca

SEQ ID NO: 861980 - DNA, 25 bp, Homo sapien
tggacacagtattccgtgccgtgct

SEQ ID NO: 861981 - DNA, 25 bp, Homo sapien
cgaaattgagggaggtagaacatct

SEQ ID NO: 861982 - DNA, 25 bp, Homo sapien
tatggtgttccatgcacacgcgcgg

SEQ ID NO: 861983 - DNA, 25 bp, Homo sapien
ctgaaaaacagcatgtgtgcaagat

SEQ ID NO: 861984 - DNA, 25 bp, Homo sapien
aaaacagcatgtgtgcaagatgtca

SEQ ID NO: 861985 - DNA, 25 bp, Homo sapien
tgaaaaacagcatgtgtgcaagatg

SEQ ID NO: 861986 - DNA, 25 bp, Homo sapien
aaaaacagcatgtgtgcaagatgtc

SEQ ID NO: 861987 - DNA, 25 bp, Homo sapien
tcaatcgcatagagaagtttacttc

SEQ ID NO: 861988 - DNA, 25 bp, Homo sapien
ggagccgctcaaggtcggagcctcc

SEQ ID NO: 861989 - DNA, 25 bp, Homo sapien
aaagtgtctcgtcatagaactcggg

SEQ ID NO: 861990 - DNA, 25 bp, Homo sapien
tgtgaatacaaaatgcgggatacaa

SEQ ID NO: 861991 - DNA, 25 bp, Homo sapien
cagctcagctcaaagccagcggcac

SEQ ID NO: 861992 - DNA, 25 bp, Homo sapien
tcagctcagctcaaagccagcggca

SEQ ID NO: 861993 - DNA, 25 bp, Homo sapien
cctgtctgaaccctggagtggcgct

SEQ ID NO: 861994 - DNA, 25 bp, Homo sapien
tgttgcagtagcttggcagaccctc

SEQ ID NO: 861995 - DNA, 25 bp, Homo sapien
tatctccaaaccatcatgaggcagg

SEQ ID NO: 861996 - DNA, 25 bp, Homo sapien
tgaggcaggccacggtatactgaaa

SEQ ID NO: 861997 - DNA, 25 bp, Homo sapien
gcacggctagcatcgggacaaagat

SEQ ID NO: 861998 - DNA, 25 bp, Homo sapien
ggactgtcccgtcttcgagtcagag

SEQ ID NO: 861999 - DNA, 25 bp, Homo sapien
ggtcctgataaagtgcctactgcaa

SEQ ID NO: 862000 - DNA, 25 bp, Homo sapien
gagcctccagtgacagtaaaatacg

SEQ ID NO: 862001 - DNA, 25 bp, Homo sapien
taagctcagaatagctgagaaaaaa

SEQ ID NO: 862002 - DNA, 25 bp, Homo sapien
caaattaactaataagatatagaac

SEQ ID NO: 862003 - DNA, 25 bp, Homo sapien
aatgtttagccattagaacatacaa

SEQ ID NO: 862004 - DNA, 25 bp, Homo sapien
cttcagtctcagatatgctatttcc

SEQ ID NO: 862005 - DNA, 25 bp, Homo sapien
tcaacggcagggatacatagagtgt

SEQ ID NO: 862006 - DNA, 25 bp, Homo sapien
cactggaggcctgcatgtcaacggc

SEQ ID NO: 862007 - DNA, 25 bp, Homo sapien
taaagctgccttaacgagctcagga

SEQ ID NO: 862008 - DNA, 25 bp, Homo sapien
catagagtgtagactgcaggctcac

SEQ ID NO: 862009 - DNA, 25 bp, Homo sapien
tttactgggcgagcggacgaatacg

SEQ ID NO: 862010 - DNA, 25 bp, Homo sapien
cacgggtgacccaggtatacagcca

SEQ ID NO: 862011 - DNA, 25 bp, Homo sapien
cgaatacggaaatgaagtgggcctc

SEQ ID NO: 862012 - DNA, 25 bp, Homo sapien
cgcatactgtccgtgtgtccgaggg

SEQ ID NO: 862013 - DNA, 25 bp, Homo sapien
tgattcagagaattgacgacgtgca

SEQ ID NO: 862014 - DNA, 25 bp, Homo sapien
ttcagagaattgacgacgtgcacct

SEQ ID NO: 862015 - DNA, 25 bp, Homo sapien
gattcagagaattgacgacgtgcac

SEQ ID NO: 862016 - DNA, 25 bp, Homo sapien
ttctgattcagagaattgacgacgt

SEQ ID NO: 862017 - DNA, 25 bp, Homo sapien
cgcccacagtcgagggtgccctgca

SEQ ID NO: 862018 - DNA, 25 bp, Homo sapien
gccatgccgcccacagtcgagggtg

SEQ ID NO: 862019 - DNA, 25 bp, Homo sapien
cacagtcgagggtgccctgcaggcc

SEQ ID NO: 862020 - DNA, 25 bp, Homo sapien
agccatgccgcccacagtcgagggt

SEQ ID NO: 862021 - DNA, 25 bp, Homo sapien
gcacttattgttgggccagaaggag

SEQ ID NO: 862022 - DNA, 25 bp, Homo sapien
ccagacgcgcggaaggcacagagaa

SEQ ID NO: 862023 - DNA, 25 bp, Homo sapien
gagcccattctggaaaccgcgaagt

SEQ ID NO: 862024 - DNA, 25 bp, Homo sapien
cagagaaggccgagaagattccaaa

SEQ ID NO: 862025 - DNA, 25 bp, Homo sapien
gcgaaggttctcggctcttccgccg

SEQ ID NO: 862026 - DNA, 25 bp, Homo sapien
tcgcgaaggttctcggctcttccgc

SEQ ID NO: 862027 - DNA, 25 bp, Homo sapien
gaaggttctcggctcttccgccgcc

SEQ ID NO: 862028 - DNA, 25 bp, Homo sapien
cttcgcgaaggttctcggctcttcc

SEQ ID NO: 862029 - DNA, 25 bp, Homo sapien
caggaaatgcgtcacgcggcggcgg

SEQ ID NO: 862030 - DNA, 25 bp, Homo sapien
ccgaccctgacgccgcgcatgcgca

SEQ ID NO: 862031 - DNA, 25 bp, Homo sapien
cggcacggcggcgtcaacttccgcc

SEQ ID NO: 862032 - DNA, 25 bp, Homo sapien
gtttccactgcccataccgcgggcc

SEQ ID NO: 862033 - DNA, 25 bp, Homo sapien
ggctcctcgcgctttcctttctctc

SEQ ID NO: 862034 - DNA, 25 bp, Homo sapien
ctccaggactgctgcgctggtggtg

SEQ ID NO: 862035 - DNA, 25 bp, Homo sapien
tcacagctccaggactgctgcgctg

SEQ ID NO: 862036 - DNA, 25 bp, Homo sapien
ggcggctcctcgcgctttcctttct

SEQ ID NO: 862037 - DNA, 25 bp, Homo sapien
aggcagggtgacggcccgaatctcc

SEQ ID NO: 862038 - DNA, 25 bp, Homo sapien
cgaggacagaagcggccggtggcgg

SEQ ID NO: 862039 - DNA, 25 bp, Homo sapien
agaagcggccggtggcgggacgcag

SEQ ID NO: 862040 - DNA, 25 bp, Homo sapien
acgcaggggaggcagggtgacggcc

SEQ ID NO: 862041 - DNA, 25 bp, Homo sapien
ctcccgtttctggtttcagacgcga

SEQ ID NO: 862042 - DNA, 25 bp, Homo sapien
caagccactcccgtttctggtttca

SEQ ID NO: 862043 - DNA, 25 bp, Homo sapien
gaacttggcggcacggctgcggcat

SEQ ID NO: 862044 - DNA, 25 bp, Homo sapien
tccctccgaacttggcggcacggct

SEQ ID NO: 862045 - DNA, 25 bp, Homo sapien
acaggtcaacagtgatttatgtcca

SEQ ID NO: 862046 - DNA, 25 bp, Homo sapien
gcaggtaggcgttgtcgtttttcca

SEQ ID NO: 862047 - DNA, 25 bp, Homo sapien
taggatatctccaggaacatgaaac

SEQ ID NO: 862048 - DNA, 25 bp, Homo sapien
ccttctcaagtaggatatctccagg

SEQ ID NO: 862049 - DNA, 25 bp, Homo sapien
gcagtgtgcccggagtagcctaata

SEQ ID NO: 862050 - DNA, 25 bp, Homo sapien
tacagcagatcactcacatcagagc

SEQ ID NO: 862051 - DNA, 25 bp, Homo sapien
ggcccgcccagcactgtgaggatga

SEQ ID NO: 862052 - DNA, 25 bp, Homo sapien
tcctggcccgtgtgttcaatgcaca

SEQ ID NO: 862053 - DNA, 25 bp, Homo sapien
cctgtgaagtgggtgacatccactt

SEQ ID NO: 862054 - DNA, 25 bp, Homo sapien
tgtggttgcttccccaccctgtgaa

SEQ ID NO: 862055 - DNA, 25 bp, Homo sapien
caccctgtgaagtgggtgacatcca

SEQ ID NO: 862056 - DNA, 25 bp, Homo sapien
tgaagtgggtgacatccacttccat

SEQ ID NO: 862057 - DNA, 25 bp, Homo sapien
cgctgaagaaaccacgggaatgctg

SEQ ID NO: 862058 - DNA, 25 bp, Homo sapien
ggccaactctcatcctacatgtggg

SEQ ID NO: 862059 - DNA, 25 bp, Homo sapien
actacgggaacgctaaaggctcaag

SEQ ID NO: 862060 - DNA, 25 bp, Homo sapien
tgactacttgacacagccacttgga

SEQ ID NO: 862061 - DNA, 25 bp, Homo sapien
gctccagtttgctgccaacgatctg

SEQ ID NO: 862062 - DNA, 25 bp, Homo sapien
tgctgccaacgatctgaggtggcat

SEQ ID NO: 862063 - DNA, 25 bp, Homo sapien
tctgaggtggcattttggcagtgat

SEQ ID NO: 862064 - DNA, 25 bp, Homo sapien
aacgatctgaggtggcattttggca

SEQ ID NO: 862065 - DNA, 25 bp, Homo sapien
ctttttaatatcctcgggtgaggca

SEQ ID NO: 862066 - DNA, 25 bp, Homo sapien
ttttaatatcctcgggtgaggcatg

SEQ ID NO: 862067 - DNA, 25 bp, Homo sapien
gtctctgcacgcctagaacttcata

SEQ ID NO: 862068 - DNA, 25 bp, Homo sapien
gaggcatgtctctgcacgcctagaa

SEQ ID NO: 862069 - DNA, 25 bp, Homo sapien
gtgcagccacagatagacccagcta

SEQ ID NO: 862070 - DNA, 25 bp, Homo sapien
tccacaacgtggactgacagtgaca

SEQ ID NO: 862071 - DNA, 25 bp, Homo sapien
tgaggcgtgacaactgcttgaggcc

SEQ ID NO: 862072 - DNA, 25 bp, Homo sapien
gcataatacaaacgaacctctagag

SEQ ID NO: 862073 - DNA, 25 bp, Homo sapien
gcctccgctacttgcttgaattttc

SEQ ID NO: 862074 - DNA, 25 bp, Homo sapien
catatgcctccgctacttgcttgaa

SEQ ID NO: 862075 - DNA, 25 bp, Homo sapien
acttcatatgcctccgctacttgct

SEQ ID NO: 862076 - DNA, 25 bp, Homo sapien
tatgcctccgctacttgcttgaatt

SEQ ID NO: 862077 - DNA, 25 bp, Homo sapien
ttgccatatttgtcatagatgtccc

SEQ ID NO: 862078 - DNA, 25 bp, Homo sapien
caccatttaatccttctttgccata

SEQ ID NO: 862079 - DNA, 25 bp, Homo sapien
ttgtcatagatgtcccgtttcttag

SEQ ID NO: 862080 - DNA, 25 bp, Homo sapien
ctttgccatatttgtcatagatgtc

SEQ ID NO: 862081 - DNA, 25 bp, Homo sapien
ctgggttacggaatgtgaagccaaa

SEQ ID NO: 862082 - DNA, 25 bp, Homo sapien
tctgggttacggaatgtgaagccaa

SEQ ID NO: 862083 - DNA, 25 bp, Homo sapien
atctgggttacggaatgtgaagcca

SEQ ID NO: 862084 - DNA, 25 bp, Homo sapien
cagatatgagagtgattatgcttct

SEQ ID NO: 862085 - DNA, 25 bp, Homo sapien
gagctccacgtttctcccctgtatt

SEQ ID NO: 862086 - DNA, 25 bp, Homo sapien
tttccctcctcgagttgcaggtggt

SEQ ID NO: 862087 - DNA, 25 bp, Homo sapien
tatctgtagacacaactactcttct

SEQ ID NO: 862088 - DNA, 25 bp, Homo sapien
ggacggatgtaaacatggttctttc

SEQ ID NO: 862089 - DNA, 25 bp, Homo sapien
ggttgatgaaggacggatgtaaaca

SEQ ID NO: 862090 - DNA, 25 bp, Homo sapien
aatgcacttaaacgatgagcacgcc

SEQ ID NO: 862091 - DNA, 25 bp, Homo sapien
gcagtgattacagcaaatgcactta

SEQ ID NO: 862092 - DNA, 25 bp, Homo sapien
tcttcctcgcttggtcaccatgaga

SEQ ID NO: 862093 - DNA, 25 bp, Homo sapien
catggtgttggaagagcgggccttc

SEQ ID NO: 862094 - DNA, 25 bp, Homo sapien
gaacacaggacttcaacccaaacac

SEQ ID NO: 862095 - DNA, 25 bp, Homo sapien
caccatgagaatcaccgatcagaac

SEQ ID NO: 862096 - DNA, 25 bp, Homo sapien
tgaaaatggaagtcatctagaacac

SEQ ID NO: 862097 - DNA, 25 bp, Homo sapien
ctgctcagtgactacatacatatag

SEQ ID NO: 862098 - DNA, 25 bp, Homo sapien
tccccagtgtgtaaatcctgagagc

SEQ ID NO: 862099 - DNA, 25 bp, Homo sapien
ttccccagtgtgtaaatcctgagag

SEQ ID NO: 862100 - DNA, 25 bp, Homo sapien
tacatacatatagcagccatggagc

SEQ ID NO: 862101 - DNA, 25 bp, Homo sapien
ggatatcaacacatccaaggcctca

SEQ ID NO: 862102 - DNA, 25 bp, Homo sapien
tactaactcctcactaggctccaag

SEQ ID NO: 862103 - DNA, 25 bp, Homo sapien
tcactgttctcttcaccagggctgt

SEQ ID NO: 862104 - DNA, 25 bp, Homo sapien
gcaggcctcgtcctcactagacagt

SEQ ID NO: 862105 - DNA, 25 bp, Homo sapien
tcctcgctggatatgagccccagct

SEQ ID NO: 862106 - DNA, 25 bp, Homo sapien
tggccccgtcctcgctggatatgag

SEQ ID NO: 862107 - DNA, 25 bp, Homo sapien
tcgccgagctcctctacgtccccag

SEQ ID NO: 862108 - DNA, 25 bp, Homo sapien
ctcgccgagctcctctacgtcccca

SEQ ID NO: 862109 - DNA, 25 bp, Homo sapien
ttgacactttatggtggtgccggca

SEQ ID NO: 862110 - DNA, 25 bp, Homo sapien
actttatggtggtgccggcagcgcc

SEQ ID NO: 862111 - DNA, 25 bp, Homo sapien
ggcagctccttgacactttatggtg

SEQ ID NO: 862112 - DNA, 25 bp, Homo sapien
gctccttgacactttatggtggtgc

SEQ ID NO: 862113 - DNA, 25 bp, Homo sapien
atacactgttttaagtcagtcccac

SEQ ID NO: 862114 - DNA, 25 bp, Homo sapien
gatacactgttttaagtcagtccca

SEQ ID NO: 862115 - DNA, 25 bp, Homo sapien
tagatacactgttttaagtcagtcc

SEQ ID NO: 862116 - DNA, 25 bp, Homo sapien
ctagatacactgttttaagtcagtc

SEQ ID NO: 862117 - DNA, 25 bp, Homo sapien
gttagagtcgtgagcaccttccttg

SEQ ID NO: 862118 - DNA, 25 bp, Homo sapien
ggcagtttctctagactcatgcaga

SEQ ID NO: 862119 - DNA, 25 bp, Homo sapien
gaaagtctagcacatgttaaaggtc

SEQ ID NO: 862120 - DNA, 25 bp, Homo sapien
agattttactggctagcttccacag

SEQ ID NO: 862121 - DNA, 25 bp, Homo sapien
caaaccagcgtgtgaggtggagacc

SEQ ID NO: 862122 - DNA, 25 bp, Homo sapien
cagtttgaaaggaccgacgtacagg

SEQ ID NO: 862123 - DNA, 25 bp, Homo sapien
tgtgggcatcacaactatacagcgc

SEQ ID NO: 862124 - DNA, 25 bp, Homo sapien
aatggattaccctaacatgcgcgcg

SEQ ID NO: 862125 - DNA, 25 bp, Homo sapien
aacaaaagagcttatctacagagta

SEQ ID NO: 862126 - DNA, 25 bp, Homo sapien
ctaaaactacaatacattgtatcaa

SEQ ID NO: 862127 - DNA, 25 bp, Homo sapien
cactacctcaccaacagttttacta

SEQ ID NO: 862128 - DNA, 25 bp, Homo sapien
tgaaacactacctcaccaacagttt

SEQ ID NO: 862129 - DNA, 25 bp, Homo sapien
ctgaacgcagagaaaaacgaccccg

SEQ ID NO: 862130 - DNA, 25 bp, Homo sapien
gtccctcggcttctgcttcctcggg

SEQ ID NO: 862131 - DNA, 25 bp, Homo sapien
gacggaaatccactgaacgcagaga

SEQ ID NO: 862132 - DNA, 25 bp, Homo sapien
caaaagacggaaatccactgaacgc

SEQ ID NO: 862133 - DNA, 25 bp, Homo sapien
tgaactatgaagagctacgtgcgtg

SEQ ID NO: 862134 - DNA, 25 bp, Homo sapien
gacacttcactagtgagtgagcctg

SEQ ID NO: 862135 - DNA, 25 bp, Homo sapien
gcttgtttccatcggtgaactatga

SEQ ID NO: 862136 - DNA, 25 bp, Homo sapien
tgagaccgtgccactacactaagag

SEQ ID NO: 862137 - DNA, 25 bp, Homo sapien
tcgatattaaagctggtctactggt

SEQ ID NO: 862138 - DNA, 25 bp, Homo sapien
aaatgacgcatacctctgaacatga

SEQ ID NO: 862139 - DNA, 25 bp, Homo sapien
tctaagcgcagatactgtctagggc

SEQ ID NO: 862140 - DNA, 25 bp, Homo sapien
tggatattatcgcagtgtggacact

SEQ ID NO: 862141 - DNA, 25 bp, Homo sapien
taccaccaaatgacgtggaagagaa

SEQ ID NO: 862142 - DNA, 25 bp, Homo sapien
actaccaccaaatgacgtggaagag

SEQ ID NO: 862143 - DNA, 25 bp, Homo sapien
gccactaccaccaaatgacgtggaa

SEQ ID NO: 862144 - DNA, 25 bp, Homo sapien
ccaccaaatgacgtggaagagaatg

SEQ ID NO: 862145 - DNA, 25 bp, Homo sapien
agttgaagttgatatcgatttgaag

SEQ ID NO: 862146 - DNA, 25 bp, Homo sapien
cattttagttgaagttgatatcgat

SEQ ID NO: 862147 - DNA, 25 bp, Homo sapien
accattttagttgaagttgatatcg

SEQ ID NO: 862148 - DNA, 25 bp, Homo sapien
tttctgccattaaccattttagttg

SEQ ID NO: 862149 - DNA, 25 bp, Homo sapien
acatggcaccagtgaaacgttacgc

SEQ ID NO: 862150 - DNA, 25 bp, Homo sapien
catggcgccagatttagcatacaac

SEQ ID NO: 862151 - DNA, 25 bp, Homo sapien
tgtgtctcaaataccgtacaggcgg

SEQ ID NO: 862152 - DNA, 25 bp, Homo sapien
actctgggagacgtgcaacatggca

SEQ ID NO: 862153 - DNA, 25 bp, Homo sapien
tctttcttgaccgttctcgacaatt

SEQ ID NO: 862154 - DNA, 25 bp, Homo sapien
ctactctttcttgaccgttctcgac

SEQ ID NO: 862155 - DNA, 25 bp, Homo sapien
ggactttaactggccatcttcttca

SEQ ID NO: 862156 - DNA, 25 bp, Homo sapien
catttattgttaaggactttaactg

SEQ ID NO: 862157 - DNA, 25 bp, Homo sapien
tccaagcgcagcagctgctccttac

SEQ ID NO: 862158 - DNA, 25 bp, Homo sapien
gttatccaagcgcagcagctgctcc

SEQ ID NO: 862159 - DNA, 25 bp, Homo sapien
tatccaagcgcagcagctgctcctt

SEQ ID NO: 862160 - DNA, 25 bp, Homo sapien
ttgttatccaagcgcagcagctgct

SEQ ID NO: 862161 - DNA, 25 bp, Homo sapien
gctccgatgagctgtttataaatac

SEQ ID NO: 862162 - DNA, 25 bp, Homo sapien
agtcgagttcgtttgaaatcttcaa

SEQ ID NO: 862163 - DNA, 25 bp, Homo sapien
catttctgttaagtgcgtgcgttga

SEQ ID NO: 862164 - DNA, 25 bp, Homo sapien
tatgtggtcccaacaatcaactcaa

SEQ ID NO: 862165 - DNA, 25 bp, Homo sapien
gaagaatcgtcctggcaatgttaac

SEQ ID NO: 862166 - DNA, 25 bp, Homo sapien
caatgaaaagcaggtccatgctggt

SEQ ID NO: 862167 - DNA, 25 bp, Homo sapien
tgacaaagacccagtttaccagctt

SEQ ID NO: 862168 - DNA, 25 bp, Homo sapien
aatgttaacttcacagcaggccgac

SEQ ID NO: 862169 - DNA, 25 bp, Homo sapien
tagagttgcatgaaacactccacaa

SEQ ID NO: 862170 - DNA, 25 bp, Homo sapien
tcacagctagagttgcatgaaacac

SEQ ID NO: 862171 - DNA, 25 bp, Homo sapien
tgagtaaactgttcacagctagagt

SEQ ID NO: 862172 - DNA, 25 bp, Homo sapien
acaccatgttgagtaaactgttcac

SEQ ID NO: 862173 - DNA, 25 bp, Homo sapien
gtgatggtatcaatgctcacagcca

SEQ ID NO: 862174 - DNA, 25 bp, Homo sapien
tgatggtatcaatgctcacagccat

SEQ ID NO: 862175 - DNA, 25 bp, Homo sapien
ttgagtgatggtatcaatgctcaca

SEQ ID NO: 862176 - DNA, 25 bp, Homo sapien
gagtgatggtatcaatgctcacagc

SEQ ID NO: 862177 - DNA, 25 bp, Homo sapien
tcccatcagtgcctgaatggcagtc

SEQ ID NO: 862178 - DNA, 25 bp, Homo sapien
tccttcagaaaacctccggtctcta

SEQ ID NO: 862179 - DNA, 25 bp, Homo sapien
ttcagaaaacctccggtctctatgg

SEQ ID NO: 862180 - DNA, 25 bp, Homo sapien
ctccttcagaaaacctccggtctct

SEQ ID NO: 862181 - DNA, 25 bp, Homo sapien
agagctcgcagcacagcgctgacca

SEQ ID NO: 862182 - DNA, 25 bp, Homo sapien
acagcgctgaccacacgggaagcaa

SEQ ID NO: 862183 - DNA, 25 bp, Homo sapien
ctgaccacacgggaagcaaaccaca

SEQ ID NO: 862184 - DNA, 25 bp, Homo sapien
tctcagagctcgcagcacagcgctg

SEQ ID NO: 862185 - DNA, 25 bp, Homo sapien
catggacacggaaagatacggctga

SEQ ID NO: 862186 - DNA, 25 bp, Homo sapien
aagatacggctgaaaagactcgtgg

SEQ ID NO: 862187 - DNA, 25 bp, Homo sapien
gaaaagactcgtggaaaacagcact

SEQ ID NO: 862188 - DNA, 25 bp, Homo sapien
cagaggcctggcattatgtaaagca

SEQ ID NO: 862189 - DNA, 25 bp, Homo sapien
gggcacagaccccaactgagggaaa

SEQ ID NO: 862190 - DNA, 25 bp, Homo sapien
cacggaagacttgggctgagaccca

SEQ ID NO: 862191 - DNA, 25 bp, Homo sapien
tttcaatgcacacgtttctcaagcc

SEQ ID NO: 862192 - DNA, 25 bp, Homo sapien
gatagaccactcatgctgggcacag

SEQ ID NO: 862193 - DNA, 25 bp, Homo sapien
cgcgtgcacacgtccacatcggtga

SEQ ID NO: 862194 - DNA, 25 bp, Homo sapien
gcacacgtccacatcggtgagaggg

SEQ ID NO: 862195 - DNA, 25 bp, Homo sapien
cagccgagtggtgaggataattcca

SEQ ID NO: 862196 - DNA, 25 bp, Homo sapien
tcagccgagtggtgaggataattcc

SEQ ID NO: 862197 - DNA, 25 bp, Homo sapien
cagcatcctgatagcctggattctg

SEQ ID NO: 862198 - DNA, 25 bp, Homo sapien
gctggcttcacacgggcctcgcagg

SEQ ID NO: 862199 - DNA, 25 bp, Homo sapien
cacggcacagcatcctgatagcctg

SEQ ID NO: 862200 - DNA, 25 bp, Homo sapien
ggctggcttcacacgggcctcgcag

SEQ ID NO: 862201 - DNA, 25 bp, Homo sapien
acgccgctcgggttactcctcaagg

SEQ ID NO: 862202 - DNA, 25 bp, Homo sapien
ctcctcaaggggtagctacagacgc

SEQ ID NO: 862203 - DNA, 25 bp, Homo sapien
tcagcgcagcttagcaacttcccag

SEQ ID NO: 862204 - DNA, 25 bp, Homo sapien
ttcccaggaagcacgccgctcgggt

SEQ ID NO: 862205 - DNA, 25 bp, Homo sapien
ggtggaggccacatgctgttgttac

SEQ ID NO: 862206 - DNA, 25 bp, Homo sapien
gtgaggtggaggccacatgctgttg

SEQ ID NO: 862207 - DNA, 25 bp, Homo sapien
aggtggaggccacatgctgttgtta

SEQ ID NO: 862208 - DNA, 25 bp, Homo sapien
tgaggtggaggccacatgctgttgt

SEQ ID NO: 862209 - DNA, 25 bp, Homo sapien
gaaataactgctccaagagcgcact

SEQ ID NO: 862210 - DNA, 25 bp, Homo sapien
tgaaggtcggtttggaaataactgc

SEQ ID NO: 862211 - DNA, 25 bp, Homo sapien
tccagggaatgaagacgtgaaggtc

SEQ ID NO: 862212 - DNA, 25 bp, Homo sapien
caagagcgcactggctgacggcacg

SEQ ID NO: 862213 - DNA, 25 bp, Homo sapien
gaagagctcggtgccagcgaaagct

SEQ ID NO: 862214 - DNA, 25 bp, Homo sapien
ggatggagccgacggccacaccaag

SEQ ID NO: 862215 - DNA, 25 bp, Homo sapien
acagcaagcatcacggcacaccaca

SEQ ID NO: 862216 - DNA, 25 bp, Homo sapien
cacacgagcgtgtccatgaaggcgc

SEQ ID NO: 862217 - DNA, 25 bp, Homo sapien
atgtacacgactgaagagctctgac

SEQ ID NO: 862218 - DNA, 25 bp, Homo sapien
tcatgtacacgactgaagagctctg

SEQ ID NO: 862219 - DNA, 25 bp, Homo sapien
catgtacacgactgaagagctctga

SEQ ID NO: 862220 - DNA, 25 bp, Homo sapien
cagggctgacaagttcgctgtcaaa

SEQ ID NO: 862221 - DNA, 25 bp, Homo sapien
ccactgaaatcacggtcagggctga

SEQ ID NO: 862222 - DNA, 25 bp, Homo sapien
tcttccgagagtgagtgtgccccac

SEQ ID NO: 862223 - DNA, 25 bp, Homo sapien
tcctgagtccatacacggaagacat

SEQ ID NO: 862224 - DNA, 25 bp, Homo sapien
gggcgttctggcctctccgcatgcg

SEQ ID NO: 862225 - DNA, 25 bp, Homo sapien
acagtgaggcgcgtgtctcagcagc

SEQ ID NO: 862226 - DNA, 25 bp, Homo sapien
ctggcagggcgttctggcctctccg

SEQ ID NO: 862227 - DNA, 25 bp, Homo sapien
gagagacagtgaggcgcgtgtctca

SEQ ID NO: 862228 - DNA, 25 bp, Homo sapien
ctgcggacgcgagggggtcccaggg

SEQ ID NO: 862229 - DNA, 25 bp, Homo sapien
tgcggacgcgagggggtcccagggc

SEQ ID NO: 862230 - DNA, 25 bp, Homo sapien
gctgcggacgcgagggggtcccagg

SEQ ID NO: 862231 - DNA, 25 bp, Homo sapien
ctgctgcggacgcgagggggtccca

SEQ ID NO: 862232 - DNA, 25 bp, Homo sapien
tccacggctgcctccctttgcacac

SEQ ID NO: 862233 - DNA, 25 bp, Homo sapien
tctgcgcctgctccacggctgcctc

SEQ ID NO: 862234 - DNA, 25 bp, Homo sapien
tgctccacggctgcctccctttgca

SEQ ID NO: 862235 - DNA, 25 bp, Homo sapien
tgcgcctgctccacggctgcctccc

SEQ ID NO: 862236 - DNA, 25 bp, Homo sapien
tgaaagctacgaaaaggcacgtcta

SEQ ID NO: 862237 - DNA, 25 bp, Homo sapien
tctgtcatcctttgcggagcaacac

SEQ ID NO: 862238 - DNA, 25 bp, Homo sapien
ggcacgtctacggtaaaagcagcac

SEQ ID NO: 862239 - DNA, 25 bp, Homo sapien
tcgcactgccgtggcagctctgtca

SEQ ID NO: 862240 - DNA, 25 bp, Homo sapien
gaccctgtgagtggaagctcgctca

SEQ ID NO: 862241 - DNA, 25 bp, Homo sapien
tttccaaagcctgagtgaggatccg

SEQ ID NO: 862242 - DNA, 25 bp, Homo sapien
ggtttgaggactccacacagcagca

SEQ ID NO: 862243 - DNA, 25 bp, Homo sapien
catcaatactgtcgggtggccggtc

SEQ ID NO: 862244 - DNA, 25 bp, Homo sapien
gcaagagccaaacatgttttctaaa

SEQ ID NO: 862245 - DNA, 25 bp, Homo sapien
ccccagcaagagccaaacatgtttt

SEQ ID NO: 862246 - DNA, 25 bp, Homo sapien
cccagcaagagccaaacatgttttc

SEQ ID NO: 862247 - DNA, 25 bp, Homo sapien
cagcaagagccaaacatgttttcta

SEQ ID NO: 862248 - DNA, 25 bp, Homo sapien
agtgattgcctttggtcgacttctt

SEQ ID NO: 862249 - DNA, 25 bp, Homo sapien
tagtgattgcctttggtcgacttct

SEQ ID NO: 862250 - DNA, 25 bp, Homo sapien
ctagtgattgcctttggtcgacttc

SEQ ID NO: 862251 - DNA, 25 bp, Homo sapien
gtgattgcctttggtcgacttcttc

SEQ ID NO: 862252 - DNA, 25 bp, Homo sapien
gatccgtgatcgcataatcctgccg

SEQ ID NO: 862253 - DNA, 25 bp, Homo sapien
aataatgaccggaagtgggcgcatc

SEQ ID NO: 862254 - DNA, 25 bp, Homo sapien
gacagccttctattcgtgtggccgg

SEQ ID NO: 862255 - DNA, 25 bp, Homo sapien
tgcgcgtgtgtaaataccggcccgt

SEQ ID NO: 862256 - DNA, 25 bp, Homo sapien
tcctaagtgcacagttagttccacg

SEQ ID NO: 862257 - DNA, 25 bp, Homo sapien
acggcatgaagagctgcttggtgtc

SEQ ID NO: 862258 - DNA, 25 bp, Homo sapien
gcacagttagttccacggcatgaag

SEQ ID NO: 862259 - DNA, 25 bp, Homo sapien
tagttccacggcatgaagagctgct

SEQ ID NO: 862260 - DNA, 25 bp, Homo sapien
caggtgacgacgaagtcagcctgcc

SEQ ID NO: 862261 - DNA, 25 bp, Homo sapien
tcacacctgccgtgggcgtctgctg

SEQ ID NO: 862262 - DNA, 25 bp, Homo sapien
tgctgtgcctgacaggtgacgacga

SEQ ID NO: 862263 - DNA, 25 bp, Homo sapien
cctgccgtgggcgtctgctgtgcct

SEQ ID NO: 862264 - DNA, 25 bp, Homo sapien
caactcgattttagccttgattaac

SEQ ID NO: 862265 - DNA, 25 bp, Homo sapien
cttcaactcgattttagccttgatt

SEQ ID NO: 862266 - DNA, 25 bp, Homo sapien
ccttcaactcgattttagccttgat

SEQ ID NO: 862267 - DNA, 25 bp, Homo sapien
tcaactcgattttagccttgattaa

SEQ ID NO: 862268 - DNA, 25 bp, Homo sapien
cattaataatggctacgatctggca

SEQ ID NO: 862269 - DNA, 25 bp, Homo sapien
gagcagcgtgacacaccttctgagc

SEQ ID NO: 862270 - DNA, 25 bp, Homo sapien
ccccggttaatggatctgacaagca

SEQ ID NO: 862271 - DNA, 25 bp, Homo sapien
taccacgcatagaaacagaggcacg

SEQ ID NO: 862272 - DNA, 25 bp, Homo sapien
tcaagaagttcaggcaaatcggacc

SEQ ID NO: 862273 - DNA, 25 bp, Homo sapien
gaaacggacactgccttacagggct

SEQ ID NO: 862274 - DNA, 25 bp, Homo sapien
tctttgaggacagcgcagggtctcc

SEQ ID NO: 862275 - DNA, 25 bp, Homo sapien
tcagcttggccaaaaacatccctgg

SEQ ID NO: 862276 - DNA, 25 bp, Homo sapien
ccagcgtctggcagggtacctcagg

SEQ ID NO: 862277 - DNA, 25 bp, Homo sapien
ttgggccgctgcgtgtgagcccgtc

SEQ ID NO: 862278 - DNA, 25 bp, Homo sapien
ctgtaaaacgctggctaactcccca

SEQ ID NO: 862279 - DNA, 25 bp, Homo sapien
gtacctcaggcgagtgccttctcct

SEQ ID NO: 862280 - DNA, 25 bp, Homo sapien
tctcaccttgctgttcaccaatgta

SEQ ID NO: 862281 - DNA, 25 bp, Homo sapien
gacagatatgtccactctcaccttg

SEQ ID NO: 862282 - DNA, 25 bp, Homo sapien
tctatgtttgcaaataacatggtcc

SEQ ID NO: 862283 - DNA, 25 bp, Homo sapien
tacttgcaatgagtgatccaaaaac

SEQ ID NO: 862284 - DNA, 25 bp, Homo sapien
gaagacagcacctcacactgtgtgc

SEQ ID NO: 862285 - DNA, 25 bp, Homo sapien
tcctagaagggatatggtaatgtcc

SEQ ID NO: 862286 - DNA, 25 bp, Homo sapien
tgactggttctacccgagatgccaa

SEQ ID NO: 862287 - DNA, 25 bp, Homo sapien
tgtgtgcccaagacaagcctttagg

SEQ ID NO: 862288 - DNA, 25 bp, Homo sapien
ggtgtgtgtggcctggccccacttg

SEQ ID NO: 862289 - DNA, 25 bp, Homo sapien
gtgtgtgtggcctggccccacttgc

SEQ ID NO: 862290 - DNA, 25 bp, Homo sapien
caaaggtgggaacaaggtgtgtgtg

SEQ ID NO: 862291 - DNA, 25 bp, Homo sapien
agcccaaaggtgggaacaaggtgtg

SEQ ID NO: 862292 - DNA, 25 bp, Homo sapien
gctgttcccacatgtagacgccaag

SEQ ID NO: 862293 - DNA, 25 bp, Homo sapien
gatacactcttttgttggcaggaag

SEQ ID NO: 862294 - DNA, 25 bp, Homo sapien
tccaacagcataaagagggtgtcag

SEQ ID NO: 862295 - DNA, 25 bp, Homo sapien
gaagggcctcctccgttgaattctg

SEQ ID NO: 862296 - DNA, 25 bp, Homo sapien
caagagctggatctctaaatatttt

SEQ ID NO: 862297 - DNA, 25 bp, Homo sapien
ataatgactgaaagcgcagcctccc

SEQ ID NO: 862298 - DNA, 25 bp, Homo sapien
tcccgcacgcagagcatctgcccag

SEQ ID NO: 862299 - DNA, 25 bp, Homo sapien
gccccggagggtggagtacgtgcca

SEQ ID NO: 862300 - DNA, 25 bp, Homo sapien
ggcattagtcaggatacgtcacagt

SEQ ID NO: 862301 - DNA, 25 bp, Homo sapien
tgtgctgtcggcattagtcaggata

SEQ ID NO: 862302 - DNA, 25 bp, Homo sapien
aggatacgtcacagtagccatggta

SEQ ID NO: 862303 - DNA, 25 bp, Homo sapien
ggaagtgcacgacgcaccacctctt

SEQ ID NO: 862304 - DNA, 25 bp, Homo sapien
gctgggtttacctggttcagcagca

SEQ ID NO: 862305 - DNA, 25 bp, Homo sapien
aaaaatgatcgaaggatgctttcac

SEQ ID NO: 862306 - DNA, 25 bp, Homo sapien
gtattagaccaattgaggctcacag

SEQ ID NO: 862307 - DNA, 25 bp, Homo sapien
caaaactttgatgccctgaagatcc

SEQ ID NO: 862308 - DNA, 25 bp, Homo sapien
tccgacggcttcatggacgtcccgt

SEQ ID NO: 862309 - DNA, 25 bp, Homo sapien
ccaaggaaagcatgtggggccatcc

SEQ ID NO: 862310 - DNA, 25 bp, Homo sapien
caccgacacgggctgtagcctgtgg

SEQ ID NO: 862311 - DNA, 25 bp, Homo sapien
ctcagacggccctctcaggtggctg

SEQ ID NO: 862312 - DNA, 25 bp, Homo sapien
gaacttactctttgcccaggacaga

SEQ ID NO: 862313 - DNA, 25 bp, Homo sapien
ggacagaccacacattcaagcctgt

SEQ ID NO: 862314 - DNA, 25 bp, Homo sapien
ccagaagtaacaccaccgatgggat

SEQ ID NO: 862315 - DNA, 25 bp, Homo sapien
gatgggatcacatcacaccaagagc

SEQ ID NO: 862316 - DNA, 25 bp, Homo sapien
ctgactccctgaactttgttaacct

SEQ ID NO: 862317 - DNA, 25 bp, Homo sapien
atcggagacgtccacgcggccgctg

SEQ ID NO: 862318 - DNA, 25 bp, Homo sapien
cagcacaatcggagacgtccacgcg

SEQ ID NO: 862319 - DNA, 25 bp, Homo sapien
gaccttgccacatgctccactctgt

SEQ ID NO: 862320 - DNA, 25 bp, Homo sapien
gcagtgcacaacatgtacaactgga

SEQ ID NO: 862321 - DNA, 25 bp, Homo sapien
agtgcacaacatgtacaactggact

SEQ ID NO: 862322 - DNA, 25 bp, Homo sapien
gtgcacaacatgtacaactggactg

SEQ ID NO: 862323 - DNA, 25 bp, Homo sapien
gttgggggaagtgaggacgtctggc

SEQ ID NO: 862324 - DNA, 25 bp, Homo sapien
aagatttaatttagggatgacactc

SEQ ID NO: 862325 - DNA, 25 bp, Homo sapien
gacactcactgtctcatgtcaaatg

SEQ ID NO: 862326 - DNA, 25 bp, Homo sapien
caagctccccagaaccaggtctgga

SEQ ID NO: 862327 - DNA, 25 bp, Homo sapien
caaatgggtcccaatcaaaggtgtc

SEQ ID NO: 862328 - DNA, 25 bp, Homo sapien
gatagtcagatcagggcggttcacg

SEQ ID NO: 862329 - DNA, 25 bp, Homo sapien
gaatacagggtggtgtttcgacgcc

SEQ ID NO: 862330 - DNA, 25 bp, Homo sapien
aagatgtgcgcccttcagtctggag

SEQ ID NO: 862331 - DNA, 25 bp, Homo sapien
tctcggccattgtaagtagtgctgc

SEQ ID NO: 862332 - DNA, 25 bp, Homo sapien
gaactgaacgtcctgcagcttcggg

SEQ ID NO: 862333 - DNA, 25 bp, Homo sapien
gtttatcattgggagaagccgcagg

SEQ ID NO: 862334 - DNA, 25 bp, Homo sapien
tgtcatctgccactttcgggagggt

SEQ ID NO: 862335 - DNA, 25 bp, Homo sapien
taacaatgcagtagccagcacgttc

SEQ ID NO: 862336 - DNA, 25 bp, Homo sapien
gaccacgtggtcctgatctgctgtg

SEQ ID NO: 862337 - DNA, 25 bp, Homo sapien
tgggagcacgtggtcctgatctgct

SEQ ID NO: 862338 - DNA, 25 bp, Homo sapien
gcacgtggtcctgatctgctgtgtg

SEQ ID NO: 862339 - DNA, 25 bp, Homo sapien
acgtggtcctgatctgctgtgtgtg

SEQ ID NO: 862340 - DNA, 25 bp, Homo sapien
ggcacctacgtcctgatcgacatgg

SEQ ID NO: 862341 - DNA, 25 bp, Homo sapien
gacatggttctcaacaagatggcca

SEQ ID NO: 862342 - DNA, 25 bp, Homo sapien
tcactagctttgttgtgggtcgggc

SEQ ID NO: 862343 - DNA, 25 bp, Homo sapien
ccttctgttggcagtgacggtgcag

SEQ ID NO: 862344 - DNA, 25 bp, Homo sapien
caggtgccacggtgtggaggtgctg

SEQ ID NO: 862345 - DNA, 25 bp, Homo sapien
gggctcgggtgtgcaggtgccacgg

SEQ ID NO: 862346 - DNA, 25 bp, Homo sapien
tgtgcaggtgccacggtgtggaggt

SEQ ID NO: 862347 - DNA, 25 bp, Homo sapien
tcgggtgtgcaggtgccacggtgtg

SEQ ID NO: 862348 - DNA, 25 bp, Homo sapien
tgctgaaggcggagaacagccacag

SEQ ID NO: 862349 - DNA, 25 bp, Homo sapien
caaatcacgtgggaaggttctcggg

SEQ ID NO: 862350 - DNA, 25 bp, Homo sapien
tgtagaacatccagcaatggtgact

SEQ ID NO: 862351 - DNA, 25 bp, Homo sapien
ccatcgtaagtgcactgccgggaca

SEQ ID NO: 862352 - DNA, 25 bp, Homo sapien
ctctttcatggttccctgtgttctg

SEQ ID NO: 862353 - DNA, 25 bp, Homo sapien
ctgctgcagaacgatgctttccaag

SEQ ID NO: 862354 - DNA, 25 bp, Homo sapien
ctgattggccggttgagcagtcctg

SEQ ID NO: 862355 - DNA, 25 bp, Homo sapien
ttggccggttgagcagtcctgctgc

SEQ ID NO: 862356 - DNA, 25 bp, Homo sapien
cagatgtttccacgtgaggctcggg

SEQ ID NO: 862357 - DNA, 25 bp, Homo sapien
tccttaaggtcttcggtggagccca

SEQ ID NO: 862358 - DNA, 25 bp, Homo sapien
gaagttacgttcatcctgccaggtg

SEQ ID NO: 862359 - DNA, 25 bp, Homo sapien
caggtcccgagcatattggcaaagg

SEQ ID NO: 862360 - DNA, 25 bp, Homo sapien
tctatggaaagggtcctcgggacca

SEQ ID NO: 862361 - DNA, 25 bp, Homo sapien
tcctctgttagggatggaaccttca

SEQ ID NO: 862362 - DNA, 25 bp, Homo sapien
tggaagcatgagtactcggccacgc

SEQ ID NO: 862363 - DNA, 25 bp, Homo sapien
gatgcaccctgatcggaatgagccc

SEQ ID NO: 862364 - DNA, 25 bp, Homo sapien
ctgccatagccccatcataagcggg

SEQ ID NO: 862365 - DNA, 25 bp, Homo sapien
ggaaaaattctctgaccccaatctg

SEQ ID NO: 862366 - DNA, 25 bp, Homo sapien
tccaaagaggtttatcctgccatag

SEQ ID NO: 862367 - DNA, 25 bp, Homo sapien
tggccccagcgagacaagtggctga

SEQ ID NO: 862368 - DNA, 25 bp, Homo sapien
cacaggtgctgtcacggaaatggac

SEQ ID NO: 862369 - DNA, 25 bp, Homo sapien
tagacatggtacctctgtcccaggt

SEQ ID NO: 862370 - DNA, 25 bp, Homo sapien
gaacctttgaactttgccgctggta

SEQ ID NO: 862371 - DNA, 25 bp, Homo sapien
tcgaaagcctgccaagtgcaagtgt

SEQ ID NO: 862372 - DNA, 25 bp, Homo sapien
caccagagcagcgttggccacgtgg

SEQ ID NO: 862373 - DNA, 25 bp, Homo sapien
tgtgtcaccagagcagcgttggcca

SEQ ID NO: 862374 - DNA, 25 bp, Homo sapien
ggcggtgggactgtgtcaccagagc

SEQ ID NO: 862375 - DNA, 25 bp, Homo sapien
tggaggcggtgggactgtgtcacca

SEQ ID NO: 862376 - DNA, 25 bp, Homo sapien
aggaagccgcagctgtcggccggcg

SEQ ID NO: 862377 - DNA, 25 bp, Homo sapien
ctcggtccctgagcgagccgtgatc

SEQ ID NO: 862378 - DNA, 25 bp, Homo sapien
tgggacactcggtccctgagcgagc

SEQ ID NO: 862379 - DNA, 25 bp, Homo sapien
gccttggtgtgggacactcggtccc

SEQ ID NO: 862380 - DNA, 25 bp, Homo sapien
gaatcgatacattgaactaagatct

SEQ ID NO: 862381 - DNA, 25 bp, Homo sapien
gacctttacatgctcgataagaatg

SEQ ID NO: 862382 - DNA, 25 bp, Homo sapien
taagaatgaatcgatacattgaact

SEQ ID NO: 862383 - DNA, 25 bp, Homo sapien
tacatgctcgataagaatgaatcga

SEQ ID NO: 862384 - DNA, 25 bp, Homo sapien
tacagcgtagacttttagaaactcc

SEQ ID NO: 862385 - DNA, 25 bp, Homo sapien
actcgctcacgggttttcctccagg

SEQ ID NO: 862386 - DNA, 25 bp, Homo sapien
atttcaaatcaaccccaagtgaggc

SEQ ID NO: 862387 - DNA, 25 bp, Homo sapien
tctccagggggggttttcagacaca

SEQ ID NO: 862388 - DNA, 25 bp, Homo sapien
tggtgaggaatctgccaagacacag

SEQ ID NO: 862389 - DNA, 25 bp, Homo sapien
gtgaggaatctgccaagacacagta

SEQ ID NO: 862390 - DNA, 25 bp, Homo sapien
ggtgaggaatctgccaagacacagt

SEQ ID NO: 862391 - DNA, 25 bp, Homo sapien
atggtgaggaatctgccaagacaca

SEQ ID NO: 862392 - DNA, 25 bp, Homo sapien
cagccagggttcctcgatggggaga

SEQ ID NO: 862393 - DNA, 25 bp, Homo sapien
gggactcagcattcgacctcaaaca

SEQ ID NO: 862394 - DNA, 25 bp, Homo sapien
tcagcattcgacctcaaacaaatga

SEQ ID NO: 862395 - DNA, 25 bp, Homo sapien
cattcgacctcaaacaaatgaaagg

SEQ ID NO: 862396 - DNA, 25 bp, Homo sapien
tcttttgtggaagacccacgctggg

SEQ ID NO: 862397 - DNA, 25 bp, Homo sapien
cactgcacagcgagttatcccgaaa

SEQ ID NO: 862398 - DNA, 25 bp, Homo sapien
tctcctggacggcttgacgttgcta

SEQ ID NO: 862399 - DNA, 25 bp, Homo sapien
gacgttgctagctccagtagttacc

SEQ ID NO: 862400 - DNA, 25 bp, Homo sapien
gcattctggagggatgtggtcacat

SEQ ID NO: 862401 - DNA, 25 bp, Homo sapien
cattctagggggatgtggtccacgt

SEQ ID NO: 862402 - DNA, 25 bp, Homo sapien
ggtccacgttgatttggaaggcact

SEQ ID NO: 862403 - DNA, 25 bp, Homo sapien
gacagattggctcagttcccggcat

SEQ ID NO: 862404 - DNA, 25 bp, Homo sapien
ggtcagattcgctcatttgctggca

SEQ ID NO: 862405 - DNA, 25 bp, Homo sapien
caatcaggagggatgtggtcacgtt

SEQ ID NO: 862406 - DNA, 25 bp, Homo sapien
gtccaccttgatccggaaggcaccg

SEQ ID NO: 862407 - DNA, 25 bp, Homo sapien
gaaggatgtgttccaccttgatcca

SEQ ID NO: 862408 - DNA, 25 bp, Homo sapien
tgcccaacctttaggatgatctgga

SEQ ID NO: 862409 - DNA, 25 bp, Homo sapien
gatgatctggacagtccctgtggaa

SEQ ID NO: 862410 - DNA, 25 bp, Homo sapien
gaaggaacgagtctctgtggccagc

SEQ ID NO: 862411 - DNA, 25 bp, Homo sapien
ggtactcctgaatggccgagagcca

SEQ ID NO: 862412 - DNA, 25 bp, Homo sapien
gcccctccgtccaactctggagtac

SEQ ID NO: 862413 - DNA, 25 bp, Homo sapien
cggcccctccgtccaactctggagt

SEQ ID NO: 862414 - DNA, 25 bp, Homo sapien
ggcccctccgtccaactctggagta

SEQ ID NO: 862415 - DNA, 25 bp, Homo sapien
gacggcccctccgtccaactctgga

SEQ ID NO: 862416 - DNA, 25 bp, Homo sapien
tggggctctcgcgtgtaacccggct

SEQ ID NO: 862417 - DNA, 25 bp, Homo sapien
gggctctcgcgtgtaacccggctgc

SEQ ID NO: 862418 - DNA, 25 bp, Homo sapien
cgcgtggggctctcgcgtgtaaccc

SEQ ID NO: 862419 - DNA, 25 bp, Homo sapien
ggctctcgcgtgtaacccggctgcc

SEQ ID NO: 862420 - DNA, 25 bp, Homo sapien
ctttcagaagcatgtcggactgggc

SEQ ID NO: 862421 - DNA, 25 bp, Homo sapien
gagtgtcgggattcctgcaaatacc

SEQ ID NO: 862422 - DNA, 25 bp, Homo sapien
ggaaacccaaaatcggctcaggaga

SEQ ID NO: 862423 - DNA, 25 bp, Homo sapien
agcacgtcggactgggcatcgttcc

SEQ ID NO: 862424 - DNA, 25 bp, Homo sapien
gaagaggtagctcgtggaagccaca

SEQ ID NO: 862425 - DNA, 25 bp, Homo sapien
tgacccgggtgtgcaacaaggcttt

SEQ ID NO: 862426 - DNA, 25 bp, Homo sapien
cagctgggatttgcccttgacccgg

SEQ ID NO: 862427 - DNA, 25 bp, Homo sapien
ttctccccagaaagcgcttgatgga

SEQ ID NO: 862428 - DNA, 25 bp, Homo sapien
tgagaccttcctcaactcgcgaggg

SEQ ID NO: 862429 - DNA, 25 bp, Homo sapien
tagagccagtcacacggtgtcccct

SEQ ID NO: 862430 - DNA, 25 bp, Homo sapien
aagaaacactcctgcgtcccgtgtt

SEQ ID NO: 862431 - DNA, 25 bp, Homo sapien
tcccgtgttttaggagagctagagc

SEQ ID NO: 862432 - DNA, 25 bp, Homo sapien
tgggtgggatgacagcgtctccggg

SEQ ID NO: 862433 - DNA, 25 bp, Homo sapien
gtgcatagaacttccacagtggctg

SEQ ID NO: 862434 - DNA, 25 bp, Homo sapien
tctccggggacaaggatggacaggt

SEQ ID NO: 862435 - DNA, 25 bp, Homo sapien
tggatgggtgaagagcatgaggtga

SEQ ID NO: 862436 - DNA, 25 bp, Homo sapien
ccgtgttccttccagagcttgcctt

SEQ ID NO: 862437 - DNA, 25 bp, Homo sapien
tgagcaccaatttgactgcacatcc

SEQ ID NO: 862438 - DNA, 25 bp, Homo sapien
ctgagcaccaatttgactgcacatc

SEQ ID NO: 862439 - DNA, 25 bp, Homo sapien
gctcagggtccgtgttccttccaga

SEQ ID NO: 862440 - DNA, 25 bp, Homo sapien
tctgagcgttgtgtgcagcgtggaa

SEQ ID NO: 862441 - DNA, 25 bp, Homo sapien
caaatttggatagattgattcccag

SEQ ID NO: 862442 - DNA, 25 bp, Homo sapien
gcctgctgtgtatgagcgggaattg

SEQ ID NO: 862443 - DNA, 25 bp, Homo sapien
gattcccagacgttctgctctgagc

SEQ ID NO: 862444 - DNA, 25 bp, Homo sapien
tcagactcccagatcaggttgaggt

SEQ ID NO: 862445 - DNA, 25 bp, Homo sapien
caggagagtgagctcgccaggccgt

SEQ ID NO: 862446 - DNA, 25 bp, Homo sapien
tgctgaggctcagcgaacagagcct

SEQ ID NO: 862447 - DNA, 25 bp, Homo sapien
aacagagcctccaaaccacggacac

SEQ ID NO: 862448 - DNA, 25 bp, Homo sapien
ggacagggaggaggtgaagaggaag

SEQ ID NO: 862449 - DNA, 25 bp, Homo sapien
aggagagggaggaagtgaaggagag

SEQ ID NO: 862450 - DNA, 25 bp, Homo sapien
gagagggaggaggtgaaaaaggaga

SEQ ID NO: 862451 - DNA, 25 bp, Homo sapien
gacagggaggaggtgaaaaaggaga

SEQ ID NO: 862452 - DNA, 25 bp, Homo sapien
atgtccctgatgcagcgggactgcc

SEQ ID NO: 862453 - DNA, 25 bp, Homo sapien
gtccctgatgcagcgggactgccct

SEQ ID NO: 862454 - DNA, 25 bp, Homo sapien
tgatgcagcgggactgccctttcat

SEQ ID NO: 862455 - DNA, 25 bp, Homo sapien
tggccctagctctgaatccacatgt

SEQ ID NO: 862456 - DNA, 25 bp, Homo sapien
gcattcagcgcctgtattcacgtgg

SEQ ID NO: 862457 - DNA, 25 bp, Homo sapien
gcattcggcggcacctgtattcacg

SEQ ID NO: 862458 - DNA, 25 bp, Homo sapien
gggcattcggcacccgtattcacgt

SEQ ID NO: 862459 - DNA, 25 bp, Homo sapien
cttgagcgctgtggcccgtttccag

SEQ ID NO: 862460 - DNA, 25 bp, Homo sapien
ggctggatgcttcgacgtcacctaa

SEQ ID NO: 862461 - DNA, 25 bp, Homo sapien
cagtttcacgggcttttgctcgtca

SEQ ID NO: 862462 - DNA, 25 bp, Homo sapien
gaatcagaattcaactagccaagcc

SEQ ID NO: 862463 - DNA, 25 bp, Homo sapien
taaactgacagatatggctggatgc

SEQ ID NO: 862464 - DNA, 25 bp, Homo sapien
gattcgatggtgtttgctgcatttg

SEQ ID NO: 862465 - DNA, 25 bp, Homo sapien
agagcagacccagaagaattgattg

SEQ ID NO: 862466 - DNA, 25 bp, Homo sapien
aagaattgattgcagtggtcgagtc

SEQ ID NO: 862467 - DNA, 25 bp, Homo sapien
agtctggcctgattcgatggtgttt

SEQ ID NO: 862468 - DNA, 25 bp, Homo sapien
tatagccaggatcggtcaactttag

SEQ ID NO: 862469 - DNA, 25 bp, Homo sapien
tacgaatccacatgggaaagtccct

SEQ ID NO: 862470 - DNA, 25 bp, Homo sapien
aactttagtatggactccgctggcc

SEQ ID NO: 862471 - DNA, 25 bp, Homo sapien
tcaaaagtagggtcatacgaatcca

SEQ ID NO: 862472 - DNA, 25 bp, Homo sapien
ggacaagcccagtttccagtgccat

SEQ ID NO: 862473 - DNA, 25 bp, Homo sapien
ttgtgaatgggacgaagatcacagc

SEQ ID NO: 862474 - DNA, 25 bp, Homo sapien
tttgtgaatgggacgaagatcacag

SEQ ID NO: 862475 - DNA, 25 bp, Homo sapien
gctgtggacaagcccagtttccagt

SEQ ID NO: 862476 - DNA, 25 bp, Homo sapien
gcagaactctgtttgaacactggga

SEQ ID NO: 862477 - DNA, 25 bp, Homo sapien
tgggtctggcttgtgtcggcctcca

SEQ ID NO: 862478 - DNA, 25 bp, Homo sapien
tgggatttgcgaatggcagagaggc

SEQ ID NO: 862479 - DNA, 25 bp, Homo sapien
ggacgtcgatgttgccagcagcttt

SEQ ID NO: 862480 - DNA, 25 bp, Homo sapien
tccgcgagagcttgtttgccactca

SEQ ID NO: 862481 - DNA, 25 bp, Homo sapien
tgttgcaggcgatgccagagtgact

SEQ ID NO: 862482 - DNA, 25 bp, Homo sapien
aatatttaaataccctccgcgagag

SEQ ID NO: 862483 - DNA, 25 bp, Homo sapien
gaatcgggtgttgcatcgtgttcca

SEQ ID NO: 862484 - DNA, 25 bp, Homo sapien
gccgaggcccgaaggtggcctggag

SEQ ID NO: 862485 - DNA, 25 bp, Homo sapien
ctcgaggtgtgctgccgaggcccga

SEQ ID NO: 862486 - DNA, 25 bp, Homo sapien
ccctcgaggtgtgctgccgaggccc

SEQ ID NO: 862487 - DNA, 25 bp, Homo sapien
agaaacaccgaaagccttgacctca

SEQ ID NO: 862488 - DNA, 25 bp, Homo sapien
caccgggccgtggtctgcctggact

SEQ ID NO: 862489 - DNA, 25 bp, Homo sapien
tttgttcatgcagaccaccgggccg

SEQ ID NO: 862490 - DNA, 25 bp, Homo sapien
ctctgagaaactggcaggccacgga

SEQ ID NO: 862491 - DNA, 25 bp, Homo sapien
ggcctcctcagaaagatccaatagt

SEQ ID NO: 862492 - DNA, 25 bp, Homo sapien
ggcaccgtggacgtggccttctccg

SEQ ID NO: 862493 - DNA, 25 bp, Homo sapien
ttccttcacgcgcacatccgtttta

SEQ ID NO: 862494 - DNA, 25 bp, Homo sapien
atgatgtggagctttaaggacctgg

SEQ ID NO: 862495 - DNA, 25 bp, Homo sapien
tctccgggggagctctctgtggaca

SEQ ID NO: 862496 - DNA, 25 bp, Homo sapien
aatggcgctcgttgtgatgattgtg

SEQ ID NO: 862497 - DNA, 25 bp, Homo sapien
ttgtgacgatcgtgttcgtgctgct

SEQ ID NO: 862498 - DNA, 25 bp, Homo sapien
tggaaatggcgctcgttgtgatgat

SEQ ID NO: 862499 - DNA, 25 bp, Homo sapien
gaaatggcgctcgttgtgatgattg

SEQ ID NO: 862500 - DNA, 25 bp, Homo sapien
gggcaagtcttgtatccgatcgctg

SEQ ID NO: 862501 - DNA, 25 bp, Homo sapien
ccgatcgctgttccgtccatgggct

SEQ ID NO: 862502 - DNA, 25 bp, Homo sapien
tcaccatatagtcttggtgctgatg

SEQ ID NO: 862503 - DNA, 25 bp, Homo sapien
tggtgctgatgacacggatggctct

SEQ ID NO: 862504 - DNA, 25 bp, Homo sapien
ttggcagaggagaaatccgccagct

SEQ ID NO: 862505 - DNA, 25 bp, Homo sapien
gaaatgagcggcttgttactcctaa

SEQ ID NO: 862506 - DNA, 25 bp, Homo sapien
ccttctttcggcaccaggtcagaga

SEQ ID NO: 862507 - DNA, 25 bp, Homo sapien
cagagagtttcgaaggacgttggca

SEQ ID NO: 862508 - DNA, 25 bp, Homo sapien
tgggtagatggatgagtaagtgggt

SEQ ID NO: 862509 - DNA, 25 bp, Homo sapien
atgagtaagtgggtggtttggtcgg

SEQ ID NO: 862510 - DNA, 25 bp, Homo sapien
ggcaggtggacaggtggtagtgagt

SEQ ID NO: 862511 - DNA, 25 bp, Homo sapien
gtggatggagggacacacggaaggg

SEQ ID NO: 862512 - DNA, 25 bp, Homo sapien
cacggaagggcggatgtgtggatgg

SEQ ID NO: 862513 - DNA, 25 bp, Homo sapien
tggtggtgagtggataggtgggtgg

SEQ ID NO: 862514 - DNA, 25 bp, Homo sapien
tgcccgtccgatcgcctgagtcagg

SEQ ID NO: 862515 - DNA, 25 bp, Homo sapien
tgctctgtgaaacgtcctgtctgtt

SEQ ID NO: 862516 - DNA, 25 bp, Homo sapien
tgagtcaggcgtggtcctggcctct

SEQ ID NO: 862517 - DNA, 25 bp, Homo sapien
ccaaggccccgagggacatggcagc

SEQ ID NO: 862518 - DNA, 25 bp, Homo sapien
agcaggaccgggacggagactccac

SEQ ID NO: 862519 - DNA, 25 bp, Homo sapien
gtactgagataaccctgcacttccg

SEQ ID NO: 862520 - DNA, 25 bp, Homo sapien
acggagactccacggttaagcagca

SEQ ID NO: 862521 - DNA, 25 bp, Homo sapien
tgcaggagccttaaatcaagtactg

SEQ ID NO: 862522 - DNA, 25 bp, Homo sapien
gggcgggcaccctctaaacagagcc

SEQ ID NO: 862523 - DNA, 25 bp, Homo sapien
atgtggccatgaggcgcacggacct

SEQ ID NO: 862524 - DNA, 25 bp, Homo sapien
ccttgtgtgggtgaacgggtgccgt

SEQ ID NO: 862525 - DNA, 25 bp, Homo sapien
gaggagaggacgctccggagagaga

SEQ ID NO: 862526 - DNA, 25 bp, Homo sapien
acttttctactcagggcacggacct

SEQ ID NO: 862527 - DNA, 25 bp, Homo sapien
tgaccagttatggacggacacgtgg

SEQ ID NO: 862528 - DNA, 25 bp, Homo sapien
aaggctccggaaactttgctgtgtg

SEQ ID NO: 862529 - DNA, 25 bp, Homo sapien
ggtgctgagacgtgcctcacaggat

SEQ ID NO: 862530 - DNA, 25 bp, Homo sapien
gcaggagtgtgtacagtagctgggg

SEQ ID NO: 862531 - DNA, 25 bp, Homo sapien
ccctgcaggagtgtgtacagtagct

SEQ ID NO: 862532 - DNA, 25 bp, Homo sapien
cctgcaggagtgtgtacagtagctg

SEQ ID NO: 862533 - DNA, 25 bp, Homo sapien
gctccaagagtgttcgataataacc

SEQ ID NO: 862534 - DNA, 25 bp, Homo sapien
gaaatccagggtatgcagagatcgc

SEQ ID NO: 862535 - DNA, 25 bp, Homo sapien
tcacgtggacatccctagagagagt

SEQ ID NO: 862536 - DNA, 25 bp, Homo sapien
taataaccaagacgtggatcctgtg

SEQ ID NO: 862537 - DNA, 25 bp, Homo sapien
ccggcacacagagtcctcgaagcat

SEQ ID NO: 862538 - DNA, 25 bp, Homo sapien
cggcacacagagtcctcgaagcatc

SEQ ID NO: 862539 - DNA, 25 bp, Homo sapien
ggtccatgcaaaactgaatccccag

SEQ ID NO: 862540 - DNA, 25 bp, Homo sapien
cctctaaaggcgttgcaggccggta

SEQ ID NO: 862541 - DNA, 25 bp, Homo sapien
tgtgactttaaagccggtcctcgcc

SEQ ID NO: 862542 - DNA, 25 bp, Homo sapien
cgagctagtagcatgggccaggatt

SEQ ID NO: 862543 - DNA, 25 bp, Homo sapien
tggcacaagtaacatcaggacctgg

SEQ ID NO: 862544 - DNA, 25 bp, Homo sapien
tctaaagcaggagagtacacgtggc

SEQ ID NO: 862545 - DNA, 25 bp, Homo sapien
taaggataccggtcctgctgggtca

SEQ ID NO: 862546 - DNA, 25 bp, Homo sapien
gaaacatctgcctgatacagcccgt

SEQ ID NO: 862547 - DNA, 25 bp, Homo sapien
ctgcagacctcatggttgtcatggc

SEQ ID NO: 862548 - DNA, 25 bp, Homo sapien
tctatggacgtgtttcctgcagacc

SEQ ID NO: 862549 - DNA, 25 bp, Homo sapien
tcagctccacctctatggacgtgtt

SEQ ID NO: 862550 - DNA, 25 bp, Homo sapien
cctgcagacctcatggttgtcatgg

SEQ ID NO: 862551 - DNA, 25 bp, Homo sapien
tggtggccgtgtatccaggtggccg

SEQ ID NO: 862552 - DNA, 25 bp, Homo sapien
ggtggtggccgtgtatccaggtggc

SEQ ID NO: 862553 - DNA, 25 bp, Homo sapien
cgtgtatccaggtggccgtgtatcc

SEQ ID NO: 862554 - DNA, 25 bp, Homo sapien
tggccgtgtatccaggtggccgtgt

SEQ ID NO: 862555 - DNA, 25 bp, Homo sapien
caatacaatgaagaacgaccgctgt

SEQ ID NO: 862556 - DNA, 25 bp, Homo sapien
gaactgagtccccaaacgactgtgg

SEQ ID NO: 862557 - DNA, 25 bp, Homo sapien
cagatttggaattacacgtgtcagg

SEQ ID NO: 862558 - DNA, 25 bp, Homo sapien
gctcagagttatttccccggccagt

SEQ ID NO: 862559 - DNA, 25 bp, Homo sapien
ggtgaccccgaagcttcactgaaat

SEQ ID NO: 862560 - DNA, 25 bp, Homo sapien
ctgaaataaaagctcgagttaaggg

SEQ ID NO: 862561 - DNA, 25 bp, Homo sapien
ccgtgcaggtgaccccgaagcttca

SEQ ID NO: 862562 - DNA, 25 bp, Homo sapien
ccttgtgaacatggttggctggcag

SEQ ID NO: 862563 - DNA, 25 bp, Homo sapien
tgctcgcctcctgcacaggccatgg

SEQ ID NO: 862564 - DNA, 25 bp, Homo sapien
agccaccaggggtcacacttgctcg

SEQ ID NO: 862565 - DNA, 25 bp, Homo sapien
acacttgctcgcctcctgcacaggc

SEQ ID NO: 862566 - DNA, 25 bp, Homo sapien
aggggtcacacttgctcgcctcctg

SEQ ID NO: 862567 - DNA, 25 bp, Homo sapien
caaaaacagggcttggatgagccca

SEQ ID NO: 862568 - DNA, 25 bp, Homo sapien
gggatgggtcacaacaggagaccaa

SEQ ID NO: 862569 - DNA, 25 bp, Homo sapien
agacagccaggaacacctctaggcc

SEQ ID NO: 862570 - DNA, 25 bp, Homo sapien
caaggagtcgtgaattctgacactg

SEQ ID NO: 862571 - DNA, 25 bp, Homo sapien
tttgatgattttggcgaagggcttg

SEQ ID NO: 862572 - DNA, 25 bp, Homo sapien
agctgatcgtgggatgttttgatga

SEQ ID NO: 862573 - DNA, 25 bp, Homo sapien
ggtttctgaagaagacgtctctgag

SEQ ID NO: 862574 - DNA, 25 bp, Homo sapien
cccggtcaagcagagctgatcgtgg

SEQ ID NO: 862575 - DNA, 25 bp, Homo sapien
cctttaaggagcctcagggtccgtg

SEQ ID NO: 862576 - DNA, 25 bp, Homo sapien
cacggaatccgagagcttctcggtg

SEQ ID NO: 862577 - DNA, 25 bp, Homo sapien
gatccctggtgcatgaggtctcccg

SEQ ID NO: 862578 - DNA, 25 bp, Homo sapien
gtgctcttgagcactggccggccca

SEQ ID NO: 862579 - DNA, 25 bp, Homo sapien
atccgagagctcctcggtgagtaag

SEQ ID NO: 862580 - DNA, 25 bp, Homo sapien
aatccgagagctcctcggtgagtaa

SEQ ID NO: 862581 - DNA, 25 bp, Homo sapien
ccttccagccccacggaatccgaga

SEQ ID NO: 862582 - DNA, 25 bp, Homo sapien
gaatccgagagctcctcggtgagta

SEQ ID NO: 862583 - DNA, 25 bp, Homo sapien
gaatccgagagctcctcggtgagta

SEQ ID NO: 862584 - DNA, 25 bp, Homo sapien
ccttccagccccacggaatccgaga

SEQ ID NO: 862585 - DNA, 25 bp, Homo sapien
taagtgtgggtgcacggtatcacac

SEQ ID NO: 862586 - DNA, 25 bp, Homo sapien
ccgagagctcctcggtgagtaagtg

SEQ ID NO: 862587 - DNA, 25 bp, Homo sapien
catggaatctgagagagctcctcgg

SEQ ID NO: 862588 - DNA, 25 bp, Homo sapien
atggaatctgagagagctcctcggt

SEQ ID NO: 862589 - DNA, 25 bp, Homo sapien
tgagagagctcctcagtgagtaagc

SEQ ID NO: 862590 - DNA, 25 bp, Homo sapien
ccatggaatctgagagagctcctcg

SEQ ID NO: 862591 - DNA, 25 bp, Homo sapien
tttcctacacatgggcaggcttgaa

SEQ ID NO: 862592 - DNA, 25 bp, Homo sapien
cacatgggcaggcttgaaaacacag

SEQ ID NO: 862593 - DNA, 25 bp, Homo sapien
cctacacatgggcaggcttgaaaac

SEQ ID NO: 862594 - DNA, 25 bp, Homo sapien
ggggtgtgttcctgctgttctcatg

SEQ ID NO: 862595 - DNA, 25 bp, Homo sapien
gcaggtactgggggagcaggcactg

SEQ ID NO: 862596 - DNA, 25 bp, Homo sapien
caggtactgggggagcaggcactgg

SEQ ID NO: 862597 - DNA, 25 bp, Homo sapien
cttggggaagcgagtactgggggag

SEQ ID NO: 862598 - DNA, 25 bp, Homo sapien
cgagtactgggggagcaggtactgg

SEQ ID NO: 862599 - DNA, 25 bp, Homo sapien
agcgagcagaggatggaccttgcca

SEQ ID NO: 862600 - DNA, 25 bp, Homo sapien
cctgagcgagcagaggatggacctt

SEQ ID NO: 862601 - DNA, 25 bp, Homo sapien
gcgagcagaggatggaccttgccat

SEQ ID NO: 862602 - DNA, 25 bp, Homo sapien
tgagcgagcagaggatggaccttgc

SEQ ID NO: 862603 - DNA, 25 bp, Homo sapien
gaggtgggtcctgtggacatgaggg

SEQ ID NO: 862604 - DNA, 25 bp, Homo sapien
caagtagttgcaaggtggagtcagc

SEQ ID NO: 862605 - DNA, 25 bp, Homo sapien
aggttcttgcgcttcccatgcagag

SEQ ID NO: 862606 - DNA, 25 bp, Homo sapien
tcccacggaaggtgcagtgaccgat

SEQ ID NO: 862607 - DNA, 25 bp, Homo sapien
cgactgatggaaactggcgtgcacg

SEQ ID NO: 862608 - DNA, 25 bp, Homo sapien
ggctattgcagaattttgagaacat

SEQ ID NO: 862609 - DNA, 25 bp, Homo sapien
tgagaacattatagggttccgcttc

SEQ ID NO: 862610 - DNA, 25 bp, Homo sapien
aaataggctattgcagaattttgag

SEQ ID NO: 862611 - DNA, 25 bp, Homo sapien
tttgagaacattatagggttccgct

SEQ ID NO: 862612 - DNA, 25 bp, Homo sapien
tacgtgcgtgatccggcgtacgtgc

SEQ ID NO: 862613 - DNA, 25 bp, Homo sapien
atccggcgtacgtgcctgatcctgg

SEQ ID NO: 862614 - DNA, 25 bp, Homo sapien
gtacgtgcctgatcctggacccgtt

SEQ ID NO: 862615 - DNA, 25 bp, Homo sapien
ggcgtacgtgcgtgatcctggaccc

SEQ ID NO: 862616 - DNA, 25 bp, Homo sapien
tgttggacgtgtcccggagtggccg

SEQ ID NO: 862617 - DNA, 25 bp, Homo sapien
ttggacgtgtcctggagtggccggg

SEQ ID NO: 862618 - DNA, 25 bp, Homo sapien
cgtgtgttggacgtgtcccggagtg

SEQ ID NO: 862619 - DNA, 25 bp, Homo sapien
tgttggacgtgtcctggagtggccg

SEQ ID NO: 862620 - DNA, 25 bp, Homo sapien
gaaggatgtaatgcgtggaccctca

SEQ ID NO: 862621 - DNA, 25 bp, Homo sapien
acagagggacgtgacgcatggaccc

SEQ ID NO: 862622 - DNA, 25 bp, Homo sapien
gaccctcagcatactgtggctctgg

SEQ ID NO: 862623 - DNA, 25 bp, Homo sapien
gcatggaccctcagtgtactgtggc

SEQ ID NO: 862624 - DNA, 25 bp, Homo sapien
gattattacagtctgcgtcacccag

SEQ ID NO: 862625 - DNA, 25 bp, Homo sapien
caggctccgaaaaacagtgtgcacg

SEQ ID NO: 862626 - DNA, 25 bp, Homo sapien
tcattacaataagcgtgccgacctc

SEQ ID NO: 862627 - DNA, 25 bp, Homo sapien
gacccgctgatgtggactgaattcg

SEQ ID NO: 862628 - DNA, 25 bp, Homo sapien
cagagtgctccagctggagcagatg

SEQ ID NO: 862629 - DNA, 25 bp, Homo sapien
gcctgactcggtgagagcaggaaaa

SEQ ID NO: 862630 - DNA, 25 bp, Homo sapien
cgtgttcctcccacactaaacacat

SEQ ID NO: 862631 - DNA, 25 bp, Homo sapien
ccagctggagcagatgagcgatcat

SEQ ID NO: 862632 - DNA, 25 bp, Homo sapien
ctgagttgggaacggcaggttcagg

SEQ ID NO: 862633 - DNA, 25 bp, Homo sapien
tgagttgggaacggcaggttcaggg

SEQ ID NO: 862634 - DNA, 25 bp, Homo sapien
gcattgttcgagttggaggcgccat

SEQ ID NO: 862635 - DNA, 25 bp, Homo sapien
catcgtctgacttggaggcggcatc

SEQ ID NO: 862636 - DNA, 25 bp, Homo sapien
tccaagttggaggtgacatcgtcca

SEQ ID NO: 862637 - DNA, 25 bp, Homo sapien
cattgtccgagttggagacggcttt

SEQ ID NO: 862638 - DNA, 25 bp, Homo sapien
caggctcacactgtcggaactgaga

SEQ ID NO: 862639 - DNA, 25 bp, Homo sapien
cacccagcttggctcctgagaatgc

SEQ ID NO: 862640 - DNA, 25 bp, Homo sapien
tcacactgtcggaactgagaggtgg

SEQ ID NO: 862641 - DNA, 25 bp, Homo sapien
tgagaatgccccagctgttggtgac

SEQ ID NO: 862642 - DNA, 25 bp, Homo sapien
aatggcagattttgttgtcaccacc

SEQ ID NO: 862643 - DNA, 25 bp, Homo sapien
caaagagccgtttgccaacatcaca

SEQ ID NO: 862644 - DNA, 25 bp, Homo sapien
aagaaggcgctttcactccacgcag

SEQ ID NO: 862645 - DNA, 25 bp, Homo sapien
ctcttatagggaatggccacccgcc

SEQ ID NO: 862646 - DNA, 25 bp, Homo sapien
gacatcttcacgtcctggagaggga

SEQ ID NO: 862647 - DNA, 25 bp, Homo sapien
cgtgctgacgtctcggtgatggaca

SEQ ID NO: 862648 - DNA, 25 bp, Homo sapien
gatatgaagtctgctgtacccaggg

SEQ ID NO: 862649 - DNA, 25 bp, Homo sapien
aggccgtccccttcactgtgtgcat

SEQ ID NO: 862650 - DNA, 25 bp, Homo sapien
cctttggccatgtattccactctta

SEQ ID NO: 862651 - DNA, 25 bp, Homo sapien
tccagcaccgctcttatgccctcat

SEQ ID NO: 862652 - DNA, 25 bp, Homo sapien
cctcaggagggatcctttggccatg

SEQ ID NO: 862653 - DNA, 25 bp, Homo sapien
tgtattccactcttaaccccagctt

SEQ ID NO: 862654 - DNA, 25 bp, Homo sapien
tcccgctggtggaataacactcctg

SEQ ID NO: 862655 - DNA, 25 bp, Homo sapien
tcagggtgtcctctaataatgagag

SEQ ID NO: 862656 - DNA, 25 bp, Homo sapien
tgtggccattcacattcggatctca

SEQ ID NO: 862657 - DNA, 25 bp, Homo sapien
aatgagagacctgctggtgaccgag

SEQ ID NO: 862658 - DNA, 25 bp, Homo sapien
agcacaggcatcacaggtgctgccc

SEQ ID NO: 862659 - DNA, 25 bp, Homo sapien
cagacgatgccagtcagcacaggca

SEQ ID NO: 862660 - DNA, 25 bp, Homo sapien
tgcagacgatgccagtcagcacagg

SEQ ID NO: 862661 - DNA, 25 bp, Homo sapien
acaggcatcacaggtgctgcccaag

SEQ ID NO: 862662 - DNA, 25 bp, Homo sapien
ctgagtggtcgcagacatgcggctc

SEQ ID NO: 862663 - DNA, 25 bp, Homo sapien
cggctccagcgttcgagccttgtta

SEQ ID NO: 862664 - DNA, 25 bp, Homo sapien
gagtggtcgcagacatgcggctcca

SEQ ID NO: 862665 - DNA, 25 bp, Homo sapien
cagcgttcgagccttgttagatccc

SEQ ID NO: 862666 - DNA, 25 bp, Homo sapien
tctcacttgggtatgcagaactgac

SEQ ID NO: 862667 - DNA, 25 bp, Homo sapien
tcactggagtgtttaatatgcattt

SEQ ID NO: 862668 - DNA, 25 bp, Homo sapien
tgcataggactctctgctttcatag

SEQ ID NO: 862669 - DNA, 25 bp, Homo sapien
ggtgttttccataccttgatataag

SEQ ID NO: 862670 - DNA, 25 bp, Homo sapien
ttctcatggtgtggagttcccatgg

SEQ ID NO: 862671 - DNA, 25 bp, Homo sapien
cacggtgtggagttactctggtctc

SEQ ID NO: 862672 - DNA, 25 bp, Homo sapien
ttctcacggtgtggagttactctgg

SEQ ID NO: 862673 - DNA, 25 bp, Homo sapien
cctgttctcacggtgtggagttact

SEQ ID NO: 862674 - DNA, 25 bp, Homo sapien
ggcctagttaccaaaggtgcctgag

SEQ ID NO: 862675 - DNA, 25 bp, Homo sapien
tgtgcatgcgacgtacagggagttc

SEQ ID NO: 862676 - DNA, 25 bp, Homo sapien
caggatctgttgtgggcctagttac

SEQ ID NO: 862677 - DNA, 25 bp, Homo sapien
tatttagtctgtagatgtgcatgcg

SEQ ID NO: 862678 - DNA, 25 bp, Homo sapien
aatagcatcaccgactatggaagcc

SEQ ID NO: 862679 - DNA, 25 bp, Homo sapien
atcaccgactatggaagccttctcc

SEQ ID NO: 862680 - DNA, 25 bp, Homo sapien
gcatcaccgactatggaagccttct

SEQ ID NO: 862681 - DNA, 25 bp, Homo sapien
tagcatcaccgactatggaagcctt

SEQ ID NO: 862682 - DNA, 25 bp, Homo sapien
gacacagcgttgattttagaacaag

SEQ ID NO: 862683 - DNA, 25 bp, Homo sapien
gagctataagctggggatgcggcgt

SEQ ID NO: 862684 - DNA, 25 bp, Homo sapien
cattgattttaggaacaaaggagct

SEQ ID NO: 862685 - DNA, 25 bp, Homo sapien
caaggagttgtaagctggggatgca

SEQ ID NO: 862686 - DNA, 25 bp, Homo sapien
acacagcgtttgtaagctggggaca

SEQ ID NO: 862687 - DNA, 25 bp, Homo sapien
agtgtgacacagcgtttgtaagctg

SEQ ID NO: 862688 - DNA, 25 bp, Homo sapien
tgtgacacagcgtttgtaagctggg

SEQ ID NO: 862689 - DNA, 25 bp, Homo sapien
tgacacagcgtttgtaagctgggga

SEQ ID NO: 862690 - DNA, 25 bp, Homo sapien
ctcatctccggtgggtgccagcaag

SEQ ID NO: 862691 - DNA, 25 bp, Homo sapien
cagggactcgcggagaacagctgca

SEQ ID NO: 862692 - DNA, 25 bp, Homo sapien
tccagttacggaactcgttatcagg

SEQ ID NO: 862693 - DNA, 25 bp, Homo sapien
gagtctcccgatgacaggtttcctg

SEQ ID NO: 862694 - DNA, 25 bp, Homo sapien
ctgcggcatttggccccgttgttcc

SEQ ID NO: 862695 - DNA, 25 bp, Homo sapien
tggccaggttgccatccggctcacg

SEQ ID NO: 862696 - DNA, 25 bp, Homo sapien
ggccccgttgttccttcactgcatg

SEQ ID NO: 862697 - DNA, 25 bp, Homo sapien
ggctcacgaggcgccgtccactgta

SEQ ID NO: 862698 - DNA, 25 bp, Homo sapien
aagttggtaaaaatcgatggagtct

SEQ ID NO: 862699 - DNA, 25 bp, Homo sapien
atgatttggactttccttggaaaag

SEQ ID NO: 862700 - DNA, 25 bp, Homo sapien
catgctgcctataggatctgtctct

SEQ ID NO: 862701 - DNA, 25 bp, Homo sapien
ttaaggaagccattgccgtccacag

SEQ ID NO: 862702 - DNA, 25 bp, Homo sapien
tgagtgacaaggacactcagcgtgc

SEQ ID NO: 862703 - DNA, 25 bp, Homo sapien
tgacaaggacactcagcgtgcacag

SEQ ID NO: 862704 - DNA, 25 bp, Homo sapien
gggatggcccttaaggaagccattg

SEQ ID NO: 862705 - DNA, 25 bp, Homo sapien
agggccacatctcatcaccaccggc

SEQ ID NO: 862706 - DNA, 25 bp, Homo sapien
gccacatctcatcaccaccggccat

SEQ ID NO: 862707 - DNA, 25 bp, Homo sapien
gggccacatctcatcaccaccggcc

SEQ ID NO: 862708 - DNA, 25 bp, Homo sapien
gcagggccacatctcatcaccaccg

SEQ ID NO: 862709 - DNA, 25 bp, Homo sapien
tgttgaggctttaccttgtgctgag

SEQ ID NO: 862710 - DNA, 25 bp, Homo sapien
gaactccgtcctcccgtgttgaggc

SEQ ID NO: 862711 - DNA, 25 bp, Homo sapien
agtaagcagggcagttcacacaggc

SEQ ID NO: 862712 - DNA, 25 bp, Homo sapien
cagggacaagatgaagtgctctacg

SEQ ID NO: 862713 - DNA, 25 bp, Homo sapien
ggacaaacatggaagtgcttggcat

SEQ ID NO: 862714 - DNA, 25 bp, Homo sapien
gagtcatatatgagaggacaaacat

SEQ ID NO: 862715 - DNA, 25 bp, Homo sapien
aggacaaacatggaagtgcttggca

SEQ ID NO: 862716 - DNA, 25 bp, Homo sapien
agtcatatatgagaggacaaacatg

SEQ ID NO: 862717 - DNA, 25 bp, Homo sapien
accgcggccaatggctggacctgag

SEQ ID NO: 862718 - DNA, 25 bp, Homo sapien
cagggtccgtttcatgctgcgcggc

SEQ ID NO: 862719 - DNA, 25 bp, Homo sapien
gaaaaccgtgtcctgcggatgccgg

SEQ ID NO: 862720 - DNA, 25 bp, Homo sapien
atccagggatgtctggcgaagctga

SEQ ID NO: 862721 - DNA, 25 bp, Homo sapien
ggtttttgccggcatcactgatgaa

SEQ ID NO: 862722 - DNA, 25 bp, Homo sapien
tttgccggcatcactgatgaagttt

SEQ ID NO: 862723 - DNA, 25 bp, Homo sapien
taggtatttggtttttgccggcatc

SEQ ID NO: 862724 - DNA, 25 bp, Homo sapien
tatttggtttttgccggcatcactg

SEQ ID NO: 862725 - DNA, 25 bp, Homo sapien
ggcttctggctactccttgtcgaca

SEQ ID NO: 862726 - DNA, 25 bp, Homo sapien
cctttagcgagatgttggagaaata

SEQ ID NO: 862727 - DNA, 25 bp, Homo sapien
ggtgagctcctcctttagcgagatg

SEQ ID NO: 862728 - DNA, 25 bp, Homo sapien
aggattggcttctggctactccttg

SEQ ID NO: 862729 - DNA, 25 bp, Homo sapien
gggcagcgagtgtccctagaatcac

SEQ ID NO: 862730 - DNA, 25 bp, Homo sapien
aatcacagctgcacgggtgccctgt

SEQ ID NO: 862731 - DNA, 25 bp, Homo sapien
caatgcctatgaccttgtggaggac

SEQ ID NO: 862732 - DNA, 25 bp, Homo sapien
cccagtgcatgtcttggcaatcatt

SEQ ID NO: 862733 - DNA, 25 bp, Homo sapien
tgctggaccatcactgctgtgtgtc

SEQ ID NO: 862734 - DNA, 25 bp, Homo sapien
ctagggcagtgccaactgacacagt

SEQ ID NO: 862735 - DNA, 25 bp, Homo sapien
gggcagtgccaactgacacagtgcc

SEQ ID NO: 862736 - DNA, 25 bp, Homo sapien
cagtgccaactgacacagtgcccag

SEQ ID NO: 862737 - DNA, 25 bp, Homo sapien
ggctgctcccaaggaggcccaatac

SEQ ID NO: 862738 - DNA, 25 bp, Homo sapien
aggaggcccaataccagcccatggg

SEQ ID NO: 862739 - DNA, 25 bp, Homo sapien
gagagccacgtcaatccacatctgc

SEQ ID NO: 862740 - DNA, 25 bp, Homo sapien
gatttggccaagaatgagcactctc

SEQ ID NO: 862741 - DNA, 25 bp, Homo sapien
gtttctgactcaagaccatgacggt

SEQ ID NO: 862742 - DNA, 25 bp, Homo sapien
acaatatgttccacaggatgccagg

SEQ ID NO: 862743 - DNA, 25 bp, Homo sapien
gagacaacagcgtggatgtgacact

SEQ ID NO: 862744 - DNA, 25 bp, Homo sapien
ccagaagcattgaggttgaatcaca

SEQ ID NO: 862745 - DNA, 25 bp, Homo sapien
ccgcagccgggtcctcaggacttga

SEQ ID NO: 862746 - DNA, 25 bp, Homo sapien
tcctgtcagggccagcgttctggtg

SEQ ID NO: 862747 - DNA, 25 bp, Homo sapien
aatgtccagagaattttggtctgag

SEQ ID NO: 862748 - DNA, 25 bp, Homo sapien
cagccatgaaaatgtccagagaatt

SEQ ID NO: 862749 - DNA, 25 bp, Homo sapien
gctgcttctgcgagctgtagtttac

SEQ ID NO: 862750 - DNA, 25 bp, Homo sapien
gctccctttgaaggtttcgagcttc

SEQ ID NO: 862751 - DNA, 25 bp, Homo sapien
aggctccctttgaaggtttcgagct

SEQ ID NO: 862752 - DNA, 25 bp, Homo sapien
ctgctgcttctgcgagctgtagttt

SEQ ID NO: 862753 - DNA, 25 bp, Homo sapien
ggttagtggagtccacctgtctcct

SEQ ID NO: 862754 - DNA, 25 bp, Homo sapien
cctctctcgtctgaaatggcctctg

SEQ ID NO: 862755 - DNA, 25 bp, Homo sapien
ggtcagtggagtccgcctgtctccg

SEQ ID NO: 862756 - DNA, 25 bp, Homo sapien
gctgggctgcgtcggttggttagtg

SEQ ID NO: 862757 - DNA, 25 bp, Homo sapien
caggtgactggagcaaaatagcccc

SEQ ID NO: 862758 - DNA, 25 bp, Homo sapien
ccttgcgcgggacatagtagctctg

SEQ ID NO: 862759 - DNA, 25 bp, Homo sapien
tatgaaccccatgccctagcaagtg

SEQ ID NO: 862760 - DNA, 25 bp, Homo sapien
tgttctcgggaattctggcctcgcc

SEQ ID NO: 862761 - DNA, 25 bp, Homo sapien
tgtggatgctcaggcagcagttcag

SEQ ID NO: 862762 - DNA, 25 bp, Homo sapien
tggatgctcaggcagcagttcagga

SEQ ID NO: 862763 - DNA, 25 bp, Homo sapien
gcagttcaggaggtgagatgagcat

SEQ ID NO: 862764 - DNA, 25 bp, Homo sapien
caggcagcagttcaggaggtgagat

SEQ ID NO: 862765 - DNA, 25 bp, Homo sapien
gacaactaccaccaagtcacggaga

SEQ ID NO: 862766 - DNA, 25 bp, Homo sapien
agaccagtagtagcccggaatgcca

SEQ ID NO: 862767 - DNA, 25 bp, Homo sapien
tgtggagacgagagatcatagaaat

SEQ ID NO: 862768 - DNA, 25 bp, Homo sapien
agaagtgtcgctctgtgtagggtcc

SEQ ID NO: 862769 - DNA, 25 bp, Homo sapien
tgtgttatggaatccaaatgcttgt

SEQ ID NO: 862770 - DNA, 25 bp, Homo sapien
ctgactgtgttatggaatccaaatg

SEQ ID NO: 862771 - DNA, 25 bp, Homo sapien
actgactgtgttatggaatccaaat

SEQ ID NO: 862772 - DNA, 25 bp, Homo sapien
gactgtgttatggaatccaaatgct

SEQ ID NO: 862773 - DNA, 25 bp, Homo sapien
cacatgttcaggttgccagagtcaa

SEQ ID NO: 862774 - DNA, 25 bp, Homo sapien
tcttggtcgtctgggtaacaggtcc

SEQ ID NO: 862775 - DNA, 25 bp, Homo sapien
gccagagtcaatgcggttaaacccc

SEQ ID NO: 862776 - DNA, 25 bp, Homo sapien
aatgctgtgcatgtcccgggctctc

SEQ ID NO: 862777 - DNA, 25 bp, Homo sapien
aaatcactggcacagggggggcttt

SEQ ID NO: 862778 - DNA, 25 bp, Homo sapien
ctggaaatcactggcacaggggggg

SEQ ID NO: 862779 - DNA, 25 bp, Homo sapien
ggaaatcactggcacagggggggct

SEQ ID NO: 862780 - DNA, 25 bp, Homo sapien
cttctggaaatcactggcacagggg

SEQ ID NO: 862781 - DNA, 25 bp, Homo sapien
tgctgaggaggctccgccaagtctc

SEQ ID NO: 862782 - DNA, 25 bp, Homo sapien
cgttggtgttcctggtgaactgcat

SEQ ID NO: 862783 - DNA, 25 bp, Homo sapien
aggaggctccgccaagtctctcagc

SEQ ID NO: 862784 - DNA, 25 bp, Homo sapien
agagacgttggtgttcctggtgaac

SEQ ID NO: 862785 - DNA, 25 bp, Homo sapien
tgctctgctcagtcagggccgctgg

SEQ ID NO: 862786 - DNA, 25 bp, Homo sapien
cccagtgggcctgatcagacagcca

SEQ ID NO: 862787 - DNA, 25 bp, Homo sapien
ttcatgttgaaggagtgacagggac

SEQ ID NO: 862788 - DNA, 25 bp, Homo sapien
cacctgcgtcgtttcatggctttct

SEQ ID NO: 862789 - DNA, 25 bp, Homo sapien
tcttcagtgtcaagatgaggccgct

SEQ ID NO: 862790 - DNA, 25 bp, Homo sapien
ggttatcacatcctctggcaggcag

SEQ ID NO: 862791 - DNA, 25 bp, Homo sapien
tgaggccgcttcactaacgagatgc

SEQ ID NO: 862792 - DNA, 25 bp, Homo sapien
gattcgtatgatgcaaagcccacgg

SEQ ID NO: 862793 - DNA, 25 bp, Homo sapien
ctccaccaccacgggcacctccacc

SEQ ID NO: 862794 - DNA, 25 bp, Homo sapien
ctccaccaccaggagcacctccacc

SEQ ID NO: 862795 - DNA, 25 bp, Homo sapien
accaccaggagcacctccaccacca

SEQ ID NO: 862796 - DNA, 25 bp, Homo sapien
tccaccaccacgggcacctccacca

SEQ ID NO: 862797 - DNA, 25 bp, Homo sapien
catactaagagcacctccaccacga

SEQ ID NO: 862798 - DNA, 25 bp, Homo sapien
gagcacctccatactaagagcacct

SEQ ID NO: 862799 - DNA, 25 bp, Homo sapien
ccatgagcacctccatactaagagc

SEQ ID NO: 862800 - DNA, 25 bp, Homo sapien
atactaagagcacctccaccacgag

SEQ ID NO: 862801 - DNA, 25 bp, Homo sapien
acctccaccaccacgggcacctcca

SEQ ID NO: 862802 - DNA, 25 bp, Homo sapien
agcacctccaccaccacgggcacct

SEQ ID NO: 862803 - DNA, 25 bp, Homo sapien
gcacctccaccaccacgggcacctc

SEQ ID NO: 862804 - DNA, 25 bp, Homo sapien
gagcacctccaccaccacgggcacc

SEQ ID NO: 862805 - DNA, 25 bp, Homo sapien
accaccacgagcacctccaccacca

SEQ ID NO: 862806 - DNA, 25 bp, Homo sapien
ccaccacgagcacctccaccaccat

SEQ ID NO: 862807 - DNA, 25 bp, Homo sapien
ctccaccaccacgagcacctccacc

SEQ ID NO: 862808 - DNA, 25 bp, Homo sapien
ccaccaccacgagcacctccaccac

SEQ ID NO: 862809 - DNA, 25 bp, Homo sapien
cgagcacctccaccaccacgagcac

SEQ ID NO: 862810 - DNA, 25 bp, Homo sapien
cacgagcacctccaccaccacgagc

SEQ ID NO: 862811 - DNA, 25 bp, Homo sapien
acgagcacctccaccaccacgagca

SEQ ID NO: 862812 - DNA, 25 bp, Homo sapien
acctccaccaccacgagcacctcca

SEQ ID NO: 862813 - DNA, 25 bp, Homo sapien
ctccaccaccacgagcacctccacc

SEQ ID NO: 862814 - DNA, 25 bp, Homo sapien
ccaccacgagcacctccaccaccag

SEQ ID NO: 862815 - DNA, 25 bp, Homo sapien
ccaccaccacgagcacctccaccac

SEQ ID NO: 862816 - DNA, 25 bp, Homo sapien
catgagcacctccatatgacgagca

SEQ ID NO: 862817 - DNA, 25 bp, Homo sapien
gagcacctccatatgacgagcacct

SEQ ID NO: 862818 - DNA, 25 bp, Homo sapien
acgagcacctccaccaccacgagca

SEQ ID NO: 862819 - DNA, 25 bp, Homo sapien
tccaccaccacgagcacctccacca

SEQ ID NO: 862820 - DNA, 25 bp, Homo sapien
acctccatacgacgagcacctccac

SEQ ID NO: 862821 - DNA, 25 bp, Homo sapien
cctccatacgacgagcacctccacc

SEQ ID NO: 862822 - DNA, 25 bp, Homo sapien
gagcacctccaccaccacgagcacc

SEQ ID NO: 862823 - DNA, 25 bp, Homo sapien
acctccaccaccacgagcacctcca

SEQ ID NO: 862824 - DNA, 25 bp, Homo sapien
gcacctccaccaccacgagcacctc

SEQ ID NO: 862825 - DNA, 25 bp, Homo sapien
tccaccaccacgagcacctccacca

SEQ ID NO: 862826 - DNA, 25 bp, Homo sapien
accaccacgagcacctccaccatga

SEQ ID NO: 862827 - DNA, 25 bp, Homo sapien
ccaccaccacgagcacctccaccat

SEQ ID NO: 862828 - DNA, 25 bp, Homo sapien
caccacgagcacctccaccatgagc

SEQ ID NO: 862829 - DNA, 25 bp, Homo sapien
tccaccatgagcacctccatacgac

SEQ ID NO: 862830 - DNA, 25 bp, Homo sapien
ccaccacgagcacctccaccaccac

SEQ ID NO: 862831 - DNA, 25 bp, Homo sapien
caccaccacgagcacctccaccacc

SEQ ID NO: 862832 - DNA, 25 bp, Homo sapien
accaccacgagcacctccaccacca

SEQ ID NO: 862833 - DNA, 25 bp, Homo sapien
gaaggccctgtaccctggatgtgca

SEQ ID NO: 862834 - DNA, 25 bp, Homo sapien
tcctagcccactggagatgagctgt

SEQ ID NO: 862835 - DNA, 25 bp, Homo sapien
cactgtgggcgtcgctgagtttccc

SEQ ID NO: 862836 - DNA, 25 bp, Homo sapien
tggtccttccatgatgcgaggctgc

SEQ ID NO: 862837 - DNA, 25 bp, Homo sapien
gtgaagactccctctttcgtcaggg

SEQ ID NO: 862838 - DNA, 25 bp, Homo sapien
agggtttgtgtgaagactccctctt

SEQ ID NO: 862839 - DNA, 25 bp, Homo sapien
tgtgaagactccctctttcgtcagg

SEQ ID NO: 862840 - DNA, 25 bp, Homo sapien
ggatgtgtgtgaagactccctcttt

SEQ ID NO: 862841 - DNA, 25 bp, Homo sapien
gcctttgcggtacaacatgctttta

SEQ ID NO: 862842 - DNA, 25 bp, Homo sapien
cattgggtagttaaattgcccctca

SEQ ID NO: 862843 - DNA, 25 bp, Homo sapien
gactttcaacctgaatgctggcctt

SEQ ID NO: 862844 - DNA, 25 bp, Homo sapien
gtgacggctcttgcctcttgacgga

SEQ ID NO: 862845 - DNA, 25 bp, Homo sapien
tgacacatcgcagtctatgaccatg

SEQ ID NO: 862846 - DNA, 25 bp, Homo sapien
cagtctatgaccatgtccacttcag

SEQ ID NO: 862847 - DNA, 25 bp, Homo sapien
acagttctgaacaccttacccgctg

SEQ ID NO: 862848 - DNA, 25 bp, Homo sapien
tacccgctgacacatcgcagtctat

SEQ ID NO: 862849 - DNA, 25 bp, Homo sapien
ctgagcgaaccaggctccttccctg

SEQ ID NO: 862850 - DNA, 25 bp, Homo sapien
gagcgaaccaggctccttccctgtt

SEQ ID NO: 862851 - DNA, 25 bp, Homo sapien
gaaccaggctccttccctgttccat

SEQ ID NO: 862852 - DNA, 25 bp, Homo sapien
agcgaaccaggctccttccctgttc

SEQ ID NO: 862853 - DNA, 25 bp, Homo sapien
ttcaggcctcggaatgacagatgat

SEQ ID NO: 862854 - DNA, 25 bp, Homo sapien
cattttcaggatgacgtccaactgc

SEQ ID NO: 862855 - DNA, 25 bp, Homo sapien
tgctggatcctcccactcattttca

SEQ ID NO: 862856 - DNA, 25 bp, Homo sapien
gctttctaaggaagttcaggcctcg

SEQ ID NO: 862857 - DNA, 25 bp, Homo sapien
catggcggtccgcaggaggaaggtt

SEQ ID NO: 862858 - DNA, 25 bp, Homo sapien
cggcacacgagctccggggctgcat

SEQ ID NO: 862859 - DNA, 25 bp, Homo sapien
agggtcgttggcctgggtgcggcac

SEQ ID NO: 862860 - DNA, 25 bp, Homo sapien
ggaaggttcagtttgggtgcacaaa

SEQ ID NO: 862861 - DNA, 25 bp, Homo sapien
tgctcaggaaccactgcccgctctc

SEQ ID NO: 862862 - DNA, 25 bp, Homo sapien
gtgctcaggaaccactgcccgctct

SEQ ID NO: 862863 - DNA, 25 bp, Homo sapien
gctcaggaaccactgcccgctctcc

SEQ ID NO: 862864 - DNA, 25 bp, Homo sapien
tcaggaaccactgcccgctctccgg

SEQ ID NO: 862865 - DNA, 25 bp, Homo sapien
ctagaatgtggcaaacgcccctgtg

SEQ ID NO: 862866 - DNA, 25 bp, Homo sapien
gaatgtggcaaacgcccctgtgctt

SEQ ID NO: 862867 - DNA, 25 bp, Homo sapien
tctctggagtggcagccgcagtgtg

SEQ ID NO: 862868 - DNA, 25 bp, Homo sapien
gagtggcagccgcagtgtgtggctc

SEQ ID NO: 862869 - DNA, 25 bp, Homo sapien
ccgagccgtggcattctggagacgt

SEQ ID NO: 862870 - DNA, 25 bp, Homo sapien
tgtgagggaaaccttgccgagctgt

SEQ ID NO: 862871 - DNA, 25 bp, Homo sapien
ccgtgatgtgagggaaaccttgcca

SEQ ID NO: 862872 - DNA, 25 bp, Homo sapien
actgtaccacgctgtaccgggcact

SEQ ID NO: 862873 - DNA, 25 bp, Homo sapien
tctgcactaggacatcccttccgtt

SEQ ID NO: 862874 - DNA, 25 bp, Homo sapien
catctcttgggttgcgaccctgccg

SEQ ID NO: 862875 - DNA, 25 bp, Homo sapien
cccttccgttgggagctcgtgacgg

SEQ ID NO: 862876 - DNA, 25 bp, Homo sapien
cgtgggcaccggtcatgtcaaatat

SEQ ID NO: 862877 - DNA, 25 bp, Homo sapien
aagcgtggcggccttccccatcagg

SEQ ID NO: 862878 - DNA, 25 bp, Homo sapien
cttccccatcgcggggcaagcgtgg

SEQ ID NO: 862879 - DNA, 25 bp, Homo sapien
cttccccatcaggcggcgagcgtgg

SEQ ID NO: 862880 - DNA, 25 bp, Homo sapien
atcgcggggcaagcgtggcggcctt

SEQ ID NO: 862881 - DNA, 25 bp, Homo sapien
cttccccatacagggggcgagcgtg

SEQ ID NO: 862882 - DNA, 25 bp, Homo sapien
agcgtggcggccttccccatacagg

SEQ ID NO: 862883 - DNA, 25 bp, Homo sapien
gagcgtggcggccttccccatacag

SEQ ID NO: 862884 - DNA, 25 bp, Homo sapien
ccttccccatacagggggcgagcgt

SEQ ID NO: 862885 - DNA, 25 bp, Homo sapien
gagcgtggcggccttccccatcagg

SEQ ID NO: 862886 - DNA, 25 bp, Homo sapien
cttccccatcaggcggcgagcgtgg

SEQ ID NO: 862887 - DNA, 25 bp, Homo sapien
cttccccatcgcggggcgagcgtgg

SEQ ID NO: 862888 - DNA, 25 bp, Homo sapien
gcgagcgtggcggccttccccatca

SEQ ID NO: 862889 - DNA, 25 bp, Homo sapien
cttccccatacagggggcgagcgtg

SEQ ID NO: 862890 - DNA, 25 bp, Homo sapien
ccttccccatacagggggcgagcgt

SEQ ID NO: 862891 - DNA, 25 bp, Homo sapien
ggcgagcgtggcggccttccccata

SEQ ID NO: 862892 - DNA, 25 bp, Homo sapien
gcgtggcggccttccccatacaggg

SEQ ID NO: 862893 - DNA, 25 bp, Homo sapien
cacacgccccggagtgctctggaag

SEQ ID NO: 862894 - DNA, 25 bp, Homo sapien
tggcttactgcactaggattccagc

SEQ ID NO: 862895 - DNA, 25 bp, Homo sapien
ttccattcctggcttactgcactag

SEQ ID NO: 862896 - DNA, 25 bp, Homo sapien
agcattctcaacacacgccccggag

SEQ ID NO: 862897 - DNA, 25 bp, Homo sapien
taagcacgtctggtgcgccagacat

SEQ ID NO: 862898 - DNA, 25 bp, Homo sapien
cagcttctgtgcctcgagtcctcag

SEQ ID NO: 862899 - DNA, 25 bp, Homo sapien
tcgagtcctcagctgtaaaccaggg

SEQ ID NO: 862900 - DNA, 25 bp, Homo sapien
tattcattaactgagagcaactaag

SEQ ID NO: 862901 - DNA, 25 bp, Homo sapien
cctccgtggagaagcacatgcacat

SEQ ID NO: 862902 - DNA, 25 bp, Homo sapien
ccctccgtggagaagcacatgcaca

SEQ ID NO: 862903 - DNA, 25 bp, Homo sapien
gtgccgacggtctttggtggagcct

SEQ ID NO: 862904 - DNA, 25 bp, Homo sapien
tgccagccgttggtgccgacggtct

SEQ ID NO: 862905 - DNA, 25 bp, Homo sapien
taatttcccaaggaacatgccagcc

SEQ ID NO: 862906 - DNA, 25 bp, Homo sapien
tccagagcctcctttaggcttttcc

SEQ ID NO: 862907 - DNA, 25 bp, Homo sapien
cttgtctgcatgcaggccgaccctg

SEQ ID NO: 862908 - DNA, 25 bp, Homo sapien
ttgtctgcatgcaggccgaccctgg

SEQ ID NO: 862909 - DNA, 25 bp, Homo sapien
gcttgtctgcatgcaggccgaccct

SEQ ID NO: 862910 - DNA, 25 bp, Homo sapien
ctccccctgactccttgccctgtcc

SEQ ID NO: 862911 - DNA, 25 bp, Homo sapien
gggctcttcgtgtaaaggcagaaaa

SEQ ID NO: 862912 - DNA, 25 bp, Homo sapien
cccacgtgagaagcagcatcgctgt

SEQ ID NO: 862913 - DNA, 25 bp, Homo sapien
tctggaaccctaccaggaacaagaa

SEQ ID NO: 862914 - DNA, 25 bp, Homo sapien
tcctcccgggcatcaaggaaagtgc

SEQ ID NO: 862915 - DNA, 25 bp, Homo sapien
ccggctctttctgccagacatcaca

SEQ ID NO: 862916 - DNA, 25 bp, Homo sapien
ctgcagcggacaccgtccccagctt

SEQ ID NO: 862917 - DNA, 25 bp, Homo sapien
tccccactggtcctccagaccaggg

SEQ ID NO: 862918 - DNA, 25 bp, Homo sapien
ccccggctctttctgccagacatca

SEQ ID NO: 862919 - DNA, 25 bp, Homo sapien
gcggctcctcccgtgtctgcatcca

SEQ ID NO: 862920 - DNA, 25 bp, Homo sapien
gtgtctgtggctctcccgcgtctgc

SEQ ID NO: 862921 - DNA, 25 bp, Homo sapien
tgcggctcccgtgtctgtggctcct

SEQ ID NO: 862922 - DNA, 25 bp, Homo sapien
ctagatcccggagtgtgagggtgtc

SEQ ID NO: 862923 - DNA, 25 bp, Homo sapien
caatggaggaacctcccgagcaggc

SEQ ID NO: 862924 - DNA, 25 bp, Homo sapien
ggaacctcccgagcaggcccagtgg

SEQ ID NO: 862925 - DNA, 25 bp, Homo sapien
atggaggaacctcccgagcaggccc

SEQ ID NO: 862926 - DNA, 25 bp, Homo sapien
gaggaacctcccgagcaggcccagt

SEQ ID NO: 862927 - DNA, 25 bp, Homo sapien
ctccgtgtgactcgcgctctgtcag

SEQ ID NO: 862928 - DNA, 25 bp, Homo sapien
cctccgtgtgactcgcgctctgtca

SEQ ID NO: 862929 - DNA, 25 bp, Homo sapien
tgaaaacgactgtggattcatttcc

SEQ ID NO: 862930 - DNA, 25 bp, Homo sapien
atatgtacataaaacagtgttatca

SEQ ID NO: 862931 - DNA, 25 bp, Homo sapien
gaatcttctgacttattgagctgca

SEQ ID NO: 862932 - DNA, 25 bp, Homo sapien
gagctgcatgtcagaagcaaaaagc

SEQ ID NO: 862933 - DNA, 25 bp, Homo sapien
ttcattcgaaaagcagagtaggaac

SEQ ID NO: 862934 - DNA, 25 bp, Homo sapien
tgcggcctgtccatcacggacggtg

SEQ ID NO: 862935 - DNA, 25 bp, Homo sapien
caaaggagcgggcacatctgcctgt

SEQ ID NO: 862936 - DNA, 25 bp, Homo sapien
cactgggtatgtttgaagtcgctcc

SEQ ID NO: 862937 - DNA, 25 bp, Homo sapien
ggaggctgtgtgtgtacgagggagg

SEQ ID NO: 862938 - DNA, 25 bp, Homo sapien
gctgtgtgtgtacgagggaggctgt

SEQ ID NO: 862939 - DNA, 25 bp, Homo sapien
aggctgtgtgtgtacgagggaggct

SEQ ID NO: 862940 - DNA, 25 bp, Homo sapien
gaggctgtgtgtgtacgagggaggc

SEQ ID NO: 862941 - DNA, 25 bp, Homo sapien
cagttaaacacgttagcggctgtgc

SEQ ID NO: 862942 - DNA, 25 bp, Homo sapien
ttgatgagagcacccaacgctgcag

SEQ ID NO: 862943 - DNA, 25 bp, Homo sapien
tttgcaaggctcaggcaatgctggg

SEQ ID NO: 862944 - DNA, 25 bp, Homo sapien
gcatccttgggcacgcacagtaagt

SEQ ID NO: 862945 - DNA, 25 bp, Homo sapien
tggcttccctgggacgagggtgtgg

SEQ ID NO: 862946 - DNA, 25 bp, Homo sapien
ctggccatgcaagcaggatgcaggg

SEQ ID NO: 862947 - DNA, 25 bp, Homo sapien
gccaagcagcaggcatagcactgac

SEQ ID NO: 862948 - DNA, 25 bp, Homo sapien
tgcagggcagagctgtggcttccct

SEQ ID NO: 862949 - DNA, 25 bp, Homo sapien
gcagcctgtccacaattataaccga

SEQ ID NO: 862950 - DNA, 25 bp, Homo sapien
ggtgaacatctgttgccccaggatc

SEQ ID NO: 862951 - DNA, 25 bp, Homo sapien
tataaccgaaccatcagtggtgaac

SEQ ID NO: 862952 - DNA, 25 bp, Homo sapien
tgttcgttctctgaccgctgggtga

SEQ ID NO: 862953 - DNA, 25 bp, Homo sapien
gggccctgttcatccgctgctctgc

SEQ ID NO: 862954 - DNA, 25 bp, Homo sapien
aaagcttttgtgtccattgtcctgg

SEQ ID NO: 862955 - DNA, 25 bp, Homo sapien
ccctgttcatccgctgctctgcatc

SEQ ID NO: 862956 - DNA, 25 bp, Homo sapien
caaagcttttgtgtccattgtcctg

SEQ ID NO: 862957 - DNA, 25 bp, Homo sapien
caagtgtgcattaattctcctgctg

SEQ ID NO: 862958 - DNA, 25 bp, Homo sapien
gccgactgagtctgccactggcatc

SEQ ID NO: 862959 - DNA, 25 bp, Homo sapien
gtactgggcagcagtgtctcgtctc

SEQ ID NO: 862960 - DNA, 25 bp, Homo sapien
cctgagcgatgtctcggatgaagaa

SEQ ID NO: 862961 - DNA, 25 bp, Homo sapien
tctgcgcgagccctgcttgcaggtg

SEQ ID NO: 862962 - DNA, 25 bp, Homo sapien
acgtgccacgagcatggctgcctga

SEQ ID NO: 862963 - DNA, 25 bp, Homo sapien
gggctgattccaccgggagcagccg

SEQ ID NO: 862964 - DNA, 25 bp, Homo sapien
gctcgattgtagctgtgattccact

SEQ ID NO: 862965 - DNA, 25 bp, Homo sapien
taacaatcaggtgaacatgccaggg

SEQ ID NO: 862966 - DNA, 25 bp, Homo sapien
cctgcttgggaaagagccgcctgtt

SEQ ID NO: 862967 - DNA, 25 bp, Homo sapien
cctcgggcagcaactcttagggcct

SEQ ID NO: 862968 - DNA, 25 bp, Homo sapien
gatcccatacatcttggtgcagcca

SEQ ID NO: 862969 - DNA, 25 bp, Homo sapien
cccagccacagtttcgatgatgatc

SEQ ID NO: 862970 - DNA, 25 bp, Homo sapien
tggtccccagaagctttctcccagt

SEQ ID NO: 862971 - DNA, 25 bp, Homo sapien
tgatgatcgtgatgggttttacttg

SEQ ID NO: 862972 - DNA, 25 bp, Homo sapien
ttggtccccagaagctttctcccag

SEQ ID NO: 862973 - DNA, 25 bp, Homo sapien
tctgtgcgtcgtcctgggtgagggt

SEQ ID NO: 862974 - DNA, 25 bp, Homo sapien
gggtctgtgcgtcgtcctgggtgag

SEQ ID NO: 862975 - DNA, 25 bp, Homo sapien
gatgtggggtctgtgcgtcatcctg

SEQ ID NO: 862976 - DNA, 25 bp, Homo sapien
gtctgtgcgtcgtcctgggtgaggg

SEQ ID NO: 862977 - DNA, 25 bp, Homo sapien
aatacgaagtgaggatgggggctct

SEQ ID NO: 862978 - DNA, 25 bp, Homo sapien
tgaatacgaagtgaggatgggggct

SEQ ID NO: 862979 - DNA, 25 bp, Homo sapien
gaatacgaagtgaggatgggggctc

SEQ ID NO: 862980 - DNA, 25 bp, Homo sapien
tacgaagtgaggatgggggctctgc

SEQ ID NO: 862981 - DNA, 25 bp, Homo sapien
gagctctcgtcctaaaattacagtt

SEQ ID NO: 862982 - DNA, 25 bp, Homo sapien
ggcagagctctcgtcctaaaattac

SEQ ID NO: 862983 - DNA, 25 bp, Homo sapien
taaaattacagtttctgtgtggcca

SEQ ID NO: 862984 - DNA, 25 bp, Homo sapien
ctgtctggcagagctctcgtcctaa

SEQ ID NO: 862985 - DNA, 25 bp, Homo sapien
tccacggggacctcttagagctgct

SEQ ID NO: 862986 - DNA, 25 bp, Homo sapien
tgctcatccccggaaggtgtggccc

SEQ ID NO: 862987 - DNA, 25 bp, Homo sapien
gggggtcttccgcacacagccagcg

SEQ ID NO: 862988 - DNA, 25 bp, Homo sapien
cctgcgagggggtcttccgcacaca

SEQ ID NO: 862989 - DNA, 25 bp, Homo sapien
tccagctccggggaccagcgttggg

SEQ ID NO: 862990 - DNA, 25 bp, Homo sapien
ggggaggccagctccggggtccagc

SEQ ID NO: 862991 - DNA, 25 bp, Homo sapien
accagctccggggaccagcgttggg

SEQ ID NO: 862992 - DNA, 25 bp, Homo sapien
tccagcctgggggtgtccagctccg

SEQ ID NO: 862993 - DNA, 25 bp, Homo sapien
cagctccgggtaccagctcatggga

SEQ ID NO: 862994 - DNA, 25 bp, Homo sapien
tccgggtaccagctcatgggagacc

SEQ ID NO: 862995 - DNA, 25 bp, Homo sapien
accagcattggggggatcagctcca

SEQ ID NO: 862996 - DNA, 25 bp, Homo sapien
gaccagctccgggtaccagctcatg

SEQ ID NO: 862997 - DNA, 25 bp, Homo sapien
tgttggtgtctggccgaaaggtcct

SEQ ID NO: 862998 - DNA, 25 bp, Homo sapien
agatcagcgggaaaaacctctggag

SEQ ID NO: 862999 - DNA, 25 bp, Homo sapien
cattaatagtttacagcccgcggtc

SEQ ID NO: 863000 - DNA, 25 bp, Homo sapien
cctctggaggttgggtgctgcccct

SEQ ID NO: 863001 - DNA, 25 bp, Homo sapien
ggcttaatccctcctgtaatacagg

SEQ ID NO: 863002 - DNA, 25 bp, Homo sapien
tgtaactgttaaggagcccctgccc

SEQ ID NO: 863003 - DNA, 25 bp, Homo sapien
cacacagatgggtgttatgcacaca

SEQ ID NO: 863004 - DNA, 25 bp, Homo sapien
tgtgcctgttgaagcgccttcttcc

SEQ ID NO: 863005 - DNA, 25 bp, Homo sapien
cttggtgccgggattgacgtgaacc

SEQ ID NO: 863006 - DNA, 25 bp, Homo sapien
ggacaggggtgctccttgccgagac

SEQ ID NO: 863007 - DNA, 25 bp, Homo sapien
tggatcaggtgatggccactcggaa

SEQ ID NO: 863008 - DNA, 25 bp, Homo sapien
ggattgacgtgaaccgtggcttccc

SEQ ID NO: 863009 - DNA, 25 bp, Homo sapien
ctgtgtccagtgctggggtggtccc

SEQ ID NO: 863010 - DNA, 25 bp, Homo sapien
ctcctcctcggggagtttgacctgc

SEQ ID NO: 863011 - DNA, 25 bp, Homo sapien
tttgacctgcatggccacatcagag

SEQ ID NO: 863012 - DNA, 25 bp, Homo sapien
tgcatggccacatcagagtcctcac

SEQ ID NO: 863013 - DNA, 25 bp, Homo sapien
cccggctttgtgtcttcgcagttgg

SEQ ID NO: 863014 - DNA, 25 bp, Homo sapien
gggtcctggcgaggctccggcttgg

SEQ ID NO: 863015 - DNA, 25 bp, Homo sapien
ttgggatgtggacagataaccagag

SEQ ID NO: 863016 - DNA, 25 bp, Homo sapien
ctgcaggtccgatgaggctttggga

SEQ ID NO: 863017 - DNA, 25 bp, Homo sapien
ggtccaggtgtccgtcggggacaga

SEQ ID NO: 863018 - DNA, 25 bp, Homo sapien
agagaggtccaggcatctgtggggg

SEQ ID NO: 863019 - DNA, 25 bp, Homo sapien
gagccaggcgtctatgggggacaga

SEQ ID NO: 863020 - DNA, 25 bp, Homo sapien
cataggggaaccacgcatccgtggg

SEQ ID NO: 863021 - DNA, 25 bp, Homo sapien
tccctcttgtgcttgctggtggcgg

SEQ ID NO: 863022 - DNA, 25 bp, Homo sapien
tagattctgcatctcgtgcgtgtcg

SEQ ID NO: 863023 - DNA, 25 bp, Homo sapien
tgaactgtcagagggtcaggaaccc

SEQ ID NO: 863024 - DNA, 25 bp, Homo sapien
tcaggaacccggagagcccctggca

SEQ ID NO: 863025 - DNA, 25 bp, Homo sapien
agagaaggagcttccggtctatttt

SEQ ID NO: 863026 - DNA, 25 bp, Homo sapien
cccgtggcagcttcgcttctgtgct

SEQ ID NO: 863027 - DNA, 25 bp, Homo sapien
gagaaggagcttccggtctattttc

SEQ ID NO: 863028 - DNA, 25 bp, Homo sapien
gggccgtcccgtggcagcttcgctt

SEQ ID NO: 863029 - DNA, 25 bp, Homo sapien
ttttctgagcccatcaaattgcttg

SEQ ID NO: 863030 - DNA, 25 bp, Homo sapien
gatgcagtatgagtccaccacgtgc

SEQ ID NO: 863031 - DNA, 25 bp, Homo sapien
tgcaaacacggaggaaacaccttat

SEQ ID NO: 863032 - DNA, 25 bp, Homo sapien
cacctccgggctgatacacagtggt

SEQ ID NO: 863033 - DNA, 25 bp, Homo sapien
tattgctgtagtccggtcacgaagg

SEQ ID NO: 863034 - DNA, 25 bp, Homo sapien
gcttagttattgctgtagtccggtc

SEQ ID NO: 863035 - DNA, 25 bp, Homo sapien
gtccggtcacgaagggtggtcacac

SEQ ID NO: 863036 - DNA, 25 bp, Homo sapien
cccactggcttagttattgctgtag

SEQ ID NO: 863037 - DNA, 25 bp, Homo sapien
gagtccagtgttgacgttagcagcg

SEQ ID NO: 863038 - DNA, 25 bp, Homo sapien
tgtgacgttgatcaaaatgtgaact

SEQ ID NO: 863039 - DNA, 25 bp, Homo sapien
aatgtgaacttttgatccgattctc

SEQ ID NO: 863040 - DNA, 25 bp, Homo sapien
ggagagcaaagtcattactagaatg

SEQ ID NO: 863041 - DNA, 25 bp, Homo sapien
gccaccctttggttcacatagagga

SEQ ID NO: 863042 - DNA, 25 bp, Homo sapien
cctgccggagtttgagctgctttaa

SEQ ID NO: 863043 - DNA, 25 bp, Homo sapien
ccagattttttgagaggcgacgtca

SEQ ID NO: 863044 - DNA, 25 bp, Homo sapien
tgtcggcatgctctgtgagggcacc

SEQ ID NO: 863045 - DNA, 25 bp, Homo sapien
ccctgttcccgggacgacagcagga

SEQ ID NO: 863046 - DNA, 25 bp, Homo sapien
gctcccaggaggtgagccgtgagtg

SEQ ID NO: 863047 - DNA, 25 bp, Homo sapien
cagcaggacttgcaggtgccttggc

SEQ ID NO: 863048 - DNA, 25 bp, Homo sapien
tcccgggacgacagcaggacttgca

SEQ ID NO: 863049 - DNA, 25 bp, Homo sapien
catcaggaaagtagctggttgtatt

SEQ ID NO: 863050 - DNA, 25 bp, Homo sapien
atcaggaaagtagctggttgtatta

SEQ ID NO: 863051 - DNA, 25 bp, Homo sapien
tcaggaaagtagctggttgtattat

SEQ ID NO: 863052 - DNA, 25 bp, Homo sapien
catctgttgcttgaatatttcacag

SEQ ID NO: 863053 - DNA, 25 bp, Homo sapien
atctgttgcttgaatatttcacaga

SEQ ID NO: 863054 - DNA, 25 bp, Homo sapien
tctgttgcttgaatatttcacagac

SEQ ID NO: 863055 - DNA, 25 bp, Homo sapien
gcatctgttgcttgaatatttcaca

SEQ ID NO: 863056 - DNA, 25 bp, Homo sapien
tgtgatgaggctcgattattaatgc

SEQ ID NO: 863057 - DNA, 25 bp, Homo sapien
gctcgattattaatgcagaacttga

SEQ ID NO: 863058 - DNA, 25 bp, Homo sapien
tacttttcagtagatattctgtgaa

SEQ ID NO: 863059 - DNA, 25 bp, Homo sapien
gaagtatttctgtgatgaggctcga

SEQ ID NO: 863060 - DNA, 25 bp, Homo sapien
tccttgttgctttgggctgagtagc

SEQ ID NO: 863061 - DNA, 25 bp, Homo sapien
tatcggccatggttcctatctggga

SEQ ID NO: 863062 - DNA, 25 bp, Homo sapien
cacctgtggtctcgggtttatcggc

SEQ ID NO: 863063 - DNA, 25 bp, Homo sapien
cgtgggccctgattggctatcgtca

SEQ ID NO: 863064 - DNA, 25 bp, Homo sapien
gatggttaatgcctgtgggccccga

SEQ ID NO: 863065 - DNA, 25 bp, Homo sapien
cagtccccggtttgaagagcatttt

SEQ ID NO: 863066 - DNA, 25 bp, Homo sapien
ccagatgttctcgagggtgcggcac

SEQ ID NO: 863067 - DNA, 25 bp, Homo sapien
catcgtgcttgactctgctctcagg

SEQ ID NO: 863068 - DNA, 25 bp, Homo sapien
gaaagtaggtacagaggcaatcagc

SEQ ID NO: 863069 - DNA, 25 bp, Homo sapien
gccaaattcttgagttgaatcagag

SEQ ID NO: 863070 - DNA, 25 bp, Homo sapien
caggccctgaggagactggatccca

SEQ ID NO: 863071 - DNA, 25 bp, Homo sapien
gccctgaggagactggatcccaaag

SEQ ID NO: 863072 - DNA, 25 bp, Homo sapien
tgcaggtgccattatctagtgaacc

SEQ ID NO: 863073 - DNA, 25 bp, Homo sapien
cttccactgttgaatactgatacgt

SEQ ID NO: 863074 - DNA, 25 bp, Homo sapien
cgtagcatccatggcatgcaggtgc

SEQ ID NO: 863075 - DNA, 25 bp, Homo sapien
tgccattatctagtgaaccaaccct

SEQ ID NO: 863076 - DNA, 25 bp, Homo sapien
tgggctgagccacggaagatgggct

SEQ ID NO: 863077 - DNA, 25 bp, Homo sapien
tggatttccggcaactcaggcaaga

SEQ ID NO: 863078 - DNA, 25 bp, Homo sapien
agatgggcttggagcgtcctccgca

SEQ ID NO: 863079 - DNA, 25 bp, Homo sapien
gcaagaggtggcaacttcggagcct

SEQ ID NO: 863080 - DNA, 25 bp, Homo sapien
cccgagcacagtctgtgatggcact

SEQ ID NO: 863081 - DNA, 25 bp, Homo sapien
tcagcttcccgagcacagtctgtga

SEQ ID NO: 863082 - DNA, 25 bp, Homo sapien
tctgtgatggcactggcgtggcctg

SEQ ID NO: 863083 - DNA, 25 bp, Homo sapien
gcttcccgagcacagtctgtgatgg

SEQ ID NO: 863084 - DNA, 25 bp, Homo sapien
gcgcctgcactcagggacggcacca

SEQ ID NO: 863085 - DNA, 25 bp, Homo sapien
gctgtgcagtgtagagtgtggtgga

SEQ ID NO: 863086 - DNA, 25 bp, Homo sapien
cagtgtagagtgtggtggaaactcc

SEQ ID NO: 863087 - DNA, 25 bp, Homo sapien
ctgcactcagggacggcaccacctg

SEQ ID NO: 863088 - DNA, 25 bp, Homo sapien
cattgttggaggacggccccgttat

SEQ ID NO: 863089 - DNA, 25 bp, Homo sapien
ctcattgttggaggacggccccgtt

SEQ ID NO: 863090 - DNA, 25 bp, Homo sapien
tcattgttggaggacggccccgtta

SEQ ID NO: 863091 - DNA, 25 bp, Homo sapien
attgttggaggacggccccgttatg

SEQ ID NO: 863092 - DNA, 25 bp, Homo sapien
gccagtgtccactgatgatgcgtct

SEQ ID NO: 863093 - DNA, 25 bp, Homo sapien
tgagcactgacatggtcttgccagt

SEQ ID NO: 863094 - DNA, 25 bp, Homo sapien
ctgacccggaggcttctgagcactg

SEQ ID NO: 863095 - DNA, 25 bp, Homo sapien
gtgtccactgatgatgcgtctgctg

SEQ ID NO: 863096 - DNA, 25 bp, Homo sapien
tgggcacgtatgtcaccgccttcat

SEQ ID NO: 863097 - DNA, 25 bp, Homo sapien
atctctttcaaagccacccgtgggc

SEQ ID NO: 863098 - DNA, 25 bp, Homo sapien
ccctcgaaagtgacggatgccgtga

SEQ ID NO: 863099 - DNA, 25 bp, Homo sapien
cgtgggcttctggtcatattgtgat

SEQ ID NO: 863100 - DNA, 25 bp, Homo sapien
aggtggtgccgagtcccacaaagga

SEQ ID NO: 863101 - DNA, 25 bp, Homo sapien
gtgccgagtcccacaaaggaacctg

SEQ ID NO: 863102 - DNA, 25 bp, Homo sapien
aatccagctgagtgggcacgtgctg

SEQ ID NO: 863103 - DNA, 25 bp, Homo sapien
atccagctgagtgggcacgtgctgc

SEQ ID NO: 863104 - DNA, 25 bp, Homo sapien
gcttcttgagcttgagttgtgggat

SEQ ID NO: 863105 - DNA, 25 bp, Homo sapien
tatctgtcattggagacaccatccc

SEQ ID NO: 863106 - DNA, 25 bp, Homo sapien
taccccacgcatgacctgggagaaa

SEQ ID NO: 863107 - DNA, 25 bp, Homo sapien
gattgacatgtacctggaattgttg

SEQ ID NO: 863108 - DNA, 25 bp, Homo sapien
tgtggccaccttggattcgtctgta

SEQ ID NO: 863109 - DNA, 25 bp, Homo sapien
caacgttttgtgttgtagctttgcc

SEQ ID NO: 863110 - DNA, 25 bp, Homo sapien
gtctgtactacagcaacgttttgtg

SEQ ID NO: 863111 - DNA, 25 bp, Homo sapien
tgttgtagctttgcctttgcttaac

SEQ ID NO: 863112 - DNA, 25 bp, Homo sapien
cagaggtgtccgctggaatcctggc

SEQ ID NO: 863113 - DNA, 25 bp, Homo sapien
aagcccagaggtgtccgctggaatc

SEQ ID NO: 863114 - DNA, 25 bp, Homo sapien
tgtccgctggaatcctggctctcca

SEQ ID NO: 863115 - DNA, 25 bp, Homo sapien
gaggtgtccgctggaatcctggctc

SEQ ID NO: 863116 - DNA, 25 bp, Homo sapien
cttctctgctttcgtgtatgtttga

SEQ ID NO: 863117 - DNA, 25 bp, Homo sapien
gatggcgtccgtgccgttgtcttct

SEQ ID NO: 863118 - DNA, 25 bp, Homo sapien
cgatggcgtccatgccgttgtcttc

SEQ ID NO: 863119 - DNA, 25 bp, Homo sapien
tggccgatggcgtccatgccgttgt

SEQ ID NO: 863120 - DNA, 25 bp, Homo sapien
ggcgtccgtgccattatgttctctg

SEQ ID NO: 863121 - DNA, 25 bp, Homo sapien
ggccgatggcgtccgtgccgttatc

SEQ ID NO: 863122 - DNA, 25 bp, Homo sapien
tggccaatggcgtccatgctgttat

SEQ ID NO: 863123 - DNA, 25 bp, Homo sapien
ggcgtccgtgccattatgttctctg

SEQ ID NO: 863124 - DNA, 25 bp, Homo sapien
ggccgatggcatccgtgccgttatg

SEQ ID NO: 863125 - DNA, 25 bp, Homo sapien
gagacggatggagtgaaacatgagc

SEQ ID NO: 863126 - DNA, 25 bp, Homo sapien
acggatggagtgaaacatgagccac

SEQ ID NO: 863127 - DNA, 25 bp, Homo sapien
caggggagacggatggagtgaaaca

SEQ ID NO: 863128 - DNA, 25 bp, Homo sapien
gggagacggatggagtgaaacatga

SEQ ID NO: 863129 - DNA, 25 bp, Homo sapien
gagttttgacggtggctttactgtg

SEQ ID NO: 863130 - DNA, 25 bp, Homo sapien
gccgcgcatccgctgtggtcccgca

SEQ ID NO: 863131 - DNA, 25 bp, Homo sapien
gcacctttgctaatgaacttggaag

SEQ ID NO: 863132 - DNA, 25 bp, Homo sapien
gacggtggctttactgtgactcccc

SEQ ID NO: 863133 - DNA, 25 bp, Homo sapien
tgtgatggccgcggcaccctgtcct

SEQ ID NO: 863134 - DNA, 25 bp, Homo sapien
ggagggtgcacctctgaagatcacg

SEQ ID NO: 863135 - DNA, 25 bp, Homo sapien
acagatgttgccgtctcctgcctct

SEQ ID NO: 863136 - DNA, 25 bp, Homo sapien
gaagatcacgcagtcctcagggggc

SEQ ID NO: 863137 - DNA, 25 bp, Homo sapien
tgagttttcatttccggacagctgg

SEQ ID NO: 863138 - DNA, 25 bp, Homo sapien
gatggcactgcgtatgcttggtgac

SEQ ID NO: 863139 - DNA, 25 bp, Homo sapien
tagagtccgatcctacagttgaatg

SEQ ID NO: 863140 - DNA, 25 bp, Homo sapien
tttcccatgggaccgtgcaggacag

SEQ ID NO: 863141 - DNA, 25 bp, Homo sapien
gggtgacgcaacgctaccttcctac

SEQ ID NO: 863142 - DNA, 25 bp, Homo sapien
agggtacaacaaggagctagattgg

SEQ ID NO: 863143 - DNA, 25 bp, Homo sapien
agctagattgggaactgactgagca

SEQ ID NO: 863144 - DNA, 25 bp, Homo sapien
caaggagctagattgggaactgact

SEQ ID NO: 863145 - DNA, 25 bp, Homo sapien
gagcttgttgcttttcgggtcctga

SEQ ID NO: 863146 - DNA, 25 bp, Homo sapien
ccaccgtggcgtcagggaaactggt

SEQ ID NO: 863147 - DNA, 25 bp, Homo sapien
ggatgcccatgtctgcagaacgcag

SEQ ID NO: 863148 - DNA, 25 bp, Homo sapien
gaactgtgctcgttggtggcatcca

SEQ ID NO: 863149 - DNA, 25 bp, Homo sapien
tcatggtctcgctgggagagtggcc

SEQ ID NO: 863150 - DNA, 25 bp, Homo sapien
tttctccagcatcctcatcttcatg

SEQ ID NO: 863151 - DNA, 25 bp, Homo sapien
tcgctgggagagtggccgggggtgc

SEQ ID NO: 863152 - DNA, 25 bp, Homo sapien
tctcgctgggagagtggccgggggt

SEQ ID NO: 863153 - DNA, 25 bp, Homo sapien
caaggctgaattatgctgtgacgac

SEQ ID NO: 863154 - DNA, 25 bp, Homo sapien
tccgtgtctcgtggctcaaggctga

SEQ ID NO: 863155 - DNA, 25 bp, Homo sapien
ggccgttgcagggtgtctgccttcc

SEQ ID NO: 863156 - DNA, 25 bp, Homo sapien
ttatgctgtgacgacccacaagccc

SEQ ID NO: 863157 - DNA, 25 bp, Homo sapien
tccatgtttgcacagccacggggtc

SEQ ID NO: 863158 - DNA, 25 bp, Homo sapien
gtcctggcgttcccgttgctgtgtg

SEQ ID NO: 863159 - DNA, 25 bp, Homo sapien
gctgtgtgtgttggtgctgtctggg

SEQ ID NO: 863160 - DNA, 25 bp, Homo sapien
tggcgttcccgttgctgtgtgtgtt

SEQ ID NO: 863161 - DNA, 25 bp, Homo sapien
gatggacacagtagttgatggacac

SEQ ID NO: 863162 - DNA, 25 bp, Homo sapien
gacacagtagttgatggacacagta

SEQ ID NO: 863163 - DNA, 25 bp, Homo sapien
gacacagtagttgatggacacagtg

SEQ ID NO: 863164 - DNA, 25 bp, Homo sapien
ggacacagtagttgatggacacagt

SEQ ID NO: 863165 - DNA, 25 bp, Homo sapien
tcagcttcctgcgtgctgaggcccc

SEQ ID NO: 863166 - DNA, 25 bp, Homo sapien
ctgagcatcccacgttgccctgaca

SEQ ID NO: 863167 - DNA, 25 bp, Homo sapien
gaagagatcttgcaatccgacccct

SEQ ID NO: 863168 - DNA, 25 bp, Homo sapien
gcaatccgaccccttgtgagctcag

SEQ ID NO: 863169 - DNA, 25 bp, Homo sapien
tgtttctctttgacgcacccgtgag

SEQ ID NO: 863170 - DNA, 25 bp, Homo sapien
ggatgtgtcgtgtctcacagggaca

SEQ ID NO: 863171 - DNA, 25 bp, Homo sapien
cacagggacaccctaagtggacaca

SEQ ID NO: 863172 - DNA, 25 bp, Homo sapien
gggttgctgcacacatggatccttt

SEQ ID NO: 863173 - DNA, 25 bp, Homo sapien
tctcctcgccatagtgcaaccttgt

SEQ ID NO: 863174 - DNA, 25 bp, Homo sapien
ggatcatcgtctttgtcatcgtaaa

SEQ ID NO: 863175 - DNA, 25 bp, Homo sapien
aaataagagtggtcacggaatcctc

SEQ ID NO: 863176 - DNA, 25 bp, Homo sapien
taaatgttcggcacaaattaggcaa

SEQ ID NO: 863177 - DNA, 25 bp, Homo sapien
cccgtgaaatccgtatcatctctat

SEQ ID NO: 863178 - DNA, 25 bp, Homo sapien
cccgtgaaatccgtatcgtctctat

SEQ ID NO: 863179 - DNA, 25 bp, Homo sapien
tgagtatggcctttgctaagtccag

SEQ ID NO: 863180 - DNA, 25 bp, Homo sapien
cagaaaggacaagcgctgatgtccc

SEQ ID NO: 863181 - DNA, 25 bp, Homo sapien
tgtcttggcagacactcgctgagga

SEQ ID NO: 863182 - DNA, 25 bp, Homo sapien
actcgctgaggatttagcacgtcca

SEQ ID NO: 863183 - DNA, 25 bp, Homo sapien
ctcgctgaggatttagcacgtccaa

SEQ ID NO: 863184 - DNA, 25 bp, Homo sapien
gtgtcttggcagacactcgctgagg

SEQ ID NO: 863185 - DNA, 25 bp, Homo sapien
tttcatggtgttcattctgcatcca

SEQ ID NO: 863186 - DNA, 25 bp, Homo sapien
tcatggtgttcattctgcatccaca

SEQ ID NO: 863187 - DNA, 25 bp, Homo sapien
aggcattgtgagcatgtccatcagg

SEQ ID NO: 863188 - DNA, 25 bp, Homo sapien
tcttcagaggaaatccccgaggcat

SEQ ID NO: 863189 - DNA, 25 bp, Homo sapien
ccttgggctgcagctcactgtttcc

SEQ ID NO: 863190 - DNA, 25 bp, Homo sapien
gacggcatgtggactgcacttcctc

SEQ ID NO: 863191 - DNA, 25 bp, Homo sapien
gatagagacggcatgtggactgcac

SEQ ID NO: 863192 - DNA, 25 bp, Homo sapien
tccttgggctgcagctcactgtttc

SEQ ID NO: 863193 - DNA, 25 bp, Homo sapien
ggagcgcagcttcagagcacctttt

SEQ ID NO: 863194 - DNA, 25 bp, Homo sapien
gaagggagcgcagcttcagagcacc

SEQ ID NO: 863195 - DNA, 25 bp, Homo sapien
ctgagtggaagggagcgcagcttca

SEQ ID NO: 863196 - DNA, 25 bp, Homo sapien
agggagcgcagcttcagagcacctt

SEQ ID NO: 863197 - DNA, 25 bp, Homo sapien
cacgagctgtgctcttttccgccag

SEQ ID NO: 863198 - DNA, 25 bp, Homo sapien
tggtctactccttccgtgcttggaa

SEQ ID NO: 863199 - DNA, 25 bp, Homo sapien
gggcactgattctaaaggtgcacga

SEQ ID NO: 863200 - DNA, 25 bp, Homo sapien
tttccgccagcgtccggaagagagc

SEQ ID NO: 863201 - DNA, 25 bp, Homo sapien
tgcagttgtcgttccctccagagcg

SEQ ID NO: 863202 - DNA, 25 bp, Homo sapien
tttccctgaaacaccttggaatctg

SEQ ID NO: 863203 - DNA, 25 bp, Homo sapien
taccagtgtggtcgttgcaggctgt

SEQ ID NO: 863204 - DNA, 25 bp, Homo sapien
tgtttgttaccagtgtggtcgttgc

SEQ ID NO: 863205 - DNA, 25 bp, Homo sapien
ggttccagccgtcaccaggtccagg

SEQ ID NO: 863206 - DNA, 25 bp, Homo sapien
ggttcacagtgcaccgtccggttcc

SEQ ID NO: 863207 - DNA, 25 bp, Homo sapien
tccaggctcacagtatgtccccagc

SEQ ID NO: 863208 - DNA, 25 bp, Homo sapien
cgtccggttccagccgtcaccaggt

SEQ ID NO: 863209 - DNA, 25 bp, Homo sapien
ccagtggaccctcggtggcagtgtc

SEQ ID NO: 863210 - DNA, 25 bp, Homo sapien
taaccgggtggaataatgcttgctt

SEQ ID NO: 863211 - DNA, 25 bp, Homo sapien
tgtttcaggtccacagacgagggag

SEQ ID NO: 863212 - DNA, 25 bp, Homo sapien
tattcactgctgagaaccgaagcca

SEQ ID NO: 863213 - DNA, 25 bp, Homo sapien
cccagaggagctttcccggccagtt

SEQ ID NO: 863214 - DNA, 25 bp, Homo sapien
gaaagagtgggtgtgatcacgtgag

SEQ ID NO: 863215 - DNA, 25 bp, Homo sapien
agtgtgggcaggtgtaagtgttagc

SEQ ID NO: 863216 - DNA, 25 bp, Homo sapien
gggtgtgatcacgtgagtgtgagca

SEQ ID NO: 863217 - DNA, 25 bp, Homo sapien
cacgtggggctttccacaagaagaa

SEQ ID NO: 863218 - DNA, 25 bp, Homo sapien
tccagaatagcgcaaaccctgaggc

SEQ ID NO: 863219 - DNA, 25 bp, Homo sapien
aagacaagactagtggccctcagct

SEQ ID NO: 863220 - DNA, 25 bp, Homo sapien
gccccaccaacgatattccagaata

SEQ ID NO: 863221 - DNA, 25 bp, Homo sapien
tcagggtggaaaagtgacccacatc

SEQ ID NO: 863222 - DNA, 25 bp, Homo sapien
cctgctggccgctttgagtctgagc

SEQ ID NO: 863223 - DNA, 25 bp, Homo sapien
tcctgctggccgctttgagtctgag

SEQ ID NO: 863224 - DNA, 25 bp, Homo sapien
gcgtgaagggaagcgcgacggccgc

SEQ ID NO: 863225 - DNA, 25 bp, Homo sapien
aggaaagcgtgaagggaagcgcgac

SEQ ID NO: 863226 - DNA, 25 bp, Homo sapien
ggccagatgtccgtggaggggtgaa

SEQ ID NO: 863227 - DNA, 25 bp, Homo sapien
tggaggggtgaaggaaagcgtgaag

SEQ ID NO: 863228 - DNA, 25 bp, Homo sapien
tgtgggcagcctcagaattcagggc

SEQ ID NO: 863229 - DNA, 25 bp, Homo sapien
aaacttgtgatttcctctggcggag

SEQ ID NO: 863230 - DNA, 25 bp, Homo sapien
cagctgtgggatcttgcagtcgtaa

SEQ ID NO: 863231 - DNA, 25 bp, Homo sapien
tagatcagtctgctgagcaccggag

SEQ ID NO: 863232 - DNA, 25 bp, Homo sapien
gcctgacctgcccgggagctgtctg

SEQ ID NO: 863233 - DNA, 25 bp, Homo sapien
tgcctgacctgcgtgggagcgacct

SEQ ID NO: 863234 - DNA, 25 bp, Homo sapien
tgggagcgacctgcgcgggagccgc

SEQ ID NO: 863235 - DNA, 25 bp, Homo sapien
tctgacctgcgcgggagctgcctga

SEQ ID NO: 863236 - DNA, 25 bp, Homo sapien
agccagccacgggttgagcggagcg

SEQ ID NO: 863237 - DNA, 25 bp, Homo sapien
ggagcggcggccgtgacctttgtgg

SEQ ID NO: 863238 - DNA, 25 bp, Homo sapien
acagccagccacgggttgagcggag

SEQ ID NO: 863239 - DNA, 25 bp, Homo sapien
gccacgggttgagcggagcggcggc

SEQ ID NO: 863240 - DNA, 25 bp, Homo sapien
agagctttatcaatagtgctgctgg

SEQ ID NO: 863241 - DNA, 25 bp, Homo sapien
gagagctttatcaatagtgctgctg

SEQ ID NO: 863242 - DNA, 25 bp, Homo sapien
taggacctctcttcttcggtggcac

SEQ ID NO: 863243 - DNA, 25 bp, Homo sapien
tggacaaggtctcgagctgcaaact

SEQ ID NO: 863244 - DNA, 25 bp, Homo sapien
gcaaacttgtggtcctgccttggga

SEQ ID NO: 863245 - DNA, 25 bp, Homo sapien
cagataccttctttgtccgtgcaag

SEQ ID NO: 863246 - DNA, 25 bp, Homo sapien
gacatcacggccaacttgcaaactg

SEQ ID NO: 863247 - DNA, 25 bp, Homo sapien
gccgtatctgcgttccacttgggta

SEQ ID NO: 863248 - DNA, 25 bp, Homo sapien
gatgcttttgttctcactgacgtgc

SEQ ID NO: 863249 - DNA, 25 bp, Homo sapien
agcacaaggctattggcgaagttga

SEQ ID NO: 863250 - DNA, 25 bp, Homo sapien
tcaggatgagaggtaatttgcaaag

SEQ ID NO: 863251 - DNA, 25 bp, Homo sapien
ggtgtggttgtatttaaaagctgca

SEQ ID NO: 863252 - DNA, 25 bp, Homo sapien
ttagttccattctgataatctatgt

SEQ ID NO: 863253 - DNA, 25 bp, Homo sapien
tgcaaagttccctttggtgtggttg

SEQ ID NO: 863254 - DNA, 25 bp, Homo sapien
ccagacttggagttgggatggcccg

SEQ ID NO: 863255 - DNA, 25 bp, Homo sapien
tcagcttctgactgtcgttagcacg

SEQ ID NO: 863256 - DNA, 25 bp, Homo sapien
cttggagttgggatggcccgtgccc

SEQ ID NO: 863257 - DNA, 25 bp, Homo sapien
cgttagcacgttggtcatttctgtg

SEQ ID NO: 863258 - DNA, 25 bp, Homo sapien
tattcagcaaaacaccttgtcccgg

SEQ ID NO: 863259 - DNA, 25 bp, Homo sapien
aggcctctgagggcgtcccttatac

SEQ ID NO: 863260 - DNA, 25 bp, Homo sapien
ttggagacggctccgcggagagcct

SEQ ID NO: 863261 - DNA, 25 bp, Homo sapien
tccagaaggacacggagcccggaaa

SEQ ID NO: 863262 - DNA, 25 bp, Homo sapien
tagaggactcaactgtgcacaccag

SEQ ID NO: 863263 - DNA, 25 bp, Homo sapien
gattttaatccagctcaaagcagca

SEQ ID NO: 863264 - DNA, 25 bp, Homo sapien
ggtacaatttgaggctgaccccaca

SEQ ID NO: 863265 - DNA, 25 bp, Homo sapien
gaaatagccgctcttctagaggact

SEQ ID NO: 863266 - DNA, 25 bp, Homo sapien
tcttaggacctcttggaagtggcac

SEQ ID NO: 863267 - DNA, 25 bp, Homo sapien
ggcgccgagcagatgtccttggaat

SEQ ID NO: 863268 - DNA, 25 bp, Homo sapien
tgtttgggctacgatggaacctccc

SEQ ID NO: 863269 - DNA, 25 bp, Homo sapien
tgtctcctgaggaggacacgcgaca

SEQ ID NO: 863270 - DNA, 25 bp, Homo sapien
gcattgaaactacaaggttgcactg

SEQ ID NO: 863271 - DNA, 25 bp, Homo sapien
tatgggcatacagcgtgcatatcag

SEQ ID NO: 863272 - DNA, 25 bp, Homo sapien
tcataagtaggaaggcacaaagcat

SEQ ID NO: 863273 - DNA, 25 bp, Homo sapien
tacagaccctggcatgctatgggca

SEQ ID NO: 863274 - DNA, 25 bp, Homo sapien
aatgcactcacaagccaggtgcggt

SEQ ID NO: 863275 - DNA, 25 bp, Homo sapien
tagttggatattgtggcactcacct

SEQ ID NO: 863276 - DNA, 25 bp, Homo sapien
tgtaaataatatgtgtaccactgaa

SEQ ID NO: 863277 - DNA, 25 bp, Homo sapien
tgttataaaatgcactcacaagcca

SEQ ID NO: 863278 - DNA, 25 bp, Homo sapien
gagaatgtttgcattaggtttgaaa

SEQ ID NO: 863279 - DNA, 25 bp, Homo sapien
gtaggacctctaccagttttgctct

SEQ ID NO: 863280 - DNA, 25 bp, Homo sapien
accttttacagttgtctcacaggtc

SEQ ID NO: 863281 - DNA, 25 bp, Homo sapien
tggatatttcattctatcaaaacag

SEQ ID NO: 863282 - DNA, 25 bp, Homo sapien
tccatttggcgtggttgtggtccat

SEQ ID NO: 863283 - DNA, 25 bp, Homo sapien
tccatttggcgtggttgtcgtccat

SEQ ID NO: 863284 - DNA, 25 bp, Homo sapien
gtccatttggcgtggttgtcgtcca

SEQ ID NO: 863285 - DNA, 25 bp, Homo sapien
gtccatttgccgtggttgtagtcca

SEQ ID NO: 863286 - DNA, 25 bp, Homo sapien
cagtagtgggtaagggagggcggag

SEQ ID NO: 863287 - DNA, 25 bp, Homo sapien
ccagtagtgggtaaggagggcggag

SEQ ID NO: 863288 - DNA, 25 bp, Homo sapien
cagtagtgggtaaggagggcggagg

SEQ ID NO: 863289 - DNA, 25 bp, Homo sapien
cagagggacccagtagtgggtaagg

SEQ ID NO: 863290 - DNA, 25 bp, Homo sapien
aaggccagagaacatccatcgggag

SEQ ID NO: 863291 - DNA, 25 bp, Homo sapien
ttctcgcaccgtgagcttttctggg

SEQ ID NO: 863292 - DNA, 25 bp, Homo sapien
gaagccacttagagtgctccgtgtg

SEQ ID NO: 863293 - DNA, 25 bp, Homo sapien
tctgtttgcaacagcacgctggaga

SEQ ID NO: 863294 - DNA, 25 bp, Homo sapien
acttgggctccgcagttcaccagtg

SEQ ID NO: 863295 - DNA, 25 bp, Homo sapien
ggctccgcagttcaccagtggacgg

SEQ ID NO: 863296 - DNA, 25 bp, Homo sapien
tgcacccagcatgaacacttgggct

SEQ ID NO: 863297 - DNA, 25 bp, Homo sapien
tccgcagttcaccagtggacggcac

SEQ ID NO: 863298 - DNA, 25 bp, Homo sapien
gctgcatccgtgtcttcggcctgcg

SEQ ID NO: 863299 - DNA, 25 bp, Homo sapien
ctgcatccgtgtcttcggcctgcga

SEQ ID NO: 863300 - DNA, 25 bp, Homo sapien
tgcatccgtgtcttcggcctgcgag

SEQ ID NO: 863301 - DNA, 25 bp, Homo sapien
gcatccgtgtcttcggcctgcgagc

SEQ ID NO: 863302 - DNA, 25 bp, Homo sapien
gtagccgctcggcatttcacaccag

SEQ ID NO: 863303 - DNA, 25 bp, Homo sapien
ggagcccttgcgcttttcctcgtag

SEQ ID NO: 863304 - DNA, 25 bp, Homo sapien
gactgtgggccatccttcttggcct

SEQ ID NO: 863305 - DNA, 25 bp, Homo sapien
tactggtggtctggatcgacttgag

SEQ ID NO: 863306 - DNA, 25 bp, Homo sapien
taccatgataatatattctgcacgg

SEQ ID NO: 863307 - DNA, 25 bp, Homo sapien
cattctttatcaagaggtcggccct

SEQ ID NO: 863308 - DNA, 25 bp, Homo sapien
tcaggcacataagccaaatgcaggc

SEQ ID NO: 863309 - DNA, 25 bp, Homo sapien
caactaatttcacgtgacagtgcat

SEQ ID NO: 863310 - DNA, 25 bp, Homo sapien
tatttgggaagcgtatcaatacctt

SEQ ID NO: 863311 - DNA, 25 bp, Homo sapien
gaatgacatgcgactgtaaagcctc

SEQ ID NO: 863312 - DNA, 25 bp, Homo sapien
tcatgtaatcataaagaccagtata

SEQ ID NO: 863313 - DNA, 25 bp, Homo sapien
gaccagtatattccctcctgctgaa

SEQ ID NO: 863314 - DNA, 25 bp, Homo sapien
gagcagactttcaatgttagcaatt

SEQ ID NO: 863315 - DNA, 25 bp, Homo sapien
gaattgtcatggttcataaatcaca

SEQ ID NO: 863316 - DNA, 25 bp, Homo sapien
tactcatgaaacagtatacagacac

SEQ ID NO: 863317 - DNA, 25 bp, Homo sapien
ttagcaattaagctgttgtcaaaca

SEQ ID NO: 863318 - DNA, 25 bp, Homo sapien
agaaaataagcagcaacccaaatcc

SEQ ID NO: 863319 - DNA, 25 bp, Homo sapien
aaaatgactactaatataagccagt

SEQ ID NO: 863320 - DNA, 25 bp, Homo sapien
gaaaagtgtgattaacattaagaat

SEQ ID NO: 863321 - DNA, 25 bp, Homo sapien
gaaaataagcagcaacccaaatcct

SEQ ID NO: 863322 - DNA, 25 bp, Homo sapien
taagtgaaagacagagttgaacgcc

SEQ ID NO: 863323 - DNA, 25 bp, Homo sapien
atttaagtgaaagacagagttgaac

SEQ ID NO: 863324 - DNA, 25 bp, Homo sapien
gttgaacgcctctcactttcagtca

SEQ ID NO: 863325 - DNA, 25 bp, Homo sapien
cactttcagtcagaagctaggtggc

SEQ ID NO: 863326 - DNA, 25 bp, Homo sapien
ccttctcggcagtttgggtttgtcg

SEQ ID NO: 863327 - DNA, 25 bp, Homo sapien
gtttgggtttatcacacgcctcacc

SEQ ID NO: 863328 - DNA, 25 bp, Homo sapien
tgggtttatcacacgcctcaccctt

SEQ ID NO: 863329 - DNA, 25 bp, Homo sapien
gtttgggtttgtcgcgcgcctcact

SEQ ID NO: 863330 - DNA, 25 bp, Homo sapien
tgaggccttgggtttttcatgcacc

SEQ ID NO: 863331 - DNA, 25 bp, Homo sapien
gaagtctcgtccactgtcaggaata

SEQ ID NO: 863332 - DNA, 25 bp, Homo sapien
tctaaacattgaagcgccgtgtgcc

SEQ ID NO: 863333 - DNA, 25 bp, Homo sapien
cccactgatgtggagagctaacaag

SEQ ID NO: 863334 - DNA, 25 bp, Homo sapien
tatacaaagatcagaaggcacaaat

SEQ ID NO: 863335 - DNA, 25 bp, Homo sapien
taatttgaccatactgtgacagctt

SEQ ID NO: 863336 - DNA, 25 bp, Homo sapien
gaccaaagtctctagagaagacagg

SEQ ID NO: 863337 - DNA, 25 bp, Homo sapien
gacagcttattacagggttgacaga

SEQ ID NO: 863338 - DNA, 25 bp, Homo sapien
gccagaacttcagcttaaatcacga

SEQ ID NO: 863339 - DNA, 25 bp, Homo sapien
gtgtttccatgaagggataccctgt

SEQ ID NO: 863340 - DNA, 25 bp, Homo sapien
gaagctgtgaggcatccctgttttg

SEQ ID NO: 863341 - DNA, 25 bp, Homo sapien
caaccggattgtcttaggtgtttca

SEQ ID NO: 863342 - DNA, 25 bp, Homo sapien
tcacagtgacgagcacaaggtacag

SEQ ID NO: 863343 - DNA, 25 bp, Homo sapien
caaaagccgtcccagaggtggacac

SEQ ID NO: 863344 - DNA, 25 bp, Homo sapien
ggaggaagactccacaaaagccgtc

SEQ ID NO: 863345 - DNA, 25 bp, Homo sapien
caagcccagagaagcggagctgtat

SEQ ID NO: 863346 - DNA, 25 bp, Homo sapien
gcacccttcgggaggcgcgtcccag

SEQ ID NO: 863347 - DNA, 25 bp, Homo sapien
cagcgcctagcaaccgacaagcagg

SEQ ID NO: 863348 - DNA, 25 bp, Homo sapien
caggcgcggtccaccccgaagaggc

SEQ ID NO: 863349 - DNA, 25 bp, Homo sapien
ggccaggcgcggtccaccccgaaga

SEQ ID NO: 863350 - DNA, 25 bp, Homo sapien
aaccgctgcgcaaagggagggcggc

SEQ ID NO: 863351 - DNA, 25 bp, Homo sapien
ctgaggctgcacagaccgcctctcc

SEQ ID NO: 863352 - DNA, 25 bp, Homo sapien
aggccgggcgcgaggagacgggccg

SEQ ID NO: 863353 - DNA, 25 bp, Homo sapien
tagcggcgcccgaaggagtccgcga

SEQ ID NO: 863354 - DNA, 25 bp, Homo sapien
agcctgcaaaggtaccattaagttt

SEQ ID NO: 863355 - DNA, 25 bp, Homo sapien
tgtgagcaactaagtacaatgaaac

SEQ ID NO: 863356 - DNA, 25 bp, Homo sapien
aagaaaattgtcaccatgcaggcag

SEQ ID NO: 863357 - DNA, 25 bp, Homo sapien
tagctacgacatactgaaacttggt

SEQ ID NO: 863358 - DNA, 25 bp, Homo sapien
taatggttaacattactgatactga

SEQ ID NO: 863359 - DNA, 25 bp, Homo sapien
ggacactgggaaggcacaaggccac

SEQ ID NO: 863360 - DNA, 25 bp, Homo sapien
caaggccactagctcagaatgtgaa

SEQ ID NO: 863361 - DNA, 25 bp, Homo sapien
ttttcttcggcctctctacttttca

SEQ ID NO: 863362 - DNA, 25 bp, Homo sapien
tgtttaaagttaactcctacagaga

SEQ ID NO: 863363 - DNA, 25 bp, Homo sapien
cagagaggtttaatataggacctgc

SEQ ID NO: 863364 - DNA, 25 bp, Homo sapien
ggacagtccaaccaggagacccagg

SEQ ID NO: 863365 - DNA, 25 bp, Homo sapien
ggaacccaggacacgagtgaccaga

SEQ ID NO: 863366 - DNA, 25 bp, Homo sapien
taccagcaacagaactaagcctgct

SEQ ID NO: 863367 - DNA, 25 bp, Homo sapien
tgtgagaaaattagaaggctgctgt

SEQ ID NO: 863368 - DNA, 25 bp, Homo sapien
tgtgagctctcctgatccacagagt

SEQ ID NO: 863369 - DNA, 25 bp, Homo sapien
gatgctatcctgttcaagcaccaat

SEQ ID NO: 863370 - DNA, 25 bp, Homo sapien
gtcccaaatgctgtgcacacagagg

SEQ ID NO: 863371 - DNA, 25 bp, Homo sapien
acagcagttgaacaacagaggaagg

SEQ ID NO: 863372 - DNA, 25 bp, Homo sapien
tcagtgttgtagtgagctgcttttt

SEQ ID NO: 863373 - DNA, 25 bp, Homo sapien
attattcactagtctaaaatgacac

SEQ ID NO: 863374 - DNA, 25 bp, Homo sapien
gaaggacaaatattctgtgggttta

SEQ ID NO: 863375 - DNA, 25 bp, Homo sapien
ctgctttccaggtatcatctttggt

SEQ ID NO: 863376 - DNA, 25 bp, Homo sapien
tgttttctgaggtcatctgctttcc

SEQ ID NO: 863377 - DNA, 25 bp, Homo sapien
cagagatgttttctgaggtcatctg

SEQ ID NO: 863378 - DNA, 25 bp, Homo sapien
ttccaggtatcatctttggttcttc

SEQ ID NO: 863379 - DNA, 25 bp, Homo sapien
ttcaggaaggtccatctcagactcc

SEQ ID NO: 863380 - DNA, 25 bp, Homo sapien
tttcttccttggaaccacctgactg

SEQ ID NO: 863381 - DNA, 25 bp, Homo sapien
tgcacctcggctccttatgttcagg

SEQ ID NO: 863382 - DNA, 25 bp, Homo sapien
tcagactccttacgcagcttcttct

SEQ ID NO: 863383 - DNA, 25 bp, Homo sapien
caggagctgccggtcgcgtgtctcc

SEQ ID NO: 863384 - DNA, 25 bp, Homo sapien
tctccttagcggtgtggacttcggc

SEQ ID NO: 863385 - DNA, 25 bp, Homo sapien
tctgcctctcgatgtttctccttca

SEQ ID NO: 863386 - DNA, 25 bp, Homo sapien
gggccacggtctgccggagctcttc

SEQ ID NO: 863387 - DNA, 25 bp, Homo sapien
cggcacctcgggtggaaccacagga

SEQ ID NO: 863388 - DNA, 25 bp, Homo sapien
cgacgcggcacctcgggtggaacca

SEQ ID NO: 863389 - DNA, 25 bp, Homo sapien
gaaccacaggaaggcaagcggggac

SEQ ID NO: 863390 - DNA, 25 bp, Homo sapien
cgcggcacctcgggtggaaccacag

SEQ ID NO: 863391 - DNA, 25 bp, Homo sapien
cgggggagagagggaggggaggcag

SEQ ID NO: 863392 - DNA, 25 bp, Homo sapien
gcgggggagagagggaggggaggca

SEQ ID NO: 863393 - DNA, 25 bp, Homo sapien
catctcctctttcagagtcttcatc

SEQ ID NO: 863394 - DNA, 25 bp, Homo sapien
tttctcggtatcttctttctctatc

SEQ ID NO: 863395 - DNA, 25 bp, Homo sapien
ctttctttctcggtatcttctttct

SEQ ID NO: 863396 - DNA, 25 bp, Homo sapien
ttctcttcacttcttactttactta

SEQ ID NO: 863397 - DNA, 25 bp, Homo sapien
gcggaacaccaatccggaaccgcag

SEQ ID NO: 863398 - DNA, 25 bp, Homo sapien
ctggagagcaccaacacacccgcac

SEQ ID NO: 863399 - DNA, 25 bp, Homo sapien
gcaccgcgaaacaccaagttgcacg

SEQ ID NO: 863400 - DNA, 25 bp, Homo sapien
atccggaaccgcaggtgcctggaga

SEQ ID NO: 863401 - DNA, 25 bp, Homo sapien
tgggttctgcaacgacggatccaac

SEQ ID NO: 863402 - DNA, 25 bp, Homo sapien
gacgatttaaagcatcccggtggaa

SEQ ID NO: 863403 - DNA, 25 bp, Homo sapien
gaagaaaatcgtgtctgtagtaaac

SEQ ID NO: 863404 - DNA, 25 bp, Homo sapien
gcacatcaaataggagtgcagccag

SEQ ID NO: 863405 - DNA, 25 bp, Homo sapien
ttttcctgggctcatcttttgccga

SEQ ID NO: 863406 - DNA, 25 bp, Homo sapien
ggttgtccttgctgtctccgtactg

SEQ ID NO: 863407 - DNA, 25 bp, Homo sapien
tctatccacgttgctttggtgcctc

SEQ ID NO: 863408 - DNA, 25 bp, Homo sapien
ttgttgtctcgatctggctctctgg

SEQ ID NO: 863409 - DNA, 25 bp, Homo sapien
tcaaacctgctaagaaacacggcca

SEQ ID NO: 863410 - DNA, 25 bp, Homo sapien
gccaacgccctgatgcaaacagagg

SEQ ID NO: 863411 - DNA, 25 bp, Homo sapien
tagcagaaccggcactgcctcaaac

SEQ ID NO: 863412 - DNA, 25 bp, Homo sapien
tagacgcgggtagcagaaccggcac

SEQ ID NO: 863413 - DNA, 25 bp, Homo sapien
gcacctcgatttctgtgttcaccat

SEQ ID NO: 863414 - DNA, 25 bp, Homo sapien
tgagcttgcacctcgatttctgtgt

SEQ ID NO: 863415 - DNA, 25 bp, Homo sapien
catctctttttgagcttgcacctcg

SEQ ID NO: 863416 - DNA, 25 bp, Homo sapien
ggtcccatctctttttgagcttgca

SEQ ID NO: 863417 - DNA, 25 bp, Homo sapien
tttgctttagcttcaggcagggagg

SEQ ID NO: 863418 - DNA, 25 bp, Homo sapien
tccctcttgcacattaagtgactcc

SEQ ID NO: 863419 - DNA, 25 bp, Homo sapien
agtgaattattctccccaaagtgag

SEQ ID NO: 863420 - DNA, 25 bp, Homo sapien
tgctttagcttcaggcagggaggac

SEQ ID NO: 863421 - DNA, 25 bp, Homo sapien
tttaacaaacttgtgagtgcaaatc

SEQ ID NO: 863422 - DNA, 25 bp, Homo sapien
atctacatcctttacaagttctcgg

SEQ ID NO: 863423 - DNA, 25 bp, Homo sapien
aacttgtgagtgcaaatctacatcc

SEQ ID NO: 863424 - DNA, 25 bp, Homo sapien
catcctttacaagttctcggccggg

SEQ ID NO: 863425 - DNA, 25 bp, Homo sapien
tcttttccatgattccttactaaat

SEQ ID NO: 863426 - DNA, 25 bp, Homo sapien
cttttccatgattccttactaaatt

SEQ ID NO: 863427 - DNA, 25 bp, Homo sapien
tttccatgattccttactaaattct

SEQ ID NO: 863428 - DNA, 25 bp, Homo sapien
ttttccatgattccttactaaattc

SEQ ID NO: 863429 - DNA, 25 bp, Homo sapien
ggagatctgtaacacaaacgcaatg

SEQ ID NO: 863430 - DNA, 25 bp, Homo sapien
caaggtagcttaacacatggaaaca

SEQ ID NO: 863431 - DNA, 25 bp, Homo sapien
gactgtggagaaacgctgatgtact

SEQ ID NO: 863432 - DNA, 25 bp, Homo sapien
catcagagcctgagcgactttgtgg

SEQ ID NO: 863433 - DNA, 25 bp, Homo sapien
acagaagagccttcctcgtggccat

SEQ ID NO: 863434 - DNA, 25 bp, Homo sapien
cggtttcctcgcctcccggcctctg

SEQ ID NO: 863435 - DNA, 25 bp, Homo sapien
ctctggtccagcttccaccacacag

SEQ ID NO: 863436 - DNA, 25 bp, Homo sapien
accacacagaagagccttcctcgtg

SEQ ID NO: 863437 - DNA, 25 bp, Homo sapien
tggctgtatatgcatcagctctagc

SEQ ID NO: 863438 - DNA, 25 bp, Homo sapien
tcagctctagcattttctaaatcag

SEQ ID NO: 863439 - DNA, 25 bp, Homo sapien
atcttcacaactggctgtatatgca

SEQ ID NO: 863440 - DNA, 25 bp, Homo sapien
aaatcatcttcacaactggctgtat

SEQ ID NO: 863441 - DNA, 25 bp, Homo sapien
cagtttttctcttgactcaggttca

SEQ ID NO: 863442 - DNA, 25 bp, Homo sapien
tttcaaagataactcgccaatcctt

SEQ ID NO: 863443 - DNA, 25 bp, Homo sapien
ttttctgcattaatagctctttgaa

SEQ ID NO: 863444 - DNA, 25 bp, Homo sapien
ttcaaattctgttctacctcgcttc

SEQ ID NO: 863445 - DNA, 25 bp, Homo sapien
ggcttcttgtacatacttacctgtg

SEQ ID NO: 863446 - DNA, 25 bp, Homo sapien
tggcttcttgtacatacttacctgt

SEQ ID NO: 863447 - DNA, 25 bp, Homo sapien
ccctaaggatttcggtggcttcttg

SEQ ID NO: 863448 - DNA, 25 bp, Homo sapien
aaggatttcggtggcttcttgtaca

SEQ ID NO: 863449 - DNA, 25 bp, Homo sapien
tattatataagaatgaacaacttgg

SEQ ID NO: 863450 - DNA, 25 bp, Homo sapien
caacttggccagatacgatggctca

SEQ ID NO: 863451 - DNA, 25 bp, Homo sapien
tgtactccagcacgggagacatagt

SEQ ID NO: 863452 - DNA, 25 bp, Homo sapien
actccagcacgggagacatagtgag

SEQ ID NO: 863453 - DNA, 25 bp, Homo sapien
tcttttgacggtgtgaagctgaggc

SEQ ID NO: 863454 - DNA, 25 bp, Homo sapien
ccgactcttttgacggtgtgaagct

SEQ ID NO: 863455 - DNA, 25 bp, Homo sapien
tgcttaagggcctgagtccgactct

SEQ ID NO: 863456 - DNA, 25 bp, Homo sapien
cctgagtccgactcttttgacggtg

SEQ ID NO: 863457 - DNA, 25 bp, Homo sapien
tatactgagctaggtgataagagat

SEQ ID NO: 863458 - DNA, 25 bp, Homo sapien
tattgagtactgactaaggaaggcc

SEQ ID NO: 863459 - DNA, 25 bp, Homo sapien
ctgactaaggaaggccatatactga

SEQ ID NO: 863460 - DNA, 25 bp, Homo sapien
ggtgcgtctcgctatgctgctcagg

SEQ ID NO: 863461 - DNA, 25 bp, Homo sapien
atatgagtctaaacaacatactgtg

SEQ ID NO: 863462 - DNA, 25 bp, Homo sapien
actgcccacaacaatcactagactg

SEQ ID NO: 863463 - DNA, 25 bp, Homo sapien
aaaaattgcattaaaccatatgtag

SEQ ID NO: 863464 - DNA, 25 bp, Homo sapien
catctacttagtggctcctccctga

SEQ ID NO: 863465 - DNA, 25 bp, Homo sapien
tatttccttacaacacacaaatgcc

SEQ ID NO: 863466 - DNA, 25 bp, Homo sapien
agaactcaccccacacgcgtataaa

SEQ ID NO: 863467 - DNA, 25 bp, Homo sapien
tctagtagtaaaagtgcctctatac

SEQ ID NO: 863468 - DNA, 25 bp, Homo sapien
cgcgtataaagtgtggactcctaca

SEQ ID NO: 863469 - DNA, 25 bp, Homo sapien
tcatacatttactgacagcctaatt

SEQ ID NO: 863470 - DNA, 25 bp, Homo sapien
gctcttccaacacctaaggaattca

SEQ ID NO: 863471 - DNA, 25 bp, Homo sapien
taataccttgcctattccataaaag

SEQ ID NO: 863472 - DNA, 25 bp, Homo sapien
tctctaccttgagccaccgacaggt

SEQ ID NO: 863473 - DNA, 25 bp, Homo sapien
tgatcggcccacgagcctgacacag

SEQ ID NO: 863474 - DNA, 25 bp, Homo sapien
ctgacacagcaaatagtgatcggcc

SEQ ID NO: 863475 - DNA, 25 bp, Homo sapien
agccaactgccctctaatcgtcctc

SEQ ID NO: 863476 - DNA, 25 bp, Homo sapien
ggcccacgggcctgaaacagccatt

SEQ ID NO: 863477 - DNA, 25 bp, Homo sapien
tcacacaacatatatgcctgggatg

SEQ ID NO: 863478 - DNA, 25 bp, Homo sapien
tactgactatgcaatcacctgcacc

SEQ ID NO: 863479 - DNA, 25 bp, Homo sapien
catttgacttcaggagctgacatac

SEQ ID NO: 863480 - DNA, 25 bp, Homo sapien
gttcctaaggactaattcatttgac

SEQ ID NO: 863481 - DNA, 25 bp, Homo sapien
agtcaatgagccgaagcagttttgt

SEQ ID NO: 863482 - DNA, 25 bp, Homo sapien
aatctaagtcaatgagccgaagcag

SEQ ID NO: 863483 - DNA, 25 bp, Homo sapien
tgaaaaatctaagtcaatgagccga

SEQ ID NO: 863484 - DNA, 25 bp, Homo sapien
tcaatgagccgaagcagttttgtac

SEQ ID NO: 863485 - DNA, 25 bp, Homo sapien
tttttcccaaagtttctgatataca

SEQ ID NO: 863486 - DNA, 25 bp, Homo sapien
ttttcccaaagtttctgatatacat

SEQ ID NO: 863487 - DNA, 25 bp, Homo sapien
tctcccgggtgctgggtccacactt

SEQ ID NO: 863488 - DNA, 25 bp, Homo sapien
acaacagtactttctcccgggtgct

SEQ ID NO: 863489 - DNA, 25 bp, Homo sapien
tggtctctatttcctccgtttgaat

SEQ ID NO: 863490 - DNA, 25 bp, Homo sapien
tatcttcgttacactgaacatatgc

SEQ ID NO: 863491 - DNA, 25 bp, Homo sapien
tgagaaaagggagtaatatacatcc

SEQ ID NO: 863492 - DNA, 25 bp, Homo sapien
aaagggagtaatatacatccctgcc

SEQ ID NO: 863493 - DNA, 25 bp, Homo sapien
gggagtaatatacatccctgccata

SEQ ID NO: 863494 - DNA, 25 bp, Homo sapien
agtaatatacatccctgccatacag

SEQ ID NO: 863495 - DNA, 25 bp, Homo sapien
acttcaagctatactctctagattt

SEQ ID NO: 863496 - DNA, 25 bp, Homo sapien
aaacttcaagctatactctctagat

SEQ ID NO: 863497 - DNA, 25 bp, Homo sapien
agaaaacttcaagctatactctcta

SEQ ID NO: 863498 - DNA, 25 bp, Homo sapien
ttcaagctatactctctagatttac

SEQ ID NO: 863499 - DNA, 25 bp, Homo sapien
cagtttatataaaatcaacgaagtc

SEQ ID NO: 863500 - DNA, 25 bp, Homo sapien
caacgaagtcgactctaaaataatc

SEQ ID NO: 863501 - DNA, 25 bp, Homo sapien
taaaatcaacgaagtcgactctaaa

SEQ ID NO: 863502 - DNA, 25 bp, Homo sapien
tatataaaatcaacgaagtcgactc

SEQ ID NO: 863503 - DNA, 25 bp, Homo sapien
ccgcagaaagctacataaccttgga

SEQ ID NO: 863504 - DNA, 25 bp, Homo sapien
ctacagcatcagaggtatctctttg

SEQ ID NO: 863505 - DNA, 25 bp, Homo sapien
taaccttggagtatcaatctttggc

SEQ ID NO: 863506 - DNA, 25 bp, Homo sapien
caatctttggcataactacagcatc

SEQ ID NO: 863507 - DNA, 25 bp, Homo sapien
tcaaccaccgtgtcgaggtttcaca

SEQ ID NO: 863508 - DNA, 25 bp, Homo sapien
atgtcaaccagcgtgtcgacgtttc

SEQ ID NO: 863509 - DNA, 25 bp, Homo sapien
cacaatcatccttaatgtcaaccag

SEQ ID NO: 863510 - DNA, 25 bp, Homo sapien
cgtgtcgaggtttcacaatcatcct

SEQ ID NO: 863511 - DNA, 25 bp, Homo sapien
cgaggtttcacaatcatcctaaatg

SEQ ID NO: 863512 - DNA, 25 bp, Homo sapien
tggtgttcagctgagatgagctgtc

SEQ ID NO: 863513 - DNA, 25 bp, Homo sapien
gggccctgtcttgagccctaagatt

SEQ ID NO: 863514 - DNA, 25 bp, Homo sapien
tcagctgagatgagctgtcactaaa

SEQ ID NO: 863515 - DNA, 25 bp, Homo sapien
tttgaaggaatggtagactggtgtt

SEQ ID NO: 863516 - DNA, 25 bp, Homo sapien
cattaaaccccatcacattaaaata

SEQ ID NO: 863517 - DNA, 25 bp, Homo sapien
gaatgtttagtcactggatttaaaa

SEQ ID NO: 863518 - DNA, 25 bp, Homo sapien
caacatgaatgtttagtcactggat

SEQ ID NO: 863519 - DNA, 25 bp, Homo sapien
tatttcaacatgaatgtttagtcac

SEQ ID NO: 863520 - DNA, 25 bp, Homo sapien
caccatccatgcttgggtcacaacg

SEQ ID NO: 863521 - DNA, 25 bp, Homo sapien
tcgtgaaacaggaggataggaagtc

SEQ ID NO: 863522 - DNA, 25 bp, Homo sapien
cgagggactgcactccaaggcgtta

SEQ ID NO: 863523 - DNA, 25 bp, Homo sapien
ttccaccagcaagcgtcaggtcttc

SEQ ID NO: 863524 - DNA, 25 bp, Homo sapien
tgcctctgaactcgggaggtgtgca

SEQ ID NO: 863525 - DNA, 25 bp, Homo sapien
tgaaggctgccaaatatcccacaca

SEQ ID NO: 863526 - DNA, 25 bp, Homo sapien
gctcttctcgggtaagtcgtgaacg

SEQ ID NO: 863527 - DNA, 25 bp, Homo sapien
cacacagaggacgtatttgctgtcc

SEQ ID NO: 863528 - DNA, 25 bp, Homo sapien
tcagcgtcacagagtaatgcagcct

SEQ ID NO: 863529 - DNA, 25 bp, Homo sapien
gcgctgttccggcaaacagtaaaaa

SEQ ID NO: 863530 - DNA, 25 bp, Homo sapien
gacgacaactgagccgtgcgctgtt

SEQ ID NO: 863531 - DNA, 25 bp, Homo sapien
tcaaagggctcaagcagcaacacgt

SEQ ID NO: 863532 - DNA, 25 bp, Homo sapien
ttcagattcctaggacacacgggcc

SEQ ID NO: 863533 - DNA, 25 bp, Homo sapien
aagtctctgcgaggccaaatcctgg

SEQ ID NO: 863534 - DNA, 25 bp, Homo sapien
tggaatcacatctcctcaaagggca

SEQ ID NO: 863535 - DNA, 25 bp, Homo sapien
tgcccactgaaaagatacctgtcgc

SEQ ID NO: 863536 - DNA, 25 bp, Homo sapien
agtagaaaagggtgaaagcacaaag

SEQ ID NO: 863537 - DNA, 25 bp, Homo sapien
gaaaagggtgaaagcacaaagctct

SEQ ID NO: 863538 - DNA, 25 bp, Homo sapien
tttttgtggacggacgttgagatag

SEQ ID NO: 863539 - DNA, 25 bp, Homo sapien
agagggcttcggtggtttactgagg

SEQ ID NO: 863540 - DNA, 25 bp, Homo sapien
tttcacaaccattgatgaaggattt

SEQ ID NO: 863541 - DNA, 25 bp, Homo sapien
tcacaaccattgatgaaggatttta

SEQ ID NO: 863542 - DNA, 25 bp, Homo sapien
ccactctcatccaaggaagcgatgt

SEQ ID NO: 863543 - DNA, 25 bp, Homo sapien
ccatacattgagaaccccactctca

SEQ ID NO: 863544 - DNA, 25 bp, Homo sapien
caaggaagcgatgtggaaggacaaa

SEQ ID NO: 863545 - DNA, 25 bp, Homo sapien
tcatccaaggaagcgatgtggaagg

SEQ ID NO: 863546 - DNA, 25 bp, Homo sapien
gctcaggaccaagaagcccagtctt

SEQ ID NO: 863547 - DNA, 25 bp, Homo sapien
aagggccccaaacctgccatgtgtg

SEQ ID NO: 863548 - DNA, 25 bp, Homo sapien
taatcaacagtcttggcgcatcctc

SEQ ID NO: 863549 - DNA, 25 bp, Homo sapien
caaagccctgtgtgagagtccctat

SEQ ID NO: 863550 - DNA, 25 bp, Homo sapien
tctgcctttggtaattcaacaacca

SEQ ID NO: 863551 - DNA, 25 bp, Homo sapien
tgtctgcctttggtaattcaacaac

SEQ ID NO: 863552 - DNA, 25 bp, Homo sapien
taaatcacttattgaacctgcgatg

SEQ ID NO: 863553 - DNA, 25 bp, Homo sapien
tattgaacctgcgatgtctgccttt

SEQ ID NO: 863554 - DNA, 25 bp, Homo sapien
cactgcacctgaccgcagttatcag

SEQ ID NO: 863555 - DNA, 25 bp, Homo sapien
gaccgcagttatcagtacttttaat

SEQ ID NO: 863556 - DNA, 25 bp, Homo sapien
acttttaatctcgattcattttaga

SEQ ID NO: 863557 - DNA, 25 bp, Homo sapien
tgcacctgaccgcagttatcagtac

SEQ ID NO: 863558 - DNA, 25 bp, Homo sapien
caaggcgcactcttaaggtcacaag

SEQ ID NO: 863559 - DNA, 25 bp, Homo sapien
taggactggacctcgcttatgcaga

SEQ ID NO: 863560 - DNA, 25 bp, Homo sapien
tgtaagggccaccacagacgtgtga

SEQ ID NO: 863561 - DNA, 25 bp, Homo sapien
gactgactatgtgggtctcgcccca

SEQ ID NO: 863562 - DNA, 25 bp, Homo sapien
caatagaagctaaatcaaaatctag

SEQ ID NO: 863563 - DNA, 25 bp, Homo sapien
aaaatctagttatagttgcctggaa

SEQ ID NO: 863564 - DNA, 25 bp, Homo sapien
atcaatgcacctttcaatagaagct

SEQ ID NO: 863565 - DNA, 25 bp, Homo sapien
tctagttatagttgcctggaatcat

SEQ ID NO: 863566 - DNA, 25 bp, Homo sapien
tgtcacccaactggatcagagcact

SEQ ID NO: 863567 - DNA, 25 bp, Homo sapien
ccaactggatcagagcactatgtac

SEQ ID NO: 863568 - DNA, 25 bp, Homo sapien
agcactatgtaccagcttgaccctc

SEQ ID NO: 863569 - DNA, 25 bp, Homo sapien
tcacccaactggatcagagcactat

SEQ ID NO: 863570 - DNA, 25 bp, Homo sapien
taataacagactaacaaggccgggc

SEQ ID NO: 863571 - DNA, 25 bp, Homo sapien
gagatagtgaagcattttccctcac

SEQ ID NO: 863572 - DNA, 25 bp, Homo sapien
tggacttcttcatcgcaaaagctca

SEQ ID NO: 863573 - DNA, 25 bp, Homo sapien
ccatttaccgtatatgcaattcccc

SEQ ID NO: 863574 - DNA, 25 bp, Homo sapien
gacagactcgttagggcctgactca

SEQ ID NO: 863575 - DNA, 25 bp, Homo sapien
aatgtccacaccctttagcacggca

SEQ ID NO: 863576 - DNA, 25 bp, Homo sapien
gacagactcgttagggcctggctca

SEQ ID NO: 863577 - DNA, 25 bp, Homo sapien
tgacagctcgtgaccacctttatgc

SEQ ID NO: 863578 - DNA, 25 bp, Homo sapien
tgctcctatcctcgcctggcaagtg

SEQ ID NO: 863579 - DNA, 25 bp, Homo sapien
ctggcaagtggtgcccagtcaccaa

SEQ ID NO: 863580 - DNA, 25 bp, Homo sapien
aatgccacctcttggttgacgactc

SEQ ID NO: 863581 - DNA, 25 bp, Homo sapien
gggtttctgctatggaggcccctag

SEQ ID NO: 863582 - DNA, 25 bp, Homo sapien
tgtataacaggccatgtcacattcc

SEQ ID NO: 863583 - DNA, 25 bp, Homo sapien
gcttctcataagaaacctgtgagcc

SEQ ID NO: 863584 - DNA, 25 bp, Homo sapien
cttcatgcttgtagttgtgagctca

SEQ ID NO: 863585 - DNA, 25 bp, Homo sapien
gatggactgtttccaaccttaagaa

SEQ ID NO: 863586 - DNA, 25 bp, Homo sapien
aataaagtgattaggatctgaaggc

SEQ ID NO: 863587 - DNA, 25 bp, Homo sapien
catgtctgtgccaataataaagtga

SEQ ID NO: 863588 - DNA, 25 bp, Homo sapien
agtgtttgtgtagtgccccaaaatt

SEQ ID NO: 863589 - DNA, 25 bp, Homo sapien
tgccccaaaattcattacctttatg

SEQ ID NO: 863590 - DNA, 25 bp, Homo sapien
cacacgagattggatacagctactg

SEQ ID NO: 863591 - DNA, 25 bp, Homo sapien
gcccaagagtgactgaacgagtgca

SEQ ID NO: 863592 - DNA, 25 bp, Homo sapien
caagatatttatcaggtaagtcagg

SEQ ID NO: 863593 - DNA, 25 bp, Homo sapien
caaggagaatgagtaataggattaa

SEQ ID NO: 863594 - DNA, 25 bp, Homo sapien
tggtcttataccatgttgctgaggt

SEQ ID NO: 863595 - DNA, 25 bp, Homo sapien
tcaatgacattaactttcactggtc

SEQ ID NO: 863596 - DNA, 25 bp, Homo sapien
gagccactctcaaatcttgtcttgt

SEQ ID NO: 863597 - DNA, 25 bp, Homo sapien
ctgaggtttgaatagtttgggagcc

SEQ ID NO: 863598 - DNA, 25 bp, Homo sapien
tccatttgcctccacatgccaccat

SEQ ID NO: 863599 - DNA, 25 bp, Homo sapien
tgttgctcaagctggctcaagagat

SEQ ID NO: 863600 - DNA, 25 bp, Homo sapien
tttgcctccacatgccaccattctt

SEQ ID NO: 863601 - DNA, 25 bp, Homo sapien
tccacatgccaccattcttggcaaa

SEQ ID NO: 863602 - DNA, 25 bp, Homo sapien
cttgagagcagcctacagttgggtc

SEQ ID NO: 863603 - DNA, 25 bp, Homo sapien
gacgggatctcattctgtgacctag

SEQ ID NO: 863604 - DNA, 25 bp, Homo sapien
aaaatgtcactctactccctcctgg

SEQ ID NO: 863605 - DNA, 25 bp, Homo sapien
ctttctatacttgggagctctggtg

SEQ ID NO: 863606 - DNA, 25 bp, Homo sapien
ttttttcgtaacttgatctcagcag

SEQ ID NO: 863607 - DNA, 25 bp, Homo sapien
gcagccagagaaattttttggagga

SEQ ID NO: 863608 - DNA, 25 bp, Homo sapien
cacccaccttttatatcgttcgtag

SEQ ID NO: 863609 - DNA, 25 bp, Homo sapien
tgagcactcacctgactctgataca

SEQ ID NO: 863610 - DNA, 25 bp, Homo sapien
gcggaaacgcggagctcagctggtg

SEQ ID NO: 863611 - DNA, 25 bp, Homo sapien
ctggtgcagcctgatgcttccgtcc

SEQ ID NO: 863612 - DNA, 25 bp, Homo sapien
agcctgatgcttccgtccgaacagc

SEQ ID NO: 863613 - DNA, 25 bp, Homo sapien
ctgcaggagcggaaacgcggagctc

SEQ ID NO: 863614 - DNA, 25 bp, Homo sapien
gacctgctgtttggcgacaggaccc

SEQ ID NO: 863615 - DNA, 25 bp, Homo sapien
gacaggacccagatcgctctggagg

SEQ ID NO: 863616 - DNA, 25 bp, Homo sapien
ttggatgtgtcgtcctgcaccagga

SEQ ID NO: 863617 - DNA, 25 bp, Homo sapien
tgaccgcatggctgtccgtgctgct

SEQ ID NO: 863618 - DNA, 25 bp, Homo sapien
agcagctggtccagagcttccccac

SEQ ID NO: 863619 - DNA, 25 bp, Homo sapien
cagcagctggtccagagcttcccca

SEQ ID NO: 863620 - DNA, 25 bp, Homo sapien
gtcgatggagccagacgccctggcc

SEQ ID NO: 863621 - DNA, 25 bp, Homo sapien
cgatggagccagacgccctggccag

SEQ ID NO: 863622 - DNA, 25 bp, Homo sapien
gagccagacgccctggccagcacca

SEQ ID NO: 863623 - DNA, 25 bp, Homo sapien
tcgatggagccagacgccctggcca

SEQ ID NO: 863624 - DNA, 25 bp, Homo sapien
aaagcagacgcagcctgttgcactc

SEQ ID NO: 863625 - DNA, 25 bp, Homo sapien
aaaagcagacgcagcctgttgcact

SEQ ID NO: 863626 - DNA, 25 bp, Homo sapien
gcaaaagcagacgcagcctgttgca

SEQ ID NO: 863627 - DNA, 25 bp, Homo sapien
caaaagcagacgcagcctgttgcac

SEQ ID NO: 863628 - DNA, 25 bp, Homo sapien
catctatttactgggaataccaaag

SEQ ID NO: 863629 - DNA, 25 bp, Homo sapien
tctcagaaaagagcaccctggacgt

SEQ ID NO: 863630 - DNA, 25 bp, Homo sapien
ggacgtggctctacattcccctgga

SEQ ID NO: 863631 - DNA, 25 bp, Homo sapien
tgggtcattacagaaacgcggtcct

SEQ ID NO: 863632 - DNA, 25 bp, Homo sapien
gggcccacaagcaccgggccagctc

SEQ ID NO: 863633 - DNA, 25 bp, Homo sapien
atatggctcaaaaaacacccaatgc

SEQ ID NO: 863634 - DNA, 25 bp, Homo sapien
tgtttctttcttcacgaacttcaca

SEQ ID NO: 863635 - DNA, 25 bp, Homo sapien
ctgaggggcagatcgttggcctttt

SEQ ID NO: 863636 - DNA, 25 bp, Homo sapien
tgccttggaagaaagcgctcagcct

SEQ ID NO: 863637 - DNA, 25 bp, Homo sapien
tagaggctgcgattactccatcctg

SEQ ID NO: 863638 - DNA, 25 bp, Homo sapien
gccttgctgtaaagtcagacgggaa

SEQ ID NO: 863639 - DNA, 25 bp, Homo sapien
gaaaattaaattaccgctgtctgcc

SEQ ID NO: 863640 - DNA, 25 bp, Homo sapien
gggtatcctcagcacacaaataacc

SEQ ID NO: 863641 - DNA, 25 bp, Homo sapien
agtgcctccgtcctcaagagctcag

SEQ ID NO: 863642 - DNA, 25 bp, Homo sapien
acagaagtgcctccgtcctcaagag

SEQ ID NO: 863643 - DNA, 25 bp, Homo sapien
tccagcacagcaagcggggtatcct

SEQ ID NO: 863644 - DNA, 25 bp, Homo sapien
ttgccccattctcccggcctttgat

SEQ ID NO: 863645 - DNA, 25 bp, Homo sapien
tgaactgcgccgtctgtgcggctcg

SEQ ID NO: 863646 - DNA, 25 bp, Homo sapien
tgctccgctgaactgcgccgtctgt

SEQ ID NO: 863647 - DNA, 25 bp, Homo sapien
gatgattcgttccacggcactgcct

SEQ ID NO: 863648 - DNA, 25 bp, Homo sapien
gactgacacattaaaggctgtgatg

SEQ ID NO: 863649 - DNA, 25 bp, Homo sapien
gctgtgatggaaaacgtggacaaca

SEQ ID NO: 863650 - DNA, 25 bp, Homo sapien
tgacacattaaaggctgtgatggaa

SEQ ID NO: 863651 - DNA, 25 bp, Homo sapien
actatgactgacacattaaaggctg

SEQ ID NO: 863652 - DNA, 25 bp, Homo sapien
acgtggatttccaccgcgaccttgc

SEQ ID NO: 863653 - DNA, 25 bp, Homo sapien
gcgaccttgccacgtaccatggctt

SEQ ID NO: 863654 - DNA, 25 bp, Homo sapien
ttgccacgtaccatggcttcgggcc

SEQ ID NO: 863655 - DNA, 25 bp, Homo sapien
cttcgggccccatgagtttcacacc

SEQ ID NO: 863656 - DNA, 25 bp, Homo sapien
cacagcaggcgctgaggctcacgga

SEQ ID NO: 863657 - DNA, 25 bp, Homo sapien
ctcacggagtttcaagggggcgcac

SEQ ID NO: 863658 - DNA, 25 bp, Homo sapien
tggactcaccaccgtgcacagcagg

SEQ ID NO: 863659 - DNA, 25 bp, Homo sapien
ttagcccatgggtgcggatgccacc

SEQ ID NO: 863660 - DNA, 25 bp, Homo sapien
tgtctaaagacactaacagtaggtg

SEQ ID NO: 863661 - DNA, 25 bp, Homo sapien
tctaaagacactaacagtaggtggg

SEQ ID NO: 863662 - DNA, 25 bp, Homo sapien
cactaacagtaggtggggcttgtct

SEQ ID NO: 863663 - DNA, 25 bp, Homo sapien
gttgtctaaagacactaacagtagg

SEQ ID NO: 863664 - DNA, 25 bp, Homo sapien
tcagagctgcgatccctgcagatcc

SEQ ID NO: 863665 - DNA, 25 bp, Homo sapien
aacagccaaagggcaggcgtggccc

SEQ ID NO: 863666 - DNA, 25 bp, Homo sapien
cagagctgcgatccctgcagatcct

SEQ ID NO: 863667 - DNA, 25 bp, Homo sapien
agagctgcgatccctgcagatcctt

SEQ ID NO: 863668 - DNA, 25 bp, Homo sapien
tgaagccaagataccgaacaagtcg

SEQ ID NO: 863669 - DNA, 25 bp, Homo sapien
caagtcggcaagagacaaaaacggg

SEQ ID NO: 863670 - DNA, 25 bp, Homo sapien
cgaaaatcaagtagggacgaggctg

SEQ ID NO: 863671 - DNA, 25 bp, Homo sapien
catttctggaatcaaggtgcacctc

SEQ ID NO: 863672 - DNA, 25 bp, Homo sapien
tgttgtctttgttctaggcaaggca

SEQ ID NO: 863673 - DNA, 25 bp, Homo sapien
gttgtctttgttctaggcaaggcat

SEQ ID NO: 863674 - DNA, 25 bp, Homo sapien
ttgattttctcttttagatttgcac

SEQ ID NO: 863675 - DNA, 25 bp, Homo sapien
ctttgattttctcttttagatttgc

SEQ ID NO: 863676 - DNA, 25 bp, Homo sapien
gattttctcttttagatttgcacat

SEQ ID NO: 863677 - DNA, 25 bp, Homo sapien
tgattttctcttttagatttgcaca

SEQ ID NO: 863678 - DNA, 25 bp, Homo sapien
ccagggaacgccctctcgcagggcc

SEQ ID NO: 863679 - DNA, 25 bp, Homo sapien
gcagagctgactgcgcggagcgagt

SEQ ID NO: 863680 - DNA, 25 bp, Homo sapien
ggcggcacaccctctggaaccttcc

SEQ ID NO: 863681 - DNA, 25 bp, Homo sapien
cagaatcctccggaagagtcagcag

SEQ ID NO: 863682 - DNA, 25 bp, Homo sapien
agagctcttgtcctgcgtctaggaa

SEQ ID NO: 863683 - DNA, 25 bp, Homo sapien
tacgtgacgttctcatgggatctct

SEQ ID NO: 863684 - DNA, 25 bp, Homo sapien
tacagttgatgaacccacagtaacg

SEQ ID NO: 863685 - DNA, 25 bp, Homo sapien
tagggctccgtctcagtgctgtacg

SEQ ID NO: 863686 - DNA, 25 bp, Homo sapien
taacctccgtgtatccagggatttc

SEQ ID NO: 863687 - DNA, 25 bp, Homo sapien
cctccgtgtatccagggatttctca

SEQ ID NO: 863688 - DNA, 25 bp, Homo sapien
tgtaacctccgtgtatccagggatt

SEQ ID NO: 863689 - DNA, 25 bp, Homo sapien
atgtaacctccgtgtatccagggat

SEQ ID NO: 863690 - DNA, 25 bp, Homo sapien
tttgcaggcatcaccaagctgcttc

SEQ ID NO: 863691 - DNA, 25 bp, Homo sapien
aattatgggtattggacgtctggac

SEQ ID NO: 863692 - DNA, 25 bp, Homo sapien
tgcctcgctaacagtccagtgactg

SEQ ID NO: 863693 - DNA, 25 bp, Homo sapien
tcttgtctgcaaagcgaagtgaagc

SEQ ID NO: 863694 - DNA, 25 bp, Homo sapien
ccaagagaggcttctcagatctcac

SEQ ID NO: 863695 - DNA, 25 bp, Homo sapien
agatctcacacaagagggaattcaa

SEQ ID NO: 863696 - DNA, 25 bp, Homo sapien
ttcccactcgagcaggagtgttcac

SEQ ID NO: 863697 - DNA, 25 bp, Homo sapien
gccagtctcttggtcaccctttggg

SEQ ID NO: 863698 - DNA, 25 bp, Homo sapien
tcccactcgagcaggagtgttcact

SEQ ID NO: 863699 - DNA, 25 bp, Homo sapien
tggagccagtctcttggtcaccctt

SEQ ID NO: 863700 - DNA, 25 bp, Homo sapien
gaccttcccactcgagcaggagtgt

SEQ ID NO: 863701 - DNA, 25 bp, Homo sapien
caggagtgtttactcccaggctcac

SEQ ID NO: 863702 - DNA, 25 bp, Homo sapien
tcccactcgagcaggagtgtttact

SEQ ID NO: 863703 - DNA, 25 bp, Homo sapien
aagaccttcccactcgagcaggagt

SEQ ID NO: 863704 - DNA, 25 bp, Homo sapien
actgagacgctgcaagggcatcagc

SEQ ID NO: 863705 - DNA, 25 bp, Homo sapien
attggacagccaccgcagtgagcaa

SEQ ID NO: 863706 - DNA, 25 bp, Homo sapien
aaccccaaagtctcgtgctaagaag

SEQ ID NO: 863707 - DNA, 25 bp, Homo sapien
agggcatcagccatcgaccattgga

SEQ ID NO: 863708 - DNA, 25 bp, Homo sapien
acagggtctgaaccttcgggcatgt

SEQ ID NO: 863709 - DNA, 25 bp, Homo sapien
tccacgcgcttctccggccacaggg

SEQ ID NO: 863710 - DNA, 25 bp, Homo sapien
cggccacagggtctgaaccttcggg

SEQ ID NO: 863711 - DNA, 25 bp, Homo sapien
ttctccggccacagggtctgaacct

SEQ ID NO: 863712 - DNA, 25 bp, Homo sapien
cagcgcgcgggaggccgtcctcttc

SEQ ID NO: 863713 - DNA, 25 bp, Homo sapien
gcagcgcgcgggaggccgtcctctt

SEQ ID NO: 863714 - DNA, 25 bp, Homo sapien
aggaagcaggcagcgcgcgggaggc

SEQ ID NO: 863715 - DNA, 25 bp, Homo sapien
ctgaggaagcaggcagcgcgcggga

SEQ ID NO: 863716 - DNA, 25 bp, Homo sapien
cagcgcgcgggaggccgtcctcttc

SEQ ID NO: 863717 - DNA, 25 bp, Homo sapien
gcagcgcgcgggaggccgtcctctt

SEQ ID NO: 863718 - DNA, 25 bp, Homo sapien
agataaagccagcagcgcgcgggag

SEQ ID NO: 863719 - DNA, 25 bp, Homo sapien
tcaggagcccagataaagccagcag

SEQ ID NO: 863720 - DNA, 25 bp, Homo sapien
gataaagccagcagcgcgcgggagg

SEQ ID NO: 863721 - DNA, 25 bp, Homo sapien
ccctctgtggcgggaaggagtcgca

SEQ ID NO: 863722 - DNA, 25 bp, Homo sapien
cctctgtggcgggaaggagtcgcaa

SEQ ID NO: 863723 - DNA, 25 bp, Homo sapien
ctccctctgtggcgggaaggagtcg

SEQ ID NO: 863724 - DNA, 25 bp, Homo sapien
ctctgtggcgggaaggagtcgcaag

SEQ ID NO: 863725 - DNA, 25 bp, Homo sapien
gcaaagctgcgtcctctgtctctgt

SEQ ID NO: 863726 - DNA, 25 bp, Homo sapien
caaagctgcgtcctctgtctctgtg

SEQ ID NO: 863727 - DNA, 25 bp, Homo sapien
ctgtgagaacaaagggttagagact

SEQ ID NO: 863728 - DNA, 25 bp, Homo sapien
ccagcaggcactccgcaagggcgtg

SEQ ID NO: 863729 - DNA, 25 bp, Homo sapien
ctaacatctcatttcagcaatcaga

SEQ ID NO: 863730 - DNA, 25 bp, Homo sapien
actccgcaagggtgtcctggacaca

SEQ ID NO: 863731 - DNA, 25 bp, Homo sapien
agatgcccggggaaggacgtcctgg

SEQ ID NO: 863732 - DNA, 25 bp, Homo sapien
ctgtagggccagatgcccggggaag

SEQ ID NO: 863733 - DNA, 25 bp, Homo sapien
ccagatgcccggggaaggacgtcct

SEQ ID NO: 863734 - DNA, 25 bp, Homo sapien
ggccagatgcccggggaaggacgtc

SEQ ID NO: 863735 - DNA, 25 bp, Homo sapien
ctgatggcgccaacggtgatggaga

SEQ ID NO: 863736 - DNA, 25 bp, Homo sapien
ctggctgcacagcagactgatggcg

SEQ ID NO: 863737 - DNA, 25 bp, Homo sapien
acagcagactgatggcgccaacggt

SEQ ID NO: 863738 - DNA, 25 bp, Homo sapien
gctgcacagcagactgatggcgcca

SEQ ID NO: 863739 - DNA, 25 bp, Homo sapien
cctttagatgagacgtgaactgcag

SEQ ID NO: 863740 - DNA, 25 bp, Homo sapien
gccttcataaggaaaactgcgattg

SEQ ID NO: 863741 - DNA, 25 bp, Homo sapien
gaaatggcaagttcctatggtcagc

SEQ ID NO: 863742 - DNA, 25 bp, Homo sapien
gcagataacaggttcagctcccaga

SEQ ID NO: 863743 - DNA, 25 bp, Homo sapien
ggtcacgcgccaaggaaaacaagag

SEQ ID NO: 863744 - DNA, 25 bp, Homo sapien
cgggtgcaaccccaataatccagtg

SEQ ID NO: 863745 - DNA, 25 bp, Homo sapien
taattgagtgtgagacacggtcacg

SEQ ID NO: 863746 - DNA, 25 bp, Homo sapien
ggcgcaactacaggcatggcgtcag

SEQ ID NO: 863747 - DNA, 25 bp, Homo sapien
cacagcttgctgatagtaatgaaca

SEQ ID NO: 863748 - DNA, 25 bp, Homo sapien
gaggcgctcccaacacatacatata

SEQ ID NO: 863749 - DNA, 25 bp, Homo sapien
cagagaaagagattgacgatgctca

SEQ ID NO: 863750 - DNA, 25 bp, Homo sapien
cattgtgacaaatcagggacgctgg

SEQ ID NO: 863751 - DNA, 25 bp, Homo sapien
tgcatgtaacctaggcagggaggcc

SEQ ID NO: 863752 - DNA, 25 bp, Homo sapien
aaaactgtgtacacttggcccgcac

SEQ ID NO: 863753 - DNA, 25 bp, Homo sapien
tcaatcaggacgttgggcgtacacg

SEQ ID NO: 863754 - DNA, 25 bp, Homo sapien
ggagtgtattcttgtcccgcacagg

SEQ ID NO: 863755 - DNA, 25 bp, Homo sapien
tgtgtcattgatacagcagactaag

SEQ ID NO: 863756 - DNA, 25 bp, Homo sapien
tgcacctgataacagagcttcaaga

SEQ ID NO: 863757 - DNA, 25 bp, Homo sapien
caatcccaaatgtgcatgcacctga

SEQ ID NO: 863758 - DNA, 25 bp, Homo sapien
gaaggtcagttcatcaggaaagcat

SEQ ID NO: 863759 - DNA, 25 bp, Homo sapien
gccactttttgatcgtaagaactgg

SEQ ID NO: 863760 - DNA, 25 bp, Homo sapien
gagtgatgaaatttaggacagccac

SEQ ID NO: 863761 - DNA, 25 bp, Homo sapien
tgacatatcttgacttccagccggg

SEQ ID NO: 863762 - DNA, 25 bp, Homo sapien
ccagccgggtgtctctccttagaaa

SEQ ID NO: 863763 - DNA, 25 bp, Homo sapien
attgtgccattgcacattgcactcc

SEQ ID NO: 863764 - DNA, 25 bp, Homo sapien
ctccagcctggctgacaaaggaaga

SEQ ID NO: 863765 - DNA, 25 bp, Homo sapien
cactccagcctggctgacaaaggaa

SEQ ID NO: 863766 - DNA, 25 bp, Homo sapien
ccagcctggctgacaaaggaagact

SEQ ID NO: 863767 - DNA, 25 bp, Homo sapien
tttacatgcatgacgggtttcggcc

SEQ ID NO: 863768 - DNA, 25 bp, Homo sapien
tccctgcaggagcttaagtaaatac

SEQ ID NO: 863769 - DNA, 25 bp, Homo sapien
cacacatcccaggatagggcggtga

SEQ ID NO: 863770 - DNA, 25 bp, Homo sapien
tcacttatgtccaggcatgatggct

SEQ ID NO: 863771 - DNA, 25 bp, Homo sapien
gtctgcatggtgtgttgccccagct

SEQ ID NO: 863772 - DNA, 25 bp, Homo sapien
tctctttggagctagcgtggattag

SEQ ID NO: 863773 - DNA, 25 bp, Homo sapien
cagcggcgggcattgtgaggtgggt

SEQ ID NO: 863774 - DNA, 25 bp, Homo sapien
gggccgggagcagcgtctgcatggt

SEQ ID NO: 863775 - DNA, 25 bp, Homo sapien
cagcgcacggtaaggtggacttttt

SEQ ID NO: 863776 - DNA, 25 bp, Homo sapien
gcatttggacagtcggtggcacaca

SEQ ID NO: 863777 - DNA, 25 bp, Homo sapien
gcgactgtccacacgcctgatcgat

SEQ ID NO: 863778 - DNA, 25 bp, Homo sapien
cttcacacggatgcttcacgatggc

SEQ ID NO: 863779 - DNA, 25 bp, Homo sapien
tgatcgcggtgcgccctgctgctgc

SEQ ID NO: 863780 - DNA, 25 bp, Homo sapien
gatcgcggtgcgccctgctgctgca

SEQ ID NO: 863781 - DNA, 25 bp, Homo sapien
ctgatcgcggtgcgccctgctgctg

SEQ ID NO: 863782 - DNA, 25 bp, Homo sapien
gagaccgctgcgtgcctgcaactgt

SEQ ID NO: 863783 - DNA, 25 bp, Homo sapien
tgcgccctgacgctgggagaccgct

SEQ ID NO: 863784 - DNA, 25 bp, Homo sapien
tcgcggtgcgccctgacgctgggag

SEQ ID NO: 863785 - DNA, 25 bp, Homo sapien
tgggagaccgctgcgtgcctgcaac

SEQ ID NO: 863786 - DNA, 25 bp, Homo sapien
tatgtgaccgcaagtgagcattgca

SEQ ID NO: 863787 - DNA, 25 bp, Homo sapien
cattgcagaaacagcacgaagcgtt

SEQ ID NO: 863788 - DNA, 25 bp, Homo sapien
caacgagggccaggttcagtacaac

SEQ ID NO: 863789 - DNA, 25 bp, Homo sapien
cataagtccatgtgcagaactgtgc

SEQ ID NO: 863790 - DNA, 25 bp, Homo sapien
ggagacgccggcataggctccatgc

SEQ ID NO: 863791 - DNA, 25 bp, Homo sapien
ctggagacgccggcataggctccat

SEQ ID NO: 863792 - DNA, 25 bp, Homo sapien
agacgccggcataggctccatgcct

SEQ ID NO: 863793 - DNA, 25 bp, Homo sapien
tccatttggaattagtattgtataa

SEQ ID NO: 863794 - DNA, 25 bp, Homo sapien
aatgagacctgctgggaccaagctc

SEQ ID NO: 863795 - DNA, 25 bp, Homo sapien
gaaagccacgcatgaattcagtgca

SEQ ID NO: 863796 - DNA, 25 bp, Homo sapien
ttcgcatggcttggatggatcacac

SEQ ID NO: 863797 - DNA, 25 bp, Homo sapien
catagcctgacacgtgaaggttcca

SEQ ID NO: 863798 - DNA, 25 bp, Homo sapien
gggcccacttgttccacttgtggaa

SEQ ID NO: 863799 - DNA, 25 bp, Homo sapien
gggctctcggctcctttgtgttctc

SEQ ID NO: 863800 - DNA, 25 bp, Homo sapien
gatttagggcaccttttatactgaa

SEQ ID NO: 863801 - DNA, 25 bp, Homo sapien
tgtaaagcttctattcagtacctgg

SEQ ID NO: 863802 - DNA, 25 bp, Homo sapien
gtggccggcggcgttgctttgtgtc

SEQ ID NO: 863803 - DNA, 25 bp, Homo sapien
ccggcggcgttgctttgtgtcagcg

SEQ ID NO: 863804 - DNA, 25 bp, Homo sapien
ggccggcggcgttgctttgtgtcag

SEQ ID NO: 863805 - DNA, 25 bp, Homo sapien
cggcgttgctttgtgtcagcgcacg

SEQ ID NO: 863806 - DNA, 25 bp, Homo sapien
tgccccgcacacaagtctgcgtgcc

SEQ ID NO: 863807 - DNA, 25 bp, Homo sapien
cttgggacccgagacgaggacaaga

SEQ ID NO: 863808 - DNA, 25 bp, Homo sapien
tgccagtccacaaacttactcccgt

SEQ ID NO: 863809 - DNA, 25 bp, Homo sapien
gttcttgggacccgagacgaggaca

SEQ ID NO: 863810 - DNA, 25 bp, Homo sapien
ctgacgtaaagctgaacctctgcct

SEQ ID NO: 863811 - DNA, 25 bp, Homo sapien
ggatgtttgctctacggctccacca

SEQ ID NO: 863812 - DNA, 25 bp, Homo sapien
catttggctctcgaaggatgtttgc

SEQ ID NO: 863813 - DNA, 25 bp, Homo sapien
aaaggtcacgcacatttggctctcg

SEQ ID NO: 863814 - DNA, 25 bp, Homo sapien
tgctggcgaatgtgtgagttgtttt

SEQ ID NO: 863815 - DNA, 25 bp, Homo sapien
aggtgtttctgtgcttacccgagta

SEQ ID NO: 863816 - DNA, 25 bp, Homo sapien
ctgggcctggttggtttgaccgact

SEQ ID NO: 863817 - DNA, 25 bp, Homo sapien
gtttgaccgactccctgctggcgaa

SEQ ID NO: 863818 - DNA, 25 bp, Homo sapien
ccatctgaaggtgcgtatctcgtga

SEQ ID NO: 863819 - DNA, 25 bp, Homo sapien
ccatatccccggtaaaatgaggccg

SEQ ID NO: 863820 - DNA, 25 bp, Homo sapien
cacatgtgccactgttcagcggagc

SEQ ID NO: 863821 - DNA, 25 bp, Homo sapien
acagctgagtgggaaccggaaacct

SEQ ID NO: 863822 - DNA, 25 bp, Homo sapien
tagcttgtgagtcccagaaagccgg

SEQ ID NO: 863823 - DNA, 25 bp, Homo sapien
tcccggccgggtctagacagaatct

SEQ ID NO: 863824 - DNA, 25 bp, Homo sapien
tggcaacacagatacgggagcaggc

SEQ ID NO: 863825 - DNA, 25 bp, Homo sapien
taatagagggaatcaggcaggtcct

SEQ ID NO: 863826 - DNA, 25 bp, Homo sapien
cggttagacaggagcatggccaaca

SEQ ID NO: 863827 - DNA, 25 bp, Homo sapien
ggagtatcccgtctctgcttgccca

SEQ ID NO: 863828 - DNA, 25 bp, Homo sapien
cactaaggtcaggaggatcaatgca

SEQ ID NO: 863829 - DNA, 25 bp, Homo sapien
tatttgccggatatttgctgcctgg

SEQ ID NO: 863830 - DNA, 25 bp, Homo sapien
tgaagacagggcagacgttcagcca

SEQ ID NO: 863831 - DNA, 25 bp, Homo sapien
taaaacacccgccatctagataggg

SEQ ID NO: 863832 - DNA, 25 bp, Homo sapien
agaaagcgtttcctgcccacgtgat

SEQ ID NO: 863833 - DNA, 25 bp, Homo sapien
cctggacagcatttccctggcgaag

SEQ ID NO: 863834 - DNA, 25 bp, Homo sapien
tattcccgtgagaaagcgtgtcctt

SEQ ID NO: 863835 - DNA, 25 bp, Homo sapien
tctgcatcggtgcatggactgcggc

SEQ ID NO: 863836 - DNA, 25 bp, Homo sapien
gctctacttagaagacaccgggtga

SEQ ID NO: 863837 - DNA, 25 bp, Homo sapien
caggaagtgagccaggttttgcagc

SEQ ID NO: 863838 - DNA, 25 bp, Homo sapien
caccaggtagcggaagccttgcctt

SEQ ID NO: 863839 - DNA, 25 bp, Homo sapien
caaacgtagccgatagctccgtggg

SEQ ID NO: 863840 - DNA, 25 bp, Homo sapien
gctccgtgggtggtcgcaaaaatca

SEQ ID NO: 863841 - DNA, 25 bp, Homo sapien
caaatttgggacatcctcatggaca

SEQ ID NO: 863842 - DNA, 25 bp, Homo sapien
tcatcccacgtccttctgtcagaag

SEQ ID NO: 863843 - DNA, 25 bp, Homo sapien
gagtctgtcaattctaaagtccgaa

SEQ ID NO: 863844 - DNA, 25 bp, Homo sapien
gctttgcgggcattgaacatttctt

SEQ ID NO: 863845 - DNA, 25 bp, Homo sapien
gtctcagtaattatacccaggaagc

SEQ ID NO: 863846 - DNA, 25 bp, Homo sapien
tggtttttatcgcaacaggcactgg

SEQ ID NO: 863847 - DNA, 25 bp, Homo sapien
taagcacacgtggattgtttccctc

SEQ ID NO: 863848 - DNA, 25 bp, Homo sapien
gctggctctggcttaggcaagtacc

SEQ ID NO: 863849 - DNA, 25 bp, Homo sapien
cctgtacctgatgatttcgtggaga

SEQ ID NO: 863850 - DNA, 25 bp, Homo sapien
tggaatcccacggacgctgcaggaa

SEQ ID NO: 863851 - DNA, 25 bp, Homo sapien
cctggaatcccatggacaacgtggg

SEQ ID NO: 863852 - DNA, 25 bp, Homo sapien
caacgtgggatcaggcatcctggaa

SEQ ID NO: 863853 - DNA, 25 bp, Homo sapien
cgctgcggagcaggcatcgtggaat

SEQ ID NO: 863854 - DNA, 25 bp, Homo sapien
gaatcccacggacagtgtgggagca

SEQ ID NO: 863855 - DNA, 25 bp, Homo sapien
caatcccatggacggtgcgggagca

SEQ ID NO: 863856 - DNA, 25 bp, Homo sapien
tcctagaatcccacggatggtgtgg

SEQ ID NO: 863857 - DNA, 25 bp, Homo sapien
tcccacggacagtgaaggaacaggc

SEQ ID NO: 863858 - DNA, 25 bp, Homo sapien
agggttcccggccatgctgtgtgcg

SEQ ID NO: 863859 - DNA, 25 bp, Homo sapien
gctgtgtgcggtgtgactgcacttt

SEQ ID NO: 863860 - DNA, 25 bp, Homo sapien
tgtgcggtgtgactgcacttttcat

SEQ ID NO: 863861 - DNA, 25 bp, Homo sapien
atgctgtgtgcggtgtgactgcact

SEQ ID NO: 863862 - DNA, 25 bp, Homo sapien
tttgttgctagtctagcgatgtgtg

SEQ ID NO: 863863 - DNA, 25 bp, Homo sapien
tttttgttgctagtctagcgatgtg

SEQ ID NO: 863864 - DNA, 25 bp, Homo sapien
tgctagtctagcgatgtgtgttttc

SEQ ID NO: 863865 - DNA, 25 bp, Homo sapien
gttgctagtctagcgatgtgtgttt

SEQ ID NO: 863866 - DNA, 25 bp, Homo sapien
ccggtaccatcgtgccttcatccag

SEQ ID NO: 863867 - DNA, 25 bp, Homo sapien
cggtaccatcgtgccttcatccagc

SEQ ID NO: 863868 - DNA, 25 bp, Homo sapien
tgccggtaccatcgtgccttcatcc

SEQ ID NO: 863869 - DNA, 25 bp, Homo sapien
ctgccggtaccatcgtgccttcatc

SEQ ID NO: 863870 - DNA, 25 bp, Homo sapien
ccacggcccgtgagaaagcagtaaa

SEQ ID NO: 863871 - DNA, 25 bp, Homo sapien
tgcagtaggtccttgggtgccggcc

SEQ ID NO: 863872 - DNA, 25 bp, Homo sapien
tggacttccacggcccgtgagaaag

SEQ ID NO: 863873 - DNA, 25 bp, Homo sapien
ccctgggctactcgctgatgcagcg

SEQ ID NO: 863874 - DNA, 25 bp, Homo sapien
gacatgaacagctgttccaaaacag

SEQ ID NO: 863875 - DNA, 25 bp, Homo sapien
acatgaacagctgttccaaaacagt

SEQ ID NO: 863876 - DNA, 25 bp, Homo sapien
ttaaattacccagacatgaacagct

SEQ ID NO: 863877 - DNA, 25 bp, Homo sapien
agactggcaactggcggcctccagt

SEQ ID NO: 863878 - DNA, 25 bp, Homo sapien
ctgaccagggactgaccttgcctgc

SEQ ID NO: 863879 - DNA, 25 bp, Homo sapien
gggtggagtccatgccccgaaatcc

SEQ ID NO: 863880 - DNA, 25 bp, Homo sapien
gctccggggacccataagaggtgca

SEQ ID NO: 863881 - DNA, 25 bp, Homo sapien
ggggctctcgccttcttcagggagt

SEQ ID NO: 863882 - DNA, 25 bp, Homo sapien
tgagctccccgtgagaaccagctgg

SEQ ID NO: 863883 - DNA, 25 bp, Homo sapien
gagtattcgatgactgggacgcccc

SEQ ID NO: 863884 - DNA, 25 bp, Homo sapien
gagctccccgtgagaaccagctggg

SEQ ID NO: 863885 - DNA, 25 bp, Homo sapien
ctgtgcaaggggagtattcgatgac

SEQ ID NO: 863886 - DNA, 25 bp, Homo sapien
gtggctcatccttcagcccgttatt

SEQ ID NO: 863887 - DNA, 25 bp, Homo sapien
agtggctcatccttcagcccgttat

SEQ ID NO: 863888 - DNA, 25 bp, Homo sapien
gagtggctcatccttcagcccgtta

SEQ ID NO: 863889 - DNA, 25 bp, Homo sapien
ggctcatccttcagcccgttatttg

SEQ ID NO: 863890 - DNA, 25 bp, Homo sapien
gtgcacccgcgccaagtgaccgtgg

SEQ ID NO: 863891 - DNA, 25 bp, Homo sapien
ggttctgtgcactcggaacagcaga

SEQ ID NO: 863892 - DNA, 25 bp, Homo sapien
gagccacgttgttctggtcacagca

SEQ ID NO: 863893 - DNA, 25 bp, Homo sapien
tcaccacggtacaagaagtgcagtt

SEQ ID NO: 863894 - DNA, 25 bp, Homo sapien
ccataaacactaagacaagaaggtc

SEQ ID NO: 863895 - DNA, 25 bp, Homo sapien
ccgagggtctctgtacgactgctcc

SEQ ID NO: 863896 - DNA, 25 bp, Homo sapien
tgcagctactagaacaccgagggtc

SEQ ID NO: 863897 - DNA, 25 bp, Homo sapien
tttaaccataaacactaagacaaga

SEQ ID NO: 863898 - DNA, 25 bp, Homo sapien
caagttcacattccacagggttgtg

SEQ ID NO: 863899 - DNA, 25 bp, Homo sapien
gttgtgaaatctggacctggatggt

SEQ ID NO: 863900 - DNA, 25 bp, Homo sapien
cctggatggtgtcgcatccagcttc

SEQ ID NO: 863901 - DNA, 25 bp, Homo sapien
ggcagtgtgggccaccgtttcagca

SEQ ID NO: 863902 - DNA, 25 bp, Homo sapien
agtccgtagttcaccatcaggctgt

SEQ ID NO: 863903 - DNA, 25 bp, Homo sapien
gatggcgtttcccaacagtccgtag

SEQ ID NO: 863904 - DNA, 25 bp, Homo sapien
cagtttccaggtgcctcctaagggc

SEQ ID NO: 863905 - DNA, 25 bp, Homo sapien
agaatcaaaccgctgtttctgaaat

SEQ ID NO: 863906 - DNA, 25 bp, Homo sapien
agcatccgagccgtggcaggagttt

SEQ ID NO: 863907 - DNA, 25 bp, Homo sapien
tggctgtccatgaaggtaataacag

SEQ ID NO: 863908 - DNA, 25 bp, Homo sapien
tttgacgtggaaggaagcactggct

SEQ ID NO: 863909 - DNA, 25 bp, Homo sapien
tttgagaatatttgacgtggaagga

SEQ ID NO: 863910 - DNA, 25 bp, Homo sapien
ggcagggtcagaggcgaggaaagtg

SEQ ID NO: 863911 - DNA, 25 bp, Homo sapien
aaagtgcctctggtagggactgcca

SEQ ID NO: 863912 - DNA, 25 bp, Homo sapien
ggtcagaggcgaggaaagtgcctct

SEQ ID NO: 863913 - DNA, 25 bp, Homo sapien
cctctggtagggactgccaaagctg

SEQ ID NO: 863914 - DNA, 25 bp, Homo sapien
agatgccctcgtggtaagtgtggga

SEQ ID NO: 863915 - DNA, 25 bp, Homo sapien
gagatgccctcgtggtaagtgtggg

SEQ ID NO: 863916 - DNA, 25 bp, Homo sapien
gatgccctcgtggtaagtgtgggaa

SEQ ID NO: 863917 - DNA, 25 bp, Homo sapien
atgccctcgtggtaagtgtgggaag

SEQ ID NO: 863918 - DNA, 25 bp, Homo sapien
tcacttctaaaatgcaggccctcaa

SEQ ID NO: 863919 - DNA, 25 bp, Homo sapien
tacaaatgcatagagctcaaagttc

SEQ ID NO: 863920 - DNA, 25 bp, Homo sapien
ggccctcaacaaggtattgacgtgt

SEQ ID NO: 863921 - DNA, 25 bp, Homo sapien
gattattacagagcccctctgcggt

SEQ ID NO: 863922 - DNA, 25 bp, Homo sapien
accgtcgcccacattccgacaccat

SEQ ID NO: 863923 - DNA, 25 bp, Homo sapien
cccacattccgacaccatcggccat

SEQ ID NO: 863924 - DNA, 25 bp, Homo sapien
ccattgccgacgttccgacaccgtc

SEQ ID NO: 863925 - DNA, 25 bp, Homo sapien
ttccgacaccgtcgcccacattccg

SEQ ID NO: 863926 - DNA, 25 bp, Homo sapien
cagtcatagtcctgggccgggtcac

SEQ ID NO: 863927 - DNA, 25 bp, Homo sapien
ccatcagaatgagcagcagcagcac

SEQ ID NO: 863928 - DNA, 25 bp, Homo sapien
cacaacatcttttacggtctggagg

SEQ ID NO: 863929 - DNA, 25 bp, Homo sapien
tcttttacggtctggagggagagta

SEQ ID NO: 863930 - DNA, 25 bp, Homo sapien
acaacatcttttacggtctggaggg

SEQ ID NO: 863931 - DNA, 25 bp, Homo sapien
acatcttttacggtctggagggaga

SEQ ID NO: 863932 - DNA, 25 bp, Homo sapien
tacgatggagtagggaaatcaacac

SEQ ID NO: 863933 - DNA, 25 bp, Homo sapien
caactgtcaacatgccggtggtgct

SEQ ID NO: 863934 - DNA, 25 bp, Homo sapien
caacacagggtaaatctaatcgtcg

SEQ ID NO: 863935 - DNA, 25 bp, Homo sapien
gttccagggaacaagtcacgacatg

SEQ ID NO: 863936 - DNA, 25 bp, Homo sapien
tggccttcagcaggcgtgttgtcac

SEQ ID NO: 863937 - DNA, 25 bp, Homo sapien
agttgactgcgtggccttcagcagg

SEQ ID NO: 863938 - DNA, 25 bp, Homo sapien
aagcatcctgcatagacacagcagc

SEQ ID NO: 863939 - DNA, 25 bp, Homo sapien
tgcatagacacagcagccggccctg

SEQ ID NO: 863940 - DNA, 25 bp, Homo sapien
gagagggcagagacacaccgacgca

SEQ ID NO: 863941 - DNA, 25 bp, Homo sapien
atccagagcttcatgccggccagtg

SEQ ID NO: 863942 - DNA, 25 bp, Homo sapien
caccgacgcaacttgaaatcacagg

SEQ ID NO: 863943 - DNA, 25 bp, Homo sapien
gaagctgctgcgacggtcggctcct

SEQ ID NO: 863944 - DNA, 25 bp, Homo sapien
cggtgcctcgagaagctggtgtctt

SEQ ID NO: 863945 - DNA, 25 bp, Homo sapien
caatgacctcgtggcgccaagagct

SEQ ID NO: 863946 - DNA, 25 bp, Homo sapien
tagaaaacagcgtctgcaacttctt

SEQ ID NO: 863947 - DNA, 25 bp, Homo sapien
ccaggagccaccatcgtttgtgaca

SEQ ID NO: 863948 - DNA, 25 bp, Homo sapien
cttgctcagacaacccgcactttcc

SEQ ID NO: 863949 - DNA, 25 bp, Homo sapien
agacaacccgcactttccacctggg

SEQ ID NO: 863950 - DNA, 25 bp, Homo sapien
ttgctcagacaacccgcactttcca

SEQ ID NO: 863951 - DNA, 25 bp, Homo sapien
ctcagacaacccgcactttccacct

SEQ ID NO: 863952 - DNA, 25 bp, Homo sapien
tcggtgctcactcgtgttccctggc

SEQ ID NO: 863953 - DNA, 25 bp, Homo sapien
catgcatgtggggtctgaactgagt

SEQ ID NO: 863954 - DNA, 25 bp, Homo sapien
tcgctgtggatttcggtgctcactc

SEQ ID NO: 863955 - DNA, 25 bp, Homo sapien
ctggcctacccacggcatgcatgtg

SEQ ID NO: 863956 - DNA, 25 bp, Homo sapien
tggagcccggttatgccctcgatca

SEQ ID NO: 863957 - DNA, 25 bp, Homo sapien
cattgggatggagcccggttatgcc

SEQ ID NO: 863958 - DNA, 25 bp, Homo sapien
ggatggagcccggttatgccctcga

SEQ ID NO: 863959 - DNA, 25 bp, Homo sapien
gagcccggttatgccctcgatcact

SEQ ID NO: 863960 - DNA, 25 bp, Homo sapien
agtgatgccgtgattttcttcaccc

SEQ ID NO: 863961 - DNA, 25 bp, Homo sapien
tcatggcggccttgtcagtgatgcc

SEQ ID NO: 863962 - DNA, 25 bp, Homo sapien
tcacgcgatcctcatggcggccttg

SEQ ID NO: 863963 - DNA, 25 bp, Homo sapien
ccttgtcagtgatgccgtgattttc

SEQ ID NO: 863964 - DNA, 25 bp, Homo sapien
aagagagacaggtgatgccacagag

SEQ ID NO: 863965 - DNA, 25 bp, Homo sapien
cacagaggcactgacattccagcat

SEQ ID NO: 863966 - DNA, 25 bp, Homo sapien
tgccacagaggcactgacattccag

SEQ ID NO: 863967 - DNA, 25 bp, Homo sapien
gagccaggcggtggcaagagagaca

SEQ ID NO: 863968 - DNA, 25 bp, Homo sapien
gatgctcgacccacatccaatctgt

SEQ ID NO: 863969 - DNA, 25 bp, Homo sapien
ttctgatccagaccgagtgggcgag

SEQ ID NO: 863970 - DNA, 25 bp, Homo sapien
tcagaacttgcagatgctcgaccca

SEQ ID NO: 863971 - DNA, 25 bp, Homo sapien
ggcgagggctcctgcgtcagaactt

SEQ ID NO: 863972 - DNA, 25 bp, Homo sapien
acccagggcccacattaaggctggt

SEQ ID NO: 863973 - DNA, 25 bp, Homo sapien
ttcgtggcccgcatgtggcccatct

SEQ ID NO: 863974 - DNA, 25 bp, Homo sapien
gactggcccgtaaggccatgctgag

SEQ ID NO: 863975 - DNA, 25 bp, Homo sapien
tctgctcggcgcactctcttgtgct

SEQ ID NO: 863976 - DNA, 25 bp, Homo sapien
ccttctgttggggatatttctacca

SEQ ID NO: 863977 - DNA, 25 bp, Homo sapien
tgtgggctgcctccttcccgctggg

SEQ ID NO: 863978 - DNA, 25 bp, Homo sapien
ggatatttctaccatcacctttgtc

SEQ ID NO: 863979 - DNA, 25 bp, Homo sapien
tgttggggatatttctaccatcacc

SEQ ID NO: 863980 - DNA, 25 bp, Homo sapien
caggtgcgcgtctgccttgtgttcc

SEQ ID NO: 863981 - DNA, 25 bp, Homo sapien
ccttgggcaggtgcgcgtctgcctt

SEQ ID NO: 863982 - DNA, 25 bp, Homo sapien
tgtctctctgagtcgggccccagca

SEQ ID NO: 863983 - DNA, 25 bp, Homo sapien
agagtccgagggacgccctgcatgc

SEQ ID NO: 863984 - DNA, 25 bp, Homo sapien
gttcgggtctacactggaggatgct

SEQ ID NO: 863985 - DNA, 25 bp, Homo sapien
tggtgttcgggtctacactggagga

SEQ ID NO: 863986 - DNA, 25 bp, Homo sapien
tgttcgggtctacactggaggatgc

SEQ ID NO: 863987 - DNA, 25 bp, Homo sapien
gatggtgttcgggtctacactggag

SEQ ID NO: 863988 - DNA, 25 bp, Homo sapien
atggtggtgttcatgggccacactg

SEQ ID NO: 863989 - DNA, 25 bp, Homo sapien
atacatgatggtgttcaggtctaca

SEQ ID NO: 863990 - DNA, 25 bp, Homo sapien
atgtcatacatgatggtgttcaggt

SEQ ID NO: 863991 - DNA, 25 bp, Homo sapien
tcatacatgatggtgttcaggtcta

SEQ ID NO: 863992 - DNA, 25 bp, Homo sapien
gaggatgatgtcatacatgatggtg

SEQ ID NO: 863993 - DNA, 25 bp, Homo sapien
atggtggtgttcatgggccacactg

SEQ ID NO: 863994 - DNA, 25 bp, Homo sapien
tcaggtctacactggaggatgatgt

SEQ ID NO: 863995 - DNA, 25 bp, Homo sapien
gatgatgtcgtacatgatggtgttc

SEQ ID NO: 863996 - DNA, 25 bp, Homo sapien
atgatggtgttcaggtctacactgg

SEQ ID NO: 863997 - DNA, 25 bp, Homo sapien
atgatgtcgtacatgatggtgttcg

SEQ ID NO: 863998 - DNA, 25 bp, Homo sapien
gacacggccgtacatggaaatattc

SEQ ID NO: 863999 - DNA, 25 bp, Homo sapien
acactggaggacacggccgtacatg

SEQ ID NO: 864000 - DNA, 25 bp, Homo sapien
ccaacgtggagaatgcagctgtaca

SEQ ID NO: 864001 - DNA, 25 bp, Homo sapien
ttcaggggccaacgtggagaatgca

SEQ ID NO: 864002 - DNA, 25 bp, Homo sapien
caagtggtagccttggagagaagtc

SEQ ID NO: 864003 - DNA, 25 bp, Homo sapien
aggagcagcacgaccatcaggctcg

SEQ ID NO: 864004 - DNA, 25 bp, Homo sapien
agtcagggtcggcatcagaggagca

SEQ ID NO: 864005 - DNA, 25 bp, Homo sapien
cacagtccgtgggtgagcacaagtg

SEQ ID NO: 864006 - DNA, 25 bp, Homo sapien
acactcagtctgcatttcatcaccc

SEQ ID NO: 864007 - DNA, 25 bp, Homo sapien
atgagaaaggaccccttggaaagtg

SEQ ID NO: 864008 - DNA, 25 bp, Homo sapien
gagaaaggaccccttggaaagtgca

SEQ ID NO: 864009 - DNA, 25 bp, Homo sapien
aaaggaccccttggaaagtgcagag

SEQ ID NO: 864010 - DNA, 25 bp, Homo sapien
acgaggtacaggaagcgacccctgg

SEQ ID NO: 864011 - DNA, 25 bp, Homo sapien
aggccctgaggagaccgacggccat

SEQ ID NO: 864012 - DNA, 25 bp, Homo sapien
gaagcgacccctggatcaaaggatg

SEQ ID NO: 864013 - DNA, 25 bp, Homo sapien
cagacgccataggtctctggattcc

SEQ ID NO: 864014 - DNA, 25 bp, Homo sapien
gtgtgagtaatgcacaactggatgg

SEQ ID NO: 864015 - DNA, 25 bp, Homo sapien
cacagtgtgagtaatgcacaactgg

SEQ ID NO: 864016 - DNA, 25 bp, Homo sapien
tcttgatgggtatgcccgaggcaca

SEQ ID NO: 864017 - DNA, 25 bp, Homo sapien
gatgaggtcgtctttctataggttg

SEQ ID NO: 864018 - DNA, 25 bp, Homo sapien
gaaagaagatattctccaccacgca

SEQ ID NO: 864019 - DNA, 25 bp, Homo sapien
aaagaagatattctccaccacgcag

SEQ ID NO: 864020 - DNA, 25 bp, Homo sapien
gcagagggagtacaagtcatcatca

SEQ ID NO: 864021 - DNA, 25 bp, Homo sapien
tcatcagggcagataccaaatagct

SEQ ID NO: 864022 - DNA, 25 bp, Homo sapien
gagggagtacaagtcatcatcaggg

SEQ ID NO: 864023 - DNA, 25 bp, Homo sapien
ctgaaagtagcagaaggcaacaggt

SEQ ID NO: 864024 - DNA, 25 bp, Homo sapien
ggtatgcattttgaccagtcttagt

SEQ ID NO: 864025 - DNA, 25 bp, Homo sapien
gacacatgtaacagggaaccatcag

SEQ ID NO: 864026 - DNA, 25 bp, Homo sapien
gaagcctgctctttgtaggttgaac

SEQ ID NO: 864027 - DNA, 25 bp, Homo sapien
tctggttgaggtcgatgtggtatcc

SEQ ID NO: 864028 - DNA, 25 bp, Homo sapien
gtcagtgatgccaatacaaagcagg

SEQ ID NO: 864029 - DNA, 25 bp, Homo sapien
cctcactattctgggcagggatgcc

SEQ ID NO: 864030 - DNA, 25 bp, Homo sapien
gcaggattctttccccctcactatt

SEQ ID NO: 864031 - DNA, 25 bp, Homo sapien
gatgccaatacaaagcaggattctt

SEQ ID NO: 864032 - DNA, 25 bp, Homo sapien
taacacttttatattgcattggcca

SEQ ID NO: 864033 - DNA, 25 bp, Homo sapien
tcataataatgttgattccccattc

SEQ ID NO: 864034 - DNA, 25 bp, Homo sapien
atacattaaaaccatgtaacacttt

SEQ ID NO: 864035 - DNA, 25 bp, Homo sapien
agtagaggcaaatagagacacttca

SEQ ID NO: 864036 - DNA, 25 bp, Homo sapien
ttaggctcctctgaagcctgccctg

SEQ ID NO: 864037 - DNA, 25 bp, Homo sapien
ggcccacacttccttccttaggctc

SEQ ID NO: 864038 - DNA, 25 bp, Homo sapien
acttggcccacacttccttccttag

SEQ ID NO: 864039 - DNA, 25 bp, Homo sapien
acacttccttccttaggctcctctg

SEQ ID NO: 864040 - DNA, 25 bp, Homo sapien
ccaaattctgtactagcctgtccca

SEQ ID NO: 864041 - DNA, 25 bp, Homo sapien
aattctgtactagcctgtcccaaac

SEQ ID NO: 864042 - DNA, 25 bp, Homo sapien
ttctgtactagcctgtcccaaacca

SEQ ID NO: 864043 - DNA, 25 bp, Homo sapien
agaaccaaattctgtactagcctgt

SEQ ID NO: 864044 - DNA, 25 bp, Homo sapien
catgcaagaatttgagtgggcaatg

SEQ ID NO: 864045 - DNA, 25 bp, Homo sapien
aaccccatgcaagaatttgagtggg

SEQ ID NO: 864046 - DNA, 25 bp, Homo sapien
ccccatgcaagaatttgagtgggca

SEQ ID NO: 864047 - DNA, 25 bp, Homo sapien
caagaatttgagtgggcaatggact

SEQ ID NO: 864048 - DNA, 25 bp, Homo sapien
aactcccacttatcctgtccattat

SEQ ID NO: 864049 - DNA, 25 bp, Homo sapien
ggaaagcttggacgaattcaaactc

SEQ ID NO: 864050 - DNA, 25 bp, Homo sapien
catgtaactcgaagaggaaagcttg

SEQ ID NO: 864051 - DNA, 25 bp, Homo sapien
tgctgatgctgacactagggcatgt

SEQ ID NO: 864052 - DNA, 25 bp, Homo sapien
gcggcaagtggggtatgaagtggga

SEQ ID NO: 864053 - DNA, 25 bp, Homo sapien
agcagccggactcttctccaaacgc

SEQ ID NO: 864054 - DNA, 25 bp, Homo sapien
gcccagcagccggactcttctccaa

SEQ ID NO: 864055 - DNA, 25 bp, Homo sapien
cagccggactcttctccaaacgcct

SEQ ID NO: 864056 - DNA, 25 bp, Homo sapien
gcatgtttgctagaactcacctgta

SEQ ID NO: 864057 - DNA, 25 bp, Homo sapien
gattcaaggtgtgaaggtaacatca

SEQ ID NO: 864058 - DNA, 25 bp, Homo sapien
ctgtaacagtgcaattaaacgttct

SEQ ID NO: 864059 - DNA, 25 bp, Homo sapien
tcacctgtaaaattgtctgagcaac

SEQ ID NO: 864060 - DNA, 25 bp, Homo sapien
aattaacttctaacatacaaagcct

SEQ ID NO: 864061 - DNA, 25 bp, Homo sapien
tggccttgtaagaaagcaaattaac

SEQ ID NO: 864062 - DNA, 25 bp, Homo sapien
accatctacgctaagacataaaatt

SEQ ID NO: 864063 - DNA, 25 bp, Homo sapien
tcagttgtttagttacaagatagaa

SEQ ID NO: 864064 - DNA, 25 bp, Homo sapien
ttaataagaggaattcatatggatc

SEQ ID NO: 864065 - DNA, 25 bp, Homo sapien
aataagaggaattcatatggatcag

SEQ ID NO: 864066 - DNA, 25 bp, Homo sapien
cagttcttcattgaatcctggatgc

SEQ ID NO: 864067 - DNA, 25 bp, Homo sapien
agtcagttcttcattgaatcctgga

SEQ ID NO: 864068 - DNA, 25 bp, Homo sapien
tcaggtacttaaagttagctccaaa

SEQ ID NO: 864069 - DNA, 25 bp, Homo sapien
ttgttaatgtataagagatgtagat

SEQ ID NO: 864070 - DNA, 25 bp, Homo sapien
tgttaatgtataagagatgtagatt

SEQ ID NO: 864071 - DNA, 25 bp, Homo sapien
attgttaatgtataagagatgtaga

SEQ ID NO: 864072 - DNA, 25 bp, Homo sapien
gaattcagtcagacaacgtacttac

SEQ ID NO: 864073 - DNA, 25 bp, Homo sapien
cttgaattcagtcagacaacgtact

SEQ ID NO: 864074 - DNA, 25 bp, Homo sapien
acccttctttcttgaattcagtcag

SEQ ID NO: 864075 - DNA, 25 bp, Homo sapien
tttcttgaattcagtcagacaacgt

SEQ ID NO: 864076 - DNA, 25 bp, Homo sapien
cttagaaaccacctcagctttctcc

SEQ ID NO: 864077 - DNA, 25 bp, Homo sapien
tatttgtgcacattgcttatactgg

SEQ ID NO: 864078 - DNA, 25 bp, Homo sapien
tgcacattgcttatactgggcatta

SEQ ID NO: 864079 - DNA, 25 bp, Homo sapien
tcctctcactctatactatctctgt

SEQ ID NO: 864080 - DNA, 25 bp, Homo sapien
cactctatactatctctgttagcta

SEQ ID NO: 864081 - DNA, 25 bp, Homo sapien
aagtcaaaagctagagtatagagaa

SEQ ID NO: 864082 - DNA, 25 bp, Homo sapien
aataaacagattatatggaggattt

SEQ ID NO: 864083 - DNA, 25 bp, Homo sapien
tctaaatacctcttaggtcagaaaa

SEQ ID NO: 864084 - DNA, 25 bp, Homo sapien
agaaacgccctaaatttctaatctg

SEQ ID NO: 864085 - DNA, 25 bp, Homo sapien
gagtagagctatatatatagcagta

SEQ ID NO: 864086 - DNA, 25 bp, Homo sapien
attaaaatgttataactctaggatg

SEQ ID NO: 864087 - DNA, 25 bp, Homo sapien
ttaaaatgttataactctaggatgt

SEQ ID NO: 864088 - DNA, 25 bp, Homo sapien
aaaagagtagagctatatatatagc

SEQ ID NO: 864089 - DNA, 25 bp, Homo sapien
cgccctgctaggagttcacgcttta

SEQ ID NO: 864090 - DNA, 25 bp, Homo sapien
gggatgtagaataaggctctcagaa

SEQ ID NO: 864091 - DNA, 25 bp, Homo sapien
aagatgggatgtagaataaggctct

SEQ ID NO: 864092 - DNA, 25 bp, Homo sapien
aaagacaaactcacaggaagatggg

SEQ ID NO: 864093 - DNA, 25 bp, Homo sapien
ttgaatcattttaagatgctcgaac

SEQ ID NO: 864094 - DNA, 25 bp, Homo sapien
tctttgtatcggtgctcagctgagt

SEQ ID NO: 864095 - DNA, 25 bp, Homo sapien
tgtctttctttgtatcggtgctcag

SEQ ID NO: 864096 - DNA, 25 bp, Homo sapien
tctttctttgtatcggtgctcagct

SEQ ID NO: 864097 - DNA, 25 bp, Homo sapien
gggactgatgactgcatgatcttct

SEQ ID NO: 864098 - DNA, 25 bp, Homo sapien
tgggactgatgactgcatgatcttc

SEQ ID NO: 864099 - DNA, 25 bp, Homo sapien
acaggtggacgctaccacgtccggc

SEQ ID NO: 864100 - DNA, 25 bp, Homo sapien
acctcttcccgctgggttcacgcca

SEQ ID NO: 864101 - DNA, 25 bp, Homo sapien
aggtggacgctaccacgtccggcta

SEQ ID NO: 864102 - DNA, 25 bp, Homo sapien
ttacaggtggacgctaccacgtccg

SEQ ID NO: 864103 - DNA, 25 bp, Homo sapien
actcccaacttgagctatacttttt

SEQ ID NO: 864104 - DNA, 25 bp, Homo sapien
cactcccaacttgagctatactttt

SEQ ID NO: 864105 - DNA, 25 bp, Homo sapien
gcactcccaacttgagctatacttt

SEQ ID NO: 864106 - DNA, 25 bp, Homo sapien
tgcactcccaacttgagctatactt

SEQ ID NO: 864107 - DNA, 25 bp, Homo sapien
gcctgcagatgtcatcggagggcca

SEQ ID NO: 864108 - DNA, 25 bp, Homo sapien
cctgcagatgtcatcggagggccag

SEQ ID NO: 864109 - DNA, 25 bp, Homo sapien
aagacgttgttgggacctggagtcg

SEQ ID NO: 864110 - DNA, 25 bp, Homo sapien
ctgcaagtgggtctgagaggccaac

SEQ ID NO: 864111 - DNA, 25 bp, Homo sapien
aagtgggtctgagaggccaacttga

SEQ ID NO: 864112 - DNA, 25 bp, Homo sapien
agggggcgccgggaggctgcaagtg

SEQ ID NO: 864113 - DNA, 25 bp, Homo sapien
gaggctgcaagtgggtctgagaggc

SEQ ID NO: 864114 - DNA, 25 bp, Homo sapien
gagaagggtgtctgcagaccccgct

SEQ ID NO: 864115 - DNA, 25 bp, Homo sapien
gtgtctgcagaccccgctgttgcct

SEQ ID NO: 864116 - DNA, 25 bp, Homo sapien
cagtgactgaacagtcccagctctg

SEQ ID NO: 864117 - DNA, 25 bp, Homo sapien
agggtgtctgcagaccccgctgttg

SEQ ID NO: 864118 - DNA, 25 bp, Homo sapien
agcagcccgagtgcgatcctgttcc

SEQ ID NO: 864119 - DNA, 25 bp, Homo sapien
ccagcagcccgagtgcgatcctgtt

SEQ ID NO: 864120 - DNA, 25 bp, Homo sapien
cagcagcccgagtgcgatcctgttc

SEQ ID NO: 864121 - DNA, 25 bp, Homo sapien
cccagcagcccgagtgcgatcctgt

SEQ ID NO: 864122 - DNA, 25 bp, Homo sapien
cctggagacccaaccaggaagaaga

SEQ ID NO: 864123 - DNA, 25 bp, Homo sapien
aatcgggcctggagacccaaccagg

SEQ ID NO: 864124 - DNA, 25 bp, Homo sapien
ggagacccaaccaggaagaagagct

SEQ ID NO: 864125 - DNA, 25 bp, Homo sapien
acaacttgggcctgcggcggtcgcc

SEQ ID NO: 864126 - DNA, 25 bp, Homo sapien
aactgggccaaaaaaggctgttgtg

SEQ ID NO: 864127 - DNA, 25 bp, Homo sapien
actgggccaaaaaaggctgttgtga

SEQ ID NO: 864128 - DNA, 25 bp, Homo sapien
tggacaggtcaacttgaggagattt

SEQ ID NO: 864129 - DNA, 25 bp, Homo sapien
gagattttgggccttcataggccac

SEQ ID NO: 864130 - DNA, 25 bp, Homo sapien
gacaggtcaacttgaggagattttg

SEQ ID NO: 864131 - DNA, 25 bp, Homo sapien
gcctggacaggtcaacttgaggaga

SEQ ID NO: 864132 - DNA, 25 bp, Homo sapien
tcctgggacaggagttggccgtgga

SEQ ID NO: 864133 - DNA, 25 bp, Homo sapien
gagttggccgtggagaggccaccgt

SEQ ID NO: 864134 - DNA, 25 bp, Homo sapien
tgggacaggagttggccgtggagag

SEQ ID NO: 864135 - DNA, 25 bp, Homo sapien
ggagttggccgtggagaggccaccg

SEQ ID NO: 864136 - DNA, 25 bp, Homo sapien
gggtatgggcctaaataggccattg

SEQ ID NO: 864137 - DNA, 25 bp, Homo sapien
gaatcagtgggcgtgttaagcttgt

SEQ ID NO: 864138 - DNA, 25 bp, Homo sapien
tagaatcagtgggcgtgttaagctt

SEQ ID NO: 864139 - DNA, 25 bp, Homo sapien
tgtagaatcagtgggcgtgttaagc

SEQ ID NO: 864140 - DNA, 25 bp, Homo sapien
ttttcctgcaactggatgttcccac

SEQ ID NO: 864141 - DNA, 25 bp, Homo sapien
ctcataaggacagcgcaacctcgat

SEQ ID NO: 864142 - DNA, 25 bp, Homo sapien
tacagaggaagcttccctcactccc

SEQ ID NO: 864143 - DNA, 25 bp, Homo sapien
tctaacgctgctgctcatctgagaa

SEQ ID NO: 864144 - DNA, 25 bp, Homo sapien
caacagggtgcgttctcctatgaga

SEQ ID NO: 864145 - DNA, 25 bp, Homo sapien
ttcacagtggtcaagggcagcaacc

SEQ ID NO: 864146 - DNA, 25 bp, Homo sapien
cctgctcaagtgcatccaaagcgac

SEQ ID NO: 864147 - DNA, 25 bp, Homo sapien
gctcaagtgcatccaaagcgaccct

SEQ ID NO: 864148 - DNA, 25 bp, Homo sapien
tgctgtgtggctccttgcggctcca

SEQ ID NO: 864149 - DNA, 25 bp, Homo sapien
cacgtgggaggttgacgtgggagga

SEQ ID NO: 864150 - DNA, 25 bp, Homo sapien
tctggaatccacgtatatgaaaatt

SEQ ID NO: 864151 - DNA, 25 bp, Homo sapien
cacccctctggaatccacgtatatg

SEQ ID NO: 864152 - DNA, 25 bp, Homo sapien
agtctcagccacgtgggaggttgac

SEQ ID NO: 864153 - DNA, 25 bp, Homo sapien
gtagggtatgggcctaaataggcca

SEQ ID NO: 864154 - DNA, 25 bp, Homo sapien
tagggtatgggcctaaataggccat

SEQ ID NO: 864155 - DNA, 25 bp, Homo sapien
agggtatgggcctaaataggccatt

SEQ ID NO: 864156 - DNA, 25 bp, Homo sapien
ataataaaataattatagaactcac

SEQ ID NO: 864157 - DNA, 25 bp, Homo sapien
cactgtgatatataataaaataatt

SEQ ID NO: 864158 - DNA, 25 bp, Homo sapien
acactgtgatatataataaaataat

SEQ ID NO: 864159 - DNA, 25 bp, Homo sapien
ttttcctgcaactggatgttcccac

SEQ ID NO: 864160 - DNA, 25 bp, Homo sapien
tagaatcagtgggcgtgttaagctt

SEQ ID NO: 864161 - DNA, 25 bp, Homo sapien
tgtagaatcagtgggcgtgttaagc

SEQ ID NO: 864162 - DNA, 25 bp, Homo sapien
gaatcagtgggcgtgttaagcttgt

SEQ ID NO: 864163 - DNA, 25 bp, Homo sapien
aacagggtgcgttctcctatgagca

SEQ ID NO: 864164 - DNA, 25 bp, Homo sapien
ggtgcgttctcctatgagcatctaa

SEQ ID NO: 864165 - DNA, 25 bp, Homo sapien
cagggtgcgttctcctatgagcatc

SEQ ID NO: 864166 - DNA, 25 bp, Homo sapien
tgcgttctcctatgagcatctaatg

SEQ ID NO: 864167 - DNA, 25 bp, Homo sapien
tctcagaaggccaaagctatagtga

SEQ ID NO: 864168 - DNA, 25 bp, Homo sapien
tcagaaggccaaagctatagtgagc

SEQ ID NO: 864169 - DNA, 25 bp, Homo sapien
ctcagaaggccaaagctatagtgag

SEQ ID NO: 864170 - DNA, 25 bp, Homo sapien
tgcatgggaaacataatttgatcat

SEQ ID NO: 864171 - DNA, 25 bp, Homo sapien
gatgcatgggaaacataatttgatc

SEQ ID NO: 864172 - DNA, 25 bp, Homo sapien
catttttaagttacagtccaaatct

SEQ ID NO: 864173 - DNA, 25 bp, Homo sapien
ctgatgcatgggaaacataatttga

SEQ ID NO: 864174 - DNA, 25 bp, Homo sapien
tctctcttcctggattcacaagtct

SEQ ID NO: 864175 - DNA, 25 bp, Homo sapien
tcctggattcacaagtctttcatgg

SEQ ID NO: 864176 - DNA, 25 bp, Homo sapien
tcttcctggattcacaagtctttca

SEQ ID NO: 864177 - DNA, 25 bp, Homo sapien
ctggattcacaagtctttcatggta

SEQ ID NO: 864178 - DNA, 25 bp, Homo sapien
ttgaaaggaaccatcccacgccatt

SEQ ID NO: 864179 - DNA, 25 bp, Homo sapien
gcttgcaggacatatgcttcaactg

SEQ ID NO: 864180 - DNA, 25 bp, Homo sapien
catttcacaatcaacagtatgtggc

SEQ ID NO: 864181 - DNA, 25 bp, Homo sapien
acagtatgtggcagcttgagtcatt

SEQ ID NO: 864182 - DNA, 25 bp, Homo sapien
catcccatatcccattgcaaggagc

SEQ ID NO: 864183 - DNA, 25 bp, Homo sapien
cagcatcccatatcccattgcaagg

SEQ ID NO: 864184 - DNA, 25 bp, Homo sapien
accagcatcccatatcccattgcaa

SEQ ID NO: 864185 - DNA, 25 bp, Homo sapien
tcccatatcccattgcaaggagctc

SEQ ID NO: 864186 - DNA, 25 bp, Homo sapien
tttgagaacagtctgggaaacatgg

SEQ ID NO: 864187 - DNA, 25 bp, Homo sapien
tgagaacagtctgggaaacatggcg

SEQ ID NO: 864188 - DNA, 25 bp, Homo sapien
agtttgagaacagtctgggaaacat

SEQ ID NO: 864189 - DNA, 25 bp, Homo sapien
gtgggtggactgctttgagctcagg

SEQ ID NO: 864190 - DNA, 25 bp, Homo sapien
tgggtgacagtgtgagacccggtat

SEQ ID NO: 864191 - DNA, 25 bp, Homo sapien
ctgggtgacagtgtgagacccggta

SEQ ID NO: 864192 - DNA, 25 bp, Homo sapien
agaagacttctatgactcccgagat

SEQ ID NO: 864193 - DNA, 25 bp, Homo sapien
aattcaccagtgcttagctgagtac

SEQ ID NO: 864194 - DNA, 25 bp, Homo sapien
gctatggagtccaactgagcctcat

SEQ ID NO: 864195 - DNA, 25 bp, Homo sapien
tatcctggagtatctaggagagccc

SEQ ID NO: 864196 - DNA, 25 bp, Homo sapien
ccatgataggaccactgaactctat

SEQ ID NO: 864197 - DNA, 25 bp, Homo sapien
gataggaccactgaactctatcctg

SEQ ID NO: 864198 - DNA, 25 bp, Homo sapien
tgataggaccactgaactctatcct

SEQ ID NO: 864199 - DNA, 25 bp, Homo sapien
tgggaaggctgacatggtaggattg

SEQ ID NO: 864200 - DNA, 25 bp, Homo sapien
cagtttctcttcttggattcagaag

SEQ ID NO: 864201 - DNA, 25 bp, Homo sapien
atgttgcccagtcagtttctcttct

SEQ ID NO: 864202 - DNA, 25 bp, Homo sapien
tttctcttcttggattcagaagtct

SEQ ID NO: 864203 - DNA, 25 bp, Homo sapien
agtcagtttctcttcttggattcag

SEQ ID NO: 864204 - DNA, 25 bp, Homo sapien
atcccagctaataggaggtctttca

SEQ ID NO: 864205 - DNA, 25 bp, Homo sapien
tcccagctaataggaggtctttcat

SEQ ID NO: 864206 - DNA, 25 bp, Homo sapien
cccagctaataggaggtctttcatt

SEQ ID NO: 864207 - DNA, 25 bp, Homo sapien
taaacaaaaggtcatatgcacaaac

SEQ ID NO: 864208 - DNA, 25 bp, Homo sapien
taagaatgctcatgccctgtgactc

SEQ ID NO: 864209 - DNA, 25 bp, Homo sapien
tttacatcgagggtaataagaatgc

SEQ ID NO: 864210 - DNA, 25 bp, Homo sapien
tacagacagtgactcattatactgc

SEQ ID NO: 864211 - DNA, 25 bp, Homo sapien
acttaagtatgtgtgctactgaggc

SEQ ID NO: 864212 - DNA, 25 bp, Homo sapien
taagtatgtgtgctactgaggcaag

SEQ ID NO: 864213 - DNA, 25 bp, Homo sapien
aagtatgtgtgctactgaggcaagc

SEQ ID NO: 864214 - DNA, 25 bp, Homo sapien
tcacagaggccgtgccaatctctct

SEQ ID NO: 864215 - DNA, 25 bp, Homo sapien
ggactatgggtgctgagtgggattt

SEQ ID NO: 864216 - DNA, 25 bp, Homo sapien
actatgggtgctgagtgggatttac

SEQ ID NO: 864217 - DNA, 25 bp, Homo sapien
gactatgggtgctgagtgggattta

SEQ ID NO: 864218 - DNA, 25 bp, Homo sapien
ctggactatgggtgctgagtgggat

SEQ ID NO: 864219 - DNA, 25 bp, Homo sapien
ggacagtacttgttctcaagggaat

SEQ ID NO: 864220 - DNA, 25 bp, Homo sapien
gggcgataagagtgaaaactccatc

SEQ ID NO: 864221 - DNA, 25 bp, Homo sapien
tgatatcaggagtcgaggcgggaag

SEQ ID NO: 864222 - DNA, 25 bp, Homo sapien
cagtgaccagcaaggttgcgccatt

SEQ ID NO: 864223 - DNA, 25 bp, Homo sapien
ggttgcagtgaccagcaaggttgcg

SEQ ID NO: 864224 - DNA, 25 bp, Homo sapien
aaaagggtatgggatcatcaccgga

SEQ ID NO: 864225 - DNA, 25 bp, Homo sapien
gaaaaaagggtatgggatcatcacc

SEQ ID NO: 864226 - DNA, 25 bp, Homo sapien
aaagggtatgggatcatcaccggac

SEQ ID NO: 864227 - DNA, 25 bp, Homo sapien
gactggaaaaaagggtatgggatca

SEQ ID NO: 864228 - DNA, 25 bp, Homo sapien
ttcacctgttgaattcataagttca

SEQ ID NO: 864229 - DNA, 25 bp, Homo sapien
ctgacaaagttgatttatcaagttg

SEQ ID NO: 864230 - DNA, 25 bp, Homo sapien
atcttcacctgttgaattcataagt

SEQ ID NO: 864231 - DNA, 25 bp, Homo sapien
cacctgttgaattcataagttcatg

SEQ ID NO: 864232 - DNA, 25 bp, Homo sapien
atgtaaggatggcatgactcgccgg

SEQ ID NO: 864233 - DNA, 25 bp, Homo sapien
tgactcgccggcagccctgggattg

SEQ ID NO: 864234 - DNA, 25 bp, Homo sapien
cggcagccctgggattgtccacggt

SEQ ID NO: 864235 - DNA, 25 bp, Homo sapien
aaggagaaacatgtaaggatggcat

SEQ ID NO: 864236 - DNA, 25 bp, Homo sapien
gtagatcagcgatacgatgattcca

SEQ ID NO: 864237 - DNA, 25 bp, Homo sapien
acgtagatcagcgatacgatgattc

SEQ ID NO: 864238 - DNA, 25 bp, Homo sapien
gtttacgtagatcagcgatacgatg

SEQ ID NO: 864239 - DNA, 25 bp, Homo sapien
ttacgtagatcagcgatacgatgat

SEQ ID NO: 864240 - DNA, 25 bp, Homo sapien
tgtagtgacagaagcaggaaactcc

SEQ ID NO: 864241 - DNA, 25 bp, Homo sapien
cctctacggccaggaaacggattct

SEQ ID NO: 864242 - DNA, 25 bp, Homo sapien
ctgcggagtgcaggccacctctacg

SEQ ID NO: 864243 - DNA, 25 bp, Homo sapien
attcgagacgggcagcacaagctgc

SEQ ID NO: 864244 - DNA, 25 bp, Homo sapien
cacaccaagatatgcacctggccac

SEQ ID NO: 864245 - DNA, 25 bp, Homo sapien
tcacaccaagatatgcacctggcca

SEQ ID NO: 864246 - DNA, 25 bp, Homo sapien
ggcagctctctccaactttggaagc

SEQ ID NO: 864247 - DNA, 25 bp, Homo sapien
cagctctctccaactttggaagccc

SEQ ID NO: 864248 - DNA, 25 bp, Homo sapien
tggcagctctctccaactttggaag

SEQ ID NO: 864249 - DNA, 25 bp, Homo sapien
ctctctccaactttggaagcccagg

SEQ ID NO: 864250 - DNA, 25 bp, Homo sapien
ggacagaggcagatgagtttcgtct

SEQ ID NO: 864251 - DNA, 25 bp, Homo sapien
ctggcatgaggcgtgcccagaggga

SEQ ID NO: 864252 - DNA, 25 bp, Homo sapien
catgaggcgtgcccagagggacaga

SEQ ID NO: 864253 - DNA, 25 bp, Homo sapien
gatgagtttcgtctcctccactgga

SEQ ID NO: 864254 - DNA, 25 bp, Homo sapien
ttttccgttccccagcattggcagg

SEQ ID NO: 864255 - DNA, 25 bp, Homo sapien
ccgttccccagcattggcaggttct

SEQ ID NO: 864256 - DNA, 25 bp, Homo sapien
cattttccgttccccagcattggca

SEQ ID NO: 864257 - DNA, 25 bp, Homo sapien
caggttctgggactggtggctgtgg

SEQ ID NO: 864258 - DNA, 25 bp, Homo sapien
cttagaaggtggggaataatcatca

SEQ ID NO: 864259 - DNA, 25 bp, Homo sapien
ttagaaggtggggaataatcatcat

SEQ ID NO: 864260 - DNA, 25 bp, Homo sapien
tacttctttttctgccctcttgggc

SEQ ID NO: 864261 - DNA, 25 bp, Homo sapien
acttctttttctgccctcttgggct

SEQ ID NO: 864262 - DNA, 25 bp, Homo sapien
ctacttctttttctgccctcttggg

SEQ ID NO: 864263 - DNA, 25 bp, Homo sapien
cttctttttctgccctcttgggctt

SEQ ID NO: 864264 - DNA, 25 bp, Homo sapien
cagatttaaggtgcaaaaagtcact

SEQ ID NO: 864265 - DNA, 25 bp, Homo sapien
aggatttcacagatttaaggtgcaa

SEQ ID NO: 864266 - DNA, 25 bp, Homo sapien
caaaaagtcactgggttctctaaga

SEQ ID NO: 864267 - DNA, 25 bp, Homo sapien
aaaagtcactgggttctctaagaag

SEQ ID NO: 864268 - DNA, 25 bp, Homo sapien
atgcacaaggtcctcttactgttcc

SEQ ID NO: 864269 - DNA, 25 bp, Homo sapien
attattcatgcacaaggtcctctta

SEQ ID NO: 864270 - DNA, 25 bp, Homo sapien
attcatgcacaaggtcctcttactg

SEQ ID NO: 864271 - DNA, 25 bp, Homo sapien
tgtagtgtggaaacaaattattcat

SEQ ID NO: 864272 - DNA, 25 bp, Homo sapien
tgggctgtgactacttccaggaagg

SEQ ID NO: 864273 - DNA, 25 bp, Homo sapien
ctgggctgtgactacttccaggaag

SEQ ID NO: 864274 - DNA, 25 bp, Homo sapien
aaggggctacaagaggcagttggaa

SEQ ID NO: 864275 - DNA, 25 bp, Homo sapien
gaaggggctacaagaggcagttgga

SEQ ID NO: 864276 - DNA, 25 bp, Homo sapien
acaaggcttagacattcgtccagta

SEQ ID NO: 864277 - DNA, 25 bp, Homo sapien
caaggcttagacattcgtccagtat

SEQ ID NO: 864278 - DNA, 25 bp, Homo sapien
cacaaggcttagacattcgtccagt

SEQ ID NO: 864279 - DNA, 25 bp, Homo sapien
aaggcttagacattcgtccagtatg

SEQ ID NO: 864280 - DNA, 25 bp, Homo sapien
ctgggctttcggacttgccagaatg

SEQ ID NO: 864281 - DNA, 25 bp, Homo sapien
gaaagctgggctttcggacttgcca

SEQ ID NO: 864282 - DNA, 25 bp, Homo sapien
aagggaagcgcttccactttctggg

SEQ ID NO: 864283 - DNA, 25 bp, Homo sapien
ttaagggaagcgcttccactttctg

SEQ ID NO: 864284 - DNA, 25 bp, Homo sapien
ggcatggtgtggatattactacatt

SEQ ID NO: 864285 - DNA, 25 bp, Homo sapien
cattggaagcgatggtgtgtactag

SEQ ID NO: 864286 - DNA, 25 bp, Homo sapien
ttggaagcgatggtgtggactagat

SEQ ID NO: 864287 - DNA, 25 bp, Homo sapien
ttgtgtattagatcagtgatacggc

SEQ ID NO: 864288 - DNA, 25 bp, Homo sapien
cgccatggttcagcacagacgctct

SEQ ID NO: 864289 - DNA, 25 bp, Homo sapien
agcacagacgctcttgctcacagtt

SEQ ID NO: 864290 - DNA, 25 bp, Homo sapien
ctctggtggcgccatggttcagcac

SEQ ID NO: 864291 - DNA, 25 bp, Homo sapien
ggttcagcacagacgctcttgctca

SEQ ID NO: 864292 - DNA, 25 bp, Homo sapien
tgcacacctagtacaactgtgggac

SEQ ID NO: 864293 - DNA, 25 bp, Homo sapien
caaatgcacccctaaattgtgtatg

SEQ ID NO: 864294 - DNA, 25 bp, Homo sapien
tgaagaacaataggtacggccattc

SEQ ID NO: 864295 - DNA, 25 bp, Homo sapien
gatagcacataatcacacaaaagga

SEQ ID NO: 864296 - DNA, 25 bp, Homo sapien
gcagcctcggggaccatgaagccac

SEQ ID NO: 864297 - DNA, 25 bp, Homo sapien
agcctcggggaccatgaagccacag

SEQ ID NO: 864298 - DNA, 25 bp, Homo sapien
cagcttccccagtcgttcctgagga

SEQ ID NO: 864299 - DNA, 25 bp, Homo sapien
cacagcttccccagtcgttcctgag

SEQ ID NO: 864300 - DNA, 25 bp, Homo sapien
aagttgcaagctttaatgtacccat

SEQ ID NO: 864301 - DNA, 25 bp, Homo sapien
tgaaggtcatgtaggagacgaaaga

SEQ ID NO: 864302 - DNA, 25 bp, Homo sapien
agcatcttgttagatgagggccgcc

SEQ ID NO: 864303 - DNA, 25 bp, Homo sapien
tggcaaacgcgagcagatgaaggtc

SEQ ID NO: 864304 - DNA, 25 bp, Homo sapien
cacccatggaccgaagcatcttgtt

SEQ ID NO: 864305 - DNA, 25 bp, Homo sapien
cttctgggatgatgataagacttgg

SEQ ID NO: 864306 - DNA, 25 bp, Homo sapien
ctgggatgatgataagacttgggat

SEQ ID NO: 864307 - DNA, 25 bp, Homo sapien
ggatgaaccaaggatcttgaaccat

SEQ ID NO: 864308 - DNA, 25 bp, Homo sapien
gatcttgaaccatgggacaatgtga

SEQ ID NO: 864309 - DNA, 25 bp, Homo sapien
gcaagctgtcccagagttcatggag

SEQ ID NO: 864310 - DNA, 25 bp, Homo sapien
ttcatggagcggaaaggctcgagaa

SEQ ID NO: 864311 - DNA, 25 bp, Homo sapien
gcaactgaggatgctcgaatcacag

SEQ ID NO: 864312 - DNA, 25 bp, Homo sapien
tcgaatcacaggtttataaaatcca

SEQ ID NO: 864313 - DNA, 25 bp, Homo sapien
cagctgtcgcactgccatgggttct

SEQ ID NO: 864314 - DNA, 25 bp, Homo sapien
tcaacgggacagacatgggacaagt

SEQ ID NO: 864315 - DNA, 25 bp, Homo sapien
tctacgtgtttcttgggcagaggac

SEQ ID NO: 864316 - DNA, 25 bp, Homo sapien
tgggacaagtgtgcctgatcatggt

SEQ ID NO: 864317 - DNA, 25 bp, Homo sapien
gttctctgatgtagctgaatgtttc

SEQ ID NO: 864318 - DNA, 25 bp, Homo sapien
ttaacagtgacgtaggaataggagt

SEQ ID NO: 864319 - DNA, 25 bp, Homo sapien
gcatgttctaagctgggctcaggaa

SEQ ID NO: 864320 - DNA, 25 bp, Homo sapien
cctggtcttaagacgcgggcagcat

SEQ ID NO: 864321 - DNA, 25 bp, Homo sapien
tggccagggagtatttgcccccgga

SEQ ID NO: 864322 - DNA, 25 bp, Homo sapien
gcactcctgtatccctgagggcatt

SEQ ID NO: 864323 - DNA, 25 bp, Homo sapien
cattccatagtaaactgttgtaaag

SEQ ID NO: 864324 - DNA, 25 bp, Homo sapien
gtaaactgttgtaaaggagcagaca

SEQ ID NO: 864325 - DNA, 25 bp, Homo sapien
cctgtatccctgagggcattccata

SEQ ID NO: 864326 - DNA, 25 bp, Homo sapien
aaaaaatgcgtctcactgaagttga

SEQ ID NO: 864327 - DNA, 25 bp, Homo sapien
gcacaatcagaagcactgaggccca

SEQ ID NO: 864328 - DNA, 25 bp, Homo sapien
gaaatggcacaatcagaagcactga

SEQ ID NO: 864329 - DNA, 25 bp, Homo sapien
aatggcacaatcagaagcactgagg

SEQ ID NO: 864330 - DNA, 25 bp, Homo sapien
gaagaggagacgtgaacagtgtgca

SEQ ID NO: 864331 - DNA, 25 bp, Homo sapien
ggagacgtgaacagtgtgcagcttc

SEQ ID NO: 864332 - DNA, 25 bp, Homo sapien
agcttcccgcccatgccatggacaa

SEQ ID NO: 864333 - DNA, 25 bp, Homo sapien
tggagaagaggagacgtgaacagtg

SEQ ID NO: 864334 - DNA, 25 bp, Homo sapien
agtatgcagcttcccgcacacactg

SEQ ID NO: 864335 - DNA, 25 bp, Homo sapien
tagtatgcagcttcccgcacacact

SEQ ID NO: 864336 - DNA, 25 bp, Homo sapien
atagtatgcagcttcccgcacacac

SEQ ID NO: 864337 - DNA, 25 bp, Homo sapien
tggttgaggacctccagggagtcct

SEQ ID NO: 864338 - DNA, 25 bp, Homo sapien
ctggttgaggacctccagggagtcc

SEQ ID NO: 864339 - DNA, 25 bp, Homo sapien
agggagtcctgctgtgaacgaaaac

SEQ ID NO: 864340 - DNA, 25 bp, Homo sapien
gagtcctgctgtgaacgaaaaccca

SEQ ID NO: 864341 - DNA, 25 bp, Homo sapien
tcagtaaaatgttggggtgacagtc

SEQ ID NO: 864342 - DNA, 25 bp, Homo sapien
cagtaaaatgttggggtgacagtca

SEQ ID NO: 864343 - DNA, 25 bp, Homo sapien
gaggagtgtaattctaacacggcca

SEQ ID NO: 864344 - DNA, 25 bp, Homo sapien
tgtagaggagtgtaattctaacacg

SEQ ID NO: 864345 - DNA, 25 bp, Homo sapien
gagtgtaattctaacacggccatcc

SEQ ID NO: 864346 - DNA, 25 bp, Homo sapien
gctggtgtagaggagtgtaattcta

SEQ ID NO: 864347 - DNA, 25 bp, Homo sapien
tctgaccccaaggacgtgggttcca

SEQ ID NO: 864348 - DNA, 25 bp, Homo sapien
ccaggtttctgaccccaaggacgtg

SEQ ID NO: 864349 - DNA, 25 bp, Homo sapien
aggaaaacactgaaaggttgcttct

SEQ ID NO: 864350 - DNA, 25 bp, Homo sapien
gcttctctgtgaacagagtggctgt

SEQ ID NO: 864351 - DNA, 25 bp, Homo sapien
cttctgttttgctgtattgtctggc

SEQ ID NO: 864352 - DNA, 25 bp, Homo sapien
catctaaaacagtgttcacttctgt

SEQ ID NO: 864353 - DNA, 25 bp, Homo sapien
ctgtcctgtatgtgtctgagctcat

SEQ ID NO: 864354 - DNA, 25 bp, Homo sapien
ttgtctggctgtcctgtatgtgtct

SEQ ID NO: 864355 - DNA, 25 bp, Homo sapien
tcatctccctttggtgagagagcac

SEQ ID NO: 864356 - DNA, 25 bp, Homo sapien
tgagagagcacattaaaggccgaga

SEQ ID NO: 864357 - DNA, 25 bp, Homo sapien
cattaaaggccgagagtccatccat

SEQ ID NO: 864358 - DNA, 25 bp, Homo sapien
caggaactcagaagggggcctttgt

SEQ ID NO: 864359 - DNA, 25 bp, Homo sapien
catgagcacatgtcagggtggagct

SEQ ID NO: 864360 - DNA, 25 bp, Homo sapien
gaatatatcccgcatggcccaaaga

SEQ ID NO: 864361 - DNA, 25 bp, Homo sapien
aggcccctggcatgactacaataga

SEQ ID NO: 864362 - DNA, 25 bp, Homo sapien
agggtttgtaaaccggcatgagcac

SEQ ID NO: 864363 - DNA, 25 bp, Homo sapien
tgtccttaggtgtcgcaggctggct

SEQ ID NO: 864364 - DNA, 25 bp, Homo sapien
ggttggtgtccctcttcgcatggag

SEQ ID NO: 864365 - DNA, 25 bp, Homo sapien
caggacactgtgagattgtaagggt

SEQ ID NO: 864366 - DNA, 25 bp, Homo sapien
ggctggctctcgtgcgtccttcctt

SEQ ID NO: 864367 - DNA, 25 bp, Homo sapien
cagtaaaggcctagcgacctgggtg

SEQ ID NO: 864368 - DNA, 25 bp, Homo sapien
agacagaggcagtgcctcggctgca

SEQ ID NO: 864369 - DNA, 25 bp, Homo sapien
ggagcatgagctgcatccaacaggc

SEQ ID NO: 864370 - DNA, 25 bp, Homo sapien
ccacggactcgggagggagcatgag

SEQ ID NO: 864371 - DNA, 25 bp, Homo sapien
gagcccgtatcagagcagagtggcc

SEQ ID NO: 864372 - DNA, 25 bp, Homo sapien
agaaggtgacaccaggcagaaacca

SEQ ID NO: 864373 - DNA, 25 bp, Homo sapien
cgtggaagaaggtgacaccaggcag

SEQ ID NO: 864374 - DNA, 25 bp, Homo sapien
agagcccgtatcagagcagagtggc

SEQ ID NO: 864375 - DNA, 25 bp, Homo sapien
cttgatcatagaagacagcctgcat

SEQ ID NO: 864376 - DNA, 25 bp, Homo sapien
ccttgatcatagaagacagcctgca

SEQ ID NO: 864377 - DNA, 25 bp, Homo sapien
ctggggctctaacaccgaaagtctg

SEQ ID NO: 864378 - DNA, 25 bp, Homo sapien
acagaggcatccacagcgacaggag

SEQ ID NO: 864379 - DNA, 25 bp, Homo sapien
caccgaaagtctgtgccagacagag

SEQ ID NO: 864380 - DNA, 25 bp, Homo sapien
gccagacagaggcatccacagcgac

SEQ ID NO: 864381 - DNA, 25 bp, Homo sapien
gctcgttagcttgtttttccatcgg

SEQ ID NO: 864382 - DNA, 25 bp, Homo sapien
ttccatcggtattctttgtccccag

SEQ ID NO: 864383 - DNA, 25 bp, Homo sapien
ggaaatctcacggtgtccaggcccc

SEQ ID NO: 864384 - DNA, 25 bp, Homo sapien
cagccccaggtgtagcctgctggaa

SEQ ID NO: 864385 - DNA, 25 bp, Homo sapien
tgaagactggggtaaccgtgacaat

SEQ ID NO: 864386 - DNA, 25 bp, Homo sapien
gcagttgctgaagactggggtaacc

SEQ ID NO: 864387 - DNA, 25 bp, Homo sapien
ttgctgaagactggggtaaccgtga

SEQ ID NO: 864388 - DNA, 25 bp, Homo sapien
ctgaagactggggtaaccgtgacaa

SEQ ID NO: 864389 - DNA, 25 bp, Homo sapien
gagagaccatatgatcggccacgaa

SEQ ID NO: 864390 - DNA, 25 bp, Homo sapien
tcccaagggcacgtggaatatcttc

SEQ ID NO: 864391 - DNA, 25 bp, Homo sapien
gaccagtaaggaagcaaaggacttg

SEQ ID NO: 864392 - DNA, 25 bp, Homo sapien
tatagaccaattggacctaacggac

SEQ ID NO: 864393 - DNA, 25 bp, Homo sapien
cttgtgcatgaaccttttgtccttt

SEQ ID NO: 864394 - DNA, 25 bp, Homo sapien
cacttttagaactgccttgtgcatg

SEQ ID NO: 864395 - DNA, 25 bp, Homo sapien
ggcttcgtctgttgcaaaggtcatg

SEQ ID NO: 864396 - DNA, 25 bp, Homo sapien
tggaaaaagtgtaggcttcgtctgt

SEQ ID NO: 864397 - DNA, 25 bp, Homo sapien
ttggcaaaaggatgaatgaagaaag

SEQ ID NO: 864398 - DNA, 25 bp, Homo sapien
tgaatgaagaaagagaacattgcac

SEQ ID NO: 864399 - DNA, 25 bp, Homo sapien
ttaaggaaattggcaaaaggatgaa

SEQ ID NO: 864400 - DNA, 25 bp, Homo sapien
gcaaaaggatgaatgaagaaagaga

SEQ ID NO: 864401 - DNA, 25 bp, Homo sapien
tgactccggcacataggctggaaac

SEQ ID NO: 864402 - DNA, 25 bp, Homo sapien
tgtgttcaaaacgtccgcagcgaca

SEQ ID NO: 864403 - DNA, 25 bp, Homo sapien
gaatccatgagcttgttccccggtg

SEQ ID NO: 864404 - DNA, 25 bp, Homo sapien
gagcttgttcctaggtgactccggc

SEQ ID NO: 864405 - DNA, 25 bp, Homo sapien
gcaggaaaggcagacagcgtgagcc

SEQ ID NO: 864406 - DNA, 25 bp, Homo sapien
agagcagccagccatgacggaacca

SEQ ID NO: 864407 - DNA, 25 bp, Homo sapien
ggaaaggcagacagcgtgagccaca

SEQ ID NO: 864408 - DNA, 25 bp, Homo sapien
acagagcagccagccatgacggaac

SEQ ID NO: 864409 - DNA, 25 bp, Homo sapien
caagagcggatgtgattctgggaga

SEQ ID NO: 864410 - DNA, 25 bp, Homo sapien
cctctgatatccagttctcgccttg

SEQ ID NO: 864411 - DNA, 25 bp, Homo sapien
acactggcaagagcggatgtgattc

SEQ ID NO: 864412 - DNA, 25 bp, Homo sapien
ggagacactggcaagagcggatgtg

SEQ ID NO: 864413 - DNA, 25 bp, Homo sapien
ttagacgagagttctgcacggctga

SEQ ID NO: 864414 - DNA, 25 bp, Homo sapien
tactgattagacgagagttctgcac

SEQ ID NO: 864415 - DNA, 25 bp, Homo sapien
aatagtactgattagacgagagttc

SEQ ID NO: 864416 - DNA, 25 bp, Homo sapien
tgattagacgagagttctgcacggc

SEQ ID NO: 864417 - DNA, 25 bp, Homo sapien
tggtgagaacattcccatgtaagct

SEQ ID NO: 864418 - DNA, 25 bp, Homo sapien
gtgcagaaccgcctttaatattaat

SEQ ID NO: 864419 - DNA, 25 bp, Homo sapien
ttccaggcctgatgcgatcatttgt

SEQ ID NO: 864420 - DNA, 25 bp, Homo sapien
tgctggcatccaccgaggtctgcat

SEQ ID NO: 864421 - DNA, 25 bp, Homo sapien
tcccgtcgttcttcacatctggtgg

SEQ ID NO: 864422 - DNA, 25 bp, Homo sapien
ttctttcccgtcgttcttcacatct

SEQ ID NO: 864423 - DNA, 25 bp, Homo sapien
ggcacttcttggcaagtccacccca

SEQ ID NO: 864424 - DNA, 25 bp, Homo sapien
tcgttcttcacatctggtggccagg

SEQ ID NO: 864425 - DNA, 25 bp, Homo sapien
tgcagctggcgcacgaggtgaacac

SEQ ID NO: 864426 - DNA, 25 bp, Homo sapien
gctggcgcacgaggtgaacacaatg

SEQ ID NO: 864427 - DNA, 25 bp, Homo sapien
agctggcgcacgaggtgaacacaat

SEQ ID NO: 864428 - DNA, 25 bp, Homo sapien
gcagctggcgcacgaggtgaacaca

SEQ ID NO: 864429 - DNA, 25 bp, Homo sapien
gcggcgtgggcgcttctattctgaa

SEQ ID NO: 864430 - DNA, 25 bp, Homo sapien
agcatccgccgaggcttggaacaca

SEQ ID NO: 864431 - DNA, 25 bp, Homo sapien
ttctattctgaagcatccgccgagg

SEQ ID NO: 864432 - DNA, 25 bp, Homo sapien
ttgcaaagcggcgtgggcgcttcta

SEQ ID NO: 864433 - DNA, 25 bp, Homo sapien
ggcctctggcagagggagtatgagg

SEQ ID NO: 864434 - DNA, 25 bp, Homo sapien
gctccactcgctcctctgttttggg

SEQ ID NO: 864435 - DNA, 25 bp, Homo sapien
ggcagctgtctgctccactcgctcc

SEQ ID NO: 864436 - DNA, 25 bp, Homo sapien
gggcctctggcagagggagtatgag

SEQ ID NO: 864437 - DNA, 25 bp, Homo sapien
ctctcagtcccagcatccggcttct

SEQ ID NO: 864438 - DNA, 25 bp, Homo sapien
cccagcatccggcttctgaatcttg

SEQ ID NO: 864439 - DNA, 25 bp, Homo sapien
tcagtcccagcatccggcttctgaa

SEQ ID NO: 864440 - DNA, 25 bp, Homo sapien
cagcatccggcttctgaatcttgca

SEQ ID NO: 864441 - DNA, 25 bp, Homo sapien
tgattacatacagtgggagctccct

SEQ ID NO: 864442 - DNA, 25 bp, Homo sapien
gaagttcagtgttcttagtcacagg

SEQ ID NO: 864443 - DNA, 25 bp, Homo sapien
ttgagatgtgaccaaccgggagaca

SEQ ID NO: 864444 - DNA, 25 bp, Homo sapien
gaggtccgcacaaggtacaagtcac

SEQ ID NO: 864445 - DNA, 25 bp, Homo sapien
cagctggagcgaagtctcccacagg

SEQ ID NO: 864446 - DNA, 25 bp, Homo sapien
gctggagcgaagtctcccacaggtc

SEQ ID NO: 864447 - DNA, 25 bp, Homo sapien
tgcagctggagcgaagtctcccaca

SEQ ID NO: 864448 - DNA, 25 bp, Homo sapien
ggagcgaagtctcccacaggtcctc

SEQ ID NO: 864449 - DNA, 25 bp, Homo sapien
tgtgctgggtgtggaagatgagagt

SEQ ID NO: 864450 - DNA, 25 bp, Homo sapien
tgctgggtgtggaagatgagagtgg

SEQ ID NO: 864451 - DNA, 25 bp, Homo sapien
gtctgtgctgggtgtggaagatgag

SEQ ID NO: 864452 - DNA, 25 bp, Homo sapien
tcagtcactgaggtctgtgctgggt

SEQ ID NO: 864453 - DNA, 25 bp, Homo sapien
tacagcaggcgtctgatacggttct

SEQ ID NO: 864454 - DNA, 25 bp, Homo sapien
tcaatctggactagaggtttgtctg

SEQ ID NO: 864455 - DNA, 25 bp, Homo sapien
caagggcgctgtgtttgcatgtaca

SEQ ID NO: 864456 - DNA, 25 bp, Homo sapien
tgtgattagcggagactggcctgcc

SEQ ID NO: 864457 - DNA, 25 bp, Homo sapien
tgtacaagtcacaccctgccgaggg

SEQ ID NO: 864458 - DNA, 25 bp, Homo sapien
catacatacgagctgcaagagggca

SEQ ID NO: 864459 - DNA, 25 bp, Homo sapien
tatttattgggctgcccctcataca

SEQ ID NO: 864460 - DNA, 25 bp, Homo sapien
gaagcctgtcttgttacagggcccg

SEQ ID NO: 864461 - DNA, 25 bp, Homo sapien
cagtcacacggatggtggctccggc

SEQ ID NO: 864462 - DNA, 25 bp, Homo sapien
gggagacctttttccgttgcgtgca

SEQ ID NO: 864463 - DNA, 25 bp, Homo sapien
gcggccacgggccagtcacacggat

SEQ ID NO: 864464 - DNA, 25 bp, Homo sapien
cagccgcctggaggggcacacgttt

SEQ ID NO: 864465 - DNA, 25 bp, Homo sapien
tgtgagacattctcacaggtgctct

SEQ ID NO: 864466 - DNA, 25 bp, Homo sapien
tcatattcaggagagacggactgtc

SEQ ID NO: 864467 - DNA, 25 bp, Homo sapien
catggctgtacctggcctcaagtgg

SEQ ID NO: 864468 - DNA, 25 bp, Homo sapien
caggtgctctgggatacacgccatg

SEQ ID NO: 864469 - DNA, 25 bp, Homo sapien
caaacactatgattgacactgcaga

SEQ ID NO: 864470 - DNA, 25 bp, Homo sapien
gagtgaagtcacagcaagaaccctt

SEQ ID NO: 864471 - DNA, 25 bp, Homo sapien
gagttctgcaactctcgtacgaggg

SEQ ID NO: 864472 - DNA, 25 bp, Homo sapien
gaatcaacgactgacttcgctgagg

SEQ ID NO: 864473 - DNA, 25 bp, Homo sapien
ttagtagatatgcagagcggacatc

SEQ ID NO: 864474 - DNA, 25 bp, Homo sapien
taattccttagtagatatgcagagc

SEQ ID NO: 864475 - DNA, 25 bp, Homo sapien
tgtatggtcctcatgtcactgcact

SEQ ID NO: 864476 - DNA, 25 bp, Homo sapien
gctccttccctgtatggtcctcatg

SEQ ID NO: 864477 - DNA, 25 bp, Homo sapien
tgagcagggaacagatcaaatcctc

SEQ ID NO: 864478 - DNA, 25 bp, Homo sapien
tcatagccagggtattagtgactac

SEQ ID NO: 864479 - DNA, 25 bp, Homo sapien
tctccatcagtggaaggcaattcac

SEQ ID NO: 864480 - DNA, 25 bp, Homo sapien
ggcaattcacgagggaagaaggcaa

SEQ ID NO: 864481 - DNA, 25 bp, Homo sapien
tgactactgagagggttaacaccaa

SEQ ID NO: 864482 - DNA, 25 bp, Homo sapien
caaggactgagttgaggataccacc

SEQ ID NO: 864483 - DNA, 25 bp, Homo sapien
tgtagagttccaagagtgaccctgc

SEQ ID NO: 864484 - DNA, 25 bp, Homo sapien
tgaatgatttgcacatcgggcagcc

SEQ ID NO: 864485 - DNA, 25 bp, Homo sapien
tacactgatacatagtaatctactg

SEQ ID NO: 864486 - DNA, 25 bp, Homo sapien
cactgatacatagtaatctactgtt

SEQ ID NO: 864487 - DNA, 25 bp, Homo sapien
ggaaagctttagtacaaccagaaca

SEQ ID NO: 864488 - DNA, 25 bp, Homo sapien
tagtacaaccagaacacatacattg

SEQ ID NO: 864489 - DNA, 25 bp, Homo sapien
tgtcctcttgggtgccagttgtttc

SEQ ID NO: 864490 - DNA, 25 bp, Homo sapien
cagtataggctgattaagtatgcaa

SEQ ID NO: 864491 - DNA, 25 bp, Homo sapien
caaattgggcacatagcatggataa

SEQ ID NO: 864492 - DNA, 25 bp, Homo sapien
caaacctggtgaagcatttcctcgg

SEQ ID NO: 864493 - DNA, 25 bp, Homo sapien
tcctccccatccgttcacgaacctc

SEQ ID NO: 864494 - DNA, 25 bp, Homo sapien
ctagaaacctgtattccacagtgct

SEQ ID NO: 864495 - DNA, 25 bp, Homo sapien
aatgatgtgattttgaagttactag

SEQ ID NO: 864496 - DNA, 25 bp, Homo sapien
ccagtccaaatgatgtgattttgaa

SEQ ID NO: 864497 - DNA, 25 bp, Homo sapien
gcagggctgcccgagagacccaggc

SEQ ID NO: 864498 - DNA, 25 bp, Homo sapien
aagagagccgcaggccaagaccagg

SEQ ID NO: 864499 - DNA, 25 bp, Homo sapien
ctgcccgagagacccaggcggccat

SEQ ID NO: 864500 - DNA, 25 bp, Homo sapien
accaggagacgcgagagaggtgggc

SEQ ID NO: 864501 - DNA, 25 bp, Homo sapien
tcgaccacgtgttcctgtcggctca

SEQ ID NO: 864502 - DNA, 25 bp, Homo sapien
tctctctgatcgaccacgtgttcct

SEQ ID NO: 864503 - DNA, 25 bp, Homo sapien
gagtctctctctgatcgaccacgtg

SEQ ID NO: 864504 - DNA, 25 bp, Homo sapien
ggctcacagaggccgcctcagggtc

SEQ ID NO: 864505 - DNA, 25 bp, Homo sapien
cttcctcgcaccctccactgttccc

SEQ ID NO: 864506 - DNA, 25 bp, Homo sapien
tgtcttcctcgcaccctccactgtt

SEQ ID NO: 864507 - DNA, 25 bp, Homo sapien
tcctcgcaccctccactgttcccgg

SEQ ID NO: 864508 - DNA, 25 bp, Homo sapien
ctcgcaccctccactgttcccggcc

SEQ ID NO: 864509 - DNA, 25 bp, Homo sapien
ctgatcgtcctgatggcagcgacca

SEQ ID NO: 864510 - DNA, 25 bp, Homo sapien
tgatggtggcggtcggtcctgatcg

SEQ ID NO: 864511 - DNA, 25 bp, Homo sapien
gtcctgatcgtcctgatggcagcga

SEQ ID NO: 864512 - DNA, 25 bp, Homo sapien
ctggccggtccccactgatggtggc

SEQ ID NO: 864513 - DNA, 25 bp, Homo sapien
gctatttcttgtcgcgtcatttctg

SEQ ID NO: 864514 - DNA, 25 bp, Homo sapien
actcaaggctatttcttgtcgcgtc

SEQ ID NO: 864515 - DNA, 25 bp, Homo sapien
tcgcgtcatttctgacagtgtccgg

SEQ ID NO: 864516 - DNA, 25 bp, Homo sapien
ctgacagtgtccggtggtccctacc

SEQ ID NO: 864517 - DNA, 25 bp, Homo sapien
tgagcacacgaagactaagccctct

SEQ ID NO: 864518 - DNA, 25 bp, Homo sapien
agtggctcccgctcactggaggctg

SEQ ID NO: 864519 - DNA, 25 bp, Homo sapien
gaggaaacgacagcaaagcacttct

SEQ ID NO: 864520 - DNA, 25 bp, Homo sapien
cgtagccagtgaggagaggatccct

SEQ ID NO: 864521 - DNA, 25 bp, Homo sapien
tggcccctgtgtccgccgaggacgt

SEQ ID NO: 864522 - DNA, 25 bp, Homo sapien
ccggacctcaggaccagttggtagg

SEQ ID NO: 864523 - DNA, 25 bp, Homo sapien
tgtgtccgccgaggacgtcctggct

SEQ ID NO: 864524 - DNA, 25 bp, Homo sapien
gaccagttggtaggccccaggcttc

SEQ ID NO: 864525 - DNA, 25 bp, Homo sapien
accgccggccctggtctgtcatcat

SEQ ID NO: 864526 - DNA, 25 bp, Homo sapien
gataattttccagaactccacctgc

SEQ ID NO: 864527 - DNA, 25 bp, Homo sapien
aacggcccagaaacgttagtgactg

SEQ ID NO: 864528 - DNA, 25 bp, Homo sapien
taaggtcgacttcacagtttctttc

SEQ ID NO: 864529 - DNA, 25 bp, Homo sapien
acctgagaggtttctcagcaggagc

SEQ ID NO: 864530 - DNA, 25 bp, Homo sapien
tccgctctgcattgcgctctgcggg

SEQ ID NO: 864531 - DNA, 25 bp, Homo sapien
cagcaggagctgaatagtgttgaaa

SEQ ID NO: 864532 - DNA, 25 bp, Homo sapien
tgttgaaaaggcttccagcccgcac

SEQ ID NO: 864533 - DNA, 25 bp, Homo sapien
tgcctctgcatagagccccctgcaa

SEQ ID NO: 864534 - DNA, 25 bp, Homo sapien
gcctggagagcctcacggcgcagga

SEQ ID NO: 864535 - DNA, 25 bp, Homo sapien
caggagggatttgccggggctgcct

SEQ ID NO: 864536 - DNA, 25 bp, Homo sapien
aaacagaggagctgttttatagcac

SEQ ID NO: 864537 - DNA, 25 bp, Homo sapien
cgtgcagggttgacgtagtcagcca

SEQ ID NO: 864538 - DNA, 25 bp, Homo sapien
cctcttggacgtgcagggttgacgt

SEQ ID NO: 864539 - DNA, 25 bp, Homo sapien
gacgtagtcagccactcttctgaaa

SEQ ID NO: 864540 - DNA, 25 bp, Homo sapien
tgggccatgagagccgcctcttgga

SEQ ID NO: 864541 - DNA, 25 bp, Homo sapien
tggggaccaggcagccacggtgaac

SEQ ID NO: 864542 - DNA, 25 bp, Homo sapien
ctggggaccaggcagccacggtgaa

SEQ ID NO: 864543 - DNA, 25 bp, Homo sapien
ggggaccaggcagccacggtgaacc

SEQ ID NO: 864544 - DNA, 25 bp, Homo sapien
cacatgcgccgagcaaagttggagc

SEQ ID NO: 864545 - DNA, 25 bp, Homo sapien
caaattggtccacgtctcttagaaa

SEQ ID NO: 864546 - DNA, 25 bp, Homo sapien
caggatttctggacagggcagctgt

SEQ ID NO: 864547 - DNA, 25 bp, Homo sapien
gaggcggttgacagctgtcgccttt

SEQ ID NO: 864548 - DNA, 25 bp, Homo sapien
gatctagagatccacagttcactgg

SEQ ID NO: 864549 - DNA, 25 bp, Homo sapien
gtggccgccatcagcctggtctcat

SEQ ID NO: 864550 - DNA, 25 bp, Homo sapien
gatggtcctggacaaacagctgtct

SEQ ID NO: 864551 - DNA, 25 bp, Homo sapien
aagacaggattgcagctgacagtgg

SEQ ID NO: 864552 - DNA, 25 bp, Homo sapien
ctgggccgatcacacctctgaggga

SEQ ID NO: 864553 - DNA, 25 bp, Homo sapien
tcacacctctgagggaccgagcgct

SEQ ID NO: 864554 - DNA, 25 bp, Homo sapien
gatcacacctctgagggaccgagcg

SEQ ID NO: 864555 - DNA, 25 bp, Homo sapien
gccgatcacacctctgagggaccga

SEQ ID NO: 864556 - DNA, 25 bp, Homo sapien
gtcacacccgtgaggggcacacatc

SEQ ID NO: 864557 - DNA, 25 bp, Homo sapien
gggcttcagagcaacgcagctgtgt

SEQ ID NO: 864558 - DNA, 25 bp, Homo sapien
caggtcacacccgtgaggggcacac

SEQ ID NO: 864559 - DNA, 25 bp, Homo sapien
ttcagagcaacgcagctgtgtcctc

SEQ ID NO: 864560 - DNA, 25 bp, Homo sapien
tcatagaactacacggccctggctc

SEQ ID NO: 864561 - DNA, 25 bp, Homo sapien
ttctgagaacaagggcttttcaggt

SEQ ID NO: 864562 - DNA, 25 bp, Homo sapien
tttctgagaacaagggcttttcagg

SEQ ID NO: 864563 - DNA, 25 bp, Homo sapien
gtttctgagaacaagggcttttcag

SEQ ID NO: 864564 - DNA, 25 bp, Homo sapien
gaaatcatagtcatcaaaagtagca

SEQ ID NO: 864565 - DNA, 25 bp, Homo sapien
caggtagataaagaaatcatagtca

SEQ ID NO: 864566 - DNA, 25 bp, Homo sapien
agtgttcattaaacttgatacaaag

SEQ ID NO: 864567 - DNA, 25 bp, Homo sapien
gtgtctgaatgtttcctgatggaag

SEQ ID NO: 864568 - DNA, 25 bp, Homo sapien
ttagaggtgaacgtccactgcggag

SEQ ID NO: 864569 - DNA, 25 bp, Homo sapien
ggagtgtcccgacgccatcccagaa

SEQ ID NO: 864570 - DNA, 25 bp, Homo sapien
cactgcggaggtcggagaagcactc

SEQ ID NO: 864571 - DNA, 25 bp, Homo sapien
agtcggtgggccgagctctctgcta

SEQ ID NO: 864572 - DNA, 25 bp, Homo sapien
ggcgtttgcttagagcctggactga

SEQ ID NO: 864573 - DNA, 25 bp, Homo sapien
tttgcttagagcctggactgaggct

SEQ ID NO: 864574 - DNA, 25 bp, Homo sapien
tgggccacggcgtttgcttagagcc

SEQ ID NO: 864575 - DNA, 25 bp, Homo sapien
cacggcgtttgcttagagcctggac

SEQ ID NO: 864576 - DNA, 25 bp, Homo sapien
gctcagtccttgttcatttgcatcc

SEQ ID NO: 864577 - DNA, 25 bp, Homo sapien
tgctcagtccttgttcatttgcatc

SEQ ID NO: 864578 - DNA, 25 bp, Homo sapien
cccccatggacccgcttcgggctgc

SEQ ID NO: 864579 - DNA, 25 bp, Homo sapien
ccccatggacccgcttcgggctgct

SEQ ID NO: 864580 - DNA, 25 bp, Homo sapien
tttaggaaggcaagtttctcaggag

SEQ ID NO: 864581 - DNA, 25 bp, Homo sapien
ctcaggagctcagaaaattaatttc

SEQ ID NO: 864582 - DNA, 25 bp, Homo sapien
ttttaggaaggcaagtttctcagga

SEQ ID NO: 864583 - DNA, 25 bp, Homo sapien
gctcagaaaattaatttcgtagtga

SEQ ID NO: 864584 - DNA, 25 bp, Homo sapien
gggccacacgtgtggctgcaaggtc

SEQ ID NO: 864585 - DNA, 25 bp, Homo sapien
tggaatgagcaccacctcgccaggg

SEQ ID NO: 864586 - DNA, 25 bp, Homo sapien
ggggccacacgtgtggctgcaaggt

SEQ ID NO: 864587 - DNA, 25 bp, Homo sapien
ttatggaatgagcaccacctcgcca

SEQ ID NO: 864588 - DNA, 25 bp, Homo sapien
aagctgaggttggactcagacaggc

SEQ ID NO: 864589 - DNA, 25 bp, Homo sapien
tcattcgtttttcggctcggcagct

SEQ ID NO: 864590 - DNA, 25 bp, Homo sapien
ggcagctgcacgaccttgtgggttc

SEQ ID NO: 864591 - DNA, 25 bp, Homo sapien
tgaggcgccaccgtggctcagggca

SEQ ID NO: 864592 - DNA, 25 bp, Homo sapien
agggcctgcggacatccaccagcgt

SEQ ID NO: 864593 - DNA, 25 bp, Homo sapien
tccaccagcgtccacgtggtcaaag

SEQ ID NO: 864594 - DNA, 25 bp, Homo sapien
gaacacattgcagggcctgcggaca

SEQ ID NO: 864595 - DNA, 25 bp, Homo sapien
tttcctgaagccgattccctggaac

SEQ ID NO: 864596 - DNA, 25 bp, Homo sapien
tgacagcagcctcaacgcgccactg

SEQ ID NO: 864597 - DNA, 25 bp, Homo sapien
ctcaacgcgccactgcctgagagga

SEQ ID NO: 864598 - DNA, 25 bp, Homo sapien
cgggcctcctcagcataaaatcagc

SEQ ID NO: 864599 - DNA, 25 bp, Homo sapien
accacaggatgtgcccagaaggcgg

SEQ ID NO: 864600 - DNA, 25 bp, Homo sapien
ttagccgaaggcagatgcagtgatc

SEQ ID NO: 864601 - DNA, 25 bp, Homo sapien
tgagatttggtttgcccagcagctt

SEQ ID NO: 864602 - DNA, 25 bp, Homo sapien
tcaaaggttccagactcagagacgt

SEQ ID NO: 864603 - DNA, 25 bp, Homo sapien
tatctgaaacctggaactaagtccc

SEQ ID NO: 864604 - DNA, 25 bp, Homo sapien
ctgcgggaaggcgtgggcttagaag

SEQ ID NO: 864605 - DNA, 25 bp, Homo sapien
agaagagggcttagccgaggcccct

SEQ ID NO: 864606 - DNA, 25 bp, Homo sapien
ctggccggctggcgtcccctttggt

SEQ ID NO: 864607 - DNA, 25 bp, Homo sapien
tgctgagacatcttggagtgagggt

SEQ ID NO: 864608 - DNA, 25 bp, Homo sapien
gaattccattaatgttcgctctgac

SEQ ID NO: 864609 - DNA, 25 bp, Homo sapien
gctctgacctttgctaatcccagcg

SEQ ID NO: 864610 - DNA, 25 bp, Homo sapien
gatgagaattccattaatgttcgct

SEQ ID NO: 864611 - DNA, 25 bp, Homo sapien
taatgttcgctctgacctttgctaa

SEQ ID NO: 864612 - DNA, 25 bp, Homo sapien
cattcgcagtgcctccatctcaaaa

SEQ ID NO: 864613 - DNA, 25 bp, Homo sapien
tcattcgcagtgcctccatctcaaa

SEQ ID NO: 864614 - DNA, 25 bp, Homo sapien
ttcgcagtgcctccatctcaaaatc

SEQ ID NO: 864615 - DNA, 25 bp, Homo sapien
cgcagtgcctccatctcaaaatctc

SEQ ID NO: 864616 - DNA, 25 bp, Homo sapien
tgatttgtttcttgccgtcaagacc

SEQ ID NO: 864617 - DNA, 25 bp, Homo sapien
tgtctgctgtgcctgcctaatgagc

SEQ ID NO: 864618 - DNA, 25 bp, Homo sapien
gctgtaaaatgaaccagtgggtgat

SEQ ID NO: 864619 - DNA, 25 bp, Homo sapien
gtaatgggtgtctgctgtgcctgcc

SEQ ID NO: 864620 - DNA, 25 bp, Homo sapien
atcccaccagccgccatgcgagtga

SEQ ID NO: 864621 - DNA, 25 bp, Homo sapien
gccccacggagaggcgcatgcagca

SEQ ID NO: 864622 - DNA, 25 bp, Homo sapien
cccacggagaggcgcatgcagcagg

SEQ ID NO: 864623 - DNA, 25 bp, Homo sapien
ggggagtatccagaagtgaggggcc

SEQ ID NO: 864624 - DNA, 25 bp, Homo sapien
cagtcgggagaggccgcccggccac

SEQ ID NO: 864625 - DNA, 25 bp, Homo sapien
aaaaagtcgtcctgttgttcaggat

SEQ ID NO: 864626 - DNA, 25 bp, Homo sapien
agtcgggagaggccgcccggccaca

SEQ ID NO: 864627 - DNA, 25 bp, Homo sapien
aaaagtcgtcctgttgttcaggatc

SEQ ID NO: 864628 - DNA, 25 bp, Homo sapien
cactgcggagagtagagggctgggc

SEQ ID NO: 864629 - DNA, 25 bp, Homo sapien
gcacagcatctgcacggagccgggc

SEQ ID NO: 864630 - DNA, 25 bp, Homo sapien
aaaatctcaatatgcggtcatctgc

SEQ ID NO: 864631 - DNA, 25 bp, Homo sapien
cagttctgtgttggacactgcggag

SEQ ID NO: 864632 - DNA, 25 bp, Homo sapien
gacacttcgtgttcgtgggaacgtc

SEQ ID NO: 864633 - DNA, 25 bp, Homo sapien
cacttcgtgttcgtgggaacgtcca

SEQ ID NO: 864634 - DNA, 25 bp, Homo sapien
tcgtgttcgtgggaacgtccagctg

SEQ ID NO: 864635 - DNA, 25 bp, Homo sapien
gttcgtgggaacgtccagctgccat

SEQ ID NO: 864636 - DNA, 25 bp, Homo sapien
tggtccggtgagcttgatttcagat

SEQ ID NO: 864637 - DNA, 25 bp, Homo sapien
gagcttgatttcagattccgggatc

SEQ ID NO: 864638 - DNA, 25 bp, Homo sapien
tcagattccgggatctggtttcgga

SEQ ID NO: 864639 - DNA, 25 bp, Homo sapien
gatctggtttcggagtggagttgtg

SEQ ID NO: 864640 - DNA, 25 bp, Homo sapien
gcctccaaatggaggggcctgcggg

SEQ ID NO: 864641 - DNA, 25 bp, Homo sapien
tgggcctccaaatggaggggcctgc

SEQ ID NO: 864642 - DNA, 25 bp, Homo sapien
cacggcccggctggagagcctctgt

SEQ ID NO: 864643 - DNA, 25 bp, Homo sapien
atgagctgtccggagggtccacact

SEQ ID NO: 864644 - DNA, 25 bp, Homo sapien
cggacatcaggctccgtgacagctg

SEQ ID NO: 864645 - DNA, 25 bp, Homo sapien
ggttctacaccgtcttctccggctg

SEQ ID NO: 864646 - DNA, 25 bp, Homo sapien
cctcgggtccactctgaaggtgatg

SEQ ID NO: 864647 - DNA, 25 bp, Homo sapien
tgggctgatgctccaggccggacat

SEQ ID NO: 864648 - DNA, 25 bp, Homo sapien
tcgaggccggaagagcagactttgc

SEQ ID NO: 864649 - DNA, 25 bp, Homo sapien
acgcagatccccacgtctcagggca

SEQ ID NO: 864650 - DNA, 25 bp, Homo sapien
ctgggatccagattcgaggccggaa

SEQ ID NO: 864651 - DNA, 25 bp, Homo sapien
gatccagattcgaggccggaagagc

SEQ ID NO: 864652 - DNA, 25 bp, Homo sapien
ctgggaagatcagtggcggctccag

SEQ ID NO: 864653 - DNA, 25 bp, Homo sapien
tctcctgggaagatcagtggcggct

SEQ ID NO: 864654 - DNA, 25 bp, Homo sapien
ttctcctgggaagatcagtggcggc

SEQ ID NO: 864655 - DNA, 25 bp, Homo sapien
tcctgggaagatcagtggcggctcc

SEQ ID NO: 864656 - DNA, 25 bp, Homo sapien
catggtctttaaggctgagctccaa

SEQ ID NO: 864657 - DNA, 25 bp, Homo sapien
ccttgctcgggtctgggaactggaa

SEQ ID NO: 864658 - DNA, 25 bp, Homo sapien
gagaaagtcacatccgtacaggcat

SEQ ID NO: 864659 - DNA, 25 bp, Homo sapien
agaaggccgcctgtaagtcaccgga

SEQ ID NO: 864660 - DNA, 25 bp, Homo sapien
ggttccgcgtgctcatcctgatggt

SEQ ID NO: 864661 - DNA, 25 bp, Homo sapien
gcccgcgcggccatgaagatgatgc

SEQ ID NO: 864662 - DNA, 25 bp, Homo sapien
aagatgatgctggtgcgccggttcc

SEQ ID NO: 864663 - DNA, 25 bp, Homo sapien
accgatggaccttgacccgcgaggc

SEQ ID NO: 864664 - DNA, 25 bp, Homo sapien
cagtcattctgcagggccaagcagg

SEQ ID NO: 864665 - DNA, 25 bp, Homo sapien
agtcattctgcagggccaagcaggg

SEQ ID NO: 864666 - DNA, 25 bp, Homo sapien
gtcattctgcagggccaagcagggc

SEQ ID NO: 864667 - DNA, 25 bp, Homo sapien
tcagtcattctgcagggccaagcag

SEQ ID NO: 864668 - DNA, 25 bp, Homo sapien
tctcatttgtgaagaggtctgtctt

SEQ ID NO: 864669 - DNA, 25 bp, Homo sapien
ggagatgctcacaggtgagttctca

SEQ ID NO: 864670 - DNA, 25 bp, Homo sapien
tgttgggccctattctccctgctgc

SEQ ID NO: 864671 - DNA, 25 bp, Homo sapien
agatgttgggccctattctccctgc

SEQ ID NO: 864672 - DNA, 25 bp, Homo sapien
tgaaccaagtgtgccatgggagctg

SEQ ID NO: 864673 - DNA, 25 bp, Homo sapien
ctgtgaaccaagtgtgccatgggag

SEQ ID NO: 864674 - DNA, 25 bp, Homo sapien
tgccatgggagctgctccatgtcca

SEQ ID NO: 864675 - DNA, 25 bp, Homo sapien
aaccaagtgtgccatgggagctgct

SEQ ID NO: 864676 - DNA, 25 bp, Homo sapien
ctgcttgctgaccccgcttgctgct

SEQ ID NO: 864677 - DNA, 25 bp, Homo sapien
tgaccccgcttgctgctgcctggct

SEQ ID NO: 864678 - DNA, 25 bp, Homo sapien
ttgctgaccccgcttgctgctgcct

SEQ ID NO: 864679 - DNA, 25 bp, Homo sapien
tgcttgctgaccccgcttgctgctg

SEQ ID NO: 864680 - DNA, 25 bp, Homo sapien
tgagatagcagcctctggctaggcc

SEQ ID NO: 864681 - DNA, 25 bp, Homo sapien
actcagccacggctgttccgagggc

SEQ ID NO: 864682 - DNA, 25 bp, Homo sapien
gggcccttctgagtacgaacttcca

SEQ ID NO: 864683 - DNA, 25 bp, Homo sapien
gaacttccagttggaggatctgggt

SEQ ID NO: 864684 - DNA, 25 bp, Homo sapien
gcacagccaccgtgtctgttccttg

SEQ ID NO: 864685 - DNA, 25 bp, Homo sapien
tctgttccttgggagcagggctcct

SEQ ID NO: 864686 - DNA, 25 bp, Homo sapien
caccgtgtctgttccttgggagcag

SEQ ID NO: 864687 - DNA, 25 bp, Homo sapien
aggtcacggtcccagggcctcgctc

SEQ ID NO: 864688 - DNA, 25 bp, Homo sapien
tggccctcttgacggacgagatgac

SEQ ID NO: 864689 - DNA, 25 bp, Homo sapien
ccaaaggcggcaacatgggggccca

SEQ ID NO: 864690 - DNA, 25 bp, Homo sapien
cgctggccctcttgacggacgagat

SEQ ID NO: 864691 - DNA, 25 bp, Homo sapien
ccctcttgacggacgagatgaccag

SEQ ID NO: 864692 - DNA, 25 bp, Homo sapien
cctggatgtgtttctgtggtccaca

SEQ ID NO: 864693 - DNA, 25 bp, Homo sapien
cacacctggatgtgtttctgtggtc

SEQ ID NO: 864694 - DNA, 25 bp, Homo sapien
ctcacacctggatgtgtttctgtgg

SEQ ID NO: 864695 - DNA, 25 bp, Homo sapien
tggatgtgtttctgtggtccacagg

SEQ ID NO: 864696 - DNA, 25 bp, Homo sapien
cctgatttgctaacctcaaggtctc

SEQ ID NO: 864697 - DNA, 25 bp, Homo sapien
tgatttgctaacctcaaggtctcct

SEQ ID NO: 864698 - DNA, 25 bp, Homo sapien
tttgctaacctcaaggtctcctctg

SEQ ID NO: 864699 - DNA, 25 bp, Homo sapien
ggcccctgatttgctaacctcaagg

SEQ ID NO: 864700 - DNA, 25 bp, Homo sapien
ggtgatgacaatgaccacaacagtg

SEQ ID NO: 864701 - DNA, 25 bp, Homo sapien
cctgcaggtggatgcatctgcaaag

SEQ ID NO: 864702 - DNA, 25 bp, Homo sapien
cagcaggtgtgcaaaccctgcaggt

SEQ ID NO: 864703 - DNA, 25 bp, Homo sapien
gtgcaaaccctgcaggtggatgcat

SEQ ID NO: 864704 - DNA, 25 bp, Homo sapien
aaaccctgcaggtggatgcatctgc

SEQ ID NO: 864705 - DNA, 25 bp, Homo sapien
atagtatttcgggaagccacccctg

SEQ ID NO: 864706 - DNA, 25 bp, Homo sapien
ggcgccgagcgttctgtattccatg

SEQ ID NO: 864707 - DNA, 25 bp, Homo sapien
catgagtcagagaaacggcaaagcc

SEQ ID NO: 864708 - DNA, 25 bp, Homo sapien
tggtgagcccacgtttcctgagagc

SEQ ID NO: 864709 - DNA, 25 bp, Homo sapien
ctgtgattcccaggcgagcaacggg

SEQ ID NO: 864710 - DNA, 25 bp, Homo sapien
ccttggccagcgcagtcatggtttt

SEQ ID NO: 864711 - DNA, 25 bp, Homo sapien
cagtcatggttttgtagtccttggg

SEQ ID NO: 864712 - DNA, 25 bp, Homo sapien
cagcgcagtcatggttttgtagtcc

SEQ ID NO: 864713 - DNA, 25 bp, Homo sapien
tggttttgtagtccttgggaatcac

SEQ ID NO: 864714 - DNA, 25 bp, Homo sapien
gggtgggcgacacctcctcatcatg

SEQ ID NO: 864715 - DNA, 25 bp, Homo sapien
ttcctgacgtaggacacggcgtcct

SEQ ID NO: 864716 - DNA, 25 bp, Homo sapien
gtgagtttgacttttgccgcgccaa

SEQ ID NO: 864717 - DNA, 25 bp, Homo sapien
tcatcatgggagtccgactgtgagt

SEQ ID NO: 864718 - DNA, 25 bp, Homo sapien
ctcaaaggtgggcttaggaccagag

SEQ ID NO: 864719 - DNA, 25 bp, Homo sapien
ctccaccacgctcaaaggtgggctt

SEQ ID NO: 864720 - DNA, 25 bp, Homo sapien
caccacgctcaaaggtgggcttagg

SEQ ID NO: 864721 - DNA, 25 bp, Homo sapien
cacgctcaaaggtgggcttaggacc

SEQ ID NO: 864722 - DNA, 25 bp, Homo sapien
cacctgtgacaaggctgagaccacg

SEQ ID NO: 864723 - DNA, 25 bp, Homo sapien
gatgcagacaccacgtgaatgccaa

SEQ ID NO: 864724 - DNA, 25 bp, Homo sapien
aggcagggccttgcgtcatggacca

SEQ ID NO: 864725 - DNA, 25 bp, Homo sapien
gagcttcccgaaaaaagatggcggc

SEQ ID NO: 864726 - DNA, 25 bp, Homo sapien
cagaggtggtgaaagtcatcaagat

SEQ ID NO: 864727 - DNA, 25 bp, Homo sapien
cattcagacgaagtacgcagcagcc

SEQ ID NO: 864728 - DNA, 25 bp, Homo sapien
gatccacggagggaacggttctgct

SEQ ID NO: 864729 - DNA, 25 bp, Homo sapien
gaagcatggaatttgacattcagac

SEQ ID NO: 864730 - DNA, 25 bp, Homo sapien
tctagctctaaaatacacttgttaa

SEQ ID NO: 864731 - DNA, 25 bp, Homo sapien
attaccatctgccatgagttggatg

SEQ ID NO: 864732 - DNA, 25 bp, Homo sapien
tgttgggaggtccatgaatgtaacc

SEQ ID NO: 864733 - DNA, 25 bp, Homo sapien
ggagccagtcctatttcatttcacc

SEQ ID NO: 864734 - DNA, 25 bp, Homo sapien
tacttcacagaagcggaattgcgca

SEQ ID NO: 864735 - DNA, 25 bp, Homo sapien
tgacggacgtgcgaggttttcacat

SEQ ID NO: 864736 - DNA, 25 bp, Homo sapien
ttcacatcgtggctcctgtaagcag

SEQ ID NO: 864737 - DNA, 25 bp, Homo sapien
attacgtgtcccaggttcgtccgcg

SEQ ID NO: 864738 - DNA, 25 bp, Homo sapien
gcagctggtgattcagcctctccct

SEQ ID NO: 864739 - DNA, 25 bp, Homo sapien
ccaccatggcggctgtctccccacc

SEQ ID NO: 864740 - DNA, 25 bp, Homo sapien
taaagcgagttcttcaggctggtgg

SEQ ID NO: 864741 - DNA, 25 bp, Homo sapien
cctcagggacttgcgggaaaatatt

SEQ ID NO: 864742 - DNA, 25 bp, Homo sapien
taaagatgatacgtacaacaaccag

SEQ ID NO: 864743 - DNA, 25 bp, Homo sapien
taaatgggcctatgtgatggaaaac

SEQ ID NO: 864744 - DNA, 25 bp, Homo sapien
tgcagctgcacgtacagctcacagc

SEQ ID NO: 864745 - DNA, 25 bp, Homo sapien
ttctcgaagtgctcccggaggaact

SEQ ID NO: 864746 - DNA, 25 bp, Homo sapien
gtctttgaggacctgctggatcccg

SEQ ID NO: 864747 - DNA, 25 bp, Homo sapien
gatgcagaggtggacgatacagtct

SEQ ID NO: 864748 - DNA, 25 bp, Homo sapien
cgagcgagcgggtccccgcactgca

SEQ ID NO: 864749 - DNA, 25 bp, Homo sapien
agcgagcgagcgggtccccgcactg

SEQ ID NO: 864750 - DNA, 25 bp, Homo sapien
agcgagcgggtccccgcactgcagc

SEQ ID NO: 864751 - DNA, 25 bp, Homo sapien
gagcgagcgagcgggtccccgcact

SEQ ID NO: 864752 - DNA, 25 bp, Homo sapien
cacactcacctgtccagctttcttg

SEQ ID NO: 864753 - DNA, 25 bp, Homo sapien
acactcacctgtccagctttcttgt

SEQ ID NO: 864754 - DNA, 25 bp, Homo sapien
cactcacctgtccagctttcttgtt

SEQ ID NO: 864755 - DNA, 25 bp, Homo sapien
cagcagggctgacattgcctcagcc

SEQ ID NO: 864756 - DNA, 25 bp, Homo sapien
gcagggctgacattgcctcagcctc

SEQ ID NO: 864757 - DNA, 25 bp, Homo sapien
agcagggctgacattgcctcagcct

SEQ ID NO: 864758 - DNA, 25 bp, Homo sapien
cacaccgccacacctggtacttaaa

SEQ ID NO: 864759 - DNA, 25 bp, Homo sapien
ggtgcacaccgccacacctggtact

SEQ ID NO: 864760 - DNA, 25 bp, Homo sapien
ctcccacttcaacatccagagtagt

SEQ ID NO: 864761 - DNA, 25 bp, Homo sapien
cacttcaacatccagagtagttggg

SEQ ID NO: 864762 - DNA, 25 bp, Homo sapien
tctgcatggcgaagagaccaacaca

SEQ ID NO: 864763 - DNA, 25 bp, Homo sapien
ttcctgggtgcggttcctgagcctt

SEQ ID NO: 864764 - DNA, 25 bp, Homo sapien
gctgcattcactgcgcaacgtccgt

SEQ ID NO: 864765 - DNA, 25 bp, Homo sapien
gatgctttgttaagctgctctggcc

SEQ ID NO: 864766 - DNA, 25 bp, Homo sapien
gaaactgcatgtgattgtggctgat

SEQ ID NO: 864767 - DNA, 25 bp, Homo sapien
catggagcacgcagcacatagtagg

SEQ ID NO: 864768 - DNA, 25 bp, Homo sapien
taggagcccaagaaccgtgaacagt

SEQ ID NO: 864769 - DNA, 25 bp, Homo sapien
gctgatgggagaggccactcatcct

SEQ ID NO: 864770 - DNA, 25 bp, Homo sapien
tctttgtagcgacgaggtgtcacta

SEQ ID NO: 864771 - DNA, 25 bp, Homo sapien
cgacgaggtgtcactatttggccca

SEQ ID NO: 864772 - DNA, 25 bp, Homo sapien
ttttaatatttctttgtagcgacga

SEQ ID NO: 864773 - DNA, 25 bp, Homo sapien
tatttctttgtagcgacgaggtgtc

SEQ ID NO: 864774 - DNA, 25 bp, Homo sapien
tgccacgtgctccttgccccgtgac

SEQ ID NO: 864775 - DNA, 25 bp, Homo sapien
cacgtgctccttgccccgtgacccc

SEQ ID NO: 864776 - DNA, 25 bp, Homo sapien
gccacgtgctccttgccccgtgacc

SEQ ID NO: 864777 - DNA, 25 bp, Homo sapien
cgtgctccttgccccgtgacccctg

SEQ ID NO: 864778 - DNA, 25 bp, Homo sapien
ccgtgtggccgccattgaagccaca

SEQ ID NO: 864779 - DNA, 25 bp, Homo sapien
aagccacaggcgcagtgatccattt

SEQ ID NO: 864780 - DNA, 25 bp, Homo sapien
gacgacgtgctttcccattttgctc

SEQ ID NO: 864781 - DNA, 25 bp, Homo sapien
ttggcaacgggaagtccgtggacga

SEQ ID NO: 864782 - DNA, 25 bp, Homo sapien
cagcggaagttgagtcaccatgtac

SEQ ID NO: 864783 - DNA, 25 bp, Homo sapien
tcaggccagcggaagttgagtcacc

SEQ ID NO: 864784 - DNA, 25 bp, Homo sapien
tggagctggcgtgggttcggcacca

SEQ ID NO: 864785 - DNA, 25 bp, Homo sapien
ttgagtcaccatgtacgctggccgg

SEQ ID NO: 864786 - DNA, 25 bp, Homo sapien
ttagaaagctgacatcacattgttg

SEQ ID NO: 864787 - DNA, 25 bp, Homo sapien
agaaagctgacatcacattgttgat

SEQ ID NO: 864788 - DNA, 25 bp, Homo sapien
tagaaagctgacatcacattgttga

SEQ ID NO: 864789 - DNA, 25 bp, Homo sapien
tttcctgctcgatgtgtgctgctgg

SEQ ID NO: 864790 - DNA, 25 bp, Homo sapien
tgctgcagttttcctgctcgatgtg

SEQ ID NO: 864791 - DNA, 25 bp, Homo sapien
gcagttttcctgctcgatgtgtgct

SEQ ID NO: 864792 - DNA, 25 bp, Homo sapien
ctttgctgcagttttcctgctcgat

SEQ ID NO: 864793 - DNA, 25 bp, Homo sapien
tcatattgttgctcatagtgttgtt

SEQ ID NO: 864794 - DNA, 25 bp, Homo sapien
gctcatattgttgctcatagtgttg

SEQ ID NO: 864795 - DNA, 25 bp, Homo sapien
ctcatattgttgctcatagtgttgt

SEQ ID NO: 864796 - DNA, 25 bp, Homo sapien
gctcatattgctcatggtgttgttc

SEQ ID NO: 864797 - DNA, 25 bp, Homo sapien
ggtgtagctgcttacaacgtcgctg

SEQ ID NO: 864798 - DNA, 25 bp, Homo sapien
tgctcacagtgtagttgttcatggt

SEQ ID NO: 864799 - DNA, 25 bp, Homo sapien
catattgttgctcacggttttcttc

SEQ ID NO: 864800 - DNA, 25 bp, Homo sapien
gatgaggggcttatcatttcaccaa

SEQ ID NO: 864801 - DNA, 25 bp, Homo sapien
tcatttcaccaagacagagctcagc

SEQ ID NO: 864802 - DNA, 25 bp, Homo sapien
tgcatcctgggcagagcacgtctct

SEQ ID NO: 864803 - DNA, 25 bp, Homo sapien
cacaagggtgcattgaactctgggt

SEQ ID NO: 864804 - DNA, 25 bp, Homo sapien
tcgcaggcgtgtctctctcatcata

SEQ ID NO: 864805 - DNA, 25 bp, Homo sapien
tctctgatcatatggcgacggcttc

SEQ ID NO: 864806 - DNA, 25 bp, Homo sapien
tcatcatatggcgatggcttcgcag

SEQ ID NO: 864807 - DNA, 25 bp, Homo sapien
ctctgatcatatggcgacggcttcg

SEQ ID NO: 864808 - DNA, 25 bp, Homo sapien
ccctgctgcccgtggactatagtgt

SEQ ID NO: 864809 - DNA, 25 bp, Homo sapien
tgtacccggccccagtgcatggtgg

SEQ ID NO: 864810 - DNA, 25 bp, Homo sapien
aaaggaacgtgcctcattcagtggt

SEQ ID NO: 864811 - DNA, 25 bp, Homo sapien
cagcgtcttcgggtcctgtgggtct

SEQ ID NO: 864812 - DNA, 25 bp, Homo sapien
aggcatgtgtgatactgtgatacag

SEQ ID NO: 864813 - DNA, 25 bp, Homo sapien
cagtgatacttttcgttatgtttaa

SEQ ID NO: 864814 - DNA, 25 bp, Homo sapien
gtcacttcaaacacttacactttct

SEQ ID NO: 864815 - DNA, 25 bp, Homo sapien
tgcagtgtgtgtaaatcacattggg

SEQ ID NO: 864816 - DNA, 25 bp, Homo sapien
cagctgcgtccggtttcccggcgtg

SEQ ID NO: 864817 - DNA, 25 bp, Homo sapien
tgcgatgtcggatcttcctggtgtg

SEQ ID NO: 864818 - DNA, 25 bp, Homo sapien
ccggttatgcgatgtcggatcttcc

SEQ ID NO: 864819 - DNA, 25 bp, Homo sapien
gcctggatgtgctgactttgccttt

SEQ ID NO: 864820 - DNA, 25 bp, Homo sapien
gtagtgttaccggaagccattgtgt

SEQ ID NO: 864821 - DNA, 25 bp, Homo sapien
tagattttaagcctcacgtgcgcag

SEQ ID NO: 864822 - DNA, 25 bp, Homo sapien
tgtggttgcccctataggtagcagg

SEQ ID NO: 864823 - DNA, 25 bp, Homo sapien
aattaaaagtaagtcgcagccgctc

SEQ ID NO: 864824 - DNA, 25 bp, Homo sapien
ggtctcgaactctccggctgaaacg

SEQ ID NO: 864825 - DNA, 25 bp, Homo sapien
tgatgactatatggaggctctttat

SEQ ID NO: 864826 - DNA, 25 bp, Homo sapien
ggctgaaacgaacctcctaactcag

SEQ ID NO: 864827 - DNA, 25 bp, Homo sapien
ttaaatcaccgaatcaatgatgact

SEQ ID NO: 864828 - DNA, 25 bp, Homo sapien
ccgggacaagcacagcgccagccgc

SEQ ID NO: 864829 - DNA, 25 bp, Homo sapien
gcgtggcccgggacaagcacagcgc

SEQ ID NO: 864830 - DNA, 25 bp, Homo sapien
aaaggcctccagaggcgtggcccgg

SEQ ID NO: 864831 - DNA, 25 bp, Homo sapien
aaggcctccagaggcgtggcccggg

SEQ ID NO: 864832 - DNA, 25 bp, Homo sapien
accatgcccggcaaggccaggaatt

SEQ ID NO: 864833 - DNA, 25 bp, Homo sapien
catgcccggcaaggccaggaatttc

SEQ ID NO: 864834 - DNA, 25 bp, Homo sapien
tgcccggcaaggccaggaatttcaa

SEQ ID NO: 864835 - DNA, 25 bp, Homo sapien
cccggcaaggccaggaatttcaaga

SEQ ID NO: 864836 - DNA, 25 bp, Homo sapien
cctctgcggatgcttcccgcccaaa

SEQ ID NO: 864837 - DNA, 25 bp, Homo sapien
atttcctctgcggatgcttcccgcc

SEQ ID NO: 864838 - DNA, 25 bp, Homo sapien
ttcctctgcggatgcttcccgccca

SEQ ID NO: 864839 - DNA, 25 bp, Homo sapien
catttcctctgcggatgcttcccgc

SEQ ID NO: 864840 - DNA, 25 bp, Homo sapien
gaagtggcgtctcatttggctgtga

SEQ ID NO: 864841 - DNA, 25 bp, Homo sapien
tcacgcatgttgtagactgtatcag

SEQ ID NO: 864842 - DNA, 25 bp, Homo sapien
gatggaaaccctatacctgttaagc

SEQ ID NO: 864843 - DNA, 25 bp, Homo sapien
acttgggctgtttgcacctgttggc

SEQ ID NO: 864844 - DNA, 25 bp, Homo sapien
ttgcatgtcataacgcccactggtg

SEQ ID NO: 864845 - DNA, 25 bp, Homo sapien
cacagcgggaaagggagttcccaca

SEQ ID NO: 864846 - DNA, 25 bp, Homo sapien
agttaagcggtcctgaacacagcgg

SEQ ID NO: 864847 - DNA, 25 bp, Homo sapien
cctggaggctgttgaattgcatgtc

SEQ ID NO: 864848 - DNA, 25 bp, Homo sapien
gtttcatcatttccaaaacaagtga

SEQ ID NO: 864849 - DNA, 25 bp, Homo sapien
tcatcatttccaaaacaagtgaaga

SEQ ID NO: 864850 - DNA, 25 bp, Homo sapien
cttttcctgttgtttcatcatttcc

SEQ ID NO: 864851 - DNA, 25 bp, Homo sapien
caaaacaagtgaagaaacgttgcat

SEQ ID NO: 864852 - DNA, 25 bp, Homo sapien
cagggcccaagctcagccttgcgtt

SEQ ID NO: 864853 - DNA, 25 bp, Homo sapien
gggcccaagctcagccttgcgtttg

SEQ ID NO: 864854 - DNA, 25 bp, Homo sapien
tcagggcccaagctcagccttgcgt

SEQ ID NO: 864855 - DNA, 25 bp, Homo sapien
agggcccaagctcagccttgcgttt

SEQ ID NO: 864856 - DNA, 25 bp, Homo sapien
gctgtcccggggttctcgtcagcct

SEQ ID NO: 864857 - DNA, 25 bp, Homo sapien
taacgtgtgcggcttgggagtcgtt

SEQ ID NO: 864858 - DNA, 25 bp, Homo sapien
ggcttgggagtcgttggcctcccca

SEQ ID NO: 864859 - DNA, 25 bp, Homo sapien
gggttctcctaggcacctgcaggac

SEQ ID NO: 864860 - DNA, 25 bp, Homo sapien
tctgtagatgattgctagtgcgcca

SEQ ID NO: 864861 - DNA, 25 bp, Homo sapien
tagatgattgctagtgcgccagcgg

SEQ ID NO: 864862 - DNA, 25 bp, Homo sapien
tgtagatgattgctagtgcgccagc

SEQ ID NO: 864863 - DNA, 25 bp, Homo sapien
atgattgctagtgcgccagcggagt

SEQ ID NO: 864864 - DNA, 25 bp, Homo sapien
gcagcgccgtctccgggatcccctg

SEQ ID NO: 864865 - DNA, 25 bp, Homo sapien
gatctcctgggggttactccgcagt

SEQ ID NO: 864866 - DNA, 25 bp, Homo sapien
gttactccgcagtccagtctccggg

SEQ ID NO: 864867 - DNA, 25 bp, Homo sapien
ttactccgcagtccagtctccggga

SEQ ID NO: 864868 - DNA, 25 bp, Homo sapien
cgccagcggagttggcggccttccc

SEQ ID NO: 864869 - DNA, 25 bp, Homo sapien
agcgccgtgcgccagcggagttggc

SEQ ID NO: 864870 - DNA, 25 bp, Homo sapien
gcgccgtgcgccagcggagttggcg

SEQ ID NO: 864871 - DNA, 25 bp, Homo sapien
cgtgcgccagcggagttggcggcct

SEQ ID NO: 864872 - DNA, 25 bp, Homo sapien
gcgccgtgcgccagcggagttggcg

SEQ ID NO: 864873 - DNA, 25 bp, Homo sapien
cgccagcggagttggcggccttccc

SEQ ID NO: 864874 - DNA, 25 bp, Homo sapien
cgtgcgccagcggagttggcggcct

SEQ ID NO: 864875 - DNA, 25 bp, Homo sapien
agcgccgtgcgccagcggagttggc

SEQ ID NO: 864876 - DNA, 25 bp, Homo sapien
tccccaagtgattatctttggtgtc

SEQ ID NO: 864877 - DNA, 25 bp, Homo sapien
cttccccaagtgattatctttggtg

SEQ ID NO: 864878 - DNA, 25 bp, Homo sapien
ccaagtgattatctttggtgtccat

SEQ ID NO: 864879 - DNA, 25 bp, Homo sapien
ctcttccccaagtgattatctttgg

SEQ ID NO: 864880 - DNA, 25 bp, Homo sapien
tgcgtgtgttgcagctcatgccagt

SEQ ID NO: 864881 - DNA, 25 bp, Homo sapien
gctagccttgcacatcctctgatca

SEQ ID NO: 864882 - DNA, 25 bp, Homo sapien
ttgagcttggcgtcggtgagttccc

SEQ ID NO: 864883 - DNA, 25 bp, Homo sapien
catcagggtgcgagaagcacttgag

SEQ ID NO: 864884 - DNA, 25 bp, Homo sapien
tcccagtttctacagactgccattg

SEQ ID NO: 864885 - DNA, 25 bp, Homo sapien
cctgcaggcgacgactgtaagggca

SEQ ID NO: 864886 - DNA, 25 bp, Homo sapien
gacagagtttgcttgtgaatccgcc

SEQ ID NO: 864887 - DNA, 25 bp, Homo sapien
tgctatgcacggctgagatggacag

SEQ ID NO: 864888 - DNA, 25 bp, Homo sapien
cacagccgcccactcgcagtcgcca

SEQ ID NO: 864889 - DNA, 25 bp, Homo sapien
gtgcaggttgtctctcgccccgtct

SEQ ID NO: 864890 - DNA, 25 bp, Homo sapien
actcgcagtcgccacggctgcccgg

SEQ ID NO: 864891 - DNA, 25 bp, Homo sapien
cacatctgggcatgtgcaggttgtc

SEQ ID NO: 864892 - DNA, 25 bp, Homo sapien
aataattgtctcacctgctaatgaa

SEQ ID NO: 864893 - DNA, 25 bp, Homo sapien
ttgtctcacctgctaatgaataaac

SEQ ID NO: 864894 - DNA, 25 bp, Homo sapien
taattgtctcacctgctaatgaata

SEQ ID NO: 864895 - DNA, 25 bp, Homo sapien
tctcacctgctaatgaataaacata

SEQ ID NO: 864896 - DNA, 25 bp, Homo sapien
tggagacggcgagggccttgggctc

SEQ ID NO: 864897 - DNA, 25 bp, Homo sapien
gagacggcgagggccttgggctctc

SEQ ID NO: 864898 - DNA, 25 bp, Homo sapien
ccgaggggcgctggatggcgtgctg

SEQ ID NO: 864899 - DNA, 25 bp, Homo sapien
cccgaggggcgctggatggcgtgct

SEQ ID NO: 864900 - DNA, 25 bp, Homo sapien
tggatcagctaaagtcagagctgtc

SEQ ID NO: 864901 - DNA, 25 bp, Homo sapien
cagtcgagcacctccagctggagct

SEQ ID NO: 864902 - DNA, 25 bp, Homo sapien
gagctgtccagctggcgacacgtga

SEQ ID NO: 864903 - DNA, 25 bp, Homo sapien
gacacgtgaagaccggctgtgagac

SEQ ID NO: 864904 - DNA, 25 bp, Homo sapien
gaaactcctgttttccgaagatcag

SEQ ID NO: 864905 - DNA, 25 bp, Homo sapien
tcacagtttgtgagcaaaggcgact

SEQ ID NO: 864906 - DNA, 25 bp, Homo sapien
gctcccaacctcagaagccgtggtg

SEQ ID NO: 864907 - DNA, 25 bp, Homo sapien
cgaagatcagcaaggcggttctctg

SEQ ID NO: 864908 - DNA, 25 bp, Homo sapien
ttcccaagataagaccgggatggtg

SEQ ID NO: 864909 - DNA, 25 bp, Homo sapien
aagaccgggatggtggactttgctc

SEQ ID NO: 864910 - DNA, 25 bp, Homo sapien
tgaagctgtattcccaagataagac

SEQ ID NO: 864911 - DNA, 25 bp, Homo sapien
cgtgaacagcgccttgaagctgtat

SEQ ID NO: 864912 - DNA, 25 bp, Homo sapien
gatgagtctgtttgggatcccgctg

SEQ ID NO: 864913 - DNA, 25 bp, Homo sapien
tttgggatcccgctgtggtacttct

SEQ ID NO: 864914 - DNA, 25 bp, Homo sapien
ttacgaaaccaaaacggcgctgatg

SEQ ID NO: 864915 - DNA, 25 bp, Homo sapien
catcttgagtactcgctgttctgaa

SEQ ID NO: 864916 - DNA, 25 bp, Homo sapien
tggaacttcgtaagatgaacacgtc

SEQ ID NO: 864917 - DNA, 25 bp, Homo sapien
tggcagcgttcccacaccgaggagt

SEQ ID NO: 864918 - DNA, 25 bp, Homo sapien
tgaacacgtctgtggaactggtacc

SEQ ID NO: 864919 - DNA, 25 bp, Homo sapien
taccacaagaagtggcagcgttccc

SEQ ID NO: 864920 - DNA, 25 bp, Homo sapien
catgaagtgcctgtgacctgacgtt

SEQ ID NO: 864921 - DNA, 25 bp, Homo sapien
tctgcacagggttgccacagtgttc

SEQ ID NO: 864922 - DNA, 25 bp, Homo sapien
ttctgtgccagctcacgagtgccac

SEQ ID NO: 864923 - DNA, 25 bp, Homo sapien
tgtatgtggaacaacgccaagacgg

SEQ ID NO: 864924 - DNA, 25 bp, Homo sapien
cctgcagtgttgtcagtgtgatgct

SEQ ID NO: 864925 - DNA, 25 bp, Homo sapien
ggcctgcagtgttgtcagtgtgatg

SEQ ID NO: 864926 - DNA, 25 bp, Homo sapien
tggcctgcagtgttgtcagtgtgat

SEQ ID NO: 864927 - DNA, 25 bp, Homo sapien
gcctgcagtgttgtcagtgtgatgc

SEQ ID NO: 864928 - DNA, 25 bp, Homo sapien
catttaccccggtaactgctgggca

SEQ ID NO: 864929 - DNA, 25 bp, Homo sapien
tggagcacatccctaagacgctgtc

SEQ ID NO: 864930 - DNA, 25 bp, Homo sapien
ggtacctggtggtgaggctctccat

SEQ ID NO: 864931 - DNA, 25 bp, Homo sapien
tgctgggcatttaaaggctcccagg

SEQ ID NO: 864932 - DNA, 25 bp, Homo sapien
aaggtgttctggcaactggatgacg

SEQ ID NO: 864933 - DNA, 25 bp, Homo sapien
tacactgaccaaggtagacacgcct

SEQ ID NO: 864934 - DNA, 25 bp, Homo sapien
gatgaaagcaagtgacgtgagcgca

SEQ ID NO: 864935 - DNA, 25 bp, Homo sapien
ccaagttgcctgtgaaaggtgttct

SEQ ID NO: 864936 - DNA, 25 bp, Homo sapien
acagttcacgtatgatcaggatggg

SEQ ID NO: 864937 - DNA, 25 bp, Homo sapien
atcaggatggggagtcgctccagat

SEQ ID NO: 864938 - DNA, 25 bp, Homo sapien
tctgggacagttcacgtatgatcag

SEQ ID NO: 864939 - DNA, 25 bp, Homo sapien
tgggacagttcacgtatgatcagga

SEQ ID NO: 864940 - DNA, 25 bp, Homo sapien
gctttccaaatagtggaacttcgga

SEQ ID NO: 864941 - DNA, 25 bp, Homo sapien
ttcagagttcatggcgaacctgtca

SEQ ID NO: 864942 - DNA, 25 bp, Homo sapien
aaagacccgacgacacagctttcca

SEQ ID NO: 864943 - DNA, 25 bp, Homo sapien
catcctgagtatacctgtctgtatc

SEQ ID NO: 864944 - DNA, 25 bp, Homo sapien
taagacagttttcagtgtaccgtaa

SEQ ID NO: 864945 - DNA, 25 bp, Homo sapien
aagacaaaacgatggtgctgactgg

SEQ ID NO: 864946 - DNA, 25 bp, Homo sapien
cacgaacccgttacatttcaggacg

SEQ ID NO: 864947 - DNA, 25 bp, Homo sapien
ataagaggagccgtctggtgtgtca

SEQ ID NO: 864948 - DNA, 25 bp, Homo sapien
cggcgcccggccagtagactttact

SEQ ID NO: 864949 - DNA, 25 bp, Homo sapien
tgtgatagcgccttcaacccgattg

SEQ ID NO: 864950 - DNA, 25 bp, Homo sapien
ggaggcactaaaccgtacaacgcga

SEQ ID NO: 864951 - DNA, 25 bp, Homo sapien
tttagcagctcccaaatggcacggg

SEQ ID NO: 864952 - DNA, 25 bp, Homo sapien
gatgcctgccgtgcctaggaatttg

SEQ ID NO: 864953 - DNA, 25 bp, Homo sapien
tatgtttattttagcctcgggcagg

SEQ ID NO: 864954 - DNA, 25 bp, Homo sapien
tcaagacacagaagataccacggca

SEQ ID NO: 864955 - DNA, 25 bp, Homo sapien
ggagcgtccgcagttccttttatcg

SEQ ID NO: 864956 - DNA, 25 bp, Homo sapien
gaattcattcaccacggaggctggg

SEQ ID NO: 864957 - DNA, 25 bp, Homo sapien
agatcatttcagcaccgggtaccaa

SEQ ID NO: 864958 - DNA, 25 bp, Homo sapien
gcgtgtgtcttcatggtagaaccat

SEQ ID NO: 864959 - DNA, 25 bp, Homo sapien
gactagggtttgtcctacagatcat

SEQ ID NO: 864960 - DNA, 25 bp, Homo sapien
ttccgcggtgtatatggaccacatc

SEQ ID NO: 864961 - DNA, 25 bp, Homo sapien
gaaataacatgttctgggccccacc

SEQ ID NO: 864962 - DNA, 25 bp, Homo sapien
aaggacatttggctcgcaggcacag

SEQ ID NO: 864963 - DNA, 25 bp, Homo sapien
gatacagatgttttggccggcagag

SEQ ID NO: 864964 - DNA, 25 bp, Homo sapien
ctactgaaaccggtgagctgctcca

SEQ ID NO: 864965 - DNA, 25 bp, Homo sapien
cattctgcagtcaggacgaaccggt

SEQ ID NO: 864966 - DNA, 25 bp, Homo sapien
ttgacccacaataaagcacaggcct

SEQ ID NO: 864967 - DNA, 25 bp, Homo sapien
gaaggcttgtgtgaaccgttgcgca

SEQ ID NO: 864968 - DNA, 25 bp, Homo sapien
cctacgggtacttgcagctgtgtcc

SEQ ID NO: 864969 - DNA, 25 bp, Homo sapien
tggacagcgagtgagcgaccacctt

SEQ ID NO: 864970 - DNA, 25 bp, Homo sapien
gcgagtgagcgaccaccttctgtgc

SEQ ID NO: 864971 - DNA, 25 bp, Homo sapien
cccacagctgtgtccacgcggggag

SEQ ID NO: 864972 - DNA, 25 bp, Homo sapien
acttcgcggcggagtcacggtccgt

SEQ ID NO: 864973 - DNA, 25 bp, Homo sapien
agcccggcctgccttgacaggaagg

SEQ ID NO: 864974 - DNA, 25 bp, Homo sapien
cgtgacacacaacaggcgctcaata

SEQ ID NO: 864975 - DNA, 25 bp, Homo sapien
ccgggacctgtgtggataatccacc

SEQ ID NO: 864976 - DNA, 25 bp, Homo sapien
gggttcagacaccactgtcggcgag

SEQ ID NO: 864977 - DNA, 25 bp, Homo sapien
gttcccacagccgtggtgggcggct

SEQ ID NO: 864978 - DNA, 25 bp, Homo sapien
ttcccacagccgtggtgggcggctc

SEQ ID NO: 864979 - DNA, 25 bp, Homo sapien
ccacagccgtggtgggcggctcctg

SEQ ID NO: 864980 - DNA, 25 bp, Homo sapien
tcccacagccgtggtgggcggctcc

SEQ ID NO: 864981 - DNA, 25 bp, Homo sapien
cagcagcatgacggggttagagatc

SEQ ID NO: 864982 - DNA, 25 bp, Homo sapien
ggttagagatcaggcccagggcctg

SEQ ID NO: 864983 - DNA, 25 bp, Homo sapien
ctggaagctgaagctcgggccctac

SEQ ID NO: 864984 - DNA, 25 bp, Homo sapien
ctgcctgccttgaggttccagagaa

SEQ ID NO: 864985 - DNA, 25 bp, Homo sapien
tgagtccaatgtccgtggtcctcca

SEQ ID NO: 864986 - DNA, 25 bp, Homo sapien
cagtgagtccaatgtccgtggtcct

SEQ ID NO: 864987 - DNA, 25 bp, Homo sapien
agtccaatgtccgtggtcctccagc

SEQ ID NO: 864988 - DNA, 25 bp, Homo sapien
ccacagtgagtccaatgtccgtggt

SEQ ID NO: 864989 - DNA, 25 bp, Homo sapien
ggtttatgcttgaagtgcgcctcca

SEQ ID NO: 864990 - DNA, 25 bp, Homo sapien
aggtttatgcttgaagtgcgcctcc

SEQ ID NO: 864991 - DNA, 25 bp, Homo sapien
caaacagaaacttgcggtcgggcgt

SEQ ID NO: 864992 - DNA, 25 bp, Homo sapien
actccgtctcgcaggcaaacagaaa

SEQ ID NO: 864993 - DNA, 25 bp, Homo sapien
tccttgctgccaatgaagacttccc

SEQ ID NO: 864994 - DNA, 25 bp, Homo sapien
cgggaacccatgcagcaccgtgtag

SEQ ID NO: 864995 - DNA, 25 bp, Homo sapien
atgagcctgcggtcatccatggtga

SEQ ID NO: 864996 - DNA, 25 bp, Homo sapien
catggtgaaccagcgcttccggaag

SEQ ID NO: 864997 - DNA, 25 bp, Homo sapien
tgcggtcatccatggtgaaccagcg

SEQ ID NO: 864998 - DNA, 25 bp, Homo sapien
catccatggtgaaccagcgcttccg

SEQ ID NO: 864999 - DNA, 25 bp, Homo sapien
tcgccgaggcaggccctacatccag

SEQ ID NO: 865000 - DNA, 25 bp, Homo sapien
gtcagagagggcccgtgaccggcag

SEQ ID NO: 865001 - DNA, 25 bp, Homo sapien
gtcgccgaggcaggccctacatcca

SEQ ID NO: 865002 - DNA, 25 bp, Homo sapien
cccgtgaccggcaggtcgccgaggc

SEQ ID NO: 865003 - DNA, 25 bp, Homo sapien
tccatgtagccttccttcaggtagt

SEQ ID NO: 865004 - DNA, 25 bp, Homo sapien
ccttcaggtagttcctggagagctt

SEQ ID NO: 865005 - DNA, 25 bp, Homo sapien
ttctccatgtagccttccttcaggt

SEQ ID NO: 865006 - DNA, 25 bp, Homo sapien
cttcaggtagttcctggagagcttt

SEQ ID NO: 865007 - DNA, 25 bp, Homo sapien
tgcaggtagtggaagcgagcagctc

SEQ ID NO: 865008 - DNA, 25 bp, Homo sapien
agctcggagtgcattgaaccagtcc

SEQ ID NO: 865009 - DNA, 25 bp, Homo sapien
ccctgggaatgccacctgcaggtag

SEQ ID NO: 865010 - DNA, 25 bp, Homo sapien
aagcgagcagctcggagtgcattga

SEQ ID NO: 865011 - DNA, 25 bp, Homo sapien
ggtgggcacaggcttgggctgagga

SEQ ID NO: 865012 - DNA, 25 bp, Homo sapien
aaaggtgggcacaggcttgggctga

SEQ ID NO: 865013 - DNA, 25 bp, Homo sapien
aaggtgggcacaggcttgggctgag

SEQ ID NO: 865014 - DNA, 25 bp, Homo sapien
caaaggtgggcacaggcttgggctg

SEQ ID NO: 865015 - DNA, 25 bp, Homo sapien
tttataaacgcccttggagctgtgg

SEQ ID NO: 865016 - DNA, 25 bp, Homo sapien
ctgtggcccctaccgagagtgggca

SEQ ID NO: 865017 - DNA, 25 bp, Homo sapien
atgacattataacctgcgccctggg

SEQ ID NO: 865018 - DNA, 25 bp, Homo sapien
tcagcctacagcctggagctggtga

SEQ ID NO: 865019 - DNA, 25 bp, Homo sapien
tgcccagcccgacttcccgccttct

SEQ ID NO: 865020 - DNA, 25 bp, Homo sapien
ttctcatgccgcctagctcaagtgc

SEQ ID NO: 865021 - DNA, 25 bp, Homo sapien
tagctcaagtgcctaccctcccgta

SEQ ID NO: 865022 - DNA, 25 bp, Homo sapien
acccgggcccgagtgctcgccagca

SEQ ID NO: 865023 - DNA, 25 bp, Homo sapien
gtggcgttcaggtgctcgatcttca

SEQ ID NO: 865024 - DNA, 25 bp, Homo sapien
atgaagatgttacgggtgctgttgt

SEQ ID NO: 865025 - DNA, 25 bp, Homo sapien
cccgtcctcatggtagatgaagatg

SEQ ID NO: 865026 - DNA, 25 bp, Homo sapien
ggtggccgatcttggccggctggaa

SEQ ID NO: 865027 - DNA, 25 bp, Homo sapien
gttgtcccggccacgcttccagaga

SEQ ID NO: 865028 - DNA, 25 bp, Homo sapien
tcagagcaccctctcgttctgtcag

SEQ ID NO: 865029 - DNA, 25 bp, Homo sapien
gtcccggccacgcttccagagaaaa

SEQ ID NO: 865030 - DNA, 25 bp, Homo sapien
tcagcacaaacttccggctcaaaaa

SEQ ID NO: 865031 - DNA, 25 bp, Homo sapien
ggaaacaaaaggagtgacgatggac

SEQ ID NO: 865032 - DNA, 25 bp, Homo sapien
acacgagtcggtgacagtggatggg

SEQ ID NO: 865033 - DNA, 25 bp, Homo sapien
aaaaggagtgacgatggacaggaca

SEQ ID NO: 865034 - DNA, 25 bp, Homo sapien
aacaaaaggagtgacgatggacagg

SEQ ID NO: 865035 - DNA, 25 bp, Homo sapien
gagaaaggagaaaggagaaaggaga

SEQ ID NO: 865036 - DNA, 25 bp, Homo sapien
gagaaaggagaaaggagaaaggaga

SEQ ID NO: 865037 - DNA, 25 bp, Homo sapien
cacagaaaagtagcccgggcatccc

SEQ ID NO: 865038 - DNA, 25 bp, Homo sapien
cctgggagcctaagcacctggacac

SEQ ID NO: 865039 - DNA, 25 bp, Homo sapien
agtagcccgggcatccccctgggag

SEQ ID NO: 865040 - DNA, 25 bp, Homo sapien
gcctaagcacctggacacgccacct

SEQ ID NO: 865041 - DNA, 25 bp, Homo sapien
agaggccagaggacccgtcctgagc

SEQ ID NO: 865042 - DNA, 25 bp, Homo sapien
cactccgagtctcgggcccgtggga

SEQ ID NO: 865043 - DNA, 25 bp, Homo sapien
acgctgctgtggcagacgatcacag

SEQ ID NO: 865044 - DNA, 25 bp, Homo sapien
cccgtgggatcgtcctggagctctg

SEQ ID NO: 865045 - DNA, 25 bp, Homo sapien
tgtccgtggttcctatcgttgcccg

SEQ ID NO: 865046 - DNA, 25 bp, Homo sapien
aggtcccgccgttggcagcagctgc

SEQ ID NO: 865047 - DNA, 25 bp, Homo sapien
catgtggcttgcagcatccgtgtcc

SEQ ID NO: 865048 - DNA, 25 bp, Homo sapien
tctggaactctgtgtcctgcggact

SEQ ID NO: 865049 - DNA, 25 bp, Homo sapien
tgagaaccagcgggccgtatcctgc

SEQ ID NO: 865050 - DNA, 25 bp, Homo sapien
caggttggtgcgtctggggccggca

SEQ ID NO: 865051 - DNA, 25 bp, Homo sapien
aggtcccagcttcgccctgcgtgga

SEQ ID NO: 865052 - DNA, 25 bp, Homo sapien
ccaggacagggaggcttccctgttc

SEQ ID NO: 865053 - DNA, 25 bp, Homo sapien
cgacctggaaggtgccgtggcccaa

SEQ ID NO: 865054 - DNA, 25 bp, Homo sapien
agcagccgcagtctacgaccccatg

SEQ ID NO: 865055 - DNA, 25 bp, Homo sapien
ggccacggcactcacggcaccttca

SEQ ID NO: 865056 - DNA, 25 bp, Homo sapien
tgctgccaggtaacacctggccacg

SEQ ID NO: 865057 - DNA, 25 bp, Homo sapien
acccccgaatggaagtgcgtggcca

SEQ ID NO: 865058 - DNA, 25 bp, Homo sapien
aggccacccccgaatggaagtgcgt

SEQ ID NO: 865059 - DNA, 25 bp, Homo sapien
gaatggaagtgcgtggccaccacca

SEQ ID NO: 865060 - DNA, 25 bp, Homo sapien
ccgaatggaagtgcgtggccaccac

SEQ ID NO: 865061 - DNA, 25 bp, Homo sapien
tgtcgctcgtacttggcccggatcc

SEQ ID NO: 865062 - DNA, 25 bp, Homo sapien
gcttctccgggtagatgaactcctg

SEQ ID NO: 865063 - DNA, 25 bp, Homo sapien
tagatgaactcctgtcgctcgtact

SEQ ID NO: 865064 - DNA, 25 bp, Homo sapien
ctgcttctccgggtagatgaactcc

SEQ ID NO: 865065 - DNA, 25 bp, Homo sapien
gccaataccattgcagaaaccacga

SEQ ID NO: 865066 - DNA, 25 bp, Homo sapien
tgaagccaataccattgcagaaacc

SEQ ID NO: 865067 - DNA, 25 bp, Homo sapien
ataccattgcagaaaccacgaccca

SEQ ID NO: 865068 - DNA, 25 bp, Homo sapien
tcgagtgaagccaataccattgcag

SEQ ID NO: 865069 - DNA, 25 bp, Homo sapien
aaacctggctctcgcggcgtcgttc

SEQ ID NO: 865070 - DNA, 25 bp, Homo sapien
tagaaggagggtactttggactcaa

SEQ ID NO: 865071 - DNA, 25 bp, Homo sapien
tcaaacctggctctcgcggcgtcgt

SEQ ID NO: 865072 - DNA, 25 bp, Homo sapien
cagtcggagggcgtgggccggtagt

SEQ ID NO: 865073 - DNA, 25 bp, Homo sapien
gctggctgcatcctgtgacccccat

SEQ ID NO: 865074 - DNA, 25 bp, Homo sapien
cgggtgtcccgtgggagagagctgg

SEQ ID NO: 865075 - DNA, 25 bp, Homo sapien
ccacaccgggtgtcccgtgggagag

SEQ ID NO: 865076 - DNA, 25 bp, Homo sapien
accgggtgtcccgtgggagagagct

SEQ ID NO: 865077 - DNA, 25 bp, Homo sapien
ccagatgtggctaggacagagtctc

SEQ ID NO: 865078 - DNA, 25 bp, Homo sapien
gctggtgagcgagagacccagatgt

SEQ ID NO: 865079 - DNA, 25 bp, Homo sapien
ggacccagaacatgtttacgaaaca

SEQ ID NO: 865080 - DNA, 25 bp, Homo sapien
aaagagccaacaggcgccagacacg

SEQ ID NO: 865081 - DNA, 25 bp, Homo sapien
gagggagcgaggcccacacagaccc

SEQ ID NO: 865082 - DNA, 25 bp, Homo sapien
gaaggacggagggacggagagacag

SEQ ID NO: 865083 - DNA, 25 bp, Homo sapien
ggaaggacggagggacggagagaca

SEQ ID NO: 865084 - DNA, 25 bp, Homo sapien
agggagcgaggcccacacagacccc

SEQ ID NO: 865085 - DNA, 25 bp, Homo sapien
caggcttagcccccggatgtccccg

SEQ ID NO: 865086 - DNA, 25 bp, Homo sapien
agcaggcttagcccccggatgtccc

SEQ ID NO: 865087 - DNA, 25 bp, Homo sapien
cttagcccccggatgtccccgctga

SEQ ID NO: 865088 - DNA, 25 bp, Homo sapien
gcttagcccccggatgtccccgctg

SEQ ID NO: 865089 - DNA, 25 bp, Homo sapien
gggtcagtggtggtgcagagccggg

SEQ ID NO: 865090 - DNA, 25 bp, Homo sapien
ggggccggggtcagtggtgctggag

SEQ ID NO: 865091 - DNA, 25 bp, Homo sapien
ggggccggggtcagtggtggtgcag

SEQ ID NO: 865092 - DNA, 25 bp, Homo sapien
cgggggccggggtcagtggtgctgg

SEQ ID NO: 865093 - DNA, 25 bp, Homo sapien
gggtcagtggtggtgcagagccggg

SEQ ID NO: 865094 - DNA, 25 bp, Homo sapien
ggccggggtcagtggtggtgcagag

SEQ ID NO: 865095 - DNA, 25 bp, Homo sapien
tggtggtgcagagccggggaccggg

SEQ ID NO: 865096 - DNA, 25 bp, Homo sapien
cagagccggggaccggggtcagtgg

SEQ ID NO: 865097 - DNA, 25 bp, Homo sapien
tcttctctgaaaggtaactcctaag

SEQ ID NO: 865098 - DNA, 25 bp, Homo sapien
cttaggagttacctttcagagaaga

SEQ ID NO: 865099 - DNA, 25 bp, Homo sapien
cgtctccctccccataggggcgtct

SEQ ID NO: 865100 - DNA, 25 bp, Homo sapien
gggtcctcgggtccagccagccagg

SEQ ID NO: 865101 - DNA, 25 bp, Homo sapien
ccacacaggcggagccgctggagag

SEQ ID NO: 865102 - DNA, 25 bp, Homo sapien
ctcacagagaggttggacccggcac

SEQ ID NO: 865103 - DNA, 25 bp, Homo sapien
gcccccagagtagcccaaggctcca

SEQ ID NO: 865104 - DNA, 25 bp, Homo sapien
ccttgctgacctgggggatattccg

SEQ ID NO: 865105 - DNA, 25 bp, Homo sapien
agacgcccagagtgtaggaggccca

SEQ ID NO: 865106 - DNA, 25 bp, Homo sapien
caggcagatgaagacgcccagagtg

SEQ ID NO: 865107 - DNA, 25 bp, Homo sapien
cccaggcgtccaggcggacggactt

SEQ ID NO: 865108 - DNA, 25 bp, Homo sapien
aggacggatggtagccgcggatgac

SEQ ID NO: 865109 - DNA, 25 bp, Homo sapien
ccccgaaggacggatggtagccgcg

SEQ ID NO: 865110 - DNA, 25 bp, Homo sapien
ctgcacacccccgaaggacggatgg

SEQ ID NO: 865111 - DNA, 25 bp, Homo sapien
cacacccccgaaggacggatggtag

SEQ ID NO: 865112 - DNA, 25 bp, Homo sapien
gccaggtactgccacagagcaaggc

SEQ ID NO: 865113 - DNA, 25 bp, Homo sapien
tggccacacggccacgtgccgcctc

SEQ ID NO: 865114 - DNA, 25 bp, Homo sapien
acgggtgacgggagaagcagttggg

SEQ ID NO: 865115 - DNA, 25 bp, Homo sapien
tcagccaccttggaccccaccaagt

SEQ ID NO: 865116 - DNA, 25 bp, Homo sapien
ccgcagtccgcgcagcgcgcgttcc

SEQ ID NO: 865117 - DNA, 25 bp, Homo sapien
gcccctgcgccatcccgggcggcct

SEQ ID NO: 865118 - DNA, 25 bp, Homo sapien
cccggctcgctagggccccgcgcag

SEQ ID NO: 865119 - DNA, 25 bp, Homo sapien
atgcgcccgcgatgccgatgccggg

SEQ ID NO: 865120 - DNA, 25 bp, Homo sapien
gcgccggttccgcattcccgccgcc

SEQ ID NO: 865121 - DNA, 25 bp, Homo sapien
ctgcctgggcgcgaggccgccccaa

SEQ ID NO: 865122 - DNA, 25 bp, Homo sapien
gcgcgaggccgccccaaaacctggc

SEQ ID NO: 865123 - DNA, 25 bp, Homo sapien
tgcctgggcgcgaggccgccccaaa

SEQ ID NO: 865124 - DNA, 25 bp, Homo sapien
gcctgggcgcgaggccgccccaaaa

SEQ ID NO: 865125 - DNA, 25 bp, Homo sapien
cggttccccccaagagcctgccgag

SEQ ID NO: 865126 - DNA, 25 bp, Homo sapien
aagagcctgccgaggcgggaaacgg

SEQ ID NO: 865127 - DNA, 25 bp, Homo sapien
cagagcctgccgaggcgggaaacgg

SEQ ID NO: 865128 - DNA, 25 bp, Homo sapien
ccccaagagcctgccgaggcgggaa

SEQ ID NO: 865129 - DNA, 25 bp, Homo sapien
gggaacgcttggaaaacgctctgga

SEQ ID NO: 865130 - DNA, 25 bp, Homo sapien
tcaggaagtcagtttgccttgctcc

SEQ ID NO: 865131 - DNA, 25 bp, Homo sapien
cagaggaaccgatacaggaagcttc

SEQ ID NO: 865132 - DNA, 25 bp, Homo sapien
taatgcttgcggtgctctaagccgc

SEQ ID NO: 865133 - DNA, 25 bp, Homo sapien
gaagccactgcacgtttgtaaggag

SEQ ID NO: 865134 - DNA, 25 bp, Homo sapien
gcagccatctcggtgatcagaccag

SEQ ID NO: 865135 - DNA, 25 bp, Homo sapien
gagtcaggttgtccacacaatggcg

SEQ ID NO: 865136 - DNA, 25 bp, Homo sapien
gacccagaaactcaaaggcagcgtt

SEQ ID NO: 865137 - DNA, 25 bp, Homo sapien
gacttgatcacaggtacgtacagga

SEQ ID NO: 865138 - DNA, 25 bp, Homo sapien
tctccggtaagaacacagtgcccat

SEQ ID NO: 865139 - DNA, 25 bp, Homo sapien
ggcccagccgcaataggtactcagt

SEQ ID NO: 865140 - DNA, 25 bp, Homo sapien
tgcagccgaatcaggtggtagaacc

SEQ ID NO: 865141 - DNA, 25 bp, Homo sapien
cagaagacagctggtgcgagcctaa

SEQ ID NO: 865142 - DNA, 25 bp, Homo sapien
caactttggcacagacgggctgaga

SEQ ID NO: 865143 - DNA, 25 bp, Homo sapien
gacatgtttaaccacgaaagggcca

SEQ ID NO: 865144 - DNA, 25 bp, Homo sapien
caaacacgaaaacatcctgctaggg

SEQ ID NO: 865145 - DNA, 25 bp, Homo sapien
cctctgattttccactagtcaagtc

SEQ ID NO: 865146 - DNA, 25 bp, Homo sapien
tctgattttccactagtcaagtctc

SEQ ID NO: 865147 - DNA, 25 bp, Homo sapien
ttccactagtcaagtctccaaatcc

SEQ ID NO: 865148 - DNA, 25 bp, Homo sapien
gattttccactagtcaagtctccaa

SEQ ID NO: 865149 - DNA, 25 bp, Homo sapien
gtctcaccatgctcgtcttgaactc

SEQ ID NO: 865150 - DNA, 25 bp, Homo sapien
ccactgcacccagccagctaatttt

SEQ ID NO: 865151 - DNA, 25 bp, Homo sapien
gggtctcaccatgctcgtcttgaac

SEQ ID NO: 865152 - DNA, 25 bp, Homo sapien
tggggtctcaccatgctcgtcttga

SEQ ID NO: 865153 - DNA, 25 bp, Homo sapien
ggcacaacggatttttgccttgagg

SEQ ID NO: 865154 - DNA, 25 bp, Homo sapien
tgagaaggcccatcatccttacggc

SEQ ID NO: 865155 - DNA, 25 bp, Homo sapien
atgtccacacgaataaccccgaaca

SEQ ID NO: 865156 - DNA, 25 bp, Homo sapien
acacacctgtgtggccggaaaggca

SEQ ID NO: 865157 - DNA, 25 bp, Homo sapien
cgctcaagaagaggttcccaagatt

SEQ ID NO: 865158 - DNA, 25 bp, Homo sapien
ccttaatgacaggtcggtagcaacc

SEQ ID NO: 865159 - DNA, 25 bp, Homo sapien
catgtataacgctatcgctcaagaa

SEQ ID NO: 865160 - DNA, 25 bp, Homo sapien
cattatgatgcacgatttggaaacc

SEQ ID NO: 865161 - DNA, 25 bp, Homo sapien
ctctccatcctgcattctaaatatt

SEQ ID NO: 865162 - DNA, 25 bp, Homo sapien
gaagacacttcatgaatttctcttt

SEQ ID NO: 865163 - DNA, 25 bp, Homo sapien
caaaattattgttatgaagacactt

SEQ ID NO: 865164 - DNA, 25 bp, Homo sapien
tcttttgattcctttctgcacaaag

SEQ ID NO: 865165 - DNA, 25 bp, Homo sapien
gtcccgaaattcatggcggtcgaca

SEQ ID NO: 865166 - DNA, 25 bp, Homo sapien
tggtcccgaaattcatggcggtcga

SEQ ID NO: 865167 - DNA, 25 bp, Homo sapien
tcccgaaattcatggcggtcgacat

SEQ ID NO: 865168 - DNA, 25 bp, Homo sapien
ggtcccgaaattcatggcggtcgac

SEQ ID NO: 865169 - DNA, 25 bp, Homo sapien
gttggcgactccggagtctgcgagc

SEQ ID NO: 865170 - DNA, 25 bp, Homo sapien
cagagcgggggtcttcttcccacct

SEQ ID NO: 865171 - DNA, 25 bp, Homo sapien
tcagagcgggggtcttcttcccacc

SEQ ID NO: 865172 - DNA, 25 bp, Homo sapien
gccgcacccggcatgagttatcagt

SEQ ID NO: 865173 - DNA, 25 bp, Homo sapien
gcacgcatgcccacgctaagtttgg

SEQ ID NO: 865174 - DNA, 25 bp, Homo sapien
gacgtgagggtcgtctccaggctaa

SEQ ID NO: 865175 - DNA, 25 bp, Homo sapien
gaggagcttggcaccttacgatcca

SEQ ID NO: 865176 - DNA, 25 bp, Homo sapien
cgggttttatttcaaatgcagccac

SEQ ID NO: 865177 - DNA, 25 bp, Homo sapien
gttttatttcaaatgcagccacaga

SEQ ID NO: 865178 - DNA, 25 bp, Homo sapien
tgggtcgggttttatttcaaatgca

SEQ ID NO: 865179 - DNA, 25 bp, Homo sapien
gtcgggttttatttcaaatgcagcc

SEQ ID NO: 865180 - DNA, 25 bp, Homo sapien
ggtacgtgatccgactccacaagct

SEQ ID NO: 865181 - DNA, 25 bp, Homo sapien
ggcggtttctgcacaggtacgtgat

SEQ ID NO: 865182 - DNA, 25 bp, Homo sapien
aggggctccccatgacccgcaatga

SEQ ID NO: 865183 - DNA, 25 bp, Homo sapien
cgcaatgacgctgtgtggggtcaaa

SEQ ID NO: 865184 - DNA, 25 bp, Homo sapien
gaatgcggcccacgcagggggatcg

SEQ ID NO: 865185 - DNA, 25 bp, Homo sapien
ggggaccaggaatgcggcccacgca

SEQ ID NO: 865186 - DNA, 25 bp, Homo sapien
gggaccaggaatgcggcccacgcag

SEQ ID NO: 865187 - DNA, 25 bp, Homo sapien
caggaatgcggcccacgcaggggga

SEQ ID NO: 865188 - DNA, 25 bp, Homo sapien
ggcgggaggagccagcatgccccaa

SEQ ID NO: 865189 - DNA, 25 bp, Homo sapien
gggaggagccagcatgccccaatct

SEQ ID NO: 865190 - DNA, 25 bp, Homo sapien
gaaggtgcaggtttgcagctggcgg

SEQ ID NO: 865191 - DNA, 25 bp, Homo sapien
gcggaaggtgcaggtttgcagctgg

SEQ ID NO: 865192 - DNA, 25 bp, Homo sapien
tgtcacagccgtcaccggccaagga

SEQ ID NO: 865193 - DNA, 25 bp, Homo sapien
atattcccggtagaaaaatagacat

SEQ ID NO: 865194 - DNA, 25 bp, Homo sapien
gctgaaggcactgaacctgccatca

SEQ ID NO: 865195 - DNA, 25 bp, Homo sapien
cgggtgattccagagcatccacgct

SEQ ID NO: 865196 - DNA, 25 bp, Homo sapien
tggaggagggaaggggcccttgcga

SEQ ID NO: 865197 - DNA, 25 bp, Homo sapien
ctggaggagggaaggggcccttgcg

SEQ ID NO: 865198 - DNA, 25 bp, Homo sapien
aagcccttgctcagccgctgccctg

SEQ ID NO: 865199 - DNA, 25 bp, Homo sapien
ccccaccaccggaggagctgaaagc

SEQ ID NO: 865200 - DNA, 25 bp, Homo sapien
aggagctgcaccctgtgtggtctga

SEQ ID NO: 865201 - DNA, 25 bp, Homo sapien
aggcagccctgcactgggcagcggc

SEQ ID NO: 865202 - DNA, 25 bp, Homo sapien
agctcccgcatcagggcttccgcct

SEQ ID NO: 865203 - DNA, 25 bp, Homo sapien
gctcccgcatcagggcttccgcctt

SEQ ID NO: 865204 - DNA, 25 bp, Homo sapien
cagctcccgcatcagggcttccgcc

SEQ ID NO: 865205 - DNA, 25 bp, Homo sapien
gccagcagggtggagaagtgctcat

SEQ ID NO: 865206 - DNA, 25 bp, Homo sapien
gggtggagaagtgctcatcgggaac

SEQ ID NO: 865207 - DNA, 25 bp, Homo sapien
ctgcaccgtcagctctcgggcccgg

SEQ ID NO: 865208 - DNA, 25 bp, Homo sapien
gcagggtggagaagtgctcatcggg

SEQ ID NO: 865209 - DNA, 25 bp, Homo sapien
tcgtcttctgaaacctccagttctt

SEQ ID NO: 865210 - DNA, 25 bp, Homo sapien
ctcgtcttctgaaacctccagttct

SEQ ID NO: 865211 - DNA, 25 bp, Homo sapien
cccccgtcccgctcctgcactaggg

SEQ ID NO: 865212 - DNA, 25 bp, Homo sapien
ccccgtcccgctcctgcactagggc

SEQ ID NO: 865213 - DNA, 25 bp, Homo sapien
gggcccctgtgaggtgcacccgggc

SEQ ID NO: 865214 - DNA, 25 bp, Homo sapien
ggcccctgtgaggtgcacccgggcc

SEQ ID NO: 865215 - DNA, 25 bp, Homo sapien
ttgagacgcacgtccgggacagaac

SEQ ID NO: 865216 - DNA, 25 bp, Homo sapien
ggacagaaccgcgtggggcagggcc

SEQ ID NO: 865217 - DNA, 25 bp, Homo sapien
tcaggcaggggttgagacgcacgtc

SEQ ID NO: 865218 - DNA, 25 bp, Homo sapien
gtgtgcgagtgaaggcttcgacccc

SEQ ID NO: 865219 - DNA, 25 bp, Homo sapien
gccagttcggcccccgagcgcctgg

SEQ ID NO: 865220 - DNA, 25 bp, Homo sapien
gcctcccgcagacgctgcctctcct

SEQ ID NO: 865221 - DNA, 25 bp, Homo sapien
agttcggcccccgagcgcctggcag

SEQ ID NO: 865222 - DNA, 25 bp, Homo sapien
tccagggccagttcggcccccgagc

SEQ ID NO: 865223 - DNA, 25 bp, Homo sapien
gccaggtgccaggattaactgccca

SEQ ID NO: 865224 - DNA, 25 bp, Homo sapien
gtgctacgacgaagagacagacagg

SEQ ID NO: 865225 - DNA, 25 bp, Homo sapien
gtcaaggaacacattaggcttcggg

SEQ ID NO: 865226 - DNA, 25 bp, Homo sapien
atcctgctaagcctgtgctacgacg

SEQ ID NO: 865227 - DNA, 25 bp, Homo sapien
gaagacctagtagaacttagcccaa

SEQ ID NO: 865228 - DNA, 25 bp, Homo sapien
ccattgagccctggctaagcaccag

SEQ ID NO: 865229 - DNA, 25 bp, Homo sapien
acacgcacactagggcttggcgggt

SEQ ID NO: 865230 - DNA, 25 bp, Homo sapien
tcaggaagtgagagccgaggcccta

SEQ ID NO: 865231 - DNA, 25 bp, Homo sapien
cactgccgtctgctgaccacccctg

SEQ ID NO: 865232 - DNA, 25 bp, Homo sapien
tcccgagcagggaggacctgcagga

SEQ ID NO: 865233 - DNA, 25 bp, Homo sapien
tcctgttcacctctgatctcagggg

SEQ ID NO: 865234 - DNA, 25 bp, Homo sapien
ctgaccacccctgcagacggcctgg

SEQ ID NO: 865235 - DNA, 25 bp, Homo sapien
tgccagtagttggagctgggacccc

SEQ ID NO: 865236 - DNA, 25 bp, Homo sapien
catccaccgcacaggagtagggctt

SEQ ID NO: 865237 - DNA, 25 bp, Homo sapien
cctgggctgctgctttgacaagatg

SEQ ID NO: 865238 - DNA, 25 bp, Homo sapien
tttcagtgactgaaccagagtcgga

SEQ ID NO: 865239 - DNA, 25 bp, Homo sapien
caatcgcaggtgacggccgtcgtga

SEQ ID NO: 865240 - DNA, 25 bp, Homo sapien
gaccacattcggatccggactctga

SEQ ID NO: 865241 - DNA, 25 bp, Homo sapien
tgaaatgacagtcccacaaccaaca

SEQ ID NO: 865242 - DNA, 25 bp, Homo sapien
caacagcatcgatgtggtcttctta

SEQ ID NO: 865243 - DNA, 25 bp, Homo sapien
aggcaggcacacgtgagctcctgga

SEQ ID NO: 865244 - DNA, 25 bp, Homo sapien
tgcagagcatgggacgcttcctgcc

SEQ ID NO: 865245 - DNA, 25 bp, Homo sapien
cccctgcagagcatgggacgcttcc

SEQ ID NO: 865246 - DNA, 25 bp, Homo sapien
cagagcatgggacgcttcctgccat

SEQ ID NO: 865247 - DNA, 25 bp, Homo sapien
cagggagacacagacgagcagatgt

SEQ ID NO: 865248 - DNA, 25 bp, Homo sapien
taaacgcgtgaggtctgatgcacag

SEQ ID NO: 865249 - DNA, 25 bp, Homo sapien
tgaagacatggacagactcccagcc

SEQ ID NO: 865250 - DNA, 25 bp, Homo sapien
agtatttacaaggtctggtggctcc

SEQ ID NO: 865251 - DNA, 25 bp, Homo sapien
catctcggcacatgtagaaggcagg

SEQ ID NO: 865252 - DNA, 25 bp, Homo sapien
ccctggagaacatgacgaagactgt

SEQ ID NO: 865253 - DNA, 25 bp, Homo sapien
tgcacacaccaacgatgtaggcggg

SEQ ID NO: 865254 - DNA, 25 bp, Homo sapien
cttgccagagacgtgggaccaggaa

SEQ ID NO: 865255 - DNA, 25 bp, Homo sapien
gctaacggcttcatcactggagtgg

SEQ ID NO: 865256 - DNA, 25 bp, Homo sapien
caaagcctgtgcttggtacctcagg

SEQ ID NO: 865257 - DNA, 25 bp, Homo sapien
tatggacgctgtctaacgattcacg

SEQ ID NO: 865258 - DNA, 25 bp, Homo sapien
tgtgagaacactaacctgcctgggc

SEQ ID NO: 865259 - DNA, 25 bp, Homo sapien
gggcttcatcctgctcgcgtgacag

SEQ ID NO: 865260 - DNA, 25 bp, Homo sapien
ctctgtgctgtcaggaaactgcagg

SEQ ID NO: 865261 - DNA, 25 bp, Homo sapien
ccgaggtcacctgggcccggagaca

SEQ ID NO: 865262 - DNA, 25 bp, Homo sapien
aaaactatgttctcatctcagaggc

SEQ ID NO: 865263 - DNA, 25 bp, Homo sapien
caaaggactctgaagcaacggtcac

SEQ ID NO: 865264 - DNA, 25 bp, Homo sapien
gagtctttgctttagttgacacagc

SEQ ID NO: 865265 - DNA, 25 bp, Homo sapien
gcctcctcagaagataaaagaccta

SEQ ID NO: 865266 - DNA, 25 bp, Homo sapien
cctcaggaaggctcccgagtgaagc

SEQ ID NO: 865267 - DNA, 25 bp, Homo sapien
ggaccggcgcgcagcggagccccga

SEQ ID NO: 865268 - DNA, 25 bp, Homo sapien
cggcgcgcagcggagccccgagaag

SEQ ID NO: 865269 - DNA, 25 bp, Homo sapien
ggagccccgagaagcgcggctcggc

SEQ ID NO: 865270 - DNA, 25 bp, Homo sapien
ctgctcggggaccggcgcgcagcgg

SEQ ID NO: 865271 - DNA, 25 bp, Homo sapien
tgacccggctgtcaggtcccgcggg

SEQ ID NO: 865272 - DNA, 25 bp, Homo sapien
tggaaccagatccagccggctggac

SEQ ID NO: 865273 - DNA, 25 bp, Homo sapien
agcgcctccacactgcgcatgcccg

SEQ ID NO: 865274 - DNA, 25 bp, Homo sapien
gacgaggctctctggccgcccgggt

SEQ ID NO: 865275 - DNA, 25 bp, Homo sapien
tgctcatatgccgtcttcaccaacg

SEQ ID NO: 865276 - DNA, 25 bp, Homo sapien
ctccataaacgcgccaatcctgctc

SEQ ID NO: 865277 - DNA, 25 bp, Homo sapien
gccaatcctgctcatatgccgtctt

SEQ ID NO: 865278 - DNA, 25 bp, Homo sapien
ttcaccaacgcaccaactcgcacag

SEQ ID NO: 865279 - DNA, 25 bp, Homo sapien
ttctccccgtagttctgtgctggtg

SEQ ID NO: 865280 - DNA, 25 bp, Homo sapien
cttctccccgtagttctgtgctggt

SEQ ID NO: 865281 - DNA, 25 bp, Homo sapien
ttcttctccccgtagttctgtgctg

SEQ ID NO: 865282 - DNA, 25 bp, Homo sapien
tcttctccccgtagttctgtgctgg

SEQ ID NO: 865283 - DNA, 25 bp, Homo sapien
cgatgactagaaggaactgcatgcc

SEQ ID NO: 865284 - DNA, 25 bp, Homo sapien
caggaggtgccccatgttagcaatg

SEQ ID NO: 865285 - DNA, 25 bp, Homo sapien
gatttcgggacatcggacagctgtg

SEQ ID NO: 865286 - DNA, 25 bp, Homo sapien
taacaaggatagctaaaacagcgct

SEQ ID NO: 865287 - DNA, 25 bp, Homo sapien
gcaccctgcagattagggtatattc

SEQ ID NO: 865288 - DNA, 25 bp, Homo sapien
accctgcagattagggtatattctg

SEQ ID NO: 865289 - DNA, 25 bp, Homo sapien
tgcaccctgcagattagggtatatt

SEQ ID NO: 865290 - DNA, 25 bp, Homo sapien
ctgcaccctgcagattagggtatat

SEQ ID NO: 865291 - DNA, 25 bp, Homo sapien
ctggtgatggcagctgaatctgctg

SEQ ID NO: 865292 - DNA, 25 bp, Homo sapien
acagcgccgccaccggctctcccat

SEQ ID NO: 865293 - DNA, 25 bp, Homo sapien
ctgaatctgctgctggcgtaggcgg

SEQ ID NO: 865294 - DNA, 25 bp, Homo sapien
tggcgtaggcggcacagcgccgcca

SEQ ID NO: 865295 - DNA, 25 bp, Homo sapien
actagtgaaacatcgggaaattcat

SEQ ID NO: 865296 - DNA, 25 bp, Homo sapien
ggcctccgctgtctgagcgtgcgct

SEQ ID NO: 865297 - DNA, 25 bp, Homo sapien
aaactgcaaagcctctgcagtctga

SEQ ID NO: 865298 - DNA, 25 bp, Homo sapien
tcattgtgttggtatcaaagcccca

SEQ ID NO: 865299 - DNA, 25 bp, Homo sapien
gctctggtggccacctctgtcccgc

SEQ ID NO: 865300 - DNA, 25 bp, Homo sapien
ctggtggccacctctgtcccgccat

SEQ ID NO: 865301 - DNA, 25 bp, Homo sapien
agctctggtggccacctctgtcccg

SEQ ID NO: 865302 - DNA, 25 bp, Homo sapien
cagagctctggtggccacctctgtc

SEQ ID NO: 865303 - DNA, 25 bp, Homo sapien
tctgcagcgattactgcaccaggag

SEQ ID NO: 865304 - DNA, 25 bp, Homo sapien
gagctgcagctggttcaacggcaca

SEQ ID NO: 865305 - DNA, 25 bp, Homo sapien
tgttccttctttccgcagggtcgcg

SEQ ID NO: 865306 - DNA, 25 bp, Homo sapien
gagacggccatttttcaacgctcaa

SEQ ID NO: 865307 - DNA, 25 bp, Homo sapien
tttcacagaagtgcctgagacgcgg

SEQ ID NO: 865308 - DNA, 25 bp, Homo sapien
acacggtcatcatctcgcgagggaa

SEQ ID NO: 865309 - DNA, 25 bp, Homo sapien
tagagtgcgccaagatgcagaacgc

SEQ ID NO: 865310 - DNA, 25 bp, Homo sapien
tattcaatagcagtgacgcgctctc

SEQ ID NO: 865311 - DNA, 25 bp, Homo sapien
tcttagtggggcgggtctgtagtgg

SEQ ID NO: 865312 - DNA, 25 bp, Homo sapien
catctctccaactgcttaattcttc

SEQ ID NO: 865313 - DNA, 25 bp, Homo sapien
aaggtagtcatctgcccaactcccc

SEQ ID NO: 865314 - DNA, 25 bp, Homo sapien
ctagttcttccaggcagccatctct

SEQ ID NO: 865315 - DNA, 25 bp, Homo sapien
actccccaattcttccaagcagcca

SEQ ID NO: 865316 - DNA, 25 bp, Homo sapien
tgtgcttcccgagtacagatcacgg

SEQ ID NO: 865317 - DNA, 25 bp, Homo sapien
gatcacggctcagcatctcatggga

SEQ ID NO: 865318 - DNA, 25 bp, Homo sapien
tgcacctgtcagaacacgccagggt

SEQ ID NO: 865319 - DNA, 25 bp, Homo sapien
tcaggacacgcagtaagatttcaag

SEQ ID NO: 865320 - DNA, 25 bp, Homo sapien
tcaatcttttaatgaccctcccgca

SEQ ID NO: 865321 - DNA, 25 bp, Homo sapien
ggcaagaaaagcaagcgagaaacag

SEQ ID NO: 865322 - DNA, 25 bp, Homo sapien
cccgcacgtcagcagcagatcaggt

SEQ ID NO: 865323 - DNA, 25 bp, Homo sapien
cagctgtacaacaacataggcttaa

SEQ ID NO: 865324 - DNA, 25 bp, Homo sapien
gaacaggacggtttgtgcgctgcct

SEQ ID NO: 865325 - DNA, 25 bp, Homo sapien
cgacacatcgttaagcagctgggta

SEQ ID NO: 865326 - DNA, 25 bp, Homo sapien
aactacaggttctcggctaaggcac

SEQ ID NO: 865327 - DNA, 25 bp, Homo sapien
actagatgcctctgtggtgaaagcc

SEQ ID NO: 865328 - DNA, 25 bp, Homo sapien
tactcggagtcctgggaaccactca

SEQ ID NO: 865329 - DNA, 25 bp, Homo sapien
gacgtcccctcacggtaaggtcaga

SEQ ID NO: 865330 - DNA, 25 bp, Homo sapien
catgggccgttggtctgagttactc

SEQ ID NO: 865331 - DNA, 25 bp, Homo sapien
cactcatcactgtcgggtgcaggtg

SEQ ID NO: 865332 - DNA, 25 bp, Homo sapien
ctgcagctgagcagccgtgggacct

SEQ ID NO: 865333 - DNA, 25 bp, Homo sapien
catgtacttcccacaggcgactctt

SEQ ID NO: 865334 - DNA, 25 bp, Homo sapien
cacagaactagcatgaggaaaccgc

SEQ ID NO: 865335 - DNA, 25 bp, Homo sapien
tgtgggagtgactcacgtccagcct

SEQ ID NO: 865336 - DNA, 25 bp, Homo sapien
tactccctcattgtccgggtgctgg

SEQ ID NO: 865337 - DNA, 25 bp, Homo sapien
tggctgccggagaacgtcttcatca

SEQ ID NO: 865338 - DNA, 25 bp, Homo sapien
tcctcgcggtggtgctggtcttctt

SEQ ID NO: 865339 - DNA, 25 bp, Homo sapien
tgaaggccgtcattccagacagcac

SEQ ID NO: 865340 - DNA, 25 bp, Homo sapien
gaaacatttctgacaccgtcgacca

SEQ ID NO: 865341 - DNA, 25 bp, Homo sapien
taaactgcggtcagatgtggcttct

SEQ ID NO: 865342 - DNA, 25 bp, Homo sapien
gctgcttaggaaacctcacgactgg

SEQ ID NO: 865343 - DNA, 25 bp, Homo sapien
tgaagcgcctcagttacacaggaac

SEQ ID NO: 865344 - DNA, 25 bp, Homo sapien
catgcagcttacgtggaaaggccac

SEQ ID NO: 865345 - DNA, 25 bp, Homo sapien
tcagaattaccaggagcgcagcaag

SEQ ID NO: 865346 - DNA, 25 bp, Homo sapien
tatgctgagtcctgaaccgtgggca

SEQ ID NO: 865347 - DNA, 25 bp, Homo sapien
caggtcagcgcaactgtgttcccga

SEQ ID NO: 865348 - DNA, 25 bp, Homo sapien
tgtcccgcactggagtcccgcaccc

SEQ ID NO: 865349 - DNA, 25 bp, Homo sapien
gtcccgcactggagtcccgcacccc

SEQ ID NO: 865350 - DNA, 25 bp, Homo sapien
tgtgtcccgcactggagtcccgcac

SEQ ID NO: 865351 - DNA, 25 bp, Homo sapien
ccgcactggagtcccgcaccccggg

SEQ ID NO: 865352 - DNA, 25 bp, Homo sapien
gggaatccagccgacacgcgtggcc

SEQ ID NO: 865353 - DNA, 25 bp, Homo sapien
taagacccttcaagtggtcctaatc

SEQ ID NO: 865354 - DNA, 25 bp, Homo sapien
ctaatcccaacaggctgaaaaccac

SEQ ID NO: 865355 - DNA, 25 bp, Homo sapien
tgaaaaccaccggcctgaagatcac

SEQ ID NO: 865356 - DNA, 25 bp, Homo sapien
gctacagacgttaaccacggcgtca

SEQ ID NO: 865357 - DNA, 25 bp, Homo sapien
agaaatcctcagcacacgcggctgc

SEQ ID NO: 865358 - DNA, 25 bp, Homo sapien
tggtgatacataaacctgtggtccc

SEQ ID NO: 865359 - DNA, 25 bp, Homo sapien
tgacactgagtgaggactcgctgtg

SEQ ID NO: 865360 - DNA, 25 bp, Homo sapien
gttgaccacaaagaagcagcgctgg

SEQ ID NO: 865361 - DNA, 25 bp, Homo sapien
aagcagcgctggcaaacatctgggc

SEQ ID NO: 865362 - DNA, 25 bp, Homo sapien
tgctgagttcgtttctgttgaccac

SEQ ID NO: 865363 - DNA, 25 bp, Homo sapien
tggcaaacatctgggctgatcacag

SEQ ID NO: 865364 - DNA, 25 bp, Homo sapien
ggcacttaccccagagcgatggaaa

SEQ ID NO: 865365 - DNA, 25 bp, Homo sapien
tacaaccgtggactctggacgagct

SEQ ID NO: 865366 - DNA, 25 bp, Homo sapien
tgtgcgaggcatccacgtcgatgtc

SEQ ID NO: 865367 - DNA, 25 bp, Homo sapien
gcgcagcggcttcgtaaacatctaa

SEQ ID NO: 865368 - DNA, 25 bp, Homo sapien
taagggattcttacgaggcagagga

SEQ ID NO: 865369 - DNA, 25 bp, Homo sapien
tcagctgtcaagatgctcgtgggga

SEQ ID NO: 865370 - DNA, 25 bp, Homo sapien
gggacggaaagtgttgcacacataa

SEQ ID NO: 865371 - DNA, 25 bp, Homo sapien
gggtggtcacgcgtatgccgccttc

SEQ ID NO: 865372 - DNA, 25 bp, Homo sapien
ccagacggacgttgctgggaggaca

SEQ ID NO: 865373 - DNA, 25 bp, Homo sapien
aggctccccagacggacgttgctgg

SEQ ID NO: 865374 - DNA, 25 bp, Homo sapien
gctgggaggacaacacaatggccca

SEQ ID NO: 865375 - DNA, 25 bp, Homo sapien
ctgggaggacaacacaatggcccac

SEQ ID NO: 865376 - DNA, 25 bp, Homo sapien
gtggattccggaggttcatccagga

SEQ ID NO: 865377 - DNA, 25 bp, Homo sapien
tcgatggtggattccggaggttcat

SEQ ID NO: 865378 - DNA, 25 bp, Homo sapien
attccggaggttcatccaggatcca

SEQ ID NO: 865379 - DNA, 25 bp, Homo sapien
cctcgatggtggattccggaggttc

SEQ ID NO: 865380 - DNA, 25 bp, Homo sapien
gctccttcgccacttggtgcagcct

SEQ ID NO: 865381 - DNA, 25 bp, Homo sapien
ttggagccggctccttcgccacttg

SEQ ID NO: 865382 - DNA, 25 bp, Homo sapien
ctctgctgacgccttcttcagcttt

SEQ ID NO: 865383 - DNA, 25 bp, Homo sapien
ccctctgctgacgccttcttcagct

SEQ ID NO: 865384 - DNA, 25 bp, Homo sapien
caatgccccgaacagtgcaggagga

SEQ ID NO: 865385 - DNA, 25 bp, Homo sapien
ggcaatcagggcgtcttcagagaaa

SEQ ID NO: 865386 - DNA, 25 bp, Homo sapien
tatgatggaaagtgaggccaagcgc

SEQ ID NO: 865387 - DNA, 25 bp, Homo sapien
tgaaacctaggagccagctgagtcc

SEQ ID NO: 865388 - DNA, 25 bp, Homo sapien
gcctccccagcaccgcggaccccag

SEQ ID NO: 865389 - DNA, 25 bp, Homo sapien
ctccccagcaccgcggaccccaggg

SEQ ID NO: 865390 - DNA, 25 bp, Homo sapien
ctggcgccctgacccgccggccacc

SEQ ID NO: 865391 - DNA, 25 bp, Homo sapien
ggggctctgggtctcctggcgccct

SEQ ID NO: 865392 - DNA, 25 bp, Homo sapien
aagcgtgaacagctgcgtcgcggac

SEQ ID NO: 865393 - DNA, 25 bp, Homo sapien
taagcgtgaacagctgcgtcgcgga

SEQ ID NO: 865394 - DNA, 25 bp, Homo sapien
ctaagcgtgaacagctgcgtcgcgg

SEQ ID NO: 865395 - DNA, 25 bp, Homo sapien
ctgaaaggacttggatgcaatgaca

SEQ ID NO: 865396 - DNA, 25 bp, Homo sapien
cattctcaggcgatacccttgtcag

SEQ ID NO: 865397 - DNA, 25 bp, Homo sapien
cccatgaatacggaccagggctcct

SEQ ID NO: 865398 - DNA, 25 bp, Homo sapien
cttgtcaggctatctagggtcatcc

SEQ ID NO: 865399 - DNA, 25 bp, Homo sapien
ggaccctgcggccttggccttccgc

SEQ ID NO: 865400 - DNA, 25 bp, Homo sapien
ttgtcatcatggcccatccccaatg

SEQ ID NO: 865401 - DNA, 25 bp, Homo sapien
atggcccatccccaatgagccgctg

SEQ ID NO: 865402 - DNA, 25 bp, Homo sapien
ccctgcggccttggccttccgcagt

SEQ ID NO: 865403 - DNA, 25 bp, Homo sapien
gcagccttgacgtctcctgagtaac

SEQ ID NO: 865404 - DNA, 25 bp, Homo sapien
tttcattagaacacctgatctgcag

SEQ ID NO: 865405 - DNA, 25 bp, Homo sapien
tgggcccggctggatacatctcagt

SEQ ID NO: 865406 - DNA, 25 bp, Homo sapien
tgcagattcacagttcacacaccca

SEQ ID NO: 865407 - DNA, 25 bp, Homo sapien
cactgactgaaccaagttagtggtt

SEQ ID NO: 865408 - DNA, 25 bp, Homo sapien
gctgcgttttccttgctccacagca

SEQ ID NO: 865409 - DNA, 25 bp, Homo sapien
tgtgctggctgcgttttccttgctc

SEQ ID NO: 865410 - DNA, 25 bp, Homo sapien
ctgttttccactgactgaaccaagt

SEQ ID NO: 865411 - DNA, 25 bp, Homo sapien
agtcccagaccagacgtgtcacccg

SEQ ID NO: 865412 - DNA, 25 bp, Homo sapien
ctccaggtgtaaacctgagtccacc

SEQ ID NO: 865413 - DNA, 25 bp, Homo sapien
gaccagacgtgtcacccgggcagct

SEQ ID NO: 865414 - DNA, 25 bp, Homo sapien
ggcagctccaggtgtaaacctgagt

SEQ ID NO: 865415 - DNA, 25 bp, Homo sapien
tacacggtccgtcatcgacagaaac

SEQ ID NO: 865416 - DNA, 25 bp, Homo sapien
tgaccacctttttgcagaacgccaa

SEQ ID NO: 865417 - DNA, 25 bp, Homo sapien
tggaaagtgtcaggccacgaaggcc

SEQ ID NO: 865418 - DNA, 25 bp, Homo sapien
tctcagcgggacatctggtgggcac

SEQ ID NO: 865419 - DNA, 25 bp, Homo sapien
gattcagagactgtcatgggtgagc

SEQ ID NO: 865420 - DNA, 25 bp, Homo sapien
ttcagagactgtcatgggtgagcac

SEQ ID NO: 865421 - DNA, 25 bp, Homo sapien
gcctggattcagagactgtcatggg

SEQ ID NO: 865422 - DNA, 25 bp, Homo sapien
tggattcagagactgtcatgggtga

SEQ ID NO: 865423 - DNA, 25 bp, Homo sapien
cagccagtgtgggatggtgctcaat

SEQ ID NO: 865424 - DNA, 25 bp, Homo sapien
cgagccatcgcagcggagtctcttc

SEQ ID NO: 865425 - DNA, 25 bp, Homo sapien
cccactagagtgtaagctgcttcca

SEQ ID NO: 865426 - DNA, 25 bp, Homo sapien
tcaacaaacaagatcagcagccagt

SEQ ID NO: 865427 - DNA, 25 bp, Homo sapien
tgatggtggggcgactcccgtgtct

SEQ ID NO: 865428 - DNA, 25 bp, Homo sapien
ggcgactcccgtgtctgcagctgtg

SEQ ID NO: 865429 - DNA, 25 bp, Homo sapien
tggggcgactcccgtgtctgcagct

SEQ ID NO: 865430 - DNA, 25 bp, Homo sapien
tggtggggcgactcccgtgtctgca

SEQ ID NO: 865431 - DNA, 25 bp, Homo sapien
cagaagttgccgtgacattgggcac

SEQ ID NO: 865432 - DNA, 25 bp, Homo sapien
cttgcagccctcttttgagcaacgg

SEQ ID NO: 865433 - DNA, 25 bp, Homo sapien
ccctcttttgagcaacggtatgtaa

SEQ ID NO: 865434 - DNA, 25 bp, Homo sapien
gtgacattgggcacataccatctgc

SEQ ID NO: 865435 - DNA, 25 bp, Homo sapien
caagaaagacgaacctgacctggga

SEQ ID NO: 865436 - DNA, 25 bp, Homo sapien
ggtagcaaactgactcttcccaagg

SEQ ID NO: 865437 - DNA, 25 bp, Homo sapien
cagtttaggacagggataacgcagc

SEQ ID NO: 865438 - DNA, 25 bp, Homo sapien
ccaggacccatgactaggaacggat

SEQ ID NO: 865439 - DNA, 25 bp, Homo sapien
tcaatgtgatcaccaaccaccacgt

SEQ ID NO: 865440 - DNA, 25 bp, Homo sapien
caccacgtctggtatctggcccttt

SEQ ID NO: 865441 - DNA, 25 bp, Homo sapien
cccagggtgagagtcacagtctctg

SEQ ID NO: 865442 - DNA, 25 bp, Homo sapien
gtgggcatactgggacgtgaacatc

SEQ ID NO: 865443 - DNA, 25 bp, Homo sapien
caggccaaggttgtgagggctccaa

SEQ ID NO: 865444 - DNA, 25 bp, Homo sapien
aacgaatggacttcagccgactgca

SEQ ID NO: 865445 - DNA, 25 bp, Homo sapien
ttttaaacgagtactcctgtgcggc

SEQ ID NO: 865446 - DNA, 25 bp, Homo sapien
acacagagagttgcttgcgcccaga

SEQ ID NO: 865447 - DNA, 25 bp, Homo sapien
ctgaaggcccagcaaggctaaaaac

SEQ ID NO: 865448 - DNA, 25 bp, Homo sapien
cgaaggggtggaccgcccagcagct

SEQ ID NO: 865449 - DNA, 25 bp, Homo sapien
gctccgaaggggtggaccgcccagc

SEQ ID NO: 865450 - DNA, 25 bp, Homo sapien
gctgaaggcccagcaaggctaaaaa

SEQ ID NO: 865451 - DNA, 25 bp, Homo sapien
tggccaacactggtcaaagcacaga

SEQ ID NO: 865452 - DNA, 25 bp, Homo sapien
tattagtaaacggtctccagccaga

SEQ ID NO: 865453 - DNA, 25 bp, Homo sapien
gaattatgagcacacccgtctacag

SEQ ID NO: 865454 - DNA, 25 bp, Homo sapien
catccgtgcctagtaaacgcaggga

SEQ ID NO: 865455 - DNA, 25 bp, Homo sapien
ggttacaactaagtgactccatgag

SEQ ID NO: 865456 - DNA, 25 bp, Homo sapien
caagacagtgcagcttcagacggtg

SEQ ID NO: 865457 - DNA, 25 bp, Homo sapien
tccctaccataccagcaagacagtg

SEQ ID NO: 865458 - DNA, 25 bp, Homo sapien
tttcaatgagttagccatacgtcgc

SEQ ID NO: 865459 - DNA, 25 bp, Homo sapien
tgtgcagcgtatggaaaatgatctt

SEQ ID NO: 865460 - DNA, 25 bp, Homo sapien
cttctggaatgcaaacggacactta

SEQ ID NO: 865461 - DNA, 25 bp, Homo sapien
gacacttatgtgcagcgtatggaaa

SEQ ID NO: 865462 - DNA, 25 bp, Homo sapien
gcaaacggacacttatgtgcagcgt

SEQ ID NO: 865463 - DNA, 25 bp, Homo sapien
ttctgaacaatgcttccccaaatca

SEQ ID NO: 865464 - DNA, 25 bp, Homo sapien
tatgagaacagtgctcaaaacgcag

SEQ ID NO: 865465 - DNA, 25 bp, Homo sapien
tcaaaacgcagatggcggagttaag

SEQ ID NO: 865466 - DNA, 25 bp, Homo sapien
cgcagatggcggagttaagtgtcac

SEQ ID NO: 865467 - DNA, 25 bp, Homo sapien
cagtgctcaaaacgcagatggcgga

SEQ ID NO: 865468 - DNA, 25 bp, Homo sapien
gaagagacgtaaactcaggtgtcct

SEQ ID NO: 865469 - DNA, 25 bp, Homo sapien
agcagatggaagagacgtaaactca

SEQ ID NO: 865470 - DNA, 25 bp, Homo sapien
caggtgtcctcctccgtagtcggct

SEQ ID NO: 865471 - DNA, 25 bp, Homo sapien
tctcgtcggggacccaggcagctga

SEQ ID NO: 865472 - DNA, 25 bp, Homo sapien
acaccggaacgcaacatctcgctgc

SEQ ID NO: 865473 - DNA, 25 bp, Homo sapien
taagcagaaagaacctcgacactgg

SEQ ID NO: 865474 - DNA, 25 bp, Homo sapien
cactggcaccgagacgccgtcggag

SEQ ID NO: 865475 - DNA, 25 bp, Homo sapien
ggatttatccgcagcccccggatct

SEQ ID NO: 865476 - DNA, 25 bp, Homo sapien
ccccaggaggcctccatctcaaaac

SEQ ID NO: 865477 - DNA, 25 bp, Homo sapien
catctcaaaacaacgtgtttttagg

SEQ ID NO: 865478 - DNA, 25 bp, Homo sapien
ctccatctcaaaacaacgtgttttt

SEQ ID NO: 865479 - DNA, 25 bp, Homo sapien
cccaggaggcctccatctcaaaaca

SEQ ID NO: 865480 - DNA, 25 bp, Homo sapien
tcgtgccaaccagaccagatggtcg

SEQ ID NO: 865481 - DNA, 25 bp, Homo sapien
tcaatagagaccatgcccaatcagg

SEQ ID NO: 865482 - DNA, 25 bp, Homo sapien
gtgaatgcgccctgcactagagcct

SEQ ID NO: 865483 - DNA, 25 bp, Homo sapien
tcaaacccaaaaagcgtcgtgccaa

SEQ ID NO: 865484 - DNA, 25 bp, Homo sapien
tcttatattcttggcgggactgcag

SEQ ID NO: 865485 - DNA, 25 bp, Homo sapien
tatgtttatctcaattccctggtgg

SEQ ID NO: 865486 - DNA, 25 bp, Homo sapien
cattgtcttagtcaaggtgctgcag

SEQ ID NO: 865487 - DNA, 25 bp, Homo sapien
tgcagacgcccatccttattaaagg

SEQ ID NO: 865488 - DNA, 25 bp, Homo sapien
aacagacacttcagcctggctctca

SEQ ID NO: 865489 - DNA, 25 bp, Homo sapien
tcatctttaggcatgcgagcttctc

SEQ ID NO: 865490 - DNA, 25 bp, Homo sapien
cacctccgggacgtcctgaaggcga

SEQ ID NO: 865491 - DNA, 25 bp, Homo sapien
tgccaggctggacgggtgaacacat

SEQ ID NO: 865492 - DNA, 25 bp, Homo sapien
gaaagcctagtcctgcacgcagtac

SEQ ID NO: 865493 - DNA, 25 bp, Homo sapien
cagtaccaacaatgcggagtcagcg

SEQ ID NO: 865494 - DNA, 25 bp, Homo sapien
gctactctgatctgagcccctgtgg

SEQ ID NO: 865495 - DNA, 25 bp, Homo sapien
atccccaggcgtctgttcccgagaa

SEQ ID NO: 865496 - DNA, 25 bp, Homo sapien
ccctggcttcggatggcatggtcca

SEQ ID NO: 865497 - DNA, 25 bp, Homo sapien
tgccaggttgccggggccgaattct

SEQ ID NO: 865498 - DNA, 25 bp, Homo sapien
aattctccctggcttcggatggcat

SEQ ID NO: 865499 - DNA, 25 bp, Homo sapien
ccgaattctccctggcttcggatgg

SEQ ID NO: 865500 - DNA, 25 bp, Homo sapien
cacactgttgcccactgcatggcag

SEQ ID NO: 865501 - DNA, 25 bp, Homo sapien
ctgttgcccactgcatggcagcctt

SEQ ID NO: 865502 - DNA, 25 bp, Homo sapien
tggaagattccgtcccctggatcca

SEQ ID NO: 865503 - DNA, 25 bp, Homo sapien
gtggaagattccgtcccctggatcc

SEQ ID NO: 865504 - DNA, 25 bp, Homo sapien
tgtccacagtgtctttcagggccac

SEQ ID NO: 865505 - DNA, 25 bp, Homo sapien
acggccagatgcgtggcctgaggct

SEQ ID NO: 865506 - DNA, 25 bp, Homo sapien
acagaggagtggacggccagatgcg

SEQ ID NO: 865507 - DNA, 25 bp, Homo sapien
tttctgtccacagtgtctttcaggg

SEQ ID NO: 865508 - DNA, 25 bp, Homo sapien
cagatagtgccctgttccgtctccg

SEQ ID NO: 865509 - DNA, 25 bp, Homo sapien
aaccaagggcggctctgttcttcct

SEQ ID NO: 865510 - DNA, 25 bp, Homo sapien
cgcactcggacctgcttgggcctgt

SEQ ID NO: 865511 - DNA, 25 bp, Homo sapien
ttgccacatagttgcttcatgcccc

SEQ ID NO: 865512 - DNA, 25 bp, Homo sapien
tgagaggcagctggtgaacgtcccc

SEQ ID NO: 865513 - DNA, 25 bp, Homo sapien
cttgaggaagccgtaggccacggaa

SEQ ID NO: 865514 - DNA, 25 bp, Homo sapien
tgtctggtctcaggcggtcctttga

SEQ ID NO: 865515 - DNA, 25 bp, Homo sapien
tctgtgtcttgtagagtccttgagg

SEQ ID NO: 865516 - DNA, 25 bp, Homo sapien
tggctagacgggctgtccactatgg

SEQ ID NO: 865517 - DNA, 25 bp, Homo sapien
tgggcagctctttaacgctgaggtt

SEQ ID NO: 865518 - DNA, 25 bp, Homo sapien
actatgggcagctctttaacgctga

SEQ ID NO: 865519 - DNA, 25 bp, Homo sapien
ctggctagacgggctgtccactatg

SEQ ID NO: 865520 - DNA, 25 bp, Homo sapien
cgtggccatgtcagcagcgtcgctg

SEQ ID NO: 865521 - DNA, 25 bp, Homo sapien
gaactgggcaccagaccaacgtggc

SEQ ID NO: 865522 - DNA, 25 bp, Homo sapien
tgaactgggcaccagaccaacgtgg

SEQ ID NO: 865523 - DNA, 25 bp, Homo sapien
atgtcagcagcgtcgctggcaccat

SEQ ID NO: 865524 - DNA, 25 bp, Homo sapien
gagtcgacaagcacctccgatttcc

SEQ ID NO: 865525 - DNA, 25 bp, Homo sapien
ttaatctgttgagcggatttcccgg

SEQ ID NO: 865526 - DNA, 25 bp, Homo sapien
gatttcctgattacaattagactcc

SEQ ID NO: 865527 - DNA, 25 bp, Homo sapien
gactcctgatttgggctccttcaag

SEQ ID NO: 865528 - DNA, 25 bp, Homo sapien
cgagcccatggacccggaggagatc

SEQ ID NO: 865529 - DNA, 25 bp, Homo sapien
cgcccagctccgacagcgacagcgg

SEQ ID NO: 865530 - DNA, 25 bp, Homo sapien
tggagaagaagaagcgcaagcacga

SEQ ID NO: 865531 - DNA, 25 bp, Homo sapien
gaccacgtgcagcggcgagcccatg

SEQ ID NO: 865532 - DNA, 25 bp, Homo sapien
gtatgaattcggacccaggcagcaa

SEQ ID NO: 865533 - DNA, 25 bp, Homo sapien
acgagaatcctcagccttgtaaaat

SEQ ID NO: 865534 - DNA, 25 bp, Homo sapien
ccacaacgagaatcctcagccttgt

SEQ ID NO: 865535 - DNA, 25 bp, Homo sapien
taagagtaaacgaaagtgctgtatg

SEQ ID NO: 865536 - DNA, 25 bp, Homo sapien
tattgatgttgctgcgttatcagcc

SEQ ID NO: 865537 - DNA, 25 bp, Homo sapien
gccgccaacgcgactctttacaaaa

SEQ ID NO: 865538 - DNA, 25 bp, Homo sapien
caaaagccgtgcacatttgttctaa

SEQ ID NO: 865539 - DNA, 25 bp, Homo sapien
cctgtaataggacaggcgccgccaa

SEQ ID NO: 865540 - DNA, 25 bp, Homo sapien
tgggtcctcgttgccgcaaaagcca

SEQ ID NO: 865541 - DNA, 25 bp, Homo sapien
ctcgttgccgcaaaagccaccaatt

SEQ ID NO: 865542 - DNA, 25 bp, Homo sapien
aagccaccaattccccgagaaattg

SEQ ID NO: 865543 - DNA, 25 bp, Homo sapien
tgggccctgggtcctcgttgccgca

SEQ ID NO: 865544 - DNA, 25 bp, Homo sapien
ttttcccgttggaggcgatgtgtcg

SEQ ID NO: 865545 - DNA, 25 bp, Homo sapien
tgtcgggtccggacacgacgtggag

SEQ ID NO: 865546 - DNA, 25 bp, Homo sapien
tatccgtgataattgcgaagttcag

SEQ ID NO: 865547 - DNA, 25 bp, Homo sapien
ttcagcctctcggaattgggccggc

SEQ ID NO: 865548 - DNA, 25 bp, Homo sapien
ccttctgcagatgccggttcgagcc

SEQ ID NO: 865549 - DNA, 25 bp, Homo sapien
aagaaacgctccgtggctcgcccag

SEQ ID NO: 865550 - DNA, 25 bp, Homo sapien
ccagggttaagagccgcggtgacaa

SEQ ID NO: 865551 - DNA, 25 bp, Homo sapien
ggaagccacgaatcccacacgacat

SEQ ID NO: 865552 - DNA, 25 bp, Homo sapien
cccgcctttgtggaactggtgttct

SEQ ID NO: 865553 - DNA, 25 bp, Homo sapien
tcggtgctgaggtgcgtgtaggcag

SEQ ID NO: 865554 - DNA, 25 bp, Homo sapien
gttctgtgcagaaggcgggcgggca

SEQ ID NO: 865555 - DNA, 25 bp, Homo sapien
cctttgtggaactggtgttctgtgc

SEQ ID NO: 865556 - DNA, 25 bp, Homo sapien
ggagatggtgcggtggagtcgggac

SEQ ID NO: 865557 - DNA, 25 bp, Homo sapien
attcaccgggaaagccacgcggagg

SEQ ID NO: 865558 - DNA, 25 bp, Homo sapien
gatggtgcggtggagtcgggactgc

SEQ ID NO: 865559 - DNA, 25 bp, Homo sapien
ctcggctcaggctattcaccgggaa

SEQ ID NO: 865560 - DNA, 25 bp, Homo sapien
aacctccagggcttcggctccaggg

SEQ ID NO: 865561 - DNA, 25 bp, Homo sapien
caaacctccagggcttcggctccag

SEQ ID NO: 865562 - DNA, 25 bp, Homo sapien
gctccaggggccagcagctgggtcc

SEQ ID NO: 865563 - DNA, 25 bp, Homo sapien
tccaggggccagcagctgggtccac

SEQ ID NO: 865564 - DNA, 25 bp, Homo sapien
caccggggagccagcggccaagcta

SEQ ID NO: 865565 - DNA, 25 bp, Homo sapien
aggtgaggcggccacggtcaccggg

SEQ ID NO: 865566 - DNA, 25 bp, Homo sapien
gagccagcggccaagctagggctgg

SEQ ID NO: 865567 - DNA, 25 bp, Homo sapien
agagaggtgaggcggccacggtcac

SEQ ID NO: 865568 - DNA, 25 bp, Homo sapien
gcccacctcccacagacactatcca

SEQ ID NO: 865569 - DNA, 25 bp, Homo sapien
gtccacctcccacagacactgtcca

SEQ ID NO: 865570 - DNA, 25 bp, Homo sapien
ttggctgtccacctcccacagacac

SEQ ID NO: 865571 - DNA, 25 bp, Homo sapien
agtggccacaaaggggacctggcct

SEQ ID NO: 865572 - DNA, 25 bp, Homo sapien
actgcccacctcccacagacactgc

SEQ ID NO: 865573 - DNA, 25 bp, Homo sapien
gcccacctcccacagacactgccca

SEQ ID NO: 865574 - DNA, 25 bp, Homo sapien
acagacactgcccacctcccacaga

SEQ ID NO: 865575 - DNA, 25 bp, Homo sapien
ctcccacagacactgcccacctccc

SEQ ID NO: 865576 - DNA, 25 bp, Homo sapien
tgtccacctcccacagacactgtcc

SEQ ID NO: 865577 - DNA, 25 bp, Homo sapien
acagacactgtccacctcccacaga

SEQ ID NO: 865578 - DNA, 25 bp, Homo sapien
agacactgcctacctcccacagaca

SEQ ID NO: 865579 - DNA, 25 bp, Homo sapien
ctcccacagacactgtccacctccc

SEQ ID NO: 865580 - DNA, 25 bp, Homo sapien
acatcattgttagggaagtggcagc

SEQ ID NO: 865581 - DNA, 25 bp, Homo sapien
caccaggttgtggagacaggtccgt

SEQ ID NO: 865582 - DNA, 25 bp, Homo sapien
accgccccgctgaaatagaggccaa

SEQ ID NO: 865583 - DNA, 25 bp, Homo sapien
tctctccactaaccctgacgggaag

SEQ ID NO: 865584 - DNA, 25 bp, Homo sapien
ggcggaaaattgagtccagattcat

SEQ ID NO: 865585 - DNA, 25 bp, Homo sapien
tctcaggagcagtgtggcggaaaat

SEQ ID NO: 865586 - DNA, 25 bp, Homo sapien
cattgtttccgacagttctcaggag

SEQ ID NO: 865587 - DNA, 25 bp, Homo sapien
cagtgtgccgctcaagtcagttaaa

SEQ ID NO: 865588 - DNA, 25 bp, Homo sapien
tggcaaaacagcccctggcatgatc

SEQ ID NO: 865589 - DNA, 25 bp, Homo sapien
gctggcaaaacagcccctggcatga

SEQ ID NO: 865590 - DNA, 25 bp, Homo sapien
tcgctggcaaaacagcccctggcat

SEQ ID NO: 865591 - DNA, 25 bp, Homo sapien
gcaaaacagcccctggcatgatcat

SEQ ID NO: 865592 - DNA, 25 bp, Homo sapien
acacaacagccgcaaacacactgcg

SEQ ID NO: 865593 - DNA, 25 bp, Homo sapien
acagccgtcgtcgtcacggttacgg

SEQ ID NO: 865594 - DNA, 25 bp, Homo sapien
aggaacagccggcgcctttcacagc

SEQ ID NO: 865595 - DNA, 25 bp, Homo sapien
acacactgcgccggtccaggaacag

SEQ ID NO: 865596 - DNA, 25 bp, Homo sapien
tctcacgggtgctgcgatggatacg

SEQ ID NO: 865597 - DNA, 25 bp, Homo sapien
gggaacgccgagctccttctgagtg

SEQ ID NO: 865598 - DNA, 25 bp, Homo sapien
cacctgaagcctctcgggaaatcca

SEQ ID NO: 865599 - DNA, 25 bp, Homo sapien
aaatccatctgtgagtggcggctgg

SEQ ID NO: 865600 - DNA, 25 bp, Homo sapien
tgggcttctccctgtaggctcggaa

SEQ ID NO: 865601 - DNA, 25 bp, Homo sapien
cttctccctgtaggctcggaatggg

SEQ ID NO: 865602 - DNA, 25 bp, Homo sapien
gggcttctccctgtaggctcggaat

SEQ ID NO: 865603 - DNA, 25 bp, Homo sapien
ggatttggggcacggatgcccaggt

SEQ ID NO: 865604 - DNA, 25 bp, Homo sapien
ctgagggacggcccttgtctgcggt

SEQ ID NO: 865605 - DNA, 25 bp, Homo sapien
agggacggcccttgtctgcggtcat

SEQ ID NO: 865606 - DNA, 25 bp, Homo sapien
gagggacggcccttgtctgcggtca

SEQ ID NO: 865607 - DNA, 25 bp, Homo sapien
ggacggcccttgtctgcggtcatcc

SEQ ID NO: 865608 - DNA, 25 bp, Homo sapien
gaaccggtgatatcagagttcttgg

SEQ ID NO: 865609 - DNA, 25 bp, Homo sapien
gggagaaccggtgatatcagagttc

SEQ ID NO: 865610 - DNA, 25 bp, Homo sapien
ccggtgatatcagagttcttggtgg

SEQ ID NO: 865611 - DNA, 25 bp, Homo sapien
gctctggggagaaccggtgatatca

SEQ ID NO: 865612 - DNA, 25 bp, Homo sapien
tgcctgcctccgtggggacagctct

SEQ ID NO: 865613 - DNA, 25 bp, Homo sapien
gcctgcctccgtggggacagctcta

SEQ ID NO: 865614 - DNA, 25 bp, Homo sapien
gcccctgttccagcagattaacgcc

SEQ ID NO: 865615 - DNA, 25 bp, Homo sapien
aggcccctgttccagcagattaacg

SEQ ID NO: 865616 - DNA, 25 bp, Homo sapien
gaggcccctgttccagcagattaac

SEQ ID NO: 865617 - DNA, 25 bp, Homo sapien
ccctgttccagcagattaacgcccc

SEQ ID NO: 865618 - DNA, 25 bp, Homo sapien
ccggctggggaaaccagctatggcc

SEQ ID NO: 865619 - DNA, 25 bp, Homo sapien
cacgtgggggctgccctagctgtgg

SEQ ID NO: 865620 - DNA, 25 bp, Homo sapien
gctgccctagctgtggccggctggg

SEQ ID NO: 865621 - DNA, 25 bp, Homo sapien
tggggaaaccagctatggcccctcc

SEQ ID NO: 865622 - DNA, 25 bp, Homo sapien
gcttggcagcgcctgaaggtaacag

SEQ ID NO: 865623 - DNA, 25 bp, Homo sapien
ccaaatatggggcattggagccatg

SEQ ID NO: 865624 - DNA, 25 bp, Homo sapien
gttgtggcgtctggccgcggcccag

SEQ ID NO: 865625 - DNA, 25 bp, Homo sapien
cagagggctggcagtccaaatatgg

SEQ ID NO: 865626 - DNA, 25 bp, Homo sapien
caacttgccggaggctcagtgttca

SEQ ID NO: 865627 - DNA, 25 bp, Homo sapien
ctcttggagggtaaggggcaggttg

SEQ ID NO: 865628 - DNA, 25 bp, Homo sapien
tcaacttgccggaggctcagtgttc

SEQ ID NO: 865629 - DNA, 25 bp, Homo sapien
agcgtctcagactcttggagggtaa

SEQ ID NO: 865630 - DNA, 25 bp, Homo sapien
cgaagccgagtcgtcagggcccgtc

SEQ ID NO: 865631 - DNA, 25 bp, Homo sapien
tggagcggccgacgggccagtgctg

SEQ ID NO: 865632 - DNA, 25 bp, Homo sapien
gctgcccagtggttcttgtgccctg

SEQ ID NO: 865633 - DNA, 25 bp, Homo sapien
gcaggtaccccgtccggtagcgcga

SEQ ID NO: 865634 - DNA, 25 bp, Homo sapien
cacaggcctagaggcgggaaagctt

SEQ ID NO: 865635 - DNA, 25 bp, Homo sapien
ccagccgagcacaggcctagaggcg

SEQ ID NO: 865636 - DNA, 25 bp, Homo sapien
tcctgaatggggtacccagccgagc

SEQ ID NO: 865637 - DNA, 25 bp, Homo sapien
aggctcctcctgaatggggtaccca

SEQ ID NO: 865638 - DNA, 25 bp, Homo sapien
tccagacgcggcttgctggcagtgt

SEQ ID NO: 865639 - DNA, 25 bp, Homo sapien
gttcaagtccagacgcggcttgctg

SEQ ID NO: 865640 - DNA, 25 bp, Homo sapien
acgcggcttgctggcagtgtggtca

SEQ ID NO: 865641 - DNA, 25 bp, Homo sapien
ttcaagtccagacgcggcttgctgg

SEQ ID NO: 865642 - DNA, 25 bp, Homo sapien
aggctctgtttcttgcgggggcagt

SEQ ID NO: 865643 - DNA, 25 bp, Homo sapien
caggctctgtttcttgcgggggcag

SEQ ID NO: 865644 - DNA, 25 bp, Homo sapien
gaggctccctcggtcagttgggcca

SEQ ID NO: 865645 - DNA, 25 bp, Homo sapien
agacggacggacagccggccagcac

SEQ ID NO: 865646 - DNA, 25 bp, Homo sapien
agacaaacagctccacgcagacgga

SEQ ID NO: 865647 - DNA, 25 bp, Homo sapien
ggcagagatgtgagcggccagcggg

SEQ ID NO: 865648 - DNA, 25 bp, Homo sapien
ccccgtgcagacatgcccttgttga

SEQ ID NO: 865649 - DNA, 25 bp, Homo sapien
ggtctgatcatcagggtgctcccag

SEQ ID NO: 865650 - DNA, 25 bp, Homo sapien
gcacggtggagacgcatgtccatcc

SEQ ID NO: 865651 - DNA, 25 bp, Homo sapien
cccctgaaaaggcacgtggacgtgg

SEQ ID NO: 865652 - DNA, 25 bp, Homo sapien
tgggaggtcacggaccctcacggcc

SEQ ID NO: 865653 - DNA, 25 bp, Homo sapien
ctgcgccgggctgatccgctgtgaa

SEQ ID NO: 865654 - DNA, 25 bp, Homo sapien
ccgctgtgaacagcggttttggaga

SEQ ID NO: 865655 - DNA, 25 bp, Homo sapien
gagatggtacgtcttgcagaggcat

SEQ ID NO: 865656 - DNA, 25 bp, Homo sapien
gctcgggtggtagtcgcaggagccc

SEQ ID NO: 865657 - DNA, 25 bp, Homo sapien
gggcctgtggtctgtctccgcctct

SEQ ID NO: 865658 - DNA, 25 bp, Homo sapien
gggcacgtggctggcatagctcggg

SEQ ID NO: 865659 - DNA, 25 bp, Homo sapien
cgtggctggcatagctcgggtggta

SEQ ID NO: 865660 - DNA, 25 bp, Homo sapien
cacccggaattgcgagagagctcct

SEQ ID NO: 865661 - DNA, 25 bp, Homo sapien
acccggaattgcgagagagctcctc

SEQ ID NO: 865662 - DNA, 25 bp, Homo sapien
gtccatgattcgtgggcaccaggca

SEQ ID NO: 865663 - DNA, 25 bp, Homo sapien
gaggactggataatcggggcccacc

SEQ ID NO: 865664 - DNA, 25 bp, Homo sapien
tagttatccaggcactcagcccctg

SEQ ID NO: 865665 - DNA, 25 bp, Homo sapien
cccctgtgtatgacggggtccatga

SEQ ID NO: 865666 - DNA, 25 bp, Homo sapien
ggtttcgggggcatccactgagagc

SEQ ID NO: 865667 - DNA, 25 bp, Homo sapien
gggtttcgggggcatccactgagag

SEQ ID NO: 865668 - DNA, 25 bp, Homo sapien
cggggtttcgggggcatccactgag

SEQ ID NO: 865669 - DNA, 25 bp, Homo sapien
gtttcgggggcatccactgagagcc

SEQ ID NO: 865670 - DNA, 25 bp, Homo sapien
tcagccctctcaacaggtcctgggt

SEQ ID NO: 865671 - DNA, 25 bp, Homo sapien
ttgctcagtaagtgaaaggagaact

SEQ ID NO: 865672 - DNA, 25 bp, Homo sapien
cctctgcagccaaacattgctcagt

SEQ ID NO: 865673 - DNA, 25 bp, Homo sapien
tacagccagagggatacccgtgggc

SEQ ID NO: 865674 - DNA, 25 bp, Homo sapien
tcgggtgagcagcatgggcaacgtt

SEQ ID NO: 865675 - DNA, 25 bp, Homo sapien
agcatgggcaacgttgcaccccaga

SEQ ID NO: 865676 - DNA, 25 bp, Homo sapien
tgcagatataacgagcaccccggtg

SEQ ID NO: 865677 - DNA, 25 bp, Homo sapien
cggtgaccatgacgatcgggtgagc

SEQ ID NO: 865678 - DNA, 25 bp, Homo sapien
acctgggagacctcgttagcgcaga

SEQ ID NO: 865679 - DNA, 25 bp, Homo sapien
ctttattaataatccggtgggctgg

SEQ ID NO: 865680 - DNA, 25 bp, Homo sapien
ctttataaagtgtcaggccggctgc

SEQ ID NO: 865681 - DNA, 25 bp, Homo sapien
ttagcgcagaatccaaaaccgtgac

SEQ ID NO: 865682 - DNA, 25 bp, Homo sapien
gacagatggggtgtcaggacccatc

SEQ ID NO: 865683 - DNA, 25 bp, Homo sapien
ctaggtggaccgacagacagacaga

SEQ ID NO: 865684 - DNA, 25 bp, Homo sapien
cagacagacagatggggtgtcagga

SEQ ID NO: 865685 - DNA, 25 bp, Homo sapien
taggtggaccgacagacagacagat

SEQ ID NO: 865686 - DNA, 25 bp, Homo sapien
gttgcccacgactccctagtttctg

SEQ ID NO: 865687 - DNA, 25 bp, Homo sapien
gcttcatggcacagggcgtggccat

SEQ ID NO: 865688 - DNA, 25 bp, Homo sapien
cacgactccctagtttctgtgaggg

SEQ ID NO: 865689 - DNA, 25 bp, Homo sapien
tgggcactccgtgactcagtttccc

SEQ ID NO: 865690 - DNA, 25 bp, Homo sapien
caccgaggcaaacacggaggcacgt

SEQ ID NO: 865691 - DNA, 25 bp, Homo sapien
ccgaggcaaacacggaggcacgtag

SEQ ID NO: 865692 - DNA, 25 bp, Homo sapien
gagcacgtccgtcctgcaggcaaga

SEQ ID NO: 865693 - DNA, 25 bp, Homo sapien
tgagagggtcggctcctgcccgagg

SEQ ID NO: 865694 - DNA, 25 bp, Homo sapien
ttgagaccacagacggtagcgcagg

SEQ ID NO: 865695 - DNA, 25 bp, Homo sapien
tcccgagtccaagtccgaatgccgg

SEQ ID NO: 865696 - DNA, 25 bp, Homo sapien
atggccccgagtccaagtccggatg

SEQ ID NO: 865697 - DNA, 25 bp, Homo sapien
cacatgccccttgtagggacaggag

SEQ ID NO: 865698 - DNA, 25 bp, Homo sapien
gatcttggacaagcggaacttggac

SEQ ID NO: 865699 - DNA, 25 bp, Homo sapien
cggaacttggacttcttcctctgga

SEQ ID NO: 865700 - DNA, 25 bp, Homo sapien
tggtgaccagatcttggacaagcgg

SEQ ID NO: 865701 - DNA, 25 bp, Homo sapien
tggacaagcggaacttggacttctt

SEQ ID NO: 865702 - DNA, 25 bp, Homo sapien
agtgaggccgtgctcaacgccgcag

SEQ ID NO: 865703 - DNA, 25 bp, Homo sapien
tgtgccctcccacgtgagaacctgc

SEQ ID NO: 865704 - DNA, 25 bp, Homo sapien
acgtgagaacctgccccgactgggt

SEQ ID NO: 865705 - DNA, 25 bp, Homo sapien
actggccacaatccgccctgggcct

SEQ ID NO: 865706 - DNA, 25 bp, Homo sapien
ggagggagctctcaccctcagggtg

SEQ ID NO: 865707 - DNA, 25 bp, Homo sapien
ggcgggagggagctctcaccctcag

SEQ ID NO: 865708 - DNA, 25 bp, Homo sapien
gctggaggcccggtccacccagcca

SEQ ID NO: 865709 - DNA, 25 bp, Homo sapien
tcaccctcagggtgaacctgcctgt

SEQ ID NO: 865710 - DNA, 25 bp, Homo sapien
tcaatcatgtcccgcagcatctgat

SEQ ID NO: 865711 - DNA, 25 bp, Homo sapien
aatcatgtcccgcagcatctgatcc

SEQ ID NO: 865712 - DNA, 25 bp, Homo sapien
gtcccgcagcatctgatcctcctct

SEQ ID NO: 865713 - DNA, 25 bp, Homo sapien
gcagcatctgatcctcctcttgttc

SEQ ID NO: 865714 - DNA, 25 bp, Homo sapien
gcctgggccgaccacacaggtgatg

SEQ ID NO: 865715 - DNA, 25 bp, Homo sapien
tgacaggccacaccttggaaccctg

SEQ ID NO: 865716 - DNA, 25 bp, Homo sapien
gaccagatggccatgagcgacaatg

SEQ ID NO: 865717 - DNA, 25 bp, Homo sapien
acagtgacatggtacaggagggccc

SEQ ID NO: 865718 - DNA, 25 bp, Homo sapien
acagtccgtgcaggagccaggagac

SEQ ID NO: 865719 - DNA, 25 bp, Homo sapien
tggacccctcatgagacgagacagg

SEQ ID NO: 865720 - DNA, 25 bp, Homo sapien
aggtgccgacccagaatgccatgtg

SEQ ID NO: 865721 - DNA, 25 bp, Homo sapien
ccagagggtctcatagaggtggact

SEQ ID NO: 865722 - DNA, 25 bp, Homo sapien
tccagcgagtccacgatgtcactgc

SEQ ID NO: 865723 - DNA, 25 bp, Homo sapien
tgtcactgcggtcgttcacggtgct

SEQ ID NO: 865724 - DNA, 25 bp, Homo sapien
ttcacggtgctcacgtactgctcca

SEQ ID NO: 865725 - DNA, 25 bp, Homo sapien
cggagccggtcctcgtccagcgagt

SEQ ID NO: 865726 - DNA, 25 bp, Homo sapien
ggcaccctgcatcacgagacaaatg

SEQ ID NO: 865727 - DNA, 25 bp, Homo sapien
cactcgctgcagagatatggacact

SEQ ID NO: 865728 - DNA, 25 bp, Homo sapien
aatgcctatggctcgccctgactgc

SEQ ID NO: 865729 - DNA, 25 bp, Homo sapien
tgaaggaaggaacggccacgtcaga

SEQ ID NO: 865730 - DNA, 25 bp, Homo sapien
caagcacagcaaggttaagtacctt

SEQ ID NO: 865731 - DNA, 25 bp, Homo sapien
taagtaccttggctgaggacacaca

SEQ ID NO: 865732 - DNA, 25 bp, Homo sapien
tacaagcatcctcactttgcagagg

SEQ ID NO: 865733 - DNA, 25 bp, Homo sapien
tttgaaactcaaacgtgggctcgcc

SEQ ID NO: 865734 - DNA, 25 bp, Homo sapien
agacatcctgggctccgcggcatcc

SEQ ID NO: 865735 - DNA, 25 bp, Homo sapien
aggacagtcaggtggcctcacagag

SEQ ID NO: 865736 - DNA, 25 bp, Homo sapien
cccagacatcctgggctccgcggca

SEQ ID NO: 865737 - DNA, 25 bp, Homo sapien
acatcctgggctccgcggcatccct

SEQ ID NO: 865738 - DNA, 25 bp, Homo sapien
tggccatgagccggcgcagctcgcc

SEQ ID NO: 865739 - DNA, 25 bp, Homo sapien
ttggccatgagccggcgcagctcgc

SEQ ID NO: 865740 - DNA, 25 bp, Homo sapien
ccatgagccggcgcagctcgccctc

SEQ ID NO: 865741 - DNA, 25 bp, Homo sapien
gccatgagccggcgcagctcgccct

SEQ ID NO: 865742 - DNA, 25 bp, Homo sapien
accatgaggctatcctcagcgtcat

SEQ ID NO: 865743 - DNA, 25 bp, Homo sapien
cagtccaccatgaggctatcctcag

SEQ ID NO: 865744 - DNA, 25 bp, Homo sapien
gctgcttctcgtgaatgagccagaa

SEQ ID NO: 865745 - DNA, 25 bp, Homo sapien
cagaagctgcttctcgtgaatgagc

SEQ ID NO: 865746 - DNA, 25 bp, Homo sapien
gtctgtgggagtcgggctggcccag

SEQ ID NO: 865747 - DNA, 25 bp, Homo sapien
aggggggcccgccagagttcatggc

SEQ ID NO: 865748 - DNA, 25 bp, Homo sapien
caggactgagggtgtctgtgggagt

SEQ ID NO: 865749 - DNA, 25 bp, Homo sapien
gggtgtctgtgggagtcgggctggc

SEQ ID NO: 865750 - DNA, 25 bp, Homo sapien
tccagccgcctctcgatgtcctgca

SEQ ID NO: 865751 - DNA, 25 bp, Homo sapien
tctgtatctcctccggggagaggta

SEQ ID NO: 865752 - DNA, 25 bp, Homo sapien
agggcgtccagccgcctctcgatgt

SEQ ID NO: 865753 - DNA, 25 bp, Homo sapien
cctctgtatctcctccggggagagg

SEQ ID NO: 865754 - DNA, 25 bp, Homo sapien
gaggggcggtgaggatgccggaggg

SEQ ID NO: 865755 - DNA, 25 bp, Homo sapien
gactggggaggtcaccgtctcgcca

SEQ ID NO: 865756 - DNA, 25 bp, Homo sapien
ggaggtcaccgtctcgccaggcaga

SEQ ID NO: 865757 - DNA, 25 bp, Homo sapien
gagcagggacattggccggggacaa

SEQ ID NO: 865758 - DNA, 25 bp, Homo sapien
aggtcaccgtctcgccaggcagagc

SEQ ID NO: 865759 - DNA, 25 bp, Homo sapien
tcatcaccatgagtctgtaacaagg

SEQ ID NO: 865760 - DNA, 25 bp, Homo sapien
gacacagcttggaaggagcctgacc

SEQ ID NO: 865761 - DNA, 25 bp, Homo sapien
gctagggtctctattcatgagggcg

SEQ ID NO: 865762 - DNA, 25 bp, Homo sapien
caaggtactctgaaacagctagggt

SEQ ID NO: 865763 - DNA, 25 bp, Homo sapien
tgtcacaaacgtcgaggctggcagg

SEQ ID NO: 865764 - DNA, 25 bp, Homo sapien
ttgccctgaaggtgaggtttcttct

SEQ ID NO: 865765 - DNA, 25 bp, Homo sapien
gggctccggccgaagccagttgtca

SEQ ID NO: 865766 - DNA, 25 bp, Homo sapien
ctggtttgccctgaaggtgaggttt

SEQ ID NO: 865767 - DNA, 25 bp, Homo sapien
gcatcacgcatggatacaggcatca

SEQ ID NO: 865768 - DNA, 25 bp, Homo sapien
cgaacacgggtgcacacgtggacac

SEQ ID NO: 865769 - DNA, 25 bp, Homo sapien
gacacatgcatcacgtgtgggcaca

SEQ ID NO: 865770 - DNA, 25 bp, Homo sapien
tggcacgagagctggatatggatcc

SEQ ID NO: 865771 - DNA, 25 bp, Homo sapien
ggcgtggggtcctgtcaggcctcac

SEQ ID NO: 865772 - DNA, 25 bp, Homo sapien
tggctgggcgtggggtcctgtcagg

SEQ ID NO: 865773 - DNA, 25 bp, Homo sapien
gctgggcgtggggtcctgtcaggcc

SEQ ID NO: 865774 - DNA, 25 bp, Homo sapien
gggcgtggggtcctgtcaggcctca

SEQ ID NO: 865775 - DNA, 25 bp, Homo sapien
ggcccgtggttccttgggcttcaga

SEQ ID NO: 865776 - DNA, 25 bp, Homo sapien
ggtcagggtgatgtggacactccca

SEQ ID NO: 865777 - DNA, 25 bp, Homo sapien
agcaaagctgcctgagaccttcctg

SEQ ID NO: 865778 - DNA, 25 bp, Homo sapien
gatgtggacactcccagcaaagctg

SEQ ID NO: 865779 - DNA, 25 bp, Homo sapien
ctgggcttctcctgtccacgggctt

SEQ ID NO: 865780 - DNA, 25 bp, Homo sapien
gggcttcagattcgctctccatcct

SEQ ID NO: 865781 - DNA, 25 bp, Homo sapien
gcttctcctgtccacgggcttcaga

SEQ ID NO: 865782 - DNA, 25 bp, Homo sapien
cctgtccacgggcttcagattcgct

SEQ ID NO: 865783 - DNA, 25 bp, Homo sapien
gatcctctgtccacctgtgcaaggg

SEQ ID NO: 865784 - DNA, 25 bp, Homo sapien
cagcgcgtggctttaacaatgagaa

SEQ ID NO: 865785 - DNA, 25 bp, Homo sapien
tgagcccagctcgataaagccatgg

SEQ ID NO: 865786 - DNA, 25 bp, Homo sapien
gagacagagccgtgcatcaaagcag

SEQ ID NO: 865787 - DNA, 25 bp, Homo sapien
caggtcatagggcatcgtcaccaga

SEQ ID NO: 865788 - DNA, 25 bp, Homo sapien
tcccgaaaacacgtgaggccataaa

SEQ ID NO: 865789 - DNA, 25 bp, Homo sapien
ggcaccagagccctcaggtcatagg

SEQ ID NO: 865790 - DNA, 25 bp, Homo sapien
tagaagaaagctcgctccctgttcc

SEQ ID NO: 865791 - DNA, 25 bp, Homo sapien
caacagcgcgacgttgtcaaagcga

SEQ ID NO: 865792 - DNA, 25 bp, Homo sapien
ccatctccggtatgtggtgacacag

SEQ ID NO: 865793 - DNA, 25 bp, Homo sapien
ggcaaacagcatagccctgaggaca

SEQ ID NO: 865794 - DNA, 25 bp, Homo sapien
gggctgatgatgaaaccgcacacac

SEQ ID NO: 865795 - DNA, 25 bp, Homo sapien
gacgaggactgtaacggcttggcta

SEQ ID NO: 865796 - DNA, 25 bp, Homo sapien
gctggcggttccatcctcgaaggga

SEQ ID NO: 865797 - DNA, 25 bp, Homo sapien
tgagaggtactgctcgtgctcagcg

SEQ ID NO: 865798 - DNA, 25 bp, Homo sapien
gacccctgaggattccgccaagttc

SEQ ID NO: 865799 - DNA, 25 bp, Homo sapien
gcttgaggaagttccgcgcctgctc

SEQ ID NO: 865800 - DNA, 25 bp, Homo sapien
ctcttccagcgctgagagggcctgc

SEQ ID NO: 865801 - DNA, 25 bp, Homo sapien
ggcctgcttgaggaagttccgcgcc

SEQ ID NO: 865802 - DNA, 25 bp, Homo sapien
gggtgggacctctgccagaaaggct

SEQ ID NO: 865803 - DNA, 25 bp, Homo sapien
cactcgggggcacggcgggatggga

SEQ ID NO: 865804 - DNA, 25 bp, Homo sapien
cagatgtggagcttgaactgagtgt

SEQ ID NO: 865805 - DNA, 25 bp, Homo sapien
tgcagatgtggagcttgaactgagt

SEQ ID NO: 865806 - DNA, 25 bp, Homo sapien
agggtctggggcactcgggggcacg

SEQ ID NO: 865807 - DNA, 25 bp, Homo sapien
agctattggtcacacgagggcggac

SEQ ID NO: 865808 - DNA, 25 bp, Homo sapien
cagcccatcggggagctattggtca

SEQ ID NO: 865809 - DNA, 25 bp, Homo sapien
ccatcggggagctattggtcacacg

SEQ ID NO: 865810 - DNA, 25 bp, Homo sapien
ttggtcacacgagggcggactttcc

SEQ ID NO: 865811 - DNA, 25 bp, Homo sapien
gcaggcgagttgcccgcagcaggct

SEQ ID NO: 865812 - DNA, 25 bp, Homo sapien
ccaggccgacggtctggccttgttt

SEQ ID NO: 865813 - DNA, 25 bp, Homo sapien
gttgggtgcagctggaacggaagcc

SEQ ID NO: 865814 - DNA, 25 bp, Homo sapien
aacttggggcttgcagaggcggctg

SEQ ID NO: 865815 - DNA, 25 bp, Homo sapien
ggtgcccggctctcctgtggccttg

SEQ ID NO: 865816 - DNA, 25 bp, Homo sapien
gaaggtgcccggctctcctgtggcc

SEQ ID NO: 865817 - DNA, 25 bp, Homo sapien
tgtggccttgtaggcccccgagtgc

SEQ ID NO: 865818 - DNA, 25 bp, Homo sapien
cagcgtgcaggagcactgcttacac

SEQ ID NO: 865819 - DNA, 25 bp, Homo sapien
gcgtgcgggcagagggcagccccac

SEQ ID NO: 865820 - DNA, 25 bp, Homo sapien
aggtgcacgtgcttgccgcagaccc

SEQ ID NO: 865821 - DNA, 25 bp, Homo sapien
aggtgctgctgaccaagctgcccgc

SEQ ID NO: 865822 - DNA, 25 bp, Homo sapien
agcagctccggtggtaaagcctccc

SEQ ID NO: 865823 - DNA, 25 bp, Homo sapien
ccaggtgccgctgtaccaggtgcac

SEQ ID NO: 865824 - DNA, 25 bp, Homo sapien
aggtggccggaagagcccatcttac

SEQ ID NO: 865825 - DNA, 25 bp, Homo sapien
cacaggtggccggaagagcccatct

SEQ ID NO: 865826 - DNA, 25 bp, Homo sapien
cagcccacaggtggccggaagagcc

SEQ ID NO: 865827 - DNA, 25 bp, Homo sapien
gtggccggaagagcccatcttacag

SEQ ID NO: 865828 - DNA, 25 bp, Homo sapien
tcctccgaggccctcttcacgcctg

SEQ ID NO: 865829 - DNA, 25 bp, Homo sapien
tccgaggccctcttcacgcctgcca

SEQ ID NO: 865830 - DNA, 25 bp, Homo sapien
agatagtggaggcttccgggctggg

SEQ ID NO: 865831 - DNA, 25 bp, Homo sapien
ttccctgacggctcctcctcagagt

SEQ ID NO: 865832 - DNA, 25 bp, Homo sapien
cactcagagccccagctggagtcag

SEQ ID NO: 865833 - DNA, 25 bp, Homo sapien
tctagtccctccagaggtcccagtg

SEQ ID NO: 865834 - DNA, 25 bp, Homo sapien
tgagggcactttttctggcacagcc

SEQ ID NO: 865835 - DNA, 25 bp, Homo sapien
ctggctctgaaagggtctagtccct

SEQ ID NO: 865836 - DNA, 25 bp, Homo sapien
ctgggacacgtaggtcaagatgctc

SEQ ID NO: 865837 - DNA, 25 bp, Homo sapien
gtcaagatgctcagccggtcaggca

SEQ ID NO: 865838 - DNA, 25 bp, Homo sapien
tccagcaaggctgggatgcccaagt

SEQ ID NO: 865839 - DNA, 25 bp, Homo sapien
gcggccgtggaagtagttgtaatac

SEQ ID NO: 865840 - DNA, 25 bp, Homo sapien
caggctggagcgcagcgtcagctca

SEQ ID NO: 865841 - DNA, 25 bp, Homo sapien
gtgcgcaccaccacgccccactaat

SEQ ID NO: 865842 - DNA, 25 bp, Homo sapien
ggctggagcgcagcgtcagctcact

SEQ ID NO: 865843 - DNA, 25 bp, Homo sapien
gcaacctccaccttccggattcaag

SEQ ID NO: 865844 - DNA, 25 bp, Homo sapien
caaattgtccccgtgctgagcaggg

SEQ ID NO: 865845 - DNA, 25 bp, Homo sapien
ttctagaacgctagggtcacccagc

SEQ ID NO: 865846 - DNA, 25 bp, Homo sapien
ggagcgtggtgcttattctgcagca

SEQ ID NO: 865847 - DNA, 25 bp, Homo sapien
tatgccctgggtgccaagataagag

SEQ ID NO: 865848 - DNA, 25 bp, Homo sapien
ttttccttcttgagagcactgaagt

SEQ ID NO: 865849 - DNA, 25 bp, Homo sapien
tattttccttcttgagagcactgaa

SEQ ID NO: 865850 - DNA, 25 bp, Homo sapien
ttccttcttgagagcactgaagttt

SEQ ID NO: 865851 - DNA, 25 bp, Homo sapien
atattttccttcttgagagcactga

SEQ ID NO: 865852 - DNA, 25 bp, Homo sapien
aaatatagtgatcgtgacccgtctg

SEQ ID NO: 865853 - DNA, 25 bp, Homo sapien
taaaatcaggtataccatggcccgg

SEQ ID NO: 865854 - DNA, 25 bp, Homo sapien
aacaggtttcagacggcaggaccac

SEQ ID NO: 865855 - DNA, 25 bp, Homo sapien
taaatcatgatctggaagccgggtg

SEQ ID NO: 865856 - DNA, 25 bp, Homo sapien
tcctgggtggccgacatcacactgt

SEQ ID NO: 865857 - DNA, 25 bp, Homo sapien
tcttgggaatgtatacccccctcca

SEQ ID NO: 865858 - DNA, 25 bp, Homo sapien
tctgggggctcttgggaatgtatac

SEQ ID NO: 865859 - DNA, 25 bp, Homo sapien
gggtggccgacatcacactgtttac

SEQ ID NO: 865860 - DNA, 25 bp, Homo sapien
ccagctgccctgtgacaccagtatg

SEQ ID NO: 865861 - DNA, 25 bp, Homo sapien
acaccagtatggaaacagcgcccgg

SEQ ID NO: 865862 - DNA, 25 bp, Homo sapien
agctgccctgtgacaccagtatgga

SEQ ID NO: 865863 - DNA, 25 bp, Homo sapien
tgacaccagtatggaaacagcgccc

SEQ ID NO: 865864 - DNA, 25 bp, Homo sapien
tgcaagggcaacagaggcacgttcc

SEQ ID NO: 865865 - DNA, 25 bp, Homo sapien
gctgctgcccaaacgccaaatggaa

SEQ ID NO: 865866 - DNA, 25 bp, Homo sapien
tggtggctccacgaatgcatgtcac

SEQ ID NO: 865867 - DNA, 25 bp, Homo sapien
tgcatgtcacaacctcagagcaggg

SEQ ID NO: 865868 - DNA, 25 bp, Homo sapien
tgcactggccgctcccccacagtgg

SEQ ID NO: 865869 - DNA, 25 bp, Homo sapien
gctgttctccatctcgggccctatc

SEQ ID NO: 865870 - DNA, 25 bp, Homo sapien
ctgcactggccgctcccccacagtg

SEQ ID NO: 865871 - DNA, 25 bp, Homo sapien
ctccatctcgggccctatcacccgg

SEQ ID NO: 865872 - DNA, 25 bp, Homo sapien
gaaagccaggccgtcgcggaacgac

SEQ ID NO: 865873 - DNA, 25 bp, Homo sapien
agaaagccaggccgtcgcggaacga

SEQ ID NO: 865874 - DNA, 25 bp, Homo sapien
agatattcacgtcgcggtagccctc

SEQ ID NO: 865875 - DNA, 25 bp, Homo sapien
gtcatgttgcagatattcacgtcgc

SEQ ID NO: 865876 - DNA, 25 bp, Homo sapien
ggcaccactgttgcagcgccctgat

SEQ ID NO: 865877 - DNA, 25 bp, Homo sapien
accactgttgcagcgccctgatggc

SEQ ID NO: 865878 - DNA, 25 bp, Homo sapien
cgcgcccgccgcgcggcggaaccgc

SEQ ID NO: 865879 - DNA, 25 bp, Homo sapien
ggcgcgcccgccgcgcggcggaacc

SEQ ID NO: 865880 - DNA, 25 bp, Homo sapien
gtgggcggcgcgcccgccgcgcggc

SEQ ID NO: 865881 - DNA, 25 bp, Homo sapien
gcggcgcgcccgccgcgcggcggaa

SEQ ID NO: 865882 - DNA, 25 bp, Homo sapien
ccggccggcgggacagacgctggga

SEQ ID NO: 865883 - DNA, 25 bp, Homo sapien
ctgggaccgctacggaaccgccaga

SEQ ID NO: 865884 - DNA, 25 bp, Homo sapien
agccccagctgagccggactgaggg

SEQ ID NO: 865885 - DNA, 25 bp, Homo sapien
agctgagccggactgagggcgacga

SEQ ID NO: 865886 - DNA, 25 bp, Homo sapien
cgttttccatcttagggagggcgca

SEQ ID NO: 865887 - DNA, 25 bp, Homo sapien
cctgtgccccgctacaagtggatgg

SEQ ID NO: 865888 - DNA, 25 bp, Homo sapien
ggactctatgttccccggagctggg

SEQ ID NO: 865889 - DNA, 25 bp, Homo sapien
aaaagggcagcgatttgtccaaggc

SEQ ID NO: 865890 - DNA, 25 bp, Homo sapien
caggcgtggatcgtggcctgaccca

SEQ ID NO: 865891 - DNA, 25 bp, Homo sapien
tctgtccaggcgcagtcaagtttcc

SEQ ID NO: 865892 - DNA, 25 bp, Homo sapien
ctgctgggtgccccacacggctggt

SEQ ID NO: 865893 - DNA, 25 bp, Homo sapien
cctggggtcggcaccgtcattccaa

SEQ ID NO: 865894 - DNA, 25 bp, Homo sapien
gcctggctgacctgggagcactcat

SEQ ID NO: 865895 - DNA, 25 bp, Homo sapien
cctggctgacctgggagcactcatg

SEQ ID NO: 865896 - DNA, 25 bp, Homo sapien
tggctgacctgggagcactcatggg

SEQ ID NO: 865897 - DNA, 25 bp, Homo sapien
ggcctggctgacctgggagcactca

SEQ ID NO: 865898 - DNA, 25 bp, Homo sapien
aacagaggccgaccccgtgggcaga

SEQ ID NO: 865899 - DNA, 25 bp, Homo sapien
acctgcgggaactgctggcccaagg

SEQ ID NO: 865900 - DNA, 25 bp, Homo sapien
aaggccggactcactcaacagaggc

SEQ ID NO: 865901 - DNA, 25 bp, Homo sapien
gccggcactcgacagggagaccatg

SEQ ID NO: 865902 - DNA, 25 bp, Homo sapien
gagggcttgctggacggcccctgat

SEQ ID NO: 865903 - DNA, 25 bp, Homo sapien
tgggctttgcctcgaggatccccgg

SEQ ID NO: 865904 - DNA, 25 bp, Homo sapien
ctcggagtattgctcctgggcctgc

SEQ ID NO: 865905 - DNA, 25 bp, Homo sapien
tcaggtcgtttcattcaaaaccagc

SEQ ID NO: 865906 - DNA, 25 bp, Homo sapien
tctggccgtacatgcccaccaggaa

SEQ ID NO: 865907 - DNA, 25 bp, Homo sapien
atcacggcctccatatgcaggatcc

SEQ ID NO: 865908 - DNA, 25 bp, Homo sapien
gggcctcggagatctgcgcgctggg

SEQ ID NO: 865909 - DNA, 25 bp, Homo sapien
aggaaggcccggtggagcagcacag

SEQ ID NO: 865910 - DNA, 25 bp, Homo sapien
aggttccggagggccgtctgcacca

SEQ ID NO: 865911 - DNA, 25 bp, Homo sapien
ttggcacaggagagcgtactcaggc

SEQ ID NO: 865912 - DNA, 25 bp, Homo sapien
agagcgtactcaggcaggttccgga

SEQ ID NO: 865913 - DNA, 25 bp, Homo sapien
cacaggagagcgtactcaggcaggt

SEQ ID NO: 865914 - DNA, 25 bp, Homo sapien
gaacgtgggcaggaaagcggctgca

SEQ ID NO: 865915 - DNA, 25 bp, Homo sapien
acgtgggcaggaaagcggctgcaat

SEQ ID NO: 865916 - DNA, 25 bp, Homo sapien
aacgtgggcaggaaagcggctgcaa

SEQ ID NO: 865917 - DNA, 25 bp, Homo sapien
gttgcggcaacactcctcggccgag

SEQ ID NO: 865918 - DNA, 25 bp, Homo sapien
ccgagctcatcagccgctgcaggtt

SEQ ID NO: 865919 - DNA, 25 bp, Homo sapien
ggccgagctcatcagccgctgcagg

SEQ ID NO: 865920 - DNA, 25 bp, Homo sapien
gcgaggttgcggcaacactcctcgg

SEQ ID NO: 865921 - DNA, 25 bp, Homo sapien
ggatctcgggtctccgccgggacat

SEQ ID NO: 865922 - DNA, 25 bp, Homo sapien
tctcgtctatgtcactcagaacctc

SEQ ID NO: 865923 - DNA, 25 bp, Homo sapien
gaagctcaggatctcgggtctccgc

SEQ ID NO: 865924 - DNA, 25 bp, Homo sapien
ccgggacatctcgtctatgtcactc

SEQ ID NO: 865925 - DNA, 25 bp, Homo sapien
ggccagaccagaactgaagggccca

SEQ ID NO: 865926 - DNA, 25 bp, Homo sapien
agggggcaaggccccgagcaccaca

SEQ ID NO: 865927 - DNA, 25 bp, Homo sapien
accagaactgaagggcccaggcaga

SEQ ID NO: 865928 - DNA, 25 bp, Homo sapien
cacagagagagggccagaccagaac

SEQ ID NO: 865929 - DNA, 25 bp, Homo sapien
ctggcgtgggtgaagcagggcctga

SEQ ID NO: 865930 - DNA, 25 bp, Homo sapien
gtgggtgaagcagggcctgactcac

SEQ ID NO: 865931 - DNA, 25 bp, Homo sapien
gcgtgggtgaagcagggcctgactc

SEQ ID NO: 865932 - DNA, 25 bp, Homo sapien
tggcgtgggtgaagcagggcctgac

SEQ ID NO: 865933 - DNA, 25 bp, Homo sapien
gtcagaggggtgaacagggagacgc

SEQ ID NO: 865934 - DNA, 25 bp, Homo sapien
ggccatctcggccgcggtcagaggg

SEQ ID NO: 865935 - DNA, 25 bp, Homo sapien
ccgtttcatgtagggggccatctcg

SEQ ID NO: 865936 - DNA, 25 bp, Homo sapien
gaaagccgtttcatgtagggggcca

SEQ ID NO: 865937 - DNA, 25 bp, Homo sapien
ctgctgggtttctcgcaatgtgggc

SEQ ID NO: 865938 - DNA, 25 bp, Homo sapien
gtgccacactgaggcaccaggacct

SEQ ID NO: 865939 - DNA, 25 bp, Homo sapien
gctgcctttggatccggcgcatgca

SEQ ID NO: 865940 - DNA, 25 bp, Homo sapien
ggcgcatgcacctctgcgagtctct

SEQ ID NO: 865941 - DNA, 25 bp, Homo sapien
aggtcactgttgtcgaaggacaggt

SEQ ID NO: 865942 - DNA, 25 bp, Homo sapien
ggtcactgttgtcgaaggacaggtc

SEQ ID NO: 865943 - DNA, 25 bp, Homo sapien
ttcgtccaggcctcggtcggtcctg

SEQ ID NO: 865944 - DNA, 25 bp, Homo sapien
ctcttcgtccaggcctcggtcggtc

SEQ ID NO: 865945 - DNA, 25 bp, Homo sapien
tacttatggatgaactgcacaaact

SEQ ID NO: 865946 - DNA, 25 bp, Homo sapien
gcattgtaggtaatgtacttatgga

SEQ ID NO: 865947 - DNA, 25 bp, Homo sapien
agatggcgggaggacttcctgtaat

SEQ ID NO: 865948 - DNA, 25 bp, Homo sapien
gatggcgggaggacttcctgtaatt

SEQ ID NO: 865949 - DNA, 25 bp, Homo sapien
cctggtgctcgctgcggaacacgtg

SEQ ID NO: 865950 - DNA, 25 bp, Homo sapien
aggtggttctgctgccggaactcct

SEQ ID NO: 865951 - DNA, 25 bp, Homo sapien
agcagcaggcggatgaaggacagaa

SEQ ID NO: 865952 - DNA, 25 bp, Homo sapien
aggacagaaggcagtcccacagcgc

SEQ ID NO: 865953 - DNA, 25 bp, Homo sapien
tccaacgcccgggagtcgctggtgt

SEQ ID NO: 865954 - DNA, 25 bp, Homo sapien
caccgccagcttccggcaggccatg

SEQ ID NO: 865955 - DNA, 25 bp, Homo sapien
ccatgctggcatccgcccctcggtt

SEQ ID NO: 865956 - DNA, 25 bp, Homo sapien
gctggtgtccgcaaggagcgtgatg

SEQ ID NO: 865957 - DNA, 25 bp, Homo sapien
cagctccggccgctgtaggtagagc

SEQ ID NO: 865958 - DNA, 25 bp, Homo sapien
agaaggtctcggcagcgcctgccca

SEQ ID NO: 865959 - DNA, 25 bp, Homo sapien
cttcgctgtgcagtaggacctcagg

SEQ ID NO: 865960 - DNA, 25 bp, Homo sapien
agtaggacctcaggcacgggcaccc

SEQ ID NO: 865961 - DNA, 25 bp, Homo sapien
ctgacaggtgctccgtcaccttcct

SEQ ID NO: 865962 - DNA, 25 bp, Homo sapien
gacaggtgctccgtcaccttcctga

SEQ ID NO: 865963 - DNA, 25 bp, Homo sapien
cctgacaggtgctccgtcaccttcc

SEQ ID NO: 865964 - DNA, 25 bp, Homo sapien
tgacaggtgctccgtcaccttcctg

SEQ ID NO: 865965 - DNA, 25 bp, Homo sapien
cgcccctgccagatgcgaggaacat

SEQ ID NO: 865966 - DNA, 25 bp, Homo sapien
cccctgccagatgcgaggaacatgg

SEQ ID NO: 865967 - DNA, 25 bp, Homo sapien
cctgccagatgcgaggaacatggat

SEQ ID NO: 865968 - DNA, 25 bp, Homo sapien
gccagatgcgaggaacatggatgca

SEQ ID NO: 865969 - DNA, 25 bp, Homo sapien
gcaggactcggatgcactggtgcag

SEQ ID NO: 865970 - DNA, 25 bp, Homo sapien
agcaggactcggatgcactggtgca

SEQ ID NO: 865971 - DNA, 25 bp, Homo sapien
tggactgatgcgtgaagagggtcag

SEQ ID NO: 865972 - DNA, 25 bp, Homo sapien
ggactgatgcgtgaagagggtcagg

SEQ ID NO: 865973 - DNA, 25 bp, Homo sapien
tgacgagggccccagccgcacggcc

SEQ ID NO: 865974 - DNA, 25 bp, Homo sapien
cagccagtccactaggaggcctgac

SEQ ID NO: 865975 - DNA, 25 bp, Homo sapien
cagtccactaggaggcctgacgagg

SEQ ID NO: 865976 - DNA, 25 bp, Homo sapien
atttccagccagtccactaggaggc

SEQ ID NO: 865977 - DNA, 25 bp, Homo sapien
ctcaccaccacaacgggcttacagg

SEQ ID NO: 865978 - DNA, 25 bp, Homo sapien
tccgcacccggcttccccccagcca

SEQ ID NO: 865979 - DNA, 25 bp, Homo sapien
agggagctcaccaccacaacgggct

SEQ ID NO: 865980 - DNA, 25 bp, Homo sapien
ggagctcaccaccacaacgggctta

SEQ ID NO: 865981 - DNA, 25 bp, Homo sapien
agcatccgcagtggcagagaagaat

SEQ ID NO: 865982 - DNA, 25 bp, Homo sapien
gaagaatgcagtcagcagctcctcc

SEQ ID NO: 865983 - DNA, 25 bp, Homo sapien
cagagaagaatgcagtcagcagctc

SEQ ID NO: 865984 - DNA, 25 bp, Homo sapien
acctcacctcgatcagcccctggag

SEQ ID NO: 865985 - DNA, 25 bp, Homo sapien
tttgctgatcaggtccggctccacg

SEQ ID NO: 865986 - DNA, 25 bp, Homo sapien
tgctccccagacctcagggtggcga

SEQ ID NO: 865987 - DNA, 25 bp, Homo sapien
ctccccagacctcagggtggcgatg

SEQ ID NO: 865988 - DNA, 25 bp, Homo sapien
tgatcaggtccggctccacgctgca

SEQ ID NO: 865989 - DNA, 25 bp, Homo sapien
cacctccaggtcctgacggaaggcc

SEQ ID NO: 865990 - DNA, 25 bp, Homo sapien
cctccaggtcctgacggaaggccag

SEQ ID NO: 865991 - DNA, 25 bp, Homo sapien
acctccaggtcctgacggaaggcca

SEQ ID NO: 865992 - DNA, 25 bp, Homo sapien
atcactgagcctgcgcccggctgag

SEQ ID NO: 865993 - DNA, 25 bp, Homo sapien
gaagagcgaggagaagccggtgtcc

SEQ ID NO: 865994 - DNA, 25 bp, Homo sapien
catcctgagctgtgcccgcaggggc

SEQ ID NO: 865995 - DNA, 25 bp, Homo sapien
agaagccggtgtcctgtggcacaca

SEQ ID NO: 865996 - DNA, 25 bp, Homo sapien
ggcctgcaggacacgcaccgtgatg

SEQ ID NO: 865997 - DNA, 25 bp, Homo sapien
ctggtactggcagagctggcgcagc

SEQ ID NO: 865998 - DNA, 25 bp, Homo sapien
gtgcatggacatcaccagggcaccg

SEQ ID NO: 865999 - DNA, 25 bp, Homo sapien
gaagtggctacggtgcatggacatc

SEQ ID NO: 866000 - DNA, 25 bp, Homo sapien
ctggaggaacatgccagccaggtcg

SEQ ID NO: 866001 - DNA, 25 bp, Homo sapien
cgaatccggccctggcctatgggct

SEQ ID NO: 866002 - DNA, 25 bp, Homo sapien
gcccagcacccggagctgggtcccc

SEQ ID NO: 866003 - DNA, 25 bp, Homo sapien
ggctgctctttggtttgggtgcctc

SEQ ID NO: 866004 - DNA, 25 bp, Homo sapien
aaagtctggcctccggaggcgccgc

SEQ ID NO: 866005 - DNA, 25 bp, Homo sapien
ccgcgctcatgctggacctccacca

SEQ ID NO: 866006 - DNA, 25 bp, Homo sapien
tgagcaaggagtggaaagtctggcc

SEQ ID NO: 866007 - DNA, 25 bp, Homo sapien
gcgctcatgctggacctccaccagg

SEQ ID NO: 866008 - DNA, 25 bp, Homo sapien
gtgtgtgaacccactccgcaggtcc

SEQ ID NO: 866009 - DNA, 25 bp, Homo sapien
ctggggctcggtcagcgtgtgtgaa

SEQ ID NO: 866010 - DNA, 25 bp, Homo sapien
aggccccaaaagcctggccgggctg

SEQ ID NO: 866011 - DNA, 25 bp, Homo sapien
gctcggtcagcgtgtgtgaacccac

SEQ ID NO: 866012 - DNA, 25 bp, Homo sapien
gggatgccaaacgactgcacgaaca

SEQ ID NO: 866013 - DNA, 25 bp, Homo sapien
atgatgttctgctccagagtctggg

SEQ ID NO: 866014 - DNA, 25 bp, Homo sapien
aggagtttgctcatgctggacacgg

SEQ ID NO: 866015 - DNA, 25 bp, Homo sapien
gaactggaggagtttgctcatgctg

SEQ ID NO: 866016 - DNA, 25 bp, Homo sapien
gggccacgtgggctcggtgacccca

SEQ ID NO: 866017 - DNA, 25 bp, Homo sapien
acctggggcagtgcacactcggcag

SEQ ID NO: 866018 - DNA, 25 bp, Homo sapien
ctggggcagtgcacactcggcagcc

SEQ ID NO: 866019 - DNA, 25 bp, Homo sapien
gggcagtgcacactcggcagcccca

SEQ ID NO: 866020 - DNA, 25 bp, Homo sapien
ctggggcagtgcacactcggcagcc

SEQ ID NO: 866021 - DNA, 25 bp, Homo sapien
gggcagtgcacactcggcagcccca

SEQ ID NO: 866022 - DNA, 25 bp, Homo sapien
ggcagtgcacactcggcagccccac

SEQ ID NO: 866023 - DNA, 25 bp, Homo sapien
tggggcagtgcacactcggcagccc

SEQ ID NO: 866024 - DNA, 25 bp, Homo sapien
gggccacgtgggctcggtgacccca

SEQ ID NO: 866025 - DNA, 25 bp, Homo sapien
ccaggggtgggtgggcgctccagag

SEQ ID NO: 866026 - DNA, 25 bp, Homo sapien
ccctggatggcagctgtgtgggccc

SEQ ID NO: 866027 - DNA, 25 bp, Homo sapien
ctggatggcagctgtgtgggcccca

SEQ ID NO: 866028 - DNA, 25 bp, Homo sapien
aggggtgggtgggcgctccagaggg

SEQ ID NO: 866029 - DNA, 25 bp, Homo sapien
ctgacagtaagaccctctcggacgg

SEQ ID NO: 866030 - DNA, 25 bp, Homo sapien
gcctgctgtggccaggacatatggt

SEQ ID NO: 866031 - DNA, 25 bp, Homo sapien
tgtttctcactctagacccctgagc

SEQ ID NO: 866032 - DNA, 25 bp, Homo sapien
caggacatatggtctgcaggatccc

SEQ ID NO: 866033 - DNA, 25 bp, Homo sapien
ggatcatgcgcagcttcagccagtc

SEQ ID NO: 866034 - DNA, 25 bp, Homo sapien
agtggcttctcctccggaaaccaga

SEQ ID NO: 866035 - DNA, 25 bp, Homo sapien
tccggaaaccagatgtccagcagcg

SEQ ID NO: 866036 - DNA, 25 bp, Homo sapien
aggcggagcacctcagaacggatca

SEQ ID NO: 866037 - DNA, 25 bp, Homo sapien
gaaggacaacgggtgagcagccttc

SEQ ID NO: 866038 - DNA, 25 bp, Homo sapien
cttcaggaaggacaacgggtgagca

SEQ ID NO: 866039 - DNA, 25 bp, Homo sapien
aacgggtgagcagccttcagaccca

SEQ ID NO: 866040 - DNA, 25 bp, Homo sapien
aggacaacgggtgagcagccttcag

SEQ ID NO: 866041 - DNA, 25 bp, Homo sapien
cggatgctttgcgtaggtgcacgca

SEQ ID NO: 866042 - DNA, 25 bp, Homo sapien
taggtgcacgcatttgatcctcaca

SEQ ID NO: 866043 - DNA, 25 bp, Homo sapien
cacttgctatgtgcggatgctttgc

SEQ ID NO: 866044 - DNA, 25 bp, Homo sapien
gctcctgtgctaggtgagcacttgc

SEQ ID NO: 866045 - DNA, 25 bp, Homo sapien
cacacgtccaccaagtgctcagaga

SEQ ID NO: 866046 - DNA, 25 bp, Homo sapien
tctggctccgcaaagccactgggaa

SEQ ID NO: 866047 - DNA, 25 bp, Homo sapien
caagggcgacgcctgtgactgtgtc

SEQ ID NO: 866048 - DNA, 25 bp, Homo sapien
ggtgaaatcccgagtttgccgcctc

SEQ ID NO: 866049 - DNA, 25 bp, Homo sapien
ggcgggcccagcgtcagcaggatca

SEQ ID NO: 866050 - DNA, 25 bp, Homo sapien
accatggcatggaccacgaggatgt

SEQ ID NO: 866051 - DNA, 25 bp, Homo sapien
agcaggatcaccatggcatggacca

SEQ ID NO: 866052 - DNA, 25 bp, Homo sapien
tcgaggcgggcccagcgtcagcagg

SEQ ID NO: 866053 - DNA, 25 bp, Homo sapien
cgctgctccagcgtaggaagacctg

SEQ ID NO: 866054 - DNA, 25 bp, Homo sapien
taggaagacctggtcctgagactcc

SEQ ID NO: 866055 - DNA, 25 bp, Homo sapien
tgctccagcgtaggaagacctggtc

SEQ ID NO: 866056 - DNA, 25 bp, Homo sapien
ccagcgtaggaagacctggtcctga

SEQ ID NO: 866057 - DNA, 25 bp, Homo sapien
tgggacatgatggtggagcgctcca

SEQ ID NO: 866058 - DNA, 25 bp, Homo sapien
cacgtagcgtgagaagatggacaac

SEQ ID NO: 866059 - DNA, 25 bp, Homo sapien
atggacaacagagcgctcagcacgg

SEQ ID NO: 866060 - DNA, 25 bp, Homo sapien
ggagagcttcgagaagaggtgggac

SEQ ID NO: 866061 - DNA, 25 bp, Homo sapien
caagtagatcaggtaggcgctgatg

SEQ ID NO: 866062 - DNA, 25 bp, Homo sapien
ctccacaggcgtgtgctgggacaag

SEQ ID NO: 866063 - DNA, 25 bp, Homo sapien
ccacaggcgtgtgctgggacaagta

SEQ ID NO: 866064 - DNA, 25 bp, Homo sapien
tgtgctgggacaagtagatcaggta

SEQ ID NO: 866065 - DNA, 25 bp, Homo sapien
cagcagccactgatagccctgcagc

SEQ ID NO: 866066 - DNA, 25 bp, Homo sapien
ctcctgacgctgtcgaacagaggca

SEQ ID NO: 866067 - DNA, 25 bp, Homo sapien
gctgtggtgctcctgacgctgtcga

SEQ ID NO: 866068 - DNA, 25 bp, Homo sapien
tggtgctcctgacgctgtcgaacag

SEQ ID NO: 866069 - DNA, 25 bp, Homo sapien
tgggccggctttcggcagtgcaggc

SEQ ID NO: 866070 - DNA, 25 bp, Homo sapien
agctgggccggctttcggcagtgca

SEQ ID NO: 866071 - DNA, 25 bp, Homo sapien
gctgggccggctttcggcagtgcag

SEQ ID NO: 866072 - DNA, 25 bp, Homo sapien
gccggctttcggcagtgcaggcagg

SEQ ID NO: 866073 - DNA, 25 bp, Homo sapien
agcacctcacacgtggtctgctcat

SEQ ID NO: 866074 - DNA, 25 bp, Homo sapien
ggcgccgcaagaagtagtccagcac

SEQ ID NO: 866075 - DNA, 25 bp, Homo sapien
tgctcatcagccttcgggcccagta

SEQ ID NO: 866076 - DNA, 25 bp, Homo sapien
ttcatggccagcacgcgggaggcca

SEQ ID NO: 866077 - DNA, 25 bp, Homo sapien
actgtaccaggtccgccagccaggg

SEQ ID NO: 866078 - DNA, 25 bp, Homo sapien
cacagcatcgtgcagcaggaactcg

SEQ ID NO: 866079 - DNA, 25 bp, Homo sapien
aggaactcgcacagacactgcacgg

SEQ ID NO: 866080 - DNA, 25 bp, Homo sapien
gggagccctcgctggactgtaccag

SEQ ID NO: 866081 - DNA, 25 bp, Homo sapien
ttcggctgcggcacaagaggtgccc

SEQ ID NO: 866082 - DNA, 25 bp, Homo sapien
ggcttttcacttgatccaggatgtg

SEQ ID NO: 866083 - DNA, 25 bp, Homo sapien
aaagtcagggtttcggctgcggcac

SEQ ID NO: 866084 - DNA, 25 bp, Homo sapien
agaggtgcccgaggcggagggactg

SEQ ID NO: 866085 - DNA, 25 bp, Homo sapien
ggtcccgacggcaggcgcagggcgg

SEQ ID NO: 866086 - DNA, 25 bp, Homo sapien
gggcggggctgtgtgggctgcgtac

SEQ ID NO: 866087 - DNA, 25 bp, Homo sapien
aggtcccgacggcaggcgcagggcg

SEQ ID NO: 866088 - DNA, 25 bp, Homo sapien
cgcagggcggggctgtgtgggctgc

SEQ ID NO: 866089 - DNA, 25 bp, Homo sapien
aggtgcccctcgaaggccaggatct

SEQ ID NO: 866090 - DNA, 25 bp, Homo sapien
ttctcccgctgggcggtctgcagct

SEQ ID NO: 866091 - DNA, 25 bp, Homo sapien
tgcagctcacggttcagcatctccg

SEQ ID NO: 866092 - DNA, 25 bp, Homo sapien
tggtgagctgcgacaggaggaggct

SEQ ID NO: 866093 - DNA, 25 bp, Homo sapien
catcaccatctccatgagcatcttc

SEQ ID NO: 866094 - DNA, 25 bp, Homo sapien
tcaccatctccatgagcatcttcag

SEQ ID NO: 866095 - DNA, 25 bp, Homo sapien
gggtcgggtactcctcccacgcagc

SEQ ID NO: 866096 - DNA, 25 bp, Homo sapien
gtcgggtactcctcccacgcagcca

SEQ ID NO: 866097 - DNA, 25 bp, Homo sapien
ttgaatgcggcgacgaccagcagga

SEQ ID NO: 866098 - DNA, 25 bp, Homo sapien
tctgggttgaatgcggcgacgacca

SEQ ID NO: 866099 - DNA, 25 bp, Homo sapien
agatggcgaggttcggaggctggta

SEQ ID NO: 866100 - DNA, 25 bp, Homo sapien
ttccagtagagggtagagatggcga

SEQ ID NO: 866101 - DNA, 25 bp, Homo sapien
tgcacagattcagaacggcgtcgat

SEQ ID NO: 866102 - DNA, 25 bp, Homo sapien
gatggtaggtgcacagattcagaac

SEQ ID NO: 866103 - DNA, 25 bp, Homo sapien
ttttcagggtgatggtaggtgcaca

SEQ ID NO: 866104 - DNA, 25 bp, Homo sapien
aacggcgtcgatcagctgggtcctc

SEQ ID NO: 866105 - DNA, 25 bp, Homo sapien
gcttggcttctcactgggaaacagg

SEQ ID NO: 866106 - DNA, 25 bp, Homo sapien
acctgggctgggtctagagagcagg

SEQ ID NO: 866107 - DNA, 25 bp, Homo sapien
gcactttgctctcggggacacctgg

SEQ ID NO: 866108 - DNA, 25 bp, Homo sapien
cacaggcagcgagggaaccggccct

SEQ ID NO: 866109 - DNA, 25 bp, Homo sapien
gaagcgcagctttgtggagcgcccc

SEQ ID NO: 866110 - DNA, 25 bp, Homo sapien
ctgaattcccaacggcagatgtgga

SEQ ID NO: 866111 - DNA, 25 bp, Homo sapien
gacaggaaatctggccgtggccaaa

SEQ ID NO: 866112 - DNA, 25 bp, Homo sapien
cgtggccaaatcacaccgagaatgc

SEQ ID NO: 866113 - DNA, 25 bp, Homo sapien
gtggtcagcaagctccatggcgtcc

SEQ ID NO: 866114 - DNA, 25 bp, Homo sapien
tgcgcatcagcgtgtcctccaaaat

SEQ ID NO: 866115 - DNA, 25 bp, Homo sapien
gcccgatgaccaggatgcgcatcag

SEQ ID NO: 866116 - DNA, 25 bp, Homo sapien
cctcggagcacagacgcaggaagaa

SEQ ID NO: 866117 - DNA, 25 bp, Homo sapien
tgaagggtggcgtgcccgtggacgc

SEQ ID NO: 866118 - DNA, 25 bp, Homo sapien
gtgcatctgagactgcgtgaagggt

SEQ ID NO: 866119 - DNA, 25 bp, Homo sapien
agtcacgtggacgcagacggcagct

SEQ ID NO: 866120 - DNA, 25 bp, Homo sapien
ccgtggacgccctggaagcaactgg

SEQ ID NO: 866121 - DNA, 25 bp, Homo sapien
tgtcccacttgtagtaggtctccgg

SEQ ID NO: 866122 - DNA, 25 bp, Homo sapien
ggccagttgtcccacttgtagtagg

SEQ ID NO: 866123 - DNA, 25 bp, Homo sapien
tgtagtaggtctccggctgctctgt

SEQ ID NO: 866124 - DNA, 25 bp, Homo sapien
ggtcactctcgggtggccagttgtc

SEQ ID NO: 866125 - DNA, 25 bp, Homo sapien
gtgcacgtagtccttaggggcgagc

SEQ ID NO: 866126 - DNA, 25 bp, Homo sapien
tgcacgtagtccttaggggcgagct

SEQ ID NO: 866127 - DNA, 25 bp, Homo sapien
gcacgtagtccttaggggcgagctt

SEQ ID NO: 866128 - DNA, 25 bp, Homo sapien
accagacggcatcccgctggatggc

SEQ ID NO: 866129 - DNA, 25 bp, Homo sapien
ggttctggaatgagcggagcacttc

SEQ ID NO: 866130 - DNA, 25 bp, Homo sapien
gatggcggcaatctggttctggaat

SEQ ID NO: 866131 - DNA, 25 bp, Homo sapien
acagtgtggagccaccagacggcat

SEQ ID NO: 866132 - DNA, 25 bp, Homo sapien
tttgtcccaggcgatgccggcctcc

SEQ ID NO: 866133 - DNA, 25 bp, Homo sapien
gcatcatggacacggccaggacgtc

SEQ ID NO: 866134 - DNA, 25 bp, Homo sapien
ccaggacgtcggtgatgtgcaccac

SEQ ID NO: 866135 - DNA, 25 bp, Homo sapien
ttcacctgcgctgtgatgcccagca

SEQ ID NO: 866136 - DNA, 25 bp, Homo sapien
gcacggggtctgtatccagaaggga

SEQ ID NO: 866137 - DNA, 25 bp, Homo sapien
cacggggtctgtatccagaagggac

SEQ ID NO: 866138 - DNA, 25 bp, Homo sapien
acggggtctgtatccagaagggaca

SEQ ID NO: 866139 - DNA, 25 bp, Homo sapien
gaggcccgcaggtagtcgtccttgt

SEQ ID NO: 866140 - DNA, 25 bp, Homo sapien
ttggtctgcttgatgatctcccgca

SEQ ID NO: 866141 - DNA, 25 bp, Homo sapien
ggtactgcggctccttgcgctcctg

SEQ ID NO: 866142 - DNA, 25 bp, Homo sapien
aggcctggaagttgatctcgtgctt

SEQ ID NO: 866143 - DNA, 25 bp, Homo sapien
agagccccatattccggcgtggagg

SEQ ID NO: 866144 - DNA, 25 bp, Homo sapien
cccatattccggcgtggagggcaag

SEQ ID NO: 866145 - DNA, 25 bp, Homo sapien
agcccagagccccatattccggcgt

SEQ ID NO: 866146 - DNA, 25 bp, Homo sapien
ccagagccccatattccggcgtgga

SEQ ID NO: 866147 - DNA, 25 bp, Homo sapien
cctgcatgttgttcgggttccgggc

SEQ ID NO: 866148 - DNA, 25 bp, Homo sapien
tgctgcagtgcggtatagaggacct

SEQ ID NO: 866149 - DNA, 25 bp, Homo sapien
tccgggcgctggagagctcattgaa

SEQ ID NO: 866150 - DNA, 25 bp, Homo sapien
ggttgtccttgtgcgcgctcagcag

SEQ ID NO: 866151 - DNA, 25 bp, Homo sapien
cttgaggcggatcttgatcaggtgt

SEQ ID NO: 866152 - DNA, 25 bp, Homo sapien
cagttcatgcagacggacatcagca

SEQ ID NO: 866153 - DNA, 25 bp, Homo sapien
tgtgagatgacgtccatgtcttcgg

SEQ ID NO: 866154 - DNA, 25 bp, Homo sapien
aaccgtgcgtgttgcagttcatgca

SEQ ID NO: 866155 - DNA, 25 bp, Homo sapien
tggcgccggttcagctggtcccgca

SEQ ID NO: 866156 - DNA, 25 bp, Homo sapien
tccttatagccgcaggtggaggtga

SEQ ID NO: 866157 - DNA, 25 bp, Homo sapien
tgtccaggacatactcctccacgct

SEQ ID NO: 866158 - DNA, 25 bp, Homo sapien
ttcctggagacgttgtcgatgggct

SEQ ID NO: 866159 - DNA, 25 bp, Homo sapien
atcagcaactccgtctggctgtcct

SEQ ID NO: 866160 - DNA, 25 bp, Homo sapien
ctcctccgcgatcagcaactccgtc

SEQ ID NO: 866161 - DNA, 25 bp, Homo sapien
cgcgatcagcaactccgtctggctg

SEQ ID NO: 866162 - DNA, 25 bp, Homo sapien
ctccgcgatcagcaactccgtctgg

SEQ ID NO: 866163 - DNA, 25 bp, Homo sapien
gtcttacagtgagggctgtccaccc

SEQ ID NO: 866164 - DNA, 25 bp, Homo sapien
ggatgttgtccacaaacgtcttaca

SEQ ID NO: 866165 - DNA, 25 bp, Homo sapien
tccacaaacgtcttacagtgagggc

SEQ ID NO: 866166 - DNA, 25 bp, Homo sapien
attctggtgttgaaggccgtctgga

SEQ ID NO: 866167 - DNA, 25 bp, Homo sapien
tgaagttgatggaggcgtcccgccg

SEQ ID NO: 866168 - DNA, 25 bp, Homo sapien
cttgacaaagatctcgggccagttc

SEQ ID NO: 866169 - DNA, 25 bp, Homo sapien
tcgtaggcggccatgaggaggttac

SEQ ID NO: 866170 - DNA, 25 bp, Homo sapien
cccgccgcaggaggctacacagagc

SEQ ID NO: 866171 - DNA, 25 bp, Homo sapien
tcaggcttggcgcgggtgaccttca

SEQ ID NO: 866172 - DNA, 25 bp, Homo sapien
gccgcctcgatctcatccagcagca

SEQ ID NO: 866173 - DNA, 25 bp, Homo sapien
cctcagtggcgaagatgttgggctt

SEQ ID NO: 866174 - DNA, 25 bp, Homo sapien
gatcctgtcatcgttgccctccagc

SEQ ID NO: 866175 - DNA, 25 bp, Homo sapien
cctttgagcccagagcaatgaagtc

SEQ ID NO: 866176 - DNA, 25 bp, Homo sapien
gattcattggcctgaccctttgagc

SEQ ID NO: 866177 - DNA, 25 bp, Homo sapien
cacagatggctctttaatcgacgga

SEQ ID NO: 866178 - DNA, 25 bp, Homo sapien
gcttcagcagggtggacgccgtttt

SEQ ID NO: 866179 - DNA, 25 bp, Homo sapien
gggccggcgcaccgtggtgggcttg

SEQ ID NO: 866180 - DNA, 25 bp, Homo sapien
cggcgctgggccggcgcaccgtggt

SEQ ID NO: 866181 - DNA, 25 bp, Homo sapien
gctgggccggcgcaccgtggtgggc

SEQ ID NO: 866182 - DNA, 25 bp, Homo sapien
gccggcgcaccgtggtgggcttggc

SEQ ID NO: 866183 - DNA, 25 bp, Homo sapien
tgccccgtccctcgcggctcccggc

SEQ ID NO: 866184 - DNA, 25 bp, Homo sapien
cctgccccgtccctcgcggctcccg

SEQ ID NO: 866185 - DNA, 25 bp, Homo sapien
gtccctcgcggctcccggcggctgc

SEQ ID NO: 866186 - DNA, 25 bp, Homo sapien
ccgtccctcgcggctcccggcggct

SEQ ID NO: 866187 - DNA, 25 bp, Homo sapien
gttcgctcgctcattcgctcccttg

SEQ ID NO: 866188 - DNA, 25 bp, Homo sapien
gaggagccagcgtgcggtcattcct

SEQ ID NO: 866189 - DNA, 25 bp, Homo sapien
ctcattcgctcccttgccgcacggg

SEQ ID NO: 866190 - DNA, 25 bp, Homo sapien
ttcactcattcgctcgttcgctcgc

SEQ ID NO: 866191 - DNA, 25 bp, Homo sapien
cagcaggcgacgcggacgccgggct

SEQ ID NO: 866192 - DNA, 25 bp, Homo sapien
ctcgcccggcaatgaggaagcgccc

SEQ ID NO: 866193 - DNA, 25 bp, Homo sapien
tcgcccggcaatgaggaagcgccca

SEQ ID NO: 866194 - DNA, 25 bp, Homo sapien
cccggcaatgaggaagcgcccaggc

SEQ ID NO: 866195 - DNA, 25 bp, Homo sapien
cgcccggcaatgaggaagcgcccag

SEQ ID NO: 866196 - DNA, 25 bp, Homo sapien
ccggaatcggaaaccgatctcaccg

SEQ ID NO: 866197 - DNA, 25 bp, Homo sapien
ctctggcccatcgcgaccggagcgc

SEQ ID NO: 866198 - DNA, 25 bp, Homo sapien
gaatcggaaaccgatctcaccgccc

SEQ ID NO: 866199 - DNA, 25 bp, Homo sapien
tcggaaaccgatctcaccgccctcg

SEQ ID NO: 866200 - DNA, 25 bp, Homo sapien
gaaggaaaacagtgcggcgggaagc

SEQ ID NO: 866201 - DNA, 25 bp, Homo sapien
cgggcccagaaggaggcgcgagagg

SEQ ID NO: 866202 - DNA, 25 bp, Homo sapien
gcgcgcatgtggtccggtccaggtg

SEQ ID NO: 866203 - DNA, 25 bp, Homo sapien
ggcctgatgcctgcagcgccccatg

SEQ ID NO: 866204 - DNA, 25 bp, Homo sapien
ccgccacggtctctttccactcctg

SEQ ID NO: 866205 - DNA, 25 bp, Homo sapien
tgggcaccagctgggtccccgcagg

SEQ ID NO: 866206 - DNA, 25 bp, Homo sapien
gccacggtctctttccactcctgtg

SEQ ID NO: 866207 - DNA, 25 bp, Homo sapien
acggtctctttccactcctgtgggc

SEQ ID NO: 866208 - DNA, 25 bp, Homo sapien
agctgctgagtagcacccgccagat

SEQ ID NO: 866209 - DNA, 25 bp, Homo sapien
cccagcgttgcaggcatcggtggct

SEQ ID NO: 866210 - DNA, 25 bp, Homo sapien
tagcacccgccagatggattccaga

SEQ ID NO: 866211 - DNA, 25 bp, Homo sapien
ggcaggaccacaggcgttccgtcat

SEQ ID NO: 866212 - DNA, 25 bp, Homo sapien
gccctgggagcatgcatcaggcact

SEQ ID NO: 866213 - DNA, 25 bp, Homo sapien
tgggagcatgcatcaggcactggca

SEQ ID NO: 866214 - DNA, 25 bp, Homo sapien
gctgttcaccatcgcgggctgcagc

SEQ ID NO: 866215 - DNA, 25 bp, Homo sapien
agccagcggctgttcaccatcgcgg

SEQ ID NO: 866216 - DNA, 25 bp, Homo sapien
cacgctgaacttcccgagctcgggg

SEQ ID NO: 866217 - DNA, 25 bp, Homo sapien
agtccagcctgttccgggctccagt

SEQ ID NO: 866218 - DNA, 25 bp, Homo sapien
tgtggccgggggtcctgaagtccag

SEQ ID NO: 866219 - DNA, 25 bp, Homo sapien
ttagctcccggggagccacgctgaa

SEQ ID NO: 866220 - DNA, 25 bp, Homo sapien
caagcgaacttgagtggccacatgc

SEQ ID NO: 866221 - DNA, 25 bp, Homo sapien
tgtttgccacccagacggagaagaa

SEQ ID NO: 866222 - DNA, 25 bp, Homo sapien
ttttatccttgaaccgagccagggc

SEQ ID NO: 866223 - DNA, 25 bp, Homo sapien
cacgggaaatggaaatctggccagc

SEQ ID NO: 866224 - DNA, 25 bp, Homo sapien
aaccaggccttggtagagggtgctt

SEQ ID NO: 866225 - DNA, 25 bp, Homo sapien
aggatctagaaccaggccttggtag

SEQ ID NO: 866226 - DNA, 25 bp, Homo sapien
catgccttggggaggccccctgtcc

SEQ ID NO: 866227 - DNA, 25 bp, Homo sapien
ccctgtccccagaaggatctagaac

SEQ ID NO: 866228 - DNA, 25 bp, Homo sapien
gaatgcccctgactggacttagagg

SEQ ID NO: 866229 - DNA, 25 bp, Homo sapien
gatcagaaacctgaaacggcattgg

SEQ ID NO: 866230 - DNA, 25 bp, Homo sapien
aatgcaaggtgaccagacgtcctcc

SEQ ID NO: 866231 - DNA, 25 bp, Homo sapien
cctctggatgtagcggaatgacaca

SEQ ID NO: 866232 - DNA, 25 bp, Homo sapien
tgtcatcattcaccccttgggcaag

SEQ ID NO: 866233 - DNA, 25 bp, Homo sapien
actccgtcttggtcagactggctgg

SEQ ID NO: 866234 - DNA, 25 bp, Homo sapien
agacccgcggagaatagaagtggaa

SEQ ID NO: 866235 - DNA, 25 bp, Homo sapien
gctggcctcgtagagcgagcggcag

SEQ ID NO: 866236 - DNA, 25 bp, Homo sapien
cccgtttctctatgggcatccacag

SEQ ID NO: 866237 - DNA, 25 bp, Homo sapien
gaaatccccgtttctctatgggcat

SEQ ID NO: 866238 - DNA, 25 bp, Homo sapien
cgggaccgttcagaggggtcatcca

SEQ ID NO: 866239 - DNA, 25 bp, Homo sapien
tatgggcatccacagccgggaccgt

SEQ ID NO: 866240 - DNA, 25 bp, Homo sapien
tgaccaggtgctaatgcagtagccc

SEQ ID NO: 866241 - DNA, 25 bp, Homo sapien
tagctgctgggcgtaagacacaatg

SEQ ID NO: 866242 - DNA, 25 bp, Homo sapien
gacacaatgcgaggacgtcgttcct

SEQ ID NO: 866243 - DNA, 25 bp, Homo sapien
tggtgaccaccgaaactcagaggag

SEQ ID NO: 866244 - DNA, 25 bp, Homo sapien
cgcatagctatgtcgtggccggcct

SEQ ID NO: 866245 - DNA, 25 bp, Homo sapien
gcctgtgcactgacgtgctcgcagt

SEQ ID NO: 866246 - DNA, 25 bp, Homo sapien
gcagtggagctggaagcggtgcccg

SEQ ID NO: 866247 - DNA, 25 bp, Homo sapien
tagctatgtcgtggccggcctgtgc

SEQ ID NO: 866248 - DNA, 25 bp, Homo sapien
cagcggccagggccgtggtaggtgt

SEQ ID NO: 866249 - DNA, 25 bp, Homo sapien
gccgcagggtcctcgctcgggggca

SEQ ID NO: 866250 - DNA, 25 bp, Homo sapien
cagggccgtggtaggtgtcccgtgg

SEQ ID NO: 866251 - DNA, 25 bp, Homo sapien
gctcgggggcagcttaggtggaggt

SEQ ID NO: 866252 - DNA, 25 bp, Homo sapien
ccggagcaccggagcctttgccagt

SEQ ID NO: 866253 - DNA, 25 bp, Homo sapien
cccctctcggggatccaggctgggt

SEQ ID NO: 866254 - DNA, 25 bp, Homo sapien
tgtagggtcgctgtccagcggggcc

SEQ ID NO: 866255 - DNA, 25 bp, Homo sapien
atccaggctgggtccggagcaccgg

SEQ ID NO: 866256 - DNA, 25 bp, Homo sapien
caggtgcagacgtcttctctgacct

SEQ ID NO: 866257 - DNA, 25 bp, Homo sapien
tggtcaccccacagtgccggcggct

SEQ ID NO: 866258 - DNA, 25 bp, Homo sapien
tcagggagagtcagaacaggaagca

SEQ ID NO: 866259 - DNA, 25 bp, Homo sapien
tctgacctcagggagagtcagaaca

SEQ ID NO: 866260 - DNA, 25 bp, Homo sapien
ctgggcccggatggtgccccgtctt

SEQ ID NO: 866261 - DNA, 25 bp, Homo sapien
tgggcccggatggtgccccgtcttg

SEQ ID NO: 866262 - DNA, 25 bp, Homo sapien
gtcgtgaggtctcccctgtgctctg

SEQ ID NO: 866263 - DNA, 25 bp, Homo sapien
caggagcgccccatcatttgacggt

SEQ ID NO: 866264 - DNA, 25 bp, Homo sapien
cagagagagtggctcacacgtcgtg

SEQ ID NO: 866265 - DNA, 25 bp, Homo sapien
gcaccagtccaggagagcttcgtgg

SEQ ID NO: 866266 - DNA, 25 bp, Homo sapien
aatttattgccgtgcgtcctgctgc

SEQ ID NO: 866267 - DNA, 25 bp, Homo sapien
caggatccgggcactacgtgtaagt

SEQ ID NO: 866268 - DNA, 25 bp, Homo sapien
gaaaacagatcacatgtgggcccgt

SEQ ID NO: 866269 - DNA, 25 bp, Homo sapien
gatccaggtctttgcgtttccaggg

SEQ ID NO: 866270 - DNA, 25 bp, Homo sapien
tcccagagaaggatactgaggccag

SEQ ID NO: 866271 - DNA, 25 bp, Homo sapien
tccaccgtttcttgtggatgctggg

SEQ ID NO: 866272 - DNA, 25 bp, Homo sapien
ccgagcttgtcactagcaatggcag

SEQ ID NO: 866273 - DNA, 25 bp, Homo sapien
ggcactttccccagctaagtcagac

SEQ ID NO: 866274 - DNA, 25 bp, Homo sapien
acactggaaccacgctagtctccgt

SEQ ID NO: 866275 - DNA, 25 bp, Homo sapien
ttccgtccacgcagagcgggctcgg

SEQ ID NO: 866276 - DNA, 25 bp, Homo sapien
ctcagggctttccttcgagtcgtgt

SEQ ID NO: 866277 - DNA, 25 bp, Homo sapien
gaaaccccttttttagcagcgatga

SEQ ID NO: 866278 - DNA, 25 bp, Homo sapien
tcccagctggcttgagcgttgagca

SEQ ID NO: 866279 - DNA, 25 bp, Homo sapien
gcctatcttatcaggcagccgggct

SEQ ID NO: 866280 - DNA, 25 bp, Homo sapien
tggtgtccaagtccctgctctgtga

SEQ ID NO: 866281 - DNA, 25 bp, Homo sapien
tgtcctaaagtgcaggcctgaggtg

SEQ ID NO: 866282 - DNA, 25 bp, Homo sapien
ctagcccggactccactggtctgtg

SEQ ID NO: 866283 - DNA, 25 bp, Homo sapien
gggcagcacgggtgggagccgcggt

SEQ ID NO: 866284 - DNA, 25 bp, Homo sapien
caggtcccgctgttcctggtgaccg

SEQ ID NO: 866285 - DNA, 25 bp, Homo sapien
tggtctgtgcccgccctgctgagtc

SEQ ID NO: 866286 - DNA, 25 bp, Homo sapien
taaataagagcgattcccacagccc

SEQ ID NO: 866287 - DNA, 25 bp, Homo sapien
aggctcatgccctgcgggaacagaa

SEQ ID NO: 866288 - DNA, 25 bp, Homo sapien
aggtgcccgctggttctgtgaccca

SEQ ID NO: 866289 - DNA, 25 bp, Homo sapien
tccctgggcggctactgttcttgcg

SEQ ID NO: 866290 - DNA, 25 bp, Homo sapien
cctgggtccctacagcactggcagc

SEQ ID NO: 866291 - DNA, 25 bp, Homo sapien
ggcagcctgggtccctacagcactg

SEQ ID NO: 866292 - DNA, 25 bp, Homo sapien
ggatgggaagtgggctccgagggcc

SEQ ID NO: 866293 - DNA, 25 bp, Homo sapien
gatgggaagtgggctccgagggcct

SEQ ID NO: 866294 - DNA, 25 bp, Homo sapien
tcctgcacgatgtcctgggggctca

SEQ ID NO: 866295 - DNA, 25 bp, Homo sapien
tccgaggggatcagcatccgcttct

SEQ ID NO: 866296 - DNA, 25 bp, Homo sapien
tcgtgcgtggcctgctgcgtgtagt

SEQ ID NO: 866297 - DNA, 25 bp, Homo sapien
tacaggtcctccgaggggatcagca

SEQ ID NO: 866298 - DNA, 25 bp, Homo sapien
gggatgaccccgcaccgctccagga

SEQ ID NO: 866299 - DNA, 25 bp, Homo sapien
tcttctctgcgtacacctggcaggg

SEQ ID NO: 866300 - DNA, 25 bp, Homo sapien
gggaaggcataacgcagggccacgg

SEQ ID NO: 866301 - DNA, 25 bp, Homo sapien
gaagttctggtagccggcggccagc

SEQ ID NO: 866302 - DNA, 25 bp, Homo sapien
ttgccagaacgacaggaagatgacg

SEQ ID NO: 866303 - DNA, 25 bp, Homo sapien
tgacggaggcgttgtagatgagggt

SEQ ID NO: 866304 - DNA, 25 bp, Homo sapien
tttgatggtgaggaacttgaggacg

SEQ ID NO: 866305 - DNA, 25 bp, Homo sapien
gacgggctggaagggccgcaggagc

SEQ ID NO: 866306 - DNA, 25 bp, Homo sapien
caggtgcccttaatgccaagagtgc

SEQ ID NO: 866307 - DNA, 25 bp, Homo sapien
acatgtgtccccgtgtgtgagcatc

SEQ ID NO: 866308 - DNA, 25 bp, Homo sapien
tggtgagcaccttggaccttcgcag

SEQ ID NO: 866309 - DNA, 25 bp, Homo sapien
gatgctggcacagacgctagactca

SEQ ID NO: 866310 - DNA, 25 bp, Homo sapien
ccgtgtcctgtgaggggaggtccag

SEQ ID NO: 866311 - DNA, 25 bp, Homo sapien
cccagccgtgtcctgtgaggggagg

SEQ ID NO: 866312 - DNA, 25 bp, Homo sapien
gccgtgtcctgtgaggggaggtcca

SEQ ID NO: 866313 - DNA, 25 bp, Homo sapien
cagccgtgtcctgtgaggggaggtc

SEQ ID NO: 866314 - DNA, 25 bp, Homo sapien
tggagaagaagtgggtacctgtctt

SEQ ID NO: 866315 - DNA, 25 bp, Homo sapien
gcccctagcccagccggacgccagg

SEQ ID NO: 866316 - DNA, 25 bp, Homo sapien
tggacgccaagtccgcctcgttggg

SEQ ID NO: 866317 - DNA, 25 bp, Homo sapien
cttacttgagcccagctggacgcca

SEQ ID NO: 866318 - DNA, 25 bp, Homo sapien
tggtgacggccatgacgggcttcac

SEQ ID NO: 866319 - DNA, 25 bp, Homo sapien
cccgtcgtggtatttgccaaatgcc

SEQ ID NO: 866320 - DNA, 25 bp, Homo sapien
gccatgacgggcttcaccaggcaga

SEQ ID NO: 866321 - DNA, 25 bp, Homo sapien
gaagtccccgtcgtggtatttgcca

SEQ ID NO: 866322 - DNA, 25 bp, Homo sapien
ctgcttacagaagcgcaggaacccg

SEQ ID NO: 866323 - DNA, 25 bp, Homo sapien
cgcaggaacccgatggagtaggtca

SEQ ID NO: 866324 - DNA, 25 bp, Homo sapien
ggagtaggtcatgccccggaggcag

SEQ ID NO: 866325 - DNA, 25 bp, Homo sapien
gtcatgccccggaggcagcaggtgc

SEQ ID NO: 866326 - DNA, 25 bp, Homo sapien
gatgggctttccacgaatctcagcc

SEQ ID NO: 866327 - DNA, 25 bp, Homo sapien
tccacgaatctcagccatgatggcg

SEQ ID NO: 866328 - DNA, 25 bp, Homo sapien
gctttccacgaatctcagccatgat

SEQ ID NO: 866329 - DNA, 25 bp, Homo sapien
aatctcagccatgatggcgccctcg

SEQ ID NO: 866330 - DNA, 25 bp, Homo sapien
tgtggcacggtgtaggagcgcaggt

SEQ ID NO: 866331 - DNA, 25 bp, Homo sapien
gatgtaacgttgctcctgtggcacg

SEQ ID NO: 866332 - DNA, 25 bp, Homo sapien
acgtagtactggtggtctccgagga

SEQ ID NO: 866333 - DNA, 25 bp, Homo sapien
agcagtcccgcacagagtcgaagta

SEQ ID NO: 866334 - DNA, 25 bp, Homo sapien
acgaagatccccgagacgcctcggg

SEQ ID NO: 866335 - DNA, 25 bp, Homo sapien
caccagggcagtccacacgaagatc

SEQ ID NO: 866336 - DNA, 25 bp, Homo sapien
agctgttccccatgtggtccatctg

SEQ ID NO: 866337 - DNA, 25 bp, Homo sapien
tgttccccatgtggtccatctgcgg

SEQ ID NO: 866338 - DNA, 25 bp, Homo sapien
ctgggctgcggccagttcgctgaca

SEQ ID NO: 866339 - DNA, 25 bp, Homo sapien
ccaggatccctgagacattactcat

SEQ ID NO: 866340 - DNA, 25 bp, Homo sapien
ctgcggccagttcgctgacaccagg

SEQ ID NO: 866341 - DNA, 25 bp, Homo sapien
acaccagggggacgccggctgtctc

SEQ ID NO: 866342 - DNA, 25 bp, Homo sapien
ggacaccagcgccaggcccggctcc

SEQ ID NO: 866343 - DNA, 25 bp, Homo sapien
cccccacacggacaccagcgccagg

SEQ ID NO: 866344 - DNA, 25 bp, Homo sapien
ccacacggacaccagcgccaggccc

SEQ ID NO: 866345 - DNA, 25 bp, Homo sapien
ccctccctgctccgagctcagccat

SEQ ID NO: 866346 - DNA, 25 bp, Homo sapien
ctcatgggaggagccggccctcact

SEQ ID NO: 866347 - DNA, 25 bp, Homo sapien
gggtgtgcagccaccctcatgggag

SEQ ID NO: 866348 - DNA, 25 bp, Homo sapien
agccaccctcatgggaggagccggc

SEQ ID NO: 866349 - DNA, 25 bp, Homo sapien
gggagcgggcgcagaccagcactgc

SEQ ID NO: 866350 - DNA, 25 bp, Homo sapien
tccctctggtctgcggtcacagggc

SEQ ID NO: 866351 - DNA, 25 bp, Homo sapien
ccctctggtctgcggtcacagggcc

SEQ ID NO: 866352 - DNA, 25 bp, Homo sapien
cctctggtctgcggtcacagggccc

SEQ ID NO: 866353 - DNA, 25 bp, Homo sapien
gccacgtggccccaactggaggccc

SEQ ID NO: 866354 - DNA, 25 bp, Homo sapien
tggccacgtggccccaactggaggc

SEQ ID NO: 866355 - DNA, 25 bp, Homo sapien
ggccacgtggccccaactggaggcc

SEQ ID NO: 866356 - DNA, 25 bp, Homo sapien
gctggtcattctcatggccacgtgg

SEQ ID NO: 866357 - DNA, 25 bp, Homo sapien
ggccaggatctgaagggctgtgcca

SEQ ID NO: 866358 - DNA, 25 bp, Homo sapien
tgcggcaaggccaggatctgaaggg

SEQ ID NO: 866359 - DNA, 25 bp, Homo sapien
gtgggtgcggcaaggccaggatctg

SEQ ID NO: 866360 - DNA, 25 bp, Homo sapien
gcaaggccaggatctgaagggctgt

SEQ ID NO: 866361 - DNA, 25 bp, Homo sapien
ctgcctatgccagacggccaggcag

SEQ ID NO: 866362 - DNA, 25 bp, Homo sapien
ctgtcccggctgagccagatgcgcc

SEQ ID NO: 866363 - DNA, 25 bp, Homo sapien
agccagatgcgccagctcgggaacc

SEQ ID NO: 866364 - DNA, 25 bp, Homo sapien
gcgccagctcgggaaccgtggacca

SEQ ID NO: 866365 - DNA, 25 bp, Homo sapien
tgtcccggctgagccagatgcgcca

SEQ ID NO: 866366 - DNA, 25 bp, Homo sapien
tggctggagaccctgtttggtgtcc

SEQ ID NO: 866367 - DNA, 25 bp, Homo sapien
gagaccctgtttggtgtccaggtgc

SEQ ID NO: 866368 - DNA, 25 bp, Homo sapien
gctcgtctggcctggacttgccagg

SEQ ID NO: 866369 - DNA, 25 bp, Homo sapien
cagccctgggcgtgtacgggtcggg

SEQ ID NO: 866370 - DNA, 25 bp, Homo sapien
cacaagcaacgattcaggtcctggt

SEQ ID NO: 866371 - DNA, 25 bp, Homo sapien
tccaagggctagtgccaaagttcct

SEQ ID NO: 866372 - DNA, 25 bp, Homo sapien
tcctacaattgatcctgcacacggg

SEQ ID NO: 866373 - DNA, 25 bp, Homo sapien
tgttcacgtgtcctgctgagcagcg

SEQ ID NO: 866374 - DNA, 25 bp, Homo sapien
tcttgagacacaaacgctaccaggt

SEQ ID NO: 866375 - DNA, 25 bp, Homo sapien
tccatgcttttgtccttcacggcca

SEQ ID NO: 866376 - DNA, 25 bp, Homo sapien
ccacggcgaggaggactgctctgtt

SEQ ID NO: 866377 - DNA, 25 bp, Homo sapien
ttttgtccttcacggccacggcgag

SEQ ID NO: 866378 - DNA, 25 bp, Homo sapien
gcttgctgacgtcactggccacgct

SEQ ID NO: 866379 - DNA, 25 bp, Homo sapien
tgccccagaaggacttttgtggtga

SEQ ID NO: 866380 - DNA, 25 bp, Homo sapien
cttttgtggtgagcacaggcttgct

SEQ ID NO: 866381 - DNA, 25 bp, Homo sapien
ccgtcttctgcttcgatatcaccaa

SEQ ID NO: 866382 - DNA, 25 bp, Homo sapien
ggaaacgcaaggaggcccattcaaa

SEQ ID NO: 866383 - DNA, 25 bp, Homo sapien
ttacaacccgggcggtagagcgaga

SEQ ID NO: 866384 - DNA, 25 bp, Homo sapien
cgagacaggacgatcgttgaggcca

SEQ ID NO: 866385 - DNA, 25 bp, Homo sapien
gtcaatcaaacagtacagccttggg

SEQ ID NO: 866386 - DNA, 25 bp, Homo sapien
ggacccccacgacacgcggtgccga

SEQ ID NO: 866387 - DNA, 25 bp, Homo sapien
acgttcacactgccaggccgggcag

SEQ ID NO: 866388 - DNA, 25 bp, Homo sapien
cgttcacactgccaggccgggcagt

SEQ ID NO: 866389 - DNA, 25 bp, Homo sapien
acacgcggtgccgaggccggccggg

SEQ ID NO: 866390 - DNA, 25 bp, Homo sapien
ttctgagcggctcgggttccgcgct

SEQ ID NO: 866391 - DNA, 25 bp, Homo sapien
ttccggaagtcagggccgcggcgct

SEQ ID NO: 866392 - DNA, 25 bp, Homo sapien
cggcgcttctggtcccggagacttg

SEQ ID NO: 866393 - DNA, 25 bp, Homo sapien
gcttgggggcgccttagagccgaac

SEQ ID NO: 866394 - DNA, 25 bp, Homo sapien
ccaggcatcgctctaagcgctttat

SEQ ID NO: 866395 - DNA, 25 bp, Homo sapien
acagcgaacgcttatttggcaccga

SEQ ID NO: 866396 - DNA, 25 bp, Homo sapien
cctgctcgaccacgggctttgggct

SEQ ID NO: 866397 - DNA, 25 bp, Homo sapien
tcgtcgctggtaggagctctgtccc

SEQ ID NO: 866398 - DNA, 25 bp, Homo sapien
ttttacagacgtgtgcaggtgcaga

SEQ ID NO: 866399 - DNA, 25 bp, Homo sapien
gtttcatccgcgttttacagacgtg

SEQ ID NO: 866400 - DNA, 25 bp, Homo sapien
cagccacccggttccgtagaagcgt

SEQ ID NO: 866401 - DNA, 25 bp, Homo sapien
gccccaccctgaagcgggatgagtt

SEQ ID NO: 866402 - DNA, 25 bp, Homo sapien
agccactgggaagccgcgtcaggag

SEQ ID NO: 866403 - DNA, 25 bp, Homo sapien
gaggagcgactggactgtctccagc

SEQ ID NO: 866404 - DNA, 25 bp, Homo sapien
gagggcatgtttccagtgaacgcct

SEQ ID NO: 866405 - DNA, 25 bp, Homo sapien
gatttgagcggggtcctggcaggaa

SEQ ID NO: 866406 - DNA, 25 bp, Homo sapien
gccgctgcatcccagccgagggcag

SEQ ID NO: 866407 - DNA, 25 bp, Homo sapien
ccgctgcatcccagccgagggcagg

SEQ ID NO: 866408 - DNA, 25 bp, Homo sapien
tgggtgctgggacgcctgtgactgg

SEQ ID NO: 866409 - DNA, 25 bp, Homo sapien
gctgtggtccgaggggctgggtgct

SEQ ID NO: 866410 - DNA, 25 bp, Homo sapien
cttcggggctgtggtccgaggggct

SEQ ID NO: 866411 - DNA, 25 bp, Homo sapien
gctgggtgctgggacgcctgtgact

SEQ ID NO: 866412 - DNA, 25 bp, Homo sapien
tgtcatcccgcctgggtgtcgggga

SEQ ID NO: 866413 - DNA, 25 bp, Homo sapien
gtcatcccgcctgggtgtcggggag

SEQ ID NO: 866414 - DNA, 25 bp, Homo sapien
ctgtcatcccgcctgggtgtcgggg

SEQ ID NO: 866415 - DNA, 25 bp, Homo sapien
tcgcccggggctcttgttgtctgtg

SEQ ID NO: 866416 - DNA, 25 bp, Homo sapien
ttgtccttgcttcccgccgctcctt

SEQ ID NO: 866417 - DNA, 25 bp, Homo sapien
gcagaccaggcaggaccgagcccgt

SEQ ID NO: 866418 - DNA, 25 bp, Homo sapien
tgtgccatttcggtgccttttgtcc

SEQ ID NO: 866419 - DNA, 25 bp, Homo sapien
catgggagtcctcataatctcccca

SEQ ID NO: 866420 - DNA, 25 bp, Homo sapien
tgcatgggagtcctcataatctccc

SEQ ID NO: 866421 - DNA, 25 bp, Homo sapien
tgggagtcctcataatctccccatc

SEQ ID NO: 866422 - DNA, 25 bp, Homo sapien
gggtgcatgggagtcctcataatct

SEQ ID NO: 866423 - DNA, 25 bp, Homo sapien
gctctgccgattgtccacactggag

SEQ ID NO: 866424 - DNA, 25 bp, Homo sapien
agcagctctgccgattgtccacact

SEQ ID NO: 866425 - DNA, 25 bp, Homo sapien
ctgagcagctctgccgattgtccac

SEQ ID NO: 866426 - DNA, 25 bp, Homo sapien
tgatgagtcgtagcggggttttgcc

SEQ ID NO: 866427 - DNA, 25 bp, Homo sapien
tccaatgcccgcagttgctgtcgcc

SEQ ID NO: 866428 - DNA, 25 bp, Homo sapien
cctccgggtcactctctgtggcggg

SEQ ID NO: 866429 - DNA, 25 bp, Homo sapien
gtctggctgcgcgtcagacggcctc

SEQ ID NO: 866430 - DNA, 25 bp, Homo sapien
ctgggcctccgggtcactctctgtg

SEQ ID NO: 866431 - DNA, 25 bp, Homo sapien
accagctcagagctagcggctgtac

SEQ ID NO: 866432 - DNA, 25 bp, Homo sapien
cagaaacaggaattcttgaagccac

SEQ ID NO: 866433 - DNA, 25 bp, Homo sapien
caggaattcttgaagccacagtagt

SEQ ID NO: 866434 - DNA, 25 bp, Homo sapien
cagtagttaagagttccctcgtcca

SEQ ID NO: 866435 - DNA, 25 bp, Homo sapien
tgtcccgttccagtgggagccacct

SEQ ID NO: 866436 - DNA, 25 bp, Homo sapien
ccacggaatccacagtacactgaag

SEQ ID NO: 866437 - DNA, 25 bp, Homo sapien
gccagagtgaagaacgaaagggtcc

SEQ ID NO: 866438 - DNA, 25 bp, Homo sapien
tttccagactttgtggggcccagga

SEQ ID NO: 866439 - DNA, 25 bp, Homo sapien
gcccaggaagtcaccctggaggtga

SEQ ID NO: 866440 - DNA, 25 bp, Homo sapien
tgaagaacgaaagggtccgtgagtc

SEQ ID NO: 866441 - DNA, 25 bp, Homo sapien
ctcctgtgtaagggggagcccctca

SEQ ID NO: 866442 - DNA, 25 bp, Homo sapien
ctccgggaacagcacgttctctctg

SEQ ID NO: 866443 - DNA, 25 bp, Homo sapien
tcctgtgtaagggggagcccctcac

SEQ ID NO: 866444 - DNA, 25 bp, Homo sapien
tggccctgaaagggtttggccaggc

SEQ ID NO: 866445 - DNA, 25 bp, Homo sapien
gggctttctgcacgggctgacccca

SEQ ID NO: 866446 - DNA, 25 bp, Homo sapien
gagcttcgtagctcgggcccagcct

SEQ ID NO: 866447 - DNA, 25 bp, Homo sapien
gtcttcccatgagaccgacacggcc

SEQ ID NO: 866448 - DNA, 25 bp, Homo sapien
taaatgtgttcaacctcgtcttccc

SEQ ID NO: 866449 - DNA, 25 bp, Homo sapien
aaacggcccttcatttagcacagcg

SEQ ID NO: 866450 - DNA, 25 bp, Homo sapien
cgctgtggccgcagctattctggaa

SEQ ID NO: 866451 - DNA, 25 bp, Homo sapien
tgctgcgattggctccaacggctca

SEQ ID NO: 866452 - DNA, 25 bp, Homo sapien
cacaggcatttttggctcagcgagg

SEQ ID NO: 866453 - DNA, 25 bp, Homo sapien
gtttgtgctcgtgggcgttgatctg

SEQ ID NO: 866454 - DNA, 25 bp, Homo sapien
ctgggtttgtgctcgtgggcgttga

SEQ ID NO: 866455 - DNA, 25 bp, Homo sapien
gtgctcgtgggcgttgatctgggtt

SEQ ID NO: 866456 - DNA, 25 bp, Homo sapien
tcgtgggcgttgatctgggttgagg

SEQ ID NO: 866457 - DNA, 25 bp, Homo sapien
cctcagcagagagagggcgcaggaa

SEQ ID NO: 866458 - DNA, 25 bp, Homo sapien
caggccatcctcagcagagagaggg

SEQ ID NO: 866459 - DNA, 25 bp, Homo sapien
ccatcctcagcagagagagggcgca

SEQ ID NO: 866460 - DNA, 25 bp, Homo sapien
cagccaggccatcctcagcagagag

SEQ ID NO: 866461 - DNA, 25 bp, Homo sapien
cttctcttccaaaccgaagcctggg

SEQ ID NO: 866462 - DNA, 25 bp, Homo sapien
ccaaaccgaagcctgggagcctctg

SEQ ID NO: 866463 - DNA, 25 bp, Homo sapien
ccagaccttcggacgcttctcttcc

SEQ ID NO: 866464 - DNA, 25 bp, Homo sapien
tcttccaaaccgaagcctgggagcc

SEQ ID NO: 866465 - DNA, 25 bp, Homo sapien
ctcccagcttcaccgccgcgtcctc

SEQ ID NO: 866466 - DNA, 25 bp, Homo sapien
tcccagcttcaccgccgcgtcctct

SEQ ID NO: 866467 - DNA, 25 bp, Homo sapien
cccagcttcaccgccgcgtcctctc

SEQ ID NO: 866468 - DNA, 25 bp, Homo sapien
tctgccgctcattccctcgattggg

SEQ ID NO: 866469 - DNA, 25 bp, Homo sapien
cgctcattccctcgattgggctaag

SEQ ID NO: 866470 - DNA, 25 bp, Homo sapien
ctggctgcctctgccgctcattccc

SEQ ID NO: 866471 - DNA, 25 bp, Homo sapien
attccctcgattgggctaagggctg

SEQ ID NO: 866472 - DNA, 25 bp, Homo sapien
tcaccagcgctggacatgtggccag

SEQ ID NO: 866473 - DNA, 25 bp, Homo sapien
ccctgacatttggaggctgttgggt

SEQ ID NO: 866474 - DNA, 25 bp, Homo sapien
ggtctgtccacgtgacaggtgcaca

SEQ ID NO: 866475 - DNA, 25 bp, Homo sapien
tgttgggttgggtccaggcggaatc

SEQ ID NO: 866476 - DNA, 25 bp, Homo sapien
gacattctccgatgctgggctccgt

SEQ ID NO: 866477 - DNA, 25 bp, Homo sapien
agtggacattctccgatgctgggct

SEQ ID NO: 866478 - DNA, 25 bp, Homo sapien
attctccgatgctgggctccgtggt

SEQ ID NO: 866479 - DNA, 25 bp, Homo sapien
ccagtggacattctccgatgctggg

SEQ ID NO: 866480 - DNA, 25 bp, Homo sapien
tgtttcccttgcgtgagcttgcttc

SEQ ID NO: 866481 - DNA, 25 bp, Homo sapien
gaggcatcctgtgcgccgacaccgt

SEQ ID NO: 866482 - DNA, 25 bp, Homo sapien
agcggctgtgctgcgcttgtttccc

SEQ ID NO: 866483 - DNA, 25 bp, Homo sapien
ttcctgagcagctttacagaggcat

SEQ ID NO: 866484 - DNA, 25 bp, Homo sapien
tcaccacatatgctagtgcacttga

SEQ ID NO: 866485 - DNA, 25 bp, Homo sapien
tgtcagaggcacagtttatttttct

SEQ ID NO: 866486 - DNA, 25 bp, Homo sapien
gcacttgatgtctcatgtatgtcag

SEQ ID NO: 866487 - DNA, 25 bp, Homo sapien
tttatcatattgctgttactctgga

SEQ ID NO: 866488 - DNA, 25 bp, Homo sapien
actgtggtctgtgtgccaagtagca

SEQ ID NO: 866489 - DNA, 25 bp, Homo sapien
aaggccgattctgcattcctgacca

SEQ ID NO: 866490 - DNA, 25 bp, Homo sapien
tgccgggcatgagggactcctttca

SEQ ID NO: 866491 - DNA, 25 bp, Homo sapien
gaccttcgacgagacactttttgct

SEQ ID NO: 866492 - DNA, 25 bp, Homo sapien
gtgtagggcacacctctctcccaag

SEQ ID NO: 866493 - DNA, 25 bp, Homo sapien
gctcacggcagtgtagggcacacct

SEQ ID NO: 866494 - DNA, 25 bp, Homo sapien
ggcagtgtagggcacacctctctcc

SEQ ID NO: 866495 - DNA, 25 bp, Homo sapien
ggctgctccctctggccgtctgggt

SEQ ID NO: 866496 - DNA, 25 bp, Homo sapien
agaaagtgaaagaacgcccagtggg

SEQ ID NO: 866497 - DNA, 25 bp, Homo sapien
gctggccgggctgttactctctcag

SEQ ID NO: 866498 - DNA, 25 bp, Homo sapien
acaaggctgtgaggattcagcccca

SEQ ID NO: 866499 - DNA, 25 bp, Homo sapien
ccgcctctatgtaccctgcagggaa

SEQ ID NO: 866500 - DNA, 25 bp, Homo sapien
tgcagacccctagtgaccagatgct

SEQ ID NO: 866501 - DNA, 25 bp, Homo sapien
ggtcctggtagtgggcagtgcaggc

SEQ ID NO: 866502 - DNA, 25 bp, Homo sapien
cccaggaagtgactgcccatgcaga

SEQ ID NO: 866503 - DNA, 25 bp, Homo sapien
gagatgttcatggccgcgtggacac

SEQ ID NO: 866504 - DNA, 25 bp, Homo sapien
tagccttgctgggtgtgtgcacatc

SEQ ID NO: 866505 - DNA, 25 bp, Homo sapien
aaagtgcccgattccaagagtctgg

SEQ ID NO: 866506 - DNA, 25 bp, Homo sapien
tacacgcctgtggacgtagccttgc

SEQ ID NO: 866507 - DNA, 25 bp, Homo sapien
tggtgcaagaacacatacacgcctg

SEQ ID NO: 866508 - DNA, 25 bp, Homo sapien
ctccctgcgggtggttttcctgcct

SEQ ID NO: 866509 - DNA, 25 bp, Homo sapien
acactggcctccctgcgggtggttt

SEQ ID NO: 866510 - DNA, 25 bp, Homo sapien
aggcttgggaggccggtgccgggca

SEQ ID NO: 866511 - DNA, 25 bp, Homo sapien
ggaatgccatcaccttaaacccaca

SEQ ID NO: 866512 - DNA, 25 bp, Homo sapien
agcagacgtggccgacaggcacatg

SEQ ID NO: 866513 - DNA, 25 bp, Homo sapien
gtggctccagagctcatgcgcagcc

SEQ ID NO: 866514 - DNA, 25 bp, Homo sapien
gctccggatgcacgtggctgtgcca

SEQ ID NO: 866515 - DNA, 25 bp, Homo sapien
tgagaaccccaggaagtagtagcgt

SEQ ID NO: 866516 - DNA, 25 bp, Homo sapien
acatttgcaagttgatgagttgttc

SEQ ID NO: 866517 - DNA, 25 bp, Homo sapien
ccggacatttgcaagttgatgagtt

SEQ ID NO: 866518 - DNA, 25 bp, Homo sapien
tttgcaagttgatgagttgttcttc

SEQ ID NO: 866519 - DNA, 25 bp, Homo sapien
tgcaagttgatgagttgttcttcat

SEQ ID NO: 866520 - DNA, 25 bp, Homo sapien
ccgacacgtgtgactgacagctggt

SEQ ID NO: 866521 - DNA, 25 bp, Homo sapien
agtccgacacgtgtgactgacagct

SEQ ID NO: 866522 - DNA, 25 bp, Homo sapien
gcagtccgacacgtgtgactgacag

SEQ ID NO: 866523 - DNA, 25 bp, Homo sapien
ctgcagtccgacacgtgtgactgac

SEQ ID NO: 866524 - DNA, 25 bp, Homo sapien
catgtctggaaccaaagtggctgct

SEQ ID NO: 866525 - DNA, 25 bp, Homo sapien
taagggagtcgttcaccagtggaac

SEQ ID NO: 866526 - DNA, 25 bp, Homo sapien
aatgtagtatttaggtgggtccagc

SEQ ID NO: 866527 - DNA, 25 bp, Homo sapien
gaatgtggtcctacgtgcaagggaa

SEQ ID NO: 866528 - DNA, 25 bp, Homo sapien
gaagtggccagctcattccatcggg

SEQ ID NO: 866529 - DNA, 25 bp, Homo sapien
gccccgtggttcctagatgtccagt

SEQ ID NO: 866530 - DNA, 25 bp, Homo sapien
tacctgccacagcttgttggacaga

SEQ ID NO: 866531 - DNA, 25 bp, Homo sapien
cccacggtggtctgtaagtccttca

SEQ ID NO: 866532 - DNA, 25 bp, Homo sapien
cgctgctgcgtctcggagtgaatga

SEQ ID NO: 866533 - DNA, 25 bp, Homo sapien
ccttggtggttagcgaggctccctc

SEQ ID NO: 866534 - DNA, 25 bp, Homo sapien
aggaggagctccaacatgaattaaa

SEQ ID NO: 866535 - DNA, 25 bp, Homo sapien
cccattcaacggaagaggaagcaga

SEQ ID NO: 866536 - DNA, 25 bp, Homo sapien
tgggagtggagtgattccagatgct

SEQ ID NO: 866537 - DNA, 25 bp, Homo sapien
agaatggattgtgggtgccaggaga

SEQ ID NO: 866538 - DNA, 25 bp, Homo sapien
taccttgggcgtcgtccccgctgga

SEQ ID NO: 866539 - DNA, 25 bp, Homo sapien
ttgggcggtcgtggtgggagtggag

SEQ ID NO: 866540 - DNA, 25 bp, Homo sapien
tgagcaagagattaaaggtgattac

SEQ ID NO: 866541 - DNA, 25 bp, Homo sapien
gactttgggttattttgagcaagag

SEQ ID NO: 866542 - DNA, 25 bp, Homo sapien
cttgactttgggttattttgagcaa

SEQ ID NO: 866543 - DNA, 25 bp, Homo sapien
ttgggttattttgagcaagagatta

SEQ ID NO: 866544 - DNA, 25 bp, Homo sapien
caagggcttcgtgtggctggccatc

SEQ ID NO: 866545 - DNA, 25 bp, Homo sapien
gatcaacagcaccatcgtggacctg

SEQ ID NO: 866546 - DNA, 25 bp, Homo sapien
gaacgagatcggctacatcgaggac

SEQ ID NO: 866547 - DNA, 25 bp, Homo sapien
tcaacgagaaccgtatccgcagcgt

SEQ ID NO: 866548 - DNA, 25 bp, Homo sapien
ttctctgtccagtccgtctcttcat

SEQ ID NO: 866549 - DNA, 25 bp, Homo sapien
gacataaaatgccatccgtgggggg

SEQ ID NO: 866550 - DNA, 25 bp, Homo sapien
cctcggtccgtggttttctgtggat

SEQ ID NO: 866551 - DNA, 25 bp, Homo sapien
ccccatgtacactgtagtcgttcta

SEQ ID NO: 866552 - DNA, 25 bp, Homo sapien
cagggtcacatctgctggcatccca

SEQ ID NO: 866553 - DNA, 25 bp, Homo sapien
ggcgacagccgagggagcaaacccc

SEQ ID NO: 866554 - DNA, 25 bp, Homo sapien
tccatcgagccagcacgggctggtt

SEQ ID NO: 866555 - DNA, 25 bp, Homo sapien
atcccacaggccagggtgagccgcg

SEQ ID NO: 866556 - DNA, 25 bp, Homo sapien
acaccaagctgacggcacaccttgg

SEQ ID NO: 866557 - DNA, 25 bp, Homo sapien
agacaccaagctgacggcacacctt

SEQ ID NO: 866558 - DNA, 25 bp, Homo sapien
tccagagacaccaagctgacggcac

SEQ ID NO: 866559 - DNA, 25 bp, Homo sapien
cagagacaccaagctgacggcacac

SEQ ID NO: 866560 - DNA, 25 bp, Homo sapien
gtcaagggcgatgctggggtggcca

SEQ ID NO: 866561 - DNA, 25 bp, Homo sapien
tggagactgggatggccgaggatgg

SEQ ID NO: 866562 - DNA, 25 bp, Homo sapien
actgagtggtcaagggcgatgctgg

SEQ ID NO: 866563 - DNA, 25 bp, Homo sapien
actgggatggccgaggatggaggct

SEQ ID NO: 866564 - DNA, 25 bp, Homo sapien
ctgatacatcattgcattagggtgg

SEQ ID NO: 866565 - DNA, 25 bp, Homo sapien
cctgatacatcattgcattagggtg

SEQ ID NO: 866566 - DNA, 25 bp, Homo sapien
tcctgatacatcattgcattagggt

SEQ ID NO: 866567 - DNA, 25 bp, Homo sapien
tgtcgaagctgtcatctgtgggcgc

SEQ ID NO: 866568 - DNA, 25 bp, Homo sapien
cagaatgtctttgcggagccgagag

SEQ ID NO: 866569 - DNA, 25 bp, Homo sapien
cacgataactcggtcagggaacggg

SEQ ID NO: 866570 - DNA, 25 bp, Homo sapien
cgcgggttgagcagtgaaaagccac

SEQ ID NO: 866571 - DNA, 25 bp, Homo sapien
ccttgatgaggacatatatgtgaga

SEQ ID NO: 866572 - DNA, 25 bp, Homo sapien
tatatgtgagagctgcgggtcccag

SEQ ID NO: 866573 - DNA, 25 bp, Homo sapien
gcaagtgagaccttgatgaggacat

SEQ ID NO: 866574 - DNA, 25 bp, Homo sapien
gacatatatgtgagagctgcgggtc

SEQ ID NO: 866575 - DNA, 25 bp, Homo sapien
gtacacgcgtctatggaaaatttcc

SEQ ID NO: 866576 - DNA, 25 bp, Homo sapien
tctgctcgttgggatctgggactcg

SEQ ID NO: 866577 - DNA, 25 bp, Homo sapien
caagctgcggaacaatacgtaggga

SEQ ID NO: 866578 - DNA, 25 bp, Homo sapien
cagtgaaacagatcagtacacgcgt

SEQ ID NO: 866579 - DNA, 25 bp, Homo sapien
gaaccatttagcgttgggtgcccac

SEQ ID NO: 866580 - DNA, 25 bp, Homo sapien
tgcaatggtcttgtgctggctgccc

SEQ ID NO: 866581 - DNA, 25 bp, Homo sapien
aaacttgcacgagttgtctgtggga

SEQ ID NO: 866582 - DNA, 25 bp, Homo sapien
ggtagattctcacagttgctccagg

SEQ ID NO: 866583 - DNA, 25 bp, Homo sapien
tgtggccctttagctgccaagcccg

SEQ ID NO: 866584 - DNA, 25 bp, Homo sapien
gggcttgtttgtggccctttagctg

SEQ ID NO: 866585 - DNA, 25 bp, Homo sapien
tttagctgccaagcccgtcttgatg

SEQ ID NO: 866586 - DNA, 25 bp, Homo sapien
ccaagcccgtcttgatgccacagaa

SEQ ID NO: 866587 - DNA, 25 bp, Homo sapien
tagggctaggccacagatacacagg

SEQ ID NO: 866588 - DNA, 25 bp, Homo sapien
accctgctagggctaggccacagat

SEQ ID NO: 866589 - DNA, 25 bp, Homo sapien
ctgctagggctaggccacagataca

SEQ ID NO: 866590 - DNA, 25 bp, Homo sapien
ctagggctaggccacagatacacag

SEQ ID NO: 866591 - DNA, 25 bp, Homo sapien
aggctggtggccgacgcccacacac

SEQ ID NO: 866592 - DNA, 25 bp, Homo sapien
acccaggctggtggccgacgcccac

SEQ ID NO: 866593 - DNA, 25 bp, Homo sapien
tcacaaggtgaggaacccaggctgg

SEQ ID NO: 866594 - DNA, 25 bp, Homo sapien
caggctggtggccgacgcccacaca

SEQ ID NO: 866595 - DNA, 25 bp, Homo sapien
agcaggaagcccgacgtaggtccca

SEQ ID NO: 866596 - DNA, 25 bp, Homo sapien
ccccagcaggaagcccgacgtaggt

SEQ ID NO: 866597 - DNA, 25 bp, Homo sapien
aagcccgacgtaggtcccagcgtgt

SEQ ID NO: 866598 - DNA, 25 bp, Homo sapien
gtaggtcccagcgtgtctgtcagtc

SEQ ID NO: 866599 - DNA, 25 bp, Homo sapien
aggccaagcagagtggctccggcta

SEQ ID NO: 866600 - DNA, 25 bp, Homo sapien
agcagagtggctccggctatgcccc

SEQ ID NO: 866601 - DNA, 25 bp, Homo sapien
caggtcaggccaagcagagtggctc

SEQ ID NO: 866602 - DNA, 25 bp, Homo sapien
ggctccggctatgcccccgagcctg

SEQ ID NO: 866603 - DNA, 25 bp, Homo sapien
aagagctcgagggtgagcgagctga

SEQ ID NO: 866604 - DNA, 25 bp, Homo sapien
ctgaagagctcgagggtgagcgagc

SEQ ID NO: 866605 - DNA, 25 bp, Homo sapien
gagggtgagcgagctgaggaaggca

SEQ ID NO: 866606 - DNA, 25 bp, Homo sapien
gctcgagggtgagcgagctgaggaa

SEQ ID NO: 866607 - DNA, 25 bp, Homo sapien
ccagaatatgcccagaactcccaca

SEQ ID NO: 866608 - DNA, 25 bp, Homo sapien
agaatatgcccagaactcccacaac

SEQ ID NO: 866609 - DNA, 25 bp, Homo sapien
cagaatatgcccagaactcccacaa

SEQ ID NO: 866610 - DNA, 25 bp, Homo sapien
gcttagagggaaacggacagcactc

SEQ ID NO: 866611 - DNA, 25 bp, Homo sapien
gaatgatgccctaatataccgcgct

SEQ ID NO: 866612 - DNA, 25 bp, Homo sapien
gctggaaatacttctgaggctgcct

SEQ ID NO: 866613 - DNA, 25 bp, Homo sapien
tgaacaagtcgacctgctgtgcagc

SEQ ID NO: 866614 - DNA, 25 bp, Homo sapien
tattatgccgtgaccaagtgggact

SEQ ID NO: 866615 - DNA, 25 bp, Homo sapien
tcctgatgttgagaaccgtacagct

SEQ ID NO: 866616 - DNA, 25 bp, Homo sapien
gaaaagtcacaaaggcgcttcagtg

SEQ ID NO: 866617 - DNA, 25 bp, Homo sapien
tatacggctcctacgtcagacagac

SEQ ID NO: 866618 - DNA, 25 bp, Homo sapien
ccgggcctgtggcatcagcggccat

SEQ ID NO: 866619 - DNA, 25 bp, Homo sapien
cacagaggccgggcctgtggcatca

SEQ ID NO: 866620 - DNA, 25 bp, Homo sapien
gggcacagaggccgggcctgtggca

SEQ ID NO: 866621 - DNA, 25 bp, Homo sapien
aggctggagagtggcctgggcacag

SEQ ID NO: 866622 - DNA, 25 bp, Homo sapien
ggcctaggcactgcaggaaaatggc

SEQ ID NO: 866623 - DNA, 25 bp, Homo sapien
gatagacggctcaatcctgacttga

SEQ ID NO: 866624 - DNA, 25 bp, Homo sapien
accacctgcttgtgcgggcctggtg

SEQ ID NO: 866625 - DNA, 25 bp, Homo sapien
tcaacagaccttccagatagacggc

SEQ ID NO: 866626 - DNA, 25 bp, Homo sapien
gtgccctggcgccatcggatggcct

SEQ ID NO: 866627 - DNA, 25 bp, Homo sapien
cttgtccccacctcgctgcagcagg

SEQ ID NO: 866628 - DNA, 25 bp, Homo sapien
accaggacccgcgggagaggagagg

SEQ ID NO: 866629 - DNA, 25 bp, Homo sapien
catcggatggcctctactgggaagt

SEQ ID NO: 866630 - DNA, 25 bp, Homo sapien
ctcctgagcccgtcgcgggtgtggg

SEQ ID NO: 866631 - DNA, 25 bp, Homo sapien
cctcctgagcccgtcgcgggtgtgg

SEQ ID NO: 866632 - DNA, 25 bp, Homo sapien
gaagccacgagccagtgagttctgc

SEQ ID NO: 866633 - DNA, 25 bp, Homo sapien
tattcaaggactggttgccagtggt

SEQ ID NO: 866634 - DNA, 25 bp, Homo sapien
gtgagttctgcagcgatgttattca

SEQ ID NO: 866635 - DNA, 25 bp, Homo sapien
gttctgcagcgatgttattcaagga

SEQ ID NO: 866636 - DNA, 25 bp, Homo sapien
gaagggcctaactgatctgtgacgc

SEQ ID NO: 866637 - DNA, 25 bp, Homo sapien
gaaccttcactggtgcccacgttgg

SEQ ID NO: 866638 - DNA, 25 bp, Homo sapien
gctttctcaggaacaggcacttaca

SEQ ID NO: 866639 - DNA, 25 bp, Homo sapien
cacaggttgggatggacgtgaccca

SEQ ID NO: 866640 - DNA, 25 bp, Homo sapien
gtttcttaggcaagagccgcgagcg

SEQ ID NO: 866641 - DNA, 25 bp, Homo sapien
tactggcaccttcccgaggatttca

SEQ ID NO: 866642 - DNA, 25 bp, Homo sapien
caggaaaccctgactgtgctggacc

SEQ ID NO: 866643 - DNA, 25 bp, Homo sapien
gaggccttcagaccgagctgaccat

SEQ ID NO: 866644 - DNA, 25 bp, Homo sapien
tcagatctggggggcgtcccccgac

SEQ ID NO: 866645 - DNA, 25 bp, Homo sapien
cagatctggggggcgtcccccgact

SEQ ID NO: 866646 - DNA, 25 bp, Homo sapien
gtccctagacctgacatctggtggg

SEQ ID NO: 866647 - DNA, 25 bp, Homo sapien
gacgtgacatcctgtggggctgcct

SEQ ID NO: 866648 - DNA, 25 bp, Homo sapien
tagacgtgacatcctgtggggctgc

SEQ ID NO: 866649 - DNA, 25 bp, Homo sapien
tgtgtccctagacctgacatctggt

SEQ ID NO: 866650 - DNA, 25 bp, Homo sapien
ctggggctcggccacggctaggctc

SEQ ID NO: 866651 - DNA, 25 bp, Homo sapien
ggctgggctgagaccgggctggtcc

SEQ ID NO: 866652 - DNA, 25 bp, Homo sapien
tgagaccgggctggtccccctctag

SEQ ID NO: 866653 - DNA, 25 bp, Homo sapien
aaccaccaaagacgggcaggaggct

SEQ ID NO: 866654 - DNA, 25 bp, Homo sapien
tgtcctcctggctgcggactcctgg

SEQ ID NO: 866655 - DNA, 25 bp, Homo sapien
gggcactggaccgtgcctctctcat

SEQ ID NO: 866656 - DNA, 25 bp, Homo sapien
tcctggctgcggactcctgggcact

SEQ ID NO: 866657 - DNA, 25 bp, Homo sapien
gactcctgggcactggaccgtgcct

SEQ ID NO: 866658 - DNA, 25 bp, Homo sapien
cttcactgccatttccaaagcaaga

SEQ ID NO: 866659 - DNA, 25 bp, Homo sapien
tcttcactgccatttccaaagcaag

SEQ ID NO: 866660 - DNA, 25 bp, Homo sapien
atacaatcttcactgccatttccaa

SEQ ID NO: 866661 - DNA, 25 bp, Homo sapien
caatcttcactgccatttccaaagc

SEQ ID NO: 866662 - DNA, 25 bp, Homo sapien
caggtcctcgattcatgagtcgaca

SEQ ID NO: 866663 - DNA, 25 bp, Homo sapien
tctgcatgggctcggtgacaagaat

SEQ ID NO: 866664 - DNA, 25 bp, Homo sapien
ttcatgagtcgacacctctgcatgg

SEQ ID NO: 866665 - DNA, 25 bp, Homo sapien
gacagcaggtcctcgattcatgagt

SEQ ID NO: 866666 - DNA, 25 bp, Homo sapien
gggcgtgtgcaggttctctgctctc

SEQ ID NO: 866667 - DNA, 25 bp, Homo sapien
gggctcgcacaccacactgtgtctg

SEQ ID NO: 866668 - DNA, 25 bp, Homo sapien
ctggggctcgcacaccacactgtgt

SEQ ID NO: 866669 - DNA, 25 bp, Homo sapien
tgtctgcaaacaggcgtgtgggcgt

SEQ ID NO: 866670 - DNA, 25 bp, Homo sapien
ggttttgccccaaactgcatttgct

SEQ ID NO: 866671 - DNA, 25 bp, Homo sapien
gtcactccacttcttcttaccactg

SEQ ID NO: 866672 - DNA, 25 bp, Homo sapien
ttttctccctctcgtaacagaaggc

SEQ ID NO: 866673 - DNA, 25 bp, Homo sapien
gtgtccccggcctggtcactccact

SEQ ID NO: 866674 - DNA, 25 bp, Homo sapien
tgtctgttcactgtttgtctcttcc

SEQ ID NO: 866675 - DNA, 25 bp, Homo sapien
tctgtctggcagagccctagactgc

SEQ ID NO: 866676 - DNA, 25 bp, Homo sapien
tgctgcgaacagtacaagtgcctct

SEQ ID NO: 866677 - DNA, 25 bp, Homo sapien
gcgtggagctgctgcgaacagtaca

SEQ ID NO: 866678 - DNA, 25 bp, Homo sapien
ctaaatgttgcaggccctccagaag

SEQ ID NO: 866679 - DNA, 25 bp, Homo sapien
taaatgttgcaggccctccagaagg

SEQ ID NO: 866680 - DNA, 25 bp, Homo sapien
aaatgttgcaggccctccagaaggt

SEQ ID NO: 866681 - DNA, 25 bp, Homo sapien
gaaatggatgactgtgatctgagaa

SEQ ID NO: 866682 - DNA, 25 bp, Homo sapien
ggtttgagagtttcaagagtgtaga

SEQ ID NO: 866683 - DNA, 25 bp, Homo sapien
gaaatccacaaggaacgcagagcaa

SEQ ID NO: 866684 - DNA, 25 bp, Homo sapien
caaggaacgcagagcaagcccggca

SEQ ID NO: 866685 - DNA, 25 bp, Homo sapien
aggcagtttagacgcccgttccaga

SEQ ID NO: 866686 - DNA, 25 bp, Homo sapien
tccataaagacacgcagaggctgca

SEQ ID NO: 866687 - DNA, 25 bp, Homo sapien
gctgaatcagacaggcagcggctca

SEQ ID NO: 866688 - DNA, 25 bp, Homo sapien
cgctgtgagacgctgacggacatgc

SEQ ID NO: 866689 - DNA, 25 bp, Homo sapien
tcagccggtactggttctccgtggt

SEQ ID NO: 866690 - DNA, 25 bp, Homo sapien
tgctcggcgtacagcgaggtcagcc

SEQ ID NO: 866691 - DNA, 25 bp, Homo sapien
gagccgctggttcttcagctcggca

SEQ ID NO: 866692 - DNA, 25 bp, Homo sapien
tggtctggaaaacctccttgagccg

SEQ ID NO: 866693 - DNA, 25 bp, Homo sapien
gacgctcttgcggaactcatgattg

SEQ ID NO: 866694 - DNA, 25 bp, Homo sapien
cttgcggaactcatgattgatgaag

SEQ ID NO: 866695 - DNA, 25 bp, Homo sapien
tgcggaactcatgattgatgaagca

SEQ ID NO: 866696 - DNA, 25 bp, Homo sapien
gcagtggcctatggaagacgctctt

SEQ ID NO: 866697 - DNA, 25 bp, Homo sapien
gatgcagtggcctatggaagacgtt

SEQ ID NO: 866698 - DNA, 25 bp, Homo sapien
gaagacgttcttgtggaactcatga

SEQ ID NO: 866699 - DNA, 25 bp, Homo sapien
ttccaggcagcgaggatgcagtggc

SEQ ID NO: 866700 - DNA, 25 bp, Homo sapien
tgtggaactcatgattgatgaagca

SEQ ID NO: 866701 - DNA, 25 bp, Homo sapien
ggcagcaagcacacggtggcctatt

SEQ ID NO: 866702 - DNA, 25 bp, Homo sapien
ggtggcctattgaagacgctcctgc

SEQ ID NO: 866703 - DNA, 25 bp, Homo sapien
aagcgaggacccagtggcctacaga

SEQ ID NO: 866704 - DNA, 25 bp, Homo sapien
tgttccaggcaagcgaggacccagt

SEQ ID NO: 866705 - DNA, 25 bp, Homo sapien
tatggaagacgctcttgcagaattc

SEQ ID NO: 866706 - DNA, 25 bp, Homo sapien
tggaagacgctcttgcagaattcat

SEQ ID NO: 866707 - DNA, 25 bp, Homo sapien
gaagacgctcttgcagaattcatga

SEQ ID NO: 866708 - DNA, 25 bp, Homo sapien
ctatggaagacgctcttgcagaatt

SEQ ID NO: 866709 - DNA, 25 bp, Homo sapien
ctgttccaggcagcgagcacgcagt

SEQ ID NO: 866710 - DNA, 25 bp, Homo sapien
gttccaggcagcgagcacgcagtgg

SEQ ID NO: 866711 - DNA, 25 bp, Homo sapien
tgttccaggcagcgagcacgcagtg

SEQ ID NO: 866712 - DNA, 25 bp, Homo sapien
ttccaggcagcgagcacgcagtggc

SEQ ID NO: 866713 - DNA, 25 bp, Homo sapien
gctcttgcggaactcatgattgatc

SEQ ID NO: 866714 - DNA, 25 bp, Homo sapien
tgttccaggcagcgaggacgcagtg

SEQ ID NO: 866715 - DNA, 25 bp, Homo sapien
gttccaggcagcgaggacgcagtgg

SEQ ID NO: 866716 - DNA, 25 bp, Homo sapien
ttccaggcagcgaggacgcagtggc

SEQ ID NO: 866717 - DNA, 25 bp, Homo sapien
gaagacactcttgcggaactcatga

SEQ ID NO: 866718 - DNA, 25 bp, Homo sapien
gaagacgctcttgcagaattcatga

SEQ ID NO: 866719 - DNA, 25 bp, Homo sapien
gcagtggcctatggaagacgttctt

SEQ ID NO: 866720 - DNA, 25 bp, Homo sapien
gacgcagtggcctatggaagacgct

SEQ ID NO: 866721 - DNA, 25 bp, Homo sapien
ggaactcatgattgataaagcactg

SEQ ID NO: 866722 - DNA, 25 bp, Homo sapien
gaactcatgattgataaagcactgt

SEQ ID NO: 866723 - DNA, 25 bp, Homo sapien
aactcatgattgataaagcactgtt

SEQ ID NO: 866724 - DNA, 25 bp, Homo sapien
actcatgattgataaagcactgttc

SEQ ID NO: 866725 - DNA, 25 bp, Homo sapien
gacgctcttgcggaactcatgattg

SEQ ID NO: 866726 - DNA, 25 bp, Homo sapien
gaagacgctcttgtggaactcatga

SEQ ID NO: 866727 - DNA, 25 bp, Homo sapien
cgcagtggcctatggaagacgctct

SEQ ID NO: 866728 - DNA, 25 bp, Homo sapien
tgcagtggcctatggaagacgttct

SEQ ID NO: 866729 - DNA, 25 bp, Homo sapien
tgctcttgtggaattcatgattggt

SEQ ID NO: 866730 - DNA, 25 bp, Homo sapien
atgctcttgtggaattcatgattgg

SEQ ID NO: 866731 - DNA, 25 bp, Homo sapien
cgtttatccccgaacacgtgtgcgt

SEQ ID NO: 866732 - DNA, 25 bp, Homo sapien
cgcctactgctgaacgtccgtttat

SEQ ID NO: 866733 - DNA, 25 bp, Homo sapien
ttaaaatcaaggcaggccgaagaga

SEQ ID NO: 866734 - DNA, 25 bp, Homo sapien
gtgtgcgtctgtccctgaacacccg

SEQ ID NO: 866735 - DNA, 25 bp, Homo sapien
gatggtcgcttcaactctgctggta

SEQ ID NO: 866736 - DNA, 25 bp, Homo sapien
tgctggtaccagacggcccttgaga

SEQ ID NO: 866737 - DNA, 25 bp, Homo sapien
gatgagccatgagttcccctgctgg

SEQ ID NO: 866738 - DNA, 25 bp, Homo sapien
caaattcccggagaccagcccgagg

SEQ ID NO: 866739 - DNA, 25 bp, Homo sapien
gcacacacacgcctttccagctgcg

SEQ ID NO: 866740 - DNA, 25 bp, Homo sapien
ctgggtctgaacctctgcggcacac

SEQ ID NO: 866741 - DNA, 25 bp, Homo sapien
agctgcggccacctttgcagggctg

SEQ ID NO: 866742 - DNA, 25 bp, Homo sapien
ggtctgaacctctgcggcacacaca

SEQ ID NO: 866743 - DNA, 25 bp, Homo sapien
caggagtacacatagctgtcgggat

SEQ ID NO: 866744 - DNA, 25 bp, Homo sapien
ggaaccatggccaaacccagaagtc

SEQ ID NO: 866745 - DNA, 25 bp, Homo sapien
tagctgtcgggatagtttccttctg

SEQ ID NO: 866746 - DNA, 25 bp, Homo sapien
ttctgacccaaaatcctgaagtggg

SEQ ID NO: 866747 - DNA, 25 bp, Homo sapien
ctctggctctagaagtggcggggag

SEQ ID NO: 866748 - DNA, 25 bp, Homo sapien
ttggcgtggggtcagcaacctggga

SEQ ID NO: 866749 - DNA, 25 bp, Homo sapien
ggctgacaccatgaggatttcatga

SEQ ID NO: 866750 - DNA, 25 bp, Homo sapien
caacctgggacctcgcaggggctct

SEQ ID NO: 866751 - DNA, 25 bp, Homo sapien
cagaactgtaaagccaagcctgccg

SEQ ID NO: 866752 - DNA, 25 bp, Homo sapien
actgtaaagccaagcctgccgtcct

SEQ ID NO: 866753 - DNA, 25 bp, Homo sapien
tgaaggcagaactgtaaagccaagc

SEQ ID NO: 866754 - DNA, 25 bp, Homo sapien
gtccaggtggctggcactgaaggca

SEQ ID NO: 866755 - DNA, 25 bp, Homo sapien
cacccaacgcttatagagggccagt

SEQ ID NO: 866756 - DNA, 25 bp, Homo sapien
aacgcttatagagggccagtgccaa

SEQ ID NO: 866757 - DNA, 25 bp, Homo sapien
tccagtccacccaacgcttatagag

SEQ ID NO: 866758 - DNA, 25 bp, Homo sapien
cagtccacccaacgcttatagaggg

SEQ ID NO: 866759 - DNA, 25 bp, Homo sapien
ttggagtgtctgaaagcctctctca

SEQ ID NO: 866760 - DNA, 25 bp, Homo sapien
tggagtgtctgaaagcctctctcat

SEQ ID NO: 866761 - DNA, 25 bp, Homo sapien
cagctccgaaacttgccaataacac

SEQ ID NO: 866762 - DNA, 25 bp, Homo sapien
actcgcggcggcagcctcaaggtcg

SEQ ID NO: 866763 - DNA, 25 bp, Homo sapien
tcggctgggacggtgcctcctctct

SEQ ID NO: 866764 - DNA, 25 bp, Homo sapien
gctggctgtggtcctcgcgcaggcg

SEQ ID NO: 866765 - DNA, 25 bp, Homo sapien
tccttggacgatggcagactcgcgg

SEQ ID NO: 866766 - DNA, 25 bp, Homo sapien
ggctcgcttggccgctccctctgtg

SEQ ID NO: 866767 - DNA, 25 bp, Homo sapien
ggaagcggggtttgcagacacggct

SEQ ID NO: 866768 - DNA, 25 bp, Homo sapien
ccggccccatggcacgatggcagag

SEQ ID NO: 866769 - DNA, 25 bp, Homo sapien
tggaccagggacctccggccccatg

SEQ ID NO: 866770 - DNA, 25 bp, Homo sapien
gctggacagcatctcaacctcttca

SEQ ID NO: 866771 - DNA, 25 bp, Homo sapien
tgagaaccttgtaaacctcagagga

SEQ ID NO: 866772 - DNA, 25 bp, Homo sapien
gcaggagaggatccgcgcagctctt

SEQ ID NO: 866773 - DNA, 25 bp, Homo sapien
gataacccagtatgcagaatccagc

SEQ ID NO: 866774 - DNA, 25 bp, Homo sapien
aggctcttgacctccacgcgttcgt

SEQ ID NO: 866775 - DNA, 25 bp, Homo sapien
tcttcccttagtccatccacccgca

SEQ ID NO: 866776 - DNA, 25 bp, Homo sapien
cacgcgttcgttcctgccatccttc

SEQ ID NO: 866777 - DNA, 25 bp, Homo sapien
atctgacatgatttccaggccctgg

SEQ ID NO: 866778 - DNA, 25 bp, Homo sapien
tacactcggatgtgctcctggggct

SEQ ID NO: 866779 - DNA, 25 bp, Homo sapien
tgctcctggggcttaaaccaggtgg

SEQ ID NO: 866780 - DNA, 25 bp, Homo sapien
tgtgctcctggggcttaaaccaggt

SEQ ID NO: 866781 - DNA, 25 bp, Homo sapien
gatgtgctcctggggcttaaaccag

SEQ ID NO: 866782 - DNA, 25 bp, Homo sapien
ccagtgctctgtgagccctctttca

SEQ ID NO: 866783 - DNA, 25 bp, Homo sapien
agtgctctgtgagccctctttcatg

SEQ ID NO: 866784 - DNA, 25 bp, Homo sapien
ctgtgagccctctttcatgtattct

SEQ ID NO: 866785 - DNA, 25 bp, Homo sapien
tgctctgtgagccctctttcatgta

SEQ ID NO: 866786 - DNA, 25 bp, Homo sapien
gtgcgggtaaggtggcggcgctggg

SEQ ID NO: 866787 - DNA, 25 bp, Homo sapien
cgcagaccggggttagggctctgca

SEQ ID NO: 866788 - DNA, 25 bp, Homo sapien
gcgacccctcagaggtgcgggtaag

SEQ ID NO: 866789 - DNA, 25 bp, Homo sapien
tcagaggtgcgggtaaggtggcggc

SEQ ID NO: 866790 - DNA, 25 bp, Homo sapien
ctgcttcctttcacggacgggaagc

SEQ ID NO: 866791 - DNA, 25 bp, Homo sapien
tgaaccatcagctcgctgtatgact

SEQ ID NO: 866792 - DNA, 25 bp, Homo sapien
cgctgtatgactcccacagaacagg

SEQ ID NO: 866793 - DNA, 25 bp, Homo sapien
gaagcacctcatccgtctgaaccat

SEQ ID NO: 866794 - DNA, 25 bp, Homo sapien
cagggcagctgcagcgttggtggct

SEQ ID NO: 866795 - DNA, 25 bp, Homo sapien
aggagggaacgcggccctctcccag

SEQ ID NO: 866796 - DNA, 25 bp, Homo sapien
ctccaggagggaacgcggccctctc

SEQ ID NO: 866797 - DNA, 25 bp, Homo sapien
tggacgccagcacaaagggggcagc

SEQ ID NO: 866798 - DNA, 25 bp, Homo sapien
cgccttccagctcctcgaccttcaa

SEQ ID NO: 866799 - DNA, 25 bp, Homo sapien
gccttccagctcctcgaccttcaac

SEQ ID NO: 866800 - DNA, 25 bp, Homo sapien
tccagccgactccgctcgccttcca

SEQ ID NO: 866801 - DNA, 25 bp, Homo sapien
agccgactccgctcgccttccagct

SEQ ID NO: 866802 - DNA, 25 bp, Homo sapien
ctgagcttcaggagcgtgggaccct

SEQ ID NO: 866803 - DNA, 25 bp, Homo sapien
tgctcggagtatggactccccggcc

SEQ ID NO: 866804 - DNA, 25 bp, Homo sapien
cactaccacgggctcagcccacagg

SEQ ID NO: 866805 - DNA, 25 bp, Homo sapien
tgcctctgctcttcgcacactacca

SEQ ID NO: 866806 - DNA, 25 bp, Homo sapien
ccacgcccagctaagttttccattt

SEQ ID NO: 866807 - DNA, 25 bp, Homo sapien
gttcaagtgatcctcgtgtctcaac

SEQ ID NO: 866808 - DNA, 25 bp, Homo sapien
caagtagctggaattacaggcacgc

SEQ ID NO: 866809 - DNA, 25 bp, Homo sapien
gatcctcgtgtctcaacctcccaag

SEQ ID NO: 866810 - DNA, 25 bp, Homo sapien
cgggacaactaacatgggtacaatc

SEQ ID NO: 866811 - DNA, 25 bp, Homo sapien
tgtctactcccacgtgatctgtcat

SEQ ID NO: 866812 - DNA, 25 bp, Homo sapien
cagcaatatcaaaaacgggacaact

SEQ ID NO: 866813 - DNA, 25 bp, Homo sapien
gtacaatccagagactgctcgcctg

SEQ ID NO: 866814 - DNA, 25 bp, Homo sapien
gggttcgtggtcttgccggcctcag

SEQ ID NO: 866815 - DNA, 25 bp, Homo sapien
tgggttcgtggtcttgccggcctca

SEQ ID NO: 866816 - DNA, 25 bp, Homo sapien
ggttcgtggtcttgccggcctcagg

SEQ ID NO: 866817 - DNA, 25 bp, Homo sapien
gttcgtggtcttgccggcctcagga

SEQ ID NO: 866818 - DNA, 25 bp, Homo sapien
agagctggactgagacttcagcatc

SEQ ID NO: 866819 - DNA, 25 bp, Homo sapien
acaggaagctctgttcggcagagct

SEQ ID NO: 866820 - DNA, 25 bp, Homo sapien
caggaagctctgttcggcagagctg

SEQ ID NO: 866821 - DNA, 25 bp, Homo sapien
gagctggactgagacttcagcatct

SEQ ID NO: 866822 - DNA, 25 bp, Homo sapien
ttttttgtcacttccatctcctgaa

SEQ ID NO: 866823 - DNA, 25 bp, Homo sapien
tctctcctggaagcctgaagctgcc

SEQ ID NO: 866824 - DNA, 25 bp, Homo sapien
gccaggccagacagcactctaactt

SEQ ID NO: 866825 - DNA, 25 bp, Homo sapien
ctttgcaaactcaagttctctcatt

SEQ ID NO: 866826 - DNA, 25 bp, Homo sapien
cgttctcagaggtaactcacaggca

SEQ ID NO: 866827 - DNA, 25 bp, Homo sapien
tatcccggatgaagcgaagagagcc

SEQ ID NO: 866828 - DNA, 25 bp, Homo sapien
tgtccgccaatttgagaagccgtgt

SEQ ID NO: 866829 - DNA, 25 bp, Homo sapien
aagagcaaatgcgaggatggtcccg

SEQ ID NO: 866830 - DNA, 25 bp, Homo sapien
caggtagatggagcagcgtgcggaa

SEQ ID NO: 866831 - DNA, 25 bp, Homo sapien
cagaagaaaaggagtagcaggtaga

SEQ ID NO: 866832 - DNA, 25 bp, Homo sapien
gggcaggcccatgagaggcgaggag

SEQ ID NO: 866833 - DNA, 25 bp, Homo sapien
gagcagcgtgcggaagcacgggtgg

SEQ ID NO: 866834 - DNA, 25 bp, Homo sapien
tctcataagatctttgcaaactggt

SEQ ID NO: 866835 - DNA, 25 bp, Homo sapien
aaactgaaaaggctgggtcctcaca

SEQ ID NO: 866836 - DNA, 25 bp, Homo sapien
agctcaattcccagggggcctgagg

SEQ ID NO: 866837 - DNA, 25 bp, Homo sapien
gggcagcacagggacgatggtggcg

SEQ ID NO: 866838 - DNA, 25 bp, Homo sapien
gcagcagcacgggtccagctcaatt

SEQ ID NO: 866839 - DNA, 25 bp, Homo sapien
ggaagagcgtgtctgcgatgcaggg

SEQ ID NO: 866840 - DNA, 25 bp, Homo sapien
cctggggtccgtacaacgccgacag

SEQ ID NO: 866841 - DNA, 25 bp, Homo sapien
gggtccgtacaacgccgacagcagc

SEQ ID NO: 866842 - DNA, 25 bp, Homo sapien
gcaagcaaggatgcccgacgggagc

SEQ ID NO: 866843 - DNA, 25 bp, Homo sapien
atgcccgacgggagcctcgacctgg

SEQ ID NO: 866844 - DNA, 25 bp, Homo sapien
tgtctgctctttgtttctggcctcc

SEQ ID NO: 866845 - DNA, 25 bp, Homo sapien
tctgctctttgtttctggcctccca

SEQ ID NO: 866846 - DNA, 25 bp, Homo sapien
catgtctgctctttgtttctggcct

SEQ ID NO: 866847 - DNA, 25 bp, Homo sapien
gctctttgtttctggcctcccagct

SEQ ID NO: 866848 - DNA, 25 bp, Homo sapien
agctgaaccctggataatccggcca

SEQ ID NO: 866849 - DNA, 25 bp, Homo sapien
accctggataatccggccactgctg

SEQ ID NO: 866850 - DNA, 25 bp, Homo sapien
gtgcctcgaggcctaggagcagcac

SEQ ID NO: 866851 - DNA, 25 bp, Homo sapien
cgaggcctaggagcagcacactgcc

SEQ ID NO: 866852 - DNA, 25 bp, Homo sapien
gagatgcacccgttagagccaccca

SEQ ID NO: 866853 - DNA, 25 bp, Homo sapien
cgcacccctggcaaagctctgagct

SEQ ID NO: 866854 - DNA, 25 bp, Homo sapien
gcacgatgggcaccggcctcaggtg

SEQ ID NO: 866855 - DNA, 25 bp, Homo sapien
gcacacaggcggctggcacgatggg

SEQ ID NO: 866856 - DNA, 25 bp, Homo sapien
gccaggaggacgaccgcacgtcagc

SEQ ID NO: 866857 - DNA, 25 bp, Homo sapien
tcccgtgagagtgcagccccgggat

SEQ ID NO: 866858 - DNA, 25 bp, Homo sapien
gagcagctatggctcggctcacacg

SEQ ID NO: 866859 - DNA, 25 bp, Homo sapien
gacgaccgcacgtcagcaggagcag

SEQ ID NO: 866860 - DNA, 25 bp, Homo sapien
cagcccgtgtgtgcactggagagca

SEQ ID NO: 866861 - DNA, 25 bp, Homo sapien
ggctggtctcggtagggttcctcca

SEQ ID NO: 866862 - DNA, 25 bp, Homo sapien
tcagacagcgcaactccaggctggt

SEQ ID NO: 866863 - DNA, 25 bp, Homo sapien
gcacagcccgtgtgtgcactggaga

SEQ ID NO: 866864 - DNA, 25 bp, Homo sapien
gccaggggcctggaagacctctctg

SEQ ID NO: 866865 - DNA, 25 bp, Homo sapien
tggaatctgtgccagcagccgatac

SEQ ID NO: 866866 - DNA, 25 bp, Homo sapien
catcaacacagacaggccagtgcag

SEQ ID NO: 866867 - DNA, 25 bp, Homo sapien
cagcggggtcctggggggagactgc

SEQ ID NO: 866868 - DNA, 25 bp, Homo sapien
cgcacgggatggctagacacagaaa

SEQ ID NO: 866869 - DNA, 25 bp, Homo sapien
ttctagatgtagtttggcgacctcc

SEQ ID NO: 866870 - DNA, 25 bp, Homo sapien
gacacggcatagttccagggccctt

SEQ ID NO: 866871 - DNA, 25 bp, Homo sapien
ggagctagcctttcccgtgacgact

SEQ ID NO: 866872 - DNA, 25 bp, Homo sapien
tactcggccggggtcagctcgctgt

SEQ ID NO: 866873 - DNA, 25 bp, Homo sapien
tcagcctcccgcatgcgccgcgtca

SEQ ID NO: 866874 - DNA, 25 bp, Homo sapien
ccttctgcaccatatcctcagcctc

SEQ ID NO: 866875 - DNA, 25 bp, Homo sapien
gctcgctgtcgtaggaccccaggat

SEQ ID NO: 866876 - DNA, 25 bp, Homo sapien
ggggctccctcgtgaggacccaggc

SEQ ID NO: 866877 - DNA, 25 bp, Homo sapien
gtcacgcgggggctccctcgtgagg

SEQ ID NO: 866878 - DNA, 25 bp, Homo sapien
agagctgggtcacgcgggggctccc

SEQ ID NO: 866879 - DNA, 25 bp, Homo sapien
gcgggggctccctcgtgaggaccca

SEQ ID NO: 866880 - DNA, 25 bp, Homo sapien
tcagcatccccagacccagtaaatg

SEQ ID NO: 866881 - DNA, 25 bp, Homo sapien
tcactacagcgggtgtgggctccac

SEQ ID NO: 866882 - DNA, 25 bp, Homo sapien
acgtcaggccttcactacagcgggt

SEQ ID NO: 866883 - DNA, 25 bp, Homo sapien
acctcgtaccggcagtatggctatg

SEQ ID NO: 866884 - DNA, 25 bp, Homo sapien
gcctgttctattgggtctgcgtgac

SEQ ID NO: 866885 - DNA, 25 bp, Homo sapien
gcacacacaaggcgagggcgcacag

SEQ ID NO: 866886 - DNA, 25 bp, Homo sapien
agggaaacgacagtgggcaggccca

SEQ ID NO: 866887 - DNA, 25 bp, Homo sapien
aggcgagggcgcacagtgggcagaa

SEQ ID NO: 866888 - DNA, 25 bp, Homo sapien
cagggctctcgggaaggctgagtcc

SEQ ID NO: 866889 - DNA, 25 bp, Homo sapien
aagctgctgcgttccaatgggacag

SEQ ID NO: 866890 - DNA, 25 bp, Homo sapien
tgggacaggaaacccatcgctcgtc

SEQ ID NO: 866891 - DNA, 25 bp, Homo sapien
cttgtcttcccacagagctcccagg

SEQ ID NO: 866892 - DNA, 25 bp, Homo sapien
cattgagttgtggccagcgtgctcc

SEQ ID NO: 866893 - DNA, 25 bp, Homo sapien
ctcattgagttgtggccagcgtgct

SEQ ID NO: 866894 - DNA, 25 bp, Homo sapien
tcattgagttgtggccagcgtgctc

SEQ ID NO: 866895 - DNA, 25 bp, Homo sapien
catttccacctcagcaaatgcggtg

SEQ ID NO: 866896 - DNA, 25 bp, Homo sapien
acctcagcaaatgcggtgattaact

SEQ ID NO: 866897 - DNA, 25 bp, Homo sapien
agcaaatgcggtgattaactgctga

SEQ ID NO: 866898 - DNA, 25 bp, Homo sapien
tgcgggcaagtccacttcatttcca

SEQ ID NO: 866899 - DNA, 25 bp, Homo sapien
gacagggcctcggtgccctggatac

SEQ ID NO: 866900 - DNA, 25 bp, Homo sapien
ggcctcggtgccctggatacaccgg

SEQ ID NO: 866901 - DNA, 25 bp, Homo sapien
tgccctggatacaccggccgatggg

SEQ ID NO: 866902 - DNA, 25 bp, Homo sapien
tgaggacagggcctcggtgccctgg

SEQ ID NO: 866903 - DNA, 25 bp, Homo sapien
tgtggctgccctgtcgctcagacca

SEQ ID NO: 866904 - DNA, 25 bp, Homo sapien
gttgtggctgccctgtcgctcagac

SEQ ID NO: 866905 - DNA, 25 bp, Homo sapien
ctcagcagctgcgagctgttgtggc

SEQ ID NO: 866906 - DNA, 25 bp, Homo sapien
ctgccctgtcgctcagaccacggag

SEQ ID NO: 866907 - DNA, 25 bp, Homo sapien
tcagggcaaacacactcagatggaa

SEQ ID NO: 866908 - DNA, 25 bp, Homo sapien
agggcactctgcatgacacacccag

SEQ ID NO: 866909 - DNA, 25 bp, Homo sapien
ggcctggaggcctaactttctggca

SEQ ID NO: 866910 - DNA, 25 bp, Homo sapien
taagtcccatttacaaacagctcag

SEQ ID NO: 866911 - DNA, 25 bp, Homo sapien
aaagctctatttctgctgggcgact

SEQ ID NO: 866912 - DNA, 25 bp, Homo sapien
gggcgactggattcggaggagcccc

SEQ ID NO: 866913 - DNA, 25 bp, Homo sapien
cccggtttactgttgacaaagctct

SEQ ID NO: 866914 - DNA, 25 bp, Homo sapien
actgttgacaaagctctatttctgc

SEQ ID NO: 866915 - DNA, 25 bp, Homo sapien
tgtgcgtctccgtaactcacggcag

SEQ ID NO: 866916 - DNA, 25 bp, Homo sapien
caaatgggatcatgcagcacacgac

SEQ ID NO: 866917 - DNA, 25 bp, Homo sapien
gggttgtccgttcacagccacgatt

SEQ ID NO: 866918 - DNA, 25 bp, Homo sapien
cacagtatcacaacccgtatgccga

SEQ ID NO: 866919 - DNA, 25 bp, Homo sapien
gaatactacgaacagctgcatgccg

SEQ ID NO: 866920 - DNA, 25 bp, Homo sapien
cagatgggcagttcctatcggtcca

SEQ ID NO: 866921 - DNA, 25 bp, Homo sapien
tattcccaggtctcatcggtgtcgg

SEQ ID NO: 866922 - DNA, 25 bp, Homo sapien
tagttttgaagacgctgcctgctgc

SEQ ID NO: 866923 - DNA, 25 bp, Homo sapien
gcagagtcagctcatcacattcatg

SEQ ID NO: 866924 - DNA, 25 bp, Homo sapien
accctttggaacgtaatcatcagga

SEQ ID NO: 866925 - DNA, 25 bp, Homo sapien
gagccaaccctttggaacgtaatca

SEQ ID NO: 866926 - DNA, 25 bp, Homo sapien
ccaacctgccagctcgtagcagagt

SEQ ID NO: 866927 - DNA, 25 bp, Homo sapien
atatacctttgacatgggtcacgac

SEQ ID NO: 866928 - DNA, 25 bp, Homo sapien
tgtcagcagcgactgaataaaatct

SEQ ID NO: 866929 - DNA, 25 bp, Homo sapien
ggtcacgactgacgcttgacatgag

SEQ ID NO: 866930 - DNA, 25 bp, Homo sapien
tttgacatgggtcacgactgacgct

SEQ ID NO: 866931 - DNA, 25 bp, Homo sapien
gatgctgagataacgccgatgccga

SEQ ID NO: 866932 - DNA, 25 bp, Homo sapien
gatgctgagatacgccaatgccaag

SEQ ID NO: 866933 - DNA, 25 bp, Homo sapien
tacactgatgctgagatacgccgat

SEQ ID NO: 866934 - DNA, 25 bp, Homo sapien
tgctgatgccaagatacaccgatgc

SEQ ID NO: 866935 - DNA, 25 bp, Homo sapien
gcagcgccacgcgtggggagaaggc

SEQ ID NO: 866936 - DNA, 25 bp, Homo sapien
agaaagccctgaagtggacggccac

SEQ ID NO: 866937 - DNA, 25 bp, Homo sapien
atagaggctgccagatcaacagcat

SEQ ID NO: 866938 - DNA, 25 bp, Homo sapien
agaaggcggccttgcaatagaggct

SEQ ID NO: 866939 - DNA, 25 bp, Homo sapien
gctggacacccagcgtcaactgctc

SEQ ID NO: 866940 - DNA, 25 bp, Homo sapien
accatgacaaccacagtctgtgctc

SEQ ID NO: 866941 - DNA, 25 bp, Homo sapien
tcagcagccacgacgtgagtccgac

SEQ ID NO: 866942 - DNA, 25 bp, Homo sapien
acgtgagtccgacgccgctggacac

SEQ ID NO: 866943 - DNA, 25 bp, Homo sapien
cctccagatggctgagtgaacagct

SEQ ID NO: 866944 - DNA, 25 bp, Homo sapien
ggataaacaaccagtccatgcccgg

SEQ ID NO: 866945 - DNA, 25 bp, Homo sapien
acacgggcgactgggatcaatcctt

SEQ ID NO: 866946 - DNA, 25 bp, Homo sapien
gaacagcttcatcacggctggctgg

SEQ ID NO: 866947 - DNA, 25 bp, Homo sapien
cttgctaacacagagcaggcccgcg

SEQ ID NO: 866948 - DNA, 25 bp, Homo sapien
tcttgctaacacagagcaggcccgc

SEQ ID NO: 866949 - DNA, 25 bp, Homo sapien
ttcttgctaacacagagcaggcccg

SEQ ID NO: 866950 - DNA, 25 bp, Homo sapien
acgttcgcaggcacccggggtcatc

SEQ ID NO: 866951 - DNA, 25 bp, Homo sapien
cgttcgcaggcacccggggtcatca

SEQ ID NO: 866952 - DNA, 25 bp, Homo sapien
gtcatcaggccacgttcgcaggcac

SEQ ID NO: 866953 - DNA, 25 bp, Homo sapien
catcaggccacgttcgcaggcaccc

SEQ ID NO: 866954 - DNA, 25 bp, Homo sapien
gaaaagccatgtgagaacattttgg

SEQ ID NO: 866955 - DNA, 25 bp, Homo sapien
catgtgagaacattttggagtgtcc

SEQ ID NO: 866956 - DNA, 25 bp, Homo sapien
cattttggagtgtcccctgtctggg

SEQ ID NO: 866957 - DNA, 25 bp, Homo sapien
agacagctccggctgaaaagccatg

SEQ ID NO: 866958 - DNA, 25 bp, Homo sapien
ggtccgcagtgacagggaaccctct

SEQ ID NO: 866959 - DNA, 25 bp, Homo sapien
tgtaaatggcatcactggatgggaa

SEQ ID NO: 866960 - DNA, 25 bp, Homo sapien
agcatgagggtgctgactgcaaggc

SEQ ID NO: 866961 - DNA, 25 bp, Homo sapien
actgcaaggcacgtgggagcctgca

SEQ ID NO: 866962 - DNA, 25 bp, Homo sapien
aacagctggccgctgacctgccgga

SEQ ID NO: 866963 - DNA, 25 bp, Homo sapien
agctggccgctgacctgccggagct

SEQ ID NO: 866964 - DNA, 25 bp, Homo sapien
gcgcctcgtgggtctcgcgcttctt

SEQ ID NO: 866965 - DNA, 25 bp, Homo sapien
gggccagcgcctcgtgggtctcgcg

SEQ ID NO: 866966 - DNA, 25 bp, Homo sapien
tctctgttcaatcccggcctttctt

SEQ ID NO: 866967 - DNA, 25 bp, Homo sapien
agcgacggcgggctctcccctgttg

SEQ ID NO: 866968 - DNA, 25 bp, Homo sapien
agcacgctgagccacagcggcacca

SEQ ID NO: 866969 - DNA, 25 bp, Homo sapien
gggatgttctctctgttcaatcccg

SEQ ID NO: 866970 - DNA, 25 bp, Homo sapien
tgagaatgggaatcaatagctgcct

SEQ ID NO: 866971 - DNA, 25 bp, Homo sapien
gacgcaggctccttgtgtatctgag

SEQ ID NO: 866972 - DNA, 25 bp, Homo sapien
gagaccggcacgacagacgcaggct

SEQ ID NO: 866973 - DNA, 25 bp, Homo sapien
ggagccgtctctgccatcgaagccc

SEQ ID NO: 866974 - DNA, 25 bp, Homo sapien
ataaattcacttccgccccaggctg

SEQ ID NO: 866975 - DNA, 25 bp, Homo sapien
cagggagaccataaattcacttccg

SEQ ID NO: 866976 - DNA, 25 bp, Homo sapien
gccgcagggagaccataaattcact

SEQ ID NO: 866977 - DNA, 25 bp, Homo sapien
ggagaccataaattcacttccgccc

SEQ ID NO: 866978 - DNA, 25 bp, Homo sapien
ctggagattaggaaatgagaactgc

SEQ ID NO: 866979 - DNA, 25 bp, Homo sapien
aatccggtgcctggagtgacgcaga

SEQ ID NO: 866980 - DNA, 25 bp, Homo sapien
gtgtcctggacacatctaccgtctc

SEQ ID NO: 866981 - DNA, 25 bp, Homo sapien
ggctctactaaacaaccgccccatg

SEQ ID NO: 866982 - DNA, 25 bp, Homo sapien
caataccccgttaggtgtggcacct

SEQ ID NO: 866983 - DNA, 25 bp, Homo sapien
tgctgtctctcgcgctgcagggaga

SEQ ID NO: 866984 - DNA, 25 bp, Homo sapien
catccttgacccaaagcacagaagt

SEQ ID NO: 866985 - DNA, 25 bp, Homo sapien
ctgggtaatgaagcacattcggcct

SEQ ID NO: 866986 - DNA, 25 bp, Homo sapien
cagatctgttcctgatactgcagga

SEQ ID NO: 866987 - DNA, 25 bp, Homo sapien
gaagaaacagatctgttcctgatac

SEQ ID NO: 866988 - DNA, 25 bp, Homo sapien
cccagtgattccagcgcagtcagac

SEQ ID NO: 866989 - DNA, 25 bp, Homo sapien
gttcctgatactgcaggagcgcccg

SEQ ID NO: 866990 - DNA, 25 bp, Homo sapien
tgggcaagaaggcactggggaagcg

SEQ ID NO: 866991 - DNA, 25 bp, Homo sapien
cgggcgcagactgggcatggacccc

SEQ ID NO: 866992 - DNA, 25 bp, Homo sapien
gggaagcgggcgcagactgggcatg

SEQ ID NO: 866993 - DNA, 25 bp, Homo sapien
agcttgggcaagaaggcactgggga

SEQ ID NO: 866994 - DNA, 25 bp, Homo sapien
tggacactccgcaggatctggaaga

SEQ ID NO: 866995 - DNA, 25 bp, Homo sapien
gaaggtccggttttccacatgcacc

SEQ ID NO: 866996 - DNA, 25 bp, Homo sapien
cgaaaggcattccaaggcagcactg

SEQ ID NO: 866997 - DNA, 25 bp, Homo sapien
cacatgcacccaactcggagaagaa

SEQ ID NO: 866998 - DNA, 25 bp, Homo sapien
ggtgtggccggacccgccacagaga

SEQ ID NO: 866999 - DNA, 25 bp, Homo sapien
caggtgtggccggacccgccacaga

SEQ ID NO: 867000 - DNA, 25 bp, Homo sapien
acaggtgtggccggacccgccacag

SEQ ID NO: 867001 - DNA, 25 bp, Homo sapien
gtggccggacccgccacagagacag

SEQ ID NO: 867002 - DNA, 25 bp, Homo sapien
atctcctggaacgtcctgatgtccg

SEQ ID NO: 867003 - DNA, 25 bp, Homo sapien
acgtcctgatgtccggccccagata

SEQ ID NO: 867004 - DNA, 25 bp, Homo sapien
tggaacgtcctgatgtccggcccca

SEQ ID NO: 867005 - DNA, 25 bp, Homo sapien
gccccagataaccctgggagccacc

SEQ ID NO: 867006 - DNA, 25 bp, Homo sapien
acagccacgcagtacacaccccagg

SEQ ID NO: 867007 - DNA, 25 bp, Homo sapien
gccattgcctctcggccacctggtt

SEQ ID NO: 867008 - DNA, 25 bp, Homo sapien
gtgtggtctgtctccccgccgcaca

SEQ ID NO: 867009 - DNA, 25 bp, Homo sapien
gagagcagcgcatgtagctgtccct

SEQ ID NO: 867010 - DNA, 25 bp, Homo sapien
gctgtgcagcttcctcgagaccacg

SEQ ID NO: 867011 - DNA, 25 bp, Homo sapien
cactccactgatggcctgaaggtca

SEQ ID NO: 867012 - DNA, 25 bp, Homo sapien
ccacagaggagttgtgaaggttcac

SEQ ID NO: 867013 - DNA, 25 bp, Homo sapien
atgcaggcgcctcacccggtggctg

SEQ ID NO: 867014 - DNA, 25 bp, Homo sapien
tgctgttctgacatccatctcgaag

SEQ ID NO: 867015 - DNA, 25 bp, Homo sapien
agtgtccaataatcatgctgttctg

SEQ ID NO: 867016 - DNA, 25 bp, Homo sapien
aacaaagtgtccaataatcatgctg

SEQ ID NO: 867017 - DNA, 25 bp, Homo sapien
tcgaaggccaggcttaattaaggcc

SEQ ID NO: 867018 - DNA, 25 bp, Homo sapien
gaacaggtggcctcaacgccagcca

SEQ ID NO: 867019 - DNA, 25 bp, Homo sapien
ggtggcctcaacgccagccacaagg

SEQ ID NO: 867020 - DNA, 25 bp, Homo sapien
aggtggcctcaacgccagccacaag

SEQ ID NO: 867021 - DNA, 25 bp, Homo sapien
acaggtggcctcaacgccagccaca

SEQ ID NO: 867022 - DNA, 25 bp, Homo sapien
gctcgcagcccacaaacaggagaaa

SEQ ID NO: 867023 - DNA, 25 bp, Homo sapien
tctgggtaaggccatcagagcacac

SEQ ID NO: 867024 - DNA, 25 bp, Homo sapien
tcagggtcgttagaatcgggctccc

SEQ ID NO: 867025 - DNA, 25 bp, Homo sapien
gcctgatcaggactcagtcacgtaa

SEQ ID NO: 867026 - DNA, 25 bp, Homo sapien
gctttgaatttgttagctgccttca

SEQ ID NO: 867027 - DNA, 25 bp, Homo sapien
gttagctgccttcatgggaccaggg

SEQ ID NO: 867028 - DNA, 25 bp, Homo sapien
gcggactcggctttcactctcaaaa

SEQ ID NO: 867029 - DNA, 25 bp, Homo sapien
ggtctcctcctacgctgcttttcca

SEQ ID NO: 867030 - DNA, 25 bp, Homo sapien
agccggccatccacgggcaccaggc

SEQ ID NO: 867031 - DNA, 25 bp, Homo sapien
gcagcaggaggtgcggacacccaca

SEQ ID NO: 867032 - DNA, 25 bp, Homo sapien
aggaggtgcggacacccacagccac

SEQ ID NO: 867033 - DNA, 25 bp, Homo sapien
ctagagaagctatgagggtgagaac

SEQ ID NO: 867034 - DNA, 25 bp, Homo sapien
tgaccttgagtctttgaggccccag

SEQ ID NO: 867035 - DNA, 25 bp, Homo sapien
acaccaggcctctgcgcagaaggcg

SEQ ID NO: 867036 - DNA, 25 bp, Homo sapien
actggggctgactgcacagcgccgt

SEQ ID NO: 867037 - DNA, 25 bp, Homo sapien
gcagaaggcgcatggcaaacaccct

SEQ ID NO: 867038 - DNA, 25 bp, Homo sapien
tgcacactgctttacgacggccagc

SEQ ID NO: 867039 - DNA, 25 bp, Homo sapien
caggtgcacactgctttacgacggc

SEQ ID NO: 867040 - DNA, 25 bp, Homo sapien
tgttgatggataaggacataggtga

SEQ ID NO: 867041 - DNA, 25 bp, Homo sapien
ctgttgatggataaggacataggtg

SEQ ID NO: 867042 - DNA, 25 bp, Homo sapien
ggctgcaaaccggaaggcgtccttg

SEQ ID NO: 867043 - DNA, 25 bp, Homo sapien
tccttggaaacggccgcactgggcc

SEQ ID NO: 867044 - DNA, 25 bp, Homo sapien
tgcaaaccggaaggcgtccttggaa

SEQ ID NO: 867045 - DNA, 25 bp, Homo sapien
tgggccctggctgcaaaccggaagg

SEQ ID NO: 867046 - DNA, 25 bp, Homo sapien
gggctccactcctaaagggtctcca

SEQ ID NO: 867047 - DNA, 25 bp, Homo sapien
tctccatccaggtgggtggcatgag

SEQ ID NO: 867048 - DNA, 25 bp, Homo sapien
gctccactcctaaagggtctccatc

SEQ ID NO: 867049 - DNA, 25 bp, Homo sapien
ggctccactcctaaagggtctccat

SEQ ID NO: 867050 - DNA, 25 bp, Homo sapien
gggacatcgccatgcctagtgatga

SEQ ID NO: 867051 - DNA, 25 bp, Homo sapien
cgccgctcagtagacggcacatggg

SEQ ID NO: 867052 - DNA, 25 bp, Homo sapien
tagacggcacatgggacatcgccat

SEQ ID NO: 867053 - DNA, 25 bp, Homo sapien
tgatgacgtttctgtttggaagaag

SEQ ID NO: 867054 - DNA, 25 bp, Homo sapien
caggaaggcttttcacagggagcca

SEQ ID NO: 867055 - DNA, 25 bp, Homo sapien
tctgtgtttaggtctaaaaagctct

SEQ ID NO: 867056 - DNA, 25 bp, Homo sapien
taaacacttgattaccaggaaggct

SEQ ID NO: 867057 - DNA, 25 bp, Homo sapien
tttcatctcctttcagaatgggaga

SEQ ID NO: 867058 - DNA, 25 bp, Homo sapien
cacaagaagtctgagagttggcgac

SEQ ID NO: 867059 - DNA, 25 bp, Homo sapien
cagaggtcaggccactagtaagggc

SEQ ID NO: 867060 - DNA, 25 bp, Homo sapien
cactgcggctgcgtgggtctaaata

SEQ ID NO: 867061 - DNA, 25 bp, Homo sapien
acagttgtgagagtgcagacccagc

SEQ ID NO: 867062 - DNA, 25 bp, Homo sapien
ctgttctccacaggcagactctgag

SEQ ID NO: 867063 - DNA, 25 bp, Homo sapien
cctgttctccacaggcagactctga

SEQ ID NO: 867064 - DNA, 25 bp, Homo sapien
ggcaggatccatgacccagggtctc

SEQ ID NO: 867065 - DNA, 25 bp, Homo sapien
cttaagtcagcatcgaggaggatgc

SEQ ID NO: 867066 - DNA, 25 bp, Homo sapien
gagaagcaaggccaaagccgagacg

SEQ ID NO: 867067 - DNA, 25 bp, Homo sapien
taagtcagcatcgaggaggatgcct

SEQ ID NO: 867068 - DNA, 25 bp, Homo sapien
acgagcgaaaccagagaagagccgg

SEQ ID NO: 867069 - DNA, 25 bp, Homo sapien
gggcaggcataagaccccttcttag

SEQ ID NO: 867070 - DNA, 25 bp, Homo sapien
tcatttccgcctctgggtgtgatgc

SEQ ID NO: 867071 - DNA, 25 bp, Homo sapien
ggttcagtccctcatggtagctcca

SEQ ID NO: 867072 - DNA, 25 bp, Homo sapien
ctcaaccacgaatctggaaaggtct

SEQ ID NO: 867073 - DNA, 25 bp, Homo sapien
tcttcacctgtcatggaccaagcgc

SEQ ID NO: 867074 - DNA, 25 bp, Homo sapien
caggtccacatagaaagcaggcgct

SEQ ID NO: 867075 - DNA, 25 bp, Homo sapien
cattggccaaggaggctacctgcac

SEQ ID NO: 867076 - DNA, 25 bp, Homo sapien
cagtggcatgtgagctcaggcccga

SEQ ID NO: 867077 - DNA, 25 bp, Homo sapien
atgctcccgacacggaagacgctgc

SEQ ID NO: 867078 - DNA, 25 bp, Homo sapien
agcacagcatgctcccgacacggaa

SEQ ID NO: 867079 - DNA, 25 bp, Homo sapien
caaaaactaagagactgagaagaga

SEQ ID NO: 867080 - DNA, 25 bp, Homo sapien
ccgcaaaaactaagagactgagaag

SEQ ID NO: 867081 - DNA, 25 bp, Homo sapien
agcccctctgcccagcagccgccct

SEQ ID NO: 867082 - DNA, 25 bp, Homo sapien
ggagcccctctgcccagcagccgcc

SEQ ID NO: 867083 - DNA, 25 bp, Homo sapien
gagcccctctgcccagcagccgccc

SEQ ID NO: 867084 - DNA, 25 bp, Homo sapien
atgaggatggcggttttgtcgaata

SEQ ID NO: 867085 - DNA, 25 bp, Homo sapien
atgatgaggatggcggttttgtcga

SEQ ID NO: 867086 - DNA, 25 bp, Homo sapien
ttgggatgctgttaatctataacct

SEQ ID NO: 867087 - DNA, 25 bp, Homo sapien
gggatgctgttaatctataacctta

SEQ ID NO: 867088 - DNA, 25 bp, Homo sapien
atgcgagccaccatgggaggatgct

SEQ ID NO: 867089 - DNA, 25 bp, Homo sapien
gatgcctgagccgtcagcatgaacc

SEQ ID NO: 867090 - DNA, 25 bp, Homo sapien
aacccacggtcacactctgggatgc

SEQ ID NO: 867091 - DNA, 25 bp, Homo sapien
tgagccgtcagcatgaacccacggt

SEQ ID NO: 867092 - DNA, 25 bp, Homo sapien
cagggtacacctgtgcctggaactc

SEQ ID NO: 867093 - DNA, 25 bp, Homo sapien
cctggaactccagtgtggttactgt

SEQ ID NO: 867094 - DNA, 25 bp, Homo sapien
cagccccgctgacaaaggcaggtct

SEQ ID NO: 867095 - DNA, 25 bp, Homo sapien
tctgtgtacgcagaatgaccggccc

SEQ ID NO: 867096 - DNA, 25 bp, Homo sapien
ccggtgaaacagtaagaccagggca

SEQ ID NO: 867097 - DNA, 25 bp, Homo sapien
acagtggcatcgcagataggagagt

SEQ ID NO: 867098 - DNA, 25 bp, Homo sapien
aaagcaaccccgctgtggacagtgg

SEQ ID NO: 867099 - DNA, 25 bp, Homo sapien
caggtgagctcgaaaccctaaagca

SEQ ID NO: 867100 - DNA, 25 bp, Homo sapien
caggggctggaccacagtctgggtg

SEQ ID NO: 867101 - DNA, 25 bp, Homo sapien
cacagtctgggtggaggggttgcgg

SEQ ID NO: 867102 - DNA, 25 bp, Homo sapien
agcaggggctggaccacagtctggg

SEQ ID NO: 867103 - DNA, 25 bp, Homo sapien
cagtctgggtggaggggttgcggaa

SEQ ID NO: 867104 - DNA, 25 bp, Homo sapien
tgggacacgtatgggtcacctccac

SEQ ID NO: 867105 - DNA, 25 bp, Homo sapien
gatgggacacgtatgggtcacctcc

SEQ ID NO: 867106 - DNA, 25 bp, Homo sapien
gagatgggacacgtatgggtcacct

SEQ ID NO: 867107 - DNA, 25 bp, Homo sapien
tggagatgggacacgtatgggtcac

SEQ ID NO: 867108 - DNA, 25 bp, Homo sapien
agagatgccagaaatcagccacatc

SEQ ID NO: 867109 - DNA, 25 bp, Homo sapien
ccagacccgtaagagatgccagaaa

SEQ ID NO: 867110 - DNA, 25 bp, Homo sapien
gcagcccaagaccagacccgtaaga

SEQ ID NO: 867111 - DNA, 25 bp, Homo sapien
gggccatgagaccacgcagcccaag

SEQ ID NO: 867112 - DNA, 25 bp, Homo sapien
tagtccataaggcaccccgtcccga

SEQ ID NO: 867113 - DNA, 25 bp, Homo sapien
cccgtcccgaaaagcgccaagtgca

SEQ ID NO: 867114 - DNA, 25 bp, Homo sapien
agtgcacgaccatcggctttaccgc

SEQ ID NO: 867115 - DNA, 25 bp, Homo sapien
ttaccgcctgctcagcacgcctaat

SEQ ID NO: 867116 - DNA, 25 bp, Homo sapien
catttgtcatctaagccaccggact

SEQ ID NO: 867117 - DNA, 25 bp, Homo sapien
tggaaaaggtgagaacgtgacggtc

SEQ ID NO: 867118 - DNA, 25 bp, Homo sapien
agagaccattttaatcctgggaagc

SEQ ID NO: 867119 - DNA, 25 bp, Homo sapien
aataacaggcgagaatgcgtcctct

SEQ ID NO: 867120 - DNA, 25 bp, Homo sapien
agtcggtccattagggagggtgcct

SEQ ID NO: 867121 - DNA, 25 bp, Homo sapien
cggtccattagggagggtgcctgag

SEQ ID NO: 867122 - DNA, 25 bp, Homo sapien
gcccttgaccccagtcggtccatta

SEQ ID NO: 867123 - DNA, 25 bp, Homo sapien
agcccttgaccccagtcggtccatt

SEQ ID NO: 867124 - DNA, 25 bp, Homo sapien
tgtgctaagaatacagcagctgact

SEQ ID NO: 867125 - DNA, 25 bp, Homo sapien
tatgtcttagcattcccatcaataa

SEQ ID NO: 867126 - DNA, 25 bp, Homo sapien
tcggaaacactaacaacatcaatga

SEQ ID NO: 867127 - DNA, 25 bp, Homo sapien
ctaccagggcagacagatgagcctg

SEQ ID NO: 867128 - DNA, 25 bp, Homo sapien
gccaaatctgcgttttaagctgaca

SEQ ID NO: 867129 - DNA, 25 bp, Homo sapien
caggctcctagggaactgattctcc

SEQ ID NO: 867130 - DNA, 25 bp, Homo sapien
tcttccgaaagacaagagctctgag

SEQ ID NO: 867131 - DNA, 25 bp, Homo sapien
tcagccacctaagccggtaaagcag

SEQ ID NO: 867132 - DNA, 25 bp, Homo sapien
caaggccacaccgtcgcccaactgt

SEQ ID NO: 867133 - DNA, 25 bp, Homo sapien
aggcaaggccacaccgtcgcccaac

SEQ ID NO: 867134 - DNA, 25 bp, Homo sapien
ggcaaggccacaccgtcgcccaact

SEQ ID NO: 867135 - DNA, 25 bp, Homo sapien
aggccacaccgtcgcccaactgtcc

SEQ ID NO: 867136 - DNA, 25 bp, Homo sapien
taggagttagcaggcatggccttca

SEQ ID NO: 867137 - DNA, 25 bp, Homo sapien
tgtatcctcaggtaggagttagcag

SEQ ID NO: 867138 - DNA, 25 bp, Homo sapien
ccaaaattaaatggctagccctgta

SEQ ID NO: 867139 - DNA, 25 bp, Homo sapien
aattaaatggctagccctgtatcct

SEQ ID NO: 867140 - DNA, 25 bp, Homo sapien
aaacctgcagcgggtcagacagccc

SEQ ID NO: 867141 - DNA, 25 bp, Homo sapien
acctgcagcgggtcagacagcccca

SEQ ID NO: 867142 - DNA, 25 bp, Homo sapien
ctgcagcgggtcagacagccccagg

SEQ ID NO: 867143 - DNA, 25 bp, Homo sapien
gaaacctgcagcgggtcagacagcc

SEQ ID NO: 867144 - DNA, 25 bp, Homo sapien
gcttcccaacgccatgctggccagc

SEQ ID NO: 867145 - DNA, 25 bp, Homo sapien
gcagggcccacactccgcaccatcc

SEQ ID NO: 867146 - DNA, 25 bp, Homo sapien
cccagcttagggcagacagtgaagc

SEQ ID NO: 867147 - DNA, 25 bp, Homo sapien
ccacactccgcaccatccaggtcag

SEQ ID NO: 867148 - DNA, 25 bp, Homo sapien
ggcaacagccggatcttgttctcca

SEQ ID NO: 867149 - DNA, 25 bp, Homo sapien
ccagacgaaagtcccatggcaacag

SEQ ID NO: 867150 - DNA, 25 bp, Homo sapien
tcaggactccccaccagacgaaagt

SEQ ID NO: 867151 - DNA, 25 bp, Homo sapien
cccatggcaacagccggatcttgtt

SEQ ID NO: 867152 - DNA, 25 bp, Homo sapien
cagggggtctaaggaaggttcgctg

SEQ ID NO: 867153 - DNA, 25 bp, Homo sapien
ggtctaaggaaggttcgctggcctg

SEQ ID NO: 867154 - DNA, 25 bp, Homo sapien
gtctaaggaaggttcgctggcctgg

SEQ ID NO: 867155 - DNA, 25 bp, Homo sapien
cacacggtacttccgatcgtgggag

SEQ ID NO: 867156 - DNA, 25 bp, Homo sapien
gatcgtgggagatcagagctctctg

SEQ ID NO: 867157 - DNA, 25 bp, Homo sapien
ccaggtaagacacgcacacggtact

SEQ ID NO: 867158 - DNA, 25 bp, Homo sapien
tgcattctgcccaggtaagacacgc

SEQ ID NO: 867159 - DNA, 25 bp, Homo sapien
gtctcgctgggatagtgcaggaccc

SEQ ID NO: 867160 - DNA, 25 bp, Homo sapien
agcactgctgggaacgcccatccga

SEQ ID NO: 867161 - DNA, 25 bp, Homo sapien
tcgccaaagcgaggcagctgtcagg

SEQ ID NO: 867162 - DNA, 25 bp, Homo sapien
ctgggaacgcccatccgaaacttca

SEQ ID NO: 867163 - DNA, 25 bp, Homo sapien
tgcccgaggtcttgccgaggatgac

SEQ ID NO: 867164 - DNA, 25 bp, Homo sapien
tacctcaaagggtgtgtgctggcct

SEQ ID NO: 867165 - DNA, 25 bp, Homo sapien
tgaagatctccagtacagtgcaacc

SEQ ID NO: 867166 - DNA, 25 bp, Homo sapien
tgttcgcctacagagatggcctgca

SEQ ID NO: 867167 - DNA, 25 bp, Homo sapien
aagggcccacacaaaggacgtctga

SEQ ID NO: 867168 - DNA, 25 bp, Homo sapien
aaaaccccagtgtcagcaagcaagt

SEQ ID NO: 867169 - DNA, 25 bp, Homo sapien
tcagccagggtttatccaagcccgg

SEQ ID NO: 867170 - DNA, 25 bp, Homo sapien
aggcacgcatgtctccacacaagaa

SEQ ID NO: 867171 - DNA, 25 bp, Homo sapien
ttcccgtggactgcggcatgagcac

SEQ ID NO: 867172 - DNA, 25 bp, Homo sapien
tgacgtccagcgtgagtcacccgag

SEQ ID NO: 867173 - DNA, 25 bp, Homo sapien
cgtggactctctaggagccgtattc

SEQ ID NO: 867174 - DNA, 25 bp, Homo sapien
gagatcacggcctgatgcagaacca

SEQ ID NO: 867175 - DNA, 25 bp, Homo sapien
aggggcaccgcgactgaagggcagg

SEQ ID NO: 867176 - DNA, 25 bp, Homo sapien
tcctcgagacctggcgcacacaggg

SEQ ID NO: 867177 - DNA, 25 bp, Homo sapien
cgagacctggcgcacacagggcaac

SEQ ID NO: 867178 - DNA, 25 bp, Homo sapien
ctggcgcacacagggcaaccaggaa

SEQ ID NO: 867179 - DNA, 25 bp, Homo sapien
tgcggcttcaccagaagccgagcag

SEQ ID NO: 867180 - DNA, 25 bp, Homo sapien
ttgcattgcggcgtgcctgttcccc

SEQ ID NO: 867181 - DNA, 25 bp, Homo sapien
gcagaagcgtgagccaattccacct

SEQ ID NO: 867182 - DNA, 25 bp, Homo sapien
cactggttacagttccctaaaatga

SEQ ID NO: 867183 - DNA, 25 bp, Homo sapien
tggtccagtctctcccagctttgca

SEQ ID NO: 867184 - DNA, 25 bp, Homo sapien
gatgctcaggcccatggtctggtcc

SEQ ID NO: 867185 - DNA, 25 bp, Homo sapien
cagtctctcccagctttgcagcttg

SEQ ID NO: 867186 - DNA, 25 bp, Homo sapien
tctcccagctttgcagcttggccag

SEQ ID NO: 867187 - DNA, 25 bp, Homo sapien
tcctggccccgtaaattcaagtgtg

SEQ ID NO: 867188 - DNA, 25 bp, Homo sapien
catgatcacggtgctaagtccctga

SEQ ID NO: 867189 - DNA, 25 bp, Homo sapien
ggcagacagcctcagaaaggatcct

SEQ ID NO: 867190 - DNA, 25 bp, Homo sapien
tcccagcaagctaaaagcaacgtgt

SEQ ID NO: 867191 - DNA, 25 bp, Homo sapien
gagcagcccgttggtctctctcatc

SEQ ID NO: 867192 - DNA, 25 bp, Homo sapien
cagcccgttggtctctctcatctcc

SEQ ID NO: 867193 - DNA, 25 bp, Homo sapien
gcagcccgttggtctctctcatctc

SEQ ID NO: 867194 - DNA, 25 bp, Homo sapien
agcagcccgttggtctctctcatct

SEQ ID NO: 867195 - DNA, 25 bp, Homo sapien
tcatgttcttcacaatcgctgcatc

SEQ ID NO: 867196 - DNA, 25 bp, Homo sapien
ttcagctcccgttccagcctaggga

SEQ ID NO: 867197 - DNA, 25 bp, Homo sapien
gccgtaccagctcagacttcatgtt

SEQ ID NO: 867198 - DNA, 25 bp, Homo sapien
gcctagggagccgtaccagctcaga

SEQ ID NO: 867199 - DNA, 25 bp, Homo sapien
taatctgctgctcgtggtctgctct

SEQ ID NO: 867200 - DNA, 25 bp, Homo sapien
ttaatctgctgctcgtggtctgctc

SEQ ID NO: 867201 - DNA, 25 bp, Homo sapien
atctgctgctcgtggtctgctcttg

SEQ ID NO: 867202 - DNA, 25 bp, Homo sapien
cttaatctgctgctcgtggtctgct

SEQ ID NO: 867203 - DNA, 25 bp, Homo sapien
actgcagttccgagatcctcccctt

SEQ ID NO: 867204 - DNA, 25 bp, Homo sapien
gactccaggcgcttcacccgcatct

SEQ ID NO: 867205 - DNA, 25 bp, Homo sapien
ggtccatcacgctccactgcagttc

SEQ ID NO: 867206 - DNA, 25 bp, Homo sapien
ttcacccgcatctcctggtccatca

SEQ ID NO: 867207 - DNA, 25 bp, Homo sapien
agtaaggagcgtgacaatcaggacc

SEQ ID NO: 867208 - DNA, 25 bp, Homo sapien
gggacgccggacagttggcaaggaa

SEQ ID NO: 867209 - DNA, 25 bp, Homo sapien
gcgcataagataattccagagtaag

SEQ ID NO: 867210 - DNA, 25 bp, Homo sapien
aaggaagaggcgcataagataattc

SEQ ID NO: 867211 - DNA, 25 bp, Homo sapien
gtgaaaacacaagcgggcactgcag

SEQ ID NO: 867212 - DNA, 25 bp, Homo sapien
cttctactgatgacaactatgtaca

SEQ ID NO: 867213 - DNA, 25 bp, Homo sapien
actatgtacaaaacgcagctgcccg

SEQ ID NO: 867214 - DNA, 25 bp, Homo sapien
aaacagctccctgcgcagcagaggc

SEQ ID NO: 867215 - DNA, 25 bp, Homo sapien
atgcgcgtcaggagctcctggttgc

SEQ ID NO: 867216 - DNA, 25 bp, Homo sapien
ctggcagcatccaagttctgctgac

SEQ ID NO: 867217 - DNA, 25 bp, Homo sapien
gctgacactgcctgttgcgctccag

SEQ ID NO: 867218 - DNA, 25 bp, Homo sapien
gctcctgaagctgccggatgcgcgt

SEQ ID NO: 867219 - DNA, 25 bp, Homo sapien
gagcaagagtcagatgccacgtgcc

SEQ ID NO: 867220 - DNA, 25 bp, Homo sapien
catgccgaggcacaaaaaagagccg

SEQ ID NO: 867221 - DNA, 25 bp, Homo sapien
cgctgtggcaccatgacggtgagca

SEQ ID NO: 867222 - DNA, 25 bp, Homo sapien
gagcaggacccatgagccaagtcat

SEQ ID NO: 867223 - DNA, 25 bp, Homo sapien
gccccgggtggagtacgagcttgtg

SEQ ID NO: 867224 - DNA, 25 bp, Homo sapien
cgggaagcaccaagcactcccggag

SEQ ID NO: 867225 - DNA, 25 bp, Homo sapien
gtggagtacgagcttgtgctgtcct

SEQ ID NO: 867226 - DNA, 25 bp, Homo sapien
cttcctcgggaagcaccaagcactc

SEQ ID NO: 867227 - DNA, 25 bp, Homo sapien
agggctgcctcacaacaaccaagag

SEQ ID NO: 867228 - DNA, 25 bp, Homo sapien
caagagacccttctgtgatgcagga

SEQ ID NO: 867229 - DNA, 25 bp, Homo sapien
gacacttaagtctcgcccctaatag

SEQ ID NO: 867230 - DNA, 25 bp, Homo sapien
gactccagcccttgtgagctgcaag

SEQ ID NO: 867231 - DNA, 25 bp, Homo sapien
tccagctccactcgagccctcttgt

SEQ ID NO: 867232 - DNA, 25 bp, Homo sapien
agctccactcgagccctcttgtgac

SEQ ID NO: 867233 - DNA, 25 bp, Homo sapien
ctcgtagttcctggcactggtgctg

SEQ ID NO: 867234 - DNA, 25 bp, Homo sapien
tctccagctccactcgagccctctt

SEQ ID NO: 867235 - DNA, 25 bp, Homo sapien
aggtgggacttcgaacggatctgct

SEQ ID NO: 867236 - DNA, 25 bp, Homo sapien
cttcgaacggatctgctctgctctt

SEQ ID NO: 867237 - DNA, 25 bp, Homo sapien
tgggacttcgaacggatctgctctg

SEQ ID NO: 867238 - DNA, 25 bp, Homo sapien
atgaggtgggacttcgaacggatct

SEQ ID NO: 867239 - DNA, 25 bp, Homo sapien
tgagtgactcagtgcagcagacaca

SEQ ID NO: 867240 - DNA, 25 bp, Homo sapien
gaatcctcagtgacggcatcaaacc

SEQ ID NO: 867241 - DNA, 25 bp, Homo sapien
aggtcccgtgctaagtcttgatgtg

SEQ ID NO: 867242 - DNA, 25 bp, Homo sapien
tgagcaggtcgcacccaaagaaaaa

SEQ ID NO: 867243 - DNA, 25 bp, Homo sapien
tttaaccaaatgcagcagggcctca

SEQ ID NO: 867244 - DNA, 25 bp, Homo sapien
gacagaactacagaacggctctggg

SEQ ID NO: 867245 - DNA, 25 bp, Homo sapien
gagcctcctctaatgcggacagaac

SEQ ID NO: 867246 - DNA, 25 bp, Homo sapien
taatgcggacagaactacagaacgg

SEQ ID NO: 867247 - DNA, 25 bp, Homo sapien
ctccctccacacgctgagagatgaa

SEQ ID NO: 867248 - DNA, 25 bp, Homo sapien
tctcagggtggataaaaccatggtg

SEQ ID NO: 867249 - DNA, 25 bp, Homo sapien
tgttcaaagatctcagggtggataa

SEQ ID NO: 867250 - DNA, 25 bp, Homo sapien
catgctctgctggtactgcatctgc

SEQ ID NO: 867251 - DNA, 25 bp, Homo sapien
ccgtctgcaagttggagccctggaa

SEQ ID NO: 867252 - DNA, 25 bp, Homo sapien
gaagcctggcagtgtgacacagtcc

SEQ ID NO: 867253 - DNA, 25 bp, Homo sapien
agactgtcccacaacaggccgtctg

SEQ ID NO: 867254 - DNA, 25 bp, Homo sapien
ctggagaccaaaggccggcgagctt

SEQ ID NO: 867255 - DNA, 25 bp, Homo sapien
gagaggagaggaagagtgtatccca

SEQ ID NO: 867256 - DNA, 25 bp, Homo sapien
ggagaggagaggaagagtgtatccc

SEQ ID NO: 867257 - DNA, 25 bp, Homo sapien
gaggagaggagaggaagagtgtatc

SEQ ID NO: 867258 - DNA, 25 bp, Homo sapien
gaggagaggaagagtgtatcccagc

SEQ ID NO: 867259 - DNA, 25 bp, Homo sapien
ccatttatcgcgacacttgcgcctg

SEQ ID NO: 867260 - DNA, 25 bp, Homo sapien
gcgcccatttatcgcgacacttgcg

SEQ ID NO: 867261 - DNA, 25 bp, Homo sapien
ttatcgcgacacttgcgcctgcgct

SEQ ID NO: 867262 - DNA, 25 bp, Homo sapien
gccggcgcccatttatcgcgacact

SEQ ID NO: 867263 - DNA, 25 bp, Homo sapien
gacagaagttaatccccagatggaa

SEQ ID NO: 867264 - DNA, 25 bp, Homo sapien
taaagctgcgtcaagttcctagatg

SEQ ID NO: 867265 - DNA, 25 bp, Homo sapien
aactggaaatctgtgcgtggtgctc

SEQ ID NO: 867266 - DNA, 25 bp, Homo sapien
gaagtcccgtcaaggcacacatggg

SEQ ID NO: 867267 - DNA, 25 bp, Homo sapien
cttccgtggtactgtgtggccaaga

SEQ ID NO: 867268 - DNA, 25 bp, Homo sapien
ctgctggcttcaggtttgatgatcc

SEQ ID NO: 867269 - DNA, 25 bp, Homo sapien
tgtaaccgacggctttgacttccag

SEQ ID NO: 867270 - DNA, 25 bp, Homo sapien
gatgatccttacattctggaattcc

SEQ ID NO: 867271 - DNA, 25 bp, Homo sapien
tgatcgaggtcccggaaccctgtgg

SEQ ID NO: 867272 - DNA, 25 bp, Homo sapien
tcaggcacaggctgatgagcctgtc

SEQ ID NO: 867273 - DNA, 25 bp, Homo sapien
ggctgatgagcctgtcatgatcgag

SEQ ID NO: 867274 - DNA, 25 bp, Homo sapien
tgagcctgtcatgatcgaggtcccg

SEQ ID NO: 867275 - DNA, 25 bp, Homo sapien
cagtcacgtcagcagggcacagaaa

SEQ ID NO: 867276 - DNA, 25 bp, Homo sapien
gtgaagaagatctaccccaagcacg

SEQ ID NO: 867277 - DNA, 25 bp, Homo sapien
gattctctgtgaggttctcgggtca

SEQ ID NO: 867278 - DNA, 25 bp, Homo sapien
tgggcgccatgtcgctcagaatcac

SEQ ID NO: 867279 - DNA, 25 bp, Homo sapien
ccagtgcatgcagctaccctggctt

SEQ ID NO: 867280 - DNA, 25 bp, Homo sapien
gactgtctcaccctgttcaaatgcc

SEQ ID NO: 867281 - DNA, 25 bp, Homo sapien
caagtcatgaaaccctgagcctgtt

SEQ ID NO: 867282 - DNA, 25 bp, Homo sapien
ccagtgtccctactctaaggtattt

SEQ ID NO: 867283 - DNA, 25 bp, Homo sapien
gccccagggcttatgcgacttggaa

SEQ ID NO: 867284 - DNA, 25 bp, Homo sapien
gacgacagtgtcttcagttgcatgg

SEQ ID NO: 867285 - DNA, 25 bp, Homo sapien
tgaagcctcttctaggttccggacg

SEQ ID NO: 867286 - DNA, 25 bp, Homo sapien
catcattaagagtagccgggcacca

SEQ ID NO: 867287 - DNA, 25 bp, Homo sapien
ctgtgcctgcggcgttgaccttctg

SEQ ID NO: 867288 - DNA, 25 bp, Homo sapien
cccgaaggccgggccgcagaatctg

SEQ ID NO: 867289 - DNA, 25 bp, Homo sapien
cgttgaccttctgcaccgccacctg

SEQ ID NO: 867290 - DNA, 25 bp, Homo sapien
gccccacagtctaacacccgaaggc

SEQ ID NO: 867291 - DNA, 25 bp, Homo sapien
ttcgcagccttcacaaatgggtccc

SEQ ID NO: 867292 - DNA, 25 bp, Homo sapien
ctccaggagcttgaaggcgcttcga

SEQ ID NO: 867293 - DNA, 25 bp, Homo sapien
ctgagatgtcgggtcagccacaggt

SEQ ID NO: 867294 - DNA, 25 bp, Homo sapien
cttgcagcgactcccaacagtgtgg

SEQ ID NO: 867295 - DNA, 25 bp, Homo sapien
gcttctgcaacaccaaagcgtgctg

SEQ ID NO: 867296 - DNA, 25 bp, Homo sapien
gcgtgctgacaagccaggaggcact

SEQ ID NO: 867297 - DNA, 25 bp, Homo sapien
ggtctcccgggaaaatggcacaagc

SEQ ID NO: 867298 - DNA, 25 bp, Homo sapien
cactgactgctgaccgtgagtcgct

SEQ ID NO: 867299 - DNA, 25 bp, Homo sapien
ccctgtcgcgctcgctgagtgcggg

SEQ ID NO: 867300 - DNA, 25 bp, Homo sapien
ccgaggccaggaccgaggaaggcga

SEQ ID NO: 867301 - DNA, 25 bp, Homo sapien
gaactgcgacccggaatcctggcct

SEQ ID NO: 867302 - DNA, 25 bp, Homo sapien
aaccactcccgctgtctgcacgcgc

SEQ ID NO: 867303 - DNA, 25 bp, Homo sapien
tggtgttccccgcgcctgcagcgcg

SEQ ID NO: 867304 - DNA, 25 bp, Homo sapien
gttccccgcgcctgcagcgcgccgc

SEQ ID NO: 867305 - DNA, 25 bp, Homo sapien
ggtgttccccgcgcctgcagcgcgc

SEQ ID NO: 867306 - DNA, 25 bp, Homo sapien
tgttccccgcgcctgcagcgcgccg

SEQ ID NO: 867307 - DNA, 25 bp, Homo sapien
aggaaggacccttgtgacttccagt

SEQ ID NO: 867308 - DNA, 25 bp, Homo sapien
gaaggacccttgtgacttccagtgg

SEQ ID NO: 867309 - DNA, 25 bp, Homo sapien
gacctggacctgcacacctatggga

SEQ ID NO: 867310 - DNA, 25 bp, Homo sapien
tggacctggacctgcacacctatgg

SEQ ID NO: 867311 - DNA, 25 bp, Homo sapien
tgaggaccacaggataaactgcgtg

SEQ ID NO: 867312 - DNA, 25 bp, Homo sapien
taatccaaaggcctgacctgaggac

SEQ ID NO: 867313 - DNA, 25 bp, Homo sapien
caggcacggggactgttgttcctca

SEQ ID NO: 867314 - DNA, 25 bp, Homo sapien
gaatctggaagcctgctacagagag

SEQ ID NO: 867315 - DNA, 25 bp, Homo sapien
cagaaaatcactggttcaatggcag

SEQ ID NO: 867316 - DNA, 25 bp, Homo sapien
cactggttcaatggcagttttccac

SEQ ID NO: 867317 - DNA, 25 bp, Homo sapien
aatcactggttcaatggcagttttc

SEQ ID NO: 867318 - DNA, 25 bp, Homo sapien
ctaccccagaaaatcactggttcaa

SEQ ID NO: 867319 - DNA, 25 bp, Homo sapien
tcctgcagcctcagcgagttctcct

SEQ ID NO: 867320 - DNA, 25 bp, Homo sapien
agaaggagagaccatcgaggatggg

SEQ ID NO: 867321 - DNA, 25 bp, Homo sapien
cctcagcgagttctcctgggcatga

SEQ ID NO: 867322 - DNA, 25 bp, Homo sapien
gaccatgggcgcctccaggctctat

SEQ ID NO: 867323 - DNA, 25 bp, Homo sapien
accgagtgccatggacagagcagac

SEQ ID NO: 867324 - DNA, 25 bp, Homo sapien
cttgggcagaactgaacagcgtcat

SEQ ID NO: 867325 - DNA, 25 bp, Homo sapien
gttccgcctggggaaccgagtgcca

SEQ ID NO: 867326 - DNA, 25 bp, Homo sapien
gacacttgggcagaactgaacagcg

SEQ ID NO: 867327 - DNA, 25 bp, Homo sapien
cagtttaagctgaggaggcatcgct

SEQ ID NO: 867328 - DNA, 25 bp, Homo sapien
ggaggcatcgcttaaatcagaccat

SEQ ID NO: 867329 - DNA, 25 bp, Homo sapien
tccagtccctgcagtttaagctgag

SEQ ID NO: 867330 - DNA, 25 bp, Homo sapien
gctgaggaggcatcgcttaaatcag

SEQ ID NO: 867331 - DNA, 25 bp, Homo sapien
ttgggcatcccgtggtgaagtcagc

SEQ ID NO: 867332 - DNA, 25 bp, Homo sapien
tcagccgcggaaaagcaagtaaccg

SEQ ID NO: 867333 - DNA, 25 bp, Homo sapien
tagcaacagcgttagactacttcgg

SEQ ID NO: 867334 - DNA, 25 bp, Homo sapien
taactaccgctgcatgggctctgat

SEQ ID NO: 867335 - DNA, 25 bp, Homo sapien
ccgtccacaggaagctaccagatgt

SEQ ID NO: 867336 - DNA, 25 bp, Homo sapien
gctaaaacccaggttgaacgcctca

SEQ ID NO: 867337 - DNA, 25 bp, Homo sapien
cctgcccaactttcatacacgttta

SEQ ID NO: 867338 - DNA, 25 bp, Homo sapien
ggaagctgaggctcggccaagggct

SEQ ID NO: 867339 - DNA, 25 bp, Homo sapien
cgtaatgaccggcacaagcttgggc

SEQ ID NO: 867340 - DNA, 25 bp, Homo sapien
tgaactgacccgcaaagcaagggca

SEQ ID NO: 867341 - DNA, 25 bp, Homo sapien
cactgtgtccggcagacaaagggca

SEQ ID NO: 867342 - DNA, 25 bp, Homo sapien
tattgggtattgatccctgcagcct

SEQ ID NO: 867343 - DNA, 25 bp, Homo sapien
gctcgcagtggacgatggatcacct

SEQ ID NO: 867344 - DNA, 25 bp, Homo sapien
tcatggctcgggtgtcatggtgcca

SEQ ID NO: 867345 - DNA, 25 bp, Homo sapien
tctgaagtcttgctcaatccttggg

SEQ ID NO: 867346 - DNA, 25 bp, Homo sapien
agactcgggtggactagggactcac

SEQ ID NO: 867347 - DNA, 25 bp, Homo sapien
cacaaaaggggttcgggcagaagca

SEQ ID NO: 867348 - DNA, 25 bp, Homo sapien
caaaaggggttcgggcagaagcaga

SEQ ID NO: 867349 - DNA, 25 bp, Homo sapien
acaaaaggggttcgggcagaagcag

SEQ ID NO: 867350 - DNA, 25 bp, Homo sapien
tcctctaaagcctcagctggaatgg

SEQ ID NO: 867351 - DNA, 25 bp, Homo sapien
ggctgggccggcaagtgcgtgacgg

SEQ ID NO: 867352 - DNA, 25 bp, Homo sapien
agtgcgtgacgggaggctgggagga

SEQ ID NO: 867353 - DNA, 25 bp, Homo sapien
gccggcaagtgcgtgacgggaggct

SEQ ID NO: 867354 - DNA, 25 bp, Homo sapien
gaacacagctgctgtagcgcccact

SEQ ID NO: 867355 - DNA, 25 bp, Homo sapien
cagctctccgtcacgcctttgtctt

SEQ ID NO: 867356 - DNA, 25 bp, Homo sapien
agtgccacacggtgcagaccccaac

SEQ ID NO: 867357 - DNA, 25 bp, Homo sapien
caccagaaatcaagggagtccaggg

SEQ ID NO: 867358 - DNA, 25 bp, Homo sapien
tcatatgggcacagggcatgaggcc

SEQ ID NO: 867359 - DNA, 25 bp, Homo sapien
tcggctgaccgagcaccatgatgct

SEQ ID NO: 867360 - DNA, 25 bp, Homo sapien
accagggctccaggtgttgactgca

SEQ ID NO: 867361 - DNA, 25 bp, Homo sapien
ctgggtgtcaggaggaaaccattcc

SEQ ID NO: 867362 - DNA, 25 bp, Homo sapien
tctcgaccaggctagcaggccacag

SEQ ID NO: 867363 - DNA, 25 bp, Homo sapien
acccgcaggcgtgagctcctctgct

SEQ ID NO: 867364 - DNA, 25 bp, Homo sapien
tcgaccaggctagcaggccacaggg

SEQ ID NO: 867365 - DNA, 25 bp, Homo sapien
ccccatggtccacggatgcgcctcc

SEQ ID NO: 867366 - DNA, 25 bp, Homo sapien
gcggggaggggagctgccgtccaaa

SEQ ID NO: 867367 - DNA, 25 bp, Homo sapien
gaggggagctgccgtccaaagggaa

SEQ ID NO: 867368 - DNA, 25 bp, Homo sapien
cagcacggggcgtggcggggagggg

SEQ ID NO: 867369 - DNA, 25 bp, Homo sapien
cgtggcggggaggggagctgccgtc

SEQ ID NO: 867370 - DNA, 25 bp, Homo sapien
agtgcggccgcagggagcaccacct

SEQ ID NO: 867371 - DNA, 25 bp, Homo sapien
tggaaagaggttttagtgcggccgc

SEQ ID NO: 867372 - DNA, 25 bp, Homo sapien
aaagaggttttagtgcggccgcagg

SEQ ID NO: 867373 - DNA, 25 bp, Homo sapien
ttttagtgcggccgcagggagcacc

SEQ ID NO: 867374 - DNA, 25 bp, Homo sapien
tgtgtggtcccgcaaagaggcagct

SEQ ID NO: 867375 - DNA, 25 bp, Homo sapien
ttgggcctcaggtcgttccacacct

SEQ ID NO: 867376 - DNA, 25 bp, Homo sapien
ctgtgtggtcccgcaaagaggcagc

SEQ ID NO: 867377 - DNA, 25 bp, Homo sapien
tcaggtcgttccacaccttgctcat

SEQ ID NO: 867378 - DNA, 25 bp, Homo sapien
cagtacagggagaagtagttccgca

SEQ ID NO: 867379 - DNA, 25 bp, Homo sapien
gcagctccatcgtctgaatcgcgtt

SEQ ID NO: 867380 - DNA, 25 bp, Homo sapien
tggatgagctgcgtctcctggtgca

SEQ ID NO: 867381 - DNA, 25 bp, Homo sapien
gatctgagagttgacgaaggcgcgg

SEQ ID NO: 867382 - DNA, 25 bp, Homo sapien
gcccagccggcgacgggagcaccaa

SEQ ID NO: 867383 - DNA, 25 bp, Homo sapien
gacgggagcaccaaggcccgaacac

SEQ ID NO: 867384 - DNA, 25 bp, Homo sapien
gaacaccagcgtgctccctgagcca

SEQ ID NO: 867385 - DNA, 25 bp, Homo sapien
gcccgaacaccagcgtgctccctga

SEQ ID NO: 867386 - DNA, 25 bp, Homo sapien
ggttctgcgcggtggcgctcatcat

SEQ ID NO: 867387 - DNA, 25 bp, Homo sapien
gtgcttgtgcaacacgcccttctca

SEQ ID NO: 867388 - DNA, 25 bp, Homo sapien
cacaatgcgggactccagctgctcc

SEQ ID NO: 867389 - DNA, 25 bp, Homo sapien
cttcatcaggctgtacttgtgcagg

SEQ ID NO: 867390 - DNA, 25 bp, Homo sapien
ttcgcccgctgtctggatgcctgcg

SEQ ID NO: 867391 - DNA, 25 bp, Homo sapien
ccgctgtctggatgcctgcgccagg

SEQ ID NO: 867392 - DNA, 25 bp, Homo sapien
ggaggcattcgcccgctgtctggat

SEQ ID NO: 867393 - DNA, 25 bp, Homo sapien
ggcattcgcccgctgtctggatgcc

SEQ ID NO: 867394 - DNA, 25 bp, Homo sapien
gaaagttctgcccccagccaaggag

SEQ ID NO: 867395 - DNA, 25 bp, Homo sapien
cagcttctccaccacgtcgttctct

SEQ ID NO: 867396 - DNA, 25 bp, Homo sapien
tccaccacgtcgttctcttcctgct

SEQ ID NO: 867397 - DNA, 25 bp, Homo sapien
tataggactgcagcagatccaagaa

SEQ ID NO: 867398 - DNA, 25 bp, Homo sapien
cttataggactgcagcagatccaag

SEQ ID NO: 867399 - DNA, 25 bp, Homo sapien
cagagagagcccaacagggcagtga

SEQ ID NO: 867400 - DNA, 25 bp, Homo sapien
agtgcacagcaaacggcgggcagcc

SEQ ID NO: 867401 - DNA, 25 bp, Homo sapien
cagaagcaccacactcggcggtggg

SEQ ID NO: 867402 - DNA, 25 bp, Homo sapien
cctcttcggccctcacacaaggctc

SEQ ID NO: 867403 - DNA, 25 bp, Homo sapien
ggccccatcacggcagagggatgcc

SEQ ID NO: 867404 - DNA, 25 bp, Homo sapien
acgggcgaaccccacccagacgctg

SEQ ID NO: 867405 - DNA, 25 bp, Homo sapien
gcacctggggacacgaagcagcccc

SEQ ID NO: 867406 - DNA, 25 bp, Homo sapien
catcacggcagagggatgccctgct

SEQ ID NO: 867407 - DNA, 25 bp, Homo sapien
tgctcagaggcatctgcggtatgaa

SEQ ID NO: 867408 - DNA, 25 bp, Homo sapien
tatgaagagtcggtccaaagccctg

SEQ ID NO: 867409 - DNA, 25 bp, Homo sapien
acggcccgaacacacggtgctcaga

SEQ ID NO: 867410 - DNA, 25 bp, Homo sapien
aggcacagtgcacacggcccgaaca

SEQ ID NO: 867411 - DNA, 25 bp, Homo sapien
ttgtgcagccttgtcggcgagcagc

SEQ ID NO: 867412 - DNA, 25 bp, Homo sapien
cgtgctgctattcagagcggcccag

SEQ ID NO: 867413 - DNA, 25 bp, Homo sapien
ccccacgtgctgctattcagagcgg

SEQ ID NO: 867414 - DNA, 25 bp, Homo sapien
agcagcgcgaattccacagacaggc

SEQ ID NO: 867415 - DNA, 25 bp, Homo sapien
agatctgccgcattgtcgatggccc

SEQ ID NO: 867416 - DNA, 25 bp, Homo sapien
cggccctgtcgcgaagcttgtgaaa

SEQ ID NO: 867417 - DNA, 25 bp, Homo sapien
tcgatggcccgcgatgcgatccgct

SEQ ID NO: 867418 - DNA, 25 bp, Homo sapien
tagctccttcccgaatatgagaaga

SEQ ID NO: 867419 - DNA, 25 bp, Homo sapien
attcgtccccgacgcactgtgctga

SEQ ID NO: 867420 - DNA, 25 bp, Homo sapien
tcaggaattcgtccccgacgcactg

SEQ ID NO: 867421 - DNA, 25 bp, Homo sapien
gaattcgtccccgacgcactgtgct

SEQ ID NO: 867422 - DNA, 25 bp, Homo sapien
agttcaggaattcgtccccgacgca

SEQ ID NO: 867423 - DNA, 25 bp, Homo sapien
aaaggaaaacacacagcttcaccct

SEQ ID NO: 867424 - DNA, 25 bp, Homo sapien
gcaaaaggaaaacacacagcttcac

SEQ ID NO: 867425 - DNA, 25 bp, Homo sapien
caaaaggaaaacacacagcttcacc

SEQ ID NO: 867426 - DNA, 25 bp, Homo sapien
ggaaaacacacagcttcaccctctt

SEQ ID NO: 867427 - DNA, 25 bp, Homo sapien
tgacgaagcgcttcagggctctcct

SEQ ID NO: 867428 - DNA, 25 bp, Homo sapien
ggtgtcgcgccaccaggttgacgaa

SEQ ID NO: 867429 - DNA, 25 bp, Homo sapien
ctggcctcgatgaactccctgtcag

SEQ ID NO: 867430 - DNA, 25 bp, Homo sapien
aggaccacatcctcggagaacaggg

SEQ ID NO: 867431 - DNA, 25 bp, Homo sapien
catcttctgctctgggcgagttctc

SEQ ID NO: 867432 - DNA, 25 bp, Homo sapien
tggaggagcacacggggtcactgga

SEQ ID NO: 867433 - DNA, 25 bp, Homo sapien
gctctgggcgagttctcaaaactct

SEQ ID NO: 867434 - DNA, 25 bp, Homo sapien
tctgctctgggcgagttctcaaaac

SEQ ID NO: 867435 - DNA, 25 bp, Homo sapien
cagccacacacacttgggtccagga

SEQ ID NO: 867436 - DNA, 25 bp, Homo sapien
caaggaaaaccacagatctgcttgt

SEQ ID NO: 867437 - DNA, 25 bp, Homo sapien
tgccaaggaaaaccacagatctgct

SEQ ID NO: 867438 - DNA, 25 bp, Homo sapien
ccaggagctgccaaggaaaaccaca

SEQ ID NO: 867439 - DNA, 25 bp, Homo sapien
tcattcgggttaaatattttcactc

SEQ ID NO: 867440 - DNA, 25 bp, Homo sapien
cactgtgcttataacttactctgca

SEQ ID NO: 867441 - DNA, 25 bp, Homo sapien
ttactctgcaaaggatgcaattact

SEQ ID NO: 867442 - DNA, 25 bp, Homo sapien
caaaggatgcaattactcattgctt

SEQ ID NO: 867443 - DNA, 25 bp, Homo sapien
gtctgtataccgaggacttgaagcg

SEQ ID NO: 867444 - DNA, 25 bp, Homo sapien
gcaggcaccatacggtaggggaact

SEQ ID NO: 867445 - DNA, 25 bp, Homo sapien
cattgtaccgtctgtataccgagga

SEQ ID NO: 867446 - DNA, 25 bp, Homo sapien
gaagaccacgaagtcattgtaccgt

SEQ ID NO: 867447 - DNA, 25 bp, Homo sapien
gcgggttcccctgcggcatctgcat

SEQ ID NO: 867448 - DNA, 25 bp, Homo sapien
cagcagcgggttcccctgcggcatc

SEQ ID NO: 867449 - DNA, 25 bp, Homo sapien
gcagcagcgggttcccctgcggcat

SEQ ID NO: 867450 - DNA, 25 bp, Homo sapien
gggctgggacctgctgcacgatggc

SEQ ID NO: 867451 - DNA, 25 bp, Homo sapien
ggctgggacctgctgcacgatggcc

SEQ ID NO: 867452 - DNA, 25 bp, Homo sapien
gaggatacattcactagattgccaa

SEQ ID NO: 867453 - DNA, 25 bp, Homo sapien
agtaaaacgtagtactgttcacgtg

SEQ ID NO: 867454 - DNA, 25 bp, Homo sapien
gtataacaaagccattcgggccagg

SEQ ID NO: 867455 - DNA, 25 bp, Homo sapien
gtcactctctgaacatagtttcgga

SEQ ID NO: 867456 - DNA, 25 bp, Homo sapien
gactcaaatcagagtcaagggacaa

SEQ ID NO: 867457 - DNA, 25 bp, Homo sapien
cctctgactcaaatcagagtcaagg

SEQ ID NO: 867458 - DNA, 25 bp, Homo sapien
agcggagccagccaaggacatcaga

SEQ ID NO: 867459 - DNA, 25 bp, Homo sapien
gacaagcggagccagccaaggacat

SEQ ID NO: 867460 - DNA, 25 bp, Homo sapien
caagcttctaatcaccgcatggctc

SEQ ID NO: 867461 - DNA, 25 bp, Homo sapien
agcttctaatcaccgcatggctcct

SEQ ID NO: 867462 - DNA, 25 bp, Homo sapien
aaacaggatgggcaaacatctcttt

SEQ ID NO: 867463 - DNA, 25 bp, Homo sapien
gcaggtcctgtgaaaccacccacgt

SEQ ID NO: 867464 - DNA, 25 bp, Homo sapien
gcaggtaagggttgatgggagccca

SEQ ID NO: 867465 - DNA, 25 bp, Homo sapien
tcgcccaggcaagaggggaaggctc

SEQ ID NO: 867466 - DNA, 25 bp, Homo sapien
tgatgggagcccagggtgcatggaa

SEQ ID NO: 867467 - DNA, 25 bp, Homo sapien
gcgagcagctgcaggtaagggttga

SEQ ID NO: 867468 - DNA, 25 bp, Homo sapien
tgcagccgcgggcagcgggtccatc

SEQ ID NO: 867469 - DNA, 25 bp, Homo sapien
cgccccgactgcagccgcgggcagc

SEQ ID NO: 867470 - DNA, 25 bp, Homo sapien
tgacgccgggggatccgcctcctcg

SEQ ID NO: 867471 - DNA, 25 bp, Homo sapien
gcgggtccatcgcgcggccagtcat

SEQ ID NO: 867472 - DNA, 25 bp, Homo sapien
gtgagcccgcgctcccacgtgactt

SEQ ID NO: 867473 - DNA, 25 bp, Homo sapien
tgagcccgcgctcccacgtgacttc

SEQ ID NO: 867474 - DNA, 25 bp, Homo sapien
cagcccggtgtgacgggtcatgcct

SEQ ID NO: 867475 - DNA, 25 bp, Homo sapien
atttgtagcatataagatccgtgca

SEQ ID NO: 867476 - DNA, 25 bp, Homo sapien
atccgtgcattccagcccggtgtga

SEQ ID NO: 867477 - DNA, 25 bp, Homo sapien
tagcatataagatccgtgcattcca

SEQ ID NO: 867478 - DNA, 25 bp, Homo sapien
gcagtcgtccttctagtcgtgtggg

SEQ ID NO: 867479 - DNA, 25 bp, Homo sapien
ttctagtcgtgtgggccctctctgg

SEQ ID NO: 867480 - DNA, 25 bp, Homo sapien
atttttgtatcgcgccaggcagtcg

SEQ ID NO: 867481 - DNA, 25 bp, Homo sapien
cgccaggcagtcgtccttctagtcg

SEQ ID NO: 867482 - DNA, 25 bp, Homo sapien
acgcggagaacgtggcggtgcccga

SEQ ID NO: 867483 - DNA, 25 bp, Homo sapien
caggctcgggacgagcgctccgaca

SEQ ID NO: 867484 - DNA, 25 bp, Homo sapien
agctgcccgggtcgcatgctgagcc

SEQ ID NO: 867485 - DNA, 25 bp, Homo sapien
agtccgaggtgaggaccgagccggc

SEQ ID NO: 867486 - DNA, 25 bp, Homo sapien
tcttgcaggctggtgtagagtggcg

SEQ ID NO: 867487 - DNA, 25 bp, Homo sapien
aaacgattctggtgcttcagtctcc

SEQ ID NO: 867488 - DNA, 25 bp, Homo sapien
acgattctggtgcttcagtctcctg

SEQ ID NO: 867489 - DNA, 25 bp, Homo sapien
ctctgtcttgcaggctggtgtagag

SEQ ID NO: 867490 - DNA, 25 bp, Homo sapien
gcttccagtagacgtggtgccggca

SEQ ID NO: 867491 - DNA, 25 bp, Homo sapien
cacatgctcgtgtgtgaaccaggca

SEQ ID NO: 867492 - DNA, 25 bp, Homo sapien
agtggtttacccagccccattggtg

SEQ ID NO: 867493 - DNA, 25 bp, Homo sapien
ttagaaccgtcttccatcctgaggg

SEQ ID NO: 867494 - DNA, 25 bp, Homo sapien
agattctgcacgggaagttcccgct

SEQ ID NO: 867495 - DNA, 25 bp, Homo sapien
cagattctgcacgggaagttcccgc

SEQ ID NO: 867496 - DNA, 25 bp, Homo sapien
gattctgcacgggaagttcccgctg

SEQ ID NO: 867497 - DNA, 25 bp, Homo sapien
tcagattctgcacgggaagttcccg

SEQ ID NO: 867498 - DNA, 25 bp, Homo sapien
gcttctgctcacttggcaacgcagc

SEQ ID NO: 867499 - DNA, 25 bp, Homo sapien
tgctcacttggcaacgcagcatcgc

SEQ ID NO: 867500 - DNA, 25 bp, Homo sapien
gcagcatcgccggttcttctggtgc

SEQ ID NO: 867501 - DNA, 25 bp, Homo sapien
tggcaacgcagcatcgccggttctt

SEQ ID NO: 867502 - DNA, 25 bp, Homo sapien
agcaggcacaaagctctcctccggg

SEQ ID NO: 867503 - DNA, 25 bp, Homo sapien
ctctcctccgggtcctggacttctt

SEQ ID NO: 867504 - DNA, 25 bp, Homo sapien
ccatctccttggtgtatttgtcctg

SEQ ID NO: 867505 - DNA, 25 bp, Homo sapien
cccttccatctccttggtgtatttg

SEQ ID NO: 867506 - DNA, 25 bp, Homo sapien
gctgaggcctggggagaagccggta

SEQ ID NO: 867507 - DNA, 25 bp, Homo sapien
tcaaggctctgcttcaagctgaggc

SEQ ID NO: 867508 - DNA, 25 bp, Homo sapien
gctctgcttcaagctgaggcctggg

SEQ ID NO: 867509 - DNA, 25 bp, Homo sapien
ctgaggcctggggagaagccggtac

SEQ ID NO: 867510 - DNA, 25 bp, Homo sapien
cctgggcccgctatcccacagggcg

SEQ ID NO: 867511 - DNA, 25 bp, Homo sapien
agctcccattcctccggcaggaatc

SEQ ID NO: 867512 - DNA, 25 bp, Homo sapien
tcctgctcccagccgatagggcctg

SEQ ID NO: 867513 - DNA, 25 bp, Homo sapien
tcctccggcaggaatcggggtcctg

SEQ ID NO: 867514 - DNA, 25 bp, Homo sapien
agcgagggacagcagcgcaaacaca

SEQ ID NO: 867515 - DNA, 25 bp, Homo sapien
tgcagcgagggacagcagcgcaaac

SEQ ID NO: 867516 - DNA, 25 bp, Homo sapien
cgagggacagcagcgcaaacacacc

SEQ ID NO: 867517 - DNA, 25 bp, Homo sapien
gcagcgagggacagcagcgcaaaca

SEQ ID NO: 867518 - DNA, 25 bp, Homo sapien
gctgtggtcagctccggggagacca

SEQ ID NO: 867519 - DNA, 25 bp, Homo sapien
tggtcagctccggggagaccacaga

SEQ ID NO: 867520 - DNA, 25 bp, Homo sapien
cagctccggggagaccacagacttt

SEQ ID NO: 867521 - DNA, 25 bp, Homo sapien
ctgcgatgaggagcgctgcggccag

SEQ ID NO: 867522 - DNA, 25 bp, Homo sapien
gcagagttggcggtattggtggcca

SEQ ID NO: 867523 - DNA, 25 bp, Homo sapien
agcgctgcggccaggtgggagagga

SEQ ID NO: 867524 - DNA, 25 bp, Homo sapien
cagagttggcggtattggtggccat

SEQ ID NO: 867525 - DNA, 25 bp, Homo sapien
gaggcttttagtaccattcagtgaa

SEQ ID NO: 867526 - DNA, 25 bp, Homo sapien
acatacgccttctccgcacagtaaa

SEQ ID NO: 867527 - DNA, 25 bp, Homo sapien
cctgcgataaataagcacgtaaatt

SEQ ID NO: 867528 - DNA, 25 bp, Homo sapien
tgcgtaacttggttgttaagcttaa

SEQ ID NO: 867529 - DNA, 25 bp, Homo sapien
gccagatcgactacgacttcgtggg

SEQ ID NO: 867530 - DNA, 25 bp, Homo sapien
gaggcagcagctgtataaactctac

SEQ ID NO: 867531 - DNA, 25 bp, Homo sapien
gaggaggactggttcgccaagatcc

SEQ ID NO: 867532 - DNA, 25 bp, Homo sapien
gagctaccggaacaggaccgccagc

SEQ ID NO: 867533 - DNA, 25 bp, Homo sapien
cactgggcggttcactcactgaggg

SEQ ID NO: 867534 - DNA, 25 bp, Homo sapien
gggttcctgcagaagacaccaccca

SEQ ID NO: 867535 - DNA, 25 bp, Homo sapien
gaggttcggttttcctgagcacctg

SEQ ID NO: 867536 - DNA, 25 bp, Homo sapien
ttcccagttcttggtatggttcctc

SEQ ID NO: 867537 - DNA, 25 bp, Homo sapien
ggcttgactcgagaattcccacagg

SEQ ID NO: 867538 - DNA, 25 bp, Homo sapien
cgtggagccctatgtggcctgcgat

SEQ ID NO: 867539 - DNA, 25 bp, Homo sapien
caagagggaggagcgcgtggagccc

SEQ ID NO: 867540 - DNA, 25 bp, Homo sapien
gcggctgggcttgactcgagaattc

SEQ ID NO: 867541 - DNA, 25 bp, Homo sapien
ggcacttcgtgggaccattgccggc

SEQ ID NO: 867542 - DNA, 25 bp, Homo sapien
attgccggccgttgtggcatctgtc

SEQ ID NO: 867543 - DNA, 25 bp, Homo sapien
tcgtgggaccattgccggccgttgt

SEQ ID NO: 867544 - DNA, 25 bp, Homo sapien
ctcaagggcacttcgtgggaccatt

SEQ ID NO: 867545 - DNA, 25 bp, Homo sapien
gtcccagcgatccagccctgatgtg

SEQ ID NO: 867546 - DNA, 25 bp, Homo sapien
cagtaagacagagcctcgagtcatt

SEQ ID NO: 867547 - DNA, 25 bp, Homo sapien
agcaacccctccaggtggatccgtc

SEQ ID NO: 867548 - DNA, 25 bp, Homo sapien
cagagcctcgagtcattctgccaag

SEQ ID NO: 867549 - DNA, 25 bp, Homo sapien
tgtgggtgaagactggcagagaaaa

SEQ ID NO: 867550 - DNA, 25 bp, Homo sapien
gagaatgtctgcgatgtgggtgaag

SEQ ID NO: 867551 - DNA, 25 bp, Homo sapien
gcgatgtgggtgaagactggcagag

SEQ ID NO: 867552 - DNA, 25 bp, Homo sapien
aatgtctgcgatgtgggtgaagact

SEQ ID NO: 867553 - DNA, 25 bp, Homo sapien
ccggacgtccgtgacagtgtagctt

SEQ ID NO: 867554 - DNA, 25 bp, Homo sapien
tccgtgacagtgtagcttcttcatc

SEQ ID NO: 867555 - DNA, 25 bp, Homo sapien
cttcatctccggcatgacccgaatt

SEQ ID NO: 867556 - DNA, 25 bp, Homo sapien
tcatctccggcatgacccgaatttc

SEQ ID NO: 867557 - DNA, 25 bp, Homo sapien
cagctggtcgctgtgcccattggca

SEQ ID NO: 867558 - DNA, 25 bp, Homo sapien
gatgggctctgaatggctggcgggt

SEQ ID NO: 867559 - DNA, 25 bp, Homo sapien
tctggggtcctgaattcgcagtggt

SEQ ID NO: 867560 - DNA, 25 bp, Homo sapien
ctggttccggctttgtctcggggct

SEQ ID NO: 867561 - DNA, 25 bp, Homo sapien
gccgccgtatgcgagagcttcagca

SEQ ID NO: 867562 - DNA, 25 bp, Homo sapien
accgtatacggcgaggccgtatgca

SEQ ID NO: 867563 - DNA, 25 bp, Homo sapien
tgcaggccgccgtatgcgagagctt

SEQ ID NO: 867564 - DNA, 25 bp, Homo sapien
ggtccaggtccatcccggccgtatg

SEQ ID NO: 867565 - DNA, 25 bp, Homo sapien
tgcgaggagcacacaggaccacaga

SEQ ID NO: 867566 - DNA, 25 bp, Homo sapien
ggtggagctgcgaggagcacacagg

SEQ ID NO: 867567 - DNA, 25 bp, Homo sapien
cctggacatgggacaagccgaggct

SEQ ID NO: 867568 - DNA, 25 bp, Homo sapien
gagctgcgaggagcacacaggacca

SEQ ID NO: 867569 - DNA, 25 bp, Homo sapien
ccccagctcaggcccctcttggcca

SEQ ID NO: 867570 - DNA, 25 bp, Homo sapien
cagctcaggcccctcttggccagct

SEQ ID NO: 867571 - DNA, 25 bp, Homo sapien
acccccagctcaggcccctcttggc

SEQ ID NO: 867572 - DNA, 25 bp, Homo sapien
ttacccccagctcaggcccctcttg

SEQ ID NO: 867573 - DNA, 25 bp, Homo sapien
actcagcacgcgcaccctggtggtg

SEQ ID NO: 867574 - DNA, 25 bp, Homo sapien
gcaccttgtgctccggggcgtagac

SEQ ID NO: 867575 - DNA, 25 bp, Homo sapien
gtggaagtgctccgcgtcccagctg

SEQ ID NO: 867576 - DNA, 25 bp, Homo sapien
ctgacggcatgggaactgtagcacc

SEQ ID NO: 867577 - DNA, 25 bp, Homo sapien
cagcgggaagatgctagacacctgc

SEQ ID NO: 867578 - DNA, 25 bp, Homo sapien
agatgctagacacctgctccgggcc

SEQ ID NO: 867579 - DNA, 25 bp, Homo sapien
gcgggaagatgctagacacctgctc

SEQ ID NO: 867580 - DNA, 25 bp, Homo sapien
ggccagcgggaagatgctagacacc

SEQ ID NO: 867581 - DNA, 25 bp, Homo sapien
gtctccaacaagaagttagtctcga

SEQ ID NO: 867582 - DNA, 25 bp, Homo sapien
ggcttgatgtggaaggcaatgtccc

SEQ ID NO: 867583 - DNA, 25 bp, Homo sapien
gcaatgtcccccgtctccaacaaga

SEQ ID NO: 867584 - DNA, 25 bp, Homo sapien
ctccaacaagaagttagtctcgaac

SEQ ID NO: 867585 - DNA, 25 bp, Homo sapien
cagcagcttccagccgggggccagg

SEQ ID NO: 867586 - DNA, 25 bp, Homo sapien
cagagtcagcatgtccctggaccag

SEQ ID NO: 867587 - DNA, 25 bp, Homo sapien
tctccagagtcagcatgtccctgga

SEQ ID NO: 867588 - DNA, 25 bp, Homo sapien
cctctccagagtcagcatgtccctg

SEQ ID NO: 867589 - DNA, 25 bp, Homo sapien
ctgcactgccatctgctcccagcca

SEQ ID NO: 867590 - DNA, 25 bp, Homo sapien
tcaaggtggtcgtgactgtccgcca

SEQ ID NO: 867591 - DNA, 25 bp, Homo sapien
ctggctcgtagcagggctggccgtg

SEQ ID NO: 867592 - DNA, 25 bp, Homo sapien
gctgtggagcccgtctctcctgcct

SEQ ID NO: 867593 - DNA, 25 bp, Homo sapien
cctgcctggctcgtagcagggctgg

SEQ ID NO: 867594 - DNA, 25 bp, Homo sapien
gcagcagaggatgagcgtgcctgcc

SEQ ID NO: 867595 - DNA, 25 bp, Homo sapien
cagaggatgagcgtgcctgccctcc

SEQ ID NO: 867596 - DNA, 25 bp, Homo sapien
agcagaggatgagcgtgcctgccct

SEQ ID NO: 867597 - DNA, 25 bp, Homo sapien
tccccggccacatccgcgtccccat

SEQ ID NO: 867598 - DNA, 25 bp, Homo sapien
agctgggagcactgccaagtcctgg

SEQ ID NO: 867599 - DNA, 25 bp, Homo sapien
ccagagctgggagcactgccaagtc

SEQ ID NO: 867600 - DNA, 25 bp, Homo sapien
gcccagagctgggagcactgccaag

SEQ ID NO: 867601 - DNA, 25 bp, Homo sapien
agagctgggagcactgccaagtcct

SEQ ID NO: 867602 - DNA, 25 bp, Homo sapien
gctgatgcccttgagctccctgttg

SEQ ID NO: 867603 - DNA, 25 bp, Homo sapien
ggcatggacccgcagaactcgctga

SEQ ID NO: 867604 - DNA, 25 bp, Homo sapien
tccctgttgccccacttgagctcag

SEQ ID NO: 867605 - DNA, 25 bp, Homo sapien
atggacccgcagaactcgctgatgc

SEQ ID NO: 867606 - DNA, 25 bp, Homo sapien
ggcctcttgtcccatcctctgtcag

SEQ ID NO: 867607 - DNA, 25 bp, Homo sapien
ccatcctctgtcagcatcctggcca

SEQ ID NO: 867608 - DNA, 25 bp, Homo sapien
tcttgtcccatcctctgtcagcatc

SEQ ID NO: 867609 - DNA, 25 bp, Homo sapien
cactggcctcttgtcccatcctctg

SEQ ID NO: 867610 - DNA, 25 bp, Homo sapien
cagagaaagcctcaggcatgaacat

SEQ ID NO: 867611 - DNA, 25 bp, Homo sapien
cagtctgtccgagtacttcagcctg

SEQ ID NO: 867612 - DNA, 25 bp, Homo sapien
tggagacctggatctcgcgccacaa

SEQ ID NO: 867613 - DNA, 25 bp, Homo sapien
ccgagacgtcttcatcgctgtcaag

SEQ ID NO: 867614 - DNA, 25 bp, Homo sapien
ctggtccgcgacgtgcacagtctgt

SEQ ID NO: 867615 - DNA, 25 bp, Homo sapien
gttcatcttcactgacggggaagat

SEQ ID NO: 867616 - DNA, 25 bp, Homo sapien
catcttcactgacggggaagatgag

SEQ ID NO: 867617 - DNA, 25 bp, Homo sapien
cttcactgacggggaagatgaggcc

SEQ ID NO: 867618 - DNA, 25 bp, Homo sapien
acgttcatcttcactgacggggaag

SEQ ID NO: 867619 - DNA, 25 bp, Homo sapien
gcaacgtggtcatcacaaactgctc

SEQ ID NO: 867620 - DNA, 25 bp, Homo sapien
gtggtcatcacaaactgctcggccg

SEQ ID NO: 867621 - DNA, 25 bp, Homo sapien
accgcttcatcgagtccggcaggaa

SEQ ID NO: 867622 - DNA, 25 bp, Homo sapien
tgcaagatggccgtggagtatgacc

SEQ ID NO: 867623 - DNA, 25 bp, Homo sapien
gtggttctgccacgtggacgatgac

SEQ ID NO: 867624 - DNA, 25 bp, Homo sapien
acgatgacaactacgtcaacctgcg

SEQ ID NO: 867625 - DNA, 25 bp, Homo sapien
gtggacgatgacaactacgtcaacc

SEQ ID NO: 867626 - DNA, 25 bp, Homo sapien
gcggctgctggccagctacccgcac

SEQ ID NO: 867627 - DNA, 25 bp, Homo sapien
caaagacatagctaggaaagcgaat

SEQ ID NO: 867628 - DNA, 25 bp, Homo sapien
tgtatttatgcgttccagcatctgg

SEQ ID NO: 867629 - DNA, 25 bp, Homo sapien
aagtgttgttgctatggtgacgtcc

SEQ ID NO: 867630 - DNA, 25 bp, Homo sapien
taaagctgaagtgggactgtctggc

SEQ ID NO: 867631 - DNA, 25 bp, Homo sapien
ttgtcatcatggcccatccccaatg

SEQ ID NO: 867632 - DNA, 25 bp, Homo sapien
ctatccacacagacccggcaaccat

SEQ ID NO: 867633 - DNA, 25 bp, Homo sapien
tatccacacagacccggcaaccatc

SEQ ID NO: 867634 - DNA, 25 bp, Homo sapien
tggcccatccccaatgagccgctgg

SEQ ID NO: 867635 - DNA, 25 bp, Homo sapien
cttcccacatggggtggcggctggg

SEQ ID NO: 867636 - DNA, 25 bp, Homo sapien
tcacttcccacatggggtggcggct

SEQ ID NO: 867637 - DNA, 25 bp, Homo sapien
gggccaaggcgggcagctgggaggt

SEQ ID NO: 867638 - DNA, 25 bp, Homo sapien
ttggggggccaaggcgggcagctgg

SEQ ID NO: 867639 - DNA, 25 bp, Homo sapien
gggatttcttgaccttgcttctctc

SEQ ID NO: 867640 - DNA, 25 bp, Homo sapien
ctgagccccagtggcagactctggt

SEQ ID NO: 867641 - DNA, 25 bp, Homo sapien
ctttaatacatcaaactgtgggatt

SEQ ID NO: 867642 - DNA, 25 bp, Homo sapien
ttccccagaggatccaccgggctgg

SEQ ID NO: 867643 - DNA, 25 bp, Homo sapien
gcggtcgcagtcaaacaaggcacaa

SEQ ID NO: 867644 - DNA, 25 bp, Homo sapien
gtcacaagacttctgcgccacaggg

SEQ ID NO: 867645 - DNA, 25 bp, Homo sapien
ggcacaaaaggcgaagtcaaagagc

SEQ ID NO: 867646 - DNA, 25 bp, Homo sapien
gaagcaatcttgtccctcaggaaga

SEQ ID NO: 867647 - DNA, 25 bp, Homo sapien
cgcaacaggactccggtacatgatg

SEQ ID NO: 867648 - DNA, 25 bp, Homo sapien
gacagggagcaagtgcggatggttg

SEQ ID NO: 867649 - DNA, 25 bp, Homo sapien
atgctgcgcagtgagcacacggccc

SEQ ID NO: 867650 - DNA, 25 bp, Homo sapien
cggacatgcagtctagggccacagc

SEQ ID NO: 867651 - DNA, 25 bp, Homo sapien
agacagaaggcgaagcgcacaggtc

SEQ ID NO: 867652 - DNA, 25 bp, Homo sapien
tcgaccacccgcaagcaaacgagca

SEQ ID NO: 867653 - DNA, 25 bp, Homo sapien
tggaggtaaccatgtctaagtggag

SEQ ID NO: 867654 - DNA, 25 bp, Homo sapien
agggcctcggcagtcactgctgcag

SEQ ID NO: 867655 - DNA, 25 bp, Homo sapien
gctcggacataactctcagggtcct

SEQ ID NO: 867656 - DNA, 25 bp, Homo sapien
ggacagctgccccatggcggtcact

SEQ ID NO: 867657 - DNA, 25 bp, Homo sapien
tgcactcgctcggacataactctca

SEQ ID NO: 867658 - DNA, 25 bp, Homo sapien
atggcggtcactgcactcgctcgga

SEQ ID NO: 867659 - DNA, 25 bp, Homo sapien
ctgaagccaagagtgcgcatctgaa

SEQ ID NO: 867660 - DNA, 25 bp, Homo sapien
gccaagagtgcgcatctgaagtcag

SEQ ID NO: 867661 - DNA, 25 bp, Homo sapien
caagagtgcgcatctgaagtcagcc

SEQ ID NO: 867662 - DNA, 25 bp, Homo sapien
gaagccaagagtgcgcatctgaagt

SEQ ID NO: 867663 - DNA, 25 bp, Homo sapien
ctgggtcaggaactcgagggcggag

SEQ ID NO: 867664 - DNA, 25 bp, Homo sapien
tgggtcaggaactcgagggcggagt

SEQ ID NO: 867665 - DNA, 25 bp, Homo sapien
gggtcaggaactcgagggcggagtc

SEQ ID NO: 867666 - DNA, 25 bp, Homo sapien
ggtcaggaactcgagggcggagtcc

SEQ ID NO: 867667 - DNA, 25 bp, Homo sapien
ggtggcacaggcgtttctgcagcac

SEQ ID NO: 867668 - DNA, 25 bp, Homo sapien
tggcacaggcgtttctgcagcacag

SEQ ID NO: 867669 - DNA, 25 bp, Homo sapien
gtggcacaggcgtttctgcagcaca

SEQ ID NO: 867670 - DNA, 25 bp, Homo sapien
ctgcgactccagctccgttcacccc

SEQ ID NO: 867671 - DNA, 25 bp, Homo sapien
tcacccctgcaaggggctgcgttac

SEQ ID NO: 867672 - DNA, 25 bp, Homo sapien
cgttcacccctgcaaggggctgcgt

SEQ ID NO: 867673 - DNA, 25 bp, Homo sapien
ccagctccgttcacccctgcaaggg

SEQ ID NO: 867674 - DNA, 25 bp, Homo sapien
gccgggggtcttgggtgagctcagg

SEQ ID NO: 867675 - DNA, 25 bp, Homo sapien
gatgagggggccgagatcagagcag

SEQ ID NO: 867676 - DNA, 25 bp, Homo sapien
ctctgaggaactgcgggatgagggg

SEQ ID NO: 867677 - DNA, 25 bp, Homo sapien
ggccgagatcagagcagccgggggt

SEQ ID NO: 867678 - DNA, 25 bp, Homo sapien
ccaggcaacgggatttctacatcaa

SEQ ID NO: 867679 - DNA, 25 bp, Homo sapien
aacatgaccaattacgcagggcacc

SEQ ID NO: 867680 - DNA, 25 bp, Homo sapien
tccttaggatcccaagaagccctgg

SEQ ID NO: 867681 - DNA, 25 bp, Homo sapien
cctcctgggctgattttaatagggc

SEQ ID NO: 867682 - DNA, 25 bp, Homo sapien
ggagtaggcacattcacaaatggcg

SEQ ID NO: 867683 - DNA, 25 bp, Homo sapien
tgaggggctgtggagtaggcacatt

SEQ ID NO: 867684 - DNA, 25 bp, Homo sapien
gggctgtggagtaggcacattcaca

SEQ ID NO: 867685 - DNA, 25 bp, Homo sapien
tgtggagtaggcacattcacaaatg

SEQ ID NO: 867686 - DNA, 25 bp, Homo sapien
caggccgcctgaccagtgcccctgc

SEQ ID NO: 867687 - DNA, 25 bp, Homo sapien
gggccgtcttggtgccacctcattt

SEQ ID NO: 867688 - DNA, 25 bp, Homo sapien
aggagaacccaaagcccacgcccag

SEQ ID NO: 867689 - DNA, 25 bp, Homo sapien
ttgtccagaattccccgcaggccgc

SEQ ID NO: 867690 - DNA, 25 bp, Homo sapien
cctgtgtgaaggccccatccgcaga

SEQ ID NO: 867691 - DNA, 25 bp, Homo sapien
gccacctgcatcgtgaagctctctg

SEQ ID NO: 867692 - DNA, 25 bp, Homo sapien
tgatgtatcttcaccaacaagaggc

SEQ ID NO: 867693 - DNA, 25 bp, Homo sapien
atgcagccacctgcatcgtgaagct

SEQ ID NO: 867694 - DNA, 25 bp, Homo sapien
tctcctcgctctctatccccaccac

SEQ ID NO: 867695 - DNA, 25 bp, Homo sapien
aggacagcaagcgcctgcgtcacca

SEQ ID NO: 867696 - DNA, 25 bp, Homo sapien
aggaggacagcaagcgcctgcgtca

SEQ ID NO: 867697 - DNA, 25 bp, Homo sapien
ggaggacagcaagcgcctgcgtcac

SEQ ID NO: 867698 - DNA, 25 bp, Homo sapien
acagcaagcgcctgcgtcaccagct

SEQ ID NO: 867699 - DNA, 25 bp, Homo sapien
agggacagcagttcccgggtgcctc

SEQ ID NO: 867700 - DNA, 25 bp, Homo sapien
gccaaagccgtacagaacacactca

SEQ ID NO: 867701 - DNA, 25 bp, Homo sapien
acaaggcctcatccgccagctgaaa

SEQ ID NO: 867702 - DNA, 25 bp, Homo sapien
cctccccatcaactctgggaaggag

SEQ ID NO: 867703 - DNA, 25 bp, Homo sapien
agggctgctcgctggacccggacgc

SEQ ID NO: 867704 - DNA, 25 bp, Homo sapien
ggacagtcactgtagcccccagtag

SEQ ID NO: 867705 - DNA, 25 bp, Homo sapien
cagcgtccccaggaagtcgagggct

SEQ ID NO: 867706 - DNA, 25 bp, Homo sapien
acgcagcccgccagggtcccacaga

SEQ ID NO: 867707 - DNA, 25 bp, Homo sapien
tggggccacggtgaagggcgctggg

SEQ ID NO: 867708 - DNA, 25 bp, Homo sapien
ctggggccacggtgaagggcgctgg

SEQ ID NO: 867709 - DNA, 25 bp, Homo sapien
gaagagggccgtcagccaaggttgc

SEQ ID NO: 867710 - DNA, 25 bp, Homo sapien
gccgtcagccaaggttgcggtccca

SEQ ID NO: 867711 - DNA, 25 bp, Homo sapien
gggcgggggacatcagccaaggttg

SEQ ID NO: 867712 - DNA, 25 bp, Homo sapien
gggtgctgggacttcgaggcatgtg

SEQ ID NO: 867713 - DNA, 25 bp, Homo sapien
tgtccaccgtcgtggcatcgtctgc

SEQ ID NO: 867714 - DNA, 25 bp, Homo sapien
ccggcgcaggacgacttggaggcca

SEQ ID NO: 867715 - DNA, 25 bp, Homo sapien
gtcgtggcatcgtctgccgtcccgt

SEQ ID NO: 867716 - DNA, 25 bp, Homo sapien
aggccaggagtgtgtccaccgtcgt

SEQ ID NO: 867717 - DNA, 25 bp, Homo sapien
ttcagcctccccacggtcaccagcc

SEQ ID NO: 867718 - DNA, 25 bp, Homo sapien
aggaagagctcccttagagagcact

SEQ ID NO: 867719 - DNA, 25 bp, Homo sapien
agagctcccttagagagcacttcag

SEQ ID NO: 867720 - DNA, 25 bp, Homo sapien
gccaggacctaggtgcagagcagca

SEQ ID NO: 867721 - DNA, 25 bp, Homo sapien
tggcgagccagctactctcatccat

SEQ ID NO: 867722 - DNA, 25 bp, Homo sapien
gggtggcgagccagctactctcatc

SEQ ID NO: 867723 - DNA, 25 bp, Homo sapien
agatggccatgtccccggtcccctt

SEQ ID NO: 867724 - DNA, 25 bp, Homo sapien
ccatgtccccggtcccctttgctct

SEQ ID NO: 867725 - DNA, 25 bp, Homo sapien
ggcctgaaccgtggccttcaggaca

SEQ ID NO: 867726 - DNA, 25 bp, Homo sapien
ggggcctgaaccgtggccttcagga

SEQ ID NO: 867727 - DNA, 25 bp, Homo sapien
cgggggcctgaaccgtggccttcag

SEQ ID NO: 867728 - DNA, 25 bp, Homo sapien
gcctgaaccgtggccttcaggacac

SEQ ID NO: 867729 - DNA, 25 bp, Homo sapien
aacgcgaggtgagtgccgcgaccct

SEQ ID NO: 867730 - DNA, 25 bp, Homo sapien
gctgtgctcctaatgtccccagcaa

SEQ ID NO: 867731 - DNA, 25 bp, Homo sapien
gctgcgagacaagttggctgtgctc

SEQ ID NO: 867732 - DNA, 25 bp, Homo sapien
acaaacgcgaggtgagtgccgcgac

SEQ ID NO: 867733 - DNA, 25 bp, Homo sapien
gaccaaggagatgggcctgacactc

SEQ ID NO: 867734 - DNA, 25 bp, Homo sapien
ggtctactctctcctaaacattcgg

SEQ ID NO: 867735 - DNA, 25 bp, Homo sapien
ttgtgagcccacctggaacactggc

SEQ ID NO: 867736 - DNA, 25 bp, Homo sapien
taaagaaccttcagaagctgccgcg

SEQ ID NO: 867737 - DNA, 25 bp, Homo sapien
gtcggaagaactgaacacgggagaa

SEQ ID NO: 867738 - DNA, 25 bp, Homo sapien
cagtgctcgagcttcaggatcccca

SEQ ID NO: 867739 - DNA, 25 bp, Homo sapien
gctcgagcttcaggatccccaaagc

SEQ ID NO: 867740 - DNA, 25 bp, Homo sapien
ctcccacaggctgccgtcggaagaa

SEQ ID NO: 867741 - DNA, 25 bp, Homo sapien
aagacaggcctttccccatgagggt

SEQ ID NO: 867742 - DNA, 25 bp, Homo sapien
agagtctccggctgccagtgggaca

SEQ ID NO: 867743 - DNA, 25 bp, Homo sapien
tcactgcaggccatgtcctcagaga

SEQ ID NO: 867744 - DNA, 25 bp, Homo sapien
gcgttatccgaggaaaacagttgcc

SEQ ID NO: 867745 - DNA, 25 bp, Homo sapien
cccccagctgcgtcccggggccctg

SEQ ID NO: 867746 - DNA, 25 bp, Homo sapien
cccagctgcgtcccggggccctgac

SEQ ID NO: 867747 - DNA, 25 bp, Homo sapien
ccaggccccccagctgcgtcccggg

SEQ ID NO: 867748 - DNA, 25 bp, Homo sapien
caggccccccagctgcgtcccgggg

SEQ ID NO: 867749 - DNA, 25 bp, Homo sapien
agccacacagagaagcaggtccacg

SEQ ID NO: 867750 - DNA, 25 bp, Homo sapien
ccacacagagaagcaggtccacgaa

SEQ ID NO: 867751 - DNA, 25 bp, Homo sapien
cgagccacacagagaagcaggtcca

SEQ ID NO: 867752 - DNA, 25 bp, Homo sapien
cacacagagaagcaggtccacgaac

SEQ ID NO: 867753 - DNA, 25 bp, Homo sapien
ccgaaggtcgtggtcaggacgttca

SEQ ID NO: 867754 - DNA, 25 bp, Homo sapien
gcacccacagggcttccgtccaggg

SEQ ID NO: 867755 - DNA, 25 bp, Homo sapien
gggtggccgcggagcacaaggactc

SEQ ID NO: 867756 - DNA, 25 bp, Homo sapien
tcttcaacgtgatccatgatcttct

SEQ ID NO: 867757 - DNA, 25 bp, Homo sapien
ggccgccgaggccacaaacaggctg

SEQ ID NO: 867758 - DNA, 25 bp, Homo sapien
ctggccgccgaggccacaaacaggc

SEQ ID NO: 867759 - DNA, 25 bp, Homo sapien
aggacgtgcaccaggagctgactgg

SEQ ID NO: 867760 - DNA, 25 bp, Homo sapien
gccgccgaggccacaaacaggctgg

SEQ ID NO: 867761 - DNA, 25 bp, Homo sapien
caaaaaagaacaggaactgaagctc

SEQ ID NO: 867762 - DNA, 25 bp, Homo sapien
acaaatagcagagggccccccaaga

SEQ ID NO: 867763 - DNA, 25 bp, Homo sapien
ggcctcagggaagatacaaatagca

SEQ ID NO: 867764 - DNA, 25 bp, Homo sapien
cagcttgtgatgcttcccaattcgt

SEQ ID NO: 867765 - DNA, 25 bp, Homo sapien
ccctggatccagccgctgcgcacgg

SEQ ID NO: 867766 - DNA, 25 bp, Homo sapien
ctgtgccagggagcgcaggccctgg

SEQ ID NO: 867767 - DNA, 25 bp, Homo sapien
ggtgctgtgccagggagcgcaggcc

SEQ ID NO: 867768 - DNA, 25 bp, Homo sapien
gacggcccaggttgctcggccgagg

SEQ ID NO: 867769 - DNA, 25 bp, Homo sapien
tttcctgggctgcgaaggttcctgc

SEQ ID NO: 867770 - DNA, 25 bp, Homo sapien
tcctgggctgcgaaggttcctgcca

SEQ ID NO: 867771 - DNA, 25 bp, Homo sapien
tgcgaaggttcctgccaggcgcagt

SEQ ID NO: 867772 - DNA, 25 bp, Homo sapien
ctgccaggcgcagtgagaaggagag

SEQ ID NO: 867773 - DNA, 25 bp, Homo sapien
tgcgcctgaacactcaattatcatg

SEQ ID NO: 867774 - DNA, 25 bp, Homo sapien
cacatgcgcctgaacactcaattat

SEQ ID NO: 867775 - DNA, 25 bp, Homo sapien
agacgggtcacgtaccgacatcata

SEQ ID NO: 867776 - DNA, 25 bp, Homo sapien
gtaccgacatcataccagggttcca

SEQ ID NO: 867777 - DNA, 25 bp, Homo sapien
cctagatatttagctcaaagagggt

SEQ ID NO: 867778 - DNA, 25 bp, Homo sapien
cccaggagatcgaaaacagcttggg

SEQ ID NO: 867779 - DNA, 25 bp, Homo sapien
aacaaggaagacctagatatttagc

SEQ ID NO: 867780 - DNA, 25 bp, Homo sapien
ggagatcgaaaacagcttgggcaat

SEQ ID NO: 867781 - DNA, 25 bp, Homo sapien
cctgggatctaccagaacagcacag

SEQ ID NO: 867782 - DNA, 25 bp, Homo sapien
caccggctgcctgggatctaccaga

SEQ ID NO: 867783 - DNA, 25 bp, Homo sapien
gcagctgggcgcattctgggtccat

SEQ ID NO: 867784 - DNA, 25 bp, Homo sapien
agcagctgggcgcattctgggtcca

SEQ ID NO: 867785 - DNA, 25 bp, Homo sapien
cctcccagcgtcaagtggtggctgc

SEQ ID NO: 867786 - DNA, 25 bp, Homo sapien
tcccagcgtcaagtggtggctgcat

SEQ ID NO: 867787 - DNA, 25 bp, Homo sapien
ctgtccctcccagcgtcaagtggtg

SEQ ID NO: 867788 - DNA, 25 bp, Homo sapien
tccctcccagcgtcaagtggtggct

SEQ ID NO: 867789 - DNA, 25 bp, Homo sapien
cggaggacggagacggctggcgtgg

SEQ ID NO: 867790 - DNA, 25 bp, Homo sapien
ttgaaggaaggagttcaagctgaga

SEQ ID NO: 867791 - DNA, 25 bp, Homo sapien
tggaggccgctctggaagcctcgag

SEQ ID NO: 867792 - DNA, 25 bp, Homo sapien
aaggctccgcctccggacagtgcca

SEQ ID NO: 867793 - DNA, 25 bp, Homo sapien
ccggctgggtaggtcggcggcctgg

SEQ ID NO: 867794 - DNA, 25 bp, Homo sapien
ggttgccatggcagcggggtcgcgg

SEQ ID NO: 867795 - DNA, 25 bp, Homo sapien
gggctgcccgcggattcccagaccc

SEQ ID NO: 867796 - DNA, 25 bp, Homo sapien
cggcgccagggaaggccccgaggct

SEQ ID NO: 867797 - DNA, 25 bp, Homo sapien
cttgcttcctcctaaggagaccaca

SEQ ID NO: 867798 - DNA, 25 bp, Homo sapien
gaagttgcctgcttgttccccaggg

SEQ ID NO: 867799 - DNA, 25 bp, Homo sapien
acagggttcagcacagctgcacccg

SEQ ID NO: 867800 - DNA, 25 bp, Homo sapien
acttggagcagctgaagttgcctgc

SEQ ID NO: 867801 - DNA, 25 bp, Homo sapien
cacaatactgtgtcgagagctggaa

SEQ ID NO: 867802 - DNA, 25 bp, Homo sapien
tgcatattccgaatgctccttggtg

SEQ ID NO: 867803 - DNA, 25 bp, Homo sapien
aaataggccgttctccacaatactg

SEQ ID NO: 867804 - DNA, 25 bp, Homo sapien
gcactcggaagcgtaaaataggccg

SEQ ID NO: 867805 - DNA, 25 bp, Homo sapien
taggtttgcagctcccaccacgttc

SEQ ID NO: 867806 - DNA, 25 bp, Homo sapien
caccacgttccgaggcttttcatcg

SEQ ID NO: 867807 - DNA, 25 bp, Homo sapien
tccgggcagtatcaaacgctggcat

SEQ ID NO: 867808 - DNA, 25 bp, Homo sapien
gtttgtcgttttccgggcagtatca

SEQ ID NO: 867809 - DNA, 25 bp, Homo sapien
tagtgtggattcacaggcgccagca

SEQ ID NO: 867810 - DNA, 25 bp, Homo sapien
gatgtgtgtggcagagccccgtttc

SEQ ID NO: 867811 - DNA, 25 bp, Homo sapien
caatagaggctggatagagatactg

SEQ ID NO: 867812 - DNA, 25 bp, Homo sapien
ggcacgcaagcggaaacaggatttg

SEQ ID NO: 867813 - DNA, 25 bp, Homo sapien
cagggatcatgctcttccagtagct

SEQ ID NO: 867814 - DNA, 25 bp, Homo sapien
gcctcacttctgattaaagagactg

SEQ ID NO: 867815 - DNA, 25 bp, Homo sapien
gggtcccctcaaagctttctcatgg

SEQ ID NO: 867816 - DNA, 25 bp, Homo sapien
gaaactaagtgtgatggagagctca

SEQ ID NO: 867817 - DNA, 25 bp, Homo sapien
gggtcataaacttattcctctgtcc

SEQ ID NO: 867818 - DNA, 25 bp, Homo sapien
caatgggcaggccaatgtgttacag

SEQ ID NO: 867819 - DNA, 25 bp, Homo sapien
agaacgttccctttcctggatctgt

SEQ ID NO: 867820 - DNA, 25 bp, Homo sapien
tgagaaataaggtctccagctctga

SEQ ID NO: 867821 - DNA, 25 bp, Homo sapien
agcttataaaaccatgccggcctga

SEQ ID NO: 867822 - DNA, 25 bp, Homo sapien
caaggccgcatctgcatctcatggt

SEQ ID NO: 867823 - DNA, 25 bp, Homo sapien
tgcatattgggtacagcgctggtcg

SEQ ID NO: 867824 - DNA, 25 bp, Homo sapien
ggagccgtctgaggccagcttataa

SEQ ID NO: 867825 - DNA, 25 bp, Homo sapien
ggagctgcctctgaactaagcgtcg

SEQ ID NO: 867826 - DNA, 25 bp, Homo sapien
cctggaattgccgaggtccttgctg

SEQ ID NO: 867827 - DNA, 25 bp, Homo sapien
taagcgtcgccttatgccaggaagg

SEQ ID NO: 867828 - DNA, 25 bp, Homo sapien
tccaacaggaccgaggtggcttcct

SEQ ID NO: 867829 - DNA, 25 bp, Homo sapien
taaagacgcaagttcatccccgtga

SEQ ID NO: 867830 - DNA, 25 bp, Homo sapien
gaatgtacagacacgcaaagcggtc

SEQ ID NO: 867831 - DNA, 25 bp, Homo sapien
gctaaagcgtgcgttgatgctgccc

SEQ ID NO: 867832 - DNA, 25 bp, Homo sapien
tgttctccgggagccgattctaccg

SEQ ID NO: 867833 - DNA, 25 bp, Homo sapien
gaaaagatagcccaacctagctcag

SEQ ID NO: 867834 - DNA, 25 bp, Homo sapien
aaaatagccaaacgacgctggtcgc

SEQ ID NO: 867835 - DNA, 25 bp, Homo sapien
gagacgtgaggaccatgcccttgat

SEQ ID NO: 867836 - DNA, 25 bp, Homo sapien
gaggaccagggagttgacacacaaa

SEQ ID NO: 867837 - DNA, 25 bp, Homo sapien
ggatacatctgttgacaccccggtc

SEQ ID NO: 867838 - DNA, 25 bp, Homo sapien
attttgccgtggtcgtaatgcaggc

SEQ ID NO: 867839 - DNA, 25 bp, Homo sapien
gcactcgggctgaacaaacgatccg

SEQ ID NO: 867840 - DNA, 25 bp, Homo sapien
agtgtgccttgagtgccccgtgaag

SEQ ID NO: 867841 - DNA, 25 bp, Homo sapien
cctctgcctgttgagtatgggtgta

SEQ ID NO: 867842 - DNA, 25 bp, Homo sapien
ctctgcctgttgagtatgggtgtat

SEQ ID NO: 867843 - DNA, 25 bp, Homo sapien
tctgcctgttgagtatgggtgtatc

SEQ ID NO: 867844 - DNA, 25 bp, Homo sapien
gggtcagctacgcggcgccctggtg

SEQ ID NO: 867845 - DNA, 25 bp, Homo sapien
cggcgccctggtgggtgagcctcct

SEQ ID NO: 867846 - DNA, 25 bp, Homo sapien
gccctggtgggtgagcctcctgcac

SEQ ID NO: 867847 - DNA, 25 bp, Homo sapien
ctacgcggcgccctggtgggtgagc

SEQ ID NO: 867848 - DNA, 25 bp, Homo sapien
gatccattctctgggtgagtgccct

SEQ ID NO: 867849 - DNA, 25 bp, Homo sapien
ctgggcccgggcatttctacattac

SEQ ID NO: 867850 - DNA, 25 bp, Homo sapien
tgttctgggcccgggcatttctaca

SEQ ID NO: 867851 - DNA, 25 bp, Homo sapien
tgtttttccctgtagtgttctgggc

SEQ ID NO: 867852 - DNA, 25 bp, Homo sapien
tgtggaccccttcttagttcacagg

SEQ ID NO: 867853 - DNA, 25 bp, Homo sapien
acagggacacgtgccacctgctcat

SEQ ID NO: 867854 - DNA, 25 bp, Homo sapien
ctggccgcacccaacctgtgttgtt

SEQ ID NO: 867855 - DNA, 25 bp, Homo sapien
actcgggtcacacctgaacgctgct

SEQ ID NO: 867856 - DNA, 25 bp, Homo sapien
ggcttacctcactgagagtgctccc

SEQ ID NO: 867857 - DNA, 25 bp, Homo sapien
ccatctcactatgcaattcgagttc

SEQ ID NO: 867858 - DNA, 25 bp, Homo sapien
cacatgtcatggcaaggttggtagt

SEQ ID NO: 867859 - DNA, 25 bp, Homo sapien
aattcgagttccaagcaacatttgc

SEQ ID NO: 867860 - DNA, 25 bp, Homo sapien
tcgcgggacggcgtgagcgagcaca

SEQ ID NO: 867861 - DNA, 25 bp, Homo sapien
gcgccggctggagcaacgtcgcggg

SEQ ID NO: 867862 - DNA, 25 bp, Homo sapien
cacccggccgtgtgtgacacgcgtg

SEQ ID NO: 867863 - DNA, 25 bp, Homo sapien
agcagctctcccgatcgagctccgg

SEQ ID NO: 867864 - DNA, 25 bp, Homo sapien
gtgctccagcgacagctccagggag

SEQ ID NO: 867865 - DNA, 25 bp, Homo sapien
gctccagcgacagctccagggaggc

SEQ ID NO: 867866 - DNA, 25 bp, Homo sapien
tgctccagcgacagctccagggagg

SEQ ID NO: 867867 - DNA, 25 bp, Homo sapien
agtgctccagcgacagctccaggga

SEQ ID NO: 867868 - DNA, 25 bp, Homo sapien
gtcccacgtgagctccaccgcgggc

SEQ ID NO: 867869 - DNA, 25 bp, Homo sapien
cccacgtgagctccaccgcgggcag

SEQ ID NO: 867870 - DNA, 25 bp, Homo sapien
gggtcccacgtgagctccaccgcgg

SEQ ID NO: 867871 - DNA, 25 bp, Homo sapien
agggtcccacgtgagctccaccgcg

SEQ ID NO: 867872 - DNA, 25 bp, Homo sapien
acgcgaagggcgcacttggcgaggg

SEQ ID NO: 867873 - DNA, 25 bp, Homo sapien
agggtttggtgcagcgccgcgccgg

SEQ ID NO: 867874 - DNA, 25 bp, Homo sapien
cgcggagacgcgaagggcgcacttg

SEQ ID NO: 867875 - DNA, 25 bp, Homo sapien
gcgcacttggcgagggtttggtgca

SEQ ID NO: 867876 - DNA, 25 bp, Homo sapien
tgcgcgcttcccgatgggagcaaac

SEQ ID NO: 867877 - DNA, 25 bp, Homo sapien
cgccgagaatctcgtcgtgcccagg

SEQ ID NO: 867878 - DNA, 25 bp, Homo sapien
atccagggccaagcgcccgaaagaa

SEQ ID NO: 867879 - DNA, 25 bp, Homo sapien
ctccagggcgccgagaatctcgtcg

SEQ ID NO: 867880 - DNA, 25 bp, Homo sapien
cttagagcggcagaacctccctggg

SEQ ID NO: 867881 - DNA, 25 bp, Homo sapien
gttactgggccagtctggcggccct

SEQ ID NO: 867882 - DNA, 25 bp, Homo sapien
agtctggcggcccttgttgcttaga

SEQ ID NO: 867883 - DNA, 25 bp, Homo sapien
gggatgcggacgtgctcttttccag

SEQ ID NO: 867884 - DNA, 25 bp, Homo sapien
tctatgtgaggagtggtcttgtgca

SEQ ID NO: 867885 - DNA, 25 bp, Homo sapien
gtcttgtgcagaaatgacctggcag

SEQ ID NO: 867886 - DNA, 25 bp, Homo sapien
gaagacgaatgtggccacaaggctt

SEQ ID NO: 867887 - DNA, 25 bp, Homo sapien
atgacccacgaagacgaatgtggcc

SEQ ID NO: 867888 - DNA, 25 bp, Homo sapien
tgcttgcgggtgtgcaaacggcctc

SEQ ID NO: 867889 - DNA, 25 bp, Homo sapien
tgctctggtcccctgcaaaacttgt

SEQ ID NO: 867890 - DNA, 25 bp, Homo sapien
gatgctcttgagttacccacgtgcc

SEQ ID NO: 867891 - DNA, 25 bp, Homo sapien
aaacggcctctgtggtcgtggctcc

SEQ ID NO: 867892 - DNA, 25 bp, Homo sapien
ctttatggtccagaggcgggaattc

SEQ ID NO: 867893 - DNA, 25 bp, Homo sapien
ccctgtgcactccaggagtccagga

SEQ ID NO: 867894 - DNA, 25 bp, Homo sapien
tcctgtccatcgtctgtgcatctga

SEQ ID NO: 867895 - DNA, 25 bp, Homo sapien
gcaagacttgcccactacggccctt

SEQ ID NO: 867896 - DNA, 25 bp, Homo sapien
aggctcggtctgcatagaacccacg

SEQ ID NO: 867897 - DNA, 25 bp, Homo sapien
tctggtggtgggcatgcgggtctgg

SEQ ID NO: 867898 - DNA, 25 bp, Homo sapien
ctgcatagaacccacgtggtcccag

SEQ ID NO: 867899 - DNA, 25 bp, Homo sapien
tcggtctgcatagaacccacgtggt

SEQ ID NO: 867900 - DNA, 25 bp, Homo sapien
gatgcttgaaaatctgcatgttcag

SEQ ID NO: 867901 - DNA, 25 bp, Homo sapien
gcttgaaaatctgcatgttcaggcc

SEQ ID NO: 867902 - DNA, 25 bp, Homo sapien
ttgaaaatctgcatgttcaggccca

SEQ ID NO: 867903 - DNA, 25 bp, Homo sapien
tgaaaatctgcatgttcaggcccat

SEQ ID NO: 867904 - DNA, 25 bp, Homo sapien
cgcctccctgcagcaccggaagccc

SEQ ID NO: 867905 - DNA, 25 bp, Homo sapien
ctccctgcagcaccggaagccccgc

SEQ ID NO: 867906 - DNA, 25 bp, Homo sapien
gcagcaccggaagccccgcctggct

SEQ ID NO: 867907 - DNA, 25 bp, Homo sapien
ggaagccccgcctggctcggaagca

SEQ ID NO: 867908 - DNA, 25 bp, Homo sapien
ggagagagacttccggttctgacag

SEQ ID NO: 867909 - DNA, 25 bp, Homo sapien
tgaatctgacattggtggaggccga

SEQ ID NO: 867910 - DNA, 25 bp, Homo sapien
tcacacggttatggagggcttctaa

SEQ ID NO: 867911 - DNA, 25 bp, Homo sapien
cagcggaatcccttcggagtgacga

SEQ ID NO: 867912 - DNA, 25 bp, Homo sapien
aaggcagctgccataccgtgaggaa

SEQ ID NO: 867913 - DNA, 25 bp, Homo sapien
agctcggtggagacggtttgcccct

SEQ ID NO: 867914 - DNA, 25 bp, Homo sapien
tgaggaaacccgacaaacagggcag

SEQ ID NO: 867915 - DNA, 25 bp, Homo sapien
tgttcgttcacacggctgccaagtg

SEQ ID NO: 867916 - DNA, 25 bp, Homo sapien
gagagcctcacccatcttggtaagc

SEQ ID NO: 867917 - DNA, 25 bp, Homo sapien
taagccaagtcagcggggcctcatg

SEQ ID NO: 867918 - DNA, 25 bp, Homo sapien
gggtcttccagcttgacgatgacct

SEQ ID NO: 867919 - DNA, 25 bp, Homo sapien
cttgacgatgacctctcttcggaga

SEQ ID NO: 867920 - DNA, 25 bp, Homo sapien
taatgaacgcacttctgtcacatgg

SEQ ID NO: 867921 - DNA, 25 bp, Homo sapien
cagtgttcccgtgacgatgaggcaa

SEQ ID NO: 867922 - DNA, 25 bp, Homo sapien
agtcaccggagtcgagcaaacacgg

SEQ ID NO: 867923 - DNA, 25 bp, Homo sapien
tgaggcaaatccaaatagtcaccgg

SEQ ID NO: 867924 - DNA, 25 bp, Homo sapien
tctgcccgccacagtgtgcctggtt

SEQ ID NO: 867925 - DNA, 25 bp, Homo sapien
cttctcagcaaaggccaacacgtct

SEQ ID NO: 867926 - DNA, 25 bp, Homo sapien
tccaagaccatctcccgttcaaggg

SEQ ID NO: 867927 - DNA, 25 bp, Homo sapien
tcctctgatgccgagagctctggct

SEQ ID NO: 867928 - DNA, 25 bp, Homo sapien
cgcgctttgtgagtctgtctcgtgg

SEQ ID NO: 867929 - DNA, 25 bp, Homo sapien
tttgtgagtctgtctcgtgggcctc

SEQ ID NO: 867930 - DNA, 25 bp, Homo sapien
gctttgtgagtctgtctcgtgggcc

SEQ ID NO: 867931 - DNA, 25 bp, Homo sapien
ttgtgagtctgtctcgtgggcctcc

SEQ ID NO: 867932 - DNA, 25 bp, Homo sapien
agccctgactcttggacgctggtgg

SEQ ID NO: 867933 - DNA, 25 bp, Homo sapien
gaatggggacgtgttttgttcagcc

SEQ ID NO: 867934 - DNA, 25 bp, Homo sapien
gacgtgttttgttcagccctgactc

SEQ ID NO: 867935 - DNA, 25 bp, Homo sapien
cctgactcttggacgctggtggcag

SEQ ID NO: 867936 - DNA, 25 bp, Homo sapien
tggacgaaggtgatgagcgcggctg

SEQ ID NO: 867937 - DNA, 25 bp, Homo sapien
cactgtcccttctaacaggacaggg

SEQ ID NO: 867938 - DNA, 25 bp, Homo sapien
aacactttctcacgtaggagctcca

SEQ ID NO: 867939 - DNA, 25 bp, Homo sapien
tggggtccagtctgaagccgacgcc

SEQ ID NO: 867940 - DNA, 25 bp, Homo sapien
cttgtggtcagggagaagcgggcag

SEQ ID NO: 867941 - DNA, 25 bp, Homo sapien
tcctctccctgtgctctgcccacct

SEQ ID NO: 867942 - DNA, 25 bp, Homo sapien
tgcgtccggctctcagggacttcct

SEQ ID NO: 867943 - DNA, 25 bp, Homo sapien
ccagggccgagctgcgtccggctct

SEQ ID NO: 867944 - DNA, 25 bp, Homo sapien
tctcagggtcgcttaacacaggcag

SEQ ID NO: 867945 - DNA, 25 bp, Homo sapien
ccccatctgaagtgagatcaaactt

SEQ ID NO: 867946 - DNA, 25 bp, Homo sapien
gagagctccggccatttattccaaa

SEQ ID NO: 867947 - DNA, 25 bp, Homo sapien
ggaagaggcagagaacacgcttttc

SEQ ID NO: 867948 - DNA, 25 bp, Homo sapien
agctttgtcggctgccaacccaact

SEQ ID NO: 867949 - DNA, 25 bp, Homo sapien
caactcctccgacagaacggcaggt

SEQ ID NO: 867950 - DNA, 25 bp, Homo sapien
gctcgaggcctttactggatgggca

SEQ ID NO: 867951 - DNA, 25 bp, Homo sapien
cttgggcgcccccttgtgagggctc

SEQ ID NO: 867952 - DNA, 25 bp, Homo sapien
tatactgcaatgactgatggacgac

SEQ ID NO: 867953 - DNA, 25 bp, Homo sapien
ggcataacctgatgtctgtcacgga

SEQ ID NO: 867954 - DNA, 25 bp, Homo sapien
gatcaccgctcgattgtatggcaca

SEQ ID NO: 867955 - DNA, 25 bp, Homo sapien
catttgagaaggcaaggagccgacg

SEQ ID NO: 867956 - DNA, 25 bp, Homo sapien
acagggctgccacgcactgctgcag

SEQ ID NO: 867957 - DNA, 25 bp, Homo sapien
cctctgctgacatggaccggttcat

SEQ ID NO: 867958 - DNA, 25 bp, Homo sapien
gagctttccgtgcaaagcgcggctc

SEQ ID NO: 867959 - DNA, 25 bp, Homo sapien
ctctgagactcggctcctctgctga

SEQ ID NO: 867960 - DNA, 25 bp, Homo sapien
aaatgaagagtcacttcacaaatgt

SEQ ID NO: 867961 - DNA, 25 bp, Homo sapien
ggtgaacactttttatgcgctgtga

SEQ ID NO: 867962 - DNA, 25 bp, Homo sapien
aaaagagaaagactagtgtgtgttt

SEQ ID NO: 867963 - DNA, 25 bp, Homo sapien
caaacacttagtcactgctggaggc

SEQ ID NO: 867964 - DNA, 25 bp, Homo sapien
cccacaggtctggtggtggcgacca

SEQ ID NO: 867965 - DNA, 25 bp, Homo sapien
gcagctgcaaaacgaccgactctat

SEQ ID NO: 867966 - DNA, 25 bp, Homo sapien
gaggttcctgccaatgccgggagga

SEQ ID NO: 867967 - DNA, 25 bp, Homo sapien
tctattgaagacacactgggtggcg

SEQ ID NO: 867968 - DNA, 25 bp, Homo sapien
aaactaaccaccgtggctataacat

SEQ ID NO: 867969 - DNA, 25 bp, Homo sapien
acatgttaaactaaccaccgtggct

SEQ ID NO: 867970 - DNA, 25 bp, Homo sapien
actaaccaccgtggctataacatat

SEQ ID NO: 867971 - DNA, 25 bp, Homo sapien
tgttaaactaaccaccgtggctata

SEQ ID NO: 867972 - DNA, 25 bp, Homo sapien
cagaaggccgtccaactggtccctt

SEQ ID NO: 867973 - DNA, 25 bp, Homo sapien
tgtattcgtaaaccaagtccggtca

SEQ ID NO: 867974 - DNA, 25 bp, Homo sapien
gcacaggcgctaaagccagaaggcc

SEQ ID NO: 867975 - DNA, 25 bp, Homo sapien
tttaaggtcctgaaaggcacaggcg

SEQ ID NO: 867976 - DNA, 25 bp, Homo sapien
caagcttaccacactgaatttcctg

SEQ ID NO: 867977 - DNA, 25 bp, Homo sapien
gaatttcctggcgacgcttgtgccc

SEQ ID NO: 867978 - DNA, 25 bp, Homo sapien
gttcaggacacggtggccatgagta

SEQ ID NO: 867979 - DNA, 25 bp, Homo sapien
gccatgagtaggtgccaagcttacc

SEQ ID NO: 867980 - DNA, 25 bp, Homo sapien
cataggcttgttaagaacccagact

SEQ ID NO: 867981 - DNA, 25 bp, Homo sapien
gactcctaataagaaagcaccacag

SEQ ID NO: 867982 - DNA, 25 bp, Homo sapien
tttgagattcgagactgacagatgc

SEQ ID NO: 867983 - DNA, 25 bp, Homo sapien
ggaatgtggcaacatgcacccgggt

SEQ ID NO: 867984 - DNA, 25 bp, Homo sapien
tgtcctcggcctagtttgtactgac

SEQ ID NO: 867985 - DNA, 25 bp, Homo sapien
ttcattcgtgtgatttccagatgca

SEQ ID NO: 867986 - DNA, 25 bp, Homo sapien
tggttcagttcttgatgcccgagtt

SEQ ID NO: 867987 - DNA, 25 bp, Homo sapien
gatgcccgagtttcaaagtctccta

SEQ ID NO: 867988 - DNA, 25 bp, Homo sapien
aaacacattggtggcgaagatctcc

SEQ ID NO: 867989 - DNA, 25 bp, Homo sapien
ttggtggcgaagatctcctgcatca

SEQ ID NO: 867990 - DNA, 25 bp, Homo sapien
ccttgggagccagctgtcggactga

SEQ ID NO: 867991 - DNA, 25 bp, Homo sapien
gccacagtctcgaggggttcacgct

SEQ ID NO: 867992 - DNA, 25 bp, Homo sapien
caagctctcggggacgattcagatc

SEQ ID NO: 867993 - DNA, 25 bp, Homo sapien
tcggggacgattcagatcagctttc

SEQ ID NO: 867994 - DNA, 25 bp, Homo sapien
gggacgattcagatcagctttcccc

SEQ ID NO: 867995 - DNA, 25 bp, Homo sapien
gctctcggggacgattcagatcagc

SEQ ID NO: 867996 - DNA, 25 bp, Homo sapien
agttgcagacagcaacgatggaggc

SEQ ID NO: 867997 - DNA, 25 bp, Homo sapien
tgaagttgcagacagcaacgatgga

SEQ ID NO: 867998 - DNA, 25 bp, Homo sapien
gaagttgcagacagcaacgatggag

SEQ ID NO: 867999 - DNA, 25 bp, Homo sapien
ctgaagttgcagacagcaacgatgg

SEQ ID NO: 868000 - DNA, 25 bp, Homo sapien
tcagagactccctctgcgcctggag

SEQ ID NO: 868001 - DNA, 25 bp, Homo sapien
ctgcaggtcaggcaccgcggctgtc

SEQ ID NO: 868002 - DNA, 25 bp, Homo sapien
tcaggcaccgcggctgtccccagca

SEQ ID NO: 868003 - DNA, 25 bp, Homo sapien
ccagcaaccctgttctcagagactc

SEQ ID NO: 868004 - DNA, 25 bp, Homo sapien
gactttaacagacgagctacacggt

SEQ ID NO: 868005 - DNA, 25 bp, Homo sapien
tacatctgtctctgcggcgataaac

SEQ ID NO: 868006 - DNA, 25 bp, Homo sapien
tctacttcaacgacaaataggtggg

SEQ ID NO: 868007 - DNA, 25 bp, Homo sapien
taaagggtgccaaggtgacaggcct

SEQ ID NO: 868008 - DNA, 25 bp, Homo sapien
gcagcccagaaatccaatgcgtcta

SEQ ID NO: 868009 - DNA, 25 bp, Homo sapien
gtctatttcaatatggcgccctgaa

SEQ ID NO: 868010 - DNA, 25 bp, Homo sapien
tgtgtctgaagtgagcttccacccg

SEQ ID NO: 868011 - DNA, 25 bp, Homo sapien
gagatgccaatactgcagcccagaa

SEQ ID NO: 868012 - DNA, 25 bp, Homo sapien
taccattccaatgggagcctctgcc

SEQ ID NO: 868013 - DNA, 25 bp, Homo sapien
gcttacaccatgaacaactgacccg

SEQ ID NO: 868014 - DNA, 25 bp, Homo sapien
aataccaggttagatgtctgtgccc

SEQ ID NO: 868015 - DNA, 25 bp, Homo sapien
cctatatgcgtcttatgtgtacaca

SEQ ID NO: 868016 - DNA, 25 bp, Homo sapien
taattgaggcacaactacctcctgc

SEQ ID NO: 868017 - DNA, 25 bp, Homo sapien
tctatcgagttaaacggaccccaca

SEQ ID NO: 868018 - DNA, 25 bp, Homo sapien
caagcactcattgacaaggccggac

SEQ ID NO: 868019 - DNA, 25 bp, Homo sapien
aacgttctaattcaccccggtcatg

SEQ ID NO: 868020 - DNA, 25 bp, Homo sapien
cacaggagacacagcgaaagctgac

SEQ ID NO: 868021 - DNA, 25 bp, Homo sapien
gaaagctgacccagaaggcaaacaa

SEQ ID NO: 868022 - DNA, 25 bp, Homo sapien
ggtgtttcaaacaactcccctgcta

SEQ ID NO: 868023 - DNA, 25 bp, Homo sapien
tgctacgcgaatcacagcgctgctg

SEQ ID NO: 868024 - DNA, 25 bp, Homo sapien
gccacagaagcagtacaaaaacagc

SEQ ID NO: 868025 - DNA, 25 bp, Homo sapien
aacagcgacttctttatccagccaa

SEQ ID NO: 868026 - DNA, 25 bp, Homo sapien
cgagcactgcgagagagagttccat

SEQ ID NO: 868027 - DNA, 25 bp, Homo sapien
ctccggtcacatccgtgaggtctgt

SEQ ID NO: 868028 - DNA, 25 bp, Homo sapien
gaaggaaacgctatgtgctgccaac

SEQ ID NO: 868029 - DNA, 25 bp, Homo sapien
aacgctgtgctaacagggtgaccca

SEQ ID NO: 868030 - DNA, 25 bp, Homo sapien
tcggcgtgcactggatctctacaag

SEQ ID NO: 868031 - DNA, 25 bp, Homo sapien
cattcgggtgccaattaagaggacg

SEQ ID NO: 868032 - DNA, 25 bp, Homo sapien
tcatggactccaccagccggttggt

SEQ ID NO: 868033 - DNA, 25 bp, Homo sapien
tactcgctggaggagaccatgaaca

SEQ ID NO: 868034 - DNA, 25 bp, Homo sapien
catgaacaggatggacgtgatcccg

SEQ ID NO: 868035 - DNA, 25 bp, Homo sapien
tgatcccgtcgaagcactggaacca

SEQ ID NO: 868036 - DNA, 25 bp, Homo sapien
cagctggccgatccggtccaagttg

SEQ ID NO: 868037 - DNA, 25 bp, Homo sapien
tggccgatccggtccaagttgtcca

SEQ ID NO: 868038 - DNA, 25 bp, Homo sapien
gtccaggaagtacttcaccgactcc

SEQ ID NO: 868039 - DNA, 25 bp, Homo sapien
tgtccaggaagtacttcaccgactc

SEQ ID NO: 868040 - DNA, 25 bp, Homo sapien
gagcgcaaccaccgaccacagagca

SEQ ID NO: 868041 - DNA, 25 bp, Homo sapien
gggagagcgcaaccaccgaccacag

SEQ ID NO: 868042 - DNA, 25 bp, Homo sapien
ggagagcgcaaccaccgaccacaga

SEQ ID NO: 868043 - DNA, 25 bp, Homo sapien
gagagcgcaaccaccgaccacagag

SEQ ID NO: 868044 - DNA, 25 bp, Homo sapien
gggatatctttttcttctgggcaac

SEQ ID NO: 868045 - DNA, 25 bp, Homo sapien
tcagtttcttctgggatatcttttt

SEQ ID NO: 868046 - DNA, 25 bp, Homo sapien
ttactcctgtgccataagtttttgt

SEQ ID NO: 868047 - DNA, 25 bp, Homo sapien
cttctgggatatctttttcttctgg

SEQ ID NO: 868048 - DNA, 25 bp, Homo sapien
gaccacgagctctgtaggtccggcg

SEQ ID NO: 868049 - DNA, 25 bp, Homo sapien
atccgaccacgagctctgtaggtcc

SEQ ID NO: 868050 - DNA, 25 bp, Homo sapien
gttaatccgaccacgagctctgtag

SEQ ID NO: 868051 - DNA, 25 bp, Homo sapien
tccgaccacgagctctgtaggtccg

SEQ ID NO: 868052 - DNA, 25 bp, Homo sapien
cagtgaccagagaatctacatctaa

SEQ ID NO: 868053 - DNA, 25 bp, Homo sapien
gttcacttggatatgctcagtgacc

SEQ ID NO: 868054 - DNA, 25 bp, Homo sapien
gctttgttcacttggatatgctcag

SEQ ID NO: 868055 - DNA, 25 bp, Homo sapien
tttgttcacttggatatgctcagtg

SEQ ID NO: 868056 - DNA, 25 bp, Homo sapien
tttcctctagggacagcgtcgagct

SEQ ID NO: 868057 - DNA, 25 bp, Homo sapien
caccagaggttagcttgtctgcaag

SEQ ID NO: 868058 - DNA, 25 bp, Homo sapien
gcgtggctttaccaagtcaccagag

SEQ ID NO: 868059 - DNA, 25 bp, Homo sapien
gtcgagctccctactgctggaccgt

SEQ ID NO: 868060 - DNA, 25 bp, Homo sapien
cagctattggttctcctttgaccga

SEQ ID NO: 868061 - DNA, 25 bp, Homo sapien
tcctttgaccgaatccttgaatttg

SEQ ID NO: 868062 - DNA, 25 bp, Homo sapien
cctctcaggacggaacccaaagaca

SEQ ID NO: 868063 - DNA, 25 bp, Homo sapien
caggatttacaatttgcagctattg

SEQ ID NO: 868064 - DNA, 25 bp, Homo sapien
cagaacactcgcagagaactgcggc

SEQ ID NO: 868065 - DNA, 25 bp, Homo sapien
tccagcccctccagaaaaaagcgaa

SEQ ID NO: 868066 - DNA, 25 bp, Homo sapien
ttccttaccttcattactgtcccta

SEQ ID NO: 868067 - DNA, 25 bp, Homo sapien
gaaaaaagcgaaagcggcagagaaa

SEQ ID NO: 868068 - DNA, 25 bp, Homo sapien
gcttcgtttctaggagaagttgtaa

SEQ ID NO: 868069 - DNA, 25 bp, Homo sapien
taagggcttcgtgttctgcactgct

SEQ ID NO: 868070 - DNA, 25 bp, Homo sapien
gagaagttgtaagggcttcgtgttc

SEQ ID NO: 868071 - DNA, 25 bp, Homo sapien
caacccaggcttcgtttctaggaga

SEQ ID NO: 868072 - DNA, 25 bp, Homo sapien
tcgtcacagaaggtgcacatggcgg

SEQ ID NO: 868073 - DNA, 25 bp, Homo sapien
tccagacacggtatggcggttccca

SEQ ID NO: 868074 - DNA, 25 bp, Homo sapien
ggcgctgcgcgactgctgctggaca

SEQ ID NO: 868075 - DNA, 25 bp, Homo sapien
gatcccaccgaatccagacacggta

SEQ ID NO: 868076 - DNA, 25 bp, Homo sapien
agcctctgaacccacccgtgtgcgg

SEQ ID NO: 868077 - DNA, 25 bp, Homo sapien
tagacgttaacttggccaagggcaa

SEQ ID NO: 868078 - DNA, 25 bp, Homo sapien
gagttagatccaatgacatttcctg

SEQ ID NO: 868079 - DNA, 25 bp, Homo sapien
ccacgccttctattctggagttaga

SEQ ID NO: 868080 - DNA, 25 bp, Homo sapien
atttggaaagaaaccacgctgcccg

SEQ ID NO: 868081 - DNA, 25 bp, Homo sapien
tccacccaggctgtacaaaagggag

SEQ ID NO: 868082 - DNA, 25 bp, Homo sapien
caatgccatgaagcacagagcggca

SEQ ID NO: 868083 - DNA, 25 bp, Homo sapien
caggaagtgcaccaggcccgtcctt

SEQ ID NO: 868084 - DNA, 25 bp, Homo sapien
tccgagccctgctcgtggagccatt

SEQ ID NO: 868085 - DNA, 25 bp, Homo sapien
gcgcggctccgaagcaggagagggc

SEQ ID NO: 868086 - DNA, 25 bp, Homo sapien
agccctgctcgtggagccattggtg

SEQ ID NO: 868087 - DNA, 25 bp, Homo sapien
cagctccgagccctgctcgtggagc

SEQ ID NO: 868088 - DNA, 25 bp, Homo sapien
aggactcagcgtgccgttcctccag

SEQ ID NO: 868089 - DNA, 25 bp, Homo sapien
gcgtgccgttcctccaggacgcaga

SEQ ID NO: 868090 - DNA, 25 bp, Homo sapien
aaagagcccttgtgtgctactgtgg

SEQ ID NO: 868091 - DNA, 25 bp, Homo sapien
actggcccaggactcagcgtgccgt

SEQ ID NO: 868092 - DNA, 25 bp, Homo sapien
gagaccacaagcagcctctgaagtc

SEQ ID NO: 868093 - DNA, 25 bp, Homo sapien
cttgagtgagagaccacaagcagcc

SEQ ID NO: 868094 - DNA, 25 bp, Homo sapien
gagagaccacaagcagcctctgaag

SEQ ID NO: 868095 - DNA, 25 bp, Homo sapien
gaccacaagcagcctctgaagtcat

SEQ ID NO: 868096 - DNA, 25 bp, Homo sapien
acacacacggtctcaacacagttca

SEQ ID NO: 868097 - DNA, 25 bp, Homo sapien
gcatttctcgaatattctgctgaca

SEQ ID NO: 868098 - DNA, 25 bp, Homo sapien
ttcccaggcccgtgggaggagtgct

SEQ ID NO: 868099 - DNA, 25 bp, Homo sapien
gacaagaggttagcaggacttcaca

SEQ ID NO: 868100 - DNA, 25 bp, Homo sapien
ccaggcagtctggtttattattcac

SEQ ID NO: 868101 - DNA, 25 bp, Homo sapien
ttccaggcgtgtgctcccgcatcca

SEQ ID NO: 868102 - DNA, 25 bp, Homo sapien
attccaggcgtgtgctcccgcatcc

SEQ ID NO: 868103 - DNA, 25 bp, Homo sapien
ccaggcgtgtgctcccgcatccagg

SEQ ID NO: 868104 - DNA, 25 bp, Homo sapien
gaggagagttgagattccgtatgaa

SEQ ID NO: 868105 - DNA, 25 bp, Homo sapien
cagaggagagttgagattccgtatg

SEQ ID NO: 868106 - DNA, 25 bp, Homo sapien
gttgagattccgtatgaagtctatt

SEQ ID NO: 868107 - DNA, 25 bp, Homo sapien
gagagttgagattccgtatgaagtc

SEQ ID NO: 868108 - DNA, 25 bp, Homo sapien
gtcgggctcagcgtttacttcacaa

SEQ ID NO: 868109 - DNA, 25 bp, Homo sapien
ttcacagtggttgtggtcgggctca

SEQ ID NO: 868110 - DNA, 25 bp, Homo sapien
tctgagacgccccagttgcccagta

SEQ ID NO: 868111 - DNA, 25 bp, Homo sapien
ggctcagcgtttacttcacaatcca

SEQ ID NO: 868112 - DNA, 25 bp, Homo sapien
gccgcctcgtcctcttagtgaatga

SEQ ID NO: 868113 - DNA, 25 bp, Homo sapien
aactgtaggtgagctgggtgaaccc

SEQ ID NO: 868114 - DNA, 25 bp, Homo sapien
ctgaagggaacactgagactgacca

SEQ ID NO: 868115 - DNA, 25 bp, Homo sapien
ggtcctcagaggcttaagcacgcgt

SEQ ID NO: 868116 - DNA, 25 bp, Homo sapien
ttgttgcctaacatagccattgagt

SEQ ID NO: 868117 - DNA, 25 bp, Homo sapien
cagccaccgtcacttcaaacatggt

SEQ ID NO: 868118 - DNA, 25 bp, Homo sapien
tcctgtgactcagtgttaaacgtgc

SEQ ID NO: 868119 - DNA, 25 bp, Homo sapien
ttgatatgatttaccagccaccgtc

SEQ ID NO: 868120 - DNA, 25 bp, Homo sapien
cacagggactgtcaaatgctgtcag

SEQ ID NO: 868121 - DNA, 25 bp, Homo sapien
tgagccttttatatagcatctgcct

SEQ ID NO: 868122 - DNA, 25 bp, Homo sapien
catcccgtgttttggttgttgatca

SEQ ID NO: 868123 - DNA, 25 bp, Homo sapien
caactaacggtccaaaatagtcatg

SEQ ID NO: 868124 - DNA, 25 bp, Homo sapien
tagagcttgcttggactgttacaca

SEQ ID NO: 868125 - DNA, 25 bp, Homo sapien
tgaaactcgcttctccggctgaaag

SEQ ID NO: 868126 - DNA, 25 bp, Homo sapien
tctcgtgcatcaacaagaacccttg

SEQ ID NO: 868127 - DNA, 25 bp, Homo sapien
aaggaatgccaagcttatctcgtgc

SEQ ID NO: 868128 - DNA, 25 bp, Homo sapien
tttcagaatactgccaaggaatgcc

SEQ ID NO: 868129 - DNA, 25 bp, Homo sapien
taacctcaccaagacagacgcacat

SEQ ID NO: 868130 - DNA, 25 bp, Homo sapien
cagtataacctcaccaagacagacg

SEQ ID NO: 868131 - DNA, 25 bp, Homo sapien
gtataacctcaccaagacagacgca

SEQ ID NO: 868132 - DNA, 25 bp, Homo sapien
tcagcagtataacctcaccaagaca

SEQ ID NO: 868133 - DNA, 25 bp, Homo sapien
caaaacgggagccaggggatcatgt

SEQ ID NO: 868134 - DNA, 25 bp, Homo sapien
gggatcatgttctagatttaacgtc

SEQ ID NO: 868135 - DNA, 25 bp, Homo sapien
catgttctagatttaacgtcaccat

SEQ ID NO: 868136 - DNA, 25 bp, Homo sapien
gagccaggggatcatgttctagatt

SEQ ID NO: 868137 - DNA, 25 bp, Homo sapien
gacggtctggttagagatgctccct

SEQ ID NO: 868138 - DNA, 25 bp, Homo sapien
cagacgtaatgatgaccaaagagta

SEQ ID NO: 868139 - DNA, 25 bp, Homo sapien
tgccttgaaccactgagtcagacgt

SEQ ID NO: 868140 - DNA, 25 bp, Homo sapien
tctgccgttggagaccatgcctagt

SEQ ID NO: 868141 - DNA, 25 bp, Homo sapien
aggccctgctaccatgctgcctgaa

SEQ ID NO: 868142 - DNA, 25 bp, Homo sapien
ggccctgctaccatgctgcctgaaa

SEQ ID NO: 868143 - DNA, 25 bp, Homo sapien
gccctgctaccatgctgcctgaaaa

SEQ ID NO: 868144 - DNA, 25 bp, Homo sapien
caggccctgctaccatgctgcctga

SEQ ID NO: 868145 - DNA, 25 bp, Homo sapien
actggctgtagtaggagagtgccca

SEQ ID NO: 868146 - DNA, 25 bp, Homo sapien
gtgtgggccgagctgactgtggcct

SEQ ID NO: 868147 - DNA, 25 bp, Homo sapien
tggccactggctgtagtaggagagt

SEQ ID NO: 868148 - DNA, 25 bp, Homo sapien
caggtgctgtgggttaccctggacc

SEQ ID NO: 868149 - DNA, 25 bp, Homo sapien
cactttcggtttccatctggtgtgc

SEQ ID NO: 868150 - DNA, 25 bp, Homo sapien
ttccatctggtgtgcttcccgaacc

SEQ ID NO: 868151 - DNA, 25 bp, Homo sapien
aaacggcagcactttcggtttccat

SEQ ID NO: 868152 - DNA, 25 bp, Homo sapien
ctggacccagggtgtgcaatgagta

SEQ ID NO: 868153 - DNA, 25 bp, Homo sapien
cagtcagcggacctacagtcaagga

SEQ ID NO: 868154 - DNA, 25 bp, Homo sapien
ctctcaaggaggaagccagtcagcg

SEQ ID NO: 868155 - DNA, 25 bp, Homo sapien
tacaatacagtaggcgctctgcact

SEQ ID NO: 868156 - DNA, 25 bp, Homo sapien
aaagcaagtggacaggaacatcggc

SEQ ID NO: 868157 - DNA, 25 bp, Homo sapien
catgcaaaacctatcgctacaaaaa

SEQ ID NO: 868158 - DNA, 25 bp, Homo sapien
gcacagagcacggaagtgacacaca

SEQ ID NO: 868159 - DNA, 25 bp, Homo sapien
aagaaagtcccaagcgctgtaaagc

SEQ ID NO: 868160 - DNA, 25 bp, Homo sapien
gatcgcttgaaactagcccaggaga

SEQ ID NO: 868161 - DNA, 25 bp, Homo sapien
gaggccagtcgttgcttaaaagaat

SEQ ID NO: 868162 - DNA, 25 bp, Homo sapien
ggctacttatctgactgaaggctga

SEQ ID NO: 868163 - DNA, 25 bp, Homo sapien
tcaggactttgacggcatatgcagg

SEQ ID NO: 868164 - DNA, 25 bp, Homo sapien
tagcagtaagggcaaaagcgtgttc

SEQ ID NO: 868165 - DNA, 25 bp, Homo sapien
acccatatttccctctgtcggagag

SEQ ID NO: 868166 - DNA, 25 bp, Homo sapien
ggacgctgacagtgggtaggattca

SEQ ID NO: 868167 - DNA, 25 bp, Homo sapien
ggagaaagcctagaattgggaaatc

SEQ ID NO: 868168 - DNA, 25 bp, Homo sapien
cagagacatccccttgcatcgttgt

SEQ ID NO: 868169 - DNA, 25 bp, Homo sapien
cctggagggaatctacagggcctga

SEQ ID NO: 868170 - DNA, 25 bp, Homo sapien
ggcggctcccaaagagagaacctgg

SEQ ID NO: 868171 - DNA, 25 bp, Homo sapien
gaggtggccctacaactctggcagg

SEQ ID NO: 868172 - DNA, 25 bp, Homo sapien
gggtgctgtgttcatgctcatacga

SEQ ID NO: 868173 - DNA, 25 bp, Homo sapien
aagttcacgaagtatctgaccagag

SEQ ID NO: 868174 - DNA, 25 bp, Homo sapien
ttcacgaagtatctgaccagagctc

SEQ ID NO: 868175 - DNA, 25 bp, Homo sapien
tcaaagttcacgaagtatctgacca

SEQ ID NO: 868176 - DNA, 25 bp, Homo sapien
caaagttcacgaagtatctgaccag

SEQ ID NO: 868177 - DNA, 25 bp, Homo sapien
tgtcctcgcctctaacttggtttcc

SEQ ID NO: 868178 - DNA, 25 bp, Homo sapien
gaaccccgactttatcaactctatg

SEQ ID NO: 868179 - DNA, 25 bp, Homo sapien
gaggacaaaggacgctatctaggtg

SEQ ID NO: 868180 - DNA, 25 bp, Homo sapien
tatctaggtgtaagcaaggctgcac

SEQ ID NO: 868181 - DNA, 25 bp, Homo sapien
ggctcacggtactgagagactggaa

SEQ ID NO: 868182 - DNA, 25 bp, Homo sapien
ccacaaatcttccagtgggaaatgg

SEQ ID NO: 868183 - DNA, 25 bp, Homo sapien
ttcttctaagctcagccggagggca

SEQ ID NO: 868184 - DNA, 25 bp, Homo sapien
ggttgggctcctatcccacaaatct

SEQ ID NO: 868185 - DNA, 25 bp, Homo sapien
gctggttcccgtccagtctccactg

SEQ ID NO: 868186 - DNA, 25 bp, Homo sapien
catccaggagggggctaagtgccaa

SEQ ID NO: 868187 - DNA, 25 bp, Homo sapien
atccccagaagctggcccgagttcc

SEQ ID NO: 868188 - DNA, 25 bp, Homo sapien
gagggggctaagtgccaagccccca

SEQ ID NO: 868189 - DNA, 25 bp, Homo sapien
tccccagaagctggcccgagttccc

SEQ ID NO: 868190 - DNA, 25 bp, Homo sapien
aggtgctgggcggggggcgcgcgtc

SEQ ID NO: 868191 - DNA, 25 bp, Homo sapien
ctgggtgcaggtgctgggcgggggg

SEQ ID NO: 868192 - DNA, 25 bp, Homo sapien
gggtgcaggtgctgggcggggggcg

SEQ ID NO: 868193 - DNA, 25 bp, Homo sapien
gtgctgggcggggggcgcgcgtcac

SEQ ID NO: 868194 - DNA, 25 bp, Homo sapien
tctggtcgaactcgcggccgtggat

SEQ ID NO: 868195 - DNA, 25 bp, Homo sapien
aggatcttcaccaggcgccggaccg

SEQ ID NO: 868196 - DNA, 25 bp, Homo sapien
cagcagcgccttctggtcgaactcg

SEQ ID NO: 868197 - DNA, 25 bp, Homo sapien
tgtcgaagatggtgtcgcggaactc

SEQ ID NO: 868198 - DNA, 25 bp, Homo sapien
gcgcgtcgatgtcgcggctacgcct

SEQ ID NO: 868199 - DNA, 25 bp, Homo sapien
cagcagcgcgtcgatgtcgcggcta

SEQ ID NO: 868200 - DNA, 25 bp, Homo sapien
cagcgcgtcgatgtcgcggctacgc

SEQ ID NO: 868201 - DNA, 25 bp, Homo sapien
ggccagcagcgcgtcgatgtcgcgg

SEQ ID NO: 868202 - DNA, 25 bp, Homo sapien
gccccgccggcctcggccggcagca

SEQ ID NO: 868203 - DNA, 25 bp, Homo sapien
cggcagcaggcagcggctgagggtc

SEQ ID NO: 868204 - DNA, 25 bp, Homo sapien
cgctgcccgccctgcgctcgcgggc

SEQ ID NO: 868205 - DNA, 25 bp, Homo sapien
ctccgcgtcgcgcgcgccgctgccc

SEQ ID NO: 868206 - DNA, 25 bp, Homo sapien
cgctcgcctcaggccgcgtccgccg

SEQ ID NO: 868207 - DNA, 25 bp, Homo sapien
gagggcgagcccgggccgaggcacc

SEQ ID NO: 868208 - DNA, 25 bp, Homo sapien
gctcgcctcaggccgcgtccgccgc

SEQ ID NO: 868209 - DNA, 25 bp, Homo sapien
gcgagcccgggccgaggcaccgccc

SEQ ID NO: 868210 - DNA, 25 bp, Homo sapien
ggagaaattcttctgctgtcggcaa

SEQ ID NO: 868211 - DNA, 25 bp, Homo sapien
ggacatctccacacgtgtcaatggg

SEQ ID NO: 868212 - DNA, 25 bp, Homo sapien
ctgtcggcaatattcgatttgagga

SEQ ID NO: 868213 - DNA, 25 bp, Homo sapien
atgacacattatggcattttatggg

SEQ ID NO: 868214 - DNA, 25 bp, Homo sapien
ccaagacgctgggattcccaatagg

SEQ ID NO: 868215 - DNA, 25 bp, Homo sapien
gcctggtatagggcccaagacgctg

SEQ ID NO: 868216 - DNA, 25 bp, Homo sapien
gtatagggcccaagacgctgggatt

SEQ ID NO: 868217 - DNA, 25 bp, Homo sapien
tagggcccaagacgctgggattccc

SEQ ID NO: 868218 - DNA, 25 bp, Homo sapien
ttctccactgcataggagaccctaa

SEQ ID NO: 868219 - DNA, 25 bp, Homo sapien
ctccactgcataggagaccctaaag

SEQ ID NO: 868220 - DNA, 25 bp, Homo sapien
tctccactgcataggagaccctaaa

SEQ ID NO: 868221 - DNA, 25 bp, Homo sapien
cgaggtgccctgaggatagctaagt

SEQ ID NO: 868222 - DNA, 25 bp, Homo sapien
ctgaggatagctaagtgtctccagg

SEQ ID NO: 868223 - DNA, 25 bp, Homo sapien
cctggataattgcagggcctcagcc

SEQ ID NO: 868224 - DNA, 25 bp, Homo sapien
acctggataattgcagggcctcagc

SEQ ID NO: 868225 - DNA, 25 bp, Homo sapien
cagtggtcgcccgtgttccagggaa

SEQ ID NO: 868226 - DNA, 25 bp, Homo sapien
gcagcggcaaagtgggcagtggtcg

SEQ ID NO: 868227 - DNA, 25 bp, Homo sapien
gtgagggcgcctgacctcagagacc

SEQ ID NO: 868228 - DNA, 25 bp, Homo sapien
gaccagtagccatgtttctgcccca

SEQ ID NO: 868229 - DNA, 25 bp, Homo sapien
tcacgtaacaccagatgccgtgttg

SEQ ID NO: 868230 - DNA, 25 bp, Homo sapien
tgccgtgttgggtgccatggtaaca

SEQ ID NO: 868231 - DNA, 25 bp, Homo sapien
gcttccggcaagatggtcctgccct

SEQ ID NO: 868232 - DNA, 25 bp, Homo sapien
tgccatggtaacagcacgcttccgg

SEQ ID NO: 868233 - DNA, 25 bp, Homo sapien
tctccccagttaggctctggccatg

SEQ ID NO: 868234 - DNA, 25 bp, Homo sapien
tctggccatggcgagaagaggtctg

SEQ ID NO: 868235 - DNA, 25 bp, Homo sapien
tggcgagaagaggtctgattattca

SEQ ID NO: 868236 - DNA, 25 bp, Homo sapien
ggtctgattattcatcgcctgatta

SEQ ID NO: 868237 - DNA, 25 bp, Homo sapien
cacagttccgtcagggatgacctcc

SEQ ID NO: 868238 - DNA, 25 bp, Homo sapien
ggtccagtatagcaaggttctgagg

SEQ ID NO: 868239 - DNA, 25 bp, Homo sapien
actgaggctgagagacgctgatcac

SEQ ID NO: 868240 - DNA, 25 bp, Homo sapien
tgtgaggtccagtatagcaaggttc

SEQ ID NO: 868241 - DNA, 25 bp, Homo sapien
cttggaagtgtcagggcccagtgca

SEQ ID NO: 868242 - DNA, 25 bp, Homo sapien
ggtgagctgggtcctgaacttccag

SEQ ID NO: 868243 - DNA, 25 bp, Homo sapien
aagagggtgagaatgctggctgccc

SEQ ID NO: 868244 - DNA, 25 bp, Homo sapien
tgggccctgccagtgaggtgagctg

SEQ ID NO: 868245 - DNA, 25 bp, Homo sapien
acttgagtgcatttgcatgtgcata

SEQ ID NO: 868246 - DNA, 25 bp, Homo sapien
tgcatgtatctgtgcatgacttgag

SEQ ID NO: 868247 - DNA, 25 bp, Homo sapien
tggagtgcatttgcatgtgcacgcg

SEQ ID NO: 868248 - DNA, 25 bp, Homo sapien
tgtatctgtgcatgactggagtgca

SEQ ID NO: 868249 - DNA, 25 bp, Homo sapien
atgagccccagaatccacgtgtggg

SEQ ID NO: 868250 - DNA, 25 bp, Homo sapien
tctcagggctttcgggccagtcctg

SEQ ID NO: 868251 - DNA, 25 bp, Homo sapien
acgtgtggggccacggctctcaggg

SEQ ID NO: 868252 - DNA, 25 bp, Homo sapien
agccctgccagtgtgcaccgtggca

SEQ ID NO: 868253 - DNA, 25 bp, Homo sapien
attcaggagcgggttctgacggaga

SEQ ID NO: 868254 - DNA, 25 bp, Homo sapien
caggagcgggttctgacggagaggg

SEQ ID NO: 868255 - DNA, 25 bp, Homo sapien
tcaagcacttcctacacgctccagg

SEQ ID NO: 868256 - DNA, 25 bp, Homo sapien
aagcacttcctacacgctccaggct

SEQ ID NO: 868257 - DNA, 25 bp, Homo sapien
gacggagcggccggcggtggtcagc

SEQ ID NO: 868258 - DNA, 25 bp, Homo sapien
acggagcggccggcggtggtcagca

SEQ ID NO: 868259 - DNA, 25 bp, Homo sapien
cttgccggcagacaccagtgatgag

SEQ ID NO: 868260 - DNA, 25 bp, Homo sapien
gccggcagacaccagtgatgaggtg

SEQ ID NO: 868261 - DNA, 25 bp, Homo sapien
tgcccacagcgtgagccccagcttc

SEQ ID NO: 868262 - DNA, 25 bp, Homo sapien
agggccccggctgtcttgccttggg

SEQ ID NO: 868263 - DNA, 25 bp, Homo sapien
gctcctgcccacagcgtgagcccca

SEQ ID NO: 868264 - DNA, 25 bp, Homo sapien
caagggccccggctgtcttgccttg

SEQ ID NO: 868265 - DNA, 25 bp, Homo sapien
agggacccaggttggggtgctcctg

SEQ ID NO: 868266 - DNA, 25 bp, Homo sapien
cctgtgcagaggaccttgttggcac

SEQ ID NO: 868267 - DNA, 25 bp, Homo sapien
ctcctgtgcagaggaccttgttggc

SEQ ID NO: 868268 - DNA, 25 bp, Homo sapien
tgtgcagaggaccttgttggcacca

SEQ ID NO: 868269 - DNA, 25 bp, Homo sapien
atggtaggtacccttgtctgctgga

SEQ ID NO: 868270 - DNA, 25 bp, Homo sapien
tgtaccatcacggattactgtagcc

SEQ ID NO: 868271 - DNA, 25 bp, Homo sapien
ttcccagatgtgagacccccctgag

SEQ ID NO: 868272 - DNA, 25 bp, Homo sapien
taaacaccaggtgtaaatgggcagg

SEQ ID NO: 868273 - DNA, 25 bp, Homo sapien
aaaaggagctgcaagccccactccg

SEQ ID NO: 868274 - DNA, 25 bp, Homo sapien
cttcaaggttagaagacccagaggc

SEQ ID NO: 868275 - DNA, 25 bp, Homo sapien
gcccaaagcgggcactcagaggcat

SEQ ID NO: 868276 - DNA, 25 bp, Homo sapien
ccactccgctcgcccaaagcgggca

SEQ ID NO: 868277 - DNA, 25 bp, Homo sapien
gctgctctagttcatcaacagagat

SEQ ID NO: 868278 - DNA, 25 bp, Homo sapien
gggagatcaatgggaacacaggcag

SEQ ID NO: 868279 - DNA, 25 bp, Homo sapien
tgtgcggcagtgacggtaatgggat

SEQ ID NO: 868280 - DNA, 25 bp, Homo sapien
aggcagctgcctgggtagggctgtg

SEQ ID NO: 868281 - DNA, 25 bp, Homo sapien
ctgccagaatgtccctatgagccct

SEQ ID NO: 868282 - DNA, 25 bp, Homo sapien
tcagcgtactggtcggtgaaggcct

SEQ ID NO: 868283 - DNA, 25 bp, Homo sapien
tgtgttttcctcctcagcgtactgg

SEQ ID NO: 868284 - DNA, 25 bp, Homo sapien
cctatgagccctctggtgtttttct

SEQ ID NO: 868285 - DNA, 25 bp, Homo sapien
ctggctgagtgactgagttaagggt

SEQ ID NO: 868286 - DNA, 25 bp, Homo sapien
tttctggctgagtgactgagttaag

SEQ ID NO: 868287 - DNA, 25 bp, Homo sapien
ctgggtttctggctgagtgactgag

SEQ ID NO: 868288 - DNA, 25 bp, Homo sapien
gctgagtgactgagttaagggtggg

SEQ ID NO: 868289 - DNA, 25 bp, Homo sapien
gggctgaagccgatgatgctggagg

SEQ ID NO: 868290 - DNA, 25 bp, Homo sapien
cgatgatgctggaggtctccttgga

SEQ ID NO: 868291 - DNA, 25 bp, Homo sapien
gaagccgatgatgctggaggtctcc

SEQ ID NO: 868292 - DNA, 25 bp, Homo sapien
tggaggtctccttggaaatcctcat

SEQ ID NO: 868293 - DNA, 25 bp, Homo sapien
taagcggtaaaaacccagcagagga

SEQ ID NO: 868294 - DNA, 25 bp, Homo sapien
tggtgctccagccattgcgtctgca

SEQ ID NO: 868295 - DNA, 25 bp, Homo sapien
cacagtcacctcaagatgcaagaac

SEQ ID NO: 868296 - DNA, 25 bp, Homo sapien
gcagaggattaacccatgcccatgg

SEQ ID NO: 868297 - DNA, 25 bp, Homo sapien
ggccaaactgctaggccaggtcagc

SEQ ID NO: 868298 - DNA, 25 bp, Homo sapien
tgtccccaggactggtagtcacctg

SEQ ID NO: 868299 - DNA, 25 bp, Homo sapien
tgtgtttatggtgagtgtgtcccca

SEQ ID NO: 868300 - DNA, 25 bp, Homo sapien
caagagaaatcatagcctggtacac

SEQ ID NO: 868301 - DNA, 25 bp, Homo sapien
tgtccttgacaacgcggagcagctc

SEQ ID NO: 868302 - DNA, 25 bp, Homo sapien
caggttccaccgtggcgtacaggca

SEQ ID NO: 868303 - DNA, 25 bp, Homo sapien
tccacccagatggtcttgcgctgct

SEQ ID NO: 868304 - DNA, 25 bp, Homo sapien
tgctcctcgccgatcttgtccttga

SEQ ID NO: 868305 - DNA, 25 bp, Homo sapien
gacgtctacgttttggctattggga

SEQ ID NO: 868306 - DNA, 25 bp, Homo sapien
cacagaccgacccttaggtgacgtc

SEQ ID NO: 868307 - DNA, 25 bp, Homo sapien
cacgggcgtgtatatgtctcttaca

SEQ ID NO: 868308 - DNA, 25 bp, Homo sapien
gatgggccctattgtgtgtattcac

SEQ ID NO: 868309 - DNA, 25 bp, Homo sapien
tcttctcacacacccggatgaagag

SEQ ID NO: 868310 - DNA, 25 bp, Homo sapien
acacccggatgaagagcacgatggg

SEQ ID NO: 868311 - DNA, 25 bp, Homo sapien
aagtctcttgtgcagccgatcccag

SEQ ID NO: 868312 - DNA, 25 bp, Homo sapien
ttgatcaagtctcttgtgcagccga

SEQ ID NO: 868313 - DNA, 25 bp, Homo sapien
ctcccgctcctgtgaaggtgcctgc

SEQ ID NO: 868314 - DNA, 25 bp, Homo sapien
tcccgctcctgtgaaggtgcctgca

SEQ ID NO: 868315 - DNA, 25 bp, Homo sapien
cctgtgaaggtgcctgcagcggggc

SEQ ID NO: 868316 - DNA, 25 bp, Homo sapien
gctcctgtgaaggtgcctgcagcgg

SEQ ID NO: 868317 - DNA, 25 bp, Homo sapien
tgagtctggacactccaggactctg

SEQ ID NO: 868318 - DNA, 25 bp, Homo sapien
ccgctgatccaggagatgagacccc

SEQ ID NO: 868319 - DNA, 25 bp, Homo sapien
agccacctgccgctgatccaggaga

SEQ ID NO: 868320 - DNA, 25 bp, Homo sapien
cccacatgagtctggacactccagg

SEQ ID NO: 868321 - DNA, 25 bp, Homo sapien
tccagtgacgcggacagagagcctt

SEQ ID NO: 868322 - DNA, 25 bp, Homo sapien
gtgacgcggacagagagccttttct

SEQ ID NO: 868323 - DNA, 25 bp, Homo sapien
tcttgccatccccaaggtcagcgtc

SEQ ID NO: 868324 - DNA, 25 bp, Homo sapien
ggagccctccagtgacgcggacaga

SEQ ID NO: 868325 - DNA, 25 bp, Homo sapien
tctctcgggagtagatgatggtctc

SEQ ID NO: 868326 - DNA, 25 bp, Homo sapien
ttggcggccacagcttcaatgttgg

SEQ ID NO: 868327 - DNA, 25 bp, Homo sapien
gaggaactcatctcttgtgacgata

SEQ ID NO: 868328 - DNA, 25 bp, Homo sapien
gggcgatgcattcgaacgcgttggg

SEQ ID NO: 868329 - DNA, 25 bp, Homo sapien
gacttgcagatggtgaactccatgg

SEQ ID NO: 868330 - DNA, 25 bp, Homo sapien
ctgacttgcagatggtgaactccat

SEQ ID NO: 868331 - DNA, 25 bp, Homo sapien
acttgcagatggtgaactccatggc

SEQ ID NO: 868332 - DNA, 25 bp, Homo sapien
ttgcagatggtgaactccatggcac

SEQ ID NO: 868333 - DNA, 25 bp, Homo sapien
ggatgaggctgaggttcttgcccag

SEQ ID NO: 868334 - DNA, 25 bp, Homo sapien
agtagaaggcgcgtaccaggctgta

SEQ ID NO: 868335 - DNA, 25 bp, Homo sapien
ccagcacggtgggtgtgaagagcac

SEQ ID NO: 868336 - DNA, 25 bp, Homo sapien
tgcaccagcgtcttggccagcacgg

SEQ ID NO: 868337 - DNA, 25 bp, Homo sapien
agcggactccccgagatgatgcgga

SEQ ID NO: 868338 - DNA, 25 bp, Homo sapien
gcttctcagtcaagagcttggtggc

SEQ ID NO: 868339 - DNA, 25 bp, Homo sapien
tatacttgttctcggacctgctgac

SEQ ID NO: 868340 - DNA, 25 bp, Homo sapien
gatgcggacccgctcgttgctgttc

SEQ ID NO: 868341 - DNA, 25 bp, Homo sapien
gattgtctacccacctgtcactgag

SEQ ID NO: 868342 - DNA, 25 bp, Homo sapien
aaatcggtaggtgctccggagagcc

SEQ ID NO: 868343 - DNA, 25 bp, Homo sapien
taatgaggacctgatctggcctaga

SEQ ID NO: 868344 - DNA, 25 bp, Homo sapien
aagtgggatttgcttcccgcaggca

SEQ ID NO: 868345 - DNA, 25 bp, Homo sapien
aaaggaagcttgctcgcgagagacg

SEQ ID NO: 868346 - DNA, 25 bp, Homo sapien
tgttgaaagcgcttcttctggctgc

SEQ ID NO: 868347 - DNA, 25 bp, Homo sapien
gggtcgcttgttgaaagcgcttctt

SEQ ID NO: 868348 - DNA, 25 bp, Homo sapien
aaaaggaagcttgctcgcgagagac

SEQ ID NO: 868349 - DNA, 25 bp, Homo sapien
ccatgctaacgctttcttagggaaa

SEQ ID NO: 868350 - DNA, 25 bp, Homo sapien
gtcctcaagcccctccatgctaacg

SEQ ID NO: 868351 - DNA, 25 bp, Homo sapien
tggtgagaactggagacctgtcctc

SEQ ID NO: 868352 - DNA, 25 bp, Homo sapien
caggaggggagaacacaatgatgct

SEQ ID NO: 868353 - DNA, 25 bp, Homo sapien
tggtagagcaaaggcctgcagtcca

SEQ ID NO: 868354 - DNA, 25 bp, Homo sapien
gatggtagagcaaaggcctgcagtc

SEQ ID NO: 868355 - DNA, 25 bp, Homo sapien
ccagggatggtagagcaaaggcctg

SEQ ID NO: 868356 - DNA, 25 bp, Homo sapien
agggatggtagagcaaaggcctgca

SEQ ID NO: 868357 - DNA, 25 bp, Homo sapien
ccggagtgcccgcagggtgtggtgg

SEQ ID NO: 868358 - DNA, 25 bp, Homo sapien
gtggtgggtgccgtctacctcctcc

SEQ ID NO: 868359 - DNA, 25 bp, Homo sapien
cggctgcctcggtgcatcaggcgct

SEQ ID NO: 868360 - DNA, 25 bp, Homo sapien
ctcggtgcatcaggcgctgcagttt

SEQ ID NO: 868361 - DNA, 25 bp, Homo sapien
cctctgtaaatctggtgtgatgatg

SEQ ID NO: 868362 - DNA, 25 bp, Homo sapien
tccgactctgcgtagggatggccct

SEQ ID NO: 868363 - DNA, 25 bp, Homo sapien
cctgaggtgtggtgttatggtctca

SEQ ID NO: 868364 - DNA, 25 bp, Homo sapien
gatgatgcttgccttcgaggactgg

SEQ ID NO: 868365 - DNA, 25 bp, Homo sapien
gctgggtatggtgcccatatccagg

SEQ ID NO: 868366 - DNA, 25 bp, Homo sapien
cccatatccaggtcatggtctgtga

SEQ ID NO: 868367 - DNA, 25 bp, Homo sapien
ccaggtcatggtctgtgaaagggtc

SEQ ID NO: 868368 - DNA, 25 bp, Homo sapien
tatccaggtcatggtctgtgaaagg

SEQ ID NO: 868369 - DNA, 25 bp, Homo sapien
ttcagccggatgtagaacgagtccc

SEQ ID NO: 868370 - DNA, 25 bp, Homo sapien
cactcgtgcctgtcctggtacatgg

SEQ ID NO: 868371 - DNA, 25 bp, Homo sapien
tgcacaacatcgtcacacttcaggg

SEQ ID NO: 868372 - DNA, 25 bp, Homo sapien
ggtacatggtgtcacggacgtgcac

SEQ ID NO: 868373 - DNA, 25 bp, Homo sapien
gaattccagacttgcagggctgtgc

SEQ ID NO: 868374 - DNA, 25 bp, Homo sapien
tgtgctgctgcgcagctccgggctt

SEQ ID NO: 868375 - DNA, 25 bp, Homo sapien
tgcaggcccacggattttctgctgg

SEQ ID NO: 868376 - DNA, 25 bp, Homo sapien
gaggtgctgcccacatcatattctg

SEQ ID NO: 868377 - DNA, 25 bp, Homo sapien
tctcgcctcggatgcagccttctag

SEQ ID NO: 868378 - DNA, 25 bp, Homo sapien
tctggatggtccagtgggcttcctc

SEQ ID NO: 868379 - DNA, 25 bp, Homo sapien
ttgaccttgtagtgcagcgtgacgg

SEQ ID NO: 868380 - DNA, 25 bp, Homo sapien
tgtgtccaacgggacactctgcctc

SEQ ID NO: 868381 - DNA, 25 bp, Homo sapien
agaagggcccaacaatgccgacggt

SEQ ID NO: 868382 - DNA, 25 bp, Homo sapien
agcgagaccgctctctgtacattgg

SEQ ID NO: 868383 - DNA, 25 bp, Homo sapien
cctgcaccctgggagcttgcaggat

SEQ ID NO: 868384 - DNA, 25 bp, Homo sapien
aaagactagctcagtgccaacaggg

SEQ ID NO: 868385 - DNA, 25 bp, Homo sapien
ccaggcttgaccgagtgcacgaagc

SEQ ID NO: 868386 - DNA, 25 bp, Homo sapien
ttctcggccagagagccaggcttga

SEQ ID NO: 868387 - DNA, 25 bp, Homo sapien
ccacagaggtgaccgaaggccggaa

SEQ ID NO: 868388 - DNA, 25 bp, Homo sapien
cattcagcgtcgtgtgctgcaccga

SEQ ID NO: 868389 - DNA, 25 bp, Homo sapien
accccggtggcatggcctcctgtgg

SEQ ID NO: 868390 - DNA, 25 bp, Homo sapien
atggctaagggaagtgagagctcac

SEQ ID NO: 868391 - DNA, 25 bp, Homo sapien
cgagaaggcccttaatggctaaggg

SEQ ID NO: 868392 - DNA, 25 bp, Homo sapien
tggtcatcaggcgcctgggtgtcct

SEQ ID NO: 868393 - DNA, 25 bp, Homo sapien
ctcaaccccggcttccccttcactg

SEQ ID NO: 868394 - DNA, 25 bp, Homo sapien
ccaggccctcggattggtgggagga

SEQ ID NO: 868395 - DNA, 25 bp, Homo sapien
acctgctccaggtcgtaggcatcca

SEQ ID NO: 868396 - DNA, 25 bp, Homo sapien
gagagaacttcctgaacatgaggtt

SEQ ID NO: 868397 - DNA, 25 bp, Homo sapien
gaaggagtagcgttcgtgactgtca

SEQ ID NO: 868398 - DNA, 25 bp, Homo sapien
gatgcttccccattaaggaggacca

SEQ ID NO: 868399 - DNA, 25 bp, Homo sapien
cgtttcatcggttggcagccttagc

SEQ ID NO: 868400 - DNA, 25 bp, Homo sapien
tctctttaacacttggtagcgctga

SEQ ID NO: 868401 - DNA, 25 bp, Homo sapien
catctttcgtttcatcggttggcag

SEQ ID NO: 868402 - DNA, 25 bp, Homo sapien
ggctggcagggcacacctggaggac

SEQ ID NO: 868403 - DNA, 25 bp, Homo sapien
tggcagggcacacctggaggactct

SEQ ID NO: 868404 - DNA, 25 bp, Homo sapien
ggcacacctggaggactctgagcca

SEQ ID NO: 868405 - DNA, 25 bp, Homo sapien
agggcacacctggaggactctgagc

SEQ ID NO: 868406 - DNA, 25 bp, Homo sapien
cctctgcacagcagccggatgggcc

SEQ ID NO: 868407 - DNA, 25 bp, Homo sapien
gcacagcagccggatgggcccccat

SEQ ID NO: 868408 - DNA, 25 bp, Homo sapien
cagcagccggatgggcccccattac

SEQ ID NO: 868409 - DNA, 25 bp, Homo sapien
ctctgcacagcagccggatgggccc

SEQ ID NO: 868410 - DNA, 25 bp, Homo sapien
cctcccggatctgagaggcacgtac

SEQ ID NO: 868411 - DNA, 25 bp, Homo sapien
accctcccggatctgagaggcacgt

SEQ ID NO: 868412 - DNA, 25 bp, Homo sapien
ggaccctcccggatctgagaggcac

SEQ ID NO: 868413 - DNA, 25 bp, Homo sapien
caggaccctcccggatctgagaggc

SEQ ID NO: 868414 - DNA, 25 bp, Homo sapien
gctgtcattgtcttcttcgactgtg

SEQ ID NO: 868415 - DNA, 25 bp, Homo sapien
ccgccgctgtcattgtcttcttcga

SEQ ID NO: 868416 - DNA, 25 bp, Homo sapien
catccagatctaaggcgtcaaaccc

SEQ ID NO: 868417 - DNA, 25 bp, Homo sapien
tctaaggcgtcaaacccgccgctgt

SEQ ID NO: 868418 - DNA, 25 bp, Homo sapien
tctctcactcttctccgacatggta

SEQ ID NO: 868419 - DNA, 25 bp, Homo sapien
tcactcttctccgacatggtacagg

SEQ ID NO: 868420 - DNA, 25 bp, Homo sapien
tcttctccgacatggtacaggacag

SEQ ID NO: 868421 - DNA, 25 bp, Homo sapien
tctccgacatggtacaggacagaga

SEQ ID NO: 868422 - DNA, 25 bp, Homo sapien
cgatggggcgcgtcctccttgtagc

SEQ ID NO: 868423 - DNA, 25 bp, Homo sapien
ccttgtagcgtctgacgatggagtc

SEQ ID NO: 868424 - DNA, 25 bp, Homo sapien
tctgacgatggagtcgtttcccggg

SEQ ID NO: 868425 - DNA, 25 bp, Homo sapien
gcgcgtcctccttgtagcgtctgac

SEQ ID NO: 868426 - DNA, 25 bp, Homo sapien
cgcctcctactcaggcggcatggag

SEQ ID NO: 868427 - DNA, 25 bp, Homo sapien
gacacacacacgttacgggtgcata

SEQ ID NO: 868428 - DNA, 25 bp, Homo sapien
cataaatattacacacgcagggact

SEQ ID NO: 868429 - DNA, 25 bp, Homo sapien
aattcaatgcaaaatcgtgcccgcc

SEQ ID NO: 868430 - DNA, 25 bp, Homo sapien
gcagccgccgagcttgaagcacatc

SEQ ID NO: 868431 - DNA, 25 bp, Homo sapien
cagccgccgagcttgaagcacatct

SEQ ID NO: 868432 - DNA, 25 bp, Homo sapien
cgcagccgccgagcttgaagcacat

SEQ ID NO: 868433 - DNA, 25 bp, Homo sapien
taaacatggtgaacagtgtgggcct

SEQ ID NO: 868434 - DNA, 25 bp, Homo sapien
gccatggtgcacaggctgagctcaa

SEQ ID NO: 868435 - DNA, 25 bp, Homo sapien
tgtgggcacctgctctaaacatggt

SEQ ID NO: 868436 - DNA, 25 bp, Homo sapien
tggagggcaacctttgaaaccaggc

SEQ ID NO: 868437 - DNA, 25 bp, Homo sapien
ctagggctggcgtccgtgccttctt

SEQ ID NO: 868438 - DNA, 25 bp, Homo sapien
caggagctagggctggcgtccgtgc

SEQ ID NO: 868439 - DNA, 25 bp, Homo sapien
ggcagagatccgcaggagctagggc

SEQ ID NO: 868440 - DNA, 25 bp, Homo sapien
gcagagatccgcaggagctagggct

SEQ ID NO: 868441 - DNA, 25 bp, Homo sapien
tttgccaacatatcgcagctcccag

SEQ ID NO: 868442 - DNA, 25 bp, Homo sapien
agcctgggtcaaagctggacaacgc

SEQ ID NO: 868443 - DNA, 25 bp, Homo sapien
acaacgccatgtgtctctgaggact

SEQ ID NO: 868444 - DNA, 25 bp, Homo sapien
tcatttgccaacatatcgcagctcc

SEQ ID NO: 868445 - DNA, 25 bp, Homo sapien
gaaaatctgatgttcgcttcaggct

SEQ ID NO: 868446 - DNA, 25 bp, Homo sapien
tgaaaatctgatgttcgcttcaggc

SEQ ID NO: 868447 - DNA, 25 bp, Homo sapien
cttcaggctgatgggggatttggct

SEQ ID NO: 868448 - DNA, 25 bp, Homo sapien
cttgaaaatctgatgttcgcttcag

SEQ ID NO: 868449 - DNA, 25 bp, Homo sapien
tgcccttcaggttcatcctgcgctg

SEQ ID NO: 868450 - DNA, 25 bp, Homo sapien
gcaggaagtacttgctgtcttcagg

SEQ ID NO: 868451 - DNA, 25 bp, Homo sapien
tcaggtgactcctccgaggtggaag

SEQ ID NO: 868452 - DNA, 25 bp, Homo sapien
tcctgagagatgatggttactggca

SEQ ID NO: 868453 - DNA, 25 bp, Homo sapien
taagcactgcgagtactgtgtctga

SEQ ID NO: 868454 - DNA, 25 bp, Homo sapien
tgctctccaggttgacgatgcaggc

SEQ ID NO: 868455 - DNA, 25 bp, Homo sapien
tccagctcgcggatctgcttcctgt

SEQ ID NO: 868456 - DNA, 25 bp, Homo sapien
ctgagcttcatctcgggagtggaag

SEQ ID NO: 868457 - DNA, 25 bp, Homo sapien
ccagggtcgagcacttgagctccag

SEQ ID NO: 868458 - DNA, 25 bp, Homo sapien
agtcctttcccagggtcgagcactt

SEQ ID NO: 868459 - DNA, 25 bp, Homo sapien
tgcagcatgaccgtgttcatgcggt

SEQ ID NO: 868460 - DNA, 25 bp, Homo sapien
tgaccgtgttcatgcggtgcttgta

SEQ ID NO: 868461 - DNA, 25 bp, Homo sapien
ccagggcctccttgcggtcgtgttc

SEQ ID NO: 868462 - DNA, 25 bp, Homo sapien
caggttgtagatcctgttgaccagc

SEQ ID NO: 868463 - DNA, 25 bp, Homo sapien
ggtcgtgttccaagatgtccaggat

SEQ ID NO: 868464 - DNA, 25 bp, Homo sapien
tcctcctgcaggttgtagatcctgt

SEQ ID NO: 868465 - DNA, 25 bp, Homo sapien
tcctccatcttattcaaccggtgct

SEQ ID NO: 868466 - DNA, 25 bp, Homo sapien
agcatttcattctcccgctccagtt

SEQ ID NO: 868467 - DNA, 25 bp, Homo sapien
tcaaccggtgctttagctgatcgat

SEQ ID NO: 868468 - DNA, 25 bp, Homo sapien
ccttcttgggccgattttcaatgtc

SEQ ID NO: 868469 - DNA, 25 bp, Homo sapien
gcagctcgcagcgttgcaggtcctt

SEQ ID NO: 868470 - DNA, 25 bp, Homo sapien
catcttgtagtaccgctcctggaag

SEQ ID NO: 868471 - DNA, 25 bp, Homo sapien
tcctggaaggttagcagctccacgc

SEQ ID NO: 868472 - DNA, 25 bp, Homo sapien
tcatcaggaagtgcgtgaggccctc

SEQ ID NO: 868473 - DNA, 25 bp, Homo sapien
ctctttcccagtcaccagtttgtac

SEQ ID NO: 868474 - DNA, 25 bp, Homo sapien
tggtggagaatctccgagtgggctc

SEQ ID NO: 868475 - DNA, 25 bp, Homo sapien
cagtttgtacagttctgggtaataa

SEQ ID NO: 868476 - DNA, 25 bp, Homo sapien
tggagaatctccgagtgggctcttt

SEQ ID NO: 868477 - DNA, 25 bp, Homo sapien
ttggtatgtagaatgtccaacagcc

SEQ ID NO: 868478 - DNA, 25 bp, Homo sapien
tggtatgtagaatgtccaacagccg

SEQ ID NO: 868479 - DNA, 25 bp, Homo sapien
gtatgtagaatgtccaacagccggc

SEQ ID NO: 868480 - DNA, 25 bp, Homo sapien
ggtatgtagaatgtccaacagccgg

SEQ ID NO: 868481 - DNA, 25 bp, Homo sapien
gagcatgtgccggttacactccaca

SEQ ID NO: 868482 - DNA, 25 bp, Homo sapien
tcatcctgctcatcaatgaccttac

SEQ ID NO: 868483 - DNA, 25 bp, Homo sapien
cagggttgatatagcggctgagcat

SEQ ID NO: 868484 - DNA, 25 bp, Homo sapien
ttacactgacgcaggtagggcgtga

SEQ ID NO: 868485 - DNA, 25 bp, Homo sapien
gaaacaccattgtctaactcaagat

SEQ ID NO: 868486 - DNA, 25 bp, Homo sapien
tgtagtaggccttgaaattgggagt

SEQ ID NO: 868487 - DNA, 25 bp, Homo sapien
actcaagatgatgaagacttactcc

SEQ ID NO: 868488 - DNA, 25 bp, Homo sapien
gatcttgctacccttgttgacaatc

SEQ ID NO: 868489 - DNA, 25 bp, Homo sapien
ctgcatttattgaggctgccatgtg

SEQ ID NO: 868490 - DNA, 25 bp, Homo sapien
tggttttgatattggcctcagaatg

SEQ ID NO: 868491 - DNA, 25 bp, Homo sapien
tcctgaaagggttgtcgattttgtc

SEQ ID NO: 868492 - DNA, 25 bp, Homo sapien
tattgatagggttacactacctgac

SEQ ID NO: 868493 - DNA, 25 bp, Homo sapien
tcaggtgacatcaaggaccgagggt

SEQ ID NO: 868494 - DNA, 25 bp, Homo sapien
taccagtagcgtagaaacaagcagg

SEQ ID NO: 868495 - DNA, 25 bp, Homo sapien
agtgcttttggccatgcaacctgca

SEQ ID NO: 868496 - DNA, 25 bp, Homo sapien
ggtctactgtgatttgcagcccaaa

SEQ ID NO: 868497 - DNA, 25 bp, Homo sapien
acacaggggctgctatcccgccatt

SEQ ID NO: 868498 - DNA, 25 bp, Homo sapien
caggggctgctatcccgccattggg

SEQ ID NO: 868499 - DNA, 25 bp, Homo sapien
tgctatcccgccattggggtgtgac

SEQ ID NO: 868500 - DNA, 25 bp, Homo sapien
ctatcccgccattggggtgtgactt

SEQ ID NO: 868501 - DNA, 25 bp, Homo sapien
catctggacttgcagtgcttgggat

SEQ ID NO: 868502 - DNA, 25 bp, Homo sapien
ttgagccaggctcccgttgcatctg

SEQ ID NO: 868503 - DNA, 25 bp, Homo sapien
tacactttccggctggatcttgtcg

SEQ ID NO: 868504 - DNA, 25 bp, Homo sapien
ggatcttgtcgtcccttgagccagg

SEQ ID NO: 868505 - DNA, 25 bp, Homo sapien
cactggcagagtggaccacaccagg

SEQ ID NO: 868506 - DNA, 25 bp, Homo sapien
gactcaggcaaagggccaatggctc

SEQ ID NO: 868507 - DNA, 25 bp, Homo sapien
tgaagctccccaagaggccacatca

SEQ ID NO: 868508 - DNA, 25 bp, Homo sapien
aagctccccaagaggccacatcatt

SEQ ID NO: 868509 - DNA, 25 bp, Homo sapien
cacatcatttttagctgactcaggc

SEQ ID NO: 868510 - DNA, 25 bp, Homo sapien
ctggatttcaggtccgtgcacaggg

SEQ ID NO: 868511 - DNA, 25 bp, Homo sapien
cacagggctgattgacagctctgat

SEQ ID NO: 868512 - DNA, 25 bp, Homo sapien
cagggctgattgacagctctgatgg

SEQ ID NO: 868513 - DNA, 25 bp, Homo sapien
tcaggtccgtgcacagggctgattg

SEQ ID NO: 868514 - DNA, 25 bp, Homo sapien
ttttacgttgtacccacaggtgcag

SEQ ID NO: 868515 - DNA, 25 bp, Homo sapien
tttacgttgtacccacaggtgcaga

SEQ ID NO: 868516 - DNA, 25 bp, Homo sapien
ttacgttgtacccacaggtgcagag

SEQ ID NO: 868517 - DNA, 25 bp, Homo sapien
gttttacgttgtacccacaggtgca

SEQ ID NO: 868518 - DNA, 25 bp, Homo sapien
cagggagctatgaaggagcccactt

SEQ ID NO: 868519 - DNA, 25 bp, Homo sapien
aaaactgcacccagaaacggtcgat

SEQ ID NO: 868520 - DNA, 25 bp, Homo sapien
gagcccacttaggaagccaggattt

SEQ ID NO: 868521 - DNA, 25 bp, Homo sapien
taaggtgacaggagcatattgcagg

SEQ ID NO: 868522 - DNA, 25 bp, Homo sapien
ccagctccagccgtgattaatttac

SEQ ID NO: 868523 - DNA, 25 bp, Homo sapien
gggactcagttacactcaggaataa

SEQ ID NO: 868524 - DNA, 25 bp, Homo sapien
taaccaatatgctttaatacctagt

SEQ ID NO: 868525 - DNA, 25 bp, Homo sapien
gagttaataaagatagaggtgactt

SEQ ID NO: 868526 - DNA, 25 bp, Homo sapien
gacagctccattaagagtcccttgc

SEQ ID NO: 868527 - DNA, 25 bp, Homo sapien
accaggacagctccattaagagtcc

SEQ ID NO: 868528 - DNA, 25 bp, Homo sapien
cattaagagtcccttgcaaggacac

SEQ ID NO: 868529 - DNA, 25 bp, Homo sapien
ccctttcagatacttggattttgat

SEQ ID NO: 868530 - DNA, 25 bp, Homo sapien
taaaaccagggaacgcacagtgaag

SEQ ID NO: 868531 - DNA, 25 bp, Homo sapien
tatattgggataagaatggctcgtc

SEQ ID NO: 868532 - DNA, 25 bp, Homo sapien
gaggagctgccacacgaaatattgg

SEQ ID NO: 868533 - DNA, 25 bp, Homo sapien
taacgcggaggtgataacacagacc

SEQ ID NO: 868534 - DNA, 25 bp, Homo sapien
gactgaacgtggcaatcctcatcct

SEQ ID NO: 868535 - DNA, 25 bp, Homo sapien
tggaccctcgtaggtcagtcctctg

SEQ ID NO: 868536 - DNA, 25 bp, Homo sapien
gccacctggaccctcgtaggtcagt

SEQ ID NO: 868537 - DNA, 25 bp, Homo sapien
ctgctctgcggctgccccaagaaca

SEQ ID NO: 868538 - DNA, 25 bp, Homo sapien
tgaggactgcaatatgctccacgcc

SEQ ID NO: 868539 - DNA, 25 bp, Homo sapien
ggtgagctgaagaaaccagaccctg

SEQ ID NO: 868540 - DNA, 25 bp, Homo sapien
ttaagacgggcacgggaatgatgcc

SEQ ID NO: 868541 - DNA, 25 bp, Homo sapien
cacagtcattgagaggccacgaaca

SEQ ID NO: 868542 - DNA, 25 bp, Homo sapien
aactctccaagcctcgaatgcttta

SEQ ID NO: 868543 - DNA, 25 bp, Homo sapien
gggaaagtggcttgaactctccaag

SEQ ID NO: 868544 - DNA, 25 bp, Homo sapien
tttattataagtggccattttcttc

SEQ ID NO: 868545 - DNA, 25 bp, Homo sapien
ttacctgtcgaatgggagtgatgac

SEQ ID NO: 868546 - DNA, 25 bp, Homo sapien
gatacgagaggaaaccgcaataccc

SEQ ID NO: 868547 - DNA, 25 bp, Homo sapien
tggaatcatggcatactcactgtag

SEQ ID NO: 868548 - DNA, 25 bp, Homo sapien
gcagccatgtagacgcaccaatgaa

SEQ ID NO: 868549 - DNA, 25 bp, Homo sapien
aggacacaagatgggcaccagccca

SEQ ID NO: 868550 - DNA, 25 bp, Homo sapien
gagttgctagcttcgacagagaccc

SEQ ID NO: 868551 - DNA, 25 bp, Homo sapien
gactgacctgctcatattccgtgtg

SEQ ID NO: 868552 - DNA, 25 bp, Homo sapien
taattacaaacgaagcatgctgact

SEQ ID NO: 868553 - DNA, 25 bp, Homo sapien
tgaaggcccgtcaagctgtttgtac

SEQ ID NO: 868554 - DNA, 25 bp, Homo sapien
tggatactacacatgcccctctctg

SEQ ID NO: 868555 - DNA, 25 bp, Homo sapien
tcttaaggaatgaggccagtcccag

SEQ ID NO: 868556 - DNA, 25 bp, Homo sapien
taatgcccactaaggaatggccccg

SEQ ID NO: 868557 - DNA, 25 bp, Homo sapien
tgcctttgataccaccatgaccgag

SEQ ID NO: 868558 - DNA, 25 bp, Homo sapien
ctgcctgcaaagcagatagtgcagg

SEQ ID NO: 868559 - DNA, 25 bp, Homo sapien
tgcctgcaaagcagatagtgcaggg

SEQ ID NO: 868560 - DNA, 25 bp, Homo sapien
cctgcaaagcagatagtgcagggcc

SEQ ID NO: 868561 - DNA, 25 bp, Homo sapien
ctgcaaagcagatagtgcagggcct

SEQ ID NO: 868562 - DNA, 25 bp, Homo sapien
cttcaaagtggttcagcgagctcat

SEQ ID NO: 868563 - DNA, 25 bp, Homo sapien
gcattatgcacaggctgagcgctca

SEQ ID NO: 868564 - DNA, 25 bp, Homo sapien
ggcaagtaacatccacacgggtcca

SEQ ID NO: 868565 - DNA, 25 bp, Homo sapien
tgatggccgcaagataacatggacg

SEQ ID NO: 868566 - DNA, 25 bp, Homo sapien
gaaagtatgtcataggctgggaggg

SEQ ID NO: 868567 - DNA, 25 bp, Homo sapien
aggcctccggcttcctccaggcgac

SEQ ID NO: 868568 - DNA, 25 bp, Homo sapien
tggggcgctcatgctccgccagcca

SEQ ID NO: 868569 - DNA, 25 bp, Homo sapien
ctccaggcgaccaggccctccgtcc

SEQ ID NO: 868570 - DNA, 25 bp, Homo sapien
gccttggcatattttgcaccctgta

SEQ ID NO: 868571 - DNA, 25 bp, Homo sapien
aaaatcgacatgtttccaacctttg

SEQ ID NO: 868572 - DNA, 25 bp, Homo sapien
tgcattgttagctgcttggacccaa

SEQ ID NO: 868573 - DNA, 25 bp, Homo sapien
aatttcatgaacctctgagcttgca

SEQ ID NO: 868574 - DNA, 25 bp, Homo sapien
cagttcagccatgagcatggcctgg

SEQ ID NO: 868575 - DNA, 25 bp, Homo sapien
ccatgagcatggcctgggtcttatc

SEQ ID NO: 868576 - DNA, 25 bp, Homo sapien
agttcagccatgagcatggcctggg

SEQ ID NO: 868577 - DNA, 25 bp, Homo sapien
tgagcatggcctgggtcttatccat

SEQ ID NO: 868578 - DNA, 25 bp, Homo sapien
tagcatgctttggcccccagtgggc

SEQ ID NO: 868579 - DNA, 25 bp, Homo sapien
tctccctcgggctcctggagatgat

SEQ ID NO: 868580 - DNA, 25 bp, Homo sapien
ctgcacctcacctctccctcgggct

SEQ ID NO: 868581 - DNA, 25 bp, Homo sapien
ctgaccccactttagcatgctttgg

SEQ ID NO: 868582 - DNA, 25 bp, Homo sapien
gaactcgactttgtccagccaaatg

SEQ ID NO: 868583 - DNA, 25 bp, Homo sapien
aattgctacttgctggtggaacaca

SEQ ID NO: 868584 - DNA, 25 bp, Homo sapien
tgaggtgcggcaccaaggaactcac

SEQ ID NO: 868585 - DNA, 25 bp, Homo sapien
ccttgaatgctggtaatttagtccc

SEQ ID NO: 868586 - DNA, 25 bp, Homo sapien
gcaaagagatgatacaggctcctac

SEQ ID NO: 868587 - DNA, 25 bp, Homo sapien
accagcaaagagatgatacaggctc

SEQ ID NO: 868588 - DNA, 25 bp, Homo sapien
cagcaaagagatgatacaggctcct

SEQ ID NO: 868589 - DNA, 25 bp, Homo sapien
aaaccagcaaagagatgatacaggc

SEQ ID NO: 868590 - DNA, 25 bp, Homo sapien
tcaaagtccttcttctttgaaatag

SEQ ID NO: 868591 - DNA, 25 bp, Homo sapien
ttcaaagtccttcttctttgaaata

SEQ ID NO: 868592 - DNA, 25 bp, Homo sapien
ggtggcctgagaacgttctctggta

SEQ ID NO: 868593 - DNA, 25 bp, Homo sapien
cattccctgtcactctggtagcaaa

SEQ ID NO: 868594 - DNA, 25 bp, Homo sapien
tcccagcggttggactctggaagcc

SEQ ID NO: 868595 - DNA, 25 bp, Homo sapien
tataaatgtggtcccagcggttgga

SEQ ID NO: 868596 - DNA, 25 bp, Homo sapien
gtgttattgtaattccacgattaca

SEQ ID NO: 868597 - DNA, 25 bp, Homo sapien
gatgaggatgcagagtgttattgta

SEQ ID NO: 868598 - DNA, 25 bp, Homo sapien
tattgtaattccacgattacaatct

SEQ ID NO: 868599 - DNA, 25 bp, Homo sapien
tgaggatgcagagtgttattgtaat

SEQ ID NO: 868600 - DNA, 25 bp, Homo sapien
caggtctgggaccatctctatcttc

SEQ ID NO: 868601 - DNA, 25 bp, Homo sapien
gcaggtctgggaccatctctatctt

SEQ ID NO: 868602 - DNA, 25 bp, Homo sapien
ctgcaggtctgggaccatctctatc

SEQ ID NO: 868603 - DNA, 25 bp, Homo sapien
tgcaggtctgggaccatctctatct

SEQ ID NO: 868604 - DNA, 25 bp, Homo sapien
tagaatctgtgtcatgctgacagtt

SEQ ID NO: 868605 - DNA, 25 bp, Homo sapien
tgttccatttcgtgtcctgctgtgt

SEQ ID NO: 868606 - DNA, 25 bp, Homo sapien
ctgtgtcatgctgacagttcacggg

SEQ ID NO: 868607 - DNA, 25 bp, Homo sapien
ttcctgtctgttccatttcgtgtcc

SEQ ID NO: 868608 - DNA, 25 bp, Homo sapien
agcctccgacagaaaccctgcagag

SEQ ID NO: 868609 - DNA, 25 bp, Homo sapien
ctctgctccccttgcacacgggctg

SEQ ID NO: 868610 - DNA, 25 bp, Homo sapien
tccaccagcctccgacagaaaccct

SEQ ID NO: 868611 - DNA, 25 bp, Homo sapien
ctccaccagcctccgacagaaaccc

SEQ ID NO: 868612 - DNA, 25 bp, Homo sapien
aatggaacagggctagcatccgcca

SEQ ID NO: 868613 - DNA, 25 bp, Homo sapien
tgtggcatgcttgcagacatactca

SEQ ID NO: 868614 - DNA, 25 bp, Homo sapien
catccgccatctagtgatttctgtg

SEQ ID NO: 868615 - DNA, 25 bp, Homo sapien
agttcctctgggataacactgggcc

SEQ ID NO: 868616 - DNA, 25 bp, Homo sapien
atagtccccggagatttgatttctt

SEQ ID NO: 868617 - DNA, 25 bp, Homo sapien
ctggatagtccccggagatttgatt

SEQ ID NO: 868618 - DNA, 25 bp, Homo sapien
gatagtccccggagatttgatttct

SEQ ID NO: 868619 - DNA, 25 bp, Homo sapien
ggatagtccccggagatttgatttc

SEQ ID NO: 868620 - DNA, 25 bp, Homo sapien
gcaccagccaacgtcaaaggtcagg

SEQ ID NO: 868621 - DNA, 25 bp, Homo sapien
ccagccaacgtcaaaggtcaggaga

SEQ ID NO: 868622 - DNA, 25 bp, Homo sapien
aggcaccagccaacgtcaaaggtca

SEQ ID NO: 868623 - DNA, 25 bp, Homo sapien
tccttggggaactccccacgatgca

SEQ ID NO: 868624 - DNA, 25 bp, Homo sapien
aaatgagctgcatcccactgaagcg

SEQ ID NO: 868625 - DNA, 25 bp, Homo sapien
tctgccgagctttcaggccaaggtt

SEQ ID NO: 868626 - DNA, 25 bp, Homo sapien
cactgaagcgttcagtctgccgagc

SEQ ID NO: 868627 - DNA, 25 bp, Homo sapien
gttcaatcacaaggtacagctctgc

SEQ ID NO: 868628 - DNA, 25 bp, Homo sapien
tgctcgactgacatgacagatgggt

SEQ ID NO: 868629 - DNA, 25 bp, Homo sapien
gccgggccctgcgtagatactatgt

SEQ ID NO: 868630 - DNA, 25 bp, Homo sapien
aacttaaccaaggatcgcaggcctg

SEQ ID NO: 868631 - DNA, 25 bp, Homo sapien
tataccaagtgatatgccgggccct

SEQ ID NO: 868632 - DNA, 25 bp, Homo sapien
ctcttcttccgtgaatagtgaatgt

SEQ ID NO: 868633 - DNA, 25 bp, Homo sapien
ttttggagtgggtcgggtggcagaa

SEQ ID NO: 868634 - DNA, 25 bp, Homo sapien
aatgtgttttggagtgggtcgggtg

SEQ ID NO: 868635 - DNA, 25 bp, Homo sapien
tttcctgccaacacgctttcctcag

SEQ ID NO: 868636 - DNA, 25 bp, Homo sapien
taagacaagtgtctcacccagttcg

SEQ ID NO: 868637 - DNA, 25 bp, Homo sapien
gcacccatcgcgaaacagattcaag

SEQ ID NO: 868638 - DNA, 25 bp, Homo sapien
tatggaaaccggctcgaggtcaggc

SEQ ID NO: 868639 - DNA, 25 bp, Homo sapien
aaaaggagatcctcactctggcatg

SEQ ID NO: 868640 - DNA, 25 bp, Homo sapien
cacggtggaaggcaacggcgaagca

SEQ ID NO: 868641 - DNA, 25 bp, Homo sapien
gaaggcaacggcgaagcagacacgt

SEQ ID NO: 868642 - DNA, 25 bp, Homo sapien
cggtggaaggcaacggcgaagcaga

SEQ ID NO: 868643 - DNA, 25 bp, Homo sapien
tggaaggcaacggcgaagcagacac

SEQ ID NO: 868644 - DNA, 25 bp, Homo sapien
cttccaagccagcaccaggggagct

SEQ ID NO: 868645 - DNA, 25 bp, Homo sapien
gcaccaggggagctgcctggcccat

SEQ ID NO: 868646 - DNA, 25 bp, Homo sapien
cagcaccaggggagctgcctggccc

SEQ ID NO: 868647 - DNA, 25 bp, Homo sapien
tccaagccagcaccaggggagctgc

SEQ ID NO: 868648 - DNA, 25 bp, Homo sapien
tcagcaggctttcctattctcactg

SEQ ID NO: 868649 - DNA, 25 bp, Homo sapien
cagcaggctttcctattctcactgg

SEQ ID NO: 868650 - DNA, 25 bp, Homo sapien
ttgtgggtgcccttaacagacgtct

SEQ ID NO: 868651 - DNA, 25 bp, Homo sapien
tgtgggtgcccttaacagacgtctg

SEQ ID NO: 868652 - DNA, 25 bp, Homo sapien
ctttgtgggtgcccttaacagacgt

SEQ ID NO: 868653 - DNA, 25 bp, Homo sapien
tgggtgcccttaacagacgtctgca

SEQ ID NO: 868654 - DNA, 25 bp, Homo sapien
gtggctcctctaggcccccagagct

SEQ ID NO: 868655 - DNA, 25 bp, Homo sapien
tgtacttgcaacctccctcctctga

SEQ ID NO: 868656 - DNA, 25 bp, Homo sapien
gaagccctccggtctctctctggct

SEQ ID NO: 868657 - DNA, 25 bp, Homo sapien
gttgcagtccgcacctcaccacgct

SEQ ID NO: 868658 - DNA, 25 bp, Homo sapien
agccattcacctttagtgttctgct

SEQ ID NO: 868659 - DNA, 25 bp, Homo sapien
atgtgtacgaggaccacaccccaac

SEQ ID NO: 868660 - DNA, 25 bp, Homo sapien
acaccccaacctcctcgtccattca

SEQ ID NO: 868661 - DNA, 25 bp, Homo sapien
tgtgtctccatgtgtacgaggacca

SEQ ID NO: 868662 - DNA, 25 bp, Homo sapien
cgtcctgcggatggaggtcattctc

SEQ ID NO: 868663 - DNA, 25 bp, Homo sapien
ctcgtcctgcggatggaggtcattc

SEQ ID NO: 868664 - DNA, 25 bp, Homo sapien
tcgtcctgcggatggaggtcattct

SEQ ID NO: 868665 - DNA, 25 bp, Homo sapien
tcaaagacccggagtgaaatcctct

SEQ ID NO: 868666 - DNA, 25 bp, Homo sapien
tcaggcctgagaggtgttctcaaag

SEQ ID NO: 868667 - DNA, 25 bp, Homo sapien
gattccaaggatgattccaagtggg

SEQ ID NO: 868668 - DNA, 25 bp, Homo sapien
cctgtgggagcaagttcgtaccgtc

SEQ ID NO: 868669 - DNA, 25 bp, Homo sapien
agctgtgatcatgccactgcactcc

SEQ ID NO: 868670 - DNA, 25 bp, Homo sapien
gaacccaggagtttgggctgtagtg

SEQ ID NO: 868671 - DNA, 25 bp, Homo sapien
ccagcctggctcacagagcgagaac

SEQ ID NO: 868672 - DNA, 25 bp, Homo sapien
actccagcctggctcacagagcgag

SEQ ID NO: 868673 - DNA, 25 bp, Homo sapien
cacctgccctgaggtgagaccccat

SEQ ID NO: 868674 - DNA, 25 bp, Homo sapien
atgacgctggcacgcactggggctc

SEQ ID NO: 868675 - DNA, 25 bp, Homo sapien
gggcgcggatgacgctggcacgcac

SEQ ID NO: 868676 - DNA, 25 bp, Homo sapien
ttttcgtcctctggggcgcggatga

SEQ ID NO: 868677 - DNA, 25 bp, Homo sapien
ctttcccagacttgcctgggctctc

SEQ ID NO: 868678 - DNA, 25 bp, Homo sapien
tcctttcccagacttgcctgggctc

SEQ ID NO: 868679 - DNA, 25 bp, Homo sapien
cccagacttgcctgggctctcagcc

SEQ ID NO: 868680 - DNA, 25 bp, Homo sapien
ttcccagacttgcctgggctctcag

SEQ ID NO: 868681 - DNA, 25 bp, Homo sapien
tgaagcaagcatctgtagcgcactg

SEQ ID NO: 868682 - DNA, 25 bp, Homo sapien
tggtggccacggtgaacccagactc

SEQ ID NO: 868683 - DNA, 25 bp, Homo sapien
tctgtagcgcactgaggacctgaga

SEQ ID NO: 868684 - DNA, 25 bp, Homo sapien
ctgaggacctgagaaaccggggctc

SEQ ID NO: 868685 - DNA, 25 bp, Homo sapien
tgtatcggccaaatcttagaaggag

SEQ ID NO: 868686 - DNA, 25 bp, Homo sapien
tttctgaagtgaggactgtatcggc

SEQ ID NO: 868687 - DNA, 25 bp, Homo sapien
cttagaaggagaagatcacgaaaaa

SEQ ID NO: 868688 - DNA, 25 bp, Homo sapien
gaaggagaagatcacgaaaaagcgt

SEQ ID NO: 868689 - DNA, 25 bp, Homo sapien
tccagaaacaccacacccaaggaag

SEQ ID NO: 868690 - DNA, 25 bp, Homo sapien
cagatggtaacagacacaggttgcc

SEQ ID NO: 868691 - DNA, 25 bp, Homo sapien
atggccacacggttcccatctgcgt

SEQ ID NO: 868692 - DNA, 25 bp, Homo sapien
acaccacacccaaggaagatatttg

SEQ ID NO: 868693 - DNA, 25 bp, Homo sapien
gagcattgaacaacgactgagtggg

SEQ ID NO: 868694 - DNA, 25 bp, Homo sapien
ggctgctcgtacagcattatcttat

SEQ ID NO: 868695 - DNA, 25 bp, Homo sapien
tgagcattgaacaacgactgagtgg

SEQ ID NO: 868696 - DNA, 25 bp, Homo sapien
tggccttggctgctcgtacagcatt

SEQ ID NO: 868697 - DNA, 25 bp, Homo sapien
aagacaagtgttccggagggctgca

SEQ ID NO: 868698 - DNA, 25 bp, Homo sapien
caatctgcactggactttgtgggag

SEQ ID NO: 868699 - DNA, 25 bp, Homo sapien
gggattcatttaccaccggcagtgt

SEQ ID NO: 868700 - DNA, 25 bp, Homo sapien
tagagccacctatgaaagcagactg

SEQ ID NO: 868701 - DNA, 25 bp, Homo sapien
taaatcgcgatgtgtgcagcccgtt

SEQ ID NO: 868702 - DNA, 25 bp, Homo sapien
tgtgagacgcgttttttccaaagcc

SEQ ID NO: 868703 - DNA, 25 bp, Homo sapien
tatgacagccccaacttgtgagacg

SEQ ID NO: 868704 - DNA, 25 bp, Homo sapien
tcttctcgttagctccgtgagggca

SEQ ID NO: 868705 - DNA, 25 bp, Homo sapien
tcccctgcccgaggttgcagagtgc

SEQ ID NO: 868706 - DNA, 25 bp, Homo sapien
gcatagacgtgtgggaggcgcacat

SEQ ID NO: 868707 - DNA, 25 bp, Homo sapien
taagcacagcgagatgaataattca

SEQ ID NO: 868708 - DNA, 25 bp, Homo sapien
gatccaggatggcatagacgtgtgg

SEQ ID NO: 868709 - DNA, 25 bp, Homo sapien
ggctggacagccgcatcaatgcttc

SEQ ID NO: 868710 - DNA, 25 bp, Homo sapien
caggctggacagccgcatcaatgct

SEQ ID NO: 868711 - DNA, 25 bp, Homo sapien
caacaggctggacagccgcatcaat

SEQ ID NO: 868712 - DNA, 25 bp, Homo sapien
aacaggctggacagccgcatcaatg

SEQ ID NO: 868713 - DNA, 25 bp, Homo sapien
tcatttcctgtgttttctggcccat

SEQ ID NO: 868714 - DNA, 25 bp, Homo sapien
ccgtcatttcctgtgttttctggcc

SEQ ID NO: 868715 - DNA, 25 bp, Homo sapien
gtgctctgccgtcatttcctgtgtt

SEQ ID NO: 868716 - DNA, 25 bp, Homo sapien
tgctctgccgtcatttcctgtgttt

SEQ ID NO: 868717 - DNA, 25 bp, Homo sapien
gtcccaggggtctccattgaactca

SEQ ID NO: 868718 - DNA, 25 bp, Homo sapien
aatcgtcttcattgcagtcttctgg

SEQ ID NO: 868719 - DNA, 25 bp, Homo sapien
gcatgccaaggtgaccatgccctaa

SEQ ID NO: 868720 - DNA, 25 bp, Homo sapien
tcttctttgtcccaggggtctccat

SEQ ID NO: 868721 - DNA, 25 bp, Homo sapien
ggaggcctggtcctgggggctgatc

SEQ ID NO: 868722 - DNA, 25 bp, Homo sapien
ctgtagggggtggggactctggagg

SEQ ID NO: 868723 - DNA, 25 bp, Homo sapien
tgtagggggtggggactctggaggc

SEQ ID NO: 868724 - DNA, 25 bp, Homo sapien
ctctggaggcctggtcctgggggct

SEQ ID NO: 868725 - DNA, 25 bp, Homo sapien
cttcctgagcctgctagagggattt

SEQ ID NO: 868726 - DNA, 25 bp, Homo sapien
cctgctagagggattttctcggtca

SEQ ID NO: 868727 - DNA, 25 bp, Homo sapien
cctgagcctgctagagggattttct

SEQ ID NO: 868728 - DNA, 25 bp, Homo sapien
agagggattttctcggtcatagcca

SEQ ID NO: 868729 - DNA, 25 bp, Homo sapien
aaagccactggcaacgccaaacaga

SEQ ID NO: 868730 - DNA, 25 bp, Homo sapien
aattgtaccgctcccataacaacag

SEQ ID NO: 868731 - DNA, 25 bp, Homo sapien
tcaatttggccgtaattgtaccgct

SEQ ID NO: 868732 - DNA, 25 bp, Homo sapien
gagggcttataacagggttgtccac

SEQ ID NO: 868733 - DNA, 25 bp, Homo sapien
gacttttacagtcgtccaggatctg

SEQ ID NO: 868734 - DNA, 25 bp, Homo sapien
caggttgttgaagggaaagccatca

SEQ ID NO: 868735 - DNA, 25 bp, Homo sapien
gagtgctgtctaatgtgctccctga

SEQ ID NO: 868736 - DNA, 25 bp, Homo sapien
tccatcctggctagacttgagtctg

SEQ ID NO: 868737 - DNA, 25 bp, Homo sapien
gaaagccagggctggctgcatgtct

SEQ ID NO: 868738 - DNA, 25 bp, Homo sapien
gccagggctggctgcatgtctccac

SEQ ID NO: 868739 - DNA, 25 bp, Homo sapien
tggaggggacaaggttggaaagcca

SEQ ID NO: 868740 - DNA, 25 bp, Homo sapien
agccagggctggctgcatgtctcca

SEQ ID NO: 868741 - DNA, 25 bp, Homo sapien
tccagtgtttgccccacagcatcat

SEQ ID NO: 868742 - DNA, 25 bp, Homo sapien
ctgtaggtggatttgaaaatgttcc

SEQ ID NO: 868743 - DNA, 25 bp, Homo sapien
cagctgtttagggagccggcgtcct

SEQ ID NO: 868744 - DNA, 25 bp, Homo sapien
gccggcgtcctgctgacagctgtag

SEQ ID NO: 868745 - DNA, 25 bp, Homo sapien
tacccacagctgtttagggagccgg

SEQ ID NO: 868746 - DNA, 25 bp, Homo sapien
tgtgtaacccaaactgcattcaagg

SEQ ID NO: 868747 - DNA, 25 bp, Homo sapien
agctgcgatgctgactgggagaaaa

SEQ ID NO: 868748 - DNA, 25 bp, Homo sapien
gcttctgagaataaggacctgttgg

SEQ ID NO: 868749 - DNA, 25 bp, Homo sapien
taattatccaggtaactcagggcct

SEQ ID NO: 868750 - DNA, 25 bp, Homo sapien
gaagggagtgttgtccgatttcgat

SEQ ID NO: 868751 - DNA, 25 bp, Homo sapien
tctaaacttgtaagagacagcaggc

SEQ ID NO: 868752 - DNA, 25 bp, Homo sapien
ggccacacaatgcagtccagctttt

SEQ ID NO: 868753 - DNA, 25 bp, Homo sapien
tgtccgatttcgatgcaatgccagc

SEQ ID NO: 868754 - DNA, 25 bp, Homo sapien
actctagcacagccatcaagtatga

SEQ ID NO: 868755 - DNA, 25 bp, Homo sapien
agcacagccatcaagtatgatttct

SEQ ID NO: 868756 - DNA, 25 bp, Homo sapien
tagcacagccatcaagtatgatttc

SEQ ID NO: 868757 - DNA, 25 bp, Homo sapien
tctagcacagccatcaagtatgatt

SEQ ID NO: 868758 - DNA, 25 bp, Homo sapien
ggccccagctactgaattggctgag

SEQ ID NO: 868759 - DNA, 25 bp, Homo sapien
tgtggccccagctactgaattggct

SEQ ID NO: 868760 - DNA, 25 bp, Homo sapien
gtgggaggattgcctgagcctagga

SEQ ID NO: 868761 - DNA, 25 bp, Homo sapien
gattgcctgagcctaggaggttgag

SEQ ID NO: 868762 - DNA, 25 bp, Homo sapien
tcaggtcattggaggacagagttca

SEQ ID NO: 868763 - DNA, 25 bp, Homo sapien
tgcaacccaaggaaggagcgagaag

SEQ ID NO: 868764 - DNA, 25 bp, Homo sapien
gagaccaacattaggaggtgttccg

SEQ ID NO: 868765 - DNA, 25 bp, Homo sapien
agaatgctggaccttagcaggcagg

SEQ ID NO: 868766 - DNA, 25 bp, Homo sapien
tcaagctactgatgttctagaaagt

SEQ ID NO: 868767 - DNA, 25 bp, Homo sapien
gaattggtatacagttcaagctact

SEQ ID NO: 868768 - DNA, 25 bp, Homo sapien
tcttattgactcataaaagctgtaa

SEQ ID NO: 868769 - DNA, 25 bp, Homo sapien
tatgtgatggcccataagaaaaagg

SEQ ID NO: 868770 - DNA, 25 bp, Homo sapien
ggccgccgcggctggtgggcgctgc

SEQ ID NO: 868771 - DNA, 25 bp, Homo sapien
gcgctgcagctgcacttgctccggg

SEQ ID NO: 868772 - DNA, 25 bp, Homo sapien
gccgcggctggtgggcgctgctggc

SEQ ID NO: 868773 - DNA, 25 bp, Homo sapien
ggcgctgcagctgcacttgctccgg

SEQ ID NO: 868774 - DNA, 25 bp, Homo sapien
ggtttccggtgagtgacatccagaa

SEQ ID NO: 868775 - DNA, 25 bp, Homo sapien
ctgagtcttcgcaccgcagggtctg

SEQ ID NO: 868776 - DNA, 25 bp, Homo sapien
gaagacttggaaatatcaagtgcca

SEQ ID NO: 868777 - DNA, 25 bp, Homo sapien
tgccagtcgctgtgaaaagcctttt

SEQ ID NO: 868778 - DNA, 25 bp, Homo sapien
taagttcattgacgggtttctgttc

SEQ ID NO: 868779 - DNA, 25 bp, Homo sapien
aatttcagataggttgtcacaaatt

SEQ ID NO: 868780 - DNA, 25 bp, Homo sapien
gctctgtgaaatgtgtaatatatcc

SEQ ID NO: 868781 - DNA, 25 bp, Homo sapien
tatggcttatgaaagtgtacagatc

SEQ ID NO: 868782 - DNA, 25 bp, Homo sapien
ttctggcagtgttcagtagacctcc

SEQ ID NO: 868783 - DNA, 25 bp, Homo sapien
gacctcctagattcagcttgcattc

SEQ ID NO: 868784 - DNA, 25 bp, Homo sapien
tgttcagtagacctcctagattcag

SEQ ID NO: 868785 - DNA, 25 bp, Homo sapien
gtagacctcctagattcagcttgca

SEQ ID NO: 868786 - DNA, 25 bp, Homo sapien
gtttttccttgttgtgcatggaagc

SEQ ID NO: 868787 - DNA, 25 bp, Homo sapien
tgcatggaagcacctttggttcatg

SEQ ID NO: 868788 - DNA, 25 bp, Homo sapien
tccttgttgtgcatggaagcacctt

SEQ ID NO: 868789 - DNA, 25 bp, Homo sapien
ggttcatgtttaggatatgagcatt

SEQ ID NO: 868790 - DNA, 25 bp, Homo sapien
tgggaatgggccagagatttactgt

SEQ ID NO: 868791 - DNA, 25 bp, Homo sapien
gaaatgaatagtaatccaaccagac

SEQ ID NO: 868792 - DNA, 25 bp, Homo sapien
aaatatgggactgatcactactgcc

SEQ ID NO: 868793 - DNA, 25 bp, Homo sapien
gatttactgtcttaccaaggtggag

SEQ ID NO: 868794 - DNA, 25 bp, Homo sapien
cacagagggcatgttattaggaact

SEQ ID NO: 868795 - DNA, 25 bp, Homo sapien
tagaacttcgggtctccacggaatg

SEQ ID NO: 868796 - DNA, 25 bp, Homo sapien
ccacggaatgtggtttgatcactgc

SEQ ID NO: 868797 - DNA, 25 bp, Homo sapien
gcttatgctgatacctatttcctgg

SEQ ID NO: 868798 - DNA, 25 bp, Homo sapien
tccagtcttaagatgcacatgtgaa

SEQ ID NO: 868799 - DNA, 25 bp, Homo sapien
tgatgccatgtagcttgtcatgttg

SEQ ID NO: 868800 - DNA, 25 bp, Homo sapien
tagcttgtcatgttgtcagactctg

SEQ ID NO: 868801 - DNA, 25 bp, Homo sapien
cctgtcacatgaaagagtttgatgc

SEQ ID NO: 868802 - DNA, 25 bp, Homo sapien
gaagtgcacttcagttttgtcgttc

SEQ ID NO: 868803 - DNA, 25 bp, Homo sapien
caggatgttgaagtgcacttcagtt

SEQ ID NO: 868804 - DNA, 25 bp, Homo sapien
atgtgactggtctgcgcttctttct

SEQ ID NO: 868805 - DNA, 25 bp, Homo sapien
gactggtctgcgcttctttctcctt

SEQ ID NO: 868806 - DNA, 25 bp, Homo sapien
aggagctggctaggcatgtgttctg

SEQ ID NO: 868807 - DNA, 25 bp, Homo sapien
tgtgcttggctattggacctgagtg

SEQ ID NO: 868808 - DNA, 25 bp, Homo sapien
ctaggcatgtgttctgcggggacca

SEQ ID NO: 868809 - DNA, 25 bp, Homo sapien
ttggctattggacctgagtgactga

SEQ ID NO: 868810 - DNA, 25 bp, Homo sapien
accaccagtcagtgaggtgtttggg

SEQ ID NO: 868811 - DNA, 25 bp, Homo sapien
gaaccaccagtcagtgaggtgtttg

SEQ ID NO: 868812 - DNA, 25 bp, Homo sapien
cttgaaccaccagtcagtgaggtgt

SEQ ID NO: 868813 - DNA, 25 bp, Homo sapien
tgaaccaccagtcagtgaggtgttt

SEQ ID NO: 868814 - DNA, 25 bp, Homo sapien
accttcttagatcttccccattctt

SEQ ID NO: 868815 - DNA, 25 bp, Homo sapien
actgggcctggctgccatttgtaaa

SEQ ID NO: 868816 - DNA, 25 bp, Homo sapien
tcttaacacttatgtggtgtttcca

SEQ ID NO: 868817 - DNA, 25 bp, Homo sapien
atgttgcttgcaattacaggcctga

SEQ ID NO: 868818 - DNA, 25 bp, Homo sapien
aagttaaatcatgttccagcattca

SEQ ID NO: 868819 - DNA, 25 bp, Homo sapien
taaatcatgttccagcattcatggt

SEQ ID NO: 868820 - DNA, 25 bp, Homo sapien
cacgctcaccccattgtcatgagga

SEQ ID NO: 868821 - DNA, 25 bp, Homo sapien
ttccctctagagtgaacttgatcct

SEQ ID NO: 868822 - DNA, 25 bp, Homo sapien
caggctcttagttatgtgtggtaga

SEQ ID NO: 868823 - DNA, 25 bp, Homo sapien
tctttttccccatgacttggtcatg

SEQ ID NO: 868824 - DNA, 25 bp, Homo sapien
aactttctttgctattggattcatg

SEQ ID NO: 868825 - DNA, 25 bp, Homo sapien
tggcatctgggtttcaggtgcatgc

SEQ ID NO: 868826 - DNA, 25 bp, Homo sapien
tatattcctggatagccccagccaa

SEQ ID NO: 868827 - DNA, 25 bp, Homo sapien
gaatgaagctcttaagttatctaga

SEQ ID NO: 868828 - DNA, 25 bp, Homo sapien
ggtgcttgatagacaatctgttgaa

SEQ ID NO: 868829 - DNA, 25 bp, Homo sapien
cagccaaatacctgacacagcaggt

SEQ ID NO: 868830 - DNA, 25 bp, Homo sapien
aaattgccatatgccaagatctggg

SEQ ID NO: 868831 - DNA, 25 bp, Homo sapien
cagttgtgctataaagcaaattgcc

SEQ ID NO: 868832 - DNA, 25 bp, Homo sapien
ttgggcccgatataccgcttccaaa

SEQ ID NO: 868833 - DNA, 25 bp, Homo sapien
caaattctcgttaaaacgtccagca

SEQ ID NO: 868834 - DNA, 25 bp, Homo sapien
agctctccacagagaactcatccat

SEQ ID NO: 868835 - DNA, 25 bp, Homo sapien
aagctctccacagagaactcatcca

SEQ ID NO: 868836 - DNA, 25 bp, Homo sapien
ccacctccttgtaggagctcaccct

SEQ ID NO: 868837 - DNA, 25 bp, Homo sapien
gatcagatccttctaaaactgtctc

SEQ ID NO: 868838 - DNA, 25 bp, Homo sapien
aggagctcaccctgatgaaggttat

SEQ ID NO: 868839 - DNA, 25 bp, Homo sapien
tggcaactggcaccagcaaggatca

SEQ ID NO: 868840 - DNA, 25 bp, Homo sapien
tataacagaatctgacacttccaac

SEQ ID NO: 868841 - DNA, 25 bp, Homo sapien
gtttataacagaatctgacacttcc

SEQ ID NO: 868842 - DNA, 25 bp, Homo sapien
ctgtttataacagaatctgacactt

SEQ ID NO: 868843 - DNA, 25 bp, Homo sapien
aacagaatctgacacttccaacatc

SEQ ID NO: 868844 - DNA, 25 bp, Homo sapien
tgcctgctgtcttcaggcaataagg

SEQ ID NO: 868845 - DNA, 25 bp, Homo sapien
tgttcccctggcaggcctaatctgg

SEQ ID NO: 868846 - DNA, 25 bp, Homo sapien
caataaggagattagggaggtgttc

SEQ ID NO: 868847 - DNA, 25 bp, Homo sapien
tctggtctatacttcttctagtcca

SEQ ID NO: 868848 - DNA, 25 bp, Homo sapien
caggtttgctctgtgaacctggcca

SEQ ID NO: 868849 - DNA, 25 bp, Homo sapien
tcagttcaggtttgctctgtgaacc

SEQ ID NO: 868850 - DNA, 25 bp, Homo sapien
tttgctctgtgaacctggccacctt

SEQ ID NO: 868851 - DNA, 25 bp, Homo sapien
tgctctgtgaacctggccaccttca

SEQ ID NO: 868852 - DNA, 25 bp, Homo sapien
aagtgataaaagtgagccatgcagc

SEQ ID NO: 868853 - DNA, 25 bp, Homo sapien
tgtgaccatgcctcgaataaagccc

SEQ ID NO: 868854 - DNA, 25 bp, Homo sapien
ctggaagaagaacataggaagccct

SEQ ID NO: 868855 - DNA, 25 bp, Homo sapien
tatgcccagttggttagaacctaga

SEQ ID NO: 868856 - DNA, 25 bp, Homo sapien
ccccgactcttcgtcttctttctgc

SEQ ID NO: 868857 - DNA, 25 bp, Homo sapien
cagttccccgactcttcgtcttctt

SEQ ID NO: 868858 - DNA, 25 bp, Homo sapien
agccagttccccgactcttcgtctt

SEQ ID NO: 868859 - DNA, 25 bp, Homo sapien
tccccgactcttcgtcttctttctg

SEQ ID NO: 868860 - DNA, 25 bp, Homo sapien
gaccccgtaggctaggttgattgct

SEQ ID NO: 868861 - DNA, 25 bp, Homo sapien
cagtgtccagcagcgacatagactg

SEQ ID NO: 868862 - DNA, 25 bp, Homo sapien
tggtcaagttctaactcttcaagcg

SEQ ID NO: 868863 - DNA, 25 bp, Homo sapien
aatagtaccttctctgaccccgtag

SEQ ID NO: 868864 - DNA, 25 bp, Homo sapien
gcagtaaacaacgtggaagacaggt

SEQ ID NO: 868865 - DNA, 25 bp, Homo sapien
gaacttttatgatagtaggaagagg

SEQ ID NO: 868866 - DNA, 25 bp, Homo sapien
gctggtcctgtagtgcagtcgtgta

SEQ ID NO: 868867 - DNA, 25 bp, Homo sapien
ggtcaggagataagcagttgattcc

SEQ ID NO: 868868 - DNA, 25 bp, Homo sapien
gaagagagtgactagaatctttgaa

SEQ ID NO: 868869 - DNA, 25 bp, Homo sapien
tgaggtttctatccaagttacgcag

SEQ ID NO: 868870 - DNA, 25 bp, Homo sapien
tctatccaagttacgcagtttttca

SEQ ID NO: 868871 - DNA, 25 bp, Homo sapien
agaagagagtgactagaatctttga

SEQ ID NO: 868872 - DNA, 25 bp, Homo sapien
gaagaatgcgaatagctgcgttttt

SEQ ID NO: 868873 - DNA, 25 bp, Homo sapien
gccagggaagaatgcgaatagctgc

SEQ ID NO: 868874 - DNA, 25 bp, Homo sapien
gggaagaatgcgaatagctgcgttt

SEQ ID NO: 868875 - DNA, 25 bp, Homo sapien
gaatgcgaatagctgcgtttttgtt

SEQ ID NO: 868876 - DNA, 25 bp, Homo sapien
gattcatccttgagaaaactactca

SEQ ID NO: 868877 - DNA, 25 bp, Homo sapien
gtctagtttctcttgattcctgtcc

SEQ ID NO: 868878 - DNA, 25 bp, Homo sapien
ttgttgcatcttggctttgtctagt

SEQ ID NO: 868879 - DNA, 25 bp, Homo sapien
ctagtttctcttgattcctgtccat

SEQ ID NO: 868880 - DNA, 25 bp, Homo sapien
tgttgttgcatcttggctttgtcta

SEQ ID NO: 868881 - DNA, 25 bp, Homo sapien
ctagccattgacagaaaacacatct

SEQ ID NO: 868882 - DNA, 25 bp, Homo sapien
gaaaacacatctgccttagtgaggc

SEQ ID NO: 868883 - DNA, 25 bp, Homo sapien
tctgccttagtgaggcccctttgat

SEQ ID NO: 868884 - DNA, 25 bp, Homo sapien
ccctttgatcttcagagagctttat

SEQ ID NO: 868885 - DNA, 25 bp, Homo sapien
ctgctatttgaccctttcccttcct

SEQ ID NO: 868886 - DNA, 25 bp, Homo sapien
gtggtctgctatttgaccctttccc

SEQ ID NO: 868887 - DNA, 25 bp, Homo sapien
gtctgctatttgaccctttcccttc

SEQ ID NO: 868888 - DNA, 25 bp, Homo sapien
tggtctgctatttgaccctttccct

SEQ ID NO: 868889 - DNA, 25 bp, Homo sapien
cagtccaggctagcgatacagagtg

SEQ ID NO: 868890 - DNA, 25 bp, Homo sapien
accagtcgttgggaatgatatcacc

SEQ ID NO: 868891 - DNA, 25 bp, Homo sapien
tacatgtccattcttaaaccagtcg

SEQ ID NO: 868892 - DNA, 25 bp, Homo sapien
tgaacagaatcagagttctcactga

SEQ ID NO: 868893 - DNA, 25 bp, Homo sapien
tttctcctagatgatgtttatcagt

SEQ ID NO: 868894 - DNA, 25 bp, Homo sapien
cattattaggcttggagggtgcctt

SEQ ID NO: 868895 - DNA, 25 bp, Homo sapien
gtgcctttggcactagagttccctt

SEQ ID NO: 868896 - DNA, 25 bp, Homo sapien
ttattaggcttggagggtgcctttg

SEQ ID NO: 868897 - DNA, 25 bp, Homo sapien
gagggtgcctttggcactagagttc

SEQ ID NO: 868898 - DNA, 25 bp, Homo sapien
gccatcaatctgtctcatttgtgta

SEQ ID NO: 868899 - DNA, 25 bp, Homo sapien
tgcatatacaaaccactagagtatg

SEQ ID NO: 868900 - DNA, 25 bp, Homo sapien
ccatcatgattgtttcctgcagtcc

SEQ ID NO: 868901 - DNA, 25 bp, Homo sapien
cagctgcgaagagccatggatggtc

SEQ ID NO: 868902 - DNA, 25 bp, Homo sapien
ttccaaatgtccacaacgtctgagg

SEQ ID NO: 868903 - DNA, 25 bp, Homo sapien
cagagacctgattgatatgatgcca

SEQ ID NO: 868904 - DNA, 25 bp, Homo sapien
gaagaacacgaagcgcgatgtgaac

SEQ ID NO: 868905 - DNA, 25 bp, Homo sapien
aagacacttgatagagctgcagagt

SEQ ID NO: 868906 - DNA, 25 bp, Homo sapien
gactcattgtcaaacacaccatgca

SEQ ID NO: 868907 - DNA, 25 bp, Homo sapien
caggctcttttcgtctttagccctc

SEQ ID NO: 868908 - DNA, 25 bp, Homo sapien
tccctgcctctggactcattgtcaa

SEQ ID NO: 868909 - DNA, 25 bp, Homo sapien
ctcctctgcgttcttgtcacatggc

SEQ ID NO: 868910 - DNA, 25 bp, Homo sapien
gaaaagggagacagcacgcatgaat

SEQ ID NO: 868911 - DNA, 25 bp, Homo sapien
gcctcttggtagctgtgaagtacgg

SEQ ID NO: 868912 - DNA, 25 bp, Homo sapien
gatggaatactgtactgcctggctt

SEQ ID NO: 868913 - DNA, 25 bp, Homo sapien
aatcagagttcaaagtgccaccagc

SEQ ID NO: 868914 - DNA, 25 bp, Homo sapien
tcttttgtcctttactgatcatcat

SEQ ID NO: 868915 - DNA, 25 bp, Homo sapien
gcctttcctggactacgttctgtgg

SEQ ID NO: 868916 - DNA, 25 bp, Homo sapien
tgaatgtcagctgccctggtcggta

SEQ ID NO: 868917 - DNA, 25 bp, Homo sapien
tatgatatcacataggttcctgttc

SEQ ID NO: 868918 - DNA, 25 bp, Homo sapien
tctgtgatgttgtccgcttagaggt

SEQ ID NO: 868919 - DNA, 25 bp, Homo sapien
tgttctcagggccttgcttgtttgc

SEQ ID NO: 868920 - DNA, 25 bp, Homo sapien
gaagtgggattcatgcttgcgatgt

SEQ ID NO: 868921 - DNA, 25 bp, Homo sapien
ttgcgatgtatcttctcgacttggg

SEQ ID NO: 868922 - DNA, 25 bp, Homo sapien
gcaagtcagaggtgtgcggaggagc

SEQ ID NO: 868923 - DNA, 25 bp, Homo sapien
ccgtcactgggagggtcttgaccat

SEQ ID NO: 868924 - DNA, 25 bp, Homo sapien
agctccgtcactgggagggtcttga

SEQ ID NO: 868925 - DNA, 25 bp, Homo sapien
ggagtgtaaagcatgaggcaagtca

SEQ ID NO: 868926 - DNA, 25 bp, Homo sapien
cctgctgccgacacacagcaggttc

SEQ ID NO: 868927 - DNA, 25 bp, Homo sapien
tgctgccgacacacagcaggttcag

SEQ ID NO: 868928 - DNA, 25 bp, Homo sapien
ctggggtctggcgacacctctccct

SEQ ID NO: 868929 - DNA, 25 bp, Homo sapien
ctgccgacacacagcaggttcagtg

SEQ ID NO: 868930 - DNA, 25 bp, Homo sapien
ttgcaccgtatatgtttgctgtgcc

SEQ ID NO: 868931 - DNA, 25 bp, Homo sapien
cttggatcccccaatcacgtgatct

SEQ ID NO: 868932 - DNA, 25 bp, Homo sapien
ggatcccccaatcacgtgatctctg

SEQ ID NO: 868933 - DNA, 25 bp, Homo sapien
gtacacattgcaccgtatatgtttg

SEQ ID NO: 868934 - DNA, 25 bp, Homo sapien
tgatccttgaatcttattttgctga

SEQ ID NO: 868935 - DNA, 25 bp, Homo sapien
tatttctatgtggtaatgatccttg

SEQ ID NO: 868936 - DNA, 25 bp, Homo sapien
actcctacagtaggttttgctgctt

SEQ ID NO: 868937 - DNA, 25 bp, Homo sapien
cccacttcactcctacagtaggttt

SEQ ID NO: 868938 - DNA, 25 bp, Homo sapien
cattttctcgtacactgactccagc

SEQ ID NO: 868939 - DNA, 25 bp, Homo sapien
ttctcgtacactgactccagcacag

SEQ ID NO: 868940 - DNA, 25 bp, Homo sapien
ctgcttcattcatacctgcttctgg

SEQ ID NO: 868941 - DNA, 25 bp, Homo sapien
tgccccaaactgcttcattcatacc

SEQ ID NO: 868942 - DNA, 25 bp, Homo sapien
gacaaacttcagttgccggaagcca

SEQ ID NO: 868943 - DNA, 25 bp, Homo sapien
gagccccagccgtaagtggacaaac

SEQ ID NO: 868944 - DNA, 25 bp, Homo sapien
gaaaattgctagtaccagtgtggga

SEQ ID NO: 868945 - DNA, 25 bp, Homo sapien
taaaattactgcagtcggactccaa

SEQ ID NO: 868946 - DNA, 25 bp, Homo sapien
gggcagctttccctagaccctgagg

SEQ ID NO: 868947 - DNA, 25 bp, Homo sapien
tctggggcagctttccctagaccct

SEQ ID NO: 868948 - DNA, 25 bp, Homo sapien
cagctttccctagaccctgaggcat

SEQ ID NO: 868949 - DNA, 25 bp, Homo sapien
tgcttcttgtctggggcagctttcc

SEQ ID NO: 868950 - DNA, 25 bp, Homo sapien
aagcctgctatgtgggtttggatcc

SEQ ID NO: 868951 - DNA, 25 bp, Homo sapien
tagccaagataagtagtagtaacac

SEQ ID NO: 868952 - DNA, 25 bp, Homo sapien
taaagcagggctagtaagagtacct

SEQ ID NO: 868953 - DNA, 25 bp, Homo sapien
taagaacatacactctgaagcctgc

SEQ ID NO: 868954 - DNA, 25 bp, Homo sapien
tagtttctactacccaataggcaag

SEQ ID NO: 868955 - DNA, 25 bp, Homo sapien
ttagcaaatgctgtcgtgggccttg

SEQ ID NO: 868956 - DNA, 25 bp, Homo sapien
gagaattgattagatgcactgtggc

SEQ ID NO: 868957 - DNA, 25 bp, Homo sapien
tgcaaacagtgtgacacagaactac

SEQ ID NO: 868958 - DNA, 25 bp, Homo sapien
gaatttttatacagtgagtacgttc

SEQ ID NO: 868959 - DNA, 25 bp, Homo sapien
acgttctctggtctttttctcgctg

SEQ ID NO: 868960 - DNA, 25 bp, Homo sapien
tatacagtgagtacgttctctggtc

SEQ ID NO: 868961 - DNA, 25 bp, Homo sapien
ttttctcgctgatgaaatggatgtt

SEQ ID NO: 868962 - DNA, 25 bp, Homo sapien
ctcaggaccgctggagtttgtatgg

SEQ ID NO: 868963 - DNA, 25 bp, Homo sapien
tgtcagtgtcacatgcggttgcaca

SEQ ID NO: 868964 - DNA, 25 bp, Homo sapien
caggaccgctggagtttgtatggct

SEQ ID NO: 868965 - DNA, 25 bp, Homo sapien
ctgtcagtgtcacatgcggttgcac

SEQ ID NO: 868966 - DNA, 25 bp, Homo sapien
gtgtgcggtcagtgtgtgaaactcc

SEQ ID NO: 868967 - DNA, 25 bp, Homo sapien
cctccatcgcccataacagggtgtg

SEQ ID NO: 868968 - DNA, 25 bp, Homo sapien
gtttgagaaatgcagtctcgtgctt

SEQ ID NO: 868969 - DNA, 25 bp, Homo sapien
gaaatgcagtctcgtgctttctagc

SEQ ID NO: 868970 - DNA, 25 bp, Homo sapien
gcaccctggacaggctcgaggacag

SEQ ID NO: 868971 - DNA, 25 bp, Homo sapien
ccctggacaggctcgaggacaggct

SEQ ID NO: 868972 - DNA, 25 bp, Homo sapien
cgcaccctggacaggctcgaggaca

SEQ ID NO: 868973 - DNA, 25 bp, Homo sapien
accctggacaggctcgaggacaggc

SEQ ID NO: 868974 - DNA, 25 bp, Homo sapien
accccttgaaggtgtaaaagatcag

SEQ ID NO: 868975 - DNA, 25 bp, Homo sapien
ccccttgaaggtgtaaaagatcagc

SEQ ID NO: 868976 - DNA, 25 bp, Homo sapien
gaccccttgaaggtgtaaaagatca

SEQ ID NO: 868977 - DNA, 25 bp, Homo sapien
gtatgcttggtccagccacgaagac

SEQ ID NO: 868978 - DNA, 25 bp, Homo sapien
tgctgcgtatgcttggtccagccac

SEQ ID NO: 868979 - DNA, 25 bp, Homo sapien
ctagcggctgctgcgtatgcttggt

SEQ ID NO: 868980 - DNA, 25 bp, Homo sapien
gcggctgctgcgtatgcttggtcca

SEQ ID NO: 868981 - DNA, 25 bp, Homo sapien
tcgacactacttctggttccaggaa

SEQ ID NO: 868982 - DNA, 25 bp, Homo sapien
tttgggctttaattcagagaccgac

SEQ ID NO: 868983 - DNA, 25 bp, Homo sapien
gaccgacaatatgcacccaggcaga

SEQ ID NO: 868984 - DNA, 25 bp, Homo sapien
aaaagtgaggtgtcttctctgcaga

SEQ ID NO: 868985 - DNA, 25 bp, Homo sapien
catgtgtaacgttgcttggcatgga

SEQ ID NO: 868986 - DNA, 25 bp, Homo sapien
aaatatatggaaagcatgtgtaacg

SEQ ID NO: 868987 - DNA, 25 bp, Homo sapien
gcacatggctttggcaagctaagaa

SEQ ID NO: 868988 - DNA, 25 bp, Homo sapien
gggacagcaatgctatgtatctcat

SEQ ID NO: 868989 - DNA, 25 bp, Homo sapien
tgtggataagggagcatttgtcatt

SEQ ID NO: 868990 - DNA, 25 bp, Homo sapien
ccgtgtggataagggagcatttgtc

SEQ ID NO: 868991 - DNA, 25 bp, Homo sapien
ctgaccgtgtggataagggagcatt

SEQ ID NO: 868992 - DNA, 25 bp, Homo sapien
tgaccgtgtggataagggagcattt

SEQ ID NO: 868993 - DNA, 25 bp, Homo sapien
tctgttgaagaataagacaaaaggg

SEQ ID NO: 868994 - DNA, 25 bp, Homo sapien
gaaagaaggtcgatatatgttgata

SEQ ID NO: 868995 - DNA, 25 bp, Homo sapien
cttagtacaaagaagtaggctggtc

SEQ ID NO: 868996 - DNA, 25 bp, Homo sapien
tctatttttcattcactgtgcctgg

SEQ ID NO: 868997 - DNA, 25 bp, Homo sapien
agaggagtaagaccgacagactcaa

SEQ ID NO: 868998 - DNA, 25 bp, Homo sapien
tggagaggagtaagaccgacagact

SEQ ID NO: 868999 - DNA, 25 bp, Homo sapien
ggagtaagaccgacagactcaaaat

SEQ ID NO: 869000 - DNA, 25 bp, Homo sapien
taagaccgacagactcaaaatgttt

SEQ ID NO: 869001 - DNA, 25 bp, Homo sapien
cactatgtctggcttcacctccatt

SEQ ID NO: 869002 - DNA, 25 bp, Homo sapien
ccaccagatagaaaccaggtgtcta

SEQ ID NO: 869003 - DNA, 25 bp, Homo sapien
ctatgtctggcttcacctccattct

SEQ ID NO: 869004 - DNA, 25 bp, Homo sapien
aagaatagccaccagatagaaacca

SEQ ID NO: 869005 - DNA, 25 bp, Homo sapien
cctgaactaaatcccagagggctga

SEQ ID NO: 869006 - DNA, 25 bp, Homo sapien
agtgctgctgtaccactccctcccg

SEQ ID NO: 869007 - DNA, 25 bp, Homo sapien
ctttcagctcaaacgcacctgaact

SEQ ID NO: 869008 - DNA, 25 bp, Homo sapien
aacgcacctgaactaaatcccagag

SEQ ID NO: 869009 - DNA, 25 bp, Homo sapien
cacattccccaggtcgaggtggtgg

SEQ ID NO: 869010 - DNA, 25 bp, Homo sapien
acacattccccaggtcgaggtggtg

SEQ ID NO: 869011 - DNA, 25 bp, Homo sapien
acattccccaggtcgaggtggtgga

SEQ ID NO: 869012 - DNA, 25 bp, Homo sapien
tctttatgtagcatgggtcacttac

SEQ ID NO: 869013 - DNA, 25 bp, Homo sapien
aaaccagacgggctgagagcagttc

SEQ ID NO: 869014 - DNA, 25 bp, Homo sapien
ctgagagcagttcccgggcctccag

SEQ ID NO: 869015 - DNA, 25 bp, Homo sapien
tgcggctcgcacagctttgccggct

SEQ ID NO: 869016 - DNA, 25 bp, Homo sapien
cgaggaaggcgtcgagttcagactt

SEQ ID NO: 869017 - DNA, 25 bp, Homo sapien
aaaggcgaggaaggcgtcgagttca

SEQ ID NO: 869018 - DNA, 25 bp, Homo sapien
gaaaggcgaggaaggcgtcgagttc

SEQ ID NO: 869019 - DNA, 25 bp, Homo sapien
ggaaggcgtcgagttcagacttcaa

SEQ ID NO: 869020 - DNA, 25 bp, Homo sapien
tgaaaactgcggaaataattccttg

SEQ ID NO: 869021 - DNA, 25 bp, Homo sapien
tgtagcttttcccacgttgttgtga

SEQ ID NO: 869022 - DNA, 25 bp, Homo sapien
gagaacgagtcatcacttaacttga

SEQ ID NO: 869023 - DNA, 25 bp, Homo sapien
ccttgttccatgtgagaacgagtca

SEQ ID NO: 869024 - DNA, 25 bp, Homo sapien
cagatccaggagacgatcagcttgg

SEQ ID NO: 869025 - DNA, 25 bp, Homo sapien
gacacatcccttcatacacggctgg

SEQ ID NO: 869026 - DNA, 25 bp, Homo sapien
tcttgggaatgacgccagatccagg

SEQ ID NO: 869027 - DNA, 25 bp, Homo sapien
catagagattcataggcagcttccc

SEQ ID NO: 869028 - DNA, 25 bp, Homo sapien
cttgctgtggagacgtttgacttgc

SEQ ID NO: 869029 - DNA, 25 bp, Homo sapien
cagcaggtaaaacggactctgagag

SEQ ID NO: 869030 - DNA, 25 bp, Homo sapien
tccctgtgctcaggggcatcaggtt

SEQ ID NO: 869031 - DNA, 25 bp, Homo sapien
ttcaggggccagcaggtaaaacgga

SEQ ID NO: 869032 - DNA, 25 bp, Homo sapien
ggccagcaggtaaaacggactctga

SEQ ID NO: 869033 - DNA, 25 bp, Homo sapien
gacttcctgtcttagttggccccat

SEQ ID NO: 869034 - DNA, 25 bp, Homo sapien
ctcaggtctctgcaggaaatgacgc

SEQ ID NO: 869035 - DNA, 25 bp, Homo sapien
gaaatgacgctggaccggcggttct

SEQ ID NO: 869036 - DNA, 25 bp, Homo sapien
ggttctaccgagagacttcctgtct

SEQ ID NO: 869037 - DNA, 25 bp, Homo sapien
aagggtgagccaggtccaagttcac

SEQ ID NO: 869038 - DNA, 25 bp, Homo sapien
tccaagttcacgtttagtcccctca

SEQ ID NO: 869039 - DNA, 25 bp, Homo sapien
ccaagttcacgtttagtcccctcat

SEQ ID NO: 869040 - DNA, 25 bp, Homo sapien
gctgccctgatgacttcttggaaga

SEQ ID NO: 869041 - DNA, 25 bp, Homo sapien
gctctcattttctagcgcagctgcc

SEQ ID NO: 869042 - DNA, 25 bp, Homo sapien
cacagctgagcacgtcgtggtgacg

SEQ ID NO: 869043 - DNA, 25 bp, Homo sapien
caaattgtgtttgacttgggcagaa

SEQ ID NO: 869044 - DNA, 25 bp, Homo sapien
aatgaccgatgctgccaggaattct

SEQ ID NO: 869045 - DNA, 25 bp, Homo sapien
acattcactgtcagacgacaaacag

SEQ ID NO: 869046 - DNA, 25 bp, Homo sapien
tctgtttgggtctcgtacgttatca

SEQ ID NO: 869047 - DNA, 25 bp, Homo sapien
aggaattctgtttgggtctcgtacg

SEQ ID NO: 869048 - DNA, 25 bp, Homo sapien
acacgggatgctgttccattcctgg

SEQ ID NO: 869049 - DNA, 25 bp, Homo sapien
gttcggacacgggatgctgttccat

SEQ ID NO: 869050 - DNA, 25 bp, Homo sapien
tcctggtgttcggacacgggatgct

SEQ ID NO: 869051 - DNA, 25 bp, Homo sapien
gatcctggtgttcggacacgggatg

SEQ ID NO: 869052 - DNA, 25 bp, Homo sapien
ctgatgggtacttgcaaaaagccct

SEQ ID NO: 869053 - DNA, 25 bp, Homo sapien
cggtcatatctctggccacagaatg

SEQ ID NO: 869054 - DNA, 25 bp, Homo sapien
tgccagggacgatgggcagggcaca

SEQ ID NO: 869055 - DNA, 25 bp, Homo sapien
aatggcctttggtaggaactgatgg

SEQ ID NO: 869056 - DNA, 25 bp, Homo sapien
tggttcttctattcagtgggagatt

SEQ ID NO: 869057 - DNA, 25 bp, Homo sapien
tcgtgactaacctggcgaacacggt

SEQ ID NO: 869058 - DNA, 25 bp, Homo sapien
tggatagaaattagatcctcagcct

SEQ ID NO: 869059 - DNA, 25 bp, Homo sapien
tcccagtctttctattggtgatggt

SEQ ID NO: 869060 - DNA, 25 bp, Homo sapien
aaaaccaccagtgcaccttgagacg

SEQ ID NO: 869061 - DNA, 25 bp, Homo sapien
gtgtcacggagctgtcttcacccag

SEQ ID NO: 869062 - DNA, 25 bp, Homo sapien
ccttgagacgcgtaggcaatgttca

SEQ ID NO: 869063 - DNA, 25 bp, Homo sapien
aagactcaccagttcctgtgcttcc

SEQ ID NO: 869064 - DNA, 25 bp, Homo sapien
gaagcccagatgaagcgttttgcgt

SEQ ID NO: 869065 - DNA, 25 bp, Homo sapien
tttcagttgccagaatcctccgctg

SEQ ID NO: 869066 - DNA, 25 bp, Homo sapien
atggtggcgagtcccttcagcgtga

SEQ ID NO: 869067 - DNA, 25 bp, Homo sapien
tcagagctgatgagaagcccgtcgt

SEQ ID NO: 869068 - DNA, 25 bp, Homo sapien
tattccatgacctgtgacgagccga

SEQ ID NO: 869069 - DNA, 25 bp, Homo sapien
tatagccagtgccaggtacgaggcg

SEQ ID NO: 869070 - DNA, 25 bp, Homo sapien
caacagggcggtgctttcaatgcag

SEQ ID NO: 869071 - DNA, 25 bp, Homo sapien
gatgttggcacacctgaaaccatgg

SEQ ID NO: 869072 - DNA, 25 bp, Homo sapien
gatattgacttagcttccctgatga

SEQ ID NO: 869073 - DNA, 25 bp, Homo sapien
tctgcttgagtggtccaggtaatcg

SEQ ID NO: 869074 - DNA, 25 bp, Homo sapien
tcctcagccggagtggttgattcag

SEQ ID NO: 869075 - DNA, 25 bp, Homo sapien
caggtaatcgcagaagtgaaacatc

SEQ ID NO: 869076 - DNA, 25 bp, Homo sapien
ctgaggctgccacgtagagggtcct

SEQ ID NO: 869077 - DNA, 25 bp, Homo sapien
tgaggctgccacgtagagggtcctc

SEQ ID NO: 869078 - DNA, 25 bp, Homo sapien
tgaggctgccacgcagaggatcctc

SEQ ID NO: 869079 - DNA, 25 bp, Homo sapien
ctccagagaatcactgagggtcccg

SEQ ID NO: 869080 - DNA, 25 bp, Homo sapien
agaatcactgggggtcccggggctg

SEQ ID NO: 869081 - DNA, 25 bp, Homo sapien
tcactgggggtcccggggctgaggc

SEQ ID NO: 869082 - DNA, 25 bp, Homo sapien
ctgccacgcagagggtcctccagag

SEQ ID NO: 869083 - DNA, 25 bp, Homo sapien
cagagggtcctccagagaatcactg

SEQ ID NO: 869084 - DNA, 25 bp, Homo sapien
gaggacgaccatatcttcatggctc

SEQ ID NO: 869085 - DNA, 25 bp, Homo sapien
cactgatcacgctgcagaggacgac

SEQ ID NO: 869086 - DNA, 25 bp, Homo sapien
ctcctggtagcactgatcacgctgc

SEQ ID NO: 869087 - DNA, 25 bp, Homo sapien
cacgctgcagaggacgaccatatct

SEQ ID NO: 869088 - DNA, 25 bp, Homo sapien
agagaccaaaagctggttagcggtg

SEQ ID NO: 869089 - DNA, 25 bp, Homo sapien
cggtgacccgggtcacactcagcat

SEQ ID NO: 869090 - DNA, 25 bp, Homo sapien
tgggtcagcagtacctgatgtctga

SEQ ID NO: 869091 - DNA, 25 bp, Homo sapien
tcagcagtacctgatgtctgagaga

SEQ ID NO: 869092 - DNA, 25 bp, Homo sapien
tgggtccggccctttgatggaaaca

SEQ ID NO: 869093 - DNA, 25 bp, Homo sapien
tggtcagccctaattcttcccacag

SEQ ID NO: 869094 - DNA, 25 bp, Homo sapien
tattctttattacatcgtggagctc

SEQ ID NO: 869095 - DNA, 25 bp, Homo sapien
agccacgccgtggtgctctcttggg

SEQ ID NO: 869096 - DNA, 25 bp, Homo sapien
gacccctctgcccatttaccgccat

SEQ ID NO: 869097 - DNA, 25 bp, Homo sapien
ggacccctctgcccatttaccgcca

SEQ ID NO: 869098 - DNA, 25 bp, Homo sapien
catcaggcgctgtcgcctcgggctt

SEQ ID NO: 869099 - DNA, 25 bp, Homo sapien
tcctcattccctgcacttagtacgt

SEQ ID NO: 869100 - DNA, 25 bp, Homo sapien
tagtacgtactcagcaaatgaggtg

SEQ ID NO: 869101 - DNA, 25 bp, Homo sapien
tcctttgtcttcgtgctcctcattc

SEQ ID NO: 869102 - DNA, 25 bp, Homo sapien
ctgttacagcggtgaagccagctgg

SEQ ID NO: 869103 - DNA, 25 bp, Homo sapien
gggcatctgctctgcactctgctgg

SEQ ID NO: 869104 - DNA, 25 bp, Homo sapien
gcagagctgacgtgatcagtgtcca

SEQ ID NO: 869105 - DNA, 25 bp, Homo sapien
tgggtgcagagctgacgtgatcagt

SEQ ID NO: 869106 - DNA, 25 bp, Homo sapien
ggcatcgatgcagcctccacgtcgc

SEQ ID NO: 869107 - DNA, 25 bp, Homo sapien
gaggcatcgatgcagcctccacgtc

SEQ ID NO: 869108 - DNA, 25 bp, Homo sapien
aggcatcgatgcagcctccacgtcg

SEQ ID NO: 869109 - DNA, 25 bp, Homo sapien
gagtaccaccatcatctgggccagt

SEQ ID NO: 869110 - DNA, 25 bp, Homo sapien
aaatgcccttaagaagcagctgaac

SEQ ID NO: 869111 - DNA, 25 bp, Homo sapien
gcctgtgctgctaccagctggttgg

SEQ ID NO: 869112 - DNA, 25 bp, Homo sapien
cagctggttggtccgtgtcttcctg

SEQ ID NO: 869113 - DNA, 25 bp, Homo sapien
gggagaggccatcctagttctcaaa

SEQ ID NO: 869114 - DNA, 25 bp, Homo sapien
tggacaaaggcgtcccatggctgaa

SEQ ID NO: 869115 - DNA, 25 bp, Homo sapien
ggtggccttctaccagttatcaaga

SEQ ID NO: 869116 - DNA, 25 bp, Homo sapien
tccacggcaaccttgatatttggga

SEQ ID NO: 869117 - DNA, 25 bp, Homo sapien
gcctggtactgtagacatggcccat

SEQ ID NO: 869118 - DNA, 25 bp, Homo sapien
gaagcctggtactgtagacatggcc

SEQ ID NO: 869119 - DNA, 25 bp, Homo sapien
cttcaggaagcctggtactgtagac

SEQ ID NO: 869120 - DNA, 25 bp, Homo sapien
tcaggaagcctggtactgtagacat

SEQ ID NO: 869121 - DNA, 25 bp, Homo sapien
ggaaggtggtcattcccgaattgct

SEQ ID NO: 869122 - DNA, 25 bp, Homo sapien
aaggtggtcattcccgaattgctga

SEQ ID NO: 869123 - DNA, 25 bp, Homo sapien
ggtggtcattcccgaattgctgatg

SEQ ID NO: 869124 - DNA, 25 bp, Homo sapien
tggtcattcccgaattgctgatggg

SEQ ID NO: 869125 - DNA, 25 bp, Homo sapien
gcatagcatttgtccgcattttaat

SEQ ID NO: 869126 - DNA, 25 bp, Homo sapien
ggacttttcggggagcatttcatat

SEQ ID NO: 869127 - DNA, 25 bp, Homo sapien
caggcgttttctaatggcctcggac

SEQ ID NO: 869128 - DNA, 25 bp, Homo sapien
tattttagctcgtctttctttgggc

SEQ ID NO: 869129 - DNA, 25 bp, Homo sapien
ggctgtcccacaggatggtgtaact

SEQ ID NO: 869130 - DNA, 25 bp, Homo sapien
taacttcctgcgtgggagtgcctgt

SEQ ID NO: 869131 - DNA, 25 bp, Homo sapien
gtgcggaatacagcgtggctcccat

SEQ ID NO: 869132 - DNA, 25 bp, Homo sapien
tgcctgtggtgaccgcacggtgcgg

SEQ ID NO: 869133 - DNA, 25 bp, Homo sapien
taaatatccgtggtgagatccgggt

SEQ ID NO: 869134 - DNA, 25 bp, Homo sapien
gacataaacgtcatgaagccagtgg

SEQ ID NO: 869135 - DNA, 25 bp, Homo sapien
ggttcctccgctgttttctgaaaga

SEQ ID NO: 869136 - DNA, 25 bp, Homo sapien
tgaaagattcagatctcagccccag

SEQ ID NO: 869137 - DNA, 25 bp, Homo sapien
tttattgctaccagaccttgacctt

SEQ ID NO: 869138 - DNA, 25 bp, Homo sapien
tggtcagaaatcacacaggccacaa

SEQ ID NO: 869139 - DNA, 25 bp, Homo sapien
cctctgacgtcagtaggacttgaga

SEQ ID NO: 869140 - DNA, 25 bp, Homo sapien
cagtttataggatacagcagggcaa

SEQ ID NO: 869141 - DNA, 25 bp, Homo sapien
tcagacacctgttcataggaagctg

SEQ ID NO: 869142 - DNA, 25 bp, Homo sapien
actaaattatgcattgctctgggaa

SEQ ID NO: 869143 - DNA, 25 bp, Homo sapien
taaattatgcattgctctgggaatg

SEQ ID NO: 869144 - DNA, 25 bp, Homo sapien
ttatgcattgctctgggaatgaact

SEQ ID NO: 869145 - DNA, 25 bp, Homo sapien
ttactaaattatgcattgctctggg

SEQ ID NO: 869146 - DNA, 25 bp, Homo sapien
tctacaccggattttattcttgtga

SEQ ID NO: 869147 - DNA, 25 bp, Homo sapien
gacttttaatgataacctcttcaaa

SEQ ID NO: 869148 - DNA, 25 bp, Homo sapien
tagtaagaaacttgagcttcatcgg

SEQ ID NO: 869149 - DNA, 25 bp, Homo sapien
gcttcatcggtgaacataacatttt

SEQ ID NO: 869150 - DNA, 25 bp, Homo sapien
ctgaaactgctcttctggtttctcc

SEQ ID NO: 869151 - DNA, 25 bp, Homo sapien
gaaactgctcttctggtttctcctt

SEQ ID NO: 869152 - DNA, 25 bp, Homo sapien
gtgcctgaaactgctcttctggttt

SEQ ID NO: 869153 - DNA, 25 bp, Homo sapien
ctagtgcctgaaactgctcttctgg

SEQ ID NO: 869154 - DNA, 25 bp, Homo sapien
ctgtgattattccctgagtgtcggg

SEQ ID NO: 869155 - DNA, 25 bp, Homo sapien
tccaatgggtttaggctgagagcca

SEQ ID NO: 869156 - DNA, 25 bp, Homo sapien
caggacagaagactttgtcattggc

SEQ ID NO: 869157 - DNA, 25 bp, Homo sapien
tgtcattggctgtgagcatcaagac

SEQ ID NO: 869158 - DNA, 25 bp, Homo sapien
ctgtcaagaaggatttgccggctgt

SEQ ID NO: 869159 - DNA, 25 bp, Homo sapien
ggctgtaactctttctcgcttgagg

SEQ ID NO: 869160 - DNA, 25 bp, Homo sapien
ctttctcgcttgagggcatttttaa

SEQ ID NO: 869161 - DNA, 25 bp, Homo sapien
gatttgccggctgtaactctttctc

SEQ ID NO: 869162 - DNA, 25 bp, Homo sapien
cagacatgagtgtggagaaatgcca

SEQ ID NO: 869163 - DNA, 25 bp, Homo sapien
ctgaagaagtttaccgcctacttca

SEQ ID NO: 869164 - DNA, 25 bp, Homo sapien
catggacacataacgaacctgaaga

SEQ ID NO: 869165 - DNA, 25 bp, Homo sapien
caacttttttcaagcgtgattataa

SEQ ID NO: 869166 - DNA, 25 bp, Homo sapien
gacgcttagagacgccgaggctgcc

SEQ ID NO: 869167 - DNA, 25 bp, Homo sapien
cgtcgacagcgacagcgtttggaat

SEQ ID NO: 869168 - DNA, 25 bp, Homo sapien
ctaagcacacgctgtgccgagggac

SEQ ID NO: 869169 - DNA, 25 bp, Homo sapien
aatgacgcatgcctcggtgaagtcg

SEQ ID NO: 869170 - DNA, 25 bp, Homo sapien
tgcgatacacctctcccagaggtga

SEQ ID NO: 869171 - DNA, 25 bp, Homo sapien
tgcgaggacaccttgcaggatgtat

SEQ ID NO: 869172 - DNA, 25 bp, Homo sapien
tttctgtttctctagcacgtccttg

SEQ ID NO: 869173 - DNA, 25 bp, Homo sapien
gtccaaagcctcttgcgatacacct

SEQ ID NO: 869174 - DNA, 25 bp, Homo sapien
cccatgtgctgacattcgctgtggt

SEQ ID NO: 869175 - DNA, 25 bp, Homo sapien
atccccatgtgctgacattcgctgt

SEQ ID NO: 869176 - DNA, 25 bp, Homo sapien
gctgacattcgctgtggtccagtgc

SEQ ID NO: 869177 - DNA, 25 bp, Homo sapien
tgtgctgacattcgctgtggtccag

SEQ ID NO: 869178 - DNA, 25 bp, Homo sapien
ttaggcaccttagcaacgagccacc

SEQ ID NO: 869179 - DNA, 25 bp, Homo sapien
caccctcccggcaatggttgttagg

SEQ ID NO: 869180 - DNA, 25 bp, Homo sapien
gagccaccctcccggcaatggttgt

SEQ ID NO: 869181 - DNA, 25 bp, Homo sapien
gcagaagagaggaactttaggcacc

SEQ ID NO: 869182 - DNA, 25 bp, Homo sapien
caggttcaggcaagatgagcgccac

SEQ ID NO: 869183 - DNA, 25 bp, Homo sapien
gcgccacataggagctgagattcag

SEQ ID NO: 869184 - DNA, 25 bp, Homo sapien
caagatgagcgccacataggagctg

SEQ ID NO: 869185 - DNA, 25 bp, Homo sapien
tcaggcaagatgagcgccacatagg

SEQ ID NO: 869186 - DNA, 25 bp, Homo sapien
gaatcacaaactcgcacagcttgaa

SEQ ID NO: 869187 - DNA, 25 bp, Homo sapien
gagcagaatcacaaactcgcacagc

SEQ ID NO: 869188 - DNA, 25 bp, Homo sapien
actcgcacagcttgaaaatggcaaa

SEQ ID NO: 869189 - DNA, 25 bp, Homo sapien
agtgcactcgagcagaatcacaaac

SEQ ID NO: 869190 - DNA, 25 bp, Homo sapien
gcttctcacccagcacactggttcc

SEQ ID NO: 869191 - DNA, 25 bp, Homo sapien
cagcaaggaggcttctcacccagca

SEQ ID NO: 869192 - DNA, 25 bp, Homo sapien
tcacccagcacactggttcccaggc

SEQ ID NO: 869193 - DNA, 25 bp, Homo sapien
gaacagcaaggaggcttctcaccca

SEQ ID NO: 869194 - DNA, 25 bp, Homo sapien
tgctggtcaccgagctcgctggcat

SEQ ID NO: 869195 - DNA, 25 bp, Homo sapien
cagccctttagggtgaccactgtgg

SEQ ID NO: 869196 - DNA, 25 bp, Homo sapien
ctcgctggcatgtgccggagtgtcc

SEQ ID NO: 869197 - DNA, 25 bp, Homo sapien
tcttgacagccctttagggtgacca

SEQ ID NO: 869198 - DNA, 25 bp, Homo sapien
cttccacaggcggagcccgtcttgg

SEQ ID NO: 869199 - DNA, 25 bp, Homo sapien
ctcgatgacagaggacgatggtgtc

SEQ ID NO: 869200 - DNA, 25 bp, Homo sapien
ggtgtcgtgaccagaaatagagcct

SEQ ID NO: 869201 - DNA, 25 bp, Homo sapien
cttgggaggaagatcgcggttctgg

SEQ ID NO: 869202 - DNA, 25 bp, Homo sapien
tggtcggtaggaaggaggtcccgca

SEQ ID NO: 869203 - DNA, 25 bp, Homo sapien
cttgtctgcttcctctccatgtgca

SEQ ID NO: 869204 - DNA, 25 bp, Homo sapien
ctgcttcctctccatgtgcagaatt

SEQ ID NO: 869205 - DNA, 25 bp, Homo sapien
tgtctgcttcctctccatgtgcaga

SEQ ID NO: 869206 - DNA, 25 bp, Homo sapien
gcttcctctccatgtgcagaattac

SEQ ID NO: 869207 - DNA, 25 bp, Homo sapien
ctggcctccggagtgctgagctcac

SEQ ID NO: 869208 - DNA, 25 bp, Homo sapien
ggttaatgactctcctctgagcagc

SEQ ID NO: 869209 - DNA, 25 bp, Homo sapien
ctttgggatgaggttaatgactctc

SEQ ID NO: 869210 - DNA, 25 bp, Homo sapien
agccattgaccctggcctccggagt

SEQ ID NO: 869211 - DNA, 25 bp, Homo sapien
cgggtggcatttgaaatagatgcca

SEQ ID NO: 869212 - DNA, 25 bp, Homo sapien
gggtggcatttgaaatagatgccat

SEQ ID NO: 869213 - DNA, 25 bp, Homo sapien
gagagaattcaccatcgaggagctg

SEQ ID NO: 869214 - DNA, 25 bp, Homo sapien
agcagtggcccaagtcgtcagtgac

SEQ ID NO: 869215 - DNA, 25 bp, Homo sapien
caggattaagtactggcgctcagac

SEQ ID NO: 869216 - DNA, 25 bp, Homo sapien
tacaacccgtgagggtggcagttct

SEQ ID NO: 869217 - DNA, 25 bp, Homo sapien
catactgggctacaaggtgtgtgat

SEQ ID NO: 869218 - DNA, 25 bp, Homo sapien
gaggctgtcagctcgacccagattt

SEQ ID NO: 869219 - DNA, 25 bp, Homo sapien
tgagaacgtgtcagccgaggctgtc

SEQ ID NO: 869220 - DNA, 25 bp, Homo sapien
tgtgtgatcacaggatgacctccct

SEQ ID NO: 869221 - DNA, 25 bp, Homo sapien
tatgacacaaatgccaaaacagggc

SEQ ID NO: 869222 - DNA, 25 bp, Homo sapien
caatggcatccgctggcagggttga

SEQ ID NO: 869223 - DNA, 25 bp, Homo sapien
gaagaaaagcacagccggagtggaa

SEQ ID NO: 869224 - DNA, 25 bp, Homo sapien
aataacgatggtagctttgtcccag

SEQ ID NO: 869225 - DNA, 25 bp, Homo sapien
catggcgataccgtttgtaaccgac

SEQ ID NO: 869226 - DNA, 25 bp, Homo sapien
tcttccattcgtttgcggctcatgg

SEQ ID NO: 869227 - DNA, 25 bp, Homo sapien
tgttttctgagctacgtactaaagg

SEQ ID NO: 869228 - DNA, 25 bp, Homo sapien
gcagcctagcatttcctgaaccgag

SEQ ID NO: 869229 - DNA, 25 bp, Homo sapien
tgtaagaagccgctgagatgaagcg

SEQ ID NO: 869230 - DNA, 25 bp, Homo sapien
tttcagcattacagccagcatacca

SEQ ID NO: 869231 - DNA, 25 bp, Homo sapien
gcacttgcacccaatccttgtaaga

SEQ ID NO: 869232 - DNA, 25 bp, Homo sapien
gagatgaagcgcatgccctgggtcc

SEQ ID NO: 869233 - DNA, 25 bp, Homo sapien
gctgaatcacacagcaccgtgtcta

SEQ ID NO: 869234 - DNA, 25 bp, Homo sapien
tccaaccgtgctgaacgctgctgaa

SEQ ID NO: 869235 - DNA, 25 bp, Homo sapien
tgctgaacgctgctgaatcacacag

SEQ ID NO: 869236 - DNA, 25 bp, Homo sapien
ctttgagccctccaaccgtgctgaa

SEQ ID NO: 869237 - DNA, 25 bp, Homo sapien
gcttgtaattgtaatgcatgttgtc

SEQ ID NO: 869238 - DNA, 25 bp, Homo sapien
cgggtaacctgtcacccatgggtca

SEQ ID NO: 869239 - DNA, 25 bp, Homo sapien
tgcgaggcagacaacgtcactgccg

SEQ ID NO: 869240 - DNA, 25 bp, Homo sapien
tgtcatgcagcattggcttgtaatt

SEQ ID NO: 869241 - DNA, 25 bp, Homo sapien
gtgccccagatggtcgtgctttgga

SEQ ID NO: 869242 - DNA, 25 bp, Homo sapien
agagagatcggcagcacgtgcccca

SEQ ID NO: 869243 - DNA, 25 bp, Homo sapien
cagctgcagagagatcggcagcacg

SEQ ID NO: 869244 - DNA, 25 bp, Homo sapien
ccagatggtcgtgctttggagtcat

SEQ ID NO: 869245 - DNA, 25 bp, Homo sapien
ccgaagcctcagactgagcttccat

SEQ ID NO: 869246 - DNA, 25 bp, Homo sapien
cgtcagagtgcggggcggccaggag

SEQ ID NO: 869247 - DNA, 25 bp, Homo sapien
caggagccccgaagcctcagactga

SEQ ID NO: 869248 - DNA, 25 bp, Homo sapien
gtgcggggcggccaggagccccgaa

SEQ ID NO: 869249 - DNA, 25 bp, Homo sapien
tcaagcccagcggattttttccgga

SEQ ID NO: 869250 - DNA, 25 bp, Homo sapien
gaggcatcaagagcatacggtattt

SEQ ID NO: 869251 - DNA, 25 bp, Homo sapien
gttgtattcgggtgactgggcccca

SEQ ID NO: 869252 - DNA, 25 bp, Homo sapien
tccggaatggtcaagcggtatttgc

SEQ ID NO: 869253 - DNA, 25 bp, Homo sapien
gggctctttgcacttgacgcaccag

SEQ ID NO: 869254 - DNA, 25 bp, Homo sapien
tctgcctcggagcaggatctgcaaa

SEQ ID NO: 869255 - DNA, 25 bp, Homo sapien
ggctgcttttgccatagaaggtgga

SEQ ID NO: 869256 - DNA, 25 bp, Homo sapien
cacacccgtgcatgttgttggaggc

SEQ ID NO: 869257 - DNA, 25 bp, Homo sapien
tcctcttccagagaaccagcggctc

SEQ ID NO: 869258 - DNA, 25 bp, Homo sapien
gagggtcaggtgagatctcagagct

SEQ ID NO: 869259 - DNA, 25 bp, Homo sapien
ttctcaacgcaggacatcctcggcg

SEQ ID NO: 869260 - DNA, 25 bp, Homo sapien
tgggtttctccgtcttcaagaccaa

SEQ ID NO: 869261 - DNA, 25 bp, Homo sapien
ggctgacaggatctgaacgtcaaca

SEQ ID NO: 869262 - DNA, 25 bp, Homo sapien
gataaaaagcttgcaagtgggctga

SEQ ID NO: 869263 - DNA, 25 bp, Homo sapien
tgaacgtcaacaaagacttggagct

SEQ ID NO: 869264 - DNA, 25 bp, Homo sapien
gggagccgtcagaaggataaaaagc

SEQ ID NO: 869265 - DNA, 25 bp, Homo sapien
tctgctggttggctggagtgtggct

SEQ ID NO: 869266 - DNA, 25 bp, Homo sapien
gagtgtggctgatggagcctgggct

SEQ ID NO: 869267 - DNA, 25 bp, Homo sapien
ctctgctggttggctggagtgtggc

SEQ ID NO: 869268 - DNA, 25 bp, Homo sapien
ctgatggagcctgggcttggttgac

SEQ ID NO: 869269 - DNA, 25 bp, Homo sapien
agagtccaacgggaatactcagtgg

SEQ ID NO: 869270 - DNA, 25 bp, Homo sapien
ccaacgggaatactcagtggttgta

SEQ ID NO: 869271 - DNA, 25 bp, Homo sapien
atctgagtccaacaggcgtacccat

SEQ ID NO: 869272 - DNA, 25 bp, Homo sapien
ggtgtagtatctgagtccaacaggc

SEQ ID NO: 869273 - DNA, 25 bp, Homo sapien
gtccagtccagccagcgtactcagt

SEQ ID NO: 869274 - DNA, 25 bp, Homo sapien
tccagccagcgtactcagtggtttt

SEQ ID NO: 869275 - DNA, 25 bp, Homo sapien
agtccagccagcgtactcagtggtt

SEQ ID NO: 869276 - DNA, 25 bp, Homo sapien
cagccagcgtactcagtggttttag

SEQ ID NO: 869277 - DNA, 25 bp, Homo sapien
cactggttgtagtgtccaagtccaa

SEQ ID NO: 869278 - DNA, 25 bp, Homo sapien
ctggttgtagtgtccaagtccaaca

SEQ ID NO: 869279 - DNA, 25 bp, Homo sapien
gagtacccactggttgtagtgtcca

SEQ ID NO: 869280 - DNA, 25 bp, Homo sapien
tacccactggttgtagtgtccaagt

SEQ ID NO: 869281 - DNA, 25 bp, Homo sapien
cattaaggctgtgcttaaagatgag

SEQ ID NO: 869282 - DNA, 25 bp, Homo sapien
tcttcattaaggctgtgcttaaaga

SEQ ID NO: 869283 - DNA, 25 bp, Homo sapien
accacatactttatgtctcccgaaa

SEQ ID NO: 869284 - DNA, 25 bp, Homo sapien
catactttatgtctcccgaaagcag

SEQ ID NO: 869285 - DNA, 25 bp, Homo sapien
tgagctcgagacctcgagatgctct

SEQ ID NO: 869286 - DNA, 25 bp, Homo sapien
gagacctcgagatgctctcgtctgt

SEQ ID NO: 869287 - DNA, 25 bp, Homo sapien
gagatgctctcgtctgtactgtggg

SEQ ID NO: 869288 - DNA, 25 bp, Homo sapien
tcagttgagctcgagacctcgagat

SEQ ID NO: 869289 - DNA, 25 bp, Homo sapien
tctgaatgtaatgccgtcctcctga

SEQ ID NO: 869290 - DNA, 25 bp, Homo sapien
aaatatggcaatttaggcaccaagg

SEQ ID NO: 869291 - DNA, 25 bp, Homo sapien
gacacagcgactatgaaagggaccg

SEQ ID NO: 869292 - DNA, 25 bp, Homo sapien
gcccagttaagacgataataaggga

SEQ ID NO: 869293 - DNA, 25 bp, Homo sapien
gatcggagccttcctattcctgtag

SEQ ID NO: 869294 - DNA, 25 bp, Homo sapien
gaccatatcccagagatcggagcct

SEQ ID NO: 869295 - DNA, 25 bp, Homo sapien
taaaacttgtagtcatggagaccat

SEQ ID NO: 869296 - DNA, 25 bp, Homo sapien
cggtgtgggaaggagtcactctata

SEQ ID NO: 869297 - DNA, 25 bp, Homo sapien
ctttacatattctgaaagaaatgtt

SEQ ID NO: 869298 - DNA, 25 bp, Homo sapien
tgctcttctttacatattctgaaag

SEQ ID NO: 869299 - DNA, 25 bp, Homo sapien
cttctttacatattctgaaagaaat

SEQ ID NO: 869300 - DNA, 25 bp, Homo sapien
ctgctcttctttacatattctgaaa

SEQ ID NO: 869301 - DNA, 25 bp, Homo sapien
aataggagtccatggagttgccata

SEQ ID NO: 869302 - DNA, 25 bp, Homo sapien
ggtatttggtgctaataggagtcca

SEQ ID NO: 869303 - DNA, 25 bp, Homo sapien
tttggtgctaataggagtccatgga

SEQ ID NO: 869304 - DNA, 25 bp, Homo sapien
gagtccatggagttgccatacagat

SEQ ID NO: 869305 - DNA, 25 bp, Homo sapien
tgaaacctggtcaccccttccatct

SEQ ID NO: 869306 - DNA, 25 bp, Homo sapien
gctctgtaagagtagcacaatgttc

SEQ ID NO: 869307 - DNA, 25 bp, Homo sapien
ctatgctttgggctctgtaagagta

SEQ ID NO: 869308 - DNA, 25 bp, Homo sapien
taagagtagcacaatgttccagatg

SEQ ID NO: 869309 - DNA, 25 bp, Homo sapien
aggtggtgtgcagcatccacagttt

SEQ ID NO: 869310 - DNA, 25 bp, Homo sapien
actcatcatcaagctcaagtttctg

SEQ ID NO: 869311 - DNA, 25 bp, Homo sapien
tatagatcgtgcctctggtgccatg

SEQ ID NO: 869312 - DNA, 25 bp, Homo sapien
tcccctacgataaggtgtcatttct

SEQ ID NO: 869313 - DNA, 25 bp, Homo sapien
cacatggtctttcatagaacaaatg

SEQ ID NO: 869314 - DNA, 25 bp, Homo sapien
atcaatgatgacatagaggaagtga

SEQ ID NO: 869315 - DNA, 25 bp, Homo sapien
tactagtgtgggttgtgagaacaca

SEQ ID NO: 869316 - DNA, 25 bp, Homo sapien
ccaattgttcctcatcaatgatgac

SEQ ID NO: 869317 - DNA, 25 bp, Homo sapien
cttcctactagtgtgggttgtgaga

SEQ ID NO: 869318 - DNA, 25 bp, Homo sapien
gacacttggcgaggaattaaactgg

SEQ ID NO: 869319 - DNA, 25 bp, Homo sapien
tcctaggaaggacgctgtttgtgaa

SEQ ID NO: 869320 - DNA, 25 bp, Homo sapien
aactggagctaagggcacagaagtt

SEQ ID NO: 869321 - DNA, 25 bp, Homo sapien
aaggcaagcgttcttctgggtggtc

SEQ ID NO: 869322 - DNA, 25 bp, Homo sapien
ctgaatcgcagaagcacagcacggt

SEQ ID NO: 869323 - DNA, 25 bp, Homo sapien
cctctctgtttatcggtttgttgct

SEQ ID NO: 869324 - DNA, 25 bp, Homo sapien
tattttcagaagttgcgattttagt

SEQ ID NO: 869325 - DNA, 25 bp, Homo sapien
caaggccagaaggtgcacgaagaag

SEQ ID NO: 869326 - DNA, 25 bp, Homo sapien
gatcatctgatcatctctggctact

SEQ ID NO: 869327 - DNA, 25 bp, Homo sapien
gagcatgtccattgattcgccacct

SEQ ID NO: 869328 - DNA, 25 bp, Homo sapien
ggagtccacagtcccaatggtacag

SEQ ID NO: 869329 - DNA, 25 bp, Homo sapien
tctggctactttatatacggtgagc

SEQ ID NO: 869330 - DNA, 25 bp, Homo sapien
gggagtgcctccaacacgaggatac

SEQ ID NO: 869331 - DNA, 25 bp, Homo sapien
cctccaacacgaggatactagatat

SEQ ID NO: 869332 - DNA, 25 bp, Homo sapien
agtgcctccaacacgaggatactag

SEQ ID NO: 869333 - DNA, 25 bp, Homo sapien
aatgtaggggagtgcctccaacacg

SEQ ID NO: 869334 - DNA, 25 bp, Homo sapien
aagtgcgtgggtgtgcgctccagcc

SEQ ID NO: 869335 - DNA, 25 bp, Homo sapien
gtgcgtgggtgtgcgctccagcccg

SEQ ID NO: 869336 - DNA, 25 bp, Homo sapien
ggaagtgcgtgggtgtgcgctccag

SEQ ID NO: 869337 - DNA, 25 bp, Homo sapien
catgggaagtgcgtgggtgtgcgct

SEQ ID NO: 869338 - DNA, 25 bp, Homo sapien
cattgatttagagcaaaacttgtct

SEQ ID NO: 869339 - DNA, 25 bp, Homo sapien
tcattgatttagagcaaaacttgtc

SEQ ID NO: 869340 - DNA, 25 bp, Homo sapien
gaagcacccagccttaaccatcagg

SEQ ID NO: 869341 - DNA, 25 bp, Homo sapien
gtcagcgcgtgggtgaagcacccag

SEQ ID NO: 869342 - DNA, 25 bp, Homo sapien
cagcgcgtgggtgaagcacccagcc

SEQ ID NO: 869343 - DNA, 25 bp, Homo sapien
catctggtgagtgaggcagtactgg

SEQ ID NO: 869344 - DNA, 25 bp, Homo sapien
ccgtttggaagtgtccggtgatgga

SEQ ID NO: 869345 - DNA, 25 bp, Homo sapien
cctggttggttgaaagtagtcacgg

SEQ ID NO: 869346 - DNA, 25 bp, Homo sapien
gaaacactggagccgtttggaagtg

SEQ ID NO: 869347 - DNA, 25 bp, Homo sapien
gatggagatgagtgcctggttggtt

SEQ ID NO: 869348 - DNA, 25 bp, Homo sapien
ggagcaatgccgtcacaccttctgt

SEQ ID NO: 869349 - DNA, 25 bp, Homo sapien
tgcacatgtatacctgatcttccgg

SEQ ID NO: 869350 - DNA, 25 bp, Homo sapien
tagactcaaagtctcaggagcaatg

SEQ ID NO: 869351 - DNA, 25 bp, Homo sapien
caaggcaagcagaatgagttagact

SEQ ID NO: 869352 - DNA, 25 bp, Homo sapien
gtctccaagcacaccacacaggaag

SEQ ID NO: 869353 - DNA, 25 bp, Homo sapien
gagtctccaagcacaccacacagga

SEQ ID NO: 869354 - DNA, 25 bp, Homo sapien
cagagtctccaagcacaccacacag

SEQ ID NO: 869355 - DNA, 25 bp, Homo sapien
agtctccaagcacaccacacaggaa

SEQ ID NO: 869356 - DNA, 25 bp, Homo sapien
ctgccagtttgtaaagatagcataa

SEQ ID NO: 869357 - DNA, 25 bp, Homo sapien
gccagtttgtaaagatagcataaca

SEQ ID NO: 869358 - DNA, 25 bp, Homo sapien
gcataacattgtttcgctggcactc

SEQ ID NO: 869359 - DNA, 25 bp, Homo sapien
tttgtaaagatagcataacattgtt

SEQ ID NO: 869360 - DNA, 25 bp, Homo sapien
aaagccaacttgttcagtcccaggg

SEQ ID NO: 869361 - DNA, 25 bp, Homo sapien
gacctagaatccaacacaagctgtg

SEQ ID NO: 869362 - DNA, 25 bp, Homo sapien
aatgctggtccttccactcagaaag

SEQ ID NO: 869363 - DNA, 25 bp, Homo sapien
tttcatagctaagtcacacaggtgg

SEQ ID NO: 869364 - DNA, 25 bp, Homo sapien
cagagaataatcaatcagaaagtta

SEQ ID NO: 869365 - DNA, 25 bp, Homo sapien
aggcccatattgattgtttcagaga

SEQ ID NO: 869366 - DNA, 25 bp, Homo sapien
tcaaaggttagcaaaggcccatatt

SEQ ID NO: 869367 - DNA, 25 bp, Homo sapien
aaagttaagcaacgcatcgccagag

SEQ ID NO: 869368 - DNA, 25 bp, Homo sapien
gctcaatgggaataactttggcctt

SEQ ID NO: 869369 - DNA, 25 bp, Homo sapien
caatgggaataactttggccttcat

SEQ ID NO: 869370 - DNA, 25 bp, Homo sapien
tctgctcaatgggaataactttggc

SEQ ID NO: 869371 - DNA, 25 bp, Homo sapien
caggggccactccttcactccaagt

SEQ ID NO: 869372 - DNA, 25 bp, Homo sapien
gattttagatattaggtggatcacc

SEQ ID NO: 869373 - DNA, 25 bp, Homo sapien
ggctttcgggacttcaacattggaa

SEQ ID NO: 869374 - DNA, 25 bp, Homo sapien
tatccctgttcaacttggcctctgg

SEQ ID NO: 869375 - DNA, 25 bp, Homo sapien
tcaagttggcccactaaattaagtc

SEQ ID NO: 869376 - DNA, 25 bp, Homo sapien
tgatctctcttgcttttccccacat

SEQ ID NO: 869377 - DNA, 25 bp, Homo sapien
tctcttgcttttccccacatttccc

SEQ ID NO: 869378 - DNA, 25 bp, Homo sapien
ctctcttgcttttccccacatttcc

SEQ ID NO: 869379 - DNA, 25 bp, Homo sapien
atctctcttgcttttccccacattt

SEQ ID NO: 869380 - DNA, 25 bp, Homo sapien
caccattgatacaatcatcaaggct

SEQ ID NO: 869381 - DNA, 25 bp, Homo sapien
cattgatacaatcatcaaggctgca

SEQ ID NO: 869382 - DNA, 25 bp, Homo sapien
agcatactctctggggtttgtgtca

SEQ ID NO: 869383 - DNA, 25 bp, Homo sapien
caaggctgcaagcagcatactctct

SEQ ID NO: 869384 - DNA, 25 bp, Homo sapien
attttgtagctaactgcgtcagctt

SEQ ID NO: 869385 - DNA, 25 bp, Homo sapien
gtgttctctagatattttgtagcta

SEQ ID NO: 869386 - DNA, 25 bp, Homo sapien
agatattttgtagctaactgcgtca

SEQ ID NO: 869387 - DNA, 25 bp, Homo sapien
tctagatattttgtagctaactgcg

SEQ ID NO: 869388 - DNA, 25 bp, Homo sapien
tctccgtctccgcggaggtgctttt

SEQ ID NO: 869389 - DNA, 25 bp, Homo sapien
ctccgtctccgcggaggtgcttttc

SEQ ID NO: 869390 - DNA, 25 bp, Homo sapien
gtctccgtctccgcggaggtgcttt

SEQ ID NO: 869391 - DNA, 25 bp, Homo sapien
tgatctctcttgcttttccccacat

SEQ ID NO: 869392 - DNA, 25 bp, Homo sapien
tctcttgcttttccccacatttccc

SEQ ID NO: 869393 - DNA, 25 bp, Homo sapien
ctctcttgcttttccccacatttcc

SEQ ID NO: 869394 - DNA, 25 bp, Homo sapien
atctctcttgcttttccccacattt

SEQ ID NO: 869395 - DNA, 25 bp, Homo sapien
cattgatacaatcatcaaggctgca

SEQ ID NO: 869396 - DNA, 25 bp, Homo sapien
caaggctgcaagcagcatactctct

SEQ ID NO: 869397 - DNA, 25 bp, Homo sapien
caccattgatacaatcatcaaggct

SEQ ID NO: 869398 - DNA, 25 bp, Homo sapien
agcatactctctggggtttgtgtca

SEQ ID NO: 869399 - DNA, 25 bp, Homo sapien
tctagatattttgtagctaactgcg

SEQ ID NO: 869400 - DNA, 25 bp, Homo sapien
attttgtagctaactgcgtcagctt

SEQ ID NO: 869401 - DNA, 25 bp, Homo sapien
gtgttctctagatattttgtagcta

SEQ ID NO: 869402 - DNA, 25 bp, Homo sapien
agatattttgtagctaactgcgtca

SEQ ID NO: 869403 - DNA, 25 bp, Homo sapien
tctccgtctccgcggaggtgctttt

SEQ ID NO: 869404 - DNA, 25 bp, Homo sapien
ctccgtctccgcggaggtgcttttc

SEQ ID NO: 869405 - DNA, 25 bp, Homo sapien
gtctccgtctccgcggaggtgcttt

SEQ ID NO: 869406 - DNA, 25 bp, Homo sapien
tgcggggcccgatgccgccctccat

SEQ ID NO: 869407 - DNA, 25 bp, Homo sapien
agaggccccactttgcaggcgagag

SEQ ID NO: 869408 - DNA, 25 bp, Homo sapien
ctccatccaggtcaccactgcacct

SEQ ID NO: 869409 - DNA, 25 bp, Homo sapien
actgatgtgtctcgagggggcctct

SEQ ID NO: 869410 - DNA, 25 bp, Homo sapien
tgtttataaacacacggcgcggctg

SEQ ID NO: 869411 - DNA, 25 bp, Homo sapien
tgaatccgccgatccgggctttggg

SEQ ID NO: 869412 - DNA, 25 bp, Homo sapien
ggcccgccgggagctctgtttataa

SEQ ID NO: 869413 - DNA, 25 bp, Homo sapien
cagacttgcggaaggctccgttccc

SEQ ID NO: 869414 - DNA, 25 bp, Homo sapien
ccggaccgccctactgcgcaccggg

SEQ ID NO: 869415 - DNA, 25 bp, Homo sapien
gggactgctggctgcgcagcgtggc

SEQ ID NO: 869416 - DNA, 25 bp, Homo sapien
acgtggtgcgcacgtggtccggccc

SEQ ID NO: 869417 - DNA, 25 bp, Homo sapien
gcagcgtggccagccggaccgccct

SEQ ID NO: 869418 - DNA, 25 bp, Homo sapien
cctgcccaatgtcgggtgcgcgagt

SEQ ID NO: 869419 - DNA, 25 bp, Homo sapien
cgttcttcaatgctccaaagggagg

SEQ ID NO: 869420 - DNA, 25 bp, Homo sapien
gcgttgcacattgcgcgtgcgcaca

SEQ ID NO: 869421 - DNA, 25 bp, Homo sapien
taaacattgggtgtcctcgaacctg

SEQ ID NO: 869422 - DNA, 25 bp, Homo sapien
catgatcatggaggtcgtgaagacc

SEQ ID NO: 869423 - DNA, 25 bp, Homo sapien
gatttatcatgcgagattggctccc

SEQ ID NO: 869424 - DNA, 25 bp, Homo sapien
cagtgcccagcgagaaaaggattta

SEQ ID NO: 869425 - DNA, 25 bp, Homo sapien
ccagcaaaggtggatgtctctgccc

SEQ ID NO: 869426 - DNA, 25 bp, Homo sapien
agtggacattggtaccattggcaat

SEQ ID NO: 869427 - DNA, 25 bp, Homo sapien
ccttctcaattaccaagtggacatt

SEQ ID NO: 869428 - DNA, 25 bp, Homo sapien
tctcaattaccaagtggacattggt

SEQ ID NO: 869429 - DNA, 25 bp, Homo sapien
cattggtaccattggcaatttccca

SEQ ID NO: 869430 - DNA, 25 bp, Homo sapien
gctttcagtcaccacagcaccgtgt

SEQ ID NO: 869431 - DNA, 25 bp, Homo sapien
taacacatcatcattggaggctgca

SEQ ID NO: 869432 - DNA, 25 bp, Homo sapien
catgaatacgataaactgcagaggg

SEQ ID NO: 869433 - DNA, 25 bp, Homo sapien
gatcaataggtatcagccaagggct

SEQ ID NO: 869434 - DNA, 25 bp, Homo sapien
tgaagatttgtaattaaactcccac

SEQ ID NO: 869435 - DNA, 25 bp, Homo sapien
agatttgtaattaaactcccacact

SEQ ID NO: 869436 - DNA, 25 bp, Homo sapien
atttgtaattaaactcccacacttg

SEQ ID NO: 869437 - DNA, 25 bp, Homo sapien
gaagatttgtaattaaactcccaca

SEQ ID NO: 869438 - DNA, 25 bp, Homo sapien
tcattgccccttctgctaacaggag

SEQ ID NO: 869439 - DNA, 25 bp, Homo sapien
gaacatctagttttcgcctgctcag

SEQ ID NO: 869440 - DNA, 25 bp, Homo sapien
tgtagtcaggaggaccactagcacc

SEQ ID NO: 869441 - DNA, 25 bp, Homo sapien
cactgacgacatctggctggaatga

SEQ ID NO: 869442 - DNA, 25 bp, Homo sapien
tctgcactgatcaatacggtagcca

SEQ ID NO: 869443 - DNA, 25 bp, Homo sapien
tgccttgcatatgtccacctgggag

SEQ ID NO: 869444 - DNA, 25 bp, Homo sapien
tcttcgtgggtcttgtacagctact

SEQ ID NO: 869445 - DNA, 25 bp, Homo sapien
attttctagagcagcaccgtccaac

SEQ ID NO: 869446 - DNA, 25 bp, Homo sapien
gcccagtgctgtgcgccgcagccgc

SEQ ID NO: 869447 - DNA, 25 bp, Homo sapien
gcgccctgctcgcgctgcgctcggc

SEQ ID NO: 869448 - DNA, 25 bp, Homo sapien
tggccgaagtcggcgaggacagcgg

SEQ ID NO: 869449 - DNA, 25 bp, Homo sapien
cagcccagtgctgtgcgccgcagcc

SEQ ID NO: 869450 - DNA, 25 bp, Homo sapien
gcgtcttcgtggacggggccttcca

SEQ ID NO: 869451 - DNA, 25 bp, Homo sapien
aggagccgcacttctacctgcgctg

SEQ ID NO: 869452 - DNA, 25 bp, Homo sapien
tgtccagcttcatctcgcggcgcca

SEQ ID NO: 869453 - DNA, 25 bp, Homo sapien
ctgcctcggcaagaacggcgtcttc

SEQ ID NO: 869454 - DNA, 25 bp, Homo sapien
tgttgctccgggaagtgcgaggtcc

SEQ ID NO: 869455 - DNA, 25 bp, Homo sapien
tgctccgggaagtgcgaggtcccta

SEQ ID NO: 869456 - DNA, 25 bp, Homo sapien
ggagggtgttgctccgggaagtgcg

SEQ ID NO: 869457 - DNA, 25 bp, Homo sapien
ggaagtgcgaggtccctaggagtgt

SEQ ID NO: 869458 - DNA, 25 bp, Homo sapien
ttacatagttaatgtatccaactga

SEQ ID NO: 869459 - DNA, 25 bp, Homo sapien
tccaactgaattcttggtttgtttg

SEQ ID NO: 869460 - DNA, 25 bp, Homo sapien
tcctttttacatagttaatgtatcc

SEQ ID NO: 869461 - DNA, 25 bp, Homo sapien
catagttaatgtatccaactgaatt

SEQ ID NO: 869462 - DNA, 25 bp, Homo sapien
ggtctcgaagtcctgtctccagtga

SEQ ID NO: 869463 - DNA, 25 bp, Homo sapien
tctcgaagtcctgtctccagtgatc

SEQ ID NO: 869464 - DNA, 25 bp, Homo sapien
cgaagtcctgtctccagtgatctgc

SEQ ID NO: 869465 - DNA, 25 bp, Homo sapien
tcgaagtcctgtctccagtgatctg

SEQ ID NO: 869466 - DNA, 25 bp, Homo sapien
acaaagacgggcatcaggtccgact

SEQ ID NO: 869467 - DNA, 25 bp, Homo sapien
tcaggtggtgctgtctcgcttctcc

SEQ ID NO: 869468 - DNA, 25 bp, Homo sapien
tgttcccgttgggtgatggttttga

SEQ ID NO: 869469 - DNA, 25 bp, Homo sapien
ttctccacgtgaaggatcagcctgc

SEQ ID NO: 869470 - DNA, 25 bp, Homo sapien
gtgttgatgatgtatgttttcctcg

SEQ ID NO: 869471 - DNA, 25 bp, Homo sapien
acagtgttgatgatgtatgttttcc

SEQ ID NO: 869472 - DNA, 25 bp, Homo sapien
gttgatgatgtatgttttcctcgga

SEQ ID NO: 869473 - DNA, 25 bp, Homo sapien
tgatgatgtatgttttcctcggatg

SEQ ID NO: 869474 - DNA, 25 bp, Homo sapien
taggatgacccgtgtgggtctcacc

SEQ ID NO: 869475 - DNA, 25 bp, Homo sapien
ctagatttggagctttgtgccagcc

SEQ ID NO: 869476 - DNA, 25 bp, Homo sapien
tgccagccttgtctgtaggatgacc

SEQ ID NO: 869477 - DNA, 25 bp, Homo sapien
acagttgtgatagaggctcctccca

SEQ ID NO: 869478 - DNA, 25 bp, Homo sapien
gattttgctagaatatccagcttcc

SEQ ID NO: 869479 - DNA, 25 bp, Homo sapien
agaagattttgctagaatatccagc

SEQ ID NO: 869480 - DNA, 25 bp, Homo sapien
ttgctagaatatccagcttcctttg

SEQ ID NO: 869481 - DNA, 25 bp, Homo sapien
gaagattttgctagaatatccagct

SEQ ID NO: 869482 - DNA, 25 bp, Homo sapien
tttggattggccaatcagggatgcc

SEQ ID NO: 869483 - DNA, 25 bp, Homo sapien
ttggattggccaatcagggatgcca

SEQ ID NO: 869484 - DNA, 25 bp, Homo sapien
tggattggccaatcagggatgccat

SEQ ID NO: 869485 - DNA, 25 bp, Homo sapien
ctttggattggccaatcagggatgc

SEQ ID NO: 869486 - DNA, 25 bp, Homo sapien
taactctccttcttgaagccaaagg

SEQ ID NO: 869487 - DNA, 25 bp, Homo sapien
aaataaatcgccgaggctctgtcta

SEQ ID NO: 869488 - DNA, 25 bp, Homo sapien
taataaagaagagggacaagcttgc

SEQ ID NO: 869489 - DNA, 25 bp, Homo sapien
tgtgtgcgcgtgacatgtctgtcgt

SEQ ID NO: 869490 - DNA, 25 bp, Homo sapien
cacaacatgcattgcctaagaataa

SEQ ID NO: 869491 - DNA, 25 bp, Homo sapien
ttttctcgcttcaccatatgcaaga

SEQ ID NO: 869492 - DNA, 25 bp, Homo sapien
tattttattcacacctaccccagga

SEQ ID NO: 869493 - DNA, 25 bp, Homo sapien
gatgatcccatatgattagctcatg

SEQ ID NO: 869494 - DNA, 25 bp, Homo sapien
tccaagctccctgcggctgtgaagg

SEQ ID NO: 869495 - DNA, 25 bp, Homo sapien
cagcaaggctgtcattcctaggcag

SEQ ID NO: 869496 - DNA, 25 bp, Homo sapien
gcacgatcagagctaaacagcaggg

SEQ ID NO: 869497 - DNA, 25 bp, Homo sapien
tcattcctaggcagcatcttgcact

SEQ ID NO: 869498 - DNA, 25 bp, Homo sapien
ctctttgttaccacccctggtgcgg

SEQ ID NO: 869499 - DNA, 25 bp, Homo sapien
ggtgcggtggacacagacattgccc

SEQ ID NO: 869500 - DNA, 25 bp, Homo sapien
tcttagagaagcagcgatgtctccc

SEQ ID NO: 869501 - DNA, 25 bp, Homo sapien
ggtttcccatgatgttacgttgccc

SEQ ID NO: 869502 - DNA, 25 bp, Homo sapien
cgggttttcctggagaaggctgcct

SEQ ID NO: 869503 - DNA, 25 bp, Homo sapien
tccgggttttcctggagaaggctgc

SEQ ID NO: 869504 - DNA, 25 bp, Homo sapien
ggttttcctggagaaggctgcctca

SEQ ID NO: 869505 - DNA, 25 bp, Homo sapien
gttttcctggagaaggctgcctcac

SEQ ID NO: 869506 - DNA, 25 bp, Homo sapien
catgcgtgtgcgaccagtactccat

SEQ ID NO: 869507 - DNA, 25 bp, Homo sapien
ggtctttgcagttggcgtgttcccc

SEQ ID NO: 869508 - DNA, 25 bp, Homo sapien
gccattcgtatctgattcatgcgtg

SEQ ID NO: 869509 - DNA, 25 bp, Homo sapien
gttccccggtgccattcgtatctga

SEQ ID NO: 869510 - DNA, 25 bp, Homo sapien
tctgcacgggccacgatactgttca

SEQ ID NO: 869511 - DNA, 25 bp, Homo sapien
ctgttcatagaagctgagctcagct

SEQ ID NO: 869512 - DNA, 25 bp, Homo sapien
gcttgttgtgactcttgttccttct

SEQ ID NO: 869513 - DNA, 25 bp, Homo sapien
ttacagccattccacgtcgtggatt

SEQ ID NO: 869514 - DNA, 25 bp, Homo sapien
ccagcgtgctgggacgggtacactc

SEQ ID NO: 869515 - DNA, 25 bp, Homo sapien
tgctgggacgggtacactcgtgcct

SEQ ID NO: 869516 - DNA, 25 bp, Homo sapien
tacactcgtgcctgttaaccgcaca

SEQ ID NO: 869517 - DNA, 25 bp, Homo sapien
ggacgggtacactcgtgcctgttaa

SEQ ID NO: 869518 - DNA, 25 bp, Homo sapien
ggtgaaacgaggaagtcgtaggaga

SEQ ID NO: 869519 - DNA, 25 bp, Homo sapien
cttgggtgaaacgaggaagtcgtag

SEQ ID NO: 869520 - DNA, 25 bp, Homo sapien
tgggtgaaacgaggaagtcgtagga

SEQ ID NO: 869521 - DNA, 25 bp, Homo sapien
tgaaacgaggaagtcgtaggagacc

SEQ ID NO: 869522 - DNA, 25 bp, Homo sapien
tcagatgctcgggtgcacatctggg

SEQ ID NO: 869523 - DNA, 25 bp, Homo sapien
cgcccagcatggcttttggctttgg

SEQ ID NO: 869524 - DNA, 25 bp, Homo sapien
cagaattggcatccaggtgaggtgc

SEQ ID NO: 869525 - DNA, 25 bp, Homo sapien
acatctggggagagtcaaccgccca

SEQ ID NO: 869526 - DNA, 25 bp, Homo sapien
cttctgagactcccacgagggctgt

SEQ ID NO: 869527 - DNA, 25 bp, Homo sapien
acgagggctgtgccgtaggccacac

SEQ ID NO: 869528 - DNA, 25 bp, Homo sapien
ccacgagggctgtgccgtaggccac

SEQ ID NO: 869529 - DNA, 25 bp, Homo sapien
ctcttctgagactcccacgagggct

SEQ ID NO: 869530 - DNA, 25 bp, Homo sapien
tttcttgcctgccaaacgttctctg

SEQ ID NO: 869531 - DNA, 25 bp, Homo sapien
tgtgacacgactctttcttgcctgc

SEQ ID NO: 869532 - DNA, 25 bp, Homo sapien
ccccgcctccagtggagatgtgaca

SEQ ID NO: 869533 - DNA, 25 bp, Homo sapien
cgggaccggctcacaagcttctgtt

SEQ ID NO: 869534 - DNA, 25 bp, Homo sapien
tgagcgttccttccgcgaagggaag

SEQ ID NO: 869535 - DNA, 25 bp, Homo sapien
cgcctgtgctgccatggggtgctca

SEQ ID NO: 869536 - DNA, 25 bp, Homo sapien
cagatgagcgttccttccgcgaagg

SEQ ID NO: 869537 - DNA, 25 bp, Homo sapien
gctgtgaacaccgagggtgccgtcc

SEQ ID NO: 869538 - DNA, 25 bp, Homo sapien
agccccagggagggtcggtggccat

SEQ ID NO: 869539 - DNA, 25 bp, Homo sapien
tgagccccagggagggtcggtggcc

SEQ ID NO: 869540 - DNA, 25 bp, Homo sapien
gagccccagggagggtcggtggcca

SEQ ID NO: 869541 - DNA, 25 bp, Homo sapien
ctgagccccagggagggtcggtggc

SEQ ID NO: 869542 - DNA, 25 bp, Homo sapien
tgaaaaccggcctggcgtcttctgg

SEQ ID NO: 869543 - DNA, 25 bp, Homo sapien
catcctgcaggtatcgctcgtgaaa

SEQ ID NO: 869544 - DNA, 25 bp, Homo sapien
cccacatgggaactgcatcctgcag

SEQ ID NO: 869545 - DNA, 25 bp, Homo sapien
agtccggctgacatcctctctctgg

SEQ ID NO: 869546 - DNA, 25 bp, Homo sapien
tccgcccggaacgtgacatagagag

SEQ ID NO: 869547 - DNA, 25 bp, Homo sapien
aattatccgtggctccgatgtcccg

SEQ ID NO: 869548 - DNA, 25 bp, Homo sapien
taatcccctcgaagagtaaacctgc

SEQ ID NO: 869549 - DNA, 25 bp, Homo sapien
tacctgttgacgtctgatgaccggc

SEQ ID NO: 869550 - DNA, 25 bp, Homo sapien
gctctttgtggaagtccgtacctgt

SEQ ID NO: 869551 - DNA, 25 bp, Homo sapien
tctttgtggaagtccgtacctgttg

SEQ ID NO: 869552 - DNA, 25 bp, Homo sapien
tttgtggaagtccgtacctgttgcc

SEQ ID NO: 869553 - DNA, 25 bp, Homo sapien
agctctttgtggaagtccgtacctg

SEQ ID NO: 869554 - DNA, 25 bp, Homo sapien
cttcgctttcagagccggcgggagt

SEQ ID NO: 869555 - DNA, 25 bp, Homo sapien
cgggagtgcaggtctgttttgcttc

SEQ ID NO: 869556 - DNA, 25 bp, Homo sapien
tttgcccttgagtgacttcatgcgg

SEQ ID NO: 869557 - DNA, 25 bp, Homo sapien
catgcgggatgaggaactgttgacc

SEQ ID NO: 869558 - DNA, 25 bp, Homo sapien
ctgctggatggaacatttcaacccc

SEQ ID NO: 869559 - DNA, 25 bp, Homo sapien
gcaggggtgctacctgggtgtgtga

SEQ ID NO: 869560 - DNA, 25 bp, Homo sapien
aggggtgctacctgggtgtgtgaag

SEQ ID NO: 869561 - DNA, 25 bp, Homo sapien
tgctgctggatggaacatttcaacc

SEQ ID NO: 869562 - DNA, 25 bp, Homo sapien
gctgacagccaagaagagttttcct

SEQ ID NO: 869563 - DNA, 25 bp, Homo sapien
tgtcagacacggtgaaaagagtgca

SEQ ID NO: 869564 - DNA, 25 bp, Homo sapien
gaactggcccctaagtctccaaatg

SEQ ID NO: 869565 - DNA, 25 bp, Homo sapien
tccgagtctagaggtaaaagcagct

SEQ ID NO: 869566 - DNA, 25 bp, Homo sapien
cagtggcgcctgtctaaagtatttt

SEQ ID NO: 869567 - DNA, 25 bp, Homo sapien
ccttgcgtgtctcaccctggaggag

SEQ ID NO: 869568 - DNA, 25 bp, Homo sapien
taaaaagcagcagtgtcctatgaag

SEQ ID NO: 869569 - DNA, 25 bp, Homo sapien
tgtcagttctagagcattggatgtg

SEQ ID NO: 869570 - DNA, 25 bp, Homo sapien
tttccgaggttcgtgcgcgtctggt

SEQ ID NO: 869571 - DNA, 25 bp, Homo sapien
tcggcaggagcggagagtttgctcc

SEQ ID NO: 869572 - DNA, 25 bp, Homo sapien
cggcggcgtgatgttctcggcagga

SEQ ID NO: 869573 - DNA, 25 bp, Homo sapien
gctgcagctcctggagtttccgagg

SEQ ID NO: 869574 - DNA, 25 bp, Homo sapien
ggcttgggcgccagccttgcaggaa

SEQ ID NO: 869575 - DNA, 25 bp, Homo sapien
ggaacccgactggactcgccctcga

SEQ ID NO: 869576 - DNA, 25 bp, Homo sapien
ctcgccctcgagacttggggatcgg

SEQ ID NO: 869577 - DNA, 25 bp, Homo sapien
atcgggtaaggcaacacggcggcca

SEQ ID NO: 869578 - DNA, 25 bp, Homo sapien
tttgctgtgtccctagcccaggaaa

SEQ ID NO: 869579 - DNA, 25 bp, Homo sapien
gctgcagtggactcggaagccgtct

SEQ ID NO: 869580 - DNA, 25 bp, Homo sapien
tgtgtgtgactcacgagctgtccgt

SEQ ID NO: 869581 - DNA, 25 bp, Homo sapien
accaggatcccggtggagcagttcc

SEQ ID NO: 869582 - DNA, 25 bp, Homo sapien
gtttttggacagttgatgggcaaga

SEQ ID NO: 869583 - DNA, 25 bp, Homo sapien
agaagagctgcagtaaaagtaaatc

SEQ ID NO: 869584 - DNA, 25 bp, Homo sapien
tttgtttttggacagttgatgggca

SEQ ID NO: 869585 - DNA, 25 bp, Homo sapien
tggacagttgatgggcaagaagagc

SEQ ID NO: 869586 - DNA, 25 bp, Homo sapien
ctgtatgaagagtgcgcgatcagtt

SEQ ID NO: 869587 - DNA, 25 bp, Homo sapien
aagagtgcgcgatcagttccgttac

SEQ ID NO: 869588 - DNA, 25 bp, Homo sapien
tatgaagagtgcgcgatcagttccg

SEQ ID NO: 869589 - DNA, 25 bp, Homo sapien
tgaagagtgcgcgatcagttccgtt

SEQ ID NO: 869590 - DNA, 25 bp, Homo sapien
ctggggagaggaccagggatgggaa

SEQ ID NO: 869591 - DNA, 25 bp, Homo sapien
tggggagaggaccagggatgggaac

SEQ ID NO: 869592 - DNA, 25 bp, Homo sapien
ccactgctgctacagaaaccaggtc

SEQ ID NO: 869593 - DNA, 25 bp, Homo sapien
tcaccgctctgggtggtgcgcttgt

SEQ ID NO: 869594 - DNA, 25 bp, Homo sapien
cgagttcccgggtgtggtcaccgct

SEQ ID NO: 869595 - DNA, 25 bp, Homo sapien
tgcgcttgtcaatgccccttttgat

SEQ ID NO: 869596 - DNA, 25 bp, Homo sapien
aggagctccccagatgcccgagccg

SEQ ID NO: 869597 - DNA, 25 bp, Homo sapien
cgtgcgggctcaggagctccccaga

SEQ ID NO: 869598 - DNA, 25 bp, Homo sapien
caggagctccccagatgcccgagcc

SEQ ID NO: 869599 - DNA, 25 bp, Homo sapien
agctccccagatgcccgagccgaac

SEQ ID NO: 869600 - DNA, 25 bp, Homo sapien
cagtgcgcgggtctcgggatcactt

SEQ ID NO: 869601 - DNA, 25 bp, Homo sapien
cgcttccgtcggcagcactgtgttt

SEQ ID NO: 869602 - DNA, 25 bp, Homo sapien
tgtacaactgtgcataccaaggcgt

SEQ ID NO: 869603 - DNA, 25 bp, Homo sapien
gaaacagcagcgcacgtgtacaact

SEQ ID NO: 869604 - DNA, 25 bp, Homo sapien
tcaagatgcgggtcccaaagacact

SEQ ID NO: 869605 - DNA, 25 bp, Homo sapien
tactgcatgactcaggtcagaggcg

SEQ ID NO: 869606 - DNA, 25 bp, Homo sapien
gacacaaaagaatccagacccaagg

SEQ ID NO: 869607 - DNA, 25 bp, Homo sapien
cacagcaaccgcgtcttaaataggg

SEQ ID NO: 869608 - DNA, 25 bp, Homo sapien
ggcagtgctaacacacacgttgtgg

SEQ ID NO: 869609 - DNA, 25 bp, Homo sapien
ccgttaaggcatcaaatcagagtcc

SEQ ID NO: 869610 - DNA, 25 bp, Homo sapien
tcagaaggccggagaatattgcagg

SEQ ID NO: 869611 - DNA, 25 bp, Homo sapien
atcactggtgggactgcattcgcct

SEQ ID NO: 869612 - DNA, 25 bp, Homo sapien
ccgcacacagaactgcgggtcggca

SEQ ID NO: 869613 - DNA, 25 bp, Homo sapien
gcagcgtggagctgcacgaggccca

SEQ ID NO: 869614 - DNA, 25 bp, Homo sapien
aacctggcagtggtcgccgtttcga

SEQ ID NO: 869615 - DNA, 25 bp, Homo sapien
aggcgcaatgcggagccgcacacag

SEQ ID NO: 869616 - DNA, 25 bp, Homo sapien
atctgcaactgatgccgggaccctc

SEQ ID NO: 869617 - DNA, 25 bp, Homo sapien
tctctgttgctatcaaagatgaccc

SEQ ID NO: 869618 - DNA, 25 bp, Homo sapien
tcccagtgagaggtgcatctgcaac

SEQ ID NO: 869619 - DNA, 25 bp, Homo sapien
aggacaccgatctggggaccccgca

SEQ ID NO: 869620 - DNA, 25 bp, Homo sapien
cgacccacgctgtcaccccgaggca

SEQ ID NO: 869621 - DNA, 25 bp, Homo sapien
acgctgtcaccccgaggcagcaagt

SEQ ID NO: 869622 - DNA, 25 bp, Homo sapien
accccgaggcagcaagtgccctgcc

SEQ ID NO: 869623 - DNA, 25 bp, Homo sapien
tgaggatgcccagcgacccacgctg

SEQ ID NO: 869624 - DNA, 25 bp, Homo sapien
gcagggagagtcagttcagatgatc

SEQ ID NO: 869625 - DNA, 25 bp, Homo sapien
gtcactgcattctcccgtgccggtg

SEQ ID NO: 869626 - DNA, 25 bp, Homo sapien
tcagatgatcccctgatgacagctg

SEQ ID NO: 869627 - DNA, 25 bp, Homo sapien
caacgcctgggtgtctagacctttc

SEQ ID NO: 869628 - DNA, 25 bp, Homo sapien
caacttggtcagttacaaaacaggg

SEQ ID NO: 869629 - DNA, 25 bp, Homo sapien
aatagaacctacactgagatgcatg

SEQ ID NO: 869630 - DNA, 25 bp, Homo sapien
catcacaatttcacgtcatctgcca

SEQ ID NO: 869631 - DNA, 25 bp, Homo sapien
tattgaaccgtacttctccattgaa

SEQ ID NO: 869632 - DNA, 25 bp, Homo sapien
tcttggctgtttccacgtcggactt

SEQ ID NO: 869633 - DNA, 25 bp, Homo sapien
ttcttcccgccatgacggatcaggt

SEQ ID NO: 869634 - DNA, 25 bp, Homo sapien
ttcgcgaccaggaaccgcatcttct

SEQ ID NO: 869635 - DNA, 25 bp, Homo sapien
cgtgcggaaatggatcttcttggct

SEQ ID NO: 869636 - DNA, 25 bp, Homo sapien
tgaaatccatgccagaggtgggggt

SEQ ID NO: 869637 - DNA, 25 bp, Homo sapien
caccaggggagacccacagggtgca

SEQ ID NO: 869638 - DNA, 25 bp, Homo sapien
acagggtgcagccgggcctctcctt

SEQ ID NO: 869639 - DNA, 25 bp, Homo sapien
agacccacagggtgcagccgggcct

SEQ ID NO: 869640 - DNA, 25 bp, Homo sapien
ccaggtccactcccctgagcagggc

SEQ ID NO: 869641 - DNA, 25 bp, Homo sapien
aggtccactcccctgagcagggcat

SEQ ID NO: 869642 - DNA, 25 bp, Homo sapien
cccaggtccactcccctgagcaggg

SEQ ID NO: 869643 - DNA, 25 bp, Homo sapien
caggtccactcccctgagcagggca

SEQ ID NO: 869644 - DNA, 25 bp, Homo sapien
aggggccgggcgtgcatgcggtggg

SEQ ID NO: 869645 - DNA, 25 bp, Homo sapien
ggagaaggggccgggcgtgcatgcg

SEQ ID NO: 869646 - DNA, 25 bp, Homo sapien
gccgggcgtgcatgcggtgggggta

SEQ ID NO: 869647 - DNA, 25 bp, Homo sapien
ccgggcgtgcatgcggtgggggtac

SEQ ID NO: 869648 - DNA, 25 bp, Homo sapien
caggatacggtcccccagcgacagg

SEQ ID NO: 869649 - DNA, 25 bp, Homo sapien
gctgcccgggagcagggtctggatg

SEQ ID NO: 869650 - DNA, 25 bp, Homo sapien
gacaggcgcccgtcggccgctgcgg

SEQ ID NO: 869651 - DNA, 25 bp, Homo sapien
tctggatgtagagcccgggggcgcc

SEQ ID NO: 869652 - DNA, 25 bp, Homo sapien
atcccgtcgatcaggcccatcccca

SEQ ID NO: 869653 - DNA, 25 bp, Homo sapien
tgaagacgtagcagaagtcctcggt

SEQ ID NO: 869654 - DNA, 25 bp, Homo sapien
tccagctccaccgtgaagacgtagc

SEQ ID NO: 869655 - DNA, 25 bp, Homo sapien
caccgtgaagacgtagcagaagtcc

SEQ ID NO: 869656 - DNA, 25 bp, Homo sapien
aggggactcctccgcaagggctgca

SEQ ID NO: 869657 - DNA, 25 bp, Homo sapien
ccccacggctgggttgccttccagg

SEQ ID NO: 869658 - DNA, 25 bp, Homo sapien
caagcaggacgagtccgtgtgcggg

SEQ ID NO: 869659 - DNA, 25 bp, Homo sapien
gcctctctgggagcgcttttccaca

SEQ ID NO: 869660 - DNA, 25 bp, Homo sapien
gaggccgctgagtccgttcctctgc

SEQ ID NO: 869661 - DNA, 25 bp, Homo sapien
tccaggtgcccgtcaaggaccacgt

SEQ ID NO: 869662 - DNA, 25 bp, Homo sapien
cctcaagggaagagtacgctccggg

SEQ ID NO: 869663 - DNA, 25 bp, Homo sapien
cgtcaaggaccacgtggtgcatacc

SEQ ID NO: 869664 - DNA, 25 bp, Homo sapien
cccctcaagggaagagtacgctccg

SEQ ID NO: 869665 - DNA, 25 bp, Homo sapien
ggcacctcagggcacgctggctggg

SEQ ID NO: 869666 - DNA, 25 bp, Homo sapien
acctcggggcacgctggctgggtcc

SEQ ID NO: 869667 - DNA, 25 bp, Homo sapien
cacctcggggcacgctggctggggg

SEQ ID NO: 869668 - DNA, 25 bp, Homo sapien
cctcggggcacgctggctggggggc

SEQ ID NO: 869669 - DNA, 25 bp, Homo sapien
cacctcggggcacgctggctggggg

SEQ ID NO: 869670 - DNA, 25 bp, Homo sapien
gcacctcggggcacgctggctgggg

SEQ ID NO: 869671 - DNA, 25 bp, Homo sapien
cctcggggcacgctggctggggggc

SEQ ID NO: 869672 - DNA, 25 bp, Homo sapien
acctcggggcacgctggctgggggg

SEQ ID NO: 869673 - DNA, 25 bp, Homo sapien
ctcggggcacgctggctgggtggcc

SEQ ID NO: 869674 - DNA, 25 bp, Homo sapien
ggcacctcagggcacgctggctggg

SEQ ID NO: 869675 - DNA, 25 bp, Homo sapien
ccgggcacctcagggcacgctggct

SEQ ID NO: 869676 - DNA, 25 bp, Homo sapien
cacctcggggcacgctggctgggtg

SEQ ID NO: 869677 - DNA, 25 bp, Homo sapien
ccactgccaggcctgccagggctgc

SEQ ID NO: 869678 - DNA, 25 bp, Homo sapien
ctcggggcacactggctgggaggcc

SEQ ID NO: 869679 - DNA, 25 bp, Homo sapien
gccggggctggctctgctccgcaga

SEQ ID NO: 869680 - DNA, 25 bp, Homo sapien
gcacactggctgggaggccccactg

SEQ ID NO: 869681 - DNA, 25 bp, Homo sapien
cacagaaagtggcggacgtagagca

SEQ ID NO: 869682 - DNA, 25 bp, Homo sapien
aaagtggcggacgtagagcaggtgc

SEQ ID NO: 869683 - DNA, 25 bp, Homo sapien
gctggtagatgctgtcgtccaggca

SEQ ID NO: 869684 - DNA, 25 bp, Homo sapien
acgtagagcaggtgctggtagatgc

SEQ ID NO: 869685 - DNA, 25 bp, Homo sapien
ttttcgtaggactccagaacatcct

SEQ ID NO: 869686 - DNA, 25 bp, Homo sapien
ggttttcgtaggactccagaacatc

SEQ ID NO: 869687 - DNA, 25 bp, Homo sapien
gtcgctgggcaggacgatgggtggg

SEQ ID NO: 869688 - DNA, 25 bp, Homo sapien
tggaagccgtcgctgggcaggacga

SEQ ID NO: 869689 - DNA, 25 bp, Homo sapien
gagaggatgcccgtaatggccacag

SEQ ID NO: 869690 - DNA, 25 bp, Homo sapien
gaggatgcccgtaatggccacagga

SEQ ID NO: 869691 - DNA, 25 bp, Homo sapien
agaggatgcccgtaatggccacagg

SEQ ID NO: 869692 - DNA, 25 bp, Homo sapien
ccagcagattgagccctgagtcccc

SEQ ID NO: 869693 - DNA, 25 bp, Homo sapien
gaccacccggtgtgacatccgagca

SEQ ID NO: 869694 - DNA, 25 bp, Homo sapien
aggccttgtagccaggaaccctcca

SEQ ID NO: 869695 - DNA, 25 bp, Homo sapien
tgtgacatccgagcagttcaggact

SEQ ID NO: 869696 - DNA, 25 bp, Homo sapien
cagttcaggactgagaacaaggcct

SEQ ID NO: 869697 - DNA, 25 bp, Homo sapien
ccagctggtagtgagtcagcagccg

SEQ ID NO: 869698 - DNA, 25 bp, Homo sapien
ctgacctgaaggcctcggggctgtc

SEQ ID NO: 869699 - DNA, 25 bp, Homo sapien
gaacgcagcccgcagggctgtccag

SEQ ID NO: 869700 - DNA, 25 bp, Homo sapien
tgctgggctcagtgcggggaacgca

SEQ ID NO: 869701 - DNA, 25 bp, Homo sapien
ttagttctaaacaccaatacactcg

SEQ ID NO: 869702 - DNA, 25 bp, Homo sapien
atgaattagttctaaacaccaatac

SEQ ID NO: 869703 - DNA, 25 bp, Homo sapien
gttctaaacaccaatacactcggac

SEQ ID NO: 869704 - DNA, 25 bp, Homo sapien
gaattagttctaaacaccaatacac

SEQ ID NO: 869705 - DNA, 25 bp, Homo sapien
tggaagaagtgctctccagccgccc

SEQ ID NO: 869706 - DNA, 25 bp, Homo sapien
cggcgctccgcatccactccaggag

SEQ ID NO: 869707 - DNA, 25 bp, Homo sapien
cgctccgcatccactccaggagctg

SEQ ID NO: 869708 - DNA, 25 bp, Homo sapien
gccggcgctccgcatccactccagg

SEQ ID NO: 869709 - DNA, 25 bp, Homo sapien
gggacagtccaatgatgccctgagc

SEQ ID NO: 869710 - DNA, 25 bp, Homo sapien
catgtccaccgggcagttctgggac

SEQ ID NO: 869711 - DNA, 25 bp, Homo sapien
gccctgacatgtccaccgggcagtt

SEQ ID NO: 869712 - DNA, 25 bp, Homo sapien
acagtccaatgatgccctgagcccg

SEQ ID NO: 869713 - DNA, 25 bp, Homo sapien
gacaccagacgctcagggagcagga

SEQ ID NO: 869714 - DNA, 25 bp, Homo sapien
cagggacaccagacgctcagggagc

SEQ ID NO: 869715 - DNA, 25 bp, Homo sapien
agggacaccagacgctcagggagca

SEQ ID NO: 869716 - DNA, 25 bp, Homo sapien
ggacaccagacgctcagggagcagg

SEQ ID NO: 869717 - DNA, 25 bp, Homo sapien
cctggtacacagacaccacgcggcg

SEQ ID NO: 869718 - DNA, 25 bp, Homo sapien
agaggtaggcgagcatctgcgaggc

SEQ ID NO: 869719 - DNA, 25 bp, Homo sapien
tctgcgaggccacctcggggtgcac

SEQ ID NO: 869720 - DNA, 25 bp, Homo sapien
ttcgggggccgaggaccagctctca

SEQ ID NO: 869721 - DNA, 25 bp, Homo sapien
ggcactccaggagtgccgggaggca

SEQ ID NO: 869722 - DNA, 25 bp, Homo sapien
tccaggagtgccgggaggcagatgt

SEQ ID NO: 869723 - DNA, 25 bp, Homo sapien
cactccaggagtgccgggaggcaga

SEQ ID NO: 869724 - DNA, 25 bp, Homo sapien
actccaggagtgccgggaggcagat

SEQ ID NO: 869725 - DNA, 25 bp, Homo sapien
gcactgcttgcagggacccggcctc

SEQ ID NO: 869726 - DNA, 25 bp, Homo sapien
ccacgcactgcttgcagggacccgg

SEQ ID NO: 869727 - DNA, 25 bp, Homo sapien
gacccggcctcggtagcttcctgct

SEQ ID NO: 869728 - DNA, 25 bp, Homo sapien
acccggcctcggtagcttcctgctg

SEQ ID NO: 869729 - DNA, 25 bp, Homo sapien
agtgcagaagcagagcccgtccgtg

SEQ ID NO: 869730 - DNA, 25 bp, Homo sapien
cctgagtgcagaagcagagcccgtc

SEQ ID NO: 869731 - DNA, 25 bp, Homo sapien
tgagtgcagaagcagagcccgtccg

SEQ ID NO: 869732 - DNA, 25 bp, Homo sapien
tgcagaagcagagcccgtccgtgca

SEQ ID NO: 869733 - DNA, 25 bp, Homo sapien
ctggccgtcagcgtgcaggagaaca

SEQ ID NO: 869734 - DNA, 25 bp, Homo sapien
cttggagacatagtagacgcactgc

SEQ ID NO: 869735 - DNA, 25 bp, Homo sapien
caggagaacagcgattccttcgagc

SEQ ID NO: 869736 - DNA, 25 bp, Homo sapien
ctgctggaaggcgtacagcaccacc

SEQ ID NO: 869737 - DNA, 25 bp, Homo sapien
acgccaatggtcacaacgggcacag

SEQ ID NO: 869738 - DNA, 25 bp, Homo sapien
agacagccacgccaatggtcacaac

SEQ ID NO: 869739 - DNA, 25 bp, Homo sapien
agctctttccctggcgcgggcacca

SEQ ID NO: 869740 - DNA, 25 bp, Homo sapien
ggcacagcgctcaggaacgcagcaa

SEQ ID NO: 869741 - DNA, 25 bp, Homo sapien
gagctgcccacggagtggttcctgc

SEQ ID NO: 869742 - DNA, 25 bp, Homo sapien
gctgcccacggagtggttcctgccg

SEQ ID NO: 869743 - DNA, 25 bp, Homo sapien
gcccacggagtggttcctgccgtct

SEQ ID NO: 869744 - DNA, 25 bp, Homo sapien
tgcccacggagtggttcctgccgtc

SEQ ID NO: 869745 - DNA, 25 bp, Homo sapien
actgtgggcggccaaccacagtggt

SEQ ID NO: 869746 - DNA, 25 bp, Homo sapien
caggaccctgggtgttccgcctttg

SEQ ID NO: 869747 - DNA, 25 bp, Homo sapien
tcctgggactgtgggcggccaacca

SEQ ID NO: 869748 - DNA, 25 bp, Homo sapien
agtggtgttccctgtcagccgcgtg

SEQ ID NO: 869749 - DNA, 25 bp, Homo sapien
ccctactgagtgatctgtgtacccc

SEQ ID NO: 869750 - DNA, 25 bp, Homo sapien
tggcatctgtgtctcccctactgag

SEQ ID NO: 869751 - DNA, 25 bp, Homo sapien
tcacggtggcatctgtgtctcccct

SEQ ID NO: 869752 - DNA, 25 bp, Homo sapien
gtctcccctactgagtgatctgtgt

SEQ ID NO: 869753 - DNA, 25 bp, Homo sapien
tctgctggataaagtacaggagctc

SEQ ID NO: 869754 - DNA, 25 bp, Homo sapien
gctcgatggagttagacatccagaa

SEQ ID NO: 869755 - DNA, 25 bp, Homo sapien
tcctccatgctctgcatgtagagtg

SEQ ID NO: 869756 - DNA, 25 bp, Homo sapien
tccagaaaagaatgggctgcaagtc

SEQ ID NO: 869757 - DNA, 25 bp, Homo sapien
cgcagctggccagcgagatgggctc

SEQ ID NO: 869758 - DNA, 25 bp, Homo sapien
ggcgcagctggccagcgagatgggc

SEQ ID NO: 869759 - DNA, 25 bp, Homo sapien
gcgcagctggccagcgagatgggct

SEQ ID NO: 869760 - DNA, 25 bp, Homo sapien
tagccctgattctgtatccatgggg

SEQ ID NO: 869761 - DNA, 25 bp, Homo sapien
aaaagcagaagtagctcaggcccct

SEQ ID NO: 869762 - DNA, 25 bp, Homo sapien
gctgccttccggctcagtgctccct

SEQ ID NO: 869763 - DNA, 25 bp, Homo sapien
cctggccagcccaatgcaggtaggg

SEQ ID NO: 869764 - DNA, 25 bp, Homo sapien
gcaccagccgcaggatgtgtctgtc

SEQ ID NO: 869765 - DNA, 25 bp, Homo sapien
tgtgacttgacactgccttctagtg

SEQ ID NO: 869766 - DNA, 25 bp, Homo sapien
gtctggtgtgacttgacactgcctt

SEQ ID NO: 869767 - DNA, 25 bp, Homo sapien
cagccgcaggatgtgtctgtctggt

SEQ ID NO: 869768 - DNA, 25 bp, Homo sapien
tggtccatgcaccagctcagcatta

SEQ ID NO: 869769 - DNA, 25 bp, Homo sapien
ccagctcagcattaagccactggac

SEQ ID NO: 869770 - DNA, 25 bp, Homo sapien
tcatccctaagtctccataatcgca

SEQ ID NO: 869771 - DNA, 25 bp, Homo sapien
actggacaagatgcctgggacgccc

SEQ ID NO: 869772 - DNA, 25 bp, Homo sapien
tgccactctgctggccgcagggcat

SEQ ID NO: 869773 - DNA, 25 bp, Homo sapien
agctgccactctgctggccgcaggg

SEQ ID NO: 869774 - DNA, 25 bp, Homo sapien
tggggggattctaaggggtgagcca

SEQ ID NO: 869775 - DNA, 25 bp, Homo sapien
attctaaggggtgagccaggcagct

SEQ ID NO: 869776 - DNA, 25 bp, Homo sapien
cggggagggaagaaactggactgag

SEQ ID NO: 869777 - DNA, 25 bp, Homo sapien
gggagggaagaaactggactgagac

SEQ ID NO: 869778 - DNA, 25 bp, Homo sapien
ggggagggaagaaactggactgaga

SEQ ID NO: 869779 - DNA, 25 bp, Homo sapien
tgtgtctggcacagctcaaagtcct

SEQ ID NO: 869780 - DNA, 25 bp, Homo sapien
atctctcctgtttttggcggctaag

SEQ ID NO: 869781 - DNA, 25 bp, Homo sapien
tcatgtgtctggcacagctcaaagt

SEQ ID NO: 869782 - DNA, 25 bp, Homo sapien
tggcggctaagcaggtccgctgcct

SEQ ID NO: 869783 - DNA, 25 bp, Homo sapien
agaggttgtgagtgagaaagcaaac

SEQ ID NO: 869784 - DNA, 25 bp, Homo sapien
accacagacagctcagccagcgcca

SEQ ID NO: 869785 - DNA, 25 bp, Homo sapien
ctggagaggttgtgagtgagaaagc

SEQ ID NO: 869786 - DNA, 25 bp, Homo sapien
gagaaagcaaaccacagacagctca

SEQ ID NO: 869787 - DNA, 25 bp, Homo sapien
aaacaaagaatgatttgagacacag

SEQ ID NO: 869788 - DNA, 25 bp, Homo sapien
gttgcaggaaactgttaaaggtgct

SEQ ID NO: 869789 - DNA, 25 bp, Homo sapien
aaatgaaatggtgaatatgttgcag

SEQ ID NO: 869790 - DNA, 25 bp, Homo sapien
aacaaagaatgatttgagacacagt

SEQ ID NO: 869791 - DNA, 25 bp, Homo sapien
agttgcgcctgcttctctgctagtt

SEQ ID NO: 869792 - DNA, 25 bp, Homo sapien
gttgcgcctgcttctctgctagttc

SEQ ID NO: 869793 - DNA, 25 bp, Homo sapien
ctgcttctctgctagttctttggtt

SEQ ID NO: 869794 - DNA, 25 bp, Homo sapien
tctctgctagttctttggttttctc

SEQ ID NO: 869795 - DNA, 25 bp, Homo sapien
aaagggctgcagctgacaccttggg

SEQ ID NO: 869796 - DNA, 25 bp, Homo sapien
tggggctgcttctggtggcctgtgg

SEQ ID NO: 869797 - DNA, 25 bp, Homo sapien
agggctgcagctgacaccttgggtt

SEQ ID NO: 869798 - DNA, 25 bp, Homo sapien
gctgcagctgacaccttgggttctg

SEQ ID NO: 869799 - DNA, 25 bp, Homo sapien
agcacagcaccgtgggggtcagata

SEQ ID NO: 869800 - DNA, 25 bp, Homo sapien
gggtcagatagaggcgctcccgcct

SEQ ID NO: 869801 - DNA, 25 bp, Homo sapien
cctcttcccccagaccggcacagga

SEQ ID NO: 869802 - DNA, 25 bp, Homo sapien
ccccagaccggcacaggacccagac

SEQ ID NO: 869803 - DNA, 25 bp, Homo sapien
cagcctggctatcttgagcaggagc

SEQ ID NO: 869804 - DNA, 25 bp, Homo sapien
aagtgggtggccgagtgctggatgc

SEQ ID NO: 869805 - DNA, 25 bp, Homo sapien
gggtcagcttgtggtcgtcgccccc

SEQ ID NO: 869806 - DNA, 25 bp, Homo sapien
tgcccgaatgtgcccggctggaagt

SEQ ID NO: 869807 - DNA, 25 bp, Homo sapien
gtggtgcagcaccacggtcctgtgc

SEQ ID NO: 869808 - DNA, 25 bp, Homo sapien
ggtcccggttgagcacatacaccag

SEQ ID NO: 869809 - DNA, 25 bp, Homo sapien
tccttgaatagcagcaggtagtaga

SEQ ID NO: 869810 - DNA, 25 bp, Homo sapien
ccacctcggagaagttgacggagat

SEQ ID NO: 869811 - DNA, 25 bp, Homo sapien
agcgggcagggcgttcactgggctc

SEQ ID NO: 869812 - DNA, 25 bp, Homo sapien
gtacagcgagtaccgcatggcgtcg

SEQ ID NO: 869813 - DNA, 25 bp, Homo sapien
gggactggtacagcgagtaccgcat

SEQ ID NO: 869814 - DNA, 25 bp, Homo sapien
ctggtctcactgactgtgcggcgca

SEQ ID NO: 869815 - DNA, 25 bp, Homo sapien
tgcagcctccgggcctgggcgttta

SEQ ID NO: 869816 - DNA, 25 bp, Homo sapien
gcagcctccgggcctgggcgtttat

SEQ ID NO: 869817 - DNA, 25 bp, Homo sapien
ctgcagcctccgggcctgggcgttt

SEQ ID NO: 869818 - DNA, 25 bp, Homo sapien
cagcctccgggcctgggcgtttatc

SEQ ID NO: 869819 - DNA, 25 bp, Homo sapien
gcccatggggctgccgatggcctgc

SEQ ID NO: 869820 - DNA, 25 bp, Homo sapien
cccagcccatggggctgccgatggc

SEQ ID NO: 869821 - DNA, 25 bp, Homo sapien
atggggctgccgatggcctgctcct

SEQ ID NO: 869822 - DNA, 25 bp, Homo sapien
gggctgccgatggcctgctcctgca

SEQ ID NO: 869823 - DNA, 25 bp, Homo sapien
ccagcagccccgccgtccttcccaa

SEQ ID NO: 869824 - DNA, 25 bp, Homo sapien
ccgcccagccgcagtgcgaggctgc

SEQ ID NO: 869825 - DNA, 25 bp, Homo sapien
cgtgagggaggccgcccagccgcag

SEQ ID NO: 869826 - DNA, 25 bp, Homo sapien
gccgcccagccgcagtgcgaggctg

SEQ ID NO: 869827 - DNA, 25 bp, Homo sapien
ggccagggcgtgagggaggccgccc

SEQ ID NO: 869828 - DNA, 25 bp, Homo sapien
tccttctcaggataagtgtctgtca

SEQ ID NO: 869829 - DNA, 25 bp, Homo sapien
ccttctcaggataagtgtctgtcag

SEQ ID NO: 869830 - DNA, 25 bp, Homo sapien
ttccatcaactcctaaacacacttg

SEQ ID NO: 869831 - DNA, 25 bp, Homo sapien
gaacgttgatgggatcaattccatc

SEQ ID NO: 869832 - DNA, 25 bp, Homo sapien
taatcggtaatgagaaactattgct

SEQ ID NO: 869833 - DNA, 25 bp, Homo sapien
gaaggaacggctatggcagagaact

SEQ ID NO: 869834 - DNA, 25 bp, Homo sapien
cagtgcttgaatataccaggagtac

SEQ ID NO: 869835 - DNA, 25 bp, Homo sapien
cagtccagatgtcagtcacgggtac

SEQ ID NO: 869836 - DNA, 25 bp, Homo sapien
cacgggtacaaacatagctgaaagg

SEQ ID NO: 869837 - DNA, 25 bp, Homo sapien
tagtgtgccatcaaaaccaaagacc

SEQ ID NO: 869838 - DNA, 25 bp, Homo sapien
taaccattcaacctgttttactgaa

SEQ ID NO: 869839 - DNA, 25 bp, Homo sapien
ggagaacagggataccggaaagatc

SEQ ID NO: 869840 - DNA, 25 bp, Homo sapien
cagggataccggaaagatctatact

SEQ ID NO: 869841 - DNA, 25 bp, Homo sapien
ccggaaagatctatactgatgttcc

SEQ ID NO: 869842 - DNA, 25 bp, Homo sapien
cctttcttctttatgaggcaagaat

SEQ ID NO: 869843 - DNA, 25 bp, Homo sapien
ctgaatttttctaatggagttgtac

SEQ ID NO: 869844 - DNA, 25 bp, Homo sapien
ctgagaggccaatagagaagatgct

SEQ ID NO: 869845 - DNA, 25 bp, Homo sapien
ggcaagaatatcctctagactccaa

SEQ ID NO: 869846 - DNA, 25 bp, Homo sapien
ggattagatatgtttgttgctgagt

SEQ ID NO: 869847 - DNA, 25 bp, Homo sapien
gagagacagcgtgaggaatactttc

SEQ ID NO: 869848 - DNA, 25 bp, Homo sapien
tctggatggcttatgagacatgttg

SEQ ID NO: 869849 - DNA, 25 bp, Homo sapien
aacaactctggcgaccatggccttt

SEQ ID NO: 869850 - DNA, 25 bp, Homo sapien
gcctgtatgttagccacagatgctg

SEQ ID NO: 869851 - DNA, 25 bp, Homo sapien
tgttgcaaggaaaattcagtagcct

SEQ ID NO: 869852 - DNA, 25 bp, Homo sapien
cagatgctgtcattacagccaaggc

SEQ ID NO: 869853 - DNA, 25 bp, Homo sapien
acagccaaggcaggactgtttctac

SEQ ID NO: 869854 - DNA, 25 bp, Homo sapien
caaagctgctgtcgttcaaatctgt

SEQ ID NO: 869855 - DNA, 25 bp, Homo sapien
catagtgctagtagatgaaggcaca

SEQ ID NO: 869856 - DNA, 25 bp, Homo sapien
cctgtcttcatagtgctagtagatg

SEQ ID NO: 869857 - DNA, 25 bp, Homo sapien
gaactgctaatcaatgggcctgtct

SEQ ID NO: 869858 - DNA, 25 bp, Homo sapien
tcctttcttcttaaatgcattgcag

SEQ ID NO: 869859 - DNA, 25 bp, Homo sapien
gaggcagcagctggtgaagttcctt

SEQ ID NO: 869860 - DNA, 25 bp, Homo sapien
tctgttgagtgtgctttcttgtcct

SEQ ID NO: 869861 - DNA, 25 bp, Homo sapien
cttgtcctgaagcacatgatgaggc

SEQ ID NO: 869862 - DNA, 25 bp, Homo sapien
gaaaaagtcgcttcgatccacatga

SEQ ID NO: 869863 - DNA, 25 bp, Homo sapien
gaccatcctggttgaaatagacacg

SEQ ID NO: 869864 - DNA, 25 bp, Homo sapien
tctcgtgtgtgatagcaagcccctg

SEQ ID NO: 869865 - DNA, 25 bp, Homo sapien
gaatagatattgtggcacttggccc

SEQ ID NO: 869866 - DNA, 25 bp, Homo sapien
gggcttctagctgccctggtccgac

SEQ ID NO: 869867 - DNA, 25 bp, Homo sapien
ccaccaccgcgaccttcgcggccgc

SEQ ID NO: 869868 - DNA, 25 bp, Homo sapien
cgcccgggtcatgatccgctgaggc

SEQ ID NO: 869869 - DNA, 25 bp, Homo sapien
tgcgcgcccgccgcttcaggagctt

SEQ ID NO: 869870 - DNA, 25 bp, Homo sapien
tagcaactatgcgcagccaatattc

SEQ ID NO: 869871 - DNA, 25 bp, Homo sapien
caactatgcgcagccaatattcttc

SEQ ID NO: 869872 - DNA, 25 bp, Homo sapien
tgttagcaactatgcgcagccaata

SEQ ID NO: 869873 - DNA, 25 bp, Homo sapien
gttagcaactatgcgcagccaatat

SEQ ID NO: 869874 - DNA, 25 bp, Homo sapien
gctcttgctcctttcgatggtcacc

SEQ ID NO: 869875 - DNA, 25 bp, Homo sapien
ctcctttcgatggtcaccacccctc

SEQ ID NO: 869876 - DNA, 25 bp, Homo sapien
ctttcgatggtcaccacccctccac

SEQ ID NO: 869877 - DNA, 25 bp, Homo sapien
ctcggatgtcacagtgatcttgctc

SEQ ID NO: 869878 - DNA, 25 bp, Homo sapien
ctgctcaaattggcagcatctgtga

SEQ ID NO: 869879 - DNA, 25 bp, Homo sapien
ttggcagcatctgtgattccatctt

SEQ ID NO: 869880 - DNA, 25 bp, Homo sapien
attggcagcatctgtgattccatct

SEQ ID NO: 869881 - DNA, 25 bp, Homo sapien
ctcaaattggcagcatctgtgattc

SEQ ID NO: 869882 - DNA, 25 bp, Homo sapien
ccttcaccacaaggtttttcacagg

SEQ ID NO: 869883 - DNA, 25 bp, Homo sapien
ttcaccacaaggtttttcacaggag

SEQ ID NO: 869884 - DNA, 25 bp, Homo sapien
accacaaggtttttcacaggagcca

SEQ ID NO: 869885 - DNA, 25 bp, Homo sapien
tcaccacaaggtttttcacaggagc

SEQ ID NO: 869886 - DNA, 25 bp, Homo sapien
catattggtgagacggctgtcctgc

SEQ ID NO: 869887 - DNA, 25 bp, Homo sapien
gtgagacggctgtcctgcattaggc

SEQ ID NO: 869888 - DNA, 25 bp, Homo sapien
ttgttccccatattggtgagacggc

SEQ ID NO: 869889 - DNA, 25 bp, Homo sapien
tccccatattggtgagacggctgtc

SEQ ID NO: 869890 - DNA, 25 bp, Homo sapien
tgcaggccagagtaaactaactttc

SEQ ID NO: 869891 - DNA, 25 bp, Homo sapien
ctgcaggccagagtaaactaacttt

SEQ ID NO: 869892 - DNA, 25 bp, Homo sapien
gcagccccatcggtgcccagggagg

SEQ ID NO: 869893 - DNA, 25 bp, Homo sapien
tcaggacaaacagacaccacagcag

SEQ ID NO: 869894 - DNA, 25 bp, Homo sapien
cccaaagcgacacggtgacacatgc

SEQ ID NO: 869895 - DNA, 25 bp, Homo sapien
cacagcagccccatcggtgcccagg

SEQ ID NO: 869896 - DNA, 25 bp, Homo sapien
tcagacccacggctcttcctgaacc

SEQ ID NO: 869897 - DNA, 25 bp, Homo sapien
acccacggctcttcctgaacctgtg

SEQ ID NO: 869898 - DNA, 25 bp, Homo sapien
cacggctcttcctgaacctgtggcc

SEQ ID NO: 869899 - DNA, 25 bp, Homo sapien
tcagcgctcagacccacggctcttc

SEQ ID NO: 869900 - DNA, 25 bp, Homo sapien
tggagtccaggtcccggtacttgta

SEQ ID NO: 869901 - DNA, 25 bp, Homo sapien
ccaggacgctcttgtagtgggttcc

SEQ ID NO: 869902 - DNA, 25 bp, Homo sapien
gacatgatgaagtgcgtcccataaa

SEQ ID NO: 869903 - DNA, 25 bp, Homo sapien
tacttgtagctcagcgtccgggaca

SEQ ID NO: 869904 - DNA, 25 bp, Homo sapien
ctgtgggcttcagccaaaggatgtg

SEQ ID NO: 869905 - DNA, 25 bp, Homo sapien
actgtgggcttcagccaaaggatgt

SEQ ID NO: 869906 - DNA, 25 bp, Homo sapien
tgtgggcttcagccaaaggatgtgg

SEQ ID NO: 869907 - DNA, 25 bp, Homo sapien
gactgtgggcttcagccaaaggatg

SEQ ID NO: 869908 - DNA, 25 bp, Homo sapien
ggcaagagacccgtcctggcttgaa

SEQ ID NO: 869909 - DNA, 25 bp, Homo sapien
acaaagggcccctctcgagccggtg

SEQ ID NO: 869910 - DNA, 25 bp, Homo sapien
gcactgagtggcctcgcaagcacgg

SEQ ID NO: 869911 - DNA, 25 bp, Homo sapien
ggcttgaaggagatactccctggga

SEQ ID NO: 869912 - DNA, 25 bp, Homo sapien
ctggaaagagtggtccaggtcccag

SEQ ID NO: 869913 - DNA, 25 bp, Homo sapien
tctggaaagagtggtccaggtccca

SEQ ID NO: 869914 - DNA, 25 bp, Homo sapien
tggaaagagtggtccaggtcccagt

SEQ ID NO: 869915 - DNA, 25 bp, Homo sapien
agccagcagctgtgctttctccgag

SEQ ID NO: 869916 - DNA, 25 bp, Homo sapien
tcagccagcagctgtgctttctccg

SEQ ID NO: 869917 - DNA, 25 bp, Homo sapien
ccagcagctgtgctttctccgagga

SEQ ID NO: 869918 - DNA, 25 bp, Homo sapien
cagcagctgtgctttctccgaggac

SEQ ID NO: 869919 - DNA, 25 bp, Homo sapien
gaaatacttccgacagcttcgcaca

SEQ ID NO: 869920 - DNA, 25 bp, Homo sapien
acttcaccacggcaaaggctttcgc

SEQ ID NO: 869921 - DNA, 25 bp, Homo sapien
tgctgtaacaggtcacggagttccc

SEQ ID NO: 869922 - DNA, 25 bp, Homo sapien
tacaggtcataagcagatggagcct

SEQ ID NO: 869923 - DNA, 25 bp, Homo sapien
cagagggtcggccaccaccttttca

SEQ ID NO: 869924 - DNA, 25 bp, Homo sapien
catagtgctcatttccaacgggttc

SEQ ID NO: 869925 - DNA, 25 bp, Homo sapien
ttttcatagtgctcatttccaacgg

SEQ ID NO: 869926 - DNA, 25 bp, Homo sapien
tgctcatttccaacgggttccccag

SEQ ID NO: 869927 - DNA, 25 bp, Homo sapien
gctgctcccacccgccgttggctgg

SEQ ID NO: 869928 - DNA, 25 bp, Homo sapien
gctcccacccgccgttggctggggc

SEQ ID NO: 869929 - DNA, 25 bp, Homo sapien
ggcgcccagacccgcgcgtgccgcg

SEQ ID NO: 869930 - DNA, 25 bp, Homo sapien
cacccgccgttggctggggccggcg

SEQ ID NO: 869931 - DNA, 25 bp, Homo sapien
gcaagaggccaagccaaaccacatg

SEQ ID NO: 869932 - DNA, 25 bp, Homo sapien
gccaaaccacatgagattatctaaa

SEQ ID NO: 869933 - DNA, 25 bp, Homo sapien
gattatctaaagcatctgctaatgt

SEQ ID NO: 869934 - DNA, 25 bp, Homo sapien
ctgctaatgttagatccaccgacat

SEQ ID NO: 869935 - DNA, 25 bp, Homo sapien
agtacaagaccagcatcgcctacat

SEQ ID NO: 869936 - DNA, 25 bp, Homo sapien
gtacaagaccagcatcgcctacatg

SEQ ID NO: 869937 - DNA, 25 bp, Homo sapien
gagtacaagaccagcatcgcctaca

SEQ ID NO: 869938 - DNA, 25 bp, Homo sapien
gaaagggtccaataccagcaggaca

SEQ ID NO: 869939 - DNA, 25 bp, Homo sapien
tttctactccattggaaacaataat

SEQ ID NO: 869940 - DNA, 25 bp, Homo sapien
tttaaaagtcatgccgcaaacgcca

SEQ ID NO: 869941 - DNA, 25 bp, Homo sapien
cacaaacacagaaagggtccaatac

SEQ ID NO: 869942 - DNA, 25 bp, Homo sapien
gatcccaaggtatgacaccatgctg

SEQ ID NO: 869943 - DNA, 25 bp, Homo sapien
gctcctagcggaacctggcagtgta

SEQ ID NO: 869944 - DNA, 25 bp, Homo sapien
ttagctgggctccatggtacgcatc

SEQ ID NO: 869945 - DNA, 25 bp, Homo sapien
cttaggatttagacgcactcatggg

SEQ ID NO: 869946 - DNA, 25 bp, Homo sapien
ccacctcgcccagcgtggaaaatgt

SEQ ID NO: 869947 - DNA, 25 bp, Homo sapien
cacctcgcccagcgtggaaaatgta

SEQ ID NO: 869948 - DNA, 25 bp, Homo sapien
aacactgccctgtgggagtaaacag

SEQ ID NO: 869949 - DNA, 25 bp, Homo sapien
tgccctgtgggagtaaacagaagac

SEQ ID NO: 869950 - DNA, 25 bp, Homo sapien
tgggagtaaacagaagacggctgac

SEQ ID NO: 869951 - DNA, 25 bp, Homo sapien
tatgggtcttcaacaaaaaggcttg

SEQ ID NO: 869952 - DNA, 25 bp, Homo sapien
gatacacaggtaaacctaacaccta

SEQ ID NO: 869953 - DNA, 25 bp, Homo sapien
taacacctaacccataagggctgct

SEQ ID NO: 869954 - DNA, 25 bp, Homo sapien
gccaggatgtagcaccctcctcttt

SEQ ID NO: 869955 - DNA, 25 bp, Homo sapien
cccaggtgatgaaatgggcgggtca

SEQ ID NO: 869956 - DNA, 25 bp, Homo sapien
aaaagtgggatataggccgggtgtg

SEQ ID NO: 869957 - DNA, 25 bp, Homo sapien
ttaactgagcatagtggtatgcgcc

SEQ ID NO: 869958 - DNA, 25 bp, Homo sapien
gcctgactaactcggtgaaatcacg

SEQ ID NO: 869959 - DNA, 25 bp, Homo sapien
ctgggcgacatgagtaaaacactat

SEQ ID NO: 869960 - DNA, 25 bp, Homo sapien
cagcatctagaaaccaccaagggag

SEQ ID NO: 869961 - DNA, 25 bp, Homo sapien
tccgctggttagaagctgggtgccc

SEQ ID NO: 869962 - DNA, 25 bp, Homo sapien
cagcaaattatccttaccccacggg

SEQ ID NO: 869963 - DNA, 25 bp, Homo sapien
tgtgaatcggtgaagacagcatcta

SEQ ID NO: 869964 - DNA, 25 bp, Homo sapien
cacgcctgtgacattagcatgctca

SEQ ID NO: 869965 - DNA, 25 bp, Homo sapien
tgctggaattgtcactggctctttc

SEQ ID NO: 869966 - DNA, 25 bp, Homo sapien
gaatcccatagatgctgtccccaga

SEQ ID NO: 869967 - DNA, 25 bp, Homo sapien
catttcggcatctggttacgctgta

SEQ ID NO: 869968 - DNA, 25 bp, Homo sapien
tggcaaatttgacaggtgcccatct

SEQ ID NO: 869969 - DNA, 25 bp, Homo sapien
ggtggcaaatttgacaggtgcccat

SEQ ID NO: 869970 - DNA, 25 bp, Homo sapien
gcaaatttgacaggtgcccatctcc

SEQ ID NO: 869971 - DNA, 25 bp, Homo sapien
aaatttgacaggtgcccatctccca

SEQ ID NO: 869972 - DNA, 25 bp, Homo sapien
ccaaattgattggtactggctgccc

SEQ ID NO: 869973 - DNA, 25 bp, Homo sapien
cttaggaaacacagattggcccgtc

SEQ ID NO: 869974 - DNA, 25 bp, Homo sapien
caaagaggtcccatcatgagtgcca

SEQ ID NO: 869975 - DNA, 25 bp, Homo sapien
gaatagctctcgtaatgtctctgga

SEQ ID NO: 869976 - DNA, 25 bp, Homo sapien
ccagaagtcaccttggagccatcaa

SEQ ID NO: 869977 - DNA, 25 bp, Homo sapien
agtcaccttggagccatcaagaact

SEQ ID NO: 869978 - DNA, 25 bp, Homo sapien
ggactcgagggatgatctggctgtc

SEQ ID NO: 869979 - DNA, 25 bp, Homo sapien
ttctttctcgctggggactcgaggg

SEQ ID NO: 869980 - DNA, 25 bp, Homo sapien
aagacaggccttggcgctgtgctct

SEQ ID NO: 869981 - DNA, 25 bp, Homo sapien
aacgtgctccactcctaaagcccaa

SEQ ID NO: 869982 - DNA, 25 bp, Homo sapien
agcccaaacgacctctcaagtctgg

SEQ ID NO: 869983 - DNA, 25 bp, Homo sapien
gctgtgctctgggttaacgttcaca

SEQ ID NO: 869984 - DNA, 25 bp, Homo sapien
tcatttggacaccttggtctgcagg

SEQ ID NO: 869985 - DNA, 25 bp, Homo sapien
gaagaagaccatgcccaggcagtag

SEQ ID NO: 869986 - DNA, 25 bp, Homo sapien
caaatgctacaaagagatgccagat

SEQ ID NO: 869987 - DNA, 25 bp, Homo sapien
gatcctcccgtcactcttgaagaag

SEQ ID NO: 869988 - DNA, 25 bp, Homo sapien
aggcagtagaagacccctccggtca

SEQ ID NO: 869989 - DNA, 25 bp, Homo sapien
tttttgagacacagttgctcttttg

SEQ ID NO: 869990 - DNA, 25 bp, Homo sapien
ggctagagtgcagtagcgagatctc

SEQ ID NO: 869991 - DNA, 25 bp, Homo sapien
tgagacacagttgctcttttgccca

SEQ ID NO: 869992 - DNA, 25 bp, Homo sapien
gtgcagtagcgagatctcagttcac

SEQ ID NO: 869993 - DNA, 25 bp, Homo sapien
ggaattaagcaagaagaacctgcca

SEQ ID NO: 869994 - DNA, 25 bp, Homo sapien
tgagtactattaacacgagttgttc

SEQ ID NO: 869995 - DNA, 25 bp, Homo sapien
tgatggacgcacgacaatgtgagtg

SEQ ID NO: 869996 - DNA, 25 bp, Homo sapien
tcttagtgaaagaaactctccgcag

SEQ ID NO: 869997 - DNA, 25 bp, Homo sapien
tgcctctttagacaagtcatgccag

SEQ ID NO: 869998 - DNA, 25 bp, Homo sapien
gcctctttagacaagtcatgccagg

SEQ ID NO: 869999 - DNA, 25 bp, Homo sapien
ctctttagacaagtcatgccaggcc

SEQ ID NO: 870000 - DNA, 25 bp, Homo sapien
tctttagacaagtcatgccaggcct

SEQ ID NO: 870001 - DNA, 25 bp, Homo sapien
ggtccagctcggacactcttggtct

SEQ ID NO: 870002 - DNA, 25 bp, Homo sapien
gtttgtgacaatctcaacagccagg

SEQ ID NO: 870003 - DNA, 25 bp, Homo sapien
ctcatctatgcagggctggcagcac

SEQ ID NO: 870004 - DNA, 25 bp, Homo sapien
ctgccaaaggagagggtttgtgaca

SEQ ID NO: 870005 - DNA, 25 bp, Homo sapien
cattacgacgtagcagagaagctcc

SEQ ID NO: 870006 - DNA, 25 bp, Homo sapien
gcccattacgacgtagcagagaagc

SEQ ID NO: 870007 - DNA, 25 bp, Homo sapien
gaagcccattacgacgtagcagaga

SEQ ID NO: 870008 - DNA, 25 bp, Homo sapien
gggaagaagcccattacgacgtagc

SEQ ID NO: 870009 - DNA, 25 bp, Homo sapien
ggcaggaagacaagccgtgccggcc

SEQ ID NO: 870010 - DNA, 25 bp, Homo sapien
ccacgaagaaactgcacacagctcc

SEQ ID NO: 870011 - DNA, 25 bp, Homo sapien
gccgtgccggccttaggacatgcct

SEQ ID NO: 870012 - DNA, 25 bp, Homo sapien
ttaggacatgcctccccacgaagaa

SEQ ID NO: 870013 - DNA, 25 bp, Homo sapien
ttgggcatagcacacacatgggcac

SEQ ID NO: 870014 - DNA, 25 bp, Homo sapien
catgagcctgaatgacgtgacagcc

SEQ ID NO: 870015 - DNA, 25 bp, Homo sapien
tgctcagcccatggtagacatcact

SEQ ID NO: 870016 - DNA, 25 bp, Homo sapien
gctggtgccagagcagggattacaa

SEQ ID NO: 870017 - DNA, 25 bp, Homo sapien
agaagacatagatggtgcccacgga

SEQ ID NO: 870018 - DNA, 25 bp, Homo sapien
tccagaccagccagcgcatgtggga

SEQ ID NO: 870019 - DNA, 25 bp, Homo sapien
tgcccacggaagccataatccagac

SEQ ID NO: 870020 - DNA, 25 bp, Homo sapien
ccagccagcgcatgtgggaggccca

SEQ ID NO: 870021 - DNA, 25 bp, Homo sapien
taaagagataactgttggccgggcg

SEQ ID NO: 870022 - DNA, 25 bp, Homo sapien
gcattctctgtaaccgcagttccgg

SEQ ID NO: 870023 - DNA, 25 bp, Homo sapien
gcagttccggcagctaaccaaagca

SEQ ID NO: 870024 - DNA, 25 bp, Homo sapien
ggtaagtagcacctcatactggtgg

SEQ ID NO: 870025 - DNA, 25 bp, Homo sapien
gagtctgtcattataaagaatttaa

SEQ ID NO: 870026 - DNA, 25 bp, Homo sapien
gccaaaaaaagtgacctgcttggag

SEQ ID NO: 870027 - DNA, 25 bp, Homo sapien
caaaaaaagtgacctgcttggagtc

SEQ ID NO: 870028 - DNA, 25 bp, Homo sapien
cctgcttggagtctgtcattataaa

SEQ ID NO: 870029 - DNA, 25 bp, Homo sapien
aatgtttcttcaccataaaattcac

SEQ ID NO: 870030 - DNA, 25 bp, Homo sapien
tgtttcttcaccataaaattcactt

SEQ ID NO: 870031 - DNA, 25 bp, Homo sapien
attttgctgaacttcaaacaaatgt

SEQ ID NO: 870032 - DNA, 25 bp, Homo sapien
cttcaccataaaattcacttggact

SEQ ID NO: 870033 - DNA, 25 bp, Homo sapien
aacatgtgtagacagtgttccacca

SEQ ID NO: 870034 - DNA, 25 bp, Homo sapien
cgtaggaagccgctatgaagaaata

SEQ ID NO: 870035 - DNA, 25 bp, Homo sapien
gaccatccggtcgaacatgtgtaga

SEQ ID NO: 870036 - DNA, 25 bp, Homo sapien
gaaatagatgaccatccggtcgaac

SEQ ID NO: 870037 - DNA, 25 bp, Homo sapien
agggcggcagagaagccggcagtca

SEQ ID NO: 870038 - DNA, 25 bp, Homo sapien
ctagggcggcagagaagccggcagt

SEQ ID NO: 870039 - DNA, 25 bp, Homo sapien
ggcggcagagaagccggcagtcaca

SEQ ID NO: 870040 - DNA, 25 bp, Homo sapien
ggcagagaagccggcagtcacagcc

SEQ ID NO: 870041 - DNA, 25 bp, Homo sapien
gtctcccagtcatcgtccgacagga

SEQ ID NO: 870042 - DNA, 25 bp, Homo sapien
ccgaggccgtagatccaggcagaga

SEQ ID NO: 870043 - DNA, 25 bp, Homo sapien
cttcttccaggagatggtgtgaaac

SEQ ID NO: 870044 - DNA, 25 bp, Homo sapien
gaaacacagtggacaccacgaagag

SEQ ID NO: 870045 - DNA, 25 bp, Homo sapien
cacagttggccgcatgttcatactc

SEQ ID NO: 870046 - DNA, 25 bp, Homo sapien
tgtgggcagggactcggtggttcat

SEQ ID NO: 870047 - DNA, 25 bp, Homo sapien
gttcatactctgtgggctggtacct

SEQ ID NO: 870048 - DNA, 25 bp, Homo sapien
ctctgtgggctggtacctcttgtgg

SEQ ID NO: 870049 - DNA, 25 bp, Homo sapien
ggctgtcggaccagcagccgggacc

SEQ ID NO: 870050 - DNA, 25 bp, Homo sapien
gctgtcggaccagcagccgggacca

SEQ ID NO: 870051 - DNA, 25 bp, Homo sapien
ctgtcggaccagcagccgggaccac

SEQ ID NO: 870052 - DNA, 25 bp, Homo sapien
ttgaaggtccgatgacgccaggaga

SEQ ID NO: 870053 - DNA, 25 bp, Homo sapien
aggagagtggctgcccttgacggta

SEQ ID NO: 870054 - DNA, 25 bp, Homo sapien
cccttgacggtagtgaggactgact

SEQ ID NO: 870055 - DNA, 25 bp, Homo sapien
ggtctgttgaaggtccgatgacgcc

SEQ ID NO: 870056 - DNA, 25 bp, Homo sapien
ctctgtgaacatgccacagacacca

SEQ ID NO: 870057 - DNA, 25 bp, Homo sapien
agatgggggccccttaggcacctgt

SEQ ID NO: 870058 - DNA, 25 bp, Homo sapien
cacctgttcgtcctcagctagctcc

SEQ ID NO: 870059 - DNA, 25 bp, Homo sapien
gattcctgtgacatcaccagcagcc

SEQ ID NO: 870060 - DNA, 25 bp, Homo sapien
gagacccaactgctctaccctgatg

SEQ ID NO: 870061 - DNA, 25 bp, Homo sapien
tacctagcttgtgtcaaagggcagg

SEQ ID NO: 870062 - DNA, 25 bp, Homo sapien
gagggtttaggctgagcactcacac

SEQ ID NO: 870063 - DNA, 25 bp, Homo sapien
agtcagtcctgcccttttcaactca

SEQ ID NO: 870064 - DNA, 25 bp, Homo sapien
cacgggtggcaggtctaccagatat

SEQ ID NO: 870065 - DNA, 25 bp, Homo sapien
taagatgaagtacaccatatggcct

SEQ ID NO: 870066 - DNA, 25 bp, Homo sapien
tcatggatcaacctagcaccacggg

SEQ ID NO: 870067 - DNA, 25 bp, Homo sapien
gcataaaattgcaaccgcgagtgaa

SEQ ID NO: 870068 - DNA, 25 bp, Homo sapien
tgcgagggagcagttcttcacatgc

SEQ ID NO: 870069 - DNA, 25 bp, Homo sapien
ggttaaaggtgttgcaaatatgtcc

SEQ ID NO: 870070 - DNA, 25 bp, Homo sapien
tcttccaagaaatccctgtccgtgt

SEQ ID NO: 870071 - DNA, 25 bp, Homo sapien
tgcacccagacagttaggcttctta

SEQ ID NO: 870072 - DNA, 25 bp, Homo sapien
gtgagtaggaagaatactgccagcc

SEQ ID NO: 870073 - DNA, 25 bp, Homo sapien
tcaagctgtgctcaatatgaccaga

SEQ ID NO: 870074 - DNA, 25 bp, Homo sapien
gaacttgtggagacttcaggagcac

SEQ ID NO: 870075 - DNA, 25 bp, Homo sapien
taggaagaatactgccagcccatct

SEQ ID NO: 870076 - DNA, 25 bp, Homo sapien
caggcccctctgttcacgaaggcag

SEQ ID NO: 870077 - DNA, 25 bp, Homo sapien
tgctcccagcagacgggtctgtgct

SEQ ID NO: 870078 - DNA, 25 bp, Homo sapien
acgggtctgtgctcgccgaagacca

SEQ ID NO: 870079 - DNA, 25 bp, Homo sapien
tctgttcacgaaggcaggggacccc

SEQ ID NO: 870080 - DNA, 25 bp, Homo sapien
ctcgcgtatttcgtcttctggaaat

SEQ ID NO: 870081 - DNA, 25 bp, Homo sapien
tcgcgtatttcgtcttctggaaatc

SEQ ID NO: 870082 - DNA, 25 bp, Homo sapien
cttccatgggaatctggccccgggc

SEQ ID NO: 870083 - DNA, 25 bp, Homo sapien
ccatgggaatctggccccgggctca

SEQ ID NO: 870084 - DNA, 25 bp, Homo sapien
cccgggctcagagcgcgggtagctg

SEQ ID NO: 870085 - DNA, 25 bp, Homo sapien
ctcagagcgcgggtagctggcagag

SEQ ID NO: 870086 - DNA, 25 bp, Homo sapien
agccggagctggaggcgcccggagc

SEQ ID NO: 870087 - DNA, 25 bp, Homo sapien
agcccgagccggagctggaggcgcc

SEQ ID NO: 870088 - DNA, 25 bp, Homo sapien
agcagcaggttggagggcgcgcggc

SEQ ID NO: 870089 - DNA, 25 bp, Homo sapien
acctggtcggcgcccggagccggag

SEQ ID NO: 870090 - DNA, 25 bp, Homo sapien
gcctcgctgtccactgcaccgggac

SEQ ID NO: 870091 - DNA, 25 bp, Homo sapien
ggctcagacagccactggtaaccac

SEQ ID NO: 870092 - DNA, 25 bp, Homo sapien
ccaggctcagacagccactggtaac

SEQ ID NO: 870093 - DNA, 25 bp, Homo sapien
tccccaggtaccagcgacacctctg

SEQ ID NO: 870094 - DNA, 25 bp, Homo sapien
tcagacagccactggtaaccacagc

SEQ ID NO: 870095 - DNA, 25 bp, Homo sapien
tgcagctttggaggagtaagcggcg

SEQ ID NO: 870096 - DNA, 25 bp, Homo sapien
ctgtacgcttgcgcgaggtgacgcc

SEQ ID NO: 870097 - DNA, 25 bp, Homo sapien
ctttggaggagtaagcggcgtggta

SEQ ID NO: 870098 - DNA, 25 bp, Homo sapien
tggtagcgaaggtcgccgaacccgc

SEQ ID NO: 870099 - DNA, 25 bp, Homo sapien
cgtgttgttccgtgaaacttggcga

SEQ ID NO: 870100 - DNA, 25 bp, Homo sapien
gcgcgtgttgttccgtgaaacttgg

SEQ ID NO: 870101 - DNA, 25 bp, Homo sapien
tctggagcgcgtgttgttccgtgaa

SEQ ID NO: 870102 - DNA, 25 bp, Homo sapien
ttgttccgtgaaacttggcgactgt

SEQ ID NO: 870103 - DNA, 25 bp, Homo sapien
gagttttgatactccctcattctta

SEQ ID NO: 870104 - DNA, 25 bp, Homo sapien
tttcagcataagcttcagatgtccc

SEQ ID NO: 870105 - DNA, 25 bp, Homo sapien
agatacatggcaagagttttgatac

SEQ ID NO: 870106 - DNA, 25 bp, Homo sapien
ttcagcataagcttcagatgtcccc

SEQ ID NO: 870107 - DNA, 25 bp, Homo sapien
agctcttttgaaacagatggtcacc

SEQ ID NO: 870108 - DNA, 25 bp, Homo sapien
ttccttttcagctcttttgaaacag

SEQ ID NO: 870109 - DNA, 25 bp, Homo sapien
gcttccttttcagctcttttgaaac

SEQ ID NO: 870110 - DNA, 25 bp, Homo sapien
tttcagctcttttgaaacagatggt

SEQ ID NO: 870111 - DNA, 25 bp, Homo sapien
taagtgaggtgatgcaaagaaagcc

SEQ ID NO: 870112 - DNA, 25 bp, Homo sapien
tctgtcgtcacccatagtggagtac

SEQ ID NO: 870113 - DNA, 25 bp, Homo sapien
tcctggtacataagttcctggtaca

SEQ ID NO: 870114 - DNA, 25 bp, Homo sapien
cgtttggacaaatgccttgacctct

SEQ ID NO: 870115 - DNA, 25 bp, Homo sapien
ttagccagtgtacctcctacctcag

SEQ ID NO: 870116 - DNA, 25 bp, Homo sapien
tattttttattccttagccagtgta

SEQ ID NO: 870117 - DNA, 25 bp, Homo sapien
tctcaaggggctgcttttcaaccaa

SEQ ID NO: 870118 - DNA, 25 bp, Homo sapien
cttttcaaccaagagccttgtgagc

SEQ ID NO: 870119 - DNA, 25 bp, Homo sapien
ccagtgcatgcaaagttcttaagtc

SEQ ID NO: 870120 - DNA, 25 bp, Homo sapien
agatgaacccaatattatcttgtaa

SEQ ID NO: 870121 - DNA, 25 bp, Homo sapien
caagaattaataccccttaatagag

SEQ ID NO: 870122 - DNA, 25 bp, Homo sapien
tctaactagccattttgtacagtaa

SEQ ID NO: 870123 - DNA, 25 bp, Homo sapien
ctgttagcttttctggcaaaacaaa

SEQ ID NO: 870124 - DNA, 25 bp, Homo sapien
taagaaacgttatttctcaactctg

SEQ ID NO: 870125 - DNA, 25 bp, Homo sapien
tcagatgtctggtagttggtcctgt

SEQ ID NO: 870126 - DNA, 25 bp, Homo sapien
cagatgtctggtagttggtcctgtg

SEQ ID NO: 870127 - DNA, 25 bp, Homo sapien
gatgtctggtagttggtcctgtgtc

SEQ ID NO: 870128 - DNA, 25 bp, Homo sapien
tgtctggtagttggtcctgtgtcag

SEQ ID NO: 870129 - DNA, 25 bp, Homo sapien
cctgagaggtcagggcttcaataag

SEQ ID NO: 870130 - DNA, 25 bp, Homo sapien
gagaggtcagggcttcaataagcca

SEQ ID NO: 870131 - DNA, 25 bp, Homo sapien
cttagcctgagaggtcagggcttca

SEQ ID NO: 870132 - DNA, 25 bp, Homo sapien
cacttagcctgagaggtcagggctt

SEQ ID NO: 870133 - DNA, 25 bp, Homo sapien
cagcaatcgagggtgtctgtgtact

SEQ ID NO: 870134 - DNA, 25 bp, Homo sapien
aagatggtcctccagcaatcgaggg

SEQ ID NO: 870135 - DNA, 25 bp, Homo sapien
cctctttgtgcctggactgcatctg

SEQ ID NO: 870136 - DNA, 25 bp, Homo sapien
tcctccagcaatcgagggtgtctgt

SEQ ID NO: 870137 - DNA, 25 bp, Homo sapien
tgtctaccctgcagcacaaattcca

SEQ ID NO: 870138 - DNA, 25 bp, Homo sapien
tccacttgatggaggaacacaaagg

SEQ ID NO: 870139 - DNA, 25 bp, Homo sapien
gcagctttcgctgtctaccctgcag

SEQ ID NO: 870140 - DNA, 25 bp, Homo sapien
tggaggaacacaaaggtcggactcc

SEQ ID NO: 870141 - DNA, 25 bp, Homo sapien
ccgatcaatatccagacacccaggt

SEQ ID NO: 870142 - DNA, 25 bp, Homo sapien
aggtgtctgagtccgtcagtaggac

SEQ ID NO: 870143 - DNA, 25 bp, Homo sapien
tccggaggtgtctgagtccgtcagt

SEQ ID NO: 870144 - DNA, 25 bp, Homo sapien
tctgagtccgtcagtaggacgctgg

SEQ ID NO: 870145 - DNA, 25 bp, Homo sapien
gattgcaggcataagccaccgcgcc

SEQ ID NO: 870146 - DNA, 25 bp, Homo sapien
tttttctgtgtgatttgaactccac

SEQ ID NO: 870147 - DNA, 25 bp, Homo sapien
ccggcgttggatttttttctgtgtg

SEQ ID NO: 870148 - DNA, 25 bp, Homo sapien
tgcaggcataagccaccgcgcccgg

SEQ ID NO: 870149 - DNA, 25 bp, Homo sapien
tagctgtaagtgtagtacatatatt

SEQ ID NO: 870150 - DNA, 25 bp, Homo sapien
tttaggggaactatcatgtagctgt

SEQ ID NO: 870151 - DNA, 25 bp, Homo sapien
gtagtacatatattaagtatcatag

SEQ ID NO: 870152 - DNA, 25 bp, Homo sapien
ggaactatcatgtagctgtaagtgt

SEQ ID NO: 870153 - DNA, 25 bp, Homo sapien
ccatctcacaactttataggaacag

SEQ ID NO: 870154 - DNA, 25 bp, Homo sapien
actttataggaacagtgtctattca

SEQ ID NO: 870155 - DNA, 25 bp, Homo sapien
tctcacaactttataggaacagtgt

SEQ ID NO: 870156 - DNA, 25 bp, Homo sapien
cacaactttataggaacagtgtcta

SEQ ID NO: 870157 - DNA, 25 bp, Homo sapien
cccagtcctaggacgacaacgtgat

SEQ ID NO: 870158 - DNA, 25 bp, Homo sapien
tcggcttcatctagaacagtccagg

SEQ ID NO: 870159 - DNA, 25 bp, Homo sapien
gacgacaacgtgatcactctattcg

SEQ ID NO: 870160 - DNA, 25 bp, Homo sapien
tgtggattcctagaagtaccacccc

SEQ ID NO: 870161 - DNA, 25 bp, Homo sapien
tctaggaaaggcgggcccgatctca

SEQ ID NO: 870162 - DNA, 25 bp, Homo sapien
gaaaggcgggcccgatctcatggcc

SEQ ID NO: 870163 - DNA, 25 bp, Homo sapien
aggcgggcccgatctcatggccaca

SEQ ID NO: 870164 - DNA, 25 bp, Homo sapien
taggaaaggcgggcccgatctcatg

SEQ ID NO: 870165 - DNA, 25 bp, Homo sapien
agccctgcagcgcacggaatggaag

SEQ ID NO: 870166 - DNA, 25 bp, Homo sapien
cgcacggaatggaagaactggaacc

SEQ ID NO: 870167 - DNA, 25 bp, Homo sapien
agcttgtgggacaaggctatctgag

SEQ ID NO: 870168 - DNA, 25 bp, Homo sapien
caaagcttgtgggacaaggctatct

SEQ ID NO: 870169 - DNA, 25 bp, Homo sapien
caccaggagagacctccagctgagg

SEQ ID NO: 870170 - DNA, 25 bp, Homo sapien
accaccaggagagacctccagctga

SEQ ID NO: 870171 - DNA, 25 bp, Homo sapien
caggagagacctccagctgaggtca

SEQ ID NO: 870172 - DNA, 25 bp, Homo sapien
ctgggaacagaaatcaggttactgc

SEQ ID NO: 870173 - DNA, 25 bp, Homo sapien
aggctggccgggctagaatacgcta

SEQ ID NO: 870174 - DNA, 25 bp, Homo sapien
agaggctggccgggctagaatacgc

SEQ ID NO: 870175 - DNA, 25 bp, Homo sapien
tggccgggctagaatacgctatgac

SEQ ID NO: 870176 - DNA, 25 bp, Homo sapien
gctggccgggctagaatacgctatg

SEQ ID NO: 870177 - DNA, 25 bp, Homo sapien
accaggagtcttttaacgacaggat

SEQ ID NO: 870178 - DNA, 25 bp, Homo sapien
gaccaggagtcttttaacgacagga

SEQ ID NO: 870179 - DNA, 25 bp, Homo sapien
tcccagaccaggagtcttttaacga

SEQ ID NO: 870180 - DNA, 25 bp, Homo sapien
cagaccaggagtcttttaacgacag

SEQ ID NO: 870181 - DNA, 25 bp, Homo sapien
gtttctgtgggagcagcagagcagc

SEQ ID NO: 870182 - DNA, 25 bp, Homo sapien
agcagcgaggagaagtgtgcttccc

SEQ ID NO: 870183 - DNA, 25 bp, Homo sapien
gattagagagcagatgtcagcgtga

SEQ ID NO: 870184 - DNA, 25 bp, Homo sapien
taagtctcaggattgtggccgcagg

SEQ ID NO: 870185 - DNA, 25 bp, Homo sapien
gacctaccccaggggctgggatcta

SEQ ID NO: 870186 - DNA, 25 bp, Homo sapien
ctcctctgactcctcctcagattcg

SEQ ID NO: 870187 - DNA, 25 bp, Homo sapien
tcacttcagcttcttcttgagccca

SEQ ID NO: 870188 - DNA, 25 bp, Homo sapien
gagcacgggtgacactcgctgtcac

SEQ ID NO: 870189 - DNA, 25 bp, Homo sapien
gatggtcctgacatgtcatcatcca

SEQ ID NO: 870190 - DNA, 25 bp, Homo sapien
tgatggtcctgacatgtcatcatcc

SEQ ID NO: 870191 - DNA, 25 bp, Homo sapien
ctctattctgtccaaggccttcttc

SEQ ID NO: 870192 - DNA, 25 bp, Homo sapien
ttcttctggactctgctaagaccca

SEQ ID NO: 870193 - DNA, 25 bp, Homo sapien
gagaagatgctttgtccacctgagc

SEQ ID NO: 870194 - DNA, 25 bp, Homo sapien
acctagtctctattctgtccaaggc

SEQ ID NO: 870195 - DNA, 25 bp, Homo sapien
aatcaaaagaaggagtttgagtcca

SEQ ID NO: 870196 - DNA, 25 bp, Homo sapien
gaagccacacagaaatcaaaagaag

SEQ ID NO: 870197 - DNA, 25 bp, Homo sapien
atcacttgaagccacacagaaatca

SEQ ID NO: 870198 - DNA, 25 bp, Homo sapien
cacacagaaatcaaaagaaggagtt

SEQ ID NO: 870199 - DNA, 25 bp, Homo sapien
ggattcttgtgcctcagcctcctga

SEQ ID NO: 870200 - DNA, 25 bp, Homo sapien
gcaacctccacctcccaggttcaaa

SEQ ID NO: 870201 - DNA, 25 bp, Homo sapien
actacaggcatgtgacactatgcct

SEQ ID NO: 870202 - DNA, 25 bp, Homo sapien
tgcagcagtgtggtctcggctcact

SEQ ID NO: 870203 - DNA, 25 bp, Homo sapien
cagcacaaggcgggagcctctggct

SEQ ID NO: 870204 - DNA, 25 bp, Homo sapien
aaggatccaacagaattcgaaacaa

SEQ ID NO: 870205 - DNA, 25 bp, Homo sapien
acagaattcgaaacaactgactgca

SEQ ID NO: 870206 - DNA, 25 bp, Homo sapien
gatccaacagaattcgaaacaactg

SEQ ID NO: 870207 - DNA, 25 bp, Homo sapien
acctcctgaagggcccatttaggag

SEQ ID NO: 870208 - DNA, 25 bp, Homo sapien
tcctgaagggcccatttaggagcca

SEQ ID NO: 870209 - DNA, 25 bp, Homo sapien
tgtccaggtgtactgctgtgtgcct

SEQ ID NO: 870210 - DNA, 25 bp, Homo sapien
aattgtccaggtgtactgctgtgtg

SEQ ID NO: 870211 - DNA, 25 bp, Homo sapien
tcggcgacctcgtgatgtgactttg

SEQ ID NO: 870212 - DNA, 25 bp, Homo sapien
gacctctgcctagggtggcgtcgta

SEQ ID NO: 870213 - DNA, 25 bp, Homo sapien
gactttgtgacgatcccacggtctc

SEQ ID NO: 870214 - DNA, 25 bp, Homo sapien
gatgtccctcctagaggttcggcga

SEQ ID NO: 870215 - DNA, 25 bp, Homo sapien
tctgacgcaggatgaggtgtgactt

SEQ ID NO: 870216 - DNA, 25 bp, Homo sapien
acttgtaaggcttcgctccggcgtg

SEQ ID NO: 870217 - DNA, 25 bp, Homo sapien
cacacaggcgtgtcttccggaagat

SEQ ID NO: 870218 - DNA, 25 bp, Homo sapien
tgtaccctgaggtccgatctgcagc

SEQ ID NO: 870219 - DNA, 25 bp, Homo sapien
agctgcaggaactccctcgtcacag

SEQ ID NO: 870220 - DNA, 25 bp, Homo sapien
tgagctgcaggaactccctcgtcac

SEQ ID NO: 870221 - DNA, 25 bp, Homo sapien
gcaggaactccctcgtcacagctta

SEQ ID NO: 870222 - DNA, 25 bp, Homo sapien
ggaactccctcgtcacagcttaaag

SEQ ID NO: 870223 - DNA, 25 bp, Homo sapien
tttcgaatagagaagtttccgtggc

SEQ ID NO: 870224 - DNA, 25 bp, Homo sapien
caagtttcgaatagagaagtttccg

SEQ ID NO: 870225 - DNA, 25 bp, Homo sapien
tgaagctcatttccggtccagtctt

SEQ ID NO: 870226 - DNA, 25 bp, Homo sapien
ttggtcttcgtgttgctgttggcta

SEQ ID NO: 870227 - DNA, 25 bp, Homo sapien
ttcatgaagctcatttccggtccag

SEQ ID NO: 870228 - DNA, 25 bp, Homo sapien
ttccaagttcgttacattcatgaag

SEQ ID NO: 870229 - DNA, 25 bp, Homo sapien
ttgagacggagtcttactccattgc

SEQ ID NO: 870230 - DNA, 25 bp, Homo sapien
gagacggagtcttactccattgccc

SEQ ID NO: 870231 - DNA, 25 bp, Homo sapien
acggagtcttactccattgcccaag

SEQ ID NO: 870232 - DNA, 25 bp, Homo sapien
gacggagtcttactccattgcccaa

SEQ ID NO: 870233 - DNA, 25 bp, Homo sapien
ctgggaagctccacgtccttatctc

SEQ ID NO: 870234 - DNA, 25 bp, Homo sapien
cccctgctccaaactggagatcaca

SEQ ID NO: 870235 - DNA, 25 bp, Homo sapien
cctgctccaaactggagatcacagc

SEQ ID NO: 870236 - DNA, 25 bp, Homo sapien
tgggaagctccacgtccttatctct

SEQ ID NO: 870237 - DNA, 25 bp, Homo sapien
agaaaaagagttcatgtaacccgag

SEQ ID NO: 870238 - DNA, 25 bp, Homo sapien
agagttcatgtaacccgaggaccac

SEQ ID NO: 870239 - DNA, 25 bp, Homo sapien
gagttcatgtaacccgaggaccacg

SEQ ID NO: 870240 - DNA, 25 bp, Homo sapien
aagagttcatgtaacccgaggacca

SEQ ID NO: 870241 - DNA, 25 bp, Homo sapien
ccacgtccccgaatgacagtgaccc

SEQ ID NO: 870242 - DNA, 25 bp, Homo sapien
gccacgtccccgaatgacagtgacc

SEQ ID NO: 870243 - DNA, 25 bp, Homo sapien
tagaggagattgatcttaaaccttc

SEQ ID NO: 870244 - DNA, 25 bp, Homo sapien
ccatggcaaaggcgtagaggagatt

SEQ ID NO: 870245 - DNA, 25 bp, Homo sapien
gcaaaggcgtagaggagattgatct

SEQ ID NO: 870246 - DNA, 25 bp, Homo sapien
ggcgtagaggagattgatcttaaac

SEQ ID NO: 870247 - DNA, 25 bp, Homo sapien
tgagtgttcggcatccccaaacaac

SEQ ID NO: 870248 - DNA, 25 bp, Homo sapien
caaacaaccagaatcacagacggct

SEQ ID NO: 870249 - DNA, 25 bp, Homo sapien
tctgtagacctgagtgttcggcatc

SEQ ID NO: 870250 - DNA, 25 bp, Homo sapien
gacggctgctttggcataatatctg

SEQ ID NO: 870251 - DNA, 25 bp, Homo sapien
tctttaaatgccctaaagagctgta

SEQ ID NO: 870252 - DNA, 25 bp, Homo sapien
cacaagagatttcctgttgtgtttc

SEQ ID NO: 870253 - DNA, 25 bp, Homo sapien
gctacatcttgcatacaaagatcaa

SEQ ID NO: 870254 - DNA, 25 bp, Homo sapien
gttgttattgaggaacgggcctgct

SEQ ID NO: 870255 - DNA, 25 bp, Homo sapien
tcttctctattctggaaaagcagac

SEQ ID NO: 870256 - DNA, 25 bp, Homo sapien
ttctctattctggaaaagcagacac

SEQ ID NO: 870257 - DNA, 25 bp, Homo sapien
gggccatagttcttcttctctattc

SEQ ID NO: 870258 - DNA, 25 bp, Homo sapien
ctgggccatagttcttcttctctat

SEQ ID NO: 870259 - DNA, 25 bp, Homo sapien
gaaacaagcttgctatgctgagagg

SEQ ID NO: 870260 - DNA, 25 bp, Homo sapien
ctcgggaccagggtagaaacaagct

SEQ ID NO: 870261 - DNA, 25 bp, Homo sapien
gggtagaaacaagcttgctatgctg

SEQ ID NO: 870262 - DNA, 25 bp, Homo sapien
acaagcttgctatgctgagaggagg

SEQ ID NO: 870263 - DNA, 25 bp, Homo sapien
cttgctgacaaagtccgatcctgag

SEQ ID NO: 870264 - DNA, 25 bp, Homo sapien
tgctgacaaagtccgatcctgagct

SEQ ID NO: 870265 - DNA, 25 bp, Homo sapien
gacaaagtccgatcctgagcttttg

SEQ ID NO: 870266 - DNA, 25 bp, Homo sapien
aagtccgatcctgagcttttgcaaa

SEQ ID NO: 870267 - DNA, 25 bp, Homo sapien
tgcgcgagcttccaggggacggtgg

SEQ ID NO: 870268 - DNA, 25 bp, Homo sapien
gcgcgagcttccaggggacggtggg

SEQ ID NO: 870269 - DNA, 25 bp, Homo sapien
ccctgcgcgagcttccaggggacgg

SEQ ID NO: 870270 - DNA, 25 bp, Homo sapien
aggtgccctgcgcgagcttccaggg

SEQ ID NO: 870271 - DNA, 25 bp, Homo sapien
ccccagtgcagtgccggctctgcag

SEQ ID NO: 870272 - DNA, 25 bp, Homo sapien
accccagtgcagtgccggctctgca

SEQ ID NO: 870273 - DNA, 25 bp, Homo sapien
cacgatgccatgattccggttaggc

SEQ ID NO: 870274 - DNA, 25 bp, Homo sapien
atgattccggttaggccaccctgca

SEQ ID NO: 870275 - DNA, 25 bp, Homo sapien
gccatgattccggttaggccaccct

SEQ ID NO: 870276 - DNA, 25 bp, Homo sapien
ccccacgatgccatgattccggtta

SEQ ID NO: 870277 - DNA, 25 bp, Homo sapien
gggtcttctgtgccatcctgcttcc

SEQ ID NO: 870278 - DNA, 25 bp, Homo sapien
tccgggtcttctgtgccatcctgct

SEQ ID NO: 870279 - DNA, 25 bp, Homo sapien
tcattccgggtcttctgtgccatcc

SEQ ID NO: 870280 - DNA, 25 bp, Homo sapien
tctgtgccatcctgcttccaggtct

SEQ ID NO: 870281 - DNA, 25 bp, Homo sapien
gctaaaatctgcggcaaagccagcc

SEQ ID NO: 870282 - DNA, 25 bp, Homo sapien
acccgagacctcacgctcagtttat

SEQ ID NO: 870283 - DNA, 25 bp, Homo sapien
tgtctgcacccgagacctcacgctc

SEQ ID NO: 870284 - DNA, 25 bp, Homo sapien
cacgctcagtttatccgtggctaaa

SEQ ID NO: 870285 - DNA, 25 bp, Homo sapien
tttgagtggggtcttctgcagatga

SEQ ID NO: 870286 - DNA, 25 bp, Homo sapien
ttgagtggggtcttctgcagatgag

SEQ ID NO: 870287 - DNA, 25 bp, Homo sapien
ttttgagtggggtcttctgcagatg

SEQ ID NO: 870288 - DNA, 25 bp, Homo sapien
tgagtggggtcttctgcagatgagc

SEQ ID NO: 870289 - DNA, 25 bp, Homo sapien
gggcttagcataagctgtggccagc

SEQ ID NO: 870290 - DNA, 25 bp, Homo sapien
tggccagcacggaacaaacgataag

SEQ ID NO: 870291 - DNA, 25 bp, Homo sapien
gataagccgctctggcacagcggtg

SEQ ID NO: 870292 - DNA, 25 bp, Homo sapien
ggaacaaacgataagccgctctggc

SEQ ID NO: 870293 - DNA, 25 bp, Homo sapien
gcttaaagatgacgtcagagccatc

SEQ ID NO: 870294 - DNA, 25 bp, Homo sapien
cttaaagatgacgtcagagccatcc

SEQ ID NO: 870295 - DNA, 25 bp, Homo sapien
ggcttaaagatgacgtcagagccat

SEQ ID NO: 870296 - DNA, 25 bp, Homo sapien
tctgagctgggcatcgggccggtca

SEQ ID NO: 870297 - DNA, 25 bp, Homo sapien
ctgcagatgagggttctgctctcag

SEQ ID NO: 870298 - DNA, 25 bp, Homo sapien
caggttgaaagcagaaagtctcttc

SEQ ID NO: 870299 - DNA, 25 bp, Homo sapien
tgctctcaggttgaaagcagaaagt

SEQ ID NO: 870300 - DNA, 25 bp, Homo sapien
ggaggaatcccaaagtgatgataga

SEQ ID NO: 870301 - DNA, 25 bp, Homo sapien
ggaatcccaaagtgatgatagaagg

SEQ ID NO: 870302 - DNA, 25 bp, Homo sapien
ctggaggaatcccaaagtgatgata

SEQ ID NO: 870303 - DNA, 25 bp, Homo sapien
gaggaatcccaaagtgatgatagaa

SEQ ID NO: 870304 - DNA, 25 bp, Homo sapien
agaaggccttaatgccagcccgtgc

SEQ ID NO: 870305 - DNA, 25 bp, Homo sapien
gctccagcgggtgggtcatcctcag

SEQ ID NO: 870306 - DNA, 25 bp, Homo sapien
cactgatacgggttggatgctgcct

SEQ ID NO: 870307 - DNA, 25 bp, Homo sapien
gtgcattcggaacgctgtttgtccc

SEQ ID NO: 870308 - DNA, 25 bp, Homo sapien
tacagttcaagagatttctgttact

SEQ ID NO: 870309 - DNA, 25 bp, Homo sapien
aagttattacagttcaagagatttc

SEQ ID NO: 870310 - DNA, 25 bp, Homo sapien
cagagagaccttgatgtagtgtaaa

SEQ ID NO: 870311 - DNA, 25 bp, Homo sapien
actttgacttgccagagagaccttg

SEQ ID NO: 870312 - DNA, 25 bp, Homo sapien
tataactgtcctgcctttctttact

SEQ ID NO: 870313 - DNA, 25 bp, Homo sapien
gatttccaatgtcgtactttttcat

SEQ ID NO: 870314 - DNA, 25 bp, Homo sapien
ctttctttactggtaatatgatttc

SEQ ID NO: 870315 - DNA, 25 bp, Homo sapien
aatatgatttccaatgtcgtacttt

SEQ ID NO: 870316 - DNA, 25 bp, Homo sapien
catttcttccacatacgtgtgaaag

SEQ ID NO: 870317 - DNA, 25 bp, Homo sapien
aaatacttagtgtgaaatgtgcccc

SEQ ID NO: 870318 - DNA, 25 bp, Homo sapien
gaaaaattatatgagctggtagagt

SEQ ID NO: 870319 - DNA, 25 bp, Homo sapien
taaaatagccctgatcctatcttgg

SEQ ID NO: 870320 - DNA, 25 bp, Homo sapien
ctgatgaggaaaccccttctgtggt

SEQ ID NO: 870321 - DNA, 25 bp, Homo sapien
taaacgcaaggccatgaaaccaatc

SEQ ID NO: 870322 - DNA, 25 bp, Homo sapien
caactgggttctggagaggcacttt

SEQ ID NO: 870323 - DNA, 25 bp, Homo sapien
gattccagactctaaggtagctttg

SEQ ID NO: 870324 - DNA, 25 bp, Homo sapien
cctgtggccgtctgccctgatctgt

SEQ ID NO: 870325 - DNA, 25 bp, Homo sapien
ctggtgacacctgtggccgtctgcc

SEQ ID NO: 870326 - DNA, 25 bp, Homo sapien
gtggcaactggtgacacctgtggcc

SEQ ID NO: 870327 - DNA, 25 bp, Homo sapien
ccaagaggtggcaactggtgacacc

SEQ ID NO: 870328 - DNA, 25 bp, Homo sapien
agagcaagtacccaggccctttgca

SEQ ID NO: 870329 - DNA, 25 bp, Homo sapien
gacttgcctgctggtacttactaaa

SEQ ID NO: 870330 - DNA, 25 bp, Homo sapien
gggcagcagaatttccatgatcagc

SEQ ID NO: 870331 - DNA, 25 bp, Homo sapien
gatcagcgtccctgactcatggctc

SEQ ID NO: 870332 - DNA, 25 bp, Homo sapien
acccagcctcctcaccaacttttga

SEQ ID NO: 870333 - DNA, 25 bp, Homo sapien
aggcgatccggccatctcgacctcc

SEQ ID NO: 870334 - DNA, 25 bp, Homo sapien
acctcaggcgatccggccatctcga

SEQ ID NO: 870335 - DNA, 25 bp, Homo sapien
ctcaccaacttttgatattactagt

SEQ ID NO: 870336 - DNA, 25 bp, Homo sapien
ccgggagacccctggcaatctgatt

SEQ ID NO: 870337 - DNA, 25 bp, Homo sapien
agcttgtgctcacgcccagggtaac

SEQ ID NO: 870338 - DNA, 25 bp, Homo sapien
tgcaccctgagatacagtgactagg

SEQ ID NO: 870339 - DNA, 25 bp, Homo sapien
tagagacgttcttgccttacgcagt

SEQ ID NO: 870340 - DNA, 25 bp, Homo sapien
cctacttcagctaaaagtggtttag

SEQ ID NO: 870341 - DNA, 25 bp, Homo sapien
gaggttgccgatttaccctctggtg

SEQ ID NO: 870342 - DNA, 25 bp, Homo sapien
tagtgaaatcctactccttttgtca

SEQ ID NO: 870343 - DNA, 25 bp, Homo sapien
ttttgtcatgtggaagcttgcagct

SEQ ID NO: 870344 - DNA, 25 bp, Homo sapien
tattggaggacagcgaggttctttc

SEQ ID NO: 870345 - DNA, 25 bp, Homo sapien
gactgaacttgacctgtgacctctg

SEQ ID NO: 870346 - DNA, 25 bp, Homo sapien
cataatgccgagtgcgtaaggaaac

SEQ ID NO: 870347 - DNA, 25 bp, Homo sapien
tgcatgcatgaacgtgccaagccag

SEQ ID NO: 870348 - DNA, 25 bp, Homo sapien
gatgaaatgggatcccggtcacgca

SEQ ID NO: 870349 - DNA, 25 bp, Homo sapien
tgttcctgggttggctttacggcaa

SEQ ID NO: 870350 - DNA, 25 bp, Homo sapien
tcatggtcacgctgggcgaagagct

SEQ ID NO: 870351 - DNA, 25 bp, Homo sapien
gctgcggtgaaatgccccagtgttc

SEQ ID NO: 870352 - DNA, 25 bp, Homo sapien
caacgagacgtgcattgagtttcct

SEQ ID NO: 870353 - DNA, 25 bp, Homo sapien
cattatcaacgagacgtgcattgag

SEQ ID NO: 870354 - DNA, 25 bp, Homo sapien
aaagggcattatcaacgagacgtgc

SEQ ID NO: 870355 - DNA, 25 bp, Homo sapien
gggcattatcaacgagacgtgcatt

SEQ ID NO: 870356 - DNA, 25 bp, Homo sapien
tcaatttccaccgagcggccagata

SEQ ID NO: 870357 - DNA, 25 bp, Homo sapien
cagcaaaggccccacgtgggtcaat

SEQ ID NO: 870358 - DNA, 25 bp, Homo sapien
cccacgtgggtcaatttccaccgag

SEQ ID NO: 870359 - DNA, 25 bp, Homo sapien
gtgggtcaatttccaccgagcggcc

SEQ ID NO: 870360 - DNA, 25 bp, Homo sapien
tgggctgggtcagccgcaggtcacc

SEQ ID NO: 870361 - DNA, 25 bp, Homo sapien
gtgggctgggtcagccgcaggtcac

SEQ ID NO: 870362 - DNA, 25 bp, Homo sapien
ggtcagccgcaggtcacccggccct

SEQ ID NO: 870363 - DNA, 25 bp, Homo sapien
ctgggtcagccgcaggtcacccggc

SEQ ID NO: 870364 - DNA, 25 bp, Homo sapien
accgcgtgcaccacgacgttgtcgc

SEQ ID NO: 870365 - DNA, 25 bp, Homo sapien
ctaccgcgtgcaccacgacgttgtc

SEQ ID NO: 870366 - DNA, 25 bp, Homo sapien
gcgtgcaccacgacgttgtcgccgg

SEQ ID NO: 870367 - DNA, 25 bp, Homo sapien
cgcgtgcaccacgacgttgtcgccg

SEQ ID NO: 870368 - DNA, 25 bp, Homo sapien
atgcctggcactggttttttgagat

SEQ ID NO: 870369 - DNA, 25 bp, Homo sapien
catgcctggcactggttttttgaga

SEQ ID NO: 870370 - DNA, 25 bp, Homo sapien
ctccacccgccgggtccctgtgatt

SEQ ID NO: 870371 - DNA, 25 bp, Homo sapien
acaatctctgtcacccccaggccag

SEQ ID NO: 870372 - DNA, 25 bp, Homo sapien
gagacaatctctgtcacccccaggc

SEQ ID NO: 870373 - DNA, 25 bp, Homo sapien
cctccacccgccgggtccctgtgat

SEQ ID NO: 870374 - DNA, 25 bp, Homo sapien
ttccttccctcaagattgtctggtt

SEQ ID NO: 870375 - DNA, 25 bp, Homo sapien
tccttccctcaagattgtctggttg

SEQ ID NO: 870376 - DNA, 25 bp, Homo sapien
ccttccctcaagattgtctggttga

SEQ ID NO: 870377 - DNA, 25 bp, Homo sapien
gcttggggcctggttaagtgctttc

SEQ ID NO: 870378 - DNA, 25 bp, Homo sapien
tacaggttaagaagtgccacctccc

SEQ ID NO: 870379 - DNA, 25 bp, Homo sapien
cggtgaagccggtgctagacactat

SEQ ID NO: 870380 - DNA, 25 bp, Homo sapien
gggcgacagtttcagcaccattggg

SEQ ID NO: 870381 - DNA, 25 bp, Homo sapien
tgcctttgacagacactccgggctg

SEQ ID NO: 870382 - DNA, 25 bp, Homo sapien
gaagcccagagtgagcgtcagtttg

SEQ ID NO: 870383 - DNA, 25 bp, Homo sapien
gaatccccagtctgcatggacctgg

SEQ ID NO: 870384 - DNA, 25 bp, Homo sapien
ggtccggccataccctgatagctaa

SEQ ID NO: 870385 - DNA, 25 bp, Homo sapien
caagtgcttgcaacgtgctgggcag

SEQ ID NO: 870386 - DNA, 25 bp, Homo sapien
gtccacatgcgaggactggtatagc

SEQ ID NO: 870387 - DNA, 25 bp, Homo sapien
cattttcgtccacatgcgaggactg

SEQ ID NO: 870388 - DNA, 25 bp, Homo sapien
acaccgtctgcacgtcattttcgtc

SEQ ID NO: 870389 - DNA, 25 bp, Homo sapien
tcctggtacttcttggtcttcagca

SEQ ID NO: 870390 - DNA, 25 bp, Homo sapien
gctgcggctggacttctggtcccag

SEQ ID NO: 870391 - DNA, 25 bp, Homo sapien
ggctgcggctggacttctggtccca

SEQ ID NO: 870392 - DNA, 25 bp, Homo sapien
tgcggctggacttctggtcccagtg

SEQ ID NO: 870393 - DNA, 25 bp, Homo sapien
ctgcggctggacttctggtcccagt

SEQ ID NO: 870394 - DNA, 25 bp, Homo sapien
gacgcggaccaccatgttgttgccc

SEQ ID NO: 870395 - DNA, 25 bp, Homo sapien
ttgacgcggaccaccatgttgttgc

SEQ ID NO: 870396 - DNA, 25 bp, Homo sapien
acttgacgcggaccaccatgttgtt

SEQ ID NO: 870397 - DNA, 25 bp, Homo sapien
gtagaaccacttgacgcggaccacc

SEQ ID NO: 870398 - DNA, 25 bp, Homo sapien
gggcttgccgaaccacttccagagc

SEQ ID NO: 870399 - DNA, 25 bp, Homo sapien
tctcttcttgggtcggctcttggcc

SEQ ID NO: 870400 - DNA, 25 bp, Homo sapien
atcttgggccggttctccacggacg

SEQ ID NO: 870401 - DNA, 25 bp, Homo sapien
gggaggtggacgccctctctcttct

SEQ ID NO: 870402 - DNA, 25 bp, Homo sapien
gggctggggcgcgggcgtcttcttg

SEQ ID NO: 870403 - DNA, 25 bp, Homo sapien
tgcggaggaggcgcctggggctggg

SEQ ID NO: 870404 - DNA, 25 bp, Homo sapien
gtgtgggctgcggaggaggcgcctg

SEQ ID NO: 870405 - DNA, 25 bp, Homo sapien
cagaggctgtgtgggctgcggagga

SEQ ID NO: 870406 - DNA, 25 bp, Homo sapien
ggagtgggccgagggccgcgccttg

SEQ ID NO: 870407 - DNA, 25 bp, Homo sapien
gggagcgccgcctgcgcggaagggc

SEQ ID NO: 870408 - DNA, 25 bp, Homo sapien
gcctgcgcggaagggccagccgtgg

SEQ ID NO: 870409 - DNA, 25 bp, Homo sapien
ccttgccggcctgcttggtggcctt

SEQ ID NO: 870410 - DNA, 25 bp, Homo sapien
gaagaggaggaagacgaagaggaag

SEQ ID NO: 870411 - DNA, 25 bp, Homo sapien
aggaggatgaggacgaggaagagga

SEQ ID NO: 870412 - DNA, 25 bp, Homo sapien
aggaggaggatgaggacgaggaaga

SEQ ID NO: 870413 - DNA, 25 bp, Homo sapien
aggaggaagacgaagaggaagagga

SEQ ID NO: 870414 - DNA, 25 bp, Homo sapien
ggaggaggaggaggccggtgaggcc

SEQ ID NO: 870415 - DNA, 25 bp, Homo sapien
aggaggaggaggccggtgaggccgc

SEQ ID NO: 870416 - DNA, 25 bp, Homo sapien
aggaggaggaggaggccggtgaggc

SEQ ID NO: 870417 - DNA, 25 bp, Homo sapien
ggaggaggaggccggtgaggccgcc

SEQ ID NO: 870418 - DNA, 25 bp, Homo sapien
gcagttacggcccccggtgccgcag

SEQ ID NO: 870419 - DNA, 25 bp, Homo sapien
agcgctgcagttacggcccccggtg

SEQ ID NO: 870420 - DNA, 25 bp, Homo sapien
ctggagctggcagcgctgcagttac

SEQ ID NO: 870421 - DNA, 25 bp, Homo sapien
gctggcagcgctgcagttacggccc

SEQ ID NO: 870422 - DNA, 25 bp, Homo sapien
ctccccttctgtctccgagccgctg

SEQ ID NO: 870423 - DNA, 25 bp, Homo sapien
tcctccccttctgtctccgagccgc

SEQ ID NO: 870424 - DNA, 25 bp, Homo sapien
ccccttctgtctccgagccgctgct

SEQ ID NO: 870425 - DNA, 25 bp, Homo sapien
cccttctgtctccgagccgctgctg

SEQ ID NO: 870426 - DNA, 25 bp, Homo sapien
ggttcccagagtcctcgaacgtgag

SEQ ID NO: 870427 - DNA, 25 bp, Homo sapien
ttcccagagtcctcgaacgtgagcc

SEQ ID NO: 870428 - DNA, 25 bp, Homo sapien
gttcccagagtcctcgaacgtgagc

SEQ ID NO: 870429 - DNA, 25 bp, Homo sapien
ccagggtgccttgggctcgctgctg

SEQ ID NO: 870430 - DNA, 25 bp, Homo sapien
ccttgggctcgctgctgccggccgc

SEQ ID NO: 870431 - DNA, 25 bp, Homo sapien
ccaggctcaggaggctcttgggctc

SEQ ID NO: 870432 - DNA, 25 bp, Homo sapien
gggtgccttgggctcgctgctgccg

SEQ ID NO: 870433 - DNA, 25 bp, Homo sapien
ggaggtggcaggagctggcagctct

SEQ ID NO: 870434 - DNA, 25 bp, Homo sapien
aggtggcaggagctggcagctctgc

SEQ ID NO: 870435 - DNA, 25 bp, Homo sapien
gccagggaggtggcaggagctggca

SEQ ID NO: 870436 - DNA, 25 bp, Homo sapien
tgatgaggggtgctggggccaggga

SEQ ID NO: 870437 - DNA, 25 bp, Homo sapien
cttgggggccttggctcgcttgtcc

SEQ ID NO: 870438 - DNA, 25 bp, Homo sapien
gggggccttggctcgcttgtccaca

SEQ ID NO: 870439 - DNA, 25 bp, Homo sapien
cttggctcgcttgtccacaggctct

SEQ ID NO: 870440 - DNA, 25 bp, Homo sapien
ttggctcgcttgtccacaggctctg

SEQ ID NO: 870441 - DNA, 25 bp, Homo sapien
ctttcagcctgcacgaagtattttc

SEQ ID NO: 870442 - DNA, 25 bp, Homo sapien
tgcgcccagcagaaaggcctggttt

SEQ ID NO: 870443 - DNA, 25 bp, Homo sapien
ccccaaagcgggtcctcctctgctt

SEQ ID NO: 870444 - DNA, 25 bp, Homo sapien
gcctgcacgaagtattttctctgga

SEQ ID NO: 870445 - DNA, 25 bp, Homo sapien
tttgctggtcttccggctgcggcgc

SEQ ID NO: 870446 - DNA, 25 bp, Homo sapien
gcgcttggcacttggcaccagaagg

SEQ ID NO: 870447 - DNA, 25 bp, Homo sapien
cagtgtctttgctggtcttccggct

SEQ ID NO: 870448 - DNA, 25 bp, Homo sapien
ttggccttggcgctgggtttccgcc

SEQ ID NO: 870449 - DNA, 25 bp, Homo sapien
gggatcctgcccgtgtctccgtcgt

SEQ ID NO: 870450 - DNA, 25 bp, Homo sapien
ctccgtcgtcaaactccacggtgat

SEQ ID NO: 870451 - DNA, 25 bp, Homo sapien
tgtatcttatagtcagggggcagga

SEQ ID NO: 870452 - DNA, 25 bp, Homo sapien
acggtgatcaagtccccatcgtcct

SEQ ID NO: 870453 - DNA, 25 bp, Homo sapien
tttgggtgacacaagacagctgagc

SEQ ID NO: 870454 - DNA, 25 bp, Homo sapien
tgcgcccgctcatgcacaagaccct

SEQ ID NO: 870455 - DNA, 25 bp, Homo sapien
cccatttctagctgactttgggtga

SEQ ID NO: 870456 - DNA, 25 bp, Homo sapien
ctgagcacatgcacctgcgcccgct

SEQ ID NO: 870457 - DNA, 25 bp, Homo sapien
gggccatggaactagcccaagttcc

SEQ ID NO: 870458 - DNA, 25 bp, Homo sapien
catgaaattcacaagagaagttatc

SEQ ID NO: 870459 - DNA, 25 bp, Homo sapien
aaatctctccataagttgaacaaaa

SEQ ID NO: 870460 - DNA, 25 bp, Homo sapien
gagaagttatccaagttgtgctaca

SEQ ID NO: 870461 - DNA, 25 bp, Homo sapien
gaatgatacccatgaggcaggccta

SEQ ID NO: 870462 - DNA, 25 bp, Homo sapien
tctctaaagaataagggtacccagc

SEQ ID NO: 870463 - DNA, 25 bp, Homo sapien
taggaaatccgaatctaaggccaac

SEQ ID NO: 870464 - DNA, 25 bp, Homo sapien
gagatcctctactcaggctggacca

SEQ ID NO: 870465 - DNA, 25 bp, Homo sapien
tattcttaagccagttagagttggg

SEQ ID NO: 870466 - DNA, 25 bp, Homo sapien
tgcctggatccaatcatgcctgaag

SEQ ID NO: 870467 - DNA, 25 bp, Homo sapien
ttagtagccaaacaagtccatactg

SEQ ID NO: 870468 - DNA, 25 bp, Homo sapien
tccatactgagatgttaggcggcag

SEQ ID NO: 870469 - DNA, 25 bp, Homo sapien
gtaggctgcaatcctggtcccttgt

SEQ ID NO: 870470 - DNA, 25 bp, Homo sapien
caatcctggtcccttgtggcaagaa

SEQ ID NO: 870471 - DNA, 25 bp, Homo sapien
cctggtcccttgtggcaagaagcga

SEQ ID NO: 870472 - DNA, 25 bp, Homo sapien
cctgggtagagacagcggtactgct

SEQ ID NO: 870473 - DNA, 25 bp, Homo sapien
gatgagtgcaaggtgtggacacagt

SEQ ID NO: 870474 - DNA, 25 bp, Homo sapien
tggacacagttatggccatggcctt

SEQ ID NO: 870475 - DNA, 25 bp, Homo sapien
gtgtggacacagttatggccatggc

SEQ ID NO: 870476 - DNA, 25 bp, Homo sapien
ctagaagggcatgggatgagtgcaa

SEQ ID NO: 870477 - DNA, 25 bp, Homo sapien
tagatgtggggccggttgccccgct

SEQ ID NO: 870478 - DNA, 25 bp, Homo sapien
gatgtggggccggttgccccgctca

SEQ ID NO: 870479 - DNA, 25 bp, Homo sapien
atgtggggccggttgccccgctcac

SEQ ID NO: 870480 - DNA, 25 bp, Homo sapien
cagtagatgtggggccggttgcccc

SEQ ID NO: 870481 - DNA, 25 bp, Homo sapien
ctgtaggagcaaacgaggcgtgagg

SEQ ID NO: 870482 - DNA, 25 bp, Homo sapien
taggagcaaacgaggcgtgaggtgg

SEQ ID NO: 870483 - DNA, 25 bp, Homo sapien
caaacgaggcgtgaggtggcagagg

SEQ ID NO: 870484 - DNA, 25 bp, Homo sapien
agcaaacgaggcgtgaggtggcaga

SEQ ID NO: 870485 - DNA, 25 bp, Homo sapien
atgagcacacgcaggccgtccttca

SEQ ID NO: 870486 - DNA, 25 bp, Homo sapien
gatgagcacacgcaggccgtccttc

SEQ ID NO: 870487 - DNA, 25 bp, Homo sapien
tgagcacacgcaggccgtccttcag

SEQ ID NO: 870488 - DNA, 25 bp, Homo sapien
tccttgtcgatgatgcaggagcgag

SEQ ID NO: 870489 - DNA, 25 bp, Homo sapien
ttaataattttttcaagccaggcgc

SEQ ID NO: 870490 - DNA, 25 bp, Homo sapien
ggctgatcccgagcccctgacctcc

SEQ ID NO: 870491 - DNA, 25 bp, Homo sapien
attttttcaagccaggcgcgatggc

SEQ ID NO: 870492 - DNA, 25 bp, Homo sapien
aataattttttcaagccaggcgcga

SEQ ID NO: 870493 - DNA, 25 bp, Homo sapien
ccccacctacctctgagactttcca

SEQ ID NO: 870494 - DNA, 25 bp, Homo sapien
cctacctctgagactttccatccac

SEQ ID NO: 870495 - DNA, 25 bp, Homo sapien
atcatcatgatgtcagagacaaggt

SEQ ID NO: 870496 - DNA, 25 bp, Homo sapien
catcatgatgtcagagacaaggtct

SEQ ID NO: 870497 - DNA, 25 bp, Homo sapien
gcctcatctgcagttgactaagctg

SEQ ID NO: 870498 - DNA, 25 bp, Homo sapien
gacccggataactcagcctcaggat

SEQ ID NO: 870499 - DNA, 25 bp, Homo sapien
gcacatgtggcatcacggccactca

SEQ ID NO: 870500 - DNA, 25 bp, Homo sapien
gcattttccttagggccaacacgga

SEQ ID NO: 870501 - DNA, 25 bp, Homo sapien
ttgggttcaaagtcctcctcggctg

SEQ ID NO: 870502 - DNA, 25 bp, Homo sapien
ggcaggtgctcgtcctcagagaagc

SEQ ID NO: 870503 - DNA, 25 bp, Homo sapien
cctcggctgccatgctctccatcag

SEQ ID NO: 870504 - DNA, 25 bp, Homo sapien
gctcgagtcttggttgggttcaaag

SEQ ID NO: 870505 - DNA, 25 bp, Homo sapien
catggccgacaaatgacttaggacc

SEQ ID NO: 870506 - DNA, 25 bp, Homo sapien
gccgacaaatgacttaggacctgaa

SEQ ID NO: 870507 - DNA, 25 bp, Homo sapien
tggccgacaaatgacttaggacctg

SEQ ID NO: 870508 - DNA, 25 bp, Homo sapien
ccgacaaatgacttaggacctgaac

SEQ ID NO: 870509 - DNA, 25 bp, Homo sapien
cagttaggggcaccccagaggccag

SEQ ID NO: 870510 - DNA, 25 bp, Homo sapien
ggtgctcaatactcagtactctgtg

SEQ ID NO: 870511 - DNA, 25 bp, Homo sapien
tcagcactcagtactcactaccata

SEQ ID NO: 870512 - DNA, 25 bp, Homo sapien
gtgaaatgggcccaaaacccagctg

SEQ ID NO: 870513 - DNA, 25 bp, Homo sapien
tccttttggcagcggtcagggagct

SEQ ID NO: 870514 - DNA, 25 bp, Homo sapien
ccttttggcagcggtcagggagctg

SEQ ID NO: 870515 - DNA, 25 bp, Homo sapien
gcagcggtcagggagctggcgtgag

SEQ ID NO: 870516 - DNA, 25 bp, Homo sapien
agggcaaggcaggagctcggggcgg

SEQ ID NO: 870517 - DNA, 25 bp, Homo sapien
gcaaggcaggagctcggggcggcgg

SEQ ID NO: 870518 - DNA, 25 bp, Homo sapien
agccctggcctcagagggcaaggca

SEQ ID NO: 870519 - DNA, 25 bp, Homo sapien
gggcggcggcagcccagctcctggc

SEQ ID NO: 870520 - DNA, 25 bp, Homo sapien
gccatcaaacggcagggaaagcaca

SEQ ID NO: 870521 - DNA, 25 bp, Homo sapien
cttcctgcaagcgtttttggttttg

SEQ ID NO: 870522 - DNA, 25 bp, Homo sapien
tctcttcctgcaagcgtttttggtt

SEQ ID NO: 870523 - DNA, 25 bp, Homo sapien
agaggagccatcaaacggcagggaa

SEQ ID NO: 870524 - DNA, 25 bp, Homo sapien
tatggagaaaccctaatgcacttac

SEQ ID NO: 870525 - DNA, 25 bp, Homo sapien
tgtaaatatgaaggctacgcagaca

SEQ ID NO: 870526 - DNA, 25 bp, Homo sapien
agtgggaatttaccaacagtcctgc

SEQ ID NO: 870527 - DNA, 25 bp, Homo sapien
taacagcagcctattgagccaaggt

SEQ ID NO: 870528 - DNA, 25 bp, Homo sapien
gcccggctgagaccaccgtctctta

SEQ ID NO: 870529 - DNA, 25 bp, Homo sapien
gctgagaccaccgtctcttattaaa

SEQ ID NO: 870530 - DNA, 25 bp, Homo sapien
gagaccaccgtctcttattaaaaga

SEQ ID NO: 870531 - DNA, 25 bp, Homo sapien
cggctgagaccaccgtctcttatta

SEQ ID NO: 870532 - DNA, 25 bp, Homo sapien
gtctgccttttgatactgtagcagg

SEQ ID NO: 870533 - DNA, 25 bp, Homo sapien
tgccttttgatactgtagcaggaac

SEQ ID NO: 870534 - DNA, 25 bp, Homo sapien
cagtgtctgccttttgatactgtag

SEQ ID NO: 870535 - DNA, 25 bp, Homo sapien
agtgtctgccttttgatactgtagc

SEQ ID NO: 870536 - DNA, 25 bp, Homo sapien
gacatgtgtctgaagatccagctat

SEQ ID NO: 870537 - DNA, 25 bp, Homo sapien
taagatacgggtggtcaagcatggt

SEQ ID NO: 870538 - DNA, 25 bp, Homo sapien
gataactatggtcactatcactgtc

SEQ ID NO: 870539 - DNA, 25 bp, Homo sapien
aaaagagagtaaggacctctgtaag

SEQ ID NO: 870540 - DNA, 25 bp, Homo sapien
agcagccgaggcgtcgtgcaggaag

SEQ ID NO: 870541 - DNA, 25 bp, Homo sapien
ttcctgtcctttgcacgcccggcgt

SEQ ID NO: 870542 - DNA, 25 bp, Homo sapien
aggaagatgcgctcgctgcggcgcc

SEQ ID NO: 870543 - DNA, 25 bp, Homo sapien
gcgcggtgctgacgggcgcaggtgc

SEQ ID NO: 870544 - DNA, 25 bp, Homo sapien
cacaggtcgtcgtcgctggcctcgg

SEQ ID NO: 870545 - DNA, 25 bp, Homo sapien
gcaggcgaccgcttgcgcaccttga

SEQ ID NO: 870546 - DNA, 25 bp, Homo sapien
accttgacctcgctctctgagtcgg

SEQ ID NO: 870547 - DNA, 25 bp, Homo sapien
gagtcggtgtactcgaactctgtgc

SEQ ID NO: 870548 - DNA, 25 bp, Homo sapien
caggcccggtgacagggcccgctcc

SEQ ID NO: 870549 - DNA, 25 bp, Homo sapien
ggcgctggcggcgaagcgtgccagc

SEQ ID NO: 870550 - DNA, 25 bp, Homo sapien
gctggcggcgaagcgtgccagcagg

SEQ ID NO: 870551 - DNA, 25 bp, Homo sapien
gcggcgaagcgtgccagcaggccca

SEQ ID NO: 870552 - DNA, 25 bp, Homo sapien
tcgtcctcctcctccgagctctcat

SEQ ID NO: 870553 - DNA, 25 bp, Homo sapien
ctgtagccaccaccgctggcctcgt

SEQ ID NO: 870554 - DNA, 25 bp, Homo sapien
tagccaccaccgctggcctcgtcct

SEQ ID NO: 870555 - DNA, 25 bp, Homo sapien
ctcgtcctcctcctcgagctcctcc

SEQ ID NO: 870556 - DNA, 25 bp, Homo sapien
cccgctagcgtccgcagcaggctgg

SEQ ID NO: 870557 - DNA, 25 bp, Homo sapien
gctctgaggaccaagaaaacctttc

SEQ ID NO: 870558 - DNA, 25 bp, Homo sapien
gaaaacctttctggagttgtccaca

SEQ ID NO: 870559 - DNA, 25 bp, Homo sapien
tgaggaccaagaaaacctttctgga

SEQ ID NO: 870560 - DNA, 25 bp, Homo sapien
ctgaggcaatgcagcttgccgaggg

SEQ ID NO: 870561 - DNA, 25 bp, Homo sapien
gcgtgagagcaaatgcaagagacca

SEQ ID NO: 870562 - DNA, 25 bp, Homo sapien
tacggagcaacgagccaggctcgca

SEQ ID NO: 870563 - DNA, 25 bp, Homo sapien
aaacagacattcaaagcgtcatggg

SEQ ID NO: 870564 - DNA, 25 bp, Homo sapien
ctttgcgtccagagtgcagcgtgag

SEQ ID NO: 870565 - DNA, 25 bp, Homo sapien
gtccacttggcactgcggcgccagc

SEQ ID NO: 870566 - DNA, 25 bp, Homo sapien
ccctatctgggtcccgtccacttgg

SEQ ID NO: 870567 - DNA, 25 bp, Homo sapien
cactcccctatctgggtcccgtcca

SEQ ID NO: 870568 - DNA, 25 bp, Homo sapien
ggcctagggcgctgcctgcttctct

SEQ ID NO: 870569 - DNA, 25 bp, Homo sapien
cctcggaaaacgaggctggccagtg

SEQ ID NO: 870570 - DNA, 25 bp, Homo sapien
tcgctcagaggggtagtagcagccc

SEQ ID NO: 870571 - DNA, 25 bp, Homo sapien
tcatccacggacagcccgggcaggg

SEQ ID NO: 870572 - DNA, 25 bp, Homo sapien
cctctcttctcggtccggggtggtg

SEQ ID NO: 870573 - DNA, 25 bp, Homo sapien
caggcggcacggtcccgtccctact

SEQ ID NO: 870574 - DNA, 25 bp, Homo sapien
ttgaataacacaggcaagcggcagg

SEQ ID NO: 870575 - DNA, 25 bp, Homo sapien
cagggatatttgaataacacaggca

SEQ ID NO: 870576 - DNA, 25 bp, Homo sapien
aagcggcaggcggcacggtcccgtc

SEQ ID NO: 870577 - DNA, 25 bp, Homo sapien
gcttggtattaccaaaatcgcggta

SEQ ID NO: 870578 - DNA, 25 bp, Homo sapien
aaagagagcccgaaccaagcctggg

SEQ ID NO: 870579 - DNA, 25 bp, Homo sapien
atcaaaatcattcggctgataacag

SEQ ID NO: 870580 - DNA, 25 bp, Homo sapien
gcaagtggagagaaacgcagactca

SEQ ID NO: 870581 - DNA, 25 bp, Homo sapien
agatggcagccttcttgcggccatc

SEQ ID NO: 870582 - DNA, 25 bp, Homo sapien
atggcagccttcttgcggccatccg

SEQ ID NO: 870583 - DNA, 25 bp, Homo sapien
cggccatccgcacgggcctcctcac

SEQ ID NO: 870584 - DNA, 25 bp, Homo sapien
ggcagccttcttgcggccatccgca

SEQ ID NO: 870585 - DNA, 25 bp, Homo sapien
catctctcccgtgcgcccactcgct

SEQ ID NO: 870586 - DNA, 25 bp, Homo sapien
gaaggtattttgtgtttggagctag

SEQ ID NO: 870587 - DNA, 25 bp, Homo sapien
gtattttgtgtttggagctagtaac

SEQ ID NO: 870588 - DNA, 25 bp, Homo sapien
ggtattttgtgtttggagctagtaa

SEQ ID NO: 870589 - DNA, 25 bp, Homo sapien
cacggaaggtattttgtgtttggag

SEQ ID NO: 870590 - DNA, 25 bp, Homo sapien
aggaggaacgcgcctcggcctctcg

SEQ ID NO: 870591 - DNA, 25 bp, Homo sapien
caaacgattcctccgaagagtcgct

SEQ ID NO: 870592 - DNA, 25 bp, Homo sapien
cagacaaaacggctgcttcctgctg

SEQ ID NO: 870593 - DNA, 25 bp, Homo sapien
gaaggcgtcagtttggagctggagg

SEQ ID NO: 870594 - DNA, 25 bp, Homo sapien
caggcacgatggagtgaagttgccc

SEQ ID NO: 870595 - DNA, 25 bp, Homo sapien
aagttgcccatttgaccattcccag

SEQ ID NO: 870596 - DNA, 25 bp, Homo sapien
ccaggacagtggagttttcgacaca

SEQ ID NO: 870597 - DNA, 25 bp, Homo sapien
gaggagaccgttctcgcttcgacct

SEQ ID NO: 870598 - DNA, 25 bp, Homo sapien
agctgctcacttccgaggcaaacgg

SEQ ID NO: 870599 - DNA, 25 bp, Homo sapien
gggaatgggccgacttgggctggcc

SEQ ID NO: 870600 - DNA, 25 bp, Homo sapien
catcttcctggttttggctgccctt

SEQ ID NO: 870601 - DNA, 25 bp, Homo sapien
tgtaagagtagctgctcacttccga

SEQ ID NO: 870602 - DNA, 25 bp, Homo sapien
cgcagcccccgctagttttcgattt

SEQ ID NO: 870603 - DNA, 25 bp, Homo sapien
ctgtcgtaaggagtcaagtacctgc

SEQ ID NO: 870604 - DNA, 25 bp, Homo sapien
gcagcccccgctagttttcgatttc

SEQ ID NO: 870605 - DNA, 25 bp, Homo sapien
aggctgtcgtaaggagtcaagtacc

SEQ ID NO: 870606 - DNA, 25 bp, Homo sapien
tttccccattccgatgagggcatca

SEQ ID NO: 870607 - DNA, 25 bp, Homo sapien
ctgactgatgaagtccgacgaggcc

SEQ ID NO: 870608 - DNA, 25 bp, Homo sapien
ccattccgatgagggcatcatgttc

SEQ ID NO: 870609 - DNA, 25 bp, Homo sapien
gaagtccgacgaggcctcatgttca

SEQ ID NO: 870610 - DNA, 25 bp, Homo sapien
gcgacagggcgctcggggcgtgggt

SEQ ID NO: 870611 - DNA, 25 bp, Homo sapien
ttctatggggttcctcgcgcctgtc

SEQ ID NO: 870612 - DNA, 25 bp, Homo sapien
tgcgtgccaagcttctatggggttc

SEQ ID NO: 870613 - DNA, 25 bp, Homo sapien
gtgggtccgtttccgcggcctgcca

SEQ ID NO: 870614 - DNA, 25 bp, Homo sapien
ccagggaggacttcatggcatacat

SEQ ID NO: 870615 - DNA, 25 bp, Homo sapien
tcggccagccgcatccggaagtcca

SEQ ID NO: 870616 - DNA, 25 bp, Homo sapien
gcatccggaagtccagctccagggc

SEQ ID NO: 870617 - DNA, 25 bp, Homo sapien
ttctccttgtactggcgctgcacct

SEQ ID NO: 870618 - DNA, 25 bp, Homo sapien
cagctgtacttcttgttgggcttca

SEQ ID NO: 870619 - DNA, 25 bp, Homo sapien
ccgcaggttcttgagtgggtccacc

SEQ ID NO: 870620 - DNA, 25 bp, Homo sapien
catccagctgtacttcttgttgggc

SEQ ID NO: 870621 - DNA, 25 bp, Homo sapien
cttgagtgggtccaccacgggccca

SEQ ID NO: 870622 - DNA, 25 bp, Homo sapien
accagtaccaggtgggaagaccaag

SEQ ID NO: 870623 - DNA, 25 bp, Homo sapien
agattctgtcccagaaataattaaa

SEQ ID NO: 870624 - DNA, 25 bp, Homo sapien
gggagattctgtcccagaaataatt

SEQ ID NO: 870625 - DNA, 25 bp, Homo sapien
gagattctgtcccagaaataattaa

SEQ ID NO: 870626 - DNA, 25 bp, Homo sapien
agtgaggacagtaagtcggccttga

SEQ ID NO: 870627 - DNA, 25 bp, Homo sapien
gcctctttcggaaggctgctgagca

SEQ ID NO: 870628 - DNA, 25 bp, Homo sapien
caacaaagcatgaaccgcagtcagc

SEQ ID NO: 870629 - DNA, 25 bp, Homo sapien
tgccaaagctagcaagaaagaggtg

SEQ ID NO: 870630 - DNA, 25 bp, Homo sapien
agaactcagaggtcgcgcactctca

SEQ ID NO: 870631 - DNA, 25 bp, Homo sapien
tgcagaactcagaggtcgcgcactc

SEQ ID NO: 870632 - DNA, 25 bp, Homo sapien
cagaactcagaggtcgcgcactctc

SEQ ID NO: 870633 - DNA, 25 bp, Homo sapien
gcagaactcagaggtcgcgcactct

SEQ ID NO: 870634 - DNA, 25 bp, Homo sapien
gctgggactcgctcggtgccacctg

SEQ ID NO: 870635 - DNA, 25 bp, Homo sapien
ggtgggctgggactcgctcggtgcc

SEQ ID NO: 870636 - DNA, 25 bp, Homo sapien
gccgagtacaggcacggcctcttgg

SEQ ID NO: 870637 - DNA, 25 bp, Homo sapien
ccagggcgttcatgccagccagtgg

SEQ ID NO: 870638 - DNA, 25 bp, Homo sapien
tctggacactcagagggctctgcgc

SEQ ID NO: 870639 - DNA, 25 bp, Homo sapien
tccacccgtggttcaggcccctcca

SEQ ID NO: 870640 - DNA, 25 bp, Homo sapien
gtctggacactcagagggctctgcg

SEQ ID NO: 870641 - DNA, 25 bp, Homo sapien
agtctggacactcagagggctctgc

SEQ ID NO: 870642 - DNA, 25 bp, Homo sapien
gggtagccatggcttccgcggcggg

SEQ ID NO: 870643 - DNA, 25 bp, Homo sapien
cttcgggtgagagtgccaggcgctc

SEQ ID NO: 870644 - DNA, 25 bp, Homo sapien
agcggatgggcttgtcttcgggtga

SEQ ID NO: 870645 - DNA, 25 bp, Homo sapien
ggcccatcagccgggagcggcacat

SEQ ID NO: 870646 - DNA, 25 bp, Homo sapien
ttctcttccatctccgcccggtgct

SEQ ID NO: 870647 - DNA, 25 bp, Homo sapien
cccggtgctcctgcgccttcaaccg

SEQ ID NO: 870648 - DNA, 25 bp, Homo sapien
gtggcgggctcacggccttgccgta

SEQ ID NO: 870649 - DNA, 25 bp, Homo sapien
ttcttctcgaccacattctcgggag

SEQ ID NO: 870650 - DNA, 25 bp, Homo sapien
ctgcggcccggcgggtacagggcgg

SEQ ID NO: 870651 - DNA, 25 bp, Homo sapien
cagaggggcggtacggtggcccgct

SEQ ID NO: 870652 - DNA, 25 bp, Homo sapien
tgggcgctcctctgcagttccaagg

SEQ ID NO: 870653 - DNA, 25 bp, Homo sapien
tgctgcaggtacaggaactcctgct

SEQ ID NO: 870654 - DNA, 25 bp, Homo sapien
aaagtgaggaaggtgatcactggga

SEQ ID NO: 870655 - DNA, 25 bp, Homo sapien
aagtgaggaaggtgatcactgggaa

SEQ ID NO: 870656 - DNA, 25 bp, Homo sapien
gaggaaggtgatcactgggaatgac

SEQ ID NO: 870657 - DNA, 25 bp, Homo sapien
gtgaggaaggtgatcactgggaatg

SEQ ID NO: 870658 - DNA, 25 bp, Homo sapien
tgacaaactggtaggctgacgggag

SEQ ID NO: 870659 - DNA, 25 bp, Homo sapien
actggtaggctgacgggagggagcc

SEQ ID NO: 870660 - DNA, 25 bp, Homo sapien
caaactggtaggctgacgggaggga

SEQ ID NO: 870661 - DNA, 25 bp, Homo sapien
gacaaactggtaggctgacgggagg

SEQ ID NO: 870662 - DNA, 25 bp, Homo sapien
ggtcggcagaccagcgacctgagcc

SEQ ID NO: 870663 - DNA, 25 bp, Homo sapien
tgtccagcgagccacatggatgcgt

SEQ ID NO: 870664 - DNA, 25 bp, Homo sapien
ccgtcaccatgaggttggggttcag

SEQ ID NO: 870665 - DNA, 25 bp, Homo sapien
ccacatggatgcgttgcccgagcgg

SEQ ID NO: 870666 - DNA, 25 bp, Homo sapien
agccgtgccccgagcagccgttcct

SEQ ID NO: 870667 - DNA, 25 bp, Homo sapien
agcagccgttcctcccggtgtctgg

SEQ ID NO: 870668 - DNA, 25 bp, Homo sapien
ctcctgatcccggtccagccgtgcc

SEQ ID NO: 870669 - DNA, 25 bp, Homo sapien
ccggtgtctggcccggtcgtccaca

SEQ ID NO: 870670 - DNA, 25 bp, Homo sapien
aagcgtgttgacgagggcgcctgga

SEQ ID NO: 870671 - DNA, 25 bp, Homo sapien
cctggacctccaacatcaacgtagc

SEQ ID NO: 870672 - DNA, 25 bp, Homo sapien
ggcccagacgcctgcaggaccgagt

SEQ ID NO: 870673 - DNA, 25 bp, Homo sapien
ccgagtgtacggagggacagccggg

SEQ ID NO: 870674 - DNA, 25 bp, Homo sapien
gagagatagtgagccctctgtcccc

SEQ ID NO: 870675 - DNA, 25 bp, Homo sapien
tctgggacaagctttgagcacaggg

SEQ ID NO: 870676 - DNA, 25 bp, Homo sapien
aatgtggttggcctctgaagagaga

SEQ ID NO: 870677 - DNA, 25 bp, Homo sapien
gacagccgtcccagcttacagaatc

SEQ ID NO: 870678 - DNA, 25 bp, Homo sapien
ggccccaggccactttgcaaacatg

SEQ ID NO: 870679 - DNA, 25 bp, Homo sapien
cacaagactaacatggaggcgtcat

SEQ ID NO: 870680 - DNA, 25 bp, Homo sapien
ggagataaagaaacatgcccaagtc

SEQ ID NO: 870681 - DNA, 25 bp, Homo sapien
gcgtcatggctgtgatcagcgtcca

SEQ ID NO: 870682 - DNA, 25 bp, Homo sapien
cacacagggagtgccacagggccct

SEQ ID NO: 870683 - DNA, 25 bp, Homo sapien
cccacacagggagtgccacagggcc

SEQ ID NO: 870684 - DNA, 25 bp, Homo sapien
cacagggagtgccacagggccctct

SEQ ID NO: 870685 - DNA, 25 bp, Homo sapien
ccccacacagggagtgccacagggc

SEQ ID NO: 870686 - DNA, 25 bp, Homo sapien
catcgcagccattaggaacccaagg

SEQ ID NO: 870687 - DNA, 25 bp, Homo sapien
gcagttccagatagggttgctctcc

SEQ ID NO: 870688 - DNA, 25 bp, Homo sapien
agcgctaacgactccactcacaggt

SEQ ID NO: 870689 - DNA, 25 bp, Homo sapien
gagtctgcagcgctaacgactccac

SEQ ID NO: 870690 - DNA, 25 bp, Homo sapien
acaggcccggtccaaggtggctcca

SEQ ID NO: 870691 - DNA, 25 bp, Homo sapien
ggggagacatggctgtgcaggaagt

SEQ ID NO: 870692 - DNA, 25 bp, Homo sapien
tccaaggtggctccaccgggaggtg

SEQ ID NO: 870693 - DNA, 25 bp, Homo sapien
ggctccaccgggaggtgaaggcaca

SEQ ID NO: 870694 - DNA, 25 bp, Homo sapien
ctacccgcacctgggctctgcccag

SEQ ID NO: 870695 - DNA, 25 bp, Homo sapien
cccgcacctgggctctgcccaggac

SEQ ID NO: 870696 - DNA, 25 bp, Homo sapien
cacctgggctctgcccaggacctac

SEQ ID NO: 870697 - DNA, 25 bp, Homo sapien
cgcacctgggctctgcccaggacct

SEQ ID NO: 870698 - DNA, 25 bp, Homo sapien
gccgcagagtgcatgtcagcgaccg

SEQ ID NO: 870699 - DNA, 25 bp, Homo sapien
aaagctttggcgctctcgggcctct

SEQ ID NO: 870700 - DNA, 25 bp, Homo sapien
tgacgttactcagcgacagagagcg

SEQ ID NO: 870701 - DNA, 25 bp, Homo sapien
agagagcgctcctggtctaccagcc

SEQ ID NO: 870702 - DNA, 25 bp, Homo sapien
cacggcggcctcctcttcggcgcgg

SEQ ID NO: 870703 - DNA, 25 bp, Homo sapien
gcggcctcctcttcggcgcggctgt

SEQ ID NO: 870704 - DNA, 25 bp, Homo sapien
tgtggtggtgctgcgcggccagcac

SEQ ID NO: 870705 - DNA, 25 bp, Homo sapien
cctcctcttcggcgcggctgtggtg

SEQ ID NO: 870706 - DNA, 25 bp, Homo sapien
gcccagctcgaagggtttccattta

SEQ ID NO: 870707 - DNA, 25 bp, Homo sapien
ccatttatgctcagggccggtgggc

SEQ ID NO: 870708 - DNA, 25 bp, Homo sapien
ccatctgcgtggcggcgaagttgcc

SEQ ID NO: 870709 - DNA, 25 bp, Homo sapien
gagcttggcggcctgttgggctgca

SEQ ID NO: 870710 - DNA, 25 bp, Homo sapien
gtgtggcccgcaccgtgggggcatc

SEQ ID NO: 870711 - DNA, 25 bp, Homo sapien
gcggccgcttgagcgagcggatgac

SEQ ID NO: 870712 - DNA, 25 bp, Homo sapien
ttggcaggcacgtaggcgcgggggt

SEQ ID NO: 870713 - DNA, 25 bp, Homo sapien
ccggggaggcgcgtgtggcccgcac

SEQ ID NO: 870714 - DNA, 25 bp, Homo sapien
catcgcgcgcctgggatgcgatctg

SEQ ID NO: 870715 - DNA, 25 bp, Homo sapien
gcgctcgtcgaaggcctccacggaa

SEQ ID NO: 870716 - DNA, 25 bp, Homo sapien
gggcccgggcatcgcgcgcctggga

SEQ ID NO: 870717 - DNA, 25 bp, Homo sapien
atgcgatctggatgggccccgggcg

SEQ ID NO: 870718 - DNA, 25 bp, Homo sapien
gctcgcggaagacggtgtagacgcc

SEQ ID NO: 870719 - DNA, 25 bp, Homo sapien
ctgctcgcggaagacggtgtagacg

SEQ ID NO: 870720 - DNA, 25 bp, Homo sapien
tcgcggaagacggtgtagacgccgg

SEQ ID NO: 870721 - DNA, 25 bp, Homo sapien
cggaagacggtgtagacgccggcgg

SEQ ID NO: 870722 - DNA, 25 bp, Homo sapien
cagggagcagggtctccgtgcgccg

SEQ ID NO: 870723 - DNA, 25 bp, Homo sapien
cgcgcgccctcgtcctgccgggcag

SEQ ID NO: 870724 - DNA, 25 bp, Homo sapien
agcagggtctccgtgcgccgcagca

SEQ ID NO: 870725 - DNA, 25 bp, Homo sapien
agccgcgcgccctcgtcctgccggg

SEQ ID NO: 870726 - DNA, 25 bp, Homo sapien
gcgccgccgttgcacatggtcagta

SEQ ID NO: 870727 - DNA, 25 bp, Homo sapien
gctgcagcgccgcattcttggtctt

SEQ ID NO: 870728 - DNA, 25 bp, Homo sapien
atggtcagtaccgacggctgcagcg

SEQ ID NO: 870729 - DNA, 25 bp, Homo sapien
ccttcttgccgaaaagcggaggcgg

SEQ ID NO: 870730 - DNA, 25 bp, Homo sapien
caggctggagtacagtggcgcaacc

SEQ ID NO: 870731 - DNA, 25 bp, Homo sapien
cagaaagagtctcgctctcctcacc

SEQ ID NO: 870732 - DNA, 25 bp, Homo sapien
gcgcaaccttggctcactgcaacct

SEQ ID NO: 870733 - DNA, 25 bp, Homo sapien
aaatgggcgtcccagccctagagag

SEQ ID NO: 870734 - DNA, 25 bp, Homo sapien
ggcccctaagaggacagtgtgacca

SEQ ID NO: 870735 - DNA, 25 bp, Homo sapien
gggctacctggatgctgccaaaggc

SEQ ID NO: 870736 - DNA, 25 bp, Homo sapien
ccgaggtttcacaccaaggcaaggc

SEQ ID NO: 870737 - DNA, 25 bp, Homo sapien
ttcaggtggaggtaggatgggtaca

SEQ ID NO: 870738 - DNA, 25 bp, Homo sapien
gaggtaggatgggtacagcccactg

SEQ ID NO: 870739 - DNA, 25 bp, Homo sapien
tatcgaaaatgctgggctgacccag

SEQ ID NO: 870740 - DNA, 25 bp, Homo sapien
tttctgggtatcgaaaatgctgggc

SEQ ID NO: 870741 - DNA, 25 bp, Homo sapien
catcccgctggccacaaagctgccc

SEQ ID NO: 870742 - DNA, 25 bp, Homo sapien
ccgctggccacaaagctgcccaaga

SEQ ID NO: 870743 - DNA, 25 bp, Homo sapien
cccatcccgctggccacaaagctgc

SEQ ID NO: 870744 - DNA, 25 bp, Homo sapien
tcccgctggccacaaagctgcccaa

SEQ ID NO: 870745 - DNA, 25 bp, Homo sapien
catggcacccattcgctaaaagctg

SEQ ID NO: 870746 - DNA, 25 bp, Homo sapien
ataatgacaacaggccgggcaaggt

SEQ ID NO: 870747 - DNA, 25 bp, Homo sapien
tggctctcgcctatagtctctggag

SEQ ID NO: 870748 - DNA, 25 bp, Homo sapien
ggattccgtgtgtaccctagagcta

SEQ ID NO: 870749 - DNA, 25 bp, Homo sapien
gcacacaccatcacaccccactaat

SEQ ID NO: 870750 - DNA, 25 bp, Homo sapien
caggcacacaccatcacaccccact

SEQ ID NO: 870751 - DNA, 25 bp, Homo sapien
ggcacacaccatcacaccccactaa

SEQ ID NO: 870752 - DNA, 25 bp, Homo sapien
aggcacacaccatcacaccccacta

SEQ ID NO: 870753 - DNA, 25 bp, Homo sapien
agcttaagaacggcctggttggccg

SEQ ID NO: 870754 - DNA, 25 bp, Homo sapien
ccgccgggagcttaagaacggcctg

SEQ ID NO: 870755 - DNA, 25 bp, Homo sapien
cgggagcttaagaacggcctggttg

SEQ ID NO: 870756 - DNA, 25 bp, Homo sapien
tgggaggaccgccgggagcttaaga

SEQ ID NO: 870757 - DNA, 25 bp, Homo sapien
tccaagctatgctgggaccagaacc

SEQ ID NO: 870758 - DNA, 25 bp, Homo sapien
cagaaaagaggcaggtgagagtccg

SEQ ID NO: 870759 - DNA, 25 bp, Homo sapien
cagaaccaggaccaagactgcagta

SEQ ID NO: 870760 - DNA, 25 bp, Homo sapien
cgttctggaactcccatcggcgcag

SEQ ID NO: 870761 - DNA, 25 bp, Homo sapien
gaggcactgaagtgggaggctcatt

SEQ ID NO: 870762 - DNA, 25 bp, Homo sapien
aggaggcactgaagtgggaggctca

SEQ ID NO: 870763 - DNA, 25 bp, Homo sapien
aggcactgaagtgggaggctcattt

SEQ ID NO: 870764 - DNA, 25 bp, Homo sapien
cttaggaggcactgaagtgggaggc

SEQ ID NO: 870765 - DNA, 25 bp, Homo sapien
taaacgcaatactgcactcatcctg

SEQ ID NO: 870766 - DNA, 25 bp, Homo sapien
tgcaatgagctataaacgcaatact

SEQ ID NO: 870767 - DNA, 25 bp, Homo sapien
gagctataaacgcaatactgcactc

SEQ ID NO: 870768 - DNA, 25 bp, Homo sapien
caatgagctataaacgcaatactgc

SEQ ID NO: 870769 - DNA, 25 bp, Homo sapien
gtaacaaaatcagctgggtgcagtg

SEQ ID NO: 870770 - DNA, 25 bp, Homo sapien
gggtgcagtggtgcacacctgaaat

SEQ ID NO: 870771 - DNA, 25 bp, Homo sapien
tgcagtggtgcacacctgaaatccc

SEQ ID NO: 870772 - DNA, 25 bp, Homo sapien
caaggcaggaggaggccaggagttt

SEQ ID NO: 870773 - DNA, 25 bp, Homo sapien
ctaggttcgggaccgcgatggtccg

SEQ ID NO: 870774 - DNA, 25 bp, Homo sapien
gatggtccggtttcggtgtccctgc

SEQ ID NO: 870775 - DNA, 25 bp, Homo sapien
gtccggtttcggtgtccctgccgca

SEQ ID NO: 870776 - DNA, 25 bp, Homo sapien
cgatggtccggtttcggtgtccctg

SEQ ID NO: 870777 - DNA, 25 bp, Homo sapien
gggcatcccgcccgccccgaggcca

SEQ ID NO: 870778 - DNA, 25 bp, Homo sapien
catcccgcccgccccgaggccaggg

SEQ ID NO: 870779 - DNA, 25 bp, Homo sapien
tgcaggttcccagggccgccgttct

SEQ ID NO: 870780 - DNA, 25 bp, Homo sapien
cagggtcccaaggctggggtcaccg

SEQ ID NO: 870781 - DNA, 25 bp, Homo sapien
atcccccggcgctcggtaactgcca

SEQ ID NO: 870782 - DNA, 25 bp, Homo sapien
ccccggcgctcggtaactgccaggg

SEQ ID NO: 870783 - DNA, 25 bp, Homo sapien
gcatcccccggcgtactcccgcatc

SEQ ID NO: 870784 - DNA, 25 bp, Homo sapien
cggcgctcggtaactgccagggacc

SEQ ID NO: 870785 - DNA, 25 bp, Homo sapien
ttctcgcccagattttgaaaactcc

SEQ ID NO: 870786 - DNA, 25 bp, Homo sapien
ccaagaaaaagattcgagctcgggg

SEQ ID NO: 870787 - DNA, 25 bp, Homo sapien
aggagggcccacgagcgccaaaagt

SEQ ID NO: 870788 - DNA, 25 bp, Homo sapien
gccaaaagtagcgtttgccaagaaa

SEQ ID NO: 870789 - DNA, 25 bp, Homo sapien
ggccgcgagtgcacaggaggacccg

SEQ ID NO: 870790 - DNA, 25 bp, Homo sapien
gagggccaagcacgctacggaaaag

SEQ ID NO: 870791 - DNA, 25 bp, Homo sapien
aaaggtagccgagccgcgcgacact

SEQ ID NO: 870792 - DNA, 25 bp, Homo sapien
ccgaccgaaggagagtcgccgagcc

SEQ ID NO: 870793 - DNA, 25 bp, Homo sapien
gaagacaggaggggacgggcacggc

SEQ ID NO: 870794 - DNA, 25 bp, Homo sapien
tgggaagacaggaggggacgggcac

SEQ ID NO: 870795 - DNA, 25 bp, Homo sapien
gaggggacgggcacggcgcggggca

SEQ ID NO: 870796 - DNA, 25 bp, Homo sapien
gacaggaggggacgggcacggcgcg

SEQ ID NO: 870797 - DNA, 25 bp, Homo sapien
aggcgggcaagcgtccggcagtggc

SEQ ID NO: 870798 - DNA, 25 bp, Homo sapien
gggcaagcccgaggcgggcaagcgt

SEQ ID NO: 870799 - DNA, 25 bp, Homo sapien
ggccatgtacttcccgggcggcagc

SEQ ID NO: 870800 - DNA, 25 bp, Homo sapien
gatggagattcaggccggccatgta

SEQ ID NO: 870801 - DNA, 25 bp, Homo sapien
gaccgtgcacggaccgctggggccc

SEQ ID NO: 870802 - DNA, 25 bp, Homo sapien
gggaccgtgcacggaccgctggggc

SEQ ID NO: 870803 - DNA, 25 bp, Homo sapien
cgggggaccgtgcacggaccgctgg

SEQ ID NO: 870804 - DNA, 25 bp, Homo sapien
gccaggccggacagcagcggcggcg

SEQ ID NO: 870805 - DNA, 25 bp, Homo sapien
cgggagtgccgcgatcagcccccca

SEQ ID NO: 870806 - DNA, 25 bp, Homo sapien
cctccgcgggagtgccgcgatcagc

SEQ ID NO: 870807 - DNA, 25 bp, Homo sapien
ccgcgggagtgccgcgatcagcccc

SEQ ID NO: 870808 - DNA, 25 bp, Homo sapien
gggagtgccgcgatcagccccccac

SEQ ID NO: 870809 - DNA, 25 bp, Homo sapien
gcccgcaggcctagctcagtgggac

SEQ ID NO: 870810 - DNA, 25 bp, Homo sapien
gctcagtgggacctaaaagttcggc

SEQ ID NO: 870811 - DNA, 25 bp, Homo sapien
tccgcggcgtgcatggcggcggcca

SEQ ID NO: 870812 - DNA, 25 bp, Homo sapien
tcggcgtagtcccagagtcctcggg

SEQ ID NO: 870813 - DNA, 25 bp, Homo sapien
gggcgcacaggcggccggcggtggg

SEQ ID NO: 870814 - DNA, 25 bp, Homo sapien
aggctccggcgacaacgactccggc

SEQ ID NO: 870815 - DNA, 25 bp, Homo sapien
gcagccgcctcacactttttgcccg

SEQ ID NO: 870816 - DNA, 25 bp, Homo sapien
gcggctgggttcacggctccaggct

SEQ ID NO: 870817 - DNA, 25 bp, Homo sapien
aagccagctttcctcccgccgagct

SEQ ID NO: 870818 - DNA, 25 bp, Homo sapien
cagcccgggattggaaaaggtacat

SEQ ID NO: 870819 - DNA, 25 bp, Homo sapien
gaaacacgcattgttcccgggtgcc

SEQ ID NO: 870820 - DNA, 25 bp, Homo sapien
gggctgaatgatcaaaactggtggt

SEQ ID NO: 870821 - DNA, 25 bp, Homo sapien
caattacggacctaggggctccagc

SEQ ID NO: 870822 - DNA, 25 bp, Homo sapien
tcacgcgcatgtaaacaccttggcc

SEQ ID NO: 870823 - DNA, 25 bp, Homo sapien
aaaacaagagaagcccgctctttcg

SEQ ID NO: 870824 - DNA, 25 bp, Homo sapien
ggcagaaatccttccaatgctgcct

SEQ ID NO: 870825 - DNA, 25 bp, Homo sapien
attaaaacaagagaagcccgctctt

SEQ ID NO: 870826 - DNA, 25 bp, Homo sapien
gcaactgcagtgataagattttaat

SEQ ID NO: 870827 - DNA, 25 bp, Homo sapien
agggcagtttcaagttgcccttcct

SEQ ID NO: 870828 - DNA, 25 bp, Homo sapien
gcagtttcaagttgcccttcctgga

SEQ ID NO: 870829 - DNA, 25 bp, Homo sapien
gggcagtttcaagttgcccttcctg

SEQ ID NO: 870830 - DNA, 25 bp, Homo sapien
ggcagtttcaagttgcccttcctgg

SEQ ID NO: 870831 - DNA, 25 bp, Homo sapien
catttttcaagtgtgcgcctcggcg

SEQ ID NO: 870832 - DNA, 25 bp, Homo sapien
gatgctccgagacgccgtaattgtg

SEQ ID NO: 870833 - DNA, 25 bp, Homo sapien
cggtgtgacgaacccagccggtatt

SEQ ID NO: 870834 - DNA, 25 bp, Homo sapien
tgtttgccctggatttgccaatggc

SEQ ID NO: 870835 - DNA, 25 bp, Homo sapien
actccatatttgcgcggccctgcag

SEQ ID NO: 870836 - DNA, 25 bp, Homo sapien
acccactccatatttgcgcggccct

SEQ ID NO: 870837 - DNA, 25 bp, Homo sapien
ccggcacccactccatatttgcgcg

SEQ ID NO: 870838 - DNA, 25 bp, Homo sapien
cagccaccggagtccggccggggag

SEQ ID NO: 870839 - DNA, 25 bp, Homo sapien
tcagacggtctctctcaattcggcg

SEQ ID NO: 870840 - DNA, 25 bp, Homo sapien
tctggtattgctggccgcttggaca

SEQ ID NO: 870841 - DNA, 25 bp, Homo sapien
gaggaccgatcccaagcgaagtagt

SEQ ID NO: 870842 - DNA, 25 bp, Homo sapien
tacccagcgggataggtggccaaaa

SEQ ID NO: 870843 - DNA, 25 bp, Homo sapien
ccgctggcatctcattgaagggcac

SEQ ID NO: 870844 - DNA, 25 bp, Homo sapien
tctccgctggcatctcattgaaggg

SEQ ID NO: 870845 - DNA, 25 bp, Homo sapien
ctccgctggcatctcattgaagggc

SEQ ID NO: 870846 - DNA, 25 bp, Homo sapien
tccgctggcatctcattgaagggca

SEQ ID NO: 870847 - DNA, 25 bp, Homo sapien
tgcgacaggcccagccgcgatacag

SEQ ID NO: 870848 - DNA, 25 bp, Homo sapien
ggtttccgcaggtcccgtgtctggc

SEQ ID NO: 870849 - DNA, 25 bp, Homo sapien
gctgggcgtcttaagcgccggtttc

SEQ ID NO: 870850 - DNA, 25 bp, Homo sapien
tacagcgccaagtctaggtcgggcc

SEQ ID NO: 870851 - DNA, 25 bp, Homo sapien
ctgaaagaccagggacgcggcgcca

SEQ ID NO: 870852 - DNA, 25 bp, Homo sapien
cgcggcgccagcgccccacacccca

SEQ ID NO: 870853 - DNA, 25 bp, Homo sapien
aaagaccagggacgcggcgccagcg

SEQ ID NO: 870854 - DNA, 25 bp, Homo sapien
gcggcgccagcgccccacaccccac

SEQ ID NO: 870855 - DNA, 25 bp, Homo sapien
gggcagaattcggactgatgcgcca

SEQ ID NO: 870856 - DNA, 25 bp, Homo sapien
agaattcggactgatgcgccaggcc

SEQ ID NO: 870857 - DNA, 25 bp, Homo sapien
gcgcaaggcgggcagaattcggact

SEQ ID NO: 870858 - DNA, 25 bp, Homo sapien
ggcccagccccgatggattccagct

SEQ ID NO: 870859 - DNA, 25 bp, Homo sapien
tgctccgggccggtctcgtgtcccg

SEQ ID NO: 870860 - DNA, 25 bp, Homo sapien
gaaaggaccgagacgcgctcagtgc

SEQ ID NO: 870861 - DNA, 25 bp, Homo sapien
gccggctgcggccataaatctccgg

SEQ ID NO: 870862 - DNA, 25 bp, Homo sapien
tgcggccataaatctccgggcgggc

SEQ ID NO: 870863 - DNA, 25 bp, Homo sapien
gagcttcacaggatcaccgccttgg

SEQ ID NO: 870864 - DNA, 25 bp, Homo sapien
gaacggcctcgttcctcggtgtcaa

SEQ ID NO: 870865 - DNA, 25 bp, Homo sapien
gcttctccgttcaccaaagagaggg

SEQ ID NO: 870866 - DNA, 25 bp, Homo sapien
ggtgtcaacaccatccatctctgag

SEQ ID NO: 870867 - DNA, 25 bp, Homo sapien
cctccttggtgcgagctttggctca

SEQ ID NO: 870868 - DNA, 25 bp, Homo sapien
caagcaaaccatgggcgcgattgga

SEQ ID NO: 870869 - DNA, 25 bp, Homo sapien
cagacttaaggtgcacggaaaccgg

SEQ ID NO: 870870 - DNA, 25 bp, Homo sapien
gaagcggcggttttgacacacgaat

SEQ ID NO: 870871 - DNA, 25 bp, Homo sapien
acacgactgcaaacggcgggtggca

SEQ ID NO: 870872 - DNA, 25 bp, Homo sapien
ccagtgacacgactgcaaacggcgg

SEQ ID NO: 870873 - DNA, 25 bp, Homo sapien
agtgacacgactgcaaacggcgggt

SEQ ID NO: 870874 - DNA, 25 bp, Homo sapien
catgccagtgacacgactgcaaacg

SEQ ID NO: 870875 - DNA, 25 bp, Homo sapien
ggaagcacctccgaaaacaaagcgc

SEQ ID NO: 870876 - DNA, 25 bp, Homo sapien
cccagaggaatttgagcgcttgccc

SEQ ID NO: 870877 - DNA, 25 bp, Homo sapien
ttggaaacctcgctccaaggacgcc

SEQ ID NO: 870878 - DNA, 25 bp, Homo sapien
gagcttcggctccttcctagaattt

SEQ ID NO: 870879 - DNA, 25 bp, Homo sapien
gcgttataaccatcagtcctccctg

SEQ ID NO: 870880 - DNA, 25 bp, Homo sapien
ctgccacccttgtactgtgcgttat

SEQ ID NO: 870881 - DNA, 25 bp, Homo sapien
ctccctgccactcggtaagggctgt

SEQ ID NO: 870882 - DNA, 25 bp, Homo sapien
tgccactcggtaagggctgtctcct

SEQ ID NO: 870883 - DNA, 25 bp, Homo sapien
gcagagcttcgtttcccaatctaga

SEQ ID NO: 870884 - DNA, 25 bp, Homo sapien
gggagggcgggtctcgtgatgtgca

SEQ ID NO: 870885 - DNA, 25 bp, Homo sapien
ggcgggtctcgtgatgtgcaggctg

SEQ ID NO: 870886 - DNA, 25 bp, Homo sapien
agagcttcgtttcccaatctagaag

SEQ ID NO: 870887 - DNA, 25 bp, Homo sapien
acaacagaaactggctggacacggt

SEQ ID NO: 870888 - DNA, 25 bp, Homo sapien
aaacaacagaaactggctggacacg

SEQ ID NO: 870889 - DNA, 25 bp, Homo sapien
cacggtggcttacaactgcagtccc

SEQ ID NO: 870890 - DNA, 25 bp, Homo sapien
ggacacggtggcttacaactgcagt

SEQ ID NO: 870891 - DNA, 25 bp, Homo sapien
tgggtactttgctccgctgccacag

SEQ ID NO: 870892 - DNA, 25 bp, Homo sapien
gctgccacagtgatgtccccacggc

SEQ ID NO: 870893 - DNA, 25 bp, Homo sapien
cagtccaactgcgtcccatgcaaag

SEQ ID NO: 870894 - DNA, 25 bp, Homo sapien
tctttggggatctgcgtgggtactt

SEQ ID NO: 870895 - DNA, 25 bp, Homo sapien
ggatgccccgagagggcaccttcga

SEQ ID NO: 870896 - DNA, 25 bp, Homo sapien
cagggacacgttccggagctgacac

SEQ ID NO: 870897 - DNA, 25 bp, Homo sapien
gctgcctctgttccagggacacgtt

SEQ ID NO: 870898 - DNA, 25 bp, Homo sapien
gtcatgctgcgccactgcctctgcc

SEQ ID NO: 870899 - DNA, 25 bp, Homo sapien
aaaagaatcaaacttgccaaggaag

SEQ ID NO: 870900 - DNA, 25 bp, Homo sapien
ggctgtccctggagacctaatccct

SEQ ID NO: 870901 - DNA, 25 bp, Homo sapien
gtgcggtttaatttggttgccatca

SEQ ID NO: 870902 - DNA, 25 bp, Homo sapien
agggcaccttgtgcggtttaatttg

SEQ ID NO: 870903 - DNA, 25 bp, Homo sapien
gggacacacagagctttacggtggg

SEQ ID NO: 870904 - DNA, 25 bp, Homo sapien
cacagagctttacggtggggccttg

SEQ ID NO: 870905 - DNA, 25 bp, Homo sapien
cacacagagctttacggtggggcct

SEQ ID NO: 870906 - DNA, 25 bp, Homo sapien
gacacacagagctttacggtggggc

SEQ ID NO: 870907 - DNA, 25 bp, Homo sapien
ctgaaggtcgggggacaagctgcct

SEQ ID NO: 870908 - DNA, 25 bp, Homo sapien
ggccactggattagtatcagtttga

SEQ ID NO: 870909 - DNA, 25 bp, Homo sapien
gtttgatgtcttgttacccatccag

SEQ ID NO: 870910 - DNA, 25 bp, Homo sapien
gcatccactccagaggccactggat

SEQ ID NO: 870911 - DNA, 25 bp, Homo sapien
tcttgttacccatccagactgattt

SEQ ID NO: 870912 - DNA, 25 bp, Homo sapien
taacgtcatcatgggacctaaaagc

SEQ ID NO: 870913 - DNA, 25 bp, Homo sapien
catgggacctaaaagcagaccagtc

SEQ ID NO: 870914 - DNA, 25 bp, Homo sapien
tctgcccaggaacccgctgcctgct

SEQ ID NO: 870915 - DNA, 25 bp, Homo sapien
aaagcagaccagtccccactgctgt

SEQ ID NO: 870916 - DNA, 25 bp, Homo sapien
tgaacaccaatgtcaggagcaggca

SEQ ID NO: 870917 - DNA, 25 bp, Homo sapien
taaaaccacgtggagctctgctgtc

SEQ ID NO: 870918 - DNA, 25 bp, Homo sapien
cagacaatgctcagaaggtggcgaa

SEQ ID NO: 870919 - DNA, 25 bp, Homo sapien
tagcacctggtcatgagatacggcg

SEQ ID NO: 870920 - DNA, 25 bp, Homo sapien
ccagcgtcgtggtcaaggctaccag

SEQ ID NO: 870921 - DNA, 25 bp, Homo sapien
gcccggccagatctagaaacttcta

SEQ ID NO: 870922 - DNA, 25 bp, Homo sapien
tcctctgcctttggtttagtggccc

SEQ ID NO: 870923 - DNA, 25 bp, Homo sapien
tgagacccatgaccatcacaaagac

SEQ ID NO: 870924 - DNA, 25 bp, Homo sapien
tctgtaattttcagatcctaaaagg

SEQ ID NO: 870925 - DNA, 25 bp, Homo sapien
gggatcaaggtccccgcatccaggc

SEQ ID NO: 870926 - DNA, 25 bp, Homo sapien
tgctggcaccgccaaggccggagca

SEQ ID NO: 870927 - DNA, 25 bp, Homo sapien
tctggagcttcattggccggcaggg

SEQ ID NO: 870928 - DNA, 25 bp, Homo sapien
agcaagtgtcttcccgccctgtgca

SEQ ID NO: 870929 - DNA, 25 bp, Homo sapien
tgtttgcagcgcaagaggagctcag

SEQ ID NO: 870930 - DNA, 25 bp, Homo sapien
cttggagaagaaaccgctcaggccc

SEQ ID NO: 870931 - DNA, 25 bp, Homo sapien
ctgccgtcctgggtcgaagcagcaa

SEQ ID NO: 870932 - DNA, 25 bp, Homo sapien
gctggacgggccgttgaaaacaaga

SEQ ID NO: 870933 - DNA, 25 bp, Homo sapien
tacacacacggaagacgtgactcac

SEQ ID NO: 870934 - DNA, 25 bp, Homo sapien
aaaagccttccatagcagaaaggag

SEQ ID NO: 870935 - DNA, 25 bp, Homo sapien
accttcggaagcctggtggagccga

SEQ ID NO: 870936 - DNA, 25 bp, Homo sapien
gaatataaattgcaactaacgctgg

SEQ ID NO: 870937 - DNA, 25 bp, Homo sapien
taaattgcaactaacgctggtgcca

SEQ ID NO: 870938 - DNA, 25 bp, Homo sapien
ccagcaggcagcatatggtctgctg

SEQ ID NO: 870939 - DNA, 25 bp, Homo sapien
taacagccgagctctgccaattggg

SEQ ID NO: 870940 - DNA, 25 bp, Homo sapien
tacacacgctaggatgcattcctgg

SEQ ID NO: 870941 - DNA, 25 bp, Homo sapien
gagcaagaagtggtcagtcccagga

SEQ ID NO: 870942 - DNA, 25 bp, Homo sapien
tctgtcacacggaaacccaggagga

SEQ ID NO: 870943 - DNA, 25 bp, Homo sapien
gatttccccaggaacgcgcatggac

SEQ ID NO: 870944 - DNA, 25 bp, Homo sapien
tgtgacaaaccaagggtccctggcg

SEQ ID NO: 870945 - DNA, 25 bp, Homo sapien
acagagcaacagtccccatgagaga

SEQ ID NO: 870946 - DNA, 25 bp, Homo sapien
cagggattgcggctcagtatacaaa

SEQ ID NO: 870947 - DNA, 25 bp, Homo sapien
gctgaaaagtcacaggagaggctcc

SEQ ID NO: 870948 - DNA, 25 bp, Homo sapien
caccacaggttcggcggttcctcgg

SEQ ID NO: 870949 - DNA, 25 bp, Homo sapien
cacaggttcggcggttcctcggcca

SEQ ID NO: 870950 - DNA, 25 bp, Homo sapien
caggttcggcggttcctcggccact

SEQ ID NO: 870951 - DNA, 25 bp, Homo sapien
cagagggaagatgacgacgtttaac

SEQ ID NO: 870952 - DNA, 25 bp, Homo sapien
gatgacgacgtttaacgcgggccgc

SEQ ID NO: 870953 - DNA, 25 bp, Homo sapien
atgacgtcggtcaggccctcgtgga

SEQ ID NO: 870954 - DNA, 25 bp, Homo sapien
acgtcccggatgacgtcggtcaggc

SEQ ID NO: 870955 - DNA, 25 bp, Homo sapien
agacaggcggtcagcggattacatg

SEQ ID NO: 870956 - DNA, 25 bp, Homo sapien
cagagacaggcggtcagcggattac

SEQ ID NO: 870957 - DNA, 25 bp, Homo sapien
gtcagcggattacatgggtggccac

SEQ ID NO: 870958 - DNA, 25 bp, Homo sapien
tcagcggattacatgggtggccacg

SEQ ID NO: 870959 - DNA, 25 bp, Homo sapien
cctctaagtgcctcaagggccctgt

SEQ ID NO: 870960 - DNA, 25 bp, Homo sapien
ctctaagtgcctcaagggccctgta

SEQ ID NO: 870961 - DNA, 25 bp, Homo sapien
tctaagtgcctcaagggccctgtac

SEQ ID NO: 870962 - DNA, 25 bp, Homo sapien
catgccagccacgaggatcagaggc

SEQ ID NO: 870963 - DNA, 25 bp, Homo sapien
ggaggagcacggcagccgggaacag

SEQ ID NO: 870964 - DNA, 25 bp, Homo sapien
gcagccgggaacaggccacacgctt

SEQ ID NO: 870965 - DNA, 25 bp, Homo sapien
aggctcagggggcacccgctccatg

SEQ ID NO: 870966 - DNA, 25 bp, Homo sapien
aataaagacgccatcacacacctct

SEQ ID NO: 870967 - DNA, 25 bp, Homo sapien
cagtaatctcgtgggcagcaatgtc

SEQ ID NO: 870968 - DNA, 25 bp, Homo sapien
aaaagcagaggtttcggcaataaag

SEQ ID NO: 870969 - DNA, 25 bp, Homo sapien
tccacacagtaatctcgtgggcagc

SEQ ID NO: 870970 - DNA, 25 bp, Homo sapien
aagcgagagcaaaccgctgctcctc

SEQ ID NO: 870971 - DNA, 25 bp, Homo sapien
ggaaaagcgagagcaaaccgctgct

SEQ ID NO: 870972 - DNA, 25 bp, Homo sapien
gaaaagcgagagcaaaccgctgctc

SEQ ID NO: 870973 - DNA, 25 bp, Homo sapien
tcaggaaaagcgagagcaaaccgct

SEQ ID NO: 870974 - DNA, 25 bp, Homo sapien
gcactgatgccacgaggaagctgtg

SEQ ID NO: 870975 - DNA, 25 bp, Homo sapien
ctcgggccacactgccgtgaccggg

SEQ ID NO: 870976 - DNA, 25 bp, Homo sapien
gaaggccggtcagaccctgtctgca

SEQ ID NO: 870977 - DNA, 25 bp, Homo sapien
agctgtggtacaggtgtccgtggac

SEQ ID NO: 870978 - DNA, 25 bp, Homo sapien
ctgccagcagggtgggaagagaaag

SEQ ID NO: 870979 - DNA, 25 bp, Homo sapien
tgccagcagggtgggaagagaaagg

SEQ ID NO: 870980 - DNA, 25 bp, Homo sapien
tgggaagagaaaggctttcagcagc

SEQ ID NO: 870981 - DNA, 25 bp, Homo sapien
gggtgggaagagaaaggctttcagc

SEQ ID NO: 870982 - DNA, 25 bp, Homo sapien
gggccacctgcgagctcagcgccgg

SEQ ID NO: 870983 - DNA, 25 bp, Homo sapien
tggggccacctgcgagctcagcgcc

SEQ ID NO: 870984 - DNA, 25 bp, Homo sapien
gccacctgcgagctcagcgccgggc

SEQ ID NO: 870985 - DNA, 25 bp, Homo sapien
ccacctgcgagctcagcgccgggct

SEQ ID NO: 870986 - DNA, 25 bp, Homo sapien
gcatccaccttagatcatcagactt

SEQ ID NO: 870987 - DNA, 25 bp, Homo sapien
catccaccttagatcatcagacttg

SEQ ID NO: 870988 - DNA, 25 bp, Homo sapien
atccaccttagatcatcagacttgc

SEQ ID NO: 870989 - DNA, 25 bp, Homo sapien
tgcatccaccttagatcatcagact

SEQ ID NO: 870990 - DNA, 25 bp, Homo sapien
ggctggcatccggtgccacgtccaa

SEQ ID NO: 870991 - DNA, 25 bp, Homo sapien
gcctgcaaggggcggcatggagccg

SEQ ID NO: 870992 - DNA, 25 bp, Homo sapien
tcccggcctgcaaggggcggcatgg

SEQ ID NO: 870993 - DNA, 25 bp, Homo sapien
aggaggccagagggcaagctcccgg

SEQ ID NO: 870994 - DNA, 25 bp, Homo sapien
gctgccccgtcatgagcacagccgt

SEQ ID NO: 870995 - DNA, 25 bp, Homo sapien
tgcttggggatcgtggacgttctcc

SEQ ID NO: 870996 - DNA, 25 bp, Homo sapien
gaaaagcaggctcatcggagcagga

SEQ ID NO: 870997 - DNA, 25 bp, Homo sapien
tgtagcgccatgcagagaggattct

SEQ ID NO: 870998 - DNA, 25 bp, Homo sapien
tatgagaaccctatctccagttcat

SEQ ID NO: 870999 - DNA, 25 bp, Homo sapien
aaaacaatatgagaaccctatctcc

SEQ ID NO: 871000 - DNA, 25 bp, Homo sapien
gaggactccacggtgtagtgttaca

SEQ ID NO: 871001 - DNA, 25 bp, Homo sapien
ggctttatttactgacacaagagga

SEQ ID NO: 871002 - DNA, 25 bp, Homo sapien
ttaaaaataggttgatgttggccag

SEQ ID NO: 871003 - DNA, 25 bp, Homo sapien
cttaaaaataggttgatgttggcca

SEQ ID NO: 871004 - DNA, 25 bp, Homo sapien
aaccccaaccaggattattcctgag

SEQ ID NO: 871005 - DNA, 25 bp, Homo sapien
ggccgaccgcaaggacaacagacta

SEQ ID NO: 871006 - DNA, 25 bp, Homo sapien
gctgaggttgcaacccagaaagcag

SEQ ID NO: 871007 - DNA, 25 bp, Homo sapien
caagttgtttttacaaccagagagg

SEQ ID NO: 871008 - DNA, 25 bp, Homo sapien
agtctggcaagcagggttgtcggcg

SEQ ID NO: 871009 - DNA, 25 bp, Homo sapien
agtggctcgagacgtcctggctgat

SEQ ID NO: 871010 - DNA, 25 bp, Homo sapien
ggctgatggctcttctcgcaactct

SEQ ID NO: 871011 - DNA, 25 bp, Homo sapien
tctcgcaactctgtgaacagctggg

SEQ ID NO: 871012 - DNA, 25 bp, Homo sapien
gggacacgaacactcagggcgttca

SEQ ID NO: 871013 - DNA, 25 bp, Homo sapien
acgaacactcagggcgttcatgtcc

SEQ ID NO: 871014 - DNA, 25 bp, Homo sapien
agggacacgaacactcagggcgttc

SEQ ID NO: 871015 - DNA, 25 bp, Homo sapien
gacacgaacactcagggcgttcatg

SEQ ID NO: 871016 - DNA, 25 bp, Homo sapien
gcagagcatcaaactccaggatgcc

SEQ ID NO: 871017 - DNA, 25 bp, Homo sapien
gcgcagcagcagagcatcaaactcc

SEQ ID NO: 871018 - DNA, 25 bp, Homo sapien
agcagcagagcatcaaactccagga

SEQ ID NO: 871019 - DNA, 25 bp, Homo sapien
gcagcagcagagcatcaaactccag

SEQ ID NO: 871020 - DNA, 25 bp, Homo sapien
tccagagttaaagatggttgcaggc

SEQ ID NO: 871021 - DNA, 25 bp, Homo sapien
actatgtgggccttccagaaagggc

SEQ ID NO: 871022 - DNA, 25 bp, Homo sapien
gcttctagatccaaacaacgggcag

SEQ ID NO: 871023 - DNA, 25 bp, Homo sapien
tacaaaatacatgctggtggcgcag

SEQ ID NO: 871024 - DNA, 25 bp, Homo sapien
gaagcgactgctgcaggctcttgca

SEQ ID NO: 871025 - DNA, 25 bp, Homo sapien
tggcacatgacaacctgcaggcagc

SEQ ID NO: 871026 - DNA, 25 bp, Homo sapien
ctggctcagcgcctggaagaactgg

SEQ ID NO: 871027 - DNA, 25 bp, Homo sapien
tccccggtgaacaggtggcacatga

SEQ ID NO: 871028 - DNA, 25 bp, Homo sapien
gtgacttcaggggctgccaggaact

SEQ ID NO: 871029 - DNA, 25 bp, Homo sapien
ttcaggggctgccaggaactcccgg

SEQ ID NO: 871030 - DNA, 25 bp, Homo sapien
acttcaggggctgccaggaactccc

SEQ ID NO: 871031 - DNA, 25 bp, Homo sapien
gacttcaggggctgccaggaactcc

SEQ ID NO: 871032 - DNA, 25 bp, Homo sapien
gtaaaaaagacggtgcaggcgccgc

SEQ ID NO: 871033 - DNA, 25 bp, Homo sapien
aaaaaagacggtgcaggcgccgcac

SEQ ID NO: 871034 - DNA, 25 bp, Homo sapien
acaaccctttgcagaccggaaggtg

SEQ ID NO: 871035 - DNA, 25 bp, Homo sapien
caaccctttgcagaccggaaggtgg

SEQ ID NO: 871036 - DNA, 25 bp, Homo sapien
gacggtgccgtcgtgtggtcactag

SEQ ID NO: 871037 - DNA, 25 bp, Homo sapien
ggcgatgcggctccgtgctacccgc

SEQ ID NO: 871038 - DNA, 25 bp, Homo sapien
ctgcaaagtcacctctggatttctc

SEQ ID NO: 871039 - DNA, 25 bp, Homo sapien
ggcgttgggcaaggacggtgccgtc

SEQ ID NO: 871040 - DNA, 25 bp, Homo sapien
tctgcagagcgtggaaaaaaaacct

SEQ ID NO: 871041 - DNA, 25 bp, Homo sapien
gtcacctgtcacaggtgttcaggat

SEQ ID NO: 871042 - DNA, 25 bp, Homo sapien
tccacgagataaccacatccacatt

SEQ ID NO: 871043 - DNA, 25 bp, Homo sapien
caggcccacgggagtgactggtcag

SEQ ID NO: 871044 - DNA, 25 bp, Homo sapien
tggctggcgtgggattccaagctct

SEQ ID NO: 871045 - DNA, 25 bp, Homo sapien
ttctgcccaatttgtaatcccctta

SEQ ID NO: 871046 - DNA, 25 bp, Homo sapien
cttactactgaggtgtgtccaagtc

SEQ ID NO: 871047 - DNA, 25 bp, Homo sapien
tagggaaagaaggtgtcttttctgc

SEQ ID NO: 871048 - DNA, 25 bp, Homo sapien
tccttccactgcagcgtccgggctc

SEQ ID NO: 871049 - DNA, 25 bp, Homo sapien
ccttgccgcagaaggcaggaatcca

SEQ ID NO: 871050 - DNA, 25 bp, Homo sapien
ctggcagcgtctgggaaccggcatt

SEQ ID NO: 871051 - DNA, 25 bp, Homo sapien
acaggcagtacccagctcagagcag

SEQ ID NO: 871052 - DNA, 25 bp, Homo sapien
tatgagcagggtcggtctctcaggc

SEQ ID NO: 871053 - DNA, 25 bp, Homo sapien
ccacagagatggcattatgagcagg

SEQ ID NO: 871054 - DNA, 25 bp, Homo sapien
catgaaatcacgctgacctcgggag

SEQ ID NO: 871055 - DNA, 25 bp, Homo sapien
gagacaagcagccatgtgacctagg

SEQ ID NO: 871056 - DNA, 25 bp, Homo sapien
aactaggaggccacacttaacagac

SEQ ID NO: 871057 - DNA, 25 bp, Homo sapien
tccgtgggctcacctggatccatag

SEQ ID NO: 871058 - DNA, 25 bp, Homo sapien
tggcttaggcccatcaactaggagg

SEQ ID NO: 871059 - DNA, 25 bp, Homo sapien
cctatgagctgaggacgccaaagca

SEQ ID NO: 871060 - DNA, 25 bp, Homo sapien
tcaacatgtctgagagcgcgggcat

SEQ ID NO: 871061 - DNA, 25 bp, Homo sapien
gacccaatcagctcgaggtgttcca

SEQ ID NO: 871062 - DNA, 25 bp, Homo sapien
cactgcaggccgatattgaccagcc

SEQ ID NO: 871063 - DNA, 25 bp, Homo sapien
gcggaggagaagttggacccaatca

SEQ ID NO: 871064 - DNA, 25 bp, Homo sapien
cagcagagaccagaacacggaggag

SEQ ID NO: 871065 - DNA, 25 bp, Homo sapien
agggcaggttcttcagcagagacca

SEQ ID NO: 871066 - DNA, 25 bp, Homo sapien
gcagagaccagaacacggaggaggg

SEQ ID NO: 871067 - DNA, 25 bp, Homo sapien
ttcagcagagaccagaacacggagg

SEQ ID NO: 871068 - DNA, 25 bp, Homo sapien
gcccacacgcactttcttgccaaag

SEQ ID NO: 871069 - DNA, 25 bp, Homo sapien
tgggacaggactgcacgcccacacg

SEQ ID NO: 871070 - DNA, 25 bp, Homo sapien
cacgcactttcttgccaaagccgcg

SEQ ID NO: 871071 - DNA, 25 bp, Homo sapien
tttcttgccaaagccgcgcggcact

SEQ ID NO: 871072 - DNA, 25 bp, Homo sapien
ggcgggcgcgcggtcggcgcgcggc

SEQ ID NO: 871073 - DNA, 25 bp, Homo sapien
ccggctgggcgggcgcgcggtcggc

SEQ ID NO: 871074 - DNA, 25 bp, Homo sapien
ggccggctgggcgggcgcgcggtcg

SEQ ID NO: 871075 - DNA, 25 bp, Homo sapien
cgcgcggtcggcgcgcggcgcggag

SEQ ID NO: 871076 - DNA, 25 bp, Homo sapien
caggccctccgagctgtggtggtgg

SEQ ID NO: 871077 - DNA, 25 bp, Homo sapien
caggatgctgctgtcgatgtcgtcc

SEQ ID NO: 871078 - DNA, 25 bp, Homo sapien
ccgagaggttcaggtggcgcaggtt

SEQ ID NO: 871079 - DNA, 25 bp, Homo sapien
aggacgccaccagagtctccaggat

SEQ ID NO: 871080 - DNA, 25 bp, Homo sapien
gctgaggttcaagctggccaggctc

SEQ ID NO: 871081 - DNA, 25 bp, Homo sapien
gcaggtccttcccgccgttgatgac

SEQ ID NO: 871082 - DNA, 25 bp, Homo sapien
gggacaggcagtggacgcagccgct

SEQ ID NO: 871083 - DNA, 25 bp, Homo sapien
agtctggggacaggcagtggacgca

SEQ ID NO: 871084 - DNA, 25 bp, Homo sapien
aagagccgttcagccaggacttggg

SEQ ID NO: 871085 - DNA, 25 bp, Homo sapien
tcagatggccgcctgacagggtaca

SEQ ID NO: 871086 - DNA, 25 bp, Homo sapien
gctgaaactgaagtagaacgggttg

SEQ ID NO: 871087 - DNA, 25 bp, Homo sapien
tgttgaatttcatgtgctgcaggag

SEQ ID NO: 871088 - DNA, 25 bp, Homo sapien
ggagtgcggtcgctaagcacagcca

SEQ ID NO: 871089 - DNA, 25 bp, Homo sapien
taagcacagccaggtagagccgcac

SEQ ID NO: 871090 - DNA, 25 bp, Homo sapien
cggtcgctaagcacagccaggtaga

SEQ ID NO: 871091 - DNA, 25 bp, Homo sapien
ctgaggagtgcggtcgctaagcaca

SEQ ID NO: 871092 - DNA, 25 bp, Homo sapien
ggcgcgcatagaagacccgcaggtt

SEQ ID NO: 871093 - DNA, 25 bp, Homo sapien
ggccaggcgcgcatagaagacccgc

SEQ ID NO: 871094 - DNA, 25 bp, Homo sapien
cctggttgatgtagccgggggccag

SEQ ID NO: 871095 - DNA, 25 bp, Homo sapien
caggcgcgcatagaagacccgcagg

SEQ ID NO: 871096 - DNA, 25 bp, Homo sapien
ctcgcgcgtgcggtccagaatctcg

SEQ ID NO: 871097 - DNA, 25 bp, Homo sapien
tccagaatctcgaagtagagcagca

SEQ ID NO: 871098 - DNA, 25 bp, Homo sapien
ccaccataagctggcccgagaggat

SEQ ID NO: 871099 - DNA, 25 bp, Homo sapien
gtagtgcggcacgttgctctggccc

SEQ ID NO: 871100 - DNA, 25 bp, Homo sapien
cactcgctgctcagctggctggcgt

SEQ ID NO: 871101 - DNA, 25 bp, Homo sapien
ccgtaggagggagtgaacagcgtct

SEQ ID NO: 871102 - DNA, 25 bp, Homo sapien
ggtggccttgcactcgctgctcagc

SEQ ID NO: 871103 - DNA, 25 bp, Homo sapien
taggagggagtgaacagcgtctgct

SEQ ID NO: 871104 - DNA, 25 bp, Homo sapien
gtgaggtggcagcccgagaggttca

SEQ ID NO: 871105 - DNA, 25 bp, Homo sapien
tgaggtggcagcccgagaggttcac

SEQ ID NO: 871106 - DNA, 25 bp, Homo sapien
acgtgttccacggtggagccaggca

SEQ ID NO: 871107 - DNA, 25 bp, Homo sapien
agctgctggatctcccggccgatct

SEQ ID NO: 871108 - DNA, 25 bp, Homo sapien
gccacgtgttccacggtggagccag

SEQ ID NO: 871109 - DNA, 25 bp, Homo sapien
aggctgcggcagcgggccacgtgtt

SEQ ID NO: 871110 - DNA, 25 bp, Homo sapien
ctaggaggtggaccccgtctgccat

SEQ ID NO: 871111 - DNA, 25 bp, Homo sapien
gggctgcaagcttccgacaggtacg

SEQ ID NO: 871112 - DNA, 25 bp, Homo sapien
ggacgttcagaatcagatctgtgct

SEQ ID NO: 871113 - DNA, 25 bp, Homo sapien
tctcatcagagaaccctaggaggtg

SEQ ID NO: 871114 - DNA, 25 bp, Homo sapien
ggctgctgcagggtgcatgtcatca

SEQ ID NO: 871115 - DNA, 25 bp, Homo sapien
ctgcagggtgcatgtcatcatcatc

SEQ ID NO: 871116 - DNA, 25 bp, Homo sapien
ccggctgctgcagggtgcatgtcat

SEQ ID NO: 871117 - DNA, 25 bp, Homo sapien
tgctgcagggtgcatgtcatcatca

SEQ ID NO: 871118 - DNA, 25 bp, Homo sapien
ggaggctgaggcaaggagaattgct

SEQ ID NO: 871119 - DNA, 25 bp, Homo sapien
aggcgcctgtaatgccatctactca

SEQ ID NO: 871120 - DNA, 25 bp, Homo sapien
tgaaccgaggaggtggaggttgcag

SEQ ID NO: 871121 - DNA, 25 bp, Homo sapien
tgagccaagatcgcaccactgcact

SEQ ID NO: 871122 - DNA, 25 bp, Homo sapien
cggccgcgggatccgcaaccccgtg

SEQ ID NO: 871123 - DNA, 25 bp, Homo sapien
gcgggatccgcaaccccgtgcctcc

SEQ ID NO: 871124 - DNA, 25 bp, Homo sapien
cacctgcccggctagggatgctcga

SEQ ID NO: 871125 - DNA, 25 bp, Homo sapien
tgcccggctagggatgctcgaagcc

SEQ ID NO: 871126 - DNA, 25 bp, Homo sapien
tcctgacctcatgtgatccgactgc

SEQ ID NO: 871127 - DNA, 25 bp, Homo sapien
caggtgtgcaccactatgcccagat

SEQ ID NO: 871128 - DNA, 25 bp, Homo sapien
gtgtgcaccactatgcccagataat

SEQ ID NO: 871129 - DNA, 25 bp, Homo sapien
ctgacctcatgtgatccgactgcct

SEQ ID NO: 871130 - DNA, 25 bp, Homo sapien
ggaagggggggcacgaaggctcatc

SEQ ID NO: 871131 - DNA, 25 bp, Homo sapien
tcctgtaacaacgcatctcatattt

SEQ ID NO: 871132 - DNA, 25 bp, Homo sapien
ctgtaacaacgcatctcatatttgg

SEQ ID NO: 871133 - DNA, 25 bp, Homo sapien
tgtaacaacgcatctcatatttgga

SEQ ID NO: 871134 - DNA, 25 bp, Homo sapien
taacaacgcatctcatatttggaat

SEQ ID NO: 871135 - DNA, 25 bp, Homo sapien
tcatcttgttttctgcgcaagttag

SEQ ID NO: 871136 - DNA, 25 bp, Homo sapien
catcttgttttctgcgcaagttagg

SEQ ID NO: 871137 - DNA, 25 bp, Homo sapien
gatggaggggccggactcgtcatac

SEQ ID NO: 871138 - DNA, 25 bp, Homo sapien
cacacggagtacttgcgctcaggag

SEQ ID NO: 871139 - DNA, 25 bp, Homo sapien
tccacacggagtacttgcgctcagg

SEQ ID NO: 871140 - DNA, 25 bp, Homo sapien
cacggagtacttgcgctcaggagga

SEQ ID NO: 871141 - DNA, 25 bp, Homo sapien
caccacaggaccccacagccgacct

SEQ ID NO: 871142 - DNA, 25 bp, Homo sapien
gcagtgaggaccctggatgtgacag

SEQ ID NO: 871143 - DNA, 25 bp, Homo sapien
cttcattgtgctgggtgccagggca

SEQ ID NO: 871144 - DNA, 25 bp, Homo sapien
cctgtcggcaatgccagggtacatg

SEQ ID NO: 871145 - DNA, 25 bp, Homo sapien
tgcatcctgtcggcaatgccagggt

SEQ ID NO: 871146 - DNA, 25 bp, Homo sapien
tagtttcgtggatgccacaggactc

SEQ ID NO: 871147 - DNA, 25 bp, Homo sapien
atgagggcaggacttagcttccaca

SEQ ID NO: 871148 - DNA, 25 bp, Homo sapien
gagggcaggacttagcttccacagc

SEQ ID NO: 871149 - DNA, 25 bp, Homo sapien
tgagggcaggacttagcttccacag

SEQ ID NO: 871150 - DNA, 25 bp, Homo sapien
aatgagggcaggacttagcttccac

SEQ ID NO: 871151 - DNA, 25 bp, Homo sapien
gagccgggagacagtctccactcac

SEQ ID NO: 871152 - DNA, 25 bp, Homo sapien
tgcctcagggcagcggaaccgctca

SEQ ID NO: 871153 - DNA, 25 bp, Homo sapien
agtgcctcagggcagcggaaccgct

SEQ ID NO: 871154 - DNA, 25 bp, Homo sapien
ggagctggaagcagccgtggccatc

SEQ ID NO: 871155 - DNA, 25 bp, Homo sapien
aagagtgcctcagggcagcggaacc

SEQ ID NO: 871156 - DNA, 25 bp, Homo sapien
ccttaatgtcacgcacgatttcccg

SEQ ID NO: 871157 - DNA, 25 bp, Homo sapien
aatgtcacgcacgatttcccgctcg

SEQ ID NO: 871158 - DNA, 25 bp, Homo sapien
ttaatgtcacgcacgatttcccgct

SEQ ID NO: 871159 - DNA, 25 bp, Homo sapien
cttctccttaatgtcacgcacgatt

SEQ ID NO: 871160 - DNA, 25 bp, Homo sapien
tagcacagcctggatagcaacgtac

SEQ ID NO: 871161 - DNA, 25 bp, Homo sapien
gttccaaaggagactcaggtcagag

SEQ ID NO: 871162 - DNA, 25 bp, Homo sapien
gagagtcctacggaaaacggcagaa

SEQ ID NO: 871163 - DNA, 25 bp, Homo sapien
gagtctgttcagacctactgtgcac

SEQ ID NO: 871164 - DNA, 25 bp, Homo sapien
tacttaatacacactccaaggccgc

SEQ ID NO: 871165 - DNA, 25 bp, Homo sapien
ccagttggtgacgatgccgtgctcg

SEQ ID NO: 871166 - DNA, 25 bp, Homo sapien
ctcgggagccacacgcagctcattg

SEQ ID NO: 871167 - DNA, 25 bp, Homo sapien
tcgtcgcccacataggaatccttct

SEQ ID NO: 871168 - DNA, 25 bp, Homo sapien
gggcctcgtcgcccacataggaatc

SEQ ID NO: 871169 - DNA, 25 bp, Homo sapien
gcgccccacgatggaggggaagacg

SEQ ID NO: 871170 - DNA, 25 bp, Homo sapien
tgcctggggcgccccacgatggagg

SEQ ID NO: 871171 - DNA, 25 bp, Homo sapien
tggtgcctggggcgccccacgatgg

SEQ ID NO: 871172 - DNA, 25 bp, Homo sapien
ggcgccccacgatggaggggaagac

SEQ ID NO: 871173 - DNA, 25 bp, Homo sapien
cgttgtcgacgacgagcgcggcgat

SEQ ID NO: 871174 - DNA, 25 bp, Homo sapien
gccggagccgttgtcgacgacgagc

SEQ ID NO: 871175 - DNA, 25 bp, Homo sapien
agccgttgtcgacgacgagcgcggc

SEQ ID NO: 871176 - DNA, 25 bp, Homo sapien
tgtcgacgacgagcgcggcgatatc

SEQ ID NO: 871177 - DNA, 25 bp, Homo sapien
gagccgaggtcgcccccgccctggc

SEQ ID NO: 871178 - DNA, 25 bp, Homo sapien
aggcaaacactggtcggaggcgtcc

SEQ ID NO: 871179 - DNA, 25 bp, Homo sapien
cagattggggacaaaggaagccggg

SEQ ID NO: 871180 - DNA, 25 bp, Homo sapien
cataaaaggcaaacactggtcggag

SEQ ID NO: 871181 - DNA, 25 bp, Homo sapien
aacactggtcggaggcgtccccgcg

SEQ ID NO: 871182 - DNA, 25 bp, Homo sapien
ctggcgggggctccgccgcgcccac

SEQ ID NO: 871183 - DNA, 25 bp, Homo sapien
gggcctggcgggggctccgccgcgc

SEQ ID NO: 871184 - DNA, 25 bp, Homo sapien
cgggcctggcgggggctccgccgcg

SEQ ID NO: 871185 - DNA, 25 bp, Homo sapien
gcctggcgggggctccgccgcgccc

SEQ ID NO: 871186 - DNA, 25 bp, Homo sapien
cccggagcgcgcctcccgagcgcgg

SEQ ID NO: 871187 - DNA, 25 bp, Homo sapien
cccgagagcggcacccccggagcgc

SEQ ID NO: 871188 - DNA, 25 bp, Homo sapien
ccattggcaagagcccggctcagac

SEQ ID NO: 871189 - DNA, 25 bp, Homo sapien
cgagcgcggcctcgcgcctccgaac

SEQ ID NO: 871190 - DNA, 25 bp, Homo sapien
cggacgcggtctcggcggtggtggc

SEQ ID NO: 871191 - DNA, 25 bp, Homo sapien
ggacgggcggcggatcggcaaaggc

SEQ ID NO: 871192 - DNA, 25 bp, Homo sapien
aaaggcgaggctctgtgctcgcggg

SEQ ID NO: 871193 - DNA, 25 bp, Homo sapien
ggcggacgcggtctcggcggtggtg

SEQ ID NO: 871194 - DNA, 25 bp, Homo sapien
ttcggaacggcgcacgctgattggc

SEQ ID NO: 871195 - DNA, 25 bp, Homo sapien
caactttcggaacggcgcacgctga

SEQ ID NO: 871196 - DNA, 25 bp, Homo sapien
gaacggcgcacgctgattggccccg

SEQ ID NO: 871197 - DNA, 25 bp, Homo sapien
aggcaactttcggaacggcgcacgc

SEQ ID NO: 871198 - DNA, 25 bp, Homo sapien
cggcttcgccgcacagtgcagcatt

SEQ ID NO: 871199 - DNA, 25 bp, Homo sapien
gcgttggccgccttggggtgctggg

SEQ ID NO: 871200 - DNA, 25 bp, Homo sapien
gagggagagttttggcgttggccgc

SEQ ID NO: 871201 - DNA, 25 bp, Homo sapien
aaaagagcgagagcgagattgagga

SEQ ID NO: 871202 - DNA, 25 bp, Homo sapien
tgttccagttcacggtacaaggctg

SEQ ID NO: 871203 - DNA, 25 bp, Homo sapien
tgtgctcagccaatgggacctgctc

SEQ ID NO: 871204 - DNA, 25 bp, Homo sapien
actgagtgtgtgtcgcaataggcaa

SEQ ID NO: 871205 - DNA, 25 bp, Homo sapien
tctttgcagcgcgtagtaggtgttc

SEQ ID NO: 871206 - DNA, 25 bp, Homo sapien
ggttcacagtccagaagacttgctg

SEQ ID NO: 871207 - DNA, 25 bp, Homo sapien
gttcacagtccagaagacttgctga

SEQ ID NO: 871208 - DNA, 25 bp, Homo sapien
ctgcctgttgatgagggctggttct

SEQ ID NO: 871209 - DNA, 25 bp, Homo sapien
gggcccttcttgctgcctgttgatg

SEQ ID NO: 871210 - DNA, 25 bp, Homo sapien
ttcgtggaacgttgaactgggtgga

SEQ ID NO: 871211 - DNA, 25 bp, Homo sapien
ggctggcgttgtggggcgatgggcg

SEQ ID NO: 871212 - DNA, 25 bp, Homo sapien
gtgggcagtggggatgggaccggat

SEQ ID NO: 871213 - DNA, 25 bp, Homo sapien
tggggtgggcagtggggatgggacc

SEQ ID NO: 871214 - DNA, 25 bp, Homo sapien
ggtgggcagtggggatgggaccgga

SEQ ID NO: 871215 - DNA, 25 bp, Homo sapien
gcatttagaactgggcctcagccac

SEQ ID NO: 871216 - DNA, 25 bp, Homo sapien
ggctgcacagacatgtagcattggg

SEQ ID NO: 871217 - DNA, 25 bp, Homo sapien
ggagaaaggcacacagatgtccctg

SEQ ID NO: 871218 - DNA, 25 bp, Homo sapien
gcattgggggtgacagtggagaaag

SEQ ID NO: 871219 - DNA, 25 bp, Homo sapien
gggccacctgggctgcacagacatg

SEQ ID NO: 871220 - DNA, 25 bp, Homo sapien
caccgtggctgtagtaggcgtgcat

SEQ ID NO: 871221 - DNA, 25 bp, Homo sapien
ctgcagactgggactccgtgaggct

SEQ ID NO: 871222 - DNA, 25 bp, Homo sapien
aggcgtgcatgggaagtcaggagga

SEQ ID NO: 871223 - DNA, 25 bp, Homo sapien
ggctgggctctgacttggatattgt

SEQ ID NO: 871224 - DNA, 25 bp, Homo sapien
ggggccagtgactgagcctcttggc

SEQ ID NO: 871225 - DNA, 25 bp, Homo sapien
tggggccagtgactgagcctcttgg

SEQ ID NO: 871226 - DNA, 25 bp, Homo sapien
gggccagtgactgagcctcttggcc

SEQ ID NO: 871227 - DNA, 25 bp, Homo sapien
gccagtgactgagcctcttggccca

SEQ ID NO: 871228 - DNA, 25 bp, Homo sapien
agaggaggagcctctgttgagggct

SEQ ID NO: 871229 - DNA, 25 bp, Homo sapien
ctggagacaccttttgggtggttcg

SEQ ID NO: 871230 - DNA, 25 bp, Homo sapien
tctgtgacatgaaggcagcgacacc

SEQ ID NO: 871231 - DNA, 25 bp, Homo sapien
cttttgggtggttcgtgccctccat

SEQ ID NO: 871232 - DNA, 25 bp, Homo sapien
tatcaggcatgcaacacaagttact

SEQ ID NO: 871233 - DNA, 25 bp, Homo sapien
tctaacaagagaccgtggccaagtc

SEQ ID NO: 871234 - DNA, 25 bp, Homo sapien
tgccaatctaagtgccaatccgagc

SEQ ID NO: 871235 - DNA, 25 bp, Homo sapien
tgcaaagaccctgacgtgggagccc

SEQ ID NO: 871236 - DNA, 25 bp, Homo sapien
cccaggtcttcggagtgcagccagg

SEQ ID NO: 871237 - DNA, 25 bp, Homo sapien
ctacccaggtcttcggagtgcagcc

SEQ ID NO: 871238 - DNA, 25 bp, Homo sapien
aagcacagaggaagcgccctggaga

SEQ ID NO: 871239 - DNA, 25 bp, Homo sapien
gaagcacagaggaagcgccctggag

SEQ ID NO: 871240 - DNA, 25 bp, Homo sapien
ggggggatggccaggtgagtaccat

SEQ ID NO: 871241 - DNA, 25 bp, Homo sapien
tgagtaggggggatggccaggtgag

SEQ ID NO: 871242 - DNA, 25 bp, Homo sapien
ggagcaggaccagcatcggccaccg

SEQ ID NO: 871243 - DNA, 25 bp, Homo sapien
agcatcggccaccgggtgagtaggg

SEQ ID NO: 871244 - DNA, 25 bp, Homo sapien
acgccctcgtaccaaggtggctcag

SEQ ID NO: 871245 - DNA, 25 bp, Homo sapien
gtgccacgccctcgtaccaaggtgg

SEQ ID NO: 871246 - DNA, 25 bp, Homo sapien
tcgtaccaaggtggctcagatggca

SEQ ID NO: 871247 - DNA, 25 bp, Homo sapien
ccaaggtggctcagatggcacctgg

SEQ ID NO: 871248 - DNA, 25 bp, Homo sapien
agcagatctggacgctggagcagcc

SEQ ID NO: 871249 - DNA, 25 bp, Homo sapien
gggttcaaggtgaacgcgtccgcca

SEQ ID NO: 871250 - DNA, 25 bp, Homo sapien
cggccaacgagaggaacgtgtccac

SEQ ID NO: 871251 - DNA, 25 bp, Homo sapien
caactgcggcaacaagtacctgacg

SEQ ID NO: 871252 - DNA, 25 bp, Homo sapien
gtctgccaatcaggacgaggagacc

SEQ ID NO: 871253 - DNA, 25 bp, Homo sapien
tctgccaatcaggacgaggagaccg

SEQ ID NO: 871254 - DNA, 25 bp, Homo sapien
cctgctgtgattggtgctccctggg

SEQ ID NO: 871255 - DNA, 25 bp, Homo sapien
gaaatattattgctggaggcgtccc

SEQ ID NO: 871256 - DNA, 25 bp, Homo sapien
tctaaacgcccatgatagtagcttc

SEQ ID NO: 871257 - DNA, 25 bp, Homo sapien
caacatgcatctcactctgggtgtc

SEQ ID NO: 871258 - DNA, 25 bp, Homo sapien
gctgcgctgtgataggtggtccctc

SEQ ID NO: 871259 - DNA, 25 bp, Homo sapien
tccagtcattgtgcgctgggaaggc

SEQ ID NO: 871260 - DNA, 25 bp, Homo sapien
gtcacctcagcgaggttccggcggc

SEQ ID NO: 871261 - DNA, 25 bp, Homo sapien
taaggatagcagctgcgagaagact

SEQ ID NO: 871262 - DNA, 25 bp, Homo sapien
gactgcagcatggaggtctttgcag

SEQ ID NO: 871263 - DNA, 25 bp, Homo sapien
tgggaaacatgccacaagcagggta

SEQ ID NO: 871264 - DNA, 25 bp, Homo sapien
ggaggtctttgcaggcactctggga

SEQ ID NO: 871265 - DNA, 25 bp, Homo sapien
tcttctagaacaaacattgccagcg

SEQ ID NO: 871266 - DNA, 25 bp, Homo sapien
ccagaaataaagttaggatggaaag

SEQ ID NO: 871267 - DNA, 25 bp, Homo sapien
gcgtggccctgctcattttcttacc

SEQ ID NO: 871268 - DNA, 25 bp, Homo sapien
gagagagagcaccacattcagatag

SEQ ID NO: 871269 - DNA, 25 bp, Homo sapien
gaatgtctcaactcagctgtctccc

SEQ ID NO: 871270 - DNA, 25 bp, Homo sapien
catagatgactgagatgggtgagaa

SEQ ID NO: 871271 - DNA, 25 bp, Homo sapien
aatatacagggcagggggatccgac

SEQ ID NO: 871272 - DNA, 25 bp, Homo sapien
gaagcgggacctaggggaatataca

SEQ ID NO: 871273 - DNA, 25 bp, Homo sapien
ggtgtggttttatgtggccatagat

SEQ ID NO: 871274 - DNA, 25 bp, Homo sapien
agggcatcggcggtctgagagcttg

SEQ ID NO: 871275 - DNA, 25 bp, Homo sapien
tcccggtgctcggtgccctggctct

SEQ ID NO: 871276 - DNA, 25 bp, Homo sapien
tgcctcccggtgctcggtgccctgg

SEQ ID NO: 871277 - DNA, 25 bp, Homo sapien
taggtctgagggcatcggcggtctg

SEQ ID NO: 871278 - DNA, 25 bp, Homo sapien
actgcccctgggaccagttccttca

SEQ ID NO: 871279 - DNA, 25 bp, Homo sapien
tccagaaaagcacgtgctccttggg

SEQ ID NO: 871280 - DNA, 25 bp, Homo sapien
cctggcctgctcagccctatgtccc

SEQ ID NO: 871281 - DNA, 25 bp, Homo sapien
tgctgctattcccaggccttcgggc

SEQ ID NO: 871282 - DNA, 25 bp, Homo sapien
ctgcgggtttaactggcaccttctc

SEQ ID NO: 871283 - DNA, 25 bp, Homo sapien
tctcctgcgggtttaactggcacct

SEQ ID NO: 871284 - DNA, 25 bp, Homo sapien
cctctcctgcgggtttaactggcac

SEQ ID NO: 871285 - DNA, 25 bp, Homo sapien
agtccctctcctgcgggtttaactg

SEQ ID NO: 871286 - DNA, 25 bp, Homo sapien
tacttgacctttaggtgggcagact

SEQ ID NO: 871287 - DNA, 25 bp, Homo sapien
ctagcgggatttgcctagcagatca

SEQ ID NO: 871288 - DNA, 25 bp, Homo sapien
aatgtgggccttggtagccgcccta

SEQ ID NO: 871289 - DNA, 25 bp, Homo sapien
gggcctgcaaaagaaaccgactgca

SEQ ID NO: 871290 - DNA, 25 bp, Homo sapien
tgaggatgctggtttagacccaatc

SEQ ID NO: 871291 - DNA, 25 bp, Homo sapien
tgtcggcggcccctgtaacttgccg

SEQ ID NO: 871292 - DNA, 25 bp, Homo sapien
tggtggggatcttactactgggcct

SEQ ID NO: 871293 - DNA, 25 bp, Homo sapien
tcacttggacgaatctgtcggcggc

SEQ ID NO: 871294 - DNA, 25 bp, Homo sapien
tgctaagtgcaaatactagattcct

SEQ ID NO: 871295 - DNA, 25 bp, Homo sapien
tatacaaagtgacagatcatgcaca

SEQ ID NO: 871296 - DNA, 25 bp, Homo sapien
tctctccagttttaaggcaagtaag

SEQ ID NO: 871297 - DNA, 25 bp, Homo sapien
caaaagtcccagttacatatgatac

SEQ ID NO: 871298 - DNA, 25 bp, Homo sapien
ctggctggtctgaagacccccagtg

SEQ ID NO: 871299 - DNA, 25 bp, Homo sapien
gagcccgaggttcaggccctgcctc

SEQ ID NO: 871300 - DNA, 25 bp, Homo sapien
ccttgctggctggtctgaagacccc

SEQ ID NO: 871301 - DNA, 25 bp, Homo sapien
ccccttgctggctggtctgaagacc

SEQ ID NO: 871302 - DNA, 25 bp, Homo sapien
tcggggaggatcctcaggaatcagg

SEQ ID NO: 871303 - DNA, 25 bp, Homo sapien
tggccttaggagaaacatcactctg

SEQ ID NO: 871304 - DNA, 25 bp, Homo sapien
gggtttggccttaggagaaacatca

SEQ ID NO: 871305 - DNA, 25 bp, Homo sapien
cagggtgggtgctcacggcagccct

SEQ ID NO: 871306 - DNA, 25 bp, Homo sapien
ctgtctagggctgtttctgcagctg

SEQ ID NO: 871307 - DNA, 25 bp, Homo sapien
cctgcctggggctcttgctggagcc

SEQ ID NO: 871308 - DNA, 25 bp, Homo sapien
gcctgctccctttgtcctgcctggg

SEQ ID NO: 871309 - DNA, 25 bp, Homo sapien
cctggggctcttgctggagccacgt

SEQ ID NO: 871310 - DNA, 25 bp, Homo sapien
gctgaggctcccagggcctgaggtc

SEQ ID NO: 871311 - DNA, 25 bp, Homo sapien
ctgaggctcccagggcctgaggtca

SEQ ID NO: 871312 - DNA, 25 bp, Homo sapien
cagagggagctgaggctcccagggc

SEQ ID NO: 871313 - DNA, 25 bp, Homo sapien
gggcagagggagctgaggctcccag

SEQ ID NO: 871314 - DNA, 25 bp, Homo sapien
cagctgtgatgtctacagccgccct

SEQ ID NO: 871315 - DNA, 25 bp, Homo sapien
agctgtgatgtctacagccgccctc

SEQ ID NO: 871316 - DNA, 25 bp, Homo sapien
tcagctgtgatgtctacagccgccc

SEQ ID NO: 871317 - DNA, 25 bp, Homo sapien
ccaaggcactgtcgttcaggctagt

SEQ ID NO: 871318 - DNA, 25 bp, Homo sapien
ttgctgccgcatggagcctgccttt

SEQ ID NO: 871319 - DNA, 25 bp, Homo sapien
tcaggctagtagcaaagttcaggca

SEQ ID NO: 871320 - DNA, 25 bp, Homo sapien
gccagcaaggacatagcagcaggct

SEQ ID NO: 871321 - DNA, 25 bp, Homo sapien
ggtccaggtgaccacctgtcttcaa

SEQ ID NO: 871322 - DNA, 25 bp, Homo sapien
cccaggtccaggtgaccacctgtct

SEQ ID NO: 871323 - DNA, 25 bp, Homo sapien
gaccacctgtcttcaaagcctccat

SEQ ID NO: 871324 - DNA, 25 bp, Homo sapien
caggtccaggtgaccacctgtcttc

SEQ ID NO: 871325 - DNA, 25 bp, Homo sapien
gaagccaatggcagcgaatgacggt

SEQ ID NO: 871326 - DNA, 25 bp, Homo sapien
tgtcaatgggccagagtgatgcctc

SEQ ID NO: 871327 - DNA, 25 bp, Homo sapien
tcagctgactccatgagaagggaag

SEQ ID NO: 871328 - DNA, 25 bp, Homo sapien
gactttccagagaccgaggatgaga

SEQ ID NO: 871329 - DNA, 25 bp, Homo sapien
agtggcgcacgggttttggatgggg

SEQ ID NO: 871330 - DNA, 25 bp, Homo sapien
tgcagtggcgcacgggttttggatg

SEQ ID NO: 871331 - DNA, 25 bp, Homo sapien
cagtggcgcacgggttttggatggg

SEQ ID NO: 871332 - DNA, 25 bp, Homo sapien
gcagtggcgcacgggttttggatgg

SEQ ID NO: 871333 - DNA, 25 bp, Homo sapien
gggcagttcacatcgcagctctctc

SEQ ID NO: 871334 - DNA, 25 bp, Homo sapien
agggacctggtctatggcctatgcc

SEQ ID NO: 871335 - DNA, 25 bp, Homo sapien
ggcctatgccatggacaaggcagaa

SEQ ID NO: 871336 - DNA, 25 bp, Homo sapien
ggtcggctccgaggagaggcccagg

SEQ ID NO: 871337 - DNA, 25 bp, Homo sapien
tcaagctgacttaggatgcaatggt

SEQ ID NO: 871338 - DNA, 25 bp, Homo sapien
gtctttattatggatccgtccactc

SEQ ID NO: 871339 - DNA, 25 bp, Homo sapien
ccaggagcagtagcccttctaggaa

SEQ ID NO: 871340 - DNA, 25 bp, Homo sapien
gaaaaccagcctacccttcaagctg

SEQ ID NO: 871341 - DNA, 25 bp, Homo sapien
ggtccaatgcgtttgaaggtgttct

SEQ ID NO: 871342 - DNA, 25 bp, Homo sapien
gcatgtggatgggaccgaagtcata

SEQ ID NO: 871343 - DNA, 25 bp, Homo sapien
aagttgttgaacacaggccgcacgg

SEQ ID NO: 871344 - DNA, 25 bp, Homo sapien
tagttgacccgcacgttgggcagag

SEQ ID NO: 871345 - DNA, 25 bp, Homo sapien
ttttgcccaggctagccccaacctc

SEQ ID NO: 871346 - DNA, 25 bp, Homo sapien
cactgcacttagcctctttttttta

SEQ ID NO: 871347 - DNA, 25 bp, Homo sapien
agccactgcacttagcctctttttt

SEQ ID NO: 871348 - DNA, 25 bp, Homo sapien
ctagccccaacctcctgggatccag

SEQ ID NO: 871349 - DNA, 25 bp, Homo sapien
tgagctcaaacccaccccttgggac

SEQ ID NO: 871350 - DNA, 25 bp, Homo sapien
gaaggatcagctgggtctacttttc

SEQ ID NO: 871351 - DNA, 25 bp, Homo sapien
ggcttgattgattcctgagctcaaa

SEQ ID NO: 871352 - DNA, 25 bp, Homo sapien
ccttgggacttcctcaccatcaagg

SEQ ID NO: 871353 - DNA, 25 bp, Homo sapien
ctgggttgagtgccaggacactcag

SEQ ID NO: 871354 - DNA, 25 bp, Homo sapien
tgggttgagtgccaggacactcagg

SEQ ID NO: 871355 - DNA, 25 bp, Homo sapien
gctgggttgagtgccaggacactca

SEQ ID NO: 871356 - DNA, 25 bp, Homo sapien
tcagcctccttctggatttcctcaa

SEQ ID NO: 871357 - DNA, 25 bp, Homo sapien
gcctccttctggatttcctcaataa

SEQ ID NO: 871358 - DNA, 25 bp, Homo sapien
cctcaataagcttctcatcatcttc

SEQ ID NO: 871359 - DNA, 25 bp, Homo sapien
tccttctggatttcctcaataagct

SEQ ID NO: 871360 - DNA, 25 bp, Homo sapien
tggcgttccacaaggaggccatcca

SEQ ID NO: 871361 - DNA, 25 bp, Homo sapien
aggaggccgcttgttgcttatggcc

SEQ ID NO: 871362 - DNA, 25 bp, Homo sapien
tggccatggaacaagcccgaagcct

SEQ ID NO: 871363 - DNA, 25 bp, Homo sapien
gggctgcacaccgttccttcctatt

SEQ ID NO: 871364 - DNA, 25 bp, Homo sapien
ctgaaagacgattaactggattgaa

SEQ ID NO: 871365 - DNA, 25 bp, Homo sapien
ctggattgaaaaaacccgccaagtg

SEQ ID NO: 871366 - DNA, 25 bp, Homo sapien
gcagtttgtgggactgaaagacgat

SEQ ID NO: 871367 - DNA, 25 bp, Homo sapien
tcctcagtgacccacaaaacagctg

SEQ ID NO: 871368 - DNA, 25 bp, Homo sapien
gtgcatgtgccatcccctgaaacag

SEQ ID NO: 871369 - DNA, 25 bp, Homo sapien
agccagtagattcctcttgcccaga

SEQ ID NO: 871370 - DNA, 25 bp, Homo sapien
ggagcttgggaaagctcataaccct

SEQ ID NO: 871371 - DNA, 25 bp, Homo sapien
ccctggcacttgtcctttgggatga

SEQ ID NO: 871372 - DNA, 25 bp, Homo sapien
aataaccatttgagcgcttggcaca

SEQ ID NO: 871373 - DNA, 25 bp, Homo sapien
tattcccagattagccacagatcgc

SEQ ID NO: 871374 - DNA, 25 bp, Homo sapien
tcatgagaggcttccaaagagctta

SEQ ID NO: 871375 - DNA, 25 bp, Homo sapien
gatatgaacagtaatcagcagccac

SEQ ID NO: 871376 - DNA, 25 bp, Homo sapien
cagccttcctccctaattccaacaa

SEQ ID NO: 871377 - DNA, 25 bp, Homo sapien
tgccgcttaagccagggtcccaaag

SEQ ID NO: 871378 - DNA, 25 bp, Homo sapien
tccaccagggagatgctgcgctggc

SEQ ID NO: 871379 - DNA, 25 bp, Homo sapien
tctgcatgcctgatccaccagggag

SEQ ID NO: 871380 - DNA, 25 bp, Homo sapien
gagagcatcttgaacactcctggca

SEQ ID NO: 871381 - DNA, 25 bp, Homo sapien
tgggatcggtccagagagagcatct

SEQ ID NO: 871382 - DNA, 25 bp, Homo sapien
caagacatgcggttgcagccttcag

SEQ ID NO: 871383 - DNA, 25 bp, Homo sapien
tcgacagaggtagcacatctgggca

SEQ ID NO: 871384 - DNA, 25 bp, Homo sapien
tttagtatgcccaatgtgtcctcag

SEQ ID NO: 871385 - DNA, 25 bp, Homo sapien
acttgttcatacactgtgctcctgg

SEQ ID NO: 871386 - DNA, 25 bp, Homo sapien
tagttctttgcccatggtttcacct

SEQ ID NO: 871387 - DNA, 25 bp, Homo sapien
gcatttgtttagtatgcccaatgtg

SEQ ID NO: 871388 - DNA, 25 bp, Homo sapien
ttagattttctgtacagagagggtc

SEQ ID NO: 871389 - DNA, 25 bp, Homo sapien
ttttagattttctgtacagagaggg

SEQ ID NO: 871390 - DNA, 25 bp, Homo sapien
tttagattttctgtacagagagggt

SEQ ID NO: 871391 - DNA, 25 bp, Homo sapien
cctttgggcatcttctagactggca

SEQ ID NO: 871392 - DNA, 25 bp, Homo sapien
caaagacttctaagatgcagaggcg

SEQ ID NO: 871393 - DNA, 25 bp, Homo sapien
tgaacgacatgcagatagaacctgg

SEQ ID NO: 871394 - DNA, 25 bp, Homo sapien
gataatcagagaacaccagcagcca

SEQ ID NO: 871395 - DNA, 25 bp, Homo sapien
ggctgtagtgttgtagtggtgcgat

SEQ ID NO: 871396 - DNA, 25 bp, Homo sapien
aggtgcgtgcccaccactcctggat

SEQ ID NO: 871397 - DNA, 25 bp, Homo sapien
gcgtgcccaccactcctggataatt

SEQ ID NO: 871398 - DNA, 25 bp, Homo sapien
aggctgtagtgttgtagtggtgcga

SEQ ID NO: 871399 - DNA, 25 bp, Homo sapien
tagaggtacggtacttgatgtcgtc

SEQ ID NO: 871400 - DNA, 25 bp, Homo sapien
tgatgtcgtctttttcagccagctc

SEQ ID NO: 871401 - DNA, 25 bp, Homo sapien
ttatgttctttccagagtccctgac

SEQ ID NO: 871402 - DNA, 25 bp, Homo sapien
cacaggtgaggccattatgttcttt

SEQ ID NO: 871403 - DNA, 25 bp, Homo sapien
acaactcctggtgagtggacaccac

SEQ ID NO: 871404 - DNA, 25 bp, Homo sapien
caccaggggctcctaagggagactt

SEQ ID NO: 871405 - DNA, 25 bp, Homo sapien
gctcggactatgaacacgtgccacc

SEQ ID NO: 871406 - DNA, 25 bp, Homo sapien
ccgcctctatcttccgagtagctcg

SEQ ID NO: 871407 - DNA, 25 bp, Homo sapien
cgcctctatcttccgagtagctcgg

SEQ ID NO: 871408 - DNA, 25 bp, Homo sapien
aggcatggagccctgttttaatgat

SEQ ID NO: 871409 - DNA, 25 bp, Homo sapien
gagtcaagcaatccgcaagcttcag

SEQ ID NO: 871410 - DNA, 25 bp, Homo sapien
tacaggcatggagccctgttttaat

SEQ ID NO: 871411 - DNA, 25 bp, Homo sapien
ggagtcaagcaatccgcaagcttca

SEQ ID NO: 871412 - DNA, 25 bp, Homo sapien
gggcattaagatttggtaatggcat

SEQ ID NO: 871413 - DNA, 25 bp, Homo sapien
tgcttgagattatcaccatcactga

SEQ ID NO: 871414 - DNA, 25 bp, Homo sapien
tgcaggtaacagagacagtttctgc

SEQ ID NO: 871415 - DNA, 25 bp, Homo sapien
actgaaactgctctgggtcggtttt

SEQ ID NO: 871416 - DNA, 25 bp, Homo sapien
ggtcggttttgttcagagcaatgca

SEQ ID NO: 871417 - DNA, 25 bp, Homo sapien
gcgttgttactgcacttttagtggc

SEQ ID NO: 871418 - DNA, 25 bp, Homo sapien
caggcttggcatggagggctcaatt

SEQ ID NO: 871419 - DNA, 25 bp, Homo sapien
gctggtcactatggacaggcttggc

SEQ ID NO: 871420 - DNA, 25 bp, Homo sapien
ggcaaagatgacgtcctgctggtca

SEQ ID NO: 871421 - DNA, 25 bp, Homo sapien
gggatccctttcacggggagctctc

SEQ ID NO: 871422 - DNA, 25 bp, Homo sapien
cccgccttcctgccgagcttctcac

SEQ ID NO: 871423 - DNA, 25 bp, Homo sapien
agggatccctttcacggggagctct

SEQ ID NO: 871424 - DNA, 25 bp, Homo sapien
actataaactgtggccctatggtgg

SEQ ID NO: 871425 - DNA, 25 bp, Homo sapien
taaactataaactgtggccctatgg

SEQ ID NO: 871426 - DNA, 25 bp, Homo sapien
ctataaactgtggccctatggtggg

SEQ ID NO: 871427 - DNA, 25 bp, Homo sapien
aactataaactgtggccctatggtg

SEQ ID NO: 871428 - DNA, 25 bp, Homo sapien
ctgcctgctggaactccactgtcag

SEQ ID NO: 871429 - DNA, 25 bp, Homo sapien
tttgctgggaatcttggcctggcag

SEQ ID NO: 871430 - DNA, 25 bp, Homo sapien
tcactgcttgggctacctctgggct

SEQ ID NO: 871431 - DNA, 25 bp, Homo sapien
agggttttgctgggaatcttggcct

SEQ ID NO: 871432 - DNA, 25 bp, Homo sapien
tggagctgctgttcaagaacaggct

SEQ ID NO: 871433 - DNA, 25 bp, Homo sapien
tgctgttcaagaacaggctcgacag

SEQ ID NO: 871434 - DNA, 25 bp, Homo sapien
ggtaattagcgtggccctgtcagtg

SEQ ID NO: 871435 - DNA, 25 bp, Homo sapien
gctgctgttcaagaacaggctcgac

SEQ ID NO: 871436 - DNA, 25 bp, Homo sapien
cagagatgtgcactccaatgcctga

SEQ ID NO: 871437 - DNA, 25 bp, Homo sapien
ctgaggtttcctcccagttcagaga

SEQ ID NO: 871438 - DNA, 25 bp, Homo sapien
ctgtcttcgtcttggtggtactgag

SEQ ID NO: 871439 - DNA, 25 bp, Homo sapien
tgacgccccactgtggagccaaagg

SEQ ID NO: 871440 - DNA, 25 bp, Homo sapien
cttgtcagctcactggttactcaac

SEQ ID NO: 871441 - DNA, 25 bp, Homo sapien
tcagctcactggttactcaacactt

SEQ ID NO: 871442 - DNA, 25 bp, Homo sapien
gctcactggttactcaacacttctt

SEQ ID NO: 871443 - DNA, 25 bp, Homo sapien
cgagtcctccacgtggtgggcttgt

SEQ ID NO: 871444 - DNA, 25 bp, Homo sapien
ggagcacatgttactacttagcttg

SEQ ID NO: 871445 - DNA, 25 bp, Homo sapien
ttagcttggagcagccaatctctgg

SEQ ID NO: 871446 - DNA, 25 bp, Homo sapien
tagcttggagcagccaatctctggc

SEQ ID NO: 871447 - DNA, 25 bp, Homo sapien
cctgttaaaagtgcaagataagccc

SEQ ID NO: 871448 - DNA, 25 bp, Homo sapien
gtctatatctaagtggtgctgccag

SEQ ID NO: 871449 - DNA, 25 bp, Homo sapien
cacatcctgaggtgggtcccgtatc

SEQ ID NO: 871450 - DNA, 25 bp, Homo sapien
catcaaggagaatgaggacaatgtc

SEQ ID NO: 871451 - DNA, 25 bp, Homo sapien
aagctgggccttctaagccgagcct

SEQ ID NO: 871452 - DNA, 25 bp, Homo sapien
ctgggccttctaagccgagcctctg

SEQ ID NO: 871453 - DNA, 25 bp, Homo sapien
caagctgggccttctaagccgagcc

SEQ ID NO: 871454 - DNA, 25 bp, Homo sapien
gctgggccttctaagccgagcctct

SEQ ID NO: 871455 - DNA, 25 bp, Homo sapien
accagaagccaacctgacatcagtc

SEQ ID NO: 871456 - DNA, 25 bp, Homo sapien
gccccattaatcctcatgccttgta

SEQ ID NO: 871457 - DNA, 25 bp, Homo sapien
aatatgtatgttaagaaggctggac

SEQ ID NO: 871458 - DNA, 25 bp, Homo sapien
gcagatgcccatctcagtagctaaa

SEQ ID NO: 871459 - DNA, 25 bp, Homo sapien
ggagttcgagactagcatggccaac

SEQ ID NO: 871460 - DNA, 25 bp, Homo sapien
ccagcctgggttgacagagtatgac

SEQ ID NO: 871461 - DNA, 25 bp, Homo sapien
gaggcggacggatcatctgaggtga

SEQ ID NO: 871462 - DNA, 25 bp, Homo sapien
caggcgtggtgatgcacgtctgtaa

SEQ ID NO: 871463 - DNA, 25 bp, Homo sapien
ctgttgcggcctcatttgcttctca

SEQ ID NO: 871464 - DNA, 25 bp, Homo sapien
taagtgctgcttaaccatcagtgcc

SEQ ID NO: 871465 - DNA, 25 bp, Homo sapien
gaagatcttaaaacagcggtcccca

SEQ ID NO: 871466 - DNA, 25 bp, Homo sapien
tcacacagtggtggcttaagagtct

SEQ ID NO: 871467 - DNA, 25 bp, Homo sapien
caaaggtagcgctatttgcggcaat

SEQ ID NO: 871468 - DNA, 25 bp, Homo sapien
tagcgaccgcaaatggaaccgaaga

SEQ ID NO: 871469 - DNA, 25 bp, Homo sapien
tatgtaggtcgtgtccagaatcccg

SEQ ID NO: 871470 - DNA, 25 bp, Homo sapien
caggctttcacgcacagaactgtgt

SEQ ID NO: 871471 - DNA, 25 bp, Homo sapien
cttgatggaaggaactagcgaccgc

SEQ ID NO: 871472 - DNA, 25 bp, Homo sapien
gttaaaggcgcatgtatttaccagc

SEQ ID NO: 871473 - DNA, 25 bp, Homo sapien
taactagacagtaaattgagccaag

SEQ ID NO: 871474 - DNA, 25 bp, Homo sapien
tcaagccttcctgtagcagtttgtg

SEQ ID NO: 871475 - DNA, 25 bp, Homo sapien
tcaaaggaaattgcccagctacacc

SEQ ID NO: 871476 - DNA, 25 bp, Homo sapien
tcacacagccgtgcaaagaactctg

SEQ ID NO: 871477 - DNA, 25 bp, Homo sapien
tctgctcatgccaacagggtgctct

SEQ ID NO: 871478 - DNA, 25 bp, Homo sapien
tggcctgcgtggcaaaattccgtct

SEQ ID NO: 871479 - DNA, 25 bp, Homo sapien
tacacacgcatgttctgccaggaca

SEQ ID NO: 871480 - DNA, 25 bp, Homo sapien
tgtctgggttatatgacctcctggg

SEQ ID NO: 871481 - DNA, 25 bp, Homo sapien
aaaaatacactaatgggccaatggg

SEQ ID NO: 871482 - DNA, 25 bp, Homo sapien
catctgtacaacaagcatgtctggg

SEQ ID NO: 871483 - DNA, 25 bp, Homo sapien
tcctgggtccggcttataaatctaa

SEQ ID NO: 871484 - DNA, 25 bp, Homo sapien
gcagttgcctctgcgagtttcgagg

SEQ ID NO: 871485 - DNA, 25 bp, Homo sapien
gaggtcggcgacatctgaggcccca

SEQ ID NO: 871486 - DNA, 25 bp, Homo sapien
ggagcccacgctgactctagacttc

SEQ ID NO: 871487 - DNA, 25 bp, Homo sapien
cccaggtcgctgccgggttctcgga

SEQ ID NO: 871488 - DNA, 25 bp, Homo sapien
tgtacttcacggctgtaaagttaaa

SEQ ID NO: 871489 - DNA, 25 bp, Homo sapien
attttggttgtacttcacggctgta

SEQ ID NO: 871490 - DNA, 25 bp, Homo sapien
aaatgctacaaagaataggatggga

SEQ ID NO: 871491 - DNA, 25 bp, Homo sapien
atgctacaaagaataggatgggaac

SEQ ID NO: 871492 - DNA, 25 bp, Homo sapien
tgtgaacttgcacggatatagatgc

SEQ ID NO: 871493 - DNA, 25 bp, Homo sapien
catgcccggacagtgtgtttagttc

SEQ ID NO: 871494 - DNA, 25 bp, Homo sapien
catggaagtggtgacagtgatatcc

SEQ ID NO: 871495 - DNA, 25 bp, Homo sapien
taagtgtatcgccttgtggctggaa

SEQ ID NO: 871496 - DNA, 25 bp, Homo sapien
caggtcccatcagtgcttcatcgag

SEQ ID NO: 871497 - DNA, 25 bp, Homo sapien
tggagagccagcgtcacaaattccc

SEQ ID NO: 871498 - DNA, 25 bp, Homo sapien
tggactctgcctactgtaccgtggg

SEQ ID NO: 871499 - DNA, 25 bp, Homo sapien
cttcatcgagtgagacaggaacgag

SEQ ID NO: 871500 - DNA, 25 bp, Homo sapien
ttagcgtaggcatcacctccccagg

SEQ ID NO: 871501 - DNA, 25 bp, Homo sapien
cctccttatctgctgcatcttagcg

SEQ ID NO: 871502 - DNA, 25 bp, Homo sapien
ccttatctgctgcatcttagcgtag

SEQ ID NO: 871503 - DNA, 25 bp, Homo sapien
tatctgctgcatcttagcgtaggca

SEQ ID NO: 871504 - DNA, 25 bp, Homo sapien
ttgtgacaattgttatagcaacagc

SEQ ID NO: 871505 - DNA, 25 bp, Homo sapien
tgctttcttaagagctgcaagatgc

SEQ ID NO: 871506 - DNA, 25 bp, Homo sapien
gagctgcaagatgccagcgactgtt

SEQ ID NO: 871507 - DNA, 25 bp, Homo sapien
tgccagcgactgttgtgacaattgt

SEQ ID NO: 871508 - DNA, 25 bp, Homo sapien
catcactgtccaacagagccggaaa

SEQ ID NO: 871509 - DNA, 25 bp, Homo sapien
ctttcggcagtgaggattaggacag

SEQ ID NO: 871510 - DNA, 25 bp, Homo sapien
atcactgtccaacagagccggaaag

SEQ ID NO: 871511 - DNA, 25 bp, Homo sapien
tgacaagctcgtcggcgtaggctgc

SEQ ID NO: 871512 - DNA, 25 bp, Homo sapien
tgggaacgaacacgtgcagctgcct

SEQ ID NO: 871513 - DNA, 25 bp, Homo sapien
tcctcctcggcttttcgctcatagt

SEQ ID NO: 871514 - DNA, 25 bp, Homo sapien
tagtacttatacaggatggtctggg

SEQ ID NO: 871515 - DNA, 25 bp, Homo sapien
actgcgtcagctcctcgaatggaaa

SEQ ID NO: 871516 - DNA, 25 bp, Homo sapien
cagatccaaagactgcctcttgggc

SEQ ID NO: 871517 - DNA, 25 bp, Homo sapien
catagcagcagcgacactcaatcag

SEQ ID NO: 871518 - DNA, 25 bp, Homo sapien
cgaatggaaattccccatagcagca

SEQ ID NO: 871519 - DNA, 25 bp, Homo sapien
tgtagggcaagcaaaaagtcttcat

SEQ ID NO: 871520 - DNA, 25 bp, Homo sapien
gtagggcaagcaaaaagtcttcatg

SEQ ID NO: 871521 - DNA, 25 bp, Homo sapien
ctgtagggcaagcaaaaagtcttca

SEQ ID NO: 871522 - DNA, 25 bp, Homo sapien
gattttctgctcatagaactcctgc

SEQ ID NO: 871523 - DNA, 25 bp, Homo sapien
tgccatctctttgattttctgctca

SEQ ID NO: 871524 - DNA, 25 bp, Homo sapien
tttctgctcatagaactcctgctct

SEQ ID NO: 871525 - DNA, 25 bp, Homo sapien
tctttgattttctgctcatagaact

SEQ ID NO: 871526 - DNA, 25 bp, Homo sapien
gagcacgtcggtcataggacctaca

SEQ ID NO: 871527 - DNA, 25 bp, Homo sapien
aaggagagcacgtcggtcataggac

SEQ ID NO: 871528 - DNA, 25 bp, Homo sapien
caatgtcgtcgcttattttcaagaa

SEQ ID NO: 871529 - DNA, 25 bp, Homo sapien
gtcataggacctacaatgtcgtcgc

SEQ ID NO: 871530 - DNA, 25 bp, Homo sapien
ttccactggtttctggtgacagctc

SEQ ID NO: 871531 - DNA, 25 bp, Homo sapien
aaatcaatgtaagaatactggttca

SEQ ID NO: 871532 - DNA, 25 bp, Homo sapien
ttgaaatcaatgtaagaatactggt

SEQ ID NO: 871533 - DNA, 25 bp, Homo sapien
ggtgacagctcctgccattttttaa

SEQ ID NO: 871534 - DNA, 25 bp, Homo sapien
caaggtctctgctggtgcgtgcgct

SEQ ID NO: 871535 - DNA, 25 bp, Homo sapien
gtagctgcccactctcttctgaggg

SEQ ID NO: 871536 - DNA, 25 bp, Homo sapien
caatttaacggcagtaagagcgacc

SEQ ID NO: 871537 - DNA, 25 bp, Homo sapien
ccttcatggaagacgcctgtgttac

SEQ ID NO: 871538 - DNA, 25 bp, Homo sapien
tcgggtgattgcatagtgtcctttg

SEQ ID NO: 871539 - DNA, 25 bp, Homo sapien
gtgtcctttgagctcgtgcagggcc

SEQ ID NO: 871540 - DNA, 25 bp, Homo sapien
gactactgagcactttgaagtcggc

SEQ ID NO: 871541 - DNA, 25 bp, Homo sapien
ctttcgggtgattgcatagtgtcct

SEQ ID NO: 871542 - DNA, 25 bp, Homo sapien
cagcgctggtcaagaggggtcaatt

SEQ ID NO: 871543 - DNA, 25 bp, Homo sapien
cttggatgaagcagcgctggtcaag

SEQ ID NO: 871544 - DNA, 25 bp, Homo sapien
tagtcaaaaaagtctattttaggca

SEQ ID NO: 871545 - DNA, 25 bp, Homo sapien
tcaagaggggtcaatttagaatagt

SEQ ID NO: 871546 - DNA, 25 bp, Homo sapien
ttggctggccagcagactgctactg

SEQ ID NO: 871547 - DNA, 25 bp, Homo sapien
ctttgtctcatcttggctggccagc

SEQ ID NO: 871548 - DNA, 25 bp, Homo sapien
tggataatctgggttttccagaaga

SEQ ID NO: 871549 - DNA, 25 bp, Homo sapien
tactgggatttataatgattctgtc

SEQ ID NO: 871550 - DNA, 25 bp, Homo sapien
aacccatttgctacatctggaaatc

SEQ ID NO: 871551 - DNA, 25 bp, Homo sapien
tatttcctcaataaacccatttgct

SEQ ID NO: 871552 - DNA, 25 bp, Homo sapien
cccatttgctacatctggaaatctt

SEQ ID NO: 871553 - DNA, 25 bp, Homo sapien
atttgctacatctggaaatcttgct

SEQ ID NO: 871554 - DNA, 25 bp, Homo sapien
ttttacagatccattcttcattgct

SEQ ID NO: 871555 - DNA, 25 bp, Homo sapien
tcactagaatggtttcaaatggcaa

SEQ ID NO: 871556 - DNA, 25 bp, Homo sapien
cttcaaattcaacactagttcccag

SEQ ID NO: 871557 - DNA, 25 bp, Homo sapien
tgtctacatagaagatgaggtctag

SEQ ID NO: 871558 - DNA, 25 bp, Homo sapien
cactagtagttcaacgagctcttga

SEQ ID NO: 871559 - DNA, 25 bp, Homo sapien
caaattgggctcttgagattcttgc

SEQ ID NO: 871560 - DNA, 25 bp, Homo sapien
ttcttgcattggaaaggctggacct

SEQ ID NO: 871561 - DNA, 25 bp, Homo sapien
atgttttccaaattgggctcttgag

SEQ ID NO: 871562 - DNA, 25 bp, Homo sapien
aggagaagaggggcctgaaatccca

SEQ ID NO: 871563 - DNA, 25 bp, Homo sapien
ggagaagaggggcctgaaatcccac

SEQ ID NO: 871564 - DNA, 25 bp, Homo sapien
gctgaggagaagaggggcctgaaat

SEQ ID NO: 871565 - DNA, 25 bp, Homo sapien
tgaggagaagaggggcctgaaatcc

SEQ ID NO: 871566 - DNA, 25 bp, Homo sapien
tgctgaaacaacaagcggcccagtt

SEQ ID NO: 871567 - DNA, 25 bp, Homo sapien
aaagcgggccctgggaattcatgct

SEQ ID NO: 871568 - DNA, 25 bp, Homo sapien
taaccagcagtcttcttcgatggcc

SEQ ID NO: 871569 - DNA, 25 bp, Homo sapien
tggcctgatcatctgctagagcagc

SEQ ID NO: 871570 - DNA, 25 bp, Homo sapien
caggaggcccaagatccagaaattc

SEQ ID NO: 871571 - DNA, 25 bp, Homo sapien
catttgctgcttggttatgactcgg

SEQ ID NO: 871572 - DNA, 25 bp, Homo sapien
tatgactcggtccaggcttgggttc

SEQ ID NO: 871573 - DNA, 25 bp, Homo sapien
gaaattcaccgtagtcatcctcaga

SEQ ID NO: 871574 - DNA, 25 bp, Homo sapien
tgctgctctagactttttaggcctt

SEQ ID NO: 871575 - DNA, 25 bp, Homo sapien
gtttgatgagattgggtcgtgatct

SEQ ID NO: 871576 - DNA, 25 bp, Homo sapien
cacactgaaaaatagctgctcttat

SEQ ID NO: 871577 - DNA, 25 bp, Homo sapien
gtgccccagaatcaaacaatgggtt

SEQ ID NO: 871578 - DNA, 25 bp, Homo sapien
aactctatcgaaaaagggcatatac

SEQ ID NO: 871579 - DNA, 25 bp, Homo sapien
gaaggatacatgctaaactggtaac

SEQ ID NO: 871580 - DNA, 25 bp, Homo sapien
tactgaaatgggaagcttcactaag

SEQ ID NO: 871581 - DNA, 25 bp, Homo sapien
aaaaaagcctagagacattgtgaag

SEQ ID NO: 871582 - DNA, 25 bp, Homo sapien
cagttgatggcgcttcttgcttgca

SEQ ID NO: 871583 - DNA, 25 bp, Homo sapien
tggacaaatctacgcaaatcgcaag

SEQ ID NO: 871584 - DNA, 25 bp, Homo sapien
cacagagttcactaggatggccaat

SEQ ID NO: 871585 - DNA, 25 bp, Homo sapien
cccagtcatgggatgcgagattacc

SEQ ID NO: 871586 - DNA, 25 bp, Homo sapien
agatatggtgatgggcccatctcgg

SEQ ID NO: 871587 - DNA, 25 bp, Homo sapien
gaggagtcagatatggtgatgggcc

SEQ ID NO: 871588 - DNA, 25 bp, Homo sapien
ggtgaccagcattggaatcctttcc

SEQ ID NO: 871589 - DNA, 25 bp, Homo sapien
gggtgaccagcattggaatcctttc

SEQ ID NO: 871590 - DNA, 25 bp, Homo sapien
caaagggccatctgtgtataatcac

SEQ ID NO: 871591 - DNA, 25 bp, Homo sapien
gaggatttctaattgcgcagataag

SEQ ID NO: 871592 - DNA, 25 bp, Homo sapien
gctctatgaattaatacaaagggcc

SEQ ID NO: 871593 - DNA, 25 bp, Homo sapien
cacagcatggtctataaatcaagtg

SEQ ID NO: 871594 - DNA, 25 bp, Homo sapien
tccccgatggcagtgaaagttgttc

SEQ ID NO: 871595 - DNA, 25 bp, Homo sapien
ccccgatggcagtgaaagttgttca

SEQ ID NO: 871596 - DNA, 25 bp, Homo sapien
catatatgggactgctaatatctaa

SEQ ID NO: 871597 - DNA, 25 bp, Homo sapien
aaatgcagacatgcatatatgggac

SEQ ID NO: 871598 - DNA, 25 bp, Homo sapien
gacatgcatatatgggactgctaat

SEQ ID NO: 871599 - DNA, 25 bp, Homo sapien
tatgggactgctaatatctaaacat

SEQ ID NO: 871600 - DNA, 25 bp, Homo sapien
tgcaacatcccctccagagttcaag

SEQ ID NO: 871601 - DNA, 25 bp, Homo sapien
taggttggtcttgaaatgccgacct

SEQ ID NO: 871602 - DNA, 25 bp, Homo sapien
gcctcccaagttacaggcatgttgc

SEQ ID NO: 871603 - DNA, 25 bp, Homo sapien
ccatcttaggttggtcttgaaatgc

SEQ ID NO: 871604 - DNA, 25 bp, Homo sapien
aatcaaagttgacctagacgctgag

SEQ ID NO: 871605 - DNA, 25 bp, Homo sapien
tgggatctgtgtatgtcactggcca

SEQ ID NO: 871606 - DNA, 25 bp, Homo sapien
tctgtgtatgtcactggccatcagg

SEQ ID NO: 871607 - DNA, 25 bp, Homo sapien
gacgctgagatcaggtgaccacagg

SEQ ID NO: 871608 - DNA, 25 bp, Homo sapien
gatggaggacaaacaacagctggag

SEQ ID NO: 871609 - DNA, 25 bp, Homo sapien
aattcatgggtcttcctcacaaggg

SEQ ID NO: 871610 - DNA, 25 bp, Homo sapien
tataagaccctgtgcctgactattg

SEQ ID NO: 871611 - DNA, 25 bp, Homo sapien
ccccttccaggagtaacagcttgaa

SEQ ID NO: 871612 - DNA, 25 bp, Homo sapien
gcttactcctcagaagccgcagctg

SEQ ID NO: 871613 - DNA, 25 bp, Homo sapien
gctaccgcgccgcttactcctcaga

SEQ ID NO: 871614 - DNA, 25 bp, Homo sapien
gcaggttcggcggccttcgctaccg

SEQ ID NO: 871615 - DNA, 25 bp, Homo sapien
aggttcggcggccttcgctaccgcg

SEQ ID NO: 871616 - DNA, 25 bp, Homo sapien
tggaggaccgccattattcacaatt

SEQ ID NO: 871617 - DNA, 25 bp, Homo sapien
ccaagaactgtcatcagccgtatct

SEQ ID NO: 871618 - DNA, 25 bp, Homo sapien
gccgtatctacatgaaggtgtgctg

SEQ ID NO: 871619 - DNA, 25 bp, Homo sapien
catcagccgtatctacatgaaggtg

SEQ ID NO: 871620 - DNA, 25 bp, Homo sapien
gacttgcgtaggagagcagacacga

SEQ ID NO: 871621 - DNA, 25 bp, Homo sapien
tttgtgctgcgaatgggaccttccg

SEQ ID NO: 871622 - DNA, 25 bp, Homo sapien
gatcccctccttgtgttgacggctg

SEQ ID NO: 871623 - DNA, 25 bp, Homo sapien
gcagacacgaggacatgagccagtt

SEQ ID NO: 871624 - DNA, 25 bp, Homo sapien
cccctcgtgtcaggagacctttaag

SEQ ID NO: 871625 - DNA, 25 bp, Homo sapien
cgtgtcaggagacctttaagcctga

SEQ ID NO: 871626 - DNA, 25 bp, Homo sapien
ctcgtgtcaggagacctttaagcct

SEQ ID NO: 871627 - DNA, 25 bp, Homo sapien
cctcgtgtcaggagacctttaagcc

SEQ ID NO: 871628 - DNA, 25 bp, Homo sapien
tggtctcagcagttgatcgggagcc

SEQ ID NO: 871629 - DNA, 25 bp, Homo sapien
cagttgatcgggagcccacgggcaa

SEQ ID NO: 871630 - DNA, 25 bp, Homo sapien
gcaagcgtggcctctcatatcctct

SEQ ID NO: 871631 - DNA, 25 bp, Homo sapien
ccacgggcaagcgtggcctctcata

SEQ ID NO: 871632 - DNA, 25 bp, Homo sapien
tgtcccaaaaagagaagatctaagg

SEQ ID NO: 871633 - DNA, 25 bp, Homo sapien
ccaaaaagagaagatctaaggccag

SEQ ID NO: 871634 - DNA, 25 bp, Homo sapien
tcccaaaaagagaagatctaaggcc

SEQ ID NO: 871635 - DNA, 25 bp, Homo sapien
aagagaagatctaaggccaggggca

SEQ ID NO: 871636 - DNA, 25 bp, Homo sapien
ggcccaagttcaagacttgcctggg

SEQ ID NO: 871637 - DNA, 25 bp, Homo sapien
aggcccaagttcaagacttgcctgg

SEQ ID NO: 871638 - DNA, 25 bp, Homo sapien
ttgattgatgctgatcaccaagttt

SEQ ID NO: 871639 - DNA, 25 bp, Homo sapien
attgattgatgctgatcaccaagtt

SEQ ID NO: 871640 - DNA, 25 bp, Homo sapien
gcattgattgatgctgatcaccaag

SEQ ID NO: 871641 - DNA, 25 bp, Homo sapien
cattgattgatgctgatcaccaagt

SEQ ID NO: 871642 - DNA, 25 bp, Homo sapien
cttcttctctgttcgaaacttgaaa

SEQ ID NO: 871643 - DNA, 25 bp, Homo sapien
acttcttctctgttcgaaacttgaa

SEQ ID NO: 871644 - DNA, 25 bp, Homo sapien
gctgcagggaatgcggaaaggcctt

SEQ ID NO: 871645 - DNA, 25 bp, Homo sapien
cctttttccagaagtcacacctcat

SEQ ID NO: 871646 - DNA, 25 bp, Homo sapien
gcctttttccagaagtcacacctca

SEQ ID NO: 871647 - DNA, 25 bp, Homo sapien
ctgcagggaatgcggaaaggccttt

SEQ ID NO: 871648 - DNA, 25 bp, Homo sapien
gacacccaatcggcagagcgccctg

SEQ ID NO: 871649 - DNA, 25 bp, Homo sapien
ttgacttgctccgttgccagcctgg

SEQ ID NO: 871650 - DNA, 25 bp, Homo sapien
tgctgcccagagctcccgggttcaa

SEQ ID NO: 871651 - DNA, 25 bp, Homo sapien
ctgatggttccctgcacccaggagg

SEQ ID NO: 871652 - DNA, 25 bp, Homo sapien
taaaaagaacagtctagcacagtgc

SEQ ID NO: 871653 - DNA, 25 bp, Homo sapien
attaaaaagaacagtctagcacagt

SEQ ID NO: 871654 - DNA, 25 bp, Homo sapien
aaaaagaacagtctagcacagtgct

SEQ ID NO: 871655 - DNA, 25 bp, Homo sapien
aaaagaacagtctagcacagtgctg

SEQ ID NO: 871656 - DNA, 25 bp, Homo sapien
acgtgccacaacgctgagctaagtt

SEQ ID NO: 871657 - DNA, 25 bp, Homo sapien
gtgccacaacgctgagctaagtttt

SEQ ID NO: 871658 - DNA, 25 bp, Homo sapien
tgccacaacgctgagctaagttttg

SEQ ID NO: 871659 - DNA, 25 bp, Homo sapien
cacgtgccacaacgctgagctaagt

SEQ ID NO: 871660 - DNA, 25 bp, Homo sapien
tgttgacatccagggaagctcacct

SEQ ID NO: 871661 - DNA, 25 bp, Homo sapien
agcccagtgagtgtttccccatcga

SEQ ID NO: 871662 - DNA, 25 bp, Homo sapien
tcacctgagcctcgagatccagaga

SEQ ID NO: 871663 - DNA, 25 bp, Homo sapien
gatatctttgggcaatgctggcttg

SEQ ID NO: 871664 - DNA, 25 bp, Homo sapien
agacagcagtggtacctctctcggg

SEQ ID NO: 871665 - DNA, 25 bp, Homo sapien
tttcacggtgagataggtcttcgcc

SEQ ID NO: 871666 - DNA, 25 bp, Homo sapien
tatagaggcatagagaggagccctg

SEQ ID NO: 871667 - DNA, 25 bp, Homo sapien
tagtcagcagtagagtgtgggcatc

SEQ ID NO: 871668 - DNA, 25 bp, Homo sapien
tatgacaagaccttcctgtagcaca

SEQ ID NO: 871669 - DNA, 25 bp, Homo sapien
gaaaactatgacaagaccttcctgt

SEQ ID NO: 871670 - DNA, 25 bp, Homo sapien
tctgttccttggaaaactatgacaa

SEQ ID NO: 871671 - DNA, 25 bp, Homo sapien
gaacaaatcatgactgttgagattc

SEQ ID NO: 871672 - DNA, 25 bp, Homo sapien
aaaacatatcttttgtagggagaag

SEQ ID NO: 871673 - DNA, 25 bp, Homo sapien
ataaaaacatatcttttgtagggag

SEQ ID NO: 871674 - DNA, 25 bp, Homo sapien
taaaaacatatcttttgtagggaga

SEQ ID NO: 871675 - DNA, 25 bp, Homo sapien
taatgcaagcctgatctaaactgtg

SEQ ID NO: 871676 - DNA, 25 bp, Homo sapien
agatgccccacgtgtacactgtgtg

SEQ ID NO: 871677 - DNA, 25 bp, Homo sapien
cattgtgcgcactagaaacatcagt

SEQ ID NO: 871678 - DNA, 25 bp, Homo sapien
aatacctgtgttagtcattgtgcgc

SEQ ID NO: 871679 - DNA, 25 bp, Homo sapien
tgtgcaacgcagttcaacaacatct

SEQ ID NO: 871680 - DNA, 25 bp, Homo sapien
tcttcttggattgacggatgacggc

SEQ ID NO: 871681 - DNA, 25 bp, Homo sapien
tgaagaatcacatttcgactcggtc

SEQ ID NO: 871682 - DNA, 25 bp, Homo sapien
catatgacggactgcattcaggaca

SEQ ID NO: 871683 - DNA, 25 bp, Homo sapien
taagaactgtaatgctcaggaaatc

SEQ ID NO: 871684 - DNA, 25 bp, Homo sapien
gaactcccgtaatccagccatgtag

SEQ ID NO: 871685 - DNA, 25 bp, Homo sapien
tcaggaaatcttacagcacgtgcca

SEQ ID NO: 871686 - DNA, 25 bp, Homo sapien
gccatgtaggaaacctgagatgcag

SEQ ID NO: 871687 - DNA, 25 bp, Homo sapien
tgagaggatgacacgtctgccggct

SEQ ID NO: 871688 - DNA, 25 bp, Homo sapien
tcctccttgggagggtccagtatga

SEQ ID NO: 871689 - DNA, 25 bp, Homo sapien
tggatggggacacggtcacatcctc

SEQ ID NO: 871690 - DNA, 25 bp, Homo sapien
gatgacacgtctgccggctccttga

SEQ ID NO: 871691 - DNA, 25 bp, Homo sapien
cacctcatagtcatgtctcttggcc

SEQ ID NO: 871692 - DNA, 25 bp, Homo sapien
cttgcttccagttcgtcatcttcca

SEQ ID NO: 871693 - DNA, 25 bp, Homo sapien
catgaaagagcgtgttcacaaagaa

SEQ ID NO: 871694 - DNA, 25 bp, Homo sapien
gctacgtaacctgtctgcccttatt

SEQ ID NO: 871695 - DNA, 25 bp, Homo sapien
gggcctgtgctgtgctacgtaacct

SEQ ID NO: 871696 - DNA, 25 bp, Homo sapien
gatagcttcttcacgtttatacgca

SEQ ID NO: 871697 - DNA, 25 bp, Homo sapien
gatcatccttgggtctctcatattt

SEQ ID NO: 871698 - DNA, 25 bp, Homo sapien
tctcgatcatccttgggtctctcat

SEQ ID NO: 871699 - DNA, 25 bp, Homo sapien
ctctcgatcatccttgggtctctca

SEQ ID NO: 871700 - DNA, 25 bp, Homo sapien
tcgatcatccttgggtctctcatat

SEQ ID NO: 871701 - DNA, 25 bp, Homo sapien
ctcagatgagaaaaaggtgatccct

SEQ ID NO: 871702 - DNA, 25 bp, Homo sapien
tgacttacagacttcttgatcttgg

SEQ ID NO: 871703 - DNA, 25 bp, Homo sapien
tgagaaaaaggtgatcccttttcca

SEQ ID NO: 871704 - DNA, 25 bp, Homo sapien
cattttggagactctttcatgactt

SEQ ID NO: 871705 - DNA, 25 bp, Homo sapien
ttaacatcaggcgagagttctaact

SEQ ID NO: 871706 - DNA, 25 bp, Homo sapien
ttttgttaacatcaggcgagagttc

SEQ ID NO: 871707 - DNA, 25 bp, Homo sapien
tgagcagcatccgattcgtggctca

SEQ ID NO: 871708 - DNA, 25 bp, Homo sapien
catgaccgcgctgggactcttgttc

SEQ ID NO: 871709 - DNA, 25 bp, Homo sapien
ctaattctaagatattatgtgttac

SEQ ID NO: 871710 - DNA, 25 bp, Homo sapien
gatttagtcatttggtcagtaacac

SEQ ID NO: 871711 - DNA, 25 bp, Homo sapien
gcaaagcttaagagagcttcaaaga

SEQ ID NO: 871712 - DNA, 25 bp, Homo sapien
atgcaaagcttaagagagcttcaaa

SEQ ID NO: 871713 - DNA, 25 bp, Homo sapien
tggaacatttgtataggatttagtc

SEQ ID NO: 871714 - DNA, 25 bp, Homo sapien
tccatcatatatgaaacgattatcc

SEQ ID NO: 871715 - DNA, 25 bp, Homo sapien
gattatcctctgctatgacctccat

SEQ ID NO: 871716 - DNA, 25 bp, Homo sapien
caaagttgctgtcaattccatcata

SEQ ID NO: 871717 - DNA, 25 bp, Homo sapien
ccataaatgtagctgctgttaattc

SEQ ID NO: 871718 - DNA, 25 bp, Homo sapien
gcatatcacagctggaatatcctgc

SEQ ID NO: 871719 - DNA, 25 bp, Homo sapien
taaaatcaaagtgcctgtaaataga

SEQ ID NO: 871720 - DNA, 25 bp, Homo sapien
tcacagctggaatatcctgcctttc

SEQ ID NO: 871721 - DNA, 25 bp, Homo sapien
tgtaaatagaaagccaatatcgaac

SEQ ID NO: 871722 - DNA, 25 bp, Homo sapien
tctcatcttcatcgtaggctcgtgg

SEQ ID NO: 871723 - DNA, 25 bp, Homo sapien
gcatccagaggaagtgtctcatctt

SEQ ID NO: 871724 - DNA, 25 bp, Homo sapien
gggtctgcagtaagcgagataaatc

SEQ ID NO: 871725 - DNA, 25 bp, Homo sapien
ctcatagagtagagcgtccgctgtt

SEQ ID NO: 871726 - DNA, 25 bp, Homo sapien
aggcatttggacgaatgttctcggt

SEQ ID NO: 871727 - DNA, 25 bp, Homo sapien
tttggacgaatgttctcggtcatca

SEQ ID NO: 871728 - DNA, 25 bp, Homo sapien
aatgttctcggtcatcagttttgta

SEQ ID NO: 871729 - DNA, 25 bp, Homo sapien
ggacgaatgttctcggtcatcagtt

SEQ ID NO: 871730 - DNA, 25 bp, Homo sapien
tggaattcttcatgataaatgtggt

SEQ ID NO: 871731 - DNA, 25 bp, Homo sapien
aatggatttcttcaactggtatgtc

SEQ ID NO: 871732 - DNA, 25 bp, Homo sapien
atgcaggaggtaattcaaaaatgtt

SEQ ID NO: 871733 - DNA, 25 bp, Homo sapien
atgataaatgtggtacgccaaatgc

SEQ ID NO: 871734 - DNA, 25 bp, Homo sapien
aagatgtgaaggatctggaacactc

SEQ ID NO: 871735 - DNA, 25 bp, Homo sapien
aaaagatgtgaaggatctggaacac

SEQ ID NO: 871736 - DNA, 25 bp, Homo sapien
caaaagatgtgaaggatctggaaca

SEQ ID NO: 871737 - DNA, 25 bp, Homo sapien
gatgtgaaggatctggaacactcac

SEQ ID NO: 871738 - DNA, 25 bp, Homo sapien
tctccagaagtgaagctttgtcatc

SEQ ID NO: 871739 - DNA, 25 bp, Homo sapien
tcctgtccatatcagcaagagttag

SEQ ID NO: 871740 - DNA, 25 bp, Homo sapien
tatttcttaagacggcatattccac

SEQ ID NO: 871741 - DNA, 25 bp, Homo sapien
ggtattatccagagagtggccgcat

SEQ ID NO: 871742 - DNA, 25 bp, Homo sapien
gaaagtcatacgtggattaagaaca

SEQ ID NO: 871743 - DNA, 25 bp, Homo sapien
gtcatacgtggattaagaacaaaag

SEQ ID NO: 871744 - DNA, 25 bp, Homo sapien
catacgtggattaagaacaaaagac

SEQ ID NO: 871745 - DNA, 25 bp, Homo sapien
ggaagaaagtcatacgtggattaag

SEQ ID NO: 871746 - DNA, 25 bp, Homo sapien
gttggactgtctcagggtacatgtc

SEQ ID NO: 871747 - DNA, 25 bp, Homo sapien
ctttcactgccatcaagctttctga

SEQ ID NO: 871748 - DNA, 25 bp, Homo sapien
tgctcgatcccaacacagaatgact

SEQ ID NO: 871749 - DNA, 25 bp, Homo sapien
tttagatccagctcaatgctcgatc

SEQ ID NO: 871750 - DNA, 25 bp, Homo sapien
ggtccaggcagctgatgaattcaac

SEQ ID NO: 871751 - DNA, 25 bp, Homo sapien
ggagaatgcgccttcgtacacacgc

SEQ ID NO: 871752 - DNA, 25 bp, Homo sapien
cacacgcccgttcttgaaagttaat

SEQ ID NO: 871753 - DNA, 25 bp, Homo sapien
tcaacttcaagatccggaaacccag

SEQ ID NO: 871754 - DNA, 25 bp, Homo sapien
acgtccgtgacgatatccatttaca

SEQ ID NO: 871755 - DNA, 25 bp, Homo sapien
gaaacccattctccatcatacatgg

SEQ ID NO: 871756 - DNA, 25 bp, Homo sapien
cataataaaacttgccacgtccgtg

SEQ ID NO: 871757 - DNA, 25 bp, Homo sapien
tccatttacaaactcccctatgtat

SEQ ID NO: 871758 - DNA, 25 bp, Homo sapien
ctttagaaaccatgtgtgtgttcca

SEQ ID NO: 871759 - DNA, 25 bp, Homo sapien
tagaaaccatgtgtgtgttccaaag

SEQ ID NO: 871760 - DNA, 25 bp, Homo sapien
ctgcggattctctttagaaaccatg

SEQ ID NO: 871761 - DNA, 25 bp, Homo sapien
aaccatgtgtgtgttccaaagccat

SEQ ID NO: 871762 - DNA, 25 bp, Homo sapien
gcagtttctctctttacccggatcc

SEQ ID NO: 871763 - DNA, 25 bp, Homo sapien
gccatcagaaatgcacaaagcagtt

SEQ ID NO: 871764 - DNA, 25 bp, Homo sapien
acaaagcagtttctctctttacccg

SEQ ID NO: 871765 - DNA, 25 bp, Homo sapien
tgaaaagaaagcacactgccatcag

SEQ ID NO: 871766 - DNA, 25 bp, Homo sapien
caccgcccggtgtactcttcgttgg

SEQ ID NO: 871767 - DNA, 25 bp, Homo sapien
tgtactcttcgttggtggtcagcca

SEQ ID NO: 871768 - DNA, 25 bp, Homo sapien
cgcccggtgtactcttcgttggtgg

SEQ ID NO: 871769 - DNA, 25 bp, Homo sapien
ccggtgtactcttcgttggtggtca

SEQ ID NO: 871770 - DNA, 25 bp, Homo sapien
ctcatcctcccctccccgtggcgca

SEQ ID NO: 871771 - DNA, 25 bp, Homo sapien
tcatcctcccctccccgtggcgcat

SEQ ID NO: 871772 - DNA, 25 bp, Homo sapien
ccactggccttcgtatatatttcca

SEQ ID NO: 871773 - DNA, 25 bp, Homo sapien
cttcccactggccttcgtatatatt

SEQ ID NO: 871774 - DNA, 25 bp, Homo sapien
tcccactggccttcgtatatatttc

SEQ ID NO: 871775 - DNA, 25 bp, Homo sapien
actggccttcgtatatatttccaga

SEQ ID NO: 871776 - DNA, 25 bp, Homo sapien
caacacgtaccctcttgattgtaat

SEQ ID NO: 871777 - DNA, 25 bp, Homo sapien
tcgtaccaacacgtaccctcttgat

SEQ ID NO: 871778 - DNA, 25 bp, Homo sapien
taccaacacgtaccctcttgattgt

SEQ ID NO: 871779 - DNA, 25 bp, Homo sapien
cagtctccctcgtaccaacacgtac

SEQ ID NO: 871780 - DNA, 25 bp, Homo sapien
gaatccgttcctcatgccgttgacc

SEQ ID NO: 871781 - DNA, 25 bp, Homo sapien
tgtacacgccgtggttcatcgggac

SEQ ID NO: 871782 - DNA, 25 bp, Homo sapien
cattgcaccagtggccgatgtagga

SEQ ID NO: 871783 - DNA, 25 bp, Homo sapien
ggtgctgcacttgaacatcccgaat

SEQ ID NO: 871784 - DNA, 25 bp, Homo sapien
agcacccagcagcatcggattctct

SEQ ID NO: 871785 - DNA, 25 bp, Homo sapien
ctgccagggaacgcgctctgcccag

SEQ ID NO: 871786 - DNA, 25 bp, Homo sapien
ccagggaacgcgctctgcccaggac

SEQ ID NO: 871787 - DNA, 25 bp, Homo sapien
gcacccagcagcatcggattctctt

SEQ ID NO: 871788 - DNA, 25 bp, Homo sapien
tccatgcatgagtccttctgaaaac

SEQ ID NO: 871789 - DNA, 25 bp, Homo sapien
tttaatccatcggcccaaatataag

SEQ ID NO: 871790 - DNA, 25 bp, Homo sapien
atccatcggcccaaatataagtccc

SEQ ID NO: 871791 - DNA, 25 bp, Homo sapien
ccctgtccatgcatgagtccttctg

SEQ ID NO: 871792 - DNA, 25 bp, Homo sapien
cctcatacagcccacgaaccttttc

SEQ ID NO: 871793 - DNA, 25 bp, Homo sapien
tacaaccgccttgaaaggctgcgaa

SEQ ID NO: 871794 - DNA, 25 bp, Homo sapien
acgataggtacaaccgccttgaaag

SEQ ID NO: 871795 - DNA, 25 bp, Homo sapien
gccttgaaaggctgcgaagccttct

SEQ ID NO: 871796 - DNA, 25 bp, Homo sapien
tggcatcttcgttctgctgaacgtt

SEQ ID NO: 871797 - DNA, 25 bp, Homo sapien
ttcacttcgttgagctgcattccca

SEQ ID NO: 871798 - DNA, 25 bp, Homo sapien
ttccactatgagtttggtcagaatg

SEQ ID NO: 871799 - DNA, 25 bp, Homo sapien
ggtcagaatggactcttcgtattgg

SEQ ID NO: 871800 - DNA, 25 bp, Homo sapien
tggtgttgccatcttgtttggaaaa

SEQ ID NO: 871801 - DNA, 25 bp, Homo sapien
ctcttgcctagtggtgttgccatct

SEQ ID NO: 871802 - DNA, 25 bp, Homo sapien
tgcctagtggtgttgccatcttgtt

SEQ ID NO: 871803 - DNA, 25 bp, Homo sapien
cttgcctagtggtgttgccatcttg

SEQ ID NO: 871804 - DNA, 25 bp, Homo sapien
agacttctccccttttttgtctgct

SEQ ID NO: 871805 - DNA, 25 bp, Homo sapien
ctagattatcagagagagatgaggg

SEQ ID NO: 871806 - DNA, 25 bp, Homo sapien
gcagacttctccccttttttgtctg

SEQ ID NO: 871807 - DNA, 25 bp, Homo sapien
agagagatgagggagagcgggcaga

SEQ ID NO: 871808 - DNA, 25 bp, Homo sapien
tggttacttgaatcaaatgatttct

SEQ ID NO: 871809 - DNA, 25 bp, Homo sapien
gatccaatggttacttgaatcaaat

SEQ ID NO: 871810 - DNA, 25 bp, Homo sapien
tttctttggttcagagctgcttgtt

SEQ ID NO: 871811 - DNA, 25 bp, Homo sapien
ccttgggaagatccaatggttactt

SEQ ID NO: 871812 - DNA, 25 bp, Homo sapien
acctgcgatctcagcacgttgaagg

SEQ ID NO: 871813 - DNA, 25 bp, Homo sapien
atcagcctaggccacgtagtgagat

SEQ ID NO: 871814 - DNA, 25 bp, Homo sapien
ggccacgtagtgagatgccacctct

SEQ ID NO: 871815 - DNA, 25 bp, Homo sapien
gatctcagcacgttgaagggccaag

SEQ ID NO: 871816 - DNA, 25 bp, Homo sapien
ttgagtgattatctcgtccctttcc

SEQ ID NO: 871817 - DNA, 25 bp, Homo sapien
ataaattgagtgattatctcgtccc

SEQ ID NO: 871818 - DNA, 25 bp, Homo sapien
tgattatctcgtccctttcctgttt

SEQ ID NO: 871819 - DNA, 25 bp, Homo sapien
tatctcgtccctttcctgttttcaa

SEQ ID NO: 871820 - DNA, 25 bp, Homo sapien
gagtgcctctcatatgccggacaag

SEQ ID NO: 871821 - DNA, 25 bp, Homo sapien
accggtgtgctggagttgcgtttcc

SEQ ID NO: 871822 - DNA, 25 bp, Homo sapien
tatttccagcgcatcgttgctcgag

SEQ ID NO: 871823 - DNA, 25 bp, Homo sapien
gcgtttccagcgcatggttgcttga

SEQ ID NO: 871824 - DNA, 25 bp, Homo sapien
caagccaatttcgtttctcagtgcg

SEQ ID NO: 871825 - DNA, 25 bp, Homo sapien
cgagcttttcggtcttctgtcagtg

SEQ ID NO: 871826 - DNA, 25 bp, Homo sapien
catctctctcctgtgtctacggtga

SEQ ID NO: 871827 - DNA, 25 bp, Homo sapien
cctgggcttaaggagaggccatctc

SEQ ID NO: 871828 - DNA, 25 bp, Homo sapien
ggctccggtctccaggcaaccgcgg

SEQ ID NO: 871829 - DNA, 25 bp, Homo sapien
ggtgttgccgggctctcggcgtccc

SEQ ID NO: 871830 - DNA, 25 bp, Homo sapien
gctgaggtgttgccgggctctcggc

SEQ ID NO: 871831 - DNA, 25 bp, Homo sapien
gttgccgggctctcggcgtcccaga

SEQ ID NO: 871832 - DNA, 25 bp, Homo sapien
caccagagaccggtttcgcggaaca

SEQ ID NO: 871833 - DNA, 25 bp, Homo sapien
gtaaattagtcccacagtgctggtt

SEQ ID NO: 871834 - DNA, 25 bp, Homo sapien
atttattaccctacagtatgtaaat

SEQ ID NO: 871835 - DNA, 25 bp, Homo sapien
cagagaccggtttcgcggaacacaa

SEQ ID NO: 871836 - DNA, 25 bp, Homo sapien
ttgaaggactcacccaatggactgg

SEQ ID NO: 871837 - DNA, 25 bp, Homo sapien
tctgtgtccggagtgttggaatccc

SEQ ID NO: 871838 - DNA, 25 bp, Homo sapien
taatgcccaccgctgatgtgacagg

SEQ ID NO: 871839 - DNA, 25 bp, Homo sapien
gaatccctgttctagagactgcttg

SEQ ID NO: 871840 - DNA, 25 bp, Homo sapien
cttggccgcacagaggaatgtttca

SEQ ID NO: 871841 - DNA, 25 bp, Homo sapien
tgtttcaaatagtgacccctgtccc

SEQ ID NO: 871842 - DNA, 25 bp, Homo sapien
tattcccagaaccattcaaggccag

SEQ ID NO: 871843 - DNA, 25 bp, Homo sapien
ggacagcattttgcgaccttggccg

SEQ ID NO: 871844 - DNA, 25 bp, Homo sapien
taaaaccaattattccatacagtga

SEQ ID NO: 871845 - DNA, 25 bp, Homo sapien
tttgaaaaggttctcaagatcactt

SEQ ID NO: 871846 - DNA, 25 bp, Homo sapien
aacataaaaatctgcgataaaacca

SEQ ID NO: 871847 - DNA, 25 bp, Homo sapien
tgcaagcaatgctccatctggtttg

SEQ ID NO: 871848 - DNA, 25 bp, Homo sapien
cccaggttggcgatgtgtctcatgg

SEQ ID NO: 871849 - DNA, 25 bp, Homo sapien
cttcatctcgcttgtgttaagagca

SEQ ID NO: 871850 - DNA, 25 bp, Homo sapien
gtgttaagagcagtcccaatcatca

SEQ ID NO: 871851 - DNA, 25 bp, Homo sapien
ccccatgtgggtgatcagtttcttc

SEQ ID NO: 871852 - DNA, 25 bp, Homo sapien
gacacaatggttcaacgttttagta

SEQ ID NO: 871853 - DNA, 25 bp, Homo sapien
gttttttgacgtcagaatggcagct

SEQ ID NO: 871854 - DNA, 25 bp, Homo sapien
ttagtagttttttgacgtcagaatg

SEQ ID NO: 871855 - DNA, 25 bp, Homo sapien
cacaatggttcaacgttttagtagt

SEQ ID NO: 871856 - DNA, 25 bp, Homo sapien
agggctcgccatgtgccaagcacag

SEQ ID NO: 871857 - DNA, 25 bp, Homo sapien
ggacacaagcctgaagcccaatgtc

SEQ ID NO: 871858 - DNA, 25 bp, Homo sapien
ttttaaagggctgtcaggttattca

SEQ ID NO: 871859 - DNA, 25 bp, Homo sapien
ttgggactgtggcactcccgggacc

SEQ ID NO: 871860 - DNA, 25 bp, Homo sapien
tctgcccttgagtcatttcatctaa

SEQ ID NO: 871861 - DNA, 25 bp, Homo sapien
cgcccagcccctattaggtctttat

SEQ ID NO: 871862 - DNA, 25 bp, Homo sapien
tgggccctcttctaattaaactctg

SEQ ID NO: 871863 - DNA, 25 bp, Homo sapien
ccaagaaacactgtggctagaagtc

SEQ ID NO: 871864 - DNA, 25 bp, Homo sapien
tgcagaatcgtgtccaatgtcgccg

SEQ ID NO: 871865 - DNA, 25 bp, Homo sapien
caaggtacctcaaacgctaactgcg

SEQ ID NO: 871866 - DNA, 25 bp, Homo sapien
tgcgttggagtcaaccaaagctcgg

SEQ ID NO: 871867 - DNA, 25 bp, Homo sapien
caaagctcggagatagaatactggc

SEQ ID NO: 871868 - DNA, 25 bp, Homo sapien
agctgggctgagaccttcctcgact

SEQ ID NO: 871869 - DNA, 25 bp, Homo sapien
gagaccttcctcgactgcaagcttg

SEQ ID NO: 871870 - DNA, 25 bp, Homo sapien
tcctcgactgcaagcttgagcagct

SEQ ID NO: 871871 - DNA, 25 bp, Homo sapien
ggctgagaccttcctcgactgcaag

SEQ ID NO: 871872 - DNA, 25 bp, Homo sapien
gctgtcgctcagcatgaagatcagt

SEQ ID NO: 871873 - DNA, 25 bp, Homo sapien
ttgactcgggaaggccggcacatga

SEQ ID NO: 871874 - DNA, 25 bp, Homo sapien
ggcacatgaccccagggctgtcgct

SEQ ID NO: 871875 - DNA, 25 bp, Homo sapien
ggctctggaggcaaacatctgcttg

SEQ ID NO: 871876 - DNA, 25 bp, Homo sapien
agtttagccctttcagtgactggag

SEQ ID NO: 871877 - DNA, 25 bp, Homo sapien
tggcaaggaaatcagtttagccctt

SEQ ID NO: 871878 - DNA, 25 bp, Homo sapien
atacaattttgagaaaaatccatga

SEQ ID NO: 871879 - DNA, 25 bp, Homo sapien
aatacaattttgagaaaaatccatg

SEQ ID NO: 871880 - DNA, 25 bp, Homo sapien
agaatacaattttgagaaaaatcca

SEQ ID NO: 871881 - DNA, 25 bp, Homo sapien
gaatacaattttgagaaaaatccat

SEQ ID NO: 871882 - DNA, 25 bp, Homo sapien
attaacagcagttaagttgagagtc

SEQ ID NO: 871883 - DNA, 25 bp, Homo sapien
cattaacagcagttaagttgagagt

SEQ ID NO: 871884 - DNA, 25 bp, Homo sapien
tcattaacagcagttaagttgagag

SEQ ID NO: 871885 - DNA, 25 bp, Homo sapien
gccagcatttgtaaacagaatgaac

SEQ ID NO: 871886 - DNA, 25 bp, Homo sapien
aaagttcaagtagctacaaaagtag

SEQ ID NO: 871887 - DNA, 25 bp, Homo sapien
ctttccttaaggataacagtatcac

SEQ ID NO: 871888 - DNA, 25 bp, Homo sapien
cactgggttaggtcattgccagcat

SEQ ID NO: 871889 - DNA, 25 bp, Homo sapien
gaagatatcctcattcagtttggtt

SEQ ID NO: 871890 - DNA, 25 bp, Homo sapien
tattataaatcccaggttaaactga

SEQ ID NO: 871891 - DNA, 25 bp, Homo sapien
ggcatgctggtccactatgaagata

SEQ ID NO: 871892 - DNA, 25 bp, Homo sapien
cagcatctcgaagttatacttctcg

SEQ ID NO: 871893 - DNA, 25 bp, Homo sapien
ctacaggcatgcaccgccaagcccg

SEQ ID NO: 871894 - DNA, 25 bp, Homo sapien
ctgcaacctgcgcctcccaggttcg

SEQ ID NO: 871895 - DNA, 25 bp, Homo sapien
gcgcctcccaggttcgagcgattct

SEQ ID NO: 871896 - DNA, 25 bp, Homo sapien
actgcagtggcgtgaccgtggctca

SEQ ID NO: 871897 - DNA, 25 bp, Homo sapien
ttgtaagaggctcctacccactcag

SEQ ID NO: 871898 - DNA, 25 bp, Homo sapien
tcttgtaagaggctcctacccactc

SEQ ID NO: 871899 - DNA, 25 bp, Homo sapien
aactcttgtaagaggctcctaccca

SEQ ID NO: 871900 - DNA, 25 bp, Homo sapien
tggagcaggagtggccgcagcctgc

SEQ ID NO: 871901 - DNA, 25 bp, Homo sapien
ggcacaactttcttattaattttca

SEQ ID NO: 871902 - DNA, 25 bp, Homo sapien
cttagttcatcttcggctgcttgat

SEQ ID NO: 871903 - DNA, 25 bp, Homo sapien
tttattcgtttagctaaagaactca

SEQ ID NO: 871904 - DNA, 25 bp, Homo sapien
gctgtgcttcatgatgtaactgctt

SEQ ID NO: 871905 - DNA, 25 bp, Homo sapien
catcaacctgagaggctgacatgtc

SEQ ID NO: 871906 - DNA, 25 bp, Homo sapien
gggagctggccgcatactcgctgct

SEQ ID NO: 871907 - DNA, 25 bp, Homo sapien
agctggccgcatactcgctgctgca

SEQ ID NO: 871908 - DNA, 25 bp, Homo sapien
ctttgtgtttggggttgcgagatta

SEQ ID NO: 871909 - DNA, 25 bp, Homo sapien
aacgctttgtgtttggggttgcgag

SEQ ID NO: 871910 - DNA, 25 bp, Homo sapien
ctcgcagtctggaaatggacacgtc

SEQ ID NO: 871911 - DNA, 25 bp, Homo sapien
ctgttgtgtgacgaagagaaaaggc

SEQ ID NO: 871912 - DNA, 25 bp, Homo sapien
tttccaaatccgctgcatgcatttt

SEQ ID NO: 871913 - DNA, 25 bp, Homo sapien
tttctaccatgggcttttccaaatc

SEQ ID NO: 871914 - DNA, 25 bp, Homo sapien
tttatctggagtaacattgatatca

SEQ ID NO: 871915 - DNA, 25 bp, Homo sapien
gcttgttgacatcactatcaaacat

SEQ ID NO: 871916 - DNA, 25 bp, Homo sapien
ggagtaacattgatatcaacgcatt

SEQ ID NO: 871917 - DNA, 25 bp, Homo sapien
tagcttgttgacatcactatcaaac

SEQ ID NO: 871918 - DNA, 25 bp, Homo sapien
cgattatacatgtggtagacctcat

SEQ ID NO: 871919 - DNA, 25 bp, Homo sapien
gtgtcgattatacatgtggtagacc

SEQ ID NO: 871920 - DNA, 25 bp, Homo sapien
tgtggtagacctcattcacgagtct

SEQ ID NO: 871921 - DNA, 25 bp, Homo sapien
tacatgtggtagacctcattcacga

SEQ ID NO: 871922 - DNA, 25 bp, Homo sapien
tgtgtcagcctgacatgtaacttgg

SEQ ID NO: 871923 - DNA, 25 bp, Homo sapien
cctgtgtcagcctgacatgtaactt

SEQ ID NO: 871924 - DNA, 25 bp, Homo sapien
ctgtgtcagcctgacatgtaacttg

SEQ ID NO: 871925 - DNA, 25 bp, Homo sapien
cacaaggccgccggttgataaagaa

SEQ ID NO: 871926 - DNA, 25 bp, Homo sapien
aaaactgtctgtctgttgaactcct

SEQ ID NO: 871927 - DNA, 25 bp, Homo sapien
ccaactccatgcgtgcattgtgaaa

SEQ ID NO: 871928 - DNA, 25 bp, Homo sapien
tgctgggtcacaaggccgccggttg

SEQ ID NO: 871929 - DNA, 25 bp, Homo sapien
ttatgcagagcatcggaacagctca

SEQ ID NO: 871930 - DNA, 25 bp, Homo sapien
tgcagagcatcggaacagctcaaac

SEQ ID NO: 871931 - DNA, 25 bp, Homo sapien
agattatgcagagcatcggaacagc

SEQ ID NO: 871932 - DNA, 25 bp, Homo sapien
gagcatcggaacagctcaaaccgta

SEQ ID NO: 871933 - DNA, 25 bp, Homo sapien
ctagggggcagctgaacaaaaggaa

SEQ ID NO: 871934 - DNA, 25 bp, Homo sapien
gaacaaaaggaatgaggctttgcaa

SEQ ID NO: 871935 - DNA, 25 bp, Homo sapien
tcttcacacacggagtcactagggg

SEQ ID NO: 871936 - DNA, 25 bp, Homo sapien
cacacggagtcactagggggcagct

SEQ ID NO: 871937 - DNA, 25 bp, Homo sapien
gattggtgcaacttacacggatgcc

SEQ ID NO: 871938 - DNA, 25 bp, Homo sapien
tgcatgtaagacctggaccattttg

SEQ ID NO: 871939 - DNA, 25 bp, Homo sapien
tgtgcataccacaggctgtcgtttt

SEQ ID NO: 871940 - DNA, 25 bp, Homo sapien
cacggatgcctgctgaaatgataca

SEQ ID NO: 871941 - DNA, 25 bp, Homo sapien
gcatgagatctcacatccaaggata

SEQ ID NO: 871942 - DNA, 25 bp, Homo sapien
tgcatgagatctcacatccaaggat

SEQ ID NO: 871943 - DNA, 25 bp, Homo sapien
gatcttattctgtctcccagtctta

SEQ ID NO: 871944 - DNA, 25 bp, Homo sapien
cttattctgtctcccagtcttaagt

SEQ ID NO: 871945 - DNA, 25 bp, Homo sapien
tcttattctgtctcccagtcttaag

SEQ ID NO: 871946 - DNA, 25 bp, Homo sapien
aggatcttattctgtctcccagtct

SEQ ID NO: 871947 - DNA, 25 bp, Homo sapien
tgtgatcaaacatcagtcgagttcc

SEQ ID NO: 871948 - DNA, 25 bp, Homo sapien
ttgtgatcaaacatcagtcgagttc

SEQ ID NO: 871949 - DNA, 25 bp, Homo sapien
attgtgatcaaacatcagtcgagtt

SEQ ID NO: 871950 - DNA, 25 bp, Homo sapien
atatgtagggcagagcgtggtggct

SEQ ID NO: 871951 - DNA, 25 bp, Homo sapien
tatatgtagggcagagcgtggtggc

SEQ ID NO: 871952 - DNA, 25 bp, Homo sapien
gtatatgtagggcagagcgtggtgg

SEQ ID NO: 871953 - DNA, 25 bp, Homo sapien
attcagaagctagaagttgagatgt

SEQ ID NO: 871954 - DNA, 25 bp, Homo sapien
gaagctagaagttgagatgttgaga

SEQ ID NO: 871955 - DNA, 25 bp, Homo sapien
tgataatgaaaaccaatggtaacta

SEQ ID NO: 871956 - DNA, 25 bp, Homo sapien
tgagatgttgagatagaaaactgaa

SEQ ID NO: 871957 - DNA, 25 bp, Homo sapien
gtgcacaaagtgagctcagagcttc

SEQ ID NO: 871958 - DNA, 25 bp, Homo sapien
tcaacctgagttaggtcggcaaact

SEQ ID NO: 871959 - DNA, 25 bp, Homo sapien
cgaaagccaaaagtttcaacctgag

SEQ ID NO: 871960 - DNA, 25 bp, Homo sapien
aactcttgaatcttagatgtgtgat

SEQ ID NO: 871961 - DNA, 25 bp, Homo sapien
tctgaaacttcaataagatccactc

SEQ ID NO: 871962 - DNA, 25 bp, Homo sapien
cttcttctaccccacatccattgtc

SEQ ID NO: 871963 - DNA, 25 bp, Homo sapien
gatccactccatagtccttaagctt

SEQ ID NO: 871964 - DNA, 25 bp, Homo sapien
tgtctgaaacttcaataagatccac

SEQ ID NO: 871965 - DNA, 25 bp, Homo sapien
caattagctgtaaaccgcgttgcac

SEQ ID NO: 871966 - DNA, 25 bp, Homo sapien
attagctgtaaaccgcgttgcactt

SEQ ID NO: 871967 - DNA, 25 bp, Homo sapien
ctgtaaaccgcgttgcactttgacc

SEQ ID NO: 871968 - DNA, 25 bp, Homo sapien
agctgtaaaccgcgttgcactttga

SEQ ID NO: 871969 - DNA, 25 bp, Homo sapien
tcagtaccacctgcccagagcaaat

SEQ ID NO: 871970 - DNA, 25 bp, Homo sapien
tctactaactcctttaccgcagtgc

SEQ ID NO: 871971 - DNA, 25 bp, Homo sapien
gcagtgcttagactcagtaccacct

SEQ ID NO: 871972 - DNA, 25 bp, Homo sapien
cagactgttttctactaactccttt

SEQ ID NO: 871973 - DNA, 25 bp, Homo sapien
tttggcaacaatggtgtcttctttc

SEQ ID NO: 871974 - DNA, 25 bp, Homo sapien
caaattaccaaaatctttggcaaca

SEQ ID NO: 871975 - DNA, 25 bp, Homo sapien
accaaaatctttggcaacaatggtg

SEQ ID NO: 871976 - DNA, 25 bp, Homo sapien
cttctttcttgaaaagtgaaagcat

SEQ ID NO: 871977 - DNA, 25 bp, Homo sapien
ggagggagcgcatttagacacagac

SEQ ID NO: 871978 - DNA, 25 bp, Homo sapien
gcttcaagtccacggccctgtgatg

SEQ ID NO: 871979 - DNA, 25 bp, Homo sapien
gggatttcacgctcccgcttcaagt

SEQ ID NO: 871980 - DNA, 25 bp, Homo sapien
gcctgtctgggacaggccgaaccca

SEQ ID NO: 871981 - DNA, 25 bp, Homo sapien
gggacaccggaagactgcgagcccc

SEQ ID NO: 871982 - DNA, 25 bp, Homo sapien
tgcaacactgaggtcgccactccgg

SEQ ID NO: 871983 - DNA, 25 bp, Homo sapien
aaggcgcacccaaggggcacgagat

SEQ ID NO: 871984 - DNA, 25 bp, Homo sapien
ggaggttggaatgccgtgggtctca

SEQ ID NO: 871985 - DNA, 25 bp, Homo sapien
cagggctcccacaggcgctccgcct

SEQ ID NO: 871986 - DNA, 25 bp, Homo sapien
cacaggcgctccgcctcctgaactc

SEQ ID NO: 871987 - DNA, 25 bp, Homo sapien
gcgctccgcctcctgaactcccatt

SEQ ID NO: 871988 - DNA, 25 bp, Homo sapien
ctccgcctcctgaactcccattggc

SEQ ID NO: 871989 - DNA, 25 bp, Homo sapien
aacgtgcacggcaggagctacggcc

SEQ ID NO: 871990 - DNA, 25 bp, Homo sapien
cggagcgagcgcgtcccaaccggtt

SEQ ID NO: 871991 - DNA, 25 bp, Homo sapien
gcgttggcctttggcacgcgctacc

SEQ ID NO: 871992 - DNA, 25 bp, Homo sapien
tcgtgacctctgacggtttctgagc

SEQ ID NO: 871993 - DNA, 25 bp, Homo sapien
gactcagatgaggtgcaaccaggcc

SEQ ID NO: 871994 - DNA, 25 bp, Homo sapien
gcatgcgcggctgaaatgactgaga

SEQ ID NO: 871995 - DNA, 25 bp, Homo sapien
caatagcctcctctagaatgggtga

SEQ ID NO: 871996 - DNA, 25 bp, Homo sapien
cagatgagttttcgagcatgcgcgg

SEQ ID NO: 871997 - DNA, 25 bp, Homo sapien
tggttaggttcttagactcgcgccc

SEQ ID NO: 871998 - DNA, 25 bp, Homo sapien
actcctcggtcaagagcgtgcctga

SEQ ID NO: 871999 - DNA, 25 bp, Homo sapien
ggtggagtccgctcatatcccagct

SEQ ID NO: 872000 - DNA, 25 bp, Homo sapien
gacatcgtgatcaacgcaaacccgg

SEQ ID NO: 872001 - DNA, 25 bp, Homo sapien
aatacatggcaccacttgcagttga

SEQ ID NO: 872002 - DNA, 25 bp, Homo sapien
tggaacaaacagactgtactgctgg

SEQ ID NO: 872003 - DNA, 25 bp, Homo sapien
aatctgcttcagacaccctgtgacg

SEQ ID NO: 872004 - DNA, 25 bp, Homo sapien
gatgagcatgaaatcccaactgcgt

SEQ ID NO: 872005 - DNA, 25 bp, Homo sapien
ttggctcgctgggaatgaactcacc

SEQ ID NO: 872006 - DNA, 25 bp, Homo sapien
catactggccacatagcgatttgca

SEQ ID NO: 872007 - DNA, 25 bp, Homo sapien
caaagatgcccttgttcgtctgcaa

SEQ ID NO: 872008 - DNA, 25 bp, Homo sapien
tgtgcgagtacttccctcagggctg

SEQ ID NO: 872009 - DNA, 25 bp, Homo sapien
tttaggccagttgtcaagtgtcaat

SEQ ID NO: 872010 - DNA, 25 bp, Homo sapien
ttaggccagttgtcaagtgtcaata

SEQ ID NO: 872011 - DNA, 25 bp, Homo sapien
atttaggccagttgtcaagtgtcaa

SEQ ID NO: 872012 - DNA, 25 bp, Homo sapien
caatttctgcggtaccttctagagg

SEQ ID NO: 872013 - DNA, 25 bp, Homo sapien
ccagacagagggtcaacagagttga

SEQ ID NO: 872014 - DNA, 25 bp, Homo sapien
tgctacaataaaggaggaagtaccg

SEQ ID NO: 872015 - DNA, 25 bp, Homo sapien
ttggaatgacgctaaactgaaggtg

SEQ ID NO: 872016 - DNA, 25 bp, Homo sapien
tcccacgcccccatcctttccgtca

SEQ ID NO: 872017 - DNA, 25 bp, Homo sapien
cccacgcccccatcctttccgtcat

SEQ ID NO: 872018 - DNA, 25 bp, Homo sapien
tcttgagaaaggaggtttagctgct

SEQ ID NO: 872019 - DNA, 25 bp, Homo sapien
ctttgtcttgagaaaggaggtttag

SEQ ID NO: 872020 - DNA, 25 bp, Homo sapien
gaaaggaggtttagctgcttcttta

SEQ ID NO: 872021 - DNA, 25 bp, Homo sapien
ggtttagctgcttctttagttctgc

SEQ ID NO: 872022 - DNA, 25 bp, Homo sapien
gccttcgctgtggggttggccccca

SEQ ID NO: 872023 - DNA, 25 bp, Homo sapien
tgaacaccagcagatacctcctgtg

SEQ ID NO: 872024 - DNA, 25 bp, Homo sapien
gatatacttggcttgcactggacac

SEQ ID NO: 872025 - DNA, 25 bp, Homo sapien
ttctgttccaaacggctgaaagagc

SEQ ID NO: 872026 - DNA, 25 bp, Homo sapien
gagttccttctcgttaagtgctgga

SEQ ID NO: 872027 - DNA, 25 bp, Homo sapien
tacggagggattccggcaactgacc

SEQ ID NO: 872028 - DNA, 25 bp, Homo sapien
tattgttatttaagactgcagaata

SEQ ID NO: 872029 - DNA, 25 bp, Homo sapien
gcacccaaccctgtattgttattta

SEQ ID NO: 872030 - DNA, 25 bp, Homo sapien
tgcacccaaccctgtattgttattt

SEQ ID NO: 872031 - DNA, 25 bp, Homo sapien
gtattgttatttaagactgcagaat

SEQ ID NO: 872032 - DNA, 25 bp, Homo sapien
actctggacgtatgtgttggtgttc

SEQ ID NO: 872033 - DNA, 25 bp, Homo sapien
tccttccaactgttcgggtgaagcg

SEQ ID NO: 872034 - DNA, 25 bp, Homo sapien
ttcgggtgaagcgtacagacaagta

SEQ ID NO: 872035 - DNA, 25 bp, Homo sapien
gacaagtacccactctggacgtatg

SEQ ID NO: 872036 - DNA, 25 bp, Homo sapien
cttcccgtttctgttggtccagtct

SEQ ID NO: 872037 - DNA, 25 bp, Homo sapien
tcttcccgtttctgttggtccagtc

SEQ ID NO: 872038 - DNA, 25 bp, Homo sapien
gattatagcagtactcagagcacct

SEQ ID NO: 872039 - DNA, 25 bp, Homo sapien
gagtttacctctaagtctgcaataa

SEQ ID NO: 872040 - DNA, 25 bp, Homo sapien
caacttataaccaagtgcagtggct

SEQ ID NO: 872041 - DNA, 25 bp, Homo sapien
aaaaagtacttatactccacagagg

SEQ ID NO: 872042 - DNA, 25 bp, Homo sapien
cctgatacaaagctcccactgcttt

SEQ ID NO: 872043 - DNA, 25 bp, Homo sapien
agtcgtccctgatacaaagctccca

SEQ ID NO: 872044 - DNA, 25 bp, Homo sapien
tcaatgatttcatcgcccccactta

SEQ ID NO: 872045 - DNA, 25 bp, Homo sapien
tcaagtcgtccctgatacaaagctc

SEQ ID NO: 872046 - DNA, 25 bp, Homo sapien
aatttttgttgcaacattggccata

SEQ ID NO: 872047 - DNA, 25 bp, Homo sapien
tgttgcaacattggccataacataa

SEQ ID NO: 872048 - DNA, 25 bp, Homo sapien
tttgttgcaacattggccataacat

SEQ ID NO: 872049 - DNA, 25 bp, Homo sapien
gcaacattggccataacataaggac

SEQ ID NO: 872050 - DNA, 25 bp, Homo sapien
tcaacaaagtcaatgctgcagaatg

SEQ ID NO: 872051 - DNA, 25 bp, Homo sapien
aatcccacagcgagagctcacacag

SEQ ID NO: 872052 - DNA, 25 bp, Homo sapien
tcgactatccaatcccacagcgaga

SEQ ID NO: 872053 - DNA, 25 bp, Homo sapien
ggccccgcttgtttctctcgactat

SEQ ID NO: 872054 - DNA, 25 bp, Homo sapien
aggcagactcgtccacatactcccg

SEQ ID NO: 872055 - DNA, 25 bp, Homo sapien
cagaagctctcaactgtgacccgga

SEQ ID NO: 872056 - DNA, 25 bp, Homo sapien
catccagattcaggcgaaagagttc

SEQ ID NO: 872057 - DNA, 25 bp, Homo sapien
ggagaaactggtcctgaaactggtc

SEQ ID NO: 872058 - DNA, 25 bp, Homo sapien
gaaactggtctgctcgctacataaa

SEQ ID NO: 872059 - DNA, 25 bp, Homo sapien
tactgagctgctaatcctactggga

SEQ ID NO: 872060 - DNA, 25 bp, Homo sapien
tagggtacacactcaagatgatctg

SEQ ID NO: 872061 - DNA, 25 bp, Homo sapien
gagtgaggccgccaactctagggta

SEQ ID NO: 872062 - DNA, 25 bp, Homo sapien
tacaagagactgaacgcagggcaga

SEQ ID NO: 872063 - DNA, 25 bp, Homo sapien
tttcttcggaagattcttcggtgga

SEQ ID NO: 872064 - DNA, 25 bp, Homo sapien
gaagattcttcggtggatgtgaaac

SEQ ID NO: 872065 - DNA, 25 bp, Homo sapien
tcggaagattcttcggtggatgtga

SEQ ID NO: 872066 - DNA, 25 bp, Homo sapien
ggtgggaattacgcctgagtggcag

SEQ ID NO: 872067 - DNA, 25 bp, Homo sapien
gctgttccacaattgaactggcaga

SEQ ID NO: 872068 - DNA, 25 bp, Homo sapien
tgtacttcaccgacttgttattctg

SEQ ID NO: 872069 - DNA, 25 bp, Homo sapien
gactcaagttcaccagattctctta

SEQ ID NO: 872070 - DNA, 25 bp, Homo sapien
tggagctccagggtcgactcaagtt

SEQ ID NO: 872071 - DNA, 25 bp, Homo sapien
tcctcttcctggtcggagagcactt

SEQ ID NO: 872072 - DNA, 25 bp, Homo sapien
tcttcctggtcggagagcacttcca

SEQ ID NO: 872073 - DNA, 25 bp, Homo sapien
tgtcctcttcctggtcggagagcac

SEQ ID NO: 872074 - DNA, 25 bp, Homo sapien
cctcttcctggtcggagagcacttc

SEQ ID NO: 872075 - DNA, 25 bp, Homo sapien
tctatccacgcggtgtgatagccaa

SEQ ID NO: 872076 - DNA, 25 bp, Homo sapien
tggctgaatcacatgaacatgttct

SEQ ID NO: 872077 - DNA, 25 bp, Homo sapien
atgaacatgttctatccacgcggtg

SEQ ID NO: 872078 - DNA, 25 bp, Homo sapien
cacgcggtgtgatagccaacaatat

SEQ ID NO: 872079 - DNA, 25 bp, Homo sapien
ctgttttagttgcacccttaatcag

SEQ ID NO: 872080 - DNA, 25 bp, Homo sapien
tcatgcaaactgttttagttgcacc

SEQ ID NO: 872081 - DNA, 25 bp, Homo sapien
gcaaactgttttagttgcaccctta

SEQ ID NO: 872082 - DNA, 25 bp, Homo sapien
actgttttagttgcacccttaatca

SEQ ID NO: 872083 - DNA, 25 bp, Homo sapien
gctcctaagaagctctaggctgaag

SEQ ID NO: 872084 - DNA, 25 bp, Homo sapien
tgagcttagacaatccaaactagcc

SEQ ID NO: 872085 - DNA, 25 bp, Homo sapien
tagtgttggaagtctagctcctaag

SEQ ID NO: 872086 - DNA, 25 bp, Homo sapien
ttcagggaagtcagccggactaaga

SEQ ID NO: 872087 - DNA, 25 bp, Homo sapien
cacaattatttagggtagtaggtca

SEQ ID NO: 872088 - DNA, 25 bp, Homo sapien
tcaaattcatttaagtaacgtgaag

SEQ ID NO: 872089 - DNA, 25 bp, Homo sapien
attcatttaagtaacgtgaagtttg

SEQ ID NO: 872090 - DNA, 25 bp, Homo sapien
ttaagtaacgtgaagtttgtgcttc

SEQ ID NO: 872091 - DNA, 25 bp, Homo sapien
catttaagtaacgtgaagtttgtgc

SEQ ID NO: 872092 - DNA, 25 bp, Homo sapien
ctgggagatcaaggtcaccatactg

SEQ ID NO: 872093 - DNA, 25 bp, Homo sapien
cctgggagatcaaggtcaccatact

SEQ ID NO: 872094 - DNA, 25 bp, Homo sapien
tacgagaaatatcctcacaaggatc

SEQ ID NO: 872095 - DNA, 25 bp, Homo sapien
gatacgagaaatatcctcacaagga

SEQ ID NO: 872096 - DNA, 25 bp, Homo sapien
tttctggatacgagaaatatcctca

SEQ ID NO: 872097 - DNA, 25 bp, Homo sapien
ctgattttctggatacgagaaatat

SEQ ID NO: 872098 - DNA, 25 bp, Homo sapien
ttttataatcagaatttcacagtgc

SEQ ID NO: 872099 - DNA, 25 bp, Homo sapien
tttataatcagaatttcacagtgct

SEQ ID NO: 872100 - DNA, 25 bp, Homo sapien
gtgatgtagtctcaatgagctaaac

SEQ ID NO: 872101 - DNA, 25 bp, Homo sapien
tgatgtagtctcaatgagctaaact

SEQ ID NO: 872102 - DNA, 25 bp, Homo sapien
gacagcagccccattttgataaacg

SEQ ID NO: 872103 - DNA, 25 bp, Homo sapien
gccccattttgataaacgtctggca

SEQ ID NO: 872104 - DNA, 25 bp, Homo sapien
cagcagccccattttgataaacgtc

SEQ ID NO: 872105 - DNA, 25 bp, Homo sapien
cattttgataaacgtctggcaaagt

SEQ ID NO: 872106 - DNA, 25 bp, Homo sapien
tgatcaaagcacactgaaggccgag

SEQ ID NO: 872107 - DNA, 25 bp, Homo sapien
tgtgagcattatcatagtatagatg

SEQ ID NO: 872108 - DNA, 25 bp, Homo sapien
cactggttactcacaggagtgatca

SEQ ID NO: 872109 - DNA, 25 bp, Homo sapien
gactggagcacactggttactcaca

SEQ ID NO: 872110 - DNA, 25 bp, Homo sapien
cctcagcctcccaaattacagctgg

SEQ ID NO: 872111 - DNA, 25 bp, Homo sapien
caggttcaaatgattttccagcctc

SEQ ID NO: 872112 - DNA, 25 bp, Homo sapien
ttgagactgagtcttgctctgtcgc

SEQ ID NO: 872113 - DNA, 25 bp, Homo sapien
cgttatttttattttgttgagactg

SEQ ID NO: 872114 - DNA, 25 bp, Homo sapien
ctggatttctgctggaacatcagat

SEQ ID NO: 872115 - DNA, 25 bp, Homo sapien
taaacacctgtcttgaacgaagtgg

SEQ ID NO: 872116 - DNA, 25 bp, Homo sapien
cagcaagagttggtttgcaactgca

SEQ ID NO: 872117 - DNA, 25 bp, Homo sapien
cgtggctcaagtgctccagcaaaga

SEQ ID NO: 872118 - DNA, 25 bp, Homo sapien
aacttttctcgatgagcgtgtgcta

SEQ ID NO: 872119 - DNA, 25 bp, Homo sapien
taaggctgaaggtcgttaagttctc

SEQ ID NO: 872120 - DNA, 25 bp, Homo sapien
cagacgagttggcactaaggctgaa

SEQ ID NO: 872121 - DNA, 25 bp, Homo sapien
tatgagaccatgcagacagacgagt

SEQ ID NO: 872122 - DNA, 25 bp, Homo sapien
tcgcgcttgcggaccccggagttgc

SEQ ID NO: 872123 - DNA, 25 bp, Homo sapien
gggaaagtcgatggccggcggcgca

SEQ ID NO: 872124 - DNA, 25 bp, Homo sapien
tcttcgcgcttgcggaccccggagt

SEQ ID NO: 872125 - DNA, 25 bp, Homo sapien
cccgtcgccctcctcttcgcgcttg

SEQ ID NO: 872126 - DNA, 25 bp, Homo sapien
agctagcgccgtccgacccggaagt

SEQ ID NO: 872127 - DNA, 25 bp, Homo sapien
agcactgccacactccgatgctgca

SEQ ID NO: 872128 - DNA, 25 bp, Homo sapien
tgccacactccgatgctgcagctag

SEQ ID NO: 872129 - DNA, 25 bp, Homo sapien
gatgctgcagctagcgccgtccgac

SEQ ID NO: 872130 - DNA, 25 bp, Homo sapien
atctataagagttaaaagaccttgt

SEQ ID NO: 872131 - DNA, 25 bp, Homo sapien
taagagttaaaagaccttgttcatg

SEQ ID NO: 872132 - DNA, 25 bp, Homo sapien
aaggaggatcaactacaaggttatt

SEQ ID NO: 872133 - DNA, 25 bp, Homo sapien
cagaaaaaggaggatcaactacaag

SEQ ID NO: 872134 - DNA, 25 bp, Homo sapien
gaatgcattgtcttgtagggtacct

SEQ ID NO: 872135 - DNA, 25 bp, Homo sapien
catagtcttcgggttggtggtacca

SEQ ID NO: 872136 - DNA, 25 bp, Homo sapien
gatctgtattaaaggaaagtgccca

SEQ ID NO: 872137 - DNA, 25 bp, Homo sapien
cctgactttggtgttagagactgat

SEQ ID NO: 872138 - DNA, 25 bp, Homo sapien
taccaggtccttaatcagtgcaggg

SEQ ID NO: 872139 - DNA, 25 bp, Homo sapien
ggaatttagactttgctgtgagcca

SEQ ID NO: 872140 - DNA, 25 bp, Homo sapien
gatctgacggtttttggaagaccac

SEQ ID NO: 872141 - DNA, 25 bp, Homo sapien
gaactagctctgttaggcctcgagg

SEQ ID NO: 872142 - DNA, 25 bp, Homo sapien
cggaggatttctcggagccaagtcc

SEQ ID NO: 872143 - DNA, 25 bp, Homo sapien
gaggcgaaagcccaaagtcctacgc

SEQ ID NO: 872144 - DNA, 25 bp, Homo sapien
aggtgccccgcttctggaaacgcat

SEQ ID NO: 872145 - DNA, 25 bp, Homo sapien
gcgaagcccacgaagcggaggattt

SEQ ID NO: 872146 - DNA, 25 bp, Homo sapien
ctggaacgggggatccgttgcagat

SEQ ID NO: 872147 - DNA, 25 bp, Homo sapien
tgcagatgttggaaatgaaaattgg

SEQ ID NO: 872148 - DNA, 25 bp, Homo sapien
gatccgttgcagatgttggaaatga

SEQ ID NO: 872149 - DNA, 25 bp, Homo sapien
catctaggactttaacccctctcac

SEQ ID NO: 872150 - DNA, 25 bp, Homo sapien
gcagcatccaaatgaagtctacact

SEQ ID NO: 872151 - DNA, 25 bp, Homo sapien
gaagtctacactttgcatttggtag

SEQ ID NO: 872152 - DNA, 25 bp, Homo sapien
tttaagcagttgttcagagcagcat

SEQ ID NO: 872153 - DNA, 25 bp, Homo sapien
ttttaagcagttgttcagagcagca

SEQ ID NO: 872154 - DNA, 25 bp, Homo sapien
tgcgcggtcggaggagccctgcgag

SEQ ID NO: 872155 - DNA, 25 bp, Homo sapien
tgacctgtgtgatcccgggagctta

SEQ ID NO: 872156 - DNA, 25 bp, Homo sapien
ttaacaggcgatgcgagcccgttgt

SEQ ID NO: 872157 - DNA, 25 bp, Homo sapien
gaagggttgagtccggctccgcctg

SEQ ID NO: 872158 - DNA, 25 bp, Homo sapien
agcaggagcaagactgagggccacc

SEQ ID NO: 872159 - DNA, 25 bp, Homo sapien
tcagaaaggtggaccgaggccacta

SEQ ID NO: 872160 - DNA, 25 bp, Homo sapien
caggtgccggtactaccatgacagg

SEQ ID NO: 872161 - DNA, 25 bp, Homo sapien
ttccccagcgaaggagaaaatcggc

SEQ ID NO: 872162 - DNA, 25 bp, Homo sapien
gacagaactgcacttgtagccggag

SEQ ID NO: 872163 - DNA, 25 bp, Homo sapien
tcacgaacacgaaaatggaaagtcc

SEQ ID NO: 872164 - DNA, 25 bp, Homo sapien
tgttgaaaagaaagcccggaggagc

SEQ ID NO: 872165 - DNA, 25 bp, Homo sapien
ccggaaacggagacacgacagtgtg

SEQ ID NO: 872166 - DNA, 25 bp, Homo sapien
taactctgttccaatctgcgtggtg

SEQ ID NO: 872167 - DNA, 25 bp, Homo sapien
gcgtccgggaataagccctacacgc

SEQ ID NO: 872168 - DNA, 25 bp, Homo sapien
cagagaaggcagagtgatctcctca

SEQ ID NO: 872169 - DNA, 25 bp, Homo sapien
gattcaacgcgttcaacagaagcca

SEQ ID NO: 872170 - DNA, 25 bp, Homo sapien
tattccgaatggacgaacactttct

SEQ ID NO: 872171 - DNA, 25 bp, Homo sapien
catctggtgcaagaccaaccgggag

SEQ ID NO: 872172 - DNA, 25 bp, Homo sapien
cccagacatgatttgtaaagccgac

SEQ ID NO: 872173 - DNA, 25 bp, Homo sapien
cactgctgaccattgtaaaataccg

SEQ ID NO: 872174 - DNA, 25 bp, Homo sapien
tactgccccgagtgaatgcgtttgg

SEQ ID NO: 872175 - DNA, 25 bp, Homo sapien
gaaacctaggtgcacaaagtctgag

SEQ ID NO: 872176 - DNA, 25 bp, Homo sapien
aactcaaatatgaaccagggcggcc

SEQ ID NO: 872177 - DNA, 25 bp, Homo sapien
tatctgggttctctacgtgccgggc

SEQ ID NO: 872178 - DNA, 25 bp, Homo sapien
cgccgggatggtcgcaggaaggaaa

SEQ ID NO: 872179 - DNA, 25 bp, Homo sapien
aggaggcctcgaggatcagtctggg

SEQ ID NO: 872180 - DNA, 25 bp, Homo sapien
accatgaccccagccacggcaggag

SEQ ID NO: 872181 - DNA, 25 bp, Homo sapien
cagtctgggccacggtacgctctgg

SEQ ID NO: 872182 - DNA, 25 bp, Homo sapien
tccctgccacgccttccgcggaggg

SEQ ID NO: 872183 - DNA, 25 bp, Homo sapien
agcttgcaccgcagggcgactgcct

SEQ ID NO: 872184 - DNA, 25 bp, Homo sapien
ccgcccgcggtgtctttctgctggg

SEQ ID NO: 872185 - DNA, 25 bp, Homo sapien
gggccgcccgcggtgtctttctgct

SEQ ID NO: 872186 - DNA, 25 bp, Homo sapien
tattggcaatccttcgtttcctcgt

SEQ ID NO: 872187 - DNA, 25 bp, Homo sapien
tgccaacatgtcatagaagggatct

SEQ ID NO: 872188 - DNA, 25 bp, Homo sapien
catagaagggatctctgctgatact

SEQ ID NO: 872189 - DNA, 25 bp, Homo sapien
cgtttcctcgttgccaacatgtcat

SEQ ID NO: 872190 - DNA, 25 bp, Homo sapien
cggccgtcggcctcagtcttacagg

SEQ ID NO: 872191 - DNA, 25 bp, Homo sapien
tgggattgtagagctcaaaacagtt

SEQ ID NO: 872192 - DNA, 25 bp, Homo sapien
atggttcccctctaccacgcggccg

SEQ ID NO: 872193 - DNA, 25 bp, Homo sapien
ggtacaccacatggttcccctctac

SEQ ID NO: 872194 - DNA, 25 bp, Homo sapien
gctgaggttttccaacgggatgatt

SEQ ID NO: 872195 - DNA, 25 bp, Homo sapien
tgaggttttccaacgggatgattcc

SEQ ID NO: 872196 - DNA, 25 bp, Homo sapien
tgctgaggttttccaacgggatgat

SEQ ID NO: 872197 - DNA, 25 bp, Homo sapien
ttccaacgggatgattcccctgggc

SEQ ID NO: 872198 - DNA, 25 bp, Homo sapien
caggatgaaccaccggcgcttccag

SEQ ID NO: 872199 - DNA, 25 bp, Homo sapien
caaagtaatagaggcagttatcggt

SEQ ID NO: 872200 - DNA, 25 bp, Homo sapien
ggtcaggatgaaccaccggcgcttc

SEQ ID NO: 872201 - DNA, 25 bp, Homo sapien
ttcaaagtaatagaggcagttatcg

SEQ ID NO: 872202 - DNA, 25 bp, Homo sapien
tgtggatggatcaccaggacacagg

SEQ ID NO: 872203 - DNA, 25 bp, Homo sapien
ggctttctctgtgacaggccggcag

SEQ ID NO: 872204 - DNA, 25 bp, Homo sapien
taagtgggggccagcacgggcgctg

SEQ ID NO: 872205 - DNA, 25 bp, Homo sapien
caagactgtgtgcgaagggctctgt

SEQ ID NO: 872206 - DNA, 25 bp, Homo sapien
caccttgggtcccccgctcacacct

SEQ ID NO: 872207 - DNA, 25 bp, Homo sapien
agggccagggggtcgttgcagacca

SEQ ID NO: 872208 - DNA, 25 bp, Homo sapien
gccagggggtcgttgcagaccagga

SEQ ID NO: 872209 - DNA, 25 bp, Homo sapien
ggccagggggtcgttgcagaccagg

SEQ ID NO: 872210 - DNA, 25 bp, Homo sapien
tcttggttcccgtgagcactgtgtg

SEQ ID NO: 872211 - DNA, 25 bp, Homo sapien
taccaacaatcgtaagccacgcctg

SEQ ID NO: 872212 - DNA, 25 bp, Homo sapien
tgtgtgcactcatttcatggcctgt

SEQ ID NO: 872213 - DNA, 25 bp, Homo sapien
cacacgcctggaagcacgttctaga

SEQ ID NO: 872214 - DNA, 25 bp, Homo sapien
tagagccgacctttccctggtggca

SEQ ID NO: 872215 - DNA, 25 bp, Homo sapien
agagccgacctttccctggtggcag

SEQ ID NO: 872216 - DNA, 25 bp, Homo sapien
gtctctagagccgacctttccctgg

SEQ ID NO: 872217 - DNA, 25 bp, Homo sapien
tctagagccgacctttccctggtgg

SEQ ID NO: 872218 - DNA, 25 bp, Homo sapien
gaaccagaagggaggcatctaatca

SEQ ID NO: 872219 - DNA, 25 bp, Homo sapien
atttgaatcgggtctctcaggcacc

SEQ ID NO: 872220 - DNA, 25 bp, Homo sapien
tcactctagaacactcgcacaatgt

SEQ ID NO: 872221 - DNA, 25 bp, Homo sapien
agtgcctgccggcatttccggttac

SEQ ID NO: 872222 - DNA, 25 bp, Homo sapien
caaaggcctttagagcactcccgaa

SEQ ID NO: 872223 - DNA, 25 bp, Homo sapien
gggcaagttggttcccacacagcat

SEQ ID NO: 872224 - DNA, 25 bp, Homo sapien
tccacagatggatcggatgaatggc

SEQ ID NO: 872225 - DNA, 25 bp, Homo sapien
ctgcggacccctagagacacagggt

SEQ ID NO: 872226 - DNA, 25 bp, Homo sapien
aggaaaacaacaagaaggcacattt

SEQ ID NO: 872227 - DNA, 25 bp, Homo sapien
acaccaaaccgagagaggcacacag

SEQ ID NO: 872228 - DNA, 25 bp, Homo sapien
taaaccacgcgtcaaaaatcacagc

SEQ ID NO: 872229 - DNA, 25 bp, Homo sapien
acaagcagggacagcccgtcacaga

SEQ ID NO: 872230 - DNA, 25 bp, Homo sapien
atgcagctaccgagagcgggctctg

SEQ ID NO: 872231 - DNA, 25 bp, Homo sapien
gatgctaactcagcagttttctggg

SEQ ID NO: 872232 - DNA, 25 bp, Homo sapien
cgggctctggcttaaccgcgtttct

SEQ ID NO: 872233 - DNA, 25 bp, Homo sapien
gataatgcgcttgcttctcgtgcag

SEQ ID NO: 872234 - DNA, 25 bp, Homo sapien
gatcttaaatggctcgttcttaatg

SEQ ID NO: 872235 - DNA, 25 bp, Homo sapien
tcttaaatggctcgttcttaatgct

SEQ ID NO: 872236 - DNA, 25 bp, Homo sapien
cgtcgtcctccgggatcttaaatgg

SEQ ID NO: 872237 - DNA, 25 bp, Homo sapien
taaatggctcgttcttaatgctctc

SEQ ID NO: 872238 - DNA, 25 bp, Homo sapien
agcgaagagatcctgcagacggcag

SEQ ID NO: 872239 - DNA, 25 bp, Homo sapien
atcctgcagacggcagcggccgcgg

SEQ ID NO: 872240 - DNA, 25 bp, Homo sapien
tcctgcagacggcagcggccgcggg

SEQ ID NO: 872241 - DNA, 25 bp, Homo sapien
cgaagagatcctgcagacggcagcg

SEQ ID NO: 872242 - DNA, 25 bp, Homo sapien
gaggtccccgccctcgttgatgccg

SEQ ID NO: 872243 - DNA, 25 bp, Homo sapien
cgccctcgttgatgccgcggttcat

SEQ ID NO: 872244 - DNA, 25 bp, Homo sapien
gtccccgccctcgttgatgccgcgg

SEQ ID NO: 872245 - DNA, 25 bp, Homo sapien
tcagggaggtccccgccctcgttga

SEQ ID NO: 872246 - DNA, 25 bp, Homo sapien
ttgtcacgcacgttgtggttgtgga

SEQ ID NO: 872247 - DNA, 25 bp, Homo sapien
gatgatggcgaatgacagcacgtag

SEQ ID NO: 872248 - DNA, 25 bp, Homo sapien
ttctgccgtgggcttgtcacgcacg

SEQ ID NO: 872249 - DNA, 25 bp, Homo sapien
catgatgatggcgaatgacagcacg

SEQ ID NO: 872250 - DNA, 25 bp, Homo sapien
ctgcaacgagtccggggtgctgggc

SEQ ID NO: 872251 - DNA, 25 bp, Homo sapien
cccacaggtcgtcctcgctcaggga

SEQ ID NO: 872252 - DNA, 25 bp, Homo sapien
aggtccccaggaacacacgctgggc

SEQ ID NO: 872253 - DNA, 25 bp, Homo sapien
agtggacagtgggaccccgcgtgct

SEQ ID NO: 872254 - DNA, 25 bp, Homo sapien
cagcctgaagctccataagaactgc

SEQ ID NO: 872255 - DNA, 25 bp, Homo sapien
gaagcgaaagcctccatcatgcgat

SEQ ID NO: 872256 - DNA, 25 bp, Homo sapien
ttgcacaggcagtagcgagaagcga

SEQ ID NO: 872257 - DNA, 25 bp, Homo sapien
tcatgcgatcaatcttctgcgcctc

SEQ ID NO: 872258 - DNA, 25 bp, Homo sapien
ggttgagatcagcaaactcatggag

SEQ ID NO: 872259 - DNA, 25 bp, Homo sapien
cttaaggcttgtacaaggttgagat

SEQ ID NO: 872260 - DNA, 25 bp, Homo sapien
caaggttgagatcagcaaactcatg

SEQ ID NO: 872261 - DNA, 25 bp, Homo sapien
aaactcatggagttcaacaaaggct

SEQ ID NO: 872262 - DNA, 25 bp, Homo sapien
ggaatctgtaactgatgattagcta

SEQ ID NO: 872263 - DNA, 25 bp, Homo sapien
atgattagctatgaacaccaccatg

SEQ ID NO: 872264 - DNA, 25 bp, Homo sapien
aggaatctgtaactgatgattagct

SEQ ID NO: 872265 - DNA, 25 bp, Homo sapien
aatctgtaactgatgattagctatg

SEQ ID NO: 872266 - DNA, 25 bp, Homo sapien
tgctaagccagtcgcagtcagaaag

SEQ ID NO: 872267 - DNA, 25 bp, Homo sapien
tacagtcataaggatagggtctgcc

SEQ ID NO: 872268 - DNA, 25 bp, Homo sapien
tgttgaagaagttccatgcctgtct

SEQ ID NO: 872269 - DNA, 25 bp, Homo sapien
tctaactgtcctggcaaggcgtgcc

SEQ ID NO: 872270 - DNA, 25 bp, Homo sapien
tttcacccaggtagtccccaatgac

SEQ ID NO: 872271 - DNA, 25 bp, Homo sapien
gggaactctgtagcaggtcattttc

SEQ ID NO: 872272 - DNA, 25 bp, Homo sapien
tataaaggaactgggcgacgtcttc

SEQ ID NO: 872273 - DNA, 25 bp, Homo sapien
cccaatgacggtcttatttaggcct

SEQ ID NO: 872274 - DNA, 25 bp, Homo sapien
tcttcccatggctatctgtttgttc

SEQ ID NO: 872275 - DNA, 25 bp, Homo sapien
ctttttgggatccatgttgaatttc

SEQ ID NO: 872276 - DNA, 25 bp, Homo sapien
tctttcttcccatggctatctgttt

SEQ ID NO: 872277 - DNA, 25 bp, Homo sapien
ctgtttgttcctctgagtcgttttg

SEQ ID NO: 872278 - DNA, 25 bp, Homo sapien
ctacggaagttagattgtcgatctc

SEQ ID NO: 872279 - DNA, 25 bp, Homo sapien
gaagttagattgtcgatctctgtca

SEQ ID NO: 872280 - DNA, 25 bp, Homo sapien
tagattgtcgatctctgtcatcacc

SEQ ID NO: 872281 - DNA, 25 bp, Homo sapien
ctctcctctacggaagttagattgt

SEQ ID NO: 872282 - DNA, 25 bp, Homo sapien
cgacgaatgtctagaagttcttctc

SEQ ID NO: 872283 - DNA, 25 bp, Homo sapien
tctctcttctaatgagaggtcttca

SEQ ID NO: 872284 - DNA, 25 bp, Homo sapien
ccttttttcttcgacgaatgtctag

SEQ ID NO: 872285 - DNA, 25 bp, Homo sapien
tcttctaatgagaggtcttcaggca

SEQ ID NO: 872286 - DNA, 25 bp, Homo sapien
tgctcccattgagactgtatctgag

SEQ ID NO: 872287 - DNA, 25 bp, Homo sapien
cagtaagaacacgaataaattgcgg

SEQ ID NO: 872288 - DNA, 25 bp, Homo sapien
ggagaacacattggcaacatccagc

SEQ ID NO: 872289 - DNA, 25 bp, Homo sapien
tgtatctgagacactcataggagcg

SEQ ID NO: 872290 - DNA, 25 bp, Homo sapien
attaagtggctagtaacatctgtag

SEQ ID NO: 872291 - DNA, 25 bp, Homo sapien
tattaagtggctagtaacatctgta

SEQ ID NO: 872292 - DNA, 25 bp, Homo sapien
gtattaagtggctagtaacatctgt

SEQ ID NO: 872293 - DNA, 25 bp, Homo sapien
atttttgttgtgatatggagctttt

SEQ ID NO: 872294 - DNA, 25 bp, Homo sapien
ttttagatttttggtcagttcagag

SEQ ID NO: 872295 - DNA, 25 bp, Homo sapien
tggtcagttcagagactggccgatt

SEQ ID NO: 872296 - DNA, 25 bp, Homo sapien
tttgttgtgatatggagctttttag

SEQ ID NO: 872297 - DNA, 25 bp, Homo sapien
tgtagcagttttttataacatggtc

SEQ ID NO: 872298 - DNA, 25 bp, Homo sapien
tctgtagcagttttttataacatgg

SEQ ID NO: 872299 - DNA, 25 bp, Homo sapien
tacaggagcctgctatcatatccaa

SEQ ID NO: 872300 - DNA, 25 bp, Homo sapien
ggagcctgctatcatatccaactat

SEQ ID NO: 872301 - DNA, 25 bp, Homo sapien
tgtaactgaacaatcgatataactc

SEQ ID NO: 872302 - DNA, 25 bp, Homo sapien
tagaataaggagttagacctgtaac

SEQ ID NO: 872303 - DNA, 25 bp, Homo sapien
aggagttagacctgtaactgaacaa

SEQ ID NO: 872304 - DNA, 25 bp, Homo sapien
gagtagaataaggagttagacctgt

SEQ ID NO: 872305 - DNA, 25 bp, Homo sapien
tatagggcccatcttggaccacaca

SEQ ID NO: 872306 - DNA, 25 bp, Homo sapien
ttttatagggcccatcttggaccac

SEQ ID NO: 872307 - DNA, 25 bp, Homo sapien
caaagtttttatagggcccatcttg

SEQ ID NO: 872308 - DNA, 25 bp, Homo sapien
tagggcccatcttggaccacacaaa

SEQ ID NO: 872309 - DNA, 25 bp, Homo sapien
ttagaaagcactggagatacttcct

SEQ ID NO: 872310 - DNA, 25 bp, Homo sapien
ccacaaacaatattccctgcaatgc

SEQ ID NO: 872311 - DNA, 25 bp, Homo sapien
attagaaagcactggagatacttcc

SEQ ID NO: 872312 - DNA, 25 bp, Homo sapien
caaacaatattccctgcaatgcttt

SEQ ID NO: 872313 - DNA, 25 bp, Homo sapien
tagacccattgccaatccccaatcc

SEQ ID NO: 872314 - DNA, 25 bp, Homo sapien
caatccccaatccttgataagcata

SEQ ID NO: 872315 - DNA, 25 bp, Homo sapien
tttacccttccactagacccattgc

SEQ ID NO: 872316 - DNA, 25 bp, Homo sapien
agcataaccacccttaaactcattc

SEQ ID NO: 872317 - DNA, 25 bp, Homo sapien
ttaaatactacagctccccaggctg

SEQ ID NO: 872318 - DNA, 25 bp, Homo sapien
cagtatactcaatgccagctagaca

SEQ ID NO: 872319 - DNA, 25 bp, Homo sapien
gatcacctaggttttcagcacacca

SEQ ID NO: 872320 - DNA, 25 bp, Homo sapien
tagacatctccaataggactgcaga

SEQ ID NO: 872321 - DNA, 25 bp, Homo sapien
aaattcagtaaatgtgtctcttcat

SEQ ID NO: 872322 - DNA, 25 bp, Homo sapien
tcttcatctcagtcccagcgtctac

SEQ ID NO: 872323 - DNA, 25 bp, Homo sapien
aaaattcagtaaatgtgtctcttca

SEQ ID NO: 872324 - DNA, 25 bp, Homo sapien
tcagtcccagcgtctaccctgtttc

SEQ ID NO: 872325 - DNA, 25 bp, Homo sapien
ctagtaccatcacctcagggcgagg

SEQ ID NO: 872326 - DNA, 25 bp, Homo sapien
tgtctgaggcctcttgtacaaggat

SEQ ID NO: 872327 - DNA, 25 bp, Homo sapien
taacaaaatgcgaaagactgggtgg

SEQ ID NO: 872328 - DNA, 25 bp, Homo sapien
cagggcgaggattttaacaggagtt

SEQ ID NO: 872329 - DNA, 25 bp, Homo sapien
ttatgattaagtccaccacccctct

SEQ ID NO: 872330 - DNA, 25 bp, Homo sapien
tatgattaagtccaccacccctctt

SEQ ID NO: 872331 - DNA, 25 bp, Homo sapien
tttcacaacggctcacagaaggctc

SEQ ID NO: 872332 - DNA, 25 bp, Homo sapien
gaactgttggtctgataggcactgg

SEQ ID NO: 872333 - DNA, 25 bp, Homo sapien
cagtaggcctagatcagcttccgag

SEQ ID NO: 872334 - DNA, 25 bp, Homo sapien
caaagactctcatggtcagtaggcc

SEQ ID NO: 872335 - DNA, 25 bp, Homo sapien
tcttcctgtaagtctcaaaagtcag

SEQ ID NO: 872336 - DNA, 25 bp, Homo sapien
gaaggttccacgtatatgtccaagc

SEQ ID NO: 872337 - DNA, 25 bp, Homo sapien
caggagtggcaaacccaaggctgag

SEQ ID NO: 872338 - DNA, 25 bp, Homo sapien
aacttccaaggatagcaggagtggc

SEQ ID NO: 872339 - DNA, 25 bp, Homo sapien
catggtttcccgtgtcaggcaggat

SEQ ID NO: 872340 - DNA, 25 bp, Homo sapien
ccagccttcgtgaccctgggagaag

SEQ ID NO: 872341 - DNA, 25 bp, Homo sapien
cactgactgctgatactctgatggg

SEQ ID NO: 872342 - DNA, 25 bp, Homo sapien
cctagagagaatgtgtccagcggga

SEQ ID NO: 872343 - DNA, 25 bp, Homo sapien
actggaacgcagagacatgatcaca

SEQ ID NO: 872344 - DNA, 25 bp, Homo sapien
cctccagcgaggaatgcatatatcc

SEQ ID NO: 872345 - DNA, 25 bp, Homo sapien
ttttgcgtgacatgaccttatcctg

SEQ ID NO: 872346 - DNA, 25 bp, Homo sapien
tgtgtgacgtggaatgtgaacatcc

SEQ ID NO: 872347 - DNA, 25 bp, Homo sapien
cactcgatttccctttcaaatggga

SEQ ID NO: 872348 - DNA, 25 bp, Homo sapien
tcctttggtgttgcgtgtaggtaac

SEQ ID NO: 872349 - DNA, 25 bp, Homo sapien
tcatccatctggaggtccttgctgt

SEQ ID NO: 872350 - DNA, 25 bp, Homo sapien
taaaaatgcgatgaagctagctatg

SEQ ID NO: 872351 - DNA, 25 bp, Homo sapien
tcttgaagggctacaaaagcgtttc

SEQ ID NO: 872352 - DNA, 25 bp, Homo sapien
acaaaagcgtttctttcagtgggag

SEQ ID NO: 872353 - DNA, 25 bp, Homo sapien
agaagcatggagacggaaccctctc

SEQ ID NO: 872354 - DNA, 25 bp, Homo sapien
cagaaaatcaaaacgtgtgagaagc

SEQ ID NO: 872355 - DNA, 25 bp, Homo sapien
gatgccctgaaccacggaaacgtaa

SEQ ID NO: 872356 - DNA, 25 bp, Homo sapien
tattacatccactgaagtgccactg

SEQ ID NO: 872357 - DNA, 25 bp, Homo sapien
aatatgtttatgactgatgccctga

SEQ ID NO: 872358 - DNA, 25 bp, Homo sapien
tgtgaaggaccgcaaaattctccgc

SEQ ID NO: 872359 - DNA, 25 bp, Homo sapien
tatggctgtaacaatgacgacaagc

SEQ ID NO: 872360 - DNA, 25 bp, Homo sapien
caaggaggttgagaccgcaaagagc

SEQ ID NO: 872361 - DNA, 25 bp, Homo sapien
catactggccagacttgggtgacac

SEQ ID NO: 872362 - DNA, 25 bp, Homo sapien
gacaagctacaaggcaacaggcaac

SEQ ID NO: 872363 - DNA, 25 bp, Homo sapien
cgccaccaccctcgccgccgccgtc

SEQ ID NO: 872364 - DNA, 25 bp, Homo sapien
ccaccctcgccgccgccgtcttcat

SEQ ID NO: 872365 - DNA, 25 bp, Homo sapien
cctcgccgccgccgtcttcatccat

SEQ ID NO: 872366 - DNA, 25 bp, Homo sapien
accctcgccgccgccgtcttcatcc

SEQ ID NO: 872367 - DNA, 25 bp, Homo sapien
cttgaggccactcccgcagccggcg

SEQ ID NO: 872368 - DNA, 25 bp, Homo sapien
aggcgaccgggcggctcctcagcgc

SEQ ID NO: 872369 - DNA, 25 bp, Homo sapien
gccactcccgcagccggcgagccgg

SEQ ID NO: 872370 - DNA, 25 bp, Homo sapien
ccgccggagggagcgcgcaggcgac

SEQ ID NO: 872371 - DNA, 25 bp, Homo sapien
tagcacatggcatagtaattcagca

SEQ ID NO: 872372 - DNA, 25 bp, Homo sapien
aatagcacatggcatagtaattcag

SEQ ID NO: 872373 - DNA, 25 bp, Homo sapien
atcgataatcccgaaaatgtttaag

SEQ ID NO: 872374 - DNA, 25 bp, Homo sapien
cataaactgatatatgcaatcgata

SEQ ID NO: 872375 - DNA, 25 bp, Homo sapien
caggtcgtacaaaactacagcagga

SEQ ID NO: 872376 - DNA, 25 bp, Homo sapien
gacagaacttcatggtaaatccgta

SEQ ID NO: 872377 - DNA, 25 bp, Homo sapien
gaattcagcaagatttaacgccaag

SEQ ID NO: 872378 - DNA, 25 bp, Homo sapien
tccattgggtgatcagacaagtcaa

SEQ ID NO: 872379 - DNA, 25 bp, Homo sapien
tcctcactcaggagcacttcgggat

SEQ ID NO: 872380 - DNA, 25 bp, Homo sapien
tacacgtgcagcgttgcagacagga

SEQ ID NO: 872381 - DNA, 25 bp, Homo sapien
ctcaggagcacttcgggatacacgt

SEQ ID NO: 872382 - DNA, 25 bp, Homo sapien
ttcgggatacacgtgcagcgttgca

SEQ ID NO: 872383 - DNA, 25 bp, Homo sapien
ggagcagggaacaaacccacggctg

SEQ ID NO: 872384 - DNA, 25 bp, Homo sapien
ctgctgaggctggatttcttcttac

SEQ ID NO: 872385 - DNA, 25 bp, Homo sapien
ttccatcaaccacaggcttattcat

SEQ ID NO: 872386 - DNA, 25 bp, Homo sapien
ccacaggcttattcatccaggaggg

SEQ ID NO: 872387 - DNA, 25 bp, Homo sapien
atcaaccacaggcttattcatccag

SEQ ID NO: 872388 - DNA, 25 bp, Homo sapien
tttgtgaatttccatcaaccacagg

SEQ ID NO: 872389 - DNA, 25 bp, Homo sapien
tcttaaggctgcatgatagtttgtc

SEQ ID NO: 872390 - DNA, 25 bp, Homo sapien
cttttcttaaggctgcatgatagtt

SEQ ID NO: 872391 - DNA, 25 bp, Homo sapien
ttcttttcttaaggctgcatgatag

SEQ ID NO: 872392 - DNA, 25 bp, Homo sapien
tttcttaaggctgcatgatagtttg

SEQ ID NO: 872393 - DNA, 25 bp, Homo sapien
tgaggtcacgccttcgtcagtctgg

SEQ ID NO: 872394 - DNA, 25 bp, Homo sapien
ttcgtgttcttggatgcggtgggcc

SEQ ID NO: 872395 - DNA, 25 bp, Homo sapien
cgccttcgtcagtctgggagggcct

SEQ ID NO: 872396 - DNA, 25 bp, Homo sapien
gtgggcctgaggtcacgccttcgtc

SEQ ID NO: 872397 - DNA, 25 bp, Homo sapien
atgcccagccgtattaaggtttttg

SEQ ID NO: 872398 - DNA, 25 bp, Homo sapien
tgacagtctccagtacagggtttca

SEQ ID NO: 872399 - DNA, 25 bp, Homo sapien
tttatgacagtctccagtacagggt

SEQ ID NO: 872400 - DNA, 25 bp, Homo sapien
tatgacagtctccagtacagggttt

SEQ ID NO: 872401 - DNA, 25 bp, Homo sapien
caggtatacccgatcctcaccacaa

SEQ ID NO: 872402 - DNA, 25 bp, Homo sapien
aggagcggtcaccttcctcgcagat

SEQ ID NO: 872403 - DNA, 25 bp, Homo sapien
ggaaacgaggctgtccaggtatacc

SEQ ID NO: 872404 - DNA, 25 bp, Homo sapien
cgatcctcaccacaacaggagcggt

SEQ ID NO: 872405 - DNA, 25 bp, Homo sapien
tgatcagactggaggtagcagaaac

SEQ ID NO: 872406 - DNA, 25 bp, Homo sapien
tggcccaaatgatcagactggaggt

SEQ ID NO: 872407 - DNA, 25 bp, Homo sapien
ccaaatgatcagactggaggtagca

SEQ ID NO: 872408 - DNA, 25 bp, Homo sapien
gactggaggtagcagaaacaaaccc

SEQ ID NO: 872409 - DNA, 25 bp, Homo sapien
tcacaaatgaacaaaaactctaaaa

SEQ ID NO: 872410 - DNA, 25 bp, Homo sapien
aagaagatgagcagcgtgcgagtca

SEQ ID NO: 872411 - DNA, 25 bp, Homo sapien
agaagatgagcagcgtgcgagtcag

SEQ ID NO: 872412 - DNA, 25 bp, Homo sapien
agatgagcagcgtgcgagtcagccc

SEQ ID NO: 872413 - DNA, 25 bp, Homo sapien
aagatgagcagcgtgcgagtcagcc

SEQ ID NO: 872414 - DNA, 25 bp, Homo sapien
gcagaagaccccataggagcgggcg

SEQ ID NO: 872415 - DNA, 25 bp, Homo sapien
gaagaccccataggagcgggcggcg

SEQ ID NO: 872416 - DNA, 25 bp, Homo sapien
ttgcagaagaccccataggagcggg

SEQ ID NO: 872417 - DNA, 25 bp, Homo sapien
agaagaccccataggagcgggcggc

SEQ ID NO: 872418 - DNA, 25 bp, Homo sapien
gcgtgctcagggagcgaaggaggcg

SEQ ID NO: 872419 - DNA, 25 bp, Homo sapien
tcggagaagtgcctccgcgagcagc

SEQ ID NO: 872420 - DNA, 25 bp, Homo sapien
cagtggagcggagtccgcacgtcac

SEQ ID NO: 872421 - DNA, 25 bp, Homo sapien
gctgaccctcgcctggcgtgctcag

SEQ ID NO: 872422 - DNA, 25 bp, Homo sapien
tgacatagtgaacctccatcttaaa

SEQ ID NO: 872423 - DNA, 25 bp, Homo sapien
gacatagtgaacctccatcttaaaa

SEQ ID NO: 872424 - DNA, 25 bp, Homo sapien
cacacgtggtctaatcgagtattat

SEQ ID NO: 872425 - DNA, 25 bp, Homo sapien
gaaaagaaacacacgtggtctaatc

SEQ ID NO: 872426 - DNA, 25 bp, Homo sapien
ggaaagttctggcatcacggttaac

SEQ ID NO: 872427 - DNA, 25 bp, Homo sapien
gattgtccgtgatggttacaggccc

SEQ ID NO: 872428 - DNA, 25 bp, Homo sapien
tcagtgtaacccgagcaaaatcgcg

SEQ ID NO: 872429 - DNA, 25 bp, Homo sapien
tacatgttgcagtaaagtccaagga

SEQ ID NO: 872430 - DNA, 25 bp, Homo sapien
aacataagcatagcagatacgttta

SEQ ID NO: 872431 - DNA, 25 bp, Homo sapien
gaattggctgttttatctagtcaaa

SEQ ID NO: 872432 - DNA, 25 bp, Homo sapien
tatttaatactaaccgattgtggac

SEQ ID NO: 872433 - DNA, 25 bp, Homo sapien
ggacctctgctgtttgaattggctg

SEQ ID NO: 872434 - DNA, 25 bp, Homo sapien
cgcctggccaagatctactcacttt

SEQ ID NO: 872435 - DNA, 25 bp, Homo sapien
tctgtcctgagatcaacgtgtcttt

SEQ ID NO: 872436 - DNA, 25 bp, Homo sapien
ctcacttttagacagcaatatatgc

SEQ ID NO: 872437 - DNA, 25 bp, Homo sapien
gaggaaattcctagcgtttctagat

SEQ ID NO: 872438 - DNA, 25 bp, Homo sapien
cagtgtttgacgaagcgatccgagc

SEQ ID NO: 872439 - DNA, 25 bp, Homo sapien
tacactgcattgttgtgccgagaac

SEQ ID NO: 872440 - DNA, 25 bp, Homo sapien
aaaacaacggtggagccttcgcact

SEQ ID NO: 872441 - DNA, 25 bp, Homo sapien
cgagaacaccgagcactgaactttg

SEQ ID NO: 872442 - DNA, 25 bp, Homo sapien
gcggagattttgaacagaactgcta

SEQ ID NO: 872443 - DNA, 25 bp, Homo sapien
agaactgctatttcctctaatgaag

SEQ ID NO: 872444 - DNA, 25 bp, Homo sapien
tcagtctttgtgatttcatagcgag

SEQ ID NO: 872445 - DNA, 25 bp, Homo sapien
gagttttctgaccagcttttgcgga

SEQ ID NO: 872446 - DNA, 25 bp, Homo sapien
gaaaggttggtattatcaggaaatg

SEQ ID NO: 872447 - DNA, 25 bp, Homo sapien
gaaagaaaggttggtattatcagga

SEQ ID NO: 872448 - DNA, 25 bp, Homo sapien
acctgccatgcctccccaaattggg

SEQ ID NO: 872449 - DNA, 25 bp, Homo sapien
agatgatgaaagaaaggttggtatt

SEQ ID NO: 872450 - DNA, 25 bp, Homo sapien
tgtacaacttaactcactggcgaga

SEQ ID NO: 872451 - DNA, 25 bp, Homo sapien
tgtcttgccagattaccgacactgt

SEQ ID NO: 872452 - DNA, 25 bp, Homo sapien
tggcgagaatacagcgtgggaccct

SEQ ID NO: 872453 - DNA, 25 bp, Homo sapien
gctagtgctgacgatgttctgtaca

SEQ ID NO: 872454 - DNA, 25 bp, Homo sapien
gagcaatgaacaggccctacctttg

SEQ ID NO: 872455 - DNA, 25 bp, Homo sapien
tacccatcgttaagtaaggcatcac

SEQ ID NO: 872456 - DNA, 25 bp, Homo sapien
tgttgtacattacttctggctgggc

SEQ ID NO: 872457 - DNA, 25 bp, Homo sapien
taccactgttagaactcctgttgca

SEQ ID NO: 872458 - DNA, 25 bp, Homo sapien
aaaatttatttttggccaggcgcag

SEQ ID NO: 872459 - DNA, 25 bp, Homo sapien
tgcacccagcctcccttcggttaaa

SEQ ID NO: 872460 - DNA, 25 bp, Homo sapien
tacaggcttggcccactgcacccag

SEQ ID NO: 872461 - DNA, 25 bp, Homo sapien
caggcttggcccactgcacccagcc

SEQ ID NO: 872462 - DNA, 25 bp, Homo sapien
tttatccaccgtgctgtgcgcttga

SEQ ID NO: 872463 - DNA, 25 bp, Homo sapien
tgcacctagtcccttcagaattctg

SEQ ID NO: 872464 - DNA, 25 bp, Homo sapien
tgcccacacttgtcttgagctcaag

SEQ ID NO: 872465 - DNA, 25 bp, Homo sapien
ggaaactcgtgactttcaaactcag

SEQ ID NO: 872466 - DNA, 25 bp, Homo sapien
tcagttctgagtcacagcgctttct

SEQ ID NO: 872467 - DNA, 25 bp, Homo sapien
cttcagggtcagttctgagtcacag

SEQ ID NO: 872468 - DNA, 25 bp, Homo sapien
ttttcctggtttgttatctttgagc

SEQ ID NO: 872469 - DNA, 25 bp, Homo sapien
gagctcttttccactctccccactg

SEQ ID NO: 872470 - DNA, 25 bp, Homo sapien
gtcattaggaggcttctgtccacat

SEQ ID NO: 872471 - DNA, 25 bp, Homo sapien
gggtcattaggaggcttctgtccac

SEQ ID NO: 872472 - DNA, 25 bp, Homo sapien
cattaggaggcttctgtccacatca

SEQ ID NO: 872473 - DNA, 25 bp, Homo sapien
ttaggaggcttctgtccacatcatg

SEQ ID NO: 872474 - DNA, 25 bp, Homo sapien
ggctttacaaagctctaaggtggca

SEQ ID NO: 872475 - DNA, 25 bp, Homo sapien
cagagaggccccaaggaggtgtctt

SEQ ID NO: 872476 - DNA, 25 bp, Homo sapien
tcttctgaggtcagatttcccggga

SEQ ID NO: 872477 - DNA, 25 bp, Homo sapien
caagttagacttatttctgtgagac

SEQ ID NO: 872478 - DNA, 25 bp, Homo sapien
gctgttttggcgtcatgggaactcc

SEQ ID NO: 872479 - DNA, 25 bp, Homo sapien
tggattcccgcacttctggagcagt

SEQ ID NO: 872480 - DNA, 25 bp, Homo sapien
catttgtacatccaggaagcccagt

SEQ ID NO: 872481 - DNA, 25 bp, Homo sapien
gatcgggtttcgtcttcatccccag

SEQ ID NO: 872482 - DNA, 25 bp, Homo sapien
tccaaggcccgcatcaggatgtctg

SEQ ID NO: 872483 - DNA, 25 bp, Homo sapien
tgctgaattccgcttcgtgtgacca

SEQ ID NO: 872484 - DNA, 25 bp, Homo sapien
catgtggtcggtgagcatcttcgga

SEQ ID NO: 872485 - DNA, 25 bp, Homo sapien
ccacttggcgctatagtgagcagca

SEQ ID NO: 872486 - DNA, 25 bp, Homo sapien
tcctccaaacagttcgtaccacaaa

SEQ ID NO: 872487 - DNA, 25 bp, Homo sapien
tccagctccgtgggcaagttgttgg

SEQ ID NO: 872488 - DNA, 25 bp, Homo sapien
gatcctgccgggagggtagagaggg

SEQ ID NO: 872489 - DNA, 25 bp, Homo sapien
gaccagcgcgtcagtaggctctgct

SEQ ID NO: 872490 - DNA, 25 bp, Homo sapien
gagaacttccagcaacagcatagag

SEQ ID NO: 872491 - DNA, 25 bp, Homo sapien
tctgatcagatggtggaaggagaac

SEQ ID NO: 872492 - DNA, 25 bp, Homo sapien
cactgagggtgcaattcctcccggc

SEQ ID NO: 872493 - DNA, 25 bp, Homo sapien
tagacatcacagagtcctagcccag

SEQ ID NO: 872494 - DNA, 25 bp, Homo sapien
cttgggtttattgcagtgcgcgacc

SEQ ID NO: 872495 - DNA, 25 bp, Homo sapien
gcgaccactcgcaagattcttctct

SEQ ID NO: 872496 - DNA, 25 bp, Homo sapien
cagatcttccaagttggtcacactg

SEQ ID NO: 872497 - DNA, 25 bp, Homo sapien
gatcttccaagttggtcacactgag

SEQ ID NO: 872498 - DNA, 25 bp, Homo sapien
gagtgacacgatgaagctctgagaa

SEQ ID NO: 872499 - DNA, 25 bp, Homo sapien
gacgagtgacacgatgaagctctga

SEQ ID NO: 872500 - DNA, 25 bp, Homo sapien
cccaggacgagtgacacgatgaagc

SEQ ID NO: 872501 - DNA, 25 bp, Homo sapien
caggacgagtgacacgatgaagctc

SEQ ID NO: 872502 - DNA, 25 bp, Homo sapien
gaaacgtcagttatggcaactcact

SEQ ID NO: 872503 - DNA, 25 bp, Homo sapien
gagaggatgttagctttacgatgac

SEQ ID NO: 872504 - DNA, 25 bp, Homo sapien
tgcccacaagggcttccatgaaaga

SEQ ID NO: 872505 - DNA, 25 bp, Homo sapien
tcactggccagatcctactaaagcc

SEQ ID NO: 872506 - DNA, 25 bp, Homo sapien
gtaatgagaactaccagtgccccga

SEQ ID NO: 872507 - DNA, 25 bp, Homo sapien
gtttaagtatcactatacactacag

SEQ ID NO: 872508 - DNA, 25 bp, Homo sapien
tggaaattatgaccagccctgtggt

SEQ ID NO: 872509 - DNA, 25 bp, Homo sapien
ttgctcatttcaagcccaaaacttg

SEQ ID NO: 872510 - DNA, 25 bp, Homo sapien
cgcatggatgtcaacaaccggaccc

SEQ ID NO: 872511 - DNA, 25 bp, Homo sapien
gatgtgcctaccaggcgcatggatg

SEQ ID NO: 872512 - DNA, 25 bp, Homo sapien
tactacgggctctgggcgatgtgcc

SEQ ID NO: 872513 - DNA, 25 bp, Homo sapien
tatgagagatccctacaatctgctg

SEQ ID NO: 872514 - DNA, 25 bp, Homo sapien
gacctgcgggtaggcggctctgagc

SEQ ID NO: 872515 - DNA, 25 bp, Homo sapien
gcgggtaggcggctctgagcatggt

SEQ ID NO: 872516 - DNA, 25 bp, Homo sapien
gggagaaggcgtagcacctgacctg

SEQ ID NO: 872517 - DNA, 25 bp, Homo sapien
tagcacctgacctgcgggtaggcgg

SEQ ID NO: 872518 - DNA, 25 bp, Homo sapien
gaaagaaacgttaactaagatctca

SEQ ID NO: 872519 - DNA, 25 bp, Homo sapien
ccgtcgttgatgagtcgttggtaaa

SEQ ID NO: 872520 - DNA, 25 bp, Homo sapien
caatgctgaaggcttggctcaaaat

SEQ ID NO: 872521 - DNA, 25 bp, Homo sapien
gaaggcttggctcaaaatcccgtcg

SEQ ID NO: 872522 - DNA, 25 bp, Homo sapien
aacgtatctggcagcttgagaaata

SEQ ID NO: 872523 - DNA, 25 bp, Homo sapien
caaagatgggatgacgctgtgcact

SEQ ID NO: 872524 - DNA, 25 bp, Homo sapien
gaaggtggccgttaatcctcagaca

SEQ ID NO: 872525 - DNA, 25 bp, Homo sapien
cacttgaacgcatgaggttgagacc

SEQ ID NO: 872526 - DNA, 25 bp, Homo sapien
cataaagttctaccgctgtgccaag

SEQ ID NO: 872527 - DNA, 25 bp, Homo sapien
gcacctcacactccacgtccagcac

SEQ ID NO: 872528 - DNA, 25 bp, Homo sapien
gtgtgccaggcggtcctgcacctca

SEQ ID NO: 872529 - DNA, 25 bp, Homo sapien
tctccgctgacaggtccgtaaggac

SEQ ID NO: 872530 - DNA, 25 bp, Homo sapien
ccgctgacaggtccgtaaggacatc

SEQ ID NO: 872531 - DNA, 25 bp, Homo sapien
gggcgttgcagaagcggccgtcagc

SEQ ID NO: 872532 - DNA, 25 bp, Homo sapien
aaaaagggcgttgcagaagcggccg

SEQ ID NO: 872533 - DNA, 25 bp, Homo sapien
aagggcgttgcagaagcggccgtca

SEQ ID NO: 872534 - DNA, 25 bp, Homo sapien
aaaagggcgttgcagaagcggccgt

SEQ ID NO: 872535 - DNA, 25 bp, Homo sapien
gaccatggagtgtgcctaagacacg

SEQ ID NO: 872536 - DNA, 25 bp, Homo sapien
cgacggtggaagctcaacattgggt

SEQ ID NO: 872537 - DNA, 25 bp, Homo sapien
tcaggagccccgtaacaggtgaaac

SEQ ID NO: 872538 - DNA, 25 bp, Homo sapien
tgaaaaggtccacaggcgagtgctg

SEQ ID NO: 872539 - DNA, 25 bp, Homo sapien
ggcatctccaaggggcccaggagta

SEQ ID NO: 872540 - DNA, 25 bp, Homo sapien
catctccaaggggcccaggagtatg

SEQ ID NO: 872541 - DNA, 25 bp, Homo sapien
tctccaaggggcccaggagtatgga

SEQ ID NO: 872542 - DNA, 25 bp, Homo sapien
ctggcatctccaaggggcccaggag

SEQ ID NO: 872543 - DNA, 25 bp, Homo sapien
catgggctggggatggatgtcggca

SEQ ID NO: 872544 - DNA, 25 bp, Homo sapien
tggatgtcggcagtcctgacctcac

SEQ ID NO: 872545 - DNA, 25 bp, Homo sapien
ccatgggctggggatggatgtcggc

SEQ ID NO: 872546 - DNA, 25 bp, Homo sapien
ggatggatgtcggcagtcctgacct

SEQ ID NO: 872547 - DNA, 25 bp, Homo sapien
ctggagaacggcaggccacgagggc

SEQ ID NO: 872548 - DNA, 25 bp, Homo sapien
ctctctgcagcaagactgactcact

SEQ ID NO: 872549 - DNA, 25 bp, Homo sapien
gggcgtgactctctgcagcaagact

SEQ ID NO: 872550 - DNA, 25 bp, Homo sapien
atccaaaccgggagcctccagcggg

SEQ ID NO: 872551 - DNA, 25 bp, Homo sapien
ctgtgaggatccaaaccgggagcct

SEQ ID NO: 872552 - DNA, 25 bp, Homo sapien
ttccccagccgagcagctgtgggct

SEQ ID NO: 872553 - DNA, 25 bp, Homo sapien
tcatgcggttactgacggatttccc

SEQ ID NO: 872554 - DNA, 25 bp, Homo sapien
ttactgacggatttccccagccgag

SEQ ID NO: 872555 - DNA, 25 bp, Homo sapien
gtgtctcatgcggttactgacggat

SEQ ID NO: 872556 - DNA, 25 bp, Homo sapien
gatccagagccactaaaaacggcag

SEQ ID NO: 872557 - DNA, 25 bp, Homo sapien
tcctgtgatccagagccactaaaaa

SEQ ID NO: 872558 - DNA, 25 bp, Homo sapien
acaacagactctttcctgtgatcca

SEQ ID NO: 872559 - DNA, 25 bp, Homo sapien
tcacagcgaccacaacagactcttt

SEQ ID NO: 872560 - DNA, 25 bp, Homo sapien
tgtggcccctctgaaatagtacaca

SEQ ID NO: 872561 - DNA, 25 bp, Homo sapien
aagaagtgaagagccgctgtctgca

SEQ ID NO: 872562 - DNA, 25 bp, Homo sapien
gtttgtgtgtctatgaattacggga

SEQ ID NO: 872563 - DNA, 25 bp, Homo sapien
gaaatagtacacaggacttagaagt

SEQ ID NO: 872564 - DNA, 25 bp, Homo sapien
gagccgaagtgacagttgagctgat

SEQ ID NO: 872565 - DNA, 25 bp, Homo sapien
tgatcgcctccgaccaagtcatagt

SEQ ID NO: 872566 - DNA, 25 bp, Homo sapien
cttgtcatggaagctgacgtggatg

SEQ ID NO: 872567 - DNA, 25 bp, Homo sapien
tgacagttgagctgatcgcctccga

SEQ ID NO: 872568 - DNA, 25 bp, Homo sapien
tactatgccgaacagagccacttgg

SEQ ID NO: 872569 - DNA, 25 bp, Homo sapien
ggaccagagcggacaattctcagga

SEQ ID NO: 872570 - DNA, 25 bp, Homo sapien
ccacatgttcccagagacgcgagga

SEQ ID NO: 872571 - DNA, 25 bp, Homo sapien
gccacttggcaaggaacgtccatcc

SEQ ID NO: 872572 - DNA, 25 bp, Homo sapien
gcttaggctgcagggcaatggtgtg

SEQ ID NO: 872573 - DNA, 25 bp, Homo sapien
ctctgttgcttaggctgcagggcaa

SEQ ID NO: 872574 - DNA, 25 bp, Homo sapien
ctgttgcttaggctgcagggcaatg

SEQ ID NO: 872575 - DNA, 25 bp, Homo sapien
gttgcttaggctgcagggcaatggt

SEQ ID NO: 872576 - DNA, 25 bp, Homo sapien
aaactgcatgtaatgatggcagttt

SEQ ID NO: 872577 - DNA, 25 bp, Homo sapien
caaactgcatgtaatgatggcagtt

SEQ ID NO: 872578 - DNA, 25 bp, Homo sapien
cagccccgtgagggggtttctgtag

SEQ ID NO: 872579 - DNA, 25 bp, Homo sapien
gcacagccccgtgagggggtttctg

SEQ ID NO: 872580 - DNA, 25 bp, Homo sapien
cctgggcaggctcttggttgttcct

SEQ ID NO: 872581 - DNA, 25 bp, Homo sapien
gaccacctgggcaggctcttggttg

SEQ ID NO: 872582 - DNA, 25 bp, Homo sapien
gcagaccacctgggcaggctcttgg

SEQ ID NO: 872583 - DNA, 25 bp, Homo sapien
cacctgggcaggctcttggttgttc

SEQ ID NO: 872584 - DNA, 25 bp, Homo sapien
cgaggcccgccgcaatgtcgctggg

SEQ ID NO: 872585 - DNA, 25 bp, Homo sapien
aggcccgccgcaatgtcgctgggca

SEQ ID NO: 872586 - DNA, 25 bp, Homo sapien
gcagggcgaggcccgccgcaatgtc

SEQ ID NO: 872587 - DNA, 25 bp, Homo sapien
ggcgaggcccgccgcaatgtcgctg

SEQ ID NO: 872588 - DNA, 25 bp, Homo sapien
tgccgtactcgaaaaagcaacccga

SEQ ID NO: 872589 - DNA, 25 bp, Homo sapien
taggttgagaaaagctctgccgtac

SEQ ID NO: 872590 - DNA, 25 bp, Homo sapien
ggtcgtctttcccaatgcaacagca

SEQ ID NO: 872591 - DNA, 25 bp, Homo sapien
gcacaagagcttgattctggtttcc

SEQ ID NO: 872592 - DNA, 25 bp, Homo sapien
caatgataatggaaaccactgtggc

SEQ ID NO: 872593 - DNA, 25 bp, Homo sapien
taagtaactggcttgaatcatgact

SEQ ID NO: 872594 - DNA, 25 bp, Homo sapien
cccaagagggtcaaagacaatgata

SEQ ID NO: 872595 - DNA, 25 bp, Homo sapien
cactgtggcagcgatgatgatccaa

SEQ ID NO: 872596 - DNA, 25 bp, Homo sapien
cgccaggcggatgtaaagcagctta

SEQ ID NO: 872597 - DNA, 25 bp, Homo sapien
tacaactgtcctgtcgcactgaaca

SEQ ID NO: 872598 - DNA, 25 bp, Homo sapien
tctctggaaaaaacagcgccaggcg

SEQ ID NO: 872599 - DNA, 25 bp, Homo sapien
tgaccacgacggttgcgatgatgcc

SEQ ID NO: 872600 - DNA, 25 bp, Homo sapien
acgataaatggcttttggatccttc

SEQ ID NO: 872601 - DNA, 25 bp, Homo sapien
ttcagccaggagagcgacgataaat

SEQ ID NO: 872602 - DNA, 25 bp, Homo sapien
tcccctgccctgtatgtcagcttgc

SEQ ID NO: 872603 - DNA, 25 bp, Homo sapien
ccaggagagcgacgataaatggctt

SEQ ID NO: 872604 - DNA, 25 bp, Homo sapien
caataagaagcttcccagcgctgaa

SEQ ID NO: 872605 - DNA, 25 bp, Homo sapien
gaacggagtgaatatgagcatccct

SEQ ID NO: 872606 - DNA, 25 bp, Homo sapien
caagcattgtacgagtgtctaggaa

SEQ ID NO: 872607 - DNA, 25 bp, Homo sapien
tgagctctgaccacaagtacatgat

SEQ ID NO: 872608 - DNA, 25 bp, Homo sapien
atggtataaacttgatgatggtgat

SEQ ID NO: 872609 - DNA, 25 bp, Homo sapien
ggagaatcatgaggacgatcaagta

SEQ ID NO: 872610 - DNA, 25 bp, Homo sapien
tgatggctgacacagtacatatgac

SEQ ID NO: 872611 - DNA, 25 bp, Homo sapien
gatcaagtaactgctgagcaaggct

SEQ ID NO: 872612 - DNA, 25 bp, Homo sapien
tacatatgacaactgccaggagaat

SEQ ID NO: 872613 - DNA, 25 bp, Homo sapien
ctgtgcatgagatacaacgtcagaa

SEQ ID NO: 872614 - DNA, 25 bp, Homo sapien
catgagatacaacgtcagaatgcca

SEQ ID NO: 872615 - DNA, 25 bp, Homo sapien
gtgcatgagatacaacgtcagaatg

SEQ ID NO: 872616 - DNA, 25 bp, Homo sapien
gagatacaacgtcagaatgccaatc

SEQ ID NO: 872617 - DNA, 25 bp, Homo sapien
ggccgaagagtaccatccccggcat

SEQ ID NO: 872618 - DNA, 25 bp, Homo sapien
ggaagaccaagtcgtcgctggcgat

SEQ ID NO: 872619 - DNA, 25 bp, Homo sapien
ccagcgccggccgaagagtaccatc

SEQ ID NO: 872620 - DNA, 25 bp, Homo sapien
gaccagctcgaagaaccctgggaag

SEQ ID NO: 872621 - DNA, 25 bp, Homo sapien
ggcgaaggtcccgtagctcgcactc

SEQ ID NO: 872622 - DNA, 25 bp, Homo sapien
ggacgccgccaccaaattatcggcg

SEQ ID NO: 872623 - DNA, 25 bp, Homo sapien
ctcaagcgcaaacgcagcgagggcg

SEQ ID NO: 872624 - DNA, 25 bp, Homo sapien
tcccgtagctcgcactcaggagaga

SEQ ID NO: 872625 - DNA, 25 bp, Homo sapien
aggccgagatcggcgcaagcgcact

SEQ ID NO: 872626 - DNA, 25 bp, Homo sapien
ctgaggccgagatcggcgcaagcgc

SEQ ID NO: 872627 - DNA, 25 bp, Homo sapien
gcgcactgagccctacaccgcctct

SEQ ID NO: 872628 - DNA, 25 bp, Homo sapien
tacaccgcctcttccgccggagctg

SEQ ID NO: 872629 - DNA, 25 bp, Homo sapien
gaactttgctttatttctcatgatg

SEQ ID NO: 872630 - DNA, 25 bp, Homo sapien
aactttgctttatttctcatgatgc

SEQ ID NO: 872631 - DNA, 25 bp, Homo sapien
attgaaaaacacacaaacacctcaa

SEQ ID NO: 872632 - DNA, 25 bp, Homo sapien
tcgcaggcacccttgctaagatgtc

SEQ ID NO: 872633 - DNA, 25 bp, Homo sapien
tattcgggaagtgaaagtaactgtg

SEQ ID NO: 872634 - DNA, 25 bp, Homo sapien
ttcataaggcgtggcatacaaggcc

SEQ ID NO: 872635 - DNA, 25 bp, Homo sapien
cttggtttccaacgccggcgaggat

SEQ ID NO: 872636 - DNA, 25 bp, Homo sapien
ccaaaacggtggtaacatagccaag

SEQ ID NO: 872637 - DNA, 25 bp, Homo sapien
tttccatgcgttgtgctctccagag

SEQ ID NO: 872638 - DNA, 25 bp, Homo sapien
cagaggatgcgccaggtgtatcaga

SEQ ID NO: 872639 - DNA, 25 bp, Homo sapien
tcctccagaagacgttgtaatgcag

SEQ ID NO: 872640 - DNA, 25 bp, Homo sapien
ggtaacataagtcatgcaacagctc

SEQ ID NO: 872641 - DNA, 25 bp, Homo sapien
caagaaactacgatgtcggctgcgg

SEQ ID NO: 872642 - DNA, 25 bp, Homo sapien
aacgaaggacttccacgtcacgtgg

SEQ ID NO: 872643 - DNA, 25 bp, Homo sapien
gtgagactccatcgacattcagaat

SEQ ID NO: 872644 - DNA, 25 bp, Homo sapien
attaatacagcattaagtttctttg

SEQ ID NO: 872645 - DNA, 25 bp, Homo sapien
ataaaaaaagataaggcaagatgca

SEQ ID NO: 872646 - DNA, 25 bp, Homo sapien
tacagcattaagtttctttgtgtaa

SEQ ID NO: 872647 - DNA, 25 bp, Homo sapien
cagcattaagtttctttgtgtaaaa

SEQ ID NO: 872648 - DNA, 25 bp, Homo sapien
gcgtttttacagagccactgatgac

SEQ ID NO: 872649 - DNA, 25 bp, Homo sapien
tttttacagagccactgatgactat

SEQ ID NO: 872650 - DNA, 25 bp, Homo sapien
gtttttacagagccactgatgacta

SEQ ID NO: 872651 - DNA, 25 bp, Homo sapien
cgtttttacagagccactgatgact

SEQ ID NO: 872652 - DNA, 25 bp, Homo sapien
atcttatgcctttgctgtggtaaga

SEQ ID NO: 872653 - DNA, 25 bp, Homo sapien
tctgtccgagcaccctgaaggacag

SEQ ID NO: 872654 - DNA, 25 bp, Homo sapien
gattttccgtatcaagcatcttatg

SEQ ID NO: 872655 - DNA, 25 bp, Homo sapien
aagtttctgattttccgtatcaagc

SEQ ID NO: 872656 - DNA, 25 bp, Homo sapien
ttatgctggcaaactgagcttcttt

SEQ ID NO: 872657 - DNA, 25 bp, Homo sapien
tgggcaagggcactcctaaaagaac

SEQ ID NO: 872658 - DNA, 25 bp, Homo sapien
gccagtttatgagagagtgccagat

SEQ ID NO: 872659 - DNA, 25 bp, Homo sapien
tcctgatccagaatgttattggcca

SEQ ID NO: 872660 - DNA, 25 bp, Homo sapien
tattggccaatcatgaaagtgtttc

SEQ ID NO: 872661 - DNA, 25 bp, Homo sapien
cctcaaagtagaagcgccagatcca

SEQ ID NO: 872662 - DNA, 25 bp, Homo sapien
gatacaaagcacgatagaggcccag

SEQ ID NO: 872663 - DNA, 25 bp, Homo sapien
gccagatccagttgacaagatacaa

SEQ ID NO: 872664 - DNA, 25 bp, Homo sapien
gaagaagtcacagtataggatggtc

SEQ ID NO: 872665 - DNA, 25 bp, Homo sapien
ggaaggatagccacggactccaggt

SEQ ID NO: 872666 - DNA, 25 bp, Homo sapien
tgcggaaggatagccacggactcca

SEQ ID NO: 872667 - DNA, 25 bp, Homo sapien
cggaaggatagccacggactccagg

SEQ ID NO: 872668 - DNA, 25 bp, Homo sapien
ctgcggaaggatagccacggactcc

SEQ ID NO: 872669 - DNA, 25 bp, Homo sapien
tggtctcaatcccttgacttcgtgt

SEQ ID NO: 872670 - DNA, 25 bp, Homo sapien
tagctggatggtctcaatcccttga

SEQ ID NO: 872671 - DNA, 25 bp, Homo sapien
gttagctggatggtctcaatccctt

SEQ ID NO: 872672 - DNA, 25 bp, Homo sapien
gctggatggtctcaatcccttgact

SEQ ID NO: 872673 - DNA, 25 bp, Homo sapien
gaggagagaaatcgtgattaactaa

SEQ ID NO: 872674 - DNA, 25 bp, Homo sapien
cgtgattaactaaaaatgagaggcc

SEQ ID NO: 872675 - DNA, 25 bp, Homo sapien
ggagagaaatcgtgattaactaaaa

SEQ ID NO: 872676 - DNA, 25 bp, Homo sapien
gaaatcgtgattaactaaaaatgag

SEQ ID NO: 872677 - DNA, 25 bp, Homo sapien
tcaggtacactgtggcataggagca

SEQ ID NO: 872678 - DNA, 25 bp, Homo sapien
tccactcggaaggtatcatgatttc

SEQ ID NO: 872679 - DNA, 25 bp, Homo sapien
cataggagcaggcaaggtagataac

SEQ ID NO: 872680 - DNA, 25 bp, Homo sapien
catgatttccatcgtaggttgcctt

SEQ ID NO: 872681 - DNA, 25 bp, Homo sapien
gttcagttctgaggcataaccacca

SEQ ID NO: 872682 - DNA, 25 bp, Homo sapien
cagttagcctaatgcatctgagagg

SEQ ID NO: 872683 - DNA, 25 bp, Homo sapien
tctcaacgatgccagttaggtgaac

SEQ ID NO: 872684 - DNA, 25 bp, Homo sapien
aaaattctgccatgctgccgcttcg

SEQ ID NO: 872685 - DNA, 25 bp, Homo sapien
ttgcgtacaagtgtttgtgtgaatg

SEQ ID NO: 872686 - DNA, 25 bp, Homo sapien
cactcaccagttgaaggacaggtgg

SEQ ID NO: 872687 - DNA, 25 bp, Homo sapien
tggtttctaatttgggaggacagtg

SEQ ID NO: 872688 - DNA, 25 bp, Homo sapien
ctgtgaacatttgcgtacaagtgtt

SEQ ID NO: 872689 - DNA, 25 bp, Homo sapien
cactgtgcgaaagaactgaagctca

SEQ ID NO: 872690 - DNA, 25 bp, Homo sapien
gtgccaccagtgctacacaaagtgt

SEQ ID NO: 872691 - DNA, 25 bp, Homo sapien
tatatccataggttcgcaactctta

SEQ ID NO: 872692 - DNA, 25 bp, Homo sapien
tactgccatgatctgtgtactctcc

SEQ ID NO: 872693 - DNA, 25 bp, Homo sapien
tagtcccagttatatatacaaggtg

SEQ ID NO: 872694 - DNA, 25 bp, Homo sapien
ttactgatagctcgtttagtcccag

SEQ ID NO: 872695 - DNA, 25 bp, Homo sapien
ccttgttatgtaccaacttgctgga

SEQ ID NO: 872696 - DNA, 25 bp, Homo sapien
gactctgtaatttcccacggcttga

SEQ ID NO: 872697 - DNA, 25 bp, Homo sapien
aaatacacagctgacataaattaag

SEQ ID NO: 872698 - DNA, 25 bp, Homo sapien
gcactgtagatgaaatacattcctg

SEQ ID NO: 872699 - DNA, 25 bp, Homo sapien
tacattcctgtggatggcataccat

SEQ ID NO: 872700 - DNA, 25 bp, Homo sapien
cataaattaagtgtccatagacctg

SEQ ID NO: 872701 - DNA, 25 bp, Homo sapien
ccaggtaacgagttgtgaagaccag

SEQ ID NO: 872702 - DNA, 25 bp, Homo sapien
gtaacgagttgtgaagaccagtgca

SEQ ID NO: 872703 - DNA, 25 bp, Homo sapien
aaaaagatccaggtaacgagttgtg

SEQ ID NO: 872704 - DNA, 25 bp, Homo sapien
agatccaggtaacgagttgtgaaga

SEQ ID NO: 872705 - DNA, 25 bp, Homo sapien
tttgggaggctctaacaggcttttc

SEQ ID NO: 872706 - DNA, 25 bp, Homo sapien
gattcctgtggatcacactgtgcag

SEQ ID NO: 872707 - DNA, 25 bp, Homo sapien
cctgaagagctttgggattcctgtg

SEQ ID NO: 872708 - DNA, 25 bp, Homo sapien
tctagggatggctctgaatgaacaa

SEQ ID NO: 872709 - DNA, 25 bp, Homo sapien
aactcccgctggaataatggcatcg

SEQ ID NO: 872710 - DNA, 25 bp, Homo sapien
tgagaagcaccgactcaggtaagag

SEQ ID NO: 872711 - DNA, 25 bp, Homo sapien
ggtatgagccatgtcgcctggtccc

SEQ ID NO: 872712 - DNA, 25 bp, Homo sapien
gctaagagcggcaattacttggata

SEQ ID NO: 872713 - DNA, 25 bp, Homo sapien
aaatgttgatgccacccttccagat

SEQ ID NO: 872714 - DNA, 25 bp, Homo sapien
gaacagggagcagtcagaccatacc

SEQ ID NO: 872715 - DNA, 25 bp, Homo sapien
tgctgctaaccaagaaaccgggagg

SEQ ID NO: 872716 - DNA, 25 bp, Homo sapien
gatccatcaatagaaaccaaagggc

SEQ ID NO: 872717 - DNA, 25 bp, Homo sapien
aatctgcggatgctaacgtggtccc

SEQ ID NO: 872718 - DNA, 25 bp, Homo sapien
ggttaccaggtaataagatctccca

SEQ ID NO: 872719 - DNA, 25 bp, Homo sapien
tttgaagccggtccatggagtagcg

SEQ ID NO: 872720 - DNA, 25 bp, Homo sapien
gacagccttgctggaaatctgcgga

SEQ ID NO: 872721 - DNA, 25 bp, Homo sapien
atggccgccaggtgggacaggtccc

SEQ ID NO: 872722 - DNA, 25 bp, Homo sapien
gcaggagcgcgtcttccagatcttc

SEQ ID NO: 872723 - DNA, 25 bp, Homo sapien
aggtccccagtcagccggaaaatgt

SEQ ID NO: 872724 - DNA, 25 bp, Homo sapien
ccccagtcagccggaaaatgttcat

SEQ ID NO: 872725 - DNA, 25 bp, Homo sapien
agaggaagcggcgaagatggcgaga

SEQ ID NO: 872726 - DNA, 25 bp, Homo sapien
aagatggcgagatcgcccgcgacgt

SEQ ID NO: 872727 - DNA, 25 bp, Homo sapien
ggcggtggcggtcggcgcagcgcgg

SEQ ID NO: 872728 - DNA, 25 bp, Homo sapien
cgcccgcgacgtggccagggacgtg

SEQ ID NO: 872729 - DNA, 25 bp, Homo sapien
tcatggcttgtccacggagtgtgcc

SEQ ID NO: 872730 - DNA, 25 bp, Homo sapien
gcatctacattgaacgcggaggcga

SEQ ID NO: 872731 - DNA, 25 bp, Homo sapien
gagataggcataggccagacacagg

SEQ ID NO: 872732 - DNA, 25 bp, Homo sapien
tgcatttgggcttgacaggtgctgc

SEQ ID NO: 872733 - DNA, 25 bp, Homo sapien
accacccacagtgagcagccaccac

SEQ ID NO: 872734 - DNA, 25 bp, Homo sapien
ctgaattgcccaccaaatgcaccag

SEQ ID NO: 872735 - DNA, 25 bp, Homo sapien
gaattgcccaccaaatgcaccaggg

SEQ ID NO: 872736 - DNA, 25 bp, Homo sapien
ctgctgaattgcccaccaaatgcac

SEQ ID NO: 872737 - DNA, 25 bp, Homo sapien
gagaccaggctgctagactggttct

SEQ ID NO: 872738 - DNA, 25 bp, Homo sapien
actggttctctgctcagagaaccca

SEQ ID NO: 872739 - DNA, 25 bp, Homo sapien
ccccagctgaacagagggcagcagt

SEQ ID NO: 872740 - DNA, 25 bp, Homo sapien
tggtcactgggcaagggcagaaatg

SEQ ID NO: 872741 - DNA, 25 bp, Homo sapien
accatcagtggttagctctcttcca

SEQ ID NO: 872742 - DNA, 25 bp, Homo sapien
ggtatatgtaggaaccaaagcatag

SEQ ID NO: 872743 - DNA, 25 bp, Homo sapien
ttaatgtattgaaccatcagtggtt

SEQ ID NO: 872744 - DNA, 25 bp, Homo sapien
agttttctgggcaacttcatatgga

SEQ ID NO: 872745 - DNA, 25 bp, Homo sapien
cactccacccatgcgctggtgtatt

SEQ ID NO: 872746 - DNA, 25 bp, Homo sapien
tattctggggtaaccgcctcactaa

SEQ ID NO: 872747 - DNA, 25 bp, Homo sapien
ccacccatgcgctggtgtattctgg

SEQ ID NO: 872748 - DNA, 25 bp, Homo sapien
aatggcggaacgacctttcttctcg

SEQ ID NO: 872749 - DNA, 25 bp, Homo sapien
tgagtgcaactgcacgagctcagct

SEQ ID NO: 872750 - DNA, 25 bp, Homo sapien
caaaaatctttgaggcctccttgag

SEQ ID NO: 872751 - DNA, 25 bp, Homo sapien
gactgaattgtatcgctctccctcc

SEQ ID NO: 872752 - DNA, 25 bp, Homo sapien
ttcgtatgtggaagtcctaacgccc

SEQ ID NO: 872753 - DNA, 25 bp, Homo sapien
gaaaatgccatgtgggctaaccagg

SEQ ID NO: 872754 - DNA, 25 bp, Homo sapien
cctggaagggacatgtgtttctaac

SEQ ID NO: 872755 - DNA, 25 bp, Homo sapien
ggcctggaaatcacgcctgttggag

SEQ ID NO: 872756 - DNA, 25 bp, Homo sapien
tatctctacagatcttatgcagggt

SEQ ID NO: 872757 - DNA, 25 bp, Homo sapien
cacaggtttgggtttgtccactgca

SEQ ID NO: 872758 - DNA, 25 bp, Homo sapien
ggtaactcctgctatatgcctaggc

SEQ ID NO: 872759 - DNA, 25 bp, Homo sapien
caattgggccacctctacacaggtt

SEQ ID NO: 872760 - DNA, 25 bp, Homo sapien
ccgtccaggtgagaagtctggcagt

SEQ ID NO: 872761 - DNA, 25 bp, Homo sapien
ccgaccacagctcggcggctgaggt

SEQ ID NO: 872762 - DNA, 25 bp, Homo sapien
cccggacctcggcagtgtctgggct

SEQ ID NO: 872763 - DNA, 25 bp, Homo sapien
ctcggcagtgtctgggctgccctct

SEQ ID NO: 872764 - DNA, 25 bp, Homo sapien
aggagggcccgaccacagctcggcg

SEQ ID NO: 872765 - DNA, 25 bp, Homo sapien
ggccgcagaggacgcggtgtggcca

SEQ ID NO: 872766 - DNA, 25 bp, Homo sapien
ctgctcaggccgcagaggacgcggt

SEQ ID NO: 872767 - DNA, 25 bp, Homo sapien
ctcaggccgcagaggacgcggtgtg

SEQ ID NO: 872768 - DNA, 25 bp, Homo sapien
caggccgcagaggacgcggtgtggc

SEQ ID NO: 872769 - DNA, 25 bp, Homo sapien
gccaggggtgaaaccatcccggagc

SEQ ID NO: 872770 - DNA, 25 bp, Homo sapien
gggtgaaaccatcccggagctgcgc

SEQ ID NO: 872771 - DNA, 25 bp, Homo sapien
ccaggggtgaaaccatcccggagct

SEQ ID NO: 872772 - DNA, 25 bp, Homo sapien
aggggtgaaaccatcccggagctgc

SEQ ID NO: 872773 - DNA, 25 bp, Homo sapien
tgcagcccgtcgagcgcccgaagtg

SEQ ID NO: 872774 - DNA, 25 bp, Homo sapien
tgaactctgcaaagatgccgaagaa

SEQ ID NO: 872775 - DNA, 25 bp, Homo sapien
gatgccgaagaaagcctcagaggtg

SEQ ID NO: 872776 - DNA, 25 bp, Homo sapien
caaagaaggccagcgccttgcccag

SEQ ID NO: 872777 - DNA, 25 bp, Homo sapien
tgacaggcctcagttaaggaaacag

SEQ ID NO: 872778 - DNA, 25 bp, Homo sapien
caggcctcagttaaggaaacagcca

SEQ ID NO: 872779 - DNA, 25 bp, Homo sapien
gcctcagttaaggaaacagccagcc

SEQ ID NO: 872780 - DNA, 25 bp, Homo sapien
ggcctcagttaaggaaacagccagc

SEQ ID NO: 872781 - DNA, 25 bp, Homo sapien
tttgcttagtgattctctgcagatc

SEQ ID NO: 872782 - DNA, 25 bp, Homo sapien
agagtttgcttagtgattctctgca

SEQ ID NO: 872783 - DNA, 25 bp, Homo sapien
tccgggtgtgaagtgggtgaaagat

SEQ ID NO: 872784 - DNA, 25 bp, Homo sapien
aatccgggtgtgaagtgggtgaaag

SEQ ID NO: 872785 - DNA, 25 bp, Homo sapien
catcaaattcctactcagacactca

SEQ ID NO: 872786 - DNA, 25 bp, Homo sapien
caggggtagatctgacatcaaattc

SEQ ID NO: 872787 - DNA, 25 bp, Homo sapien
aagggcaggggtagatctgacatca

SEQ ID NO: 872788 - DNA, 25 bp, Homo sapien
tgacatcaaattcctactcagacac

SEQ ID NO: 872789 - DNA, 25 bp, Homo sapien
ggaagtcgaggtctccagcggccac

SEQ ID NO: 872790 - DNA, 25 bp, Homo sapien
tctgctggaagtcgaggtctccagc

SEQ ID NO: 872791 - DNA, 25 bp, Homo sapien
tctctgctggaagtcgaggtctcca

SEQ ID NO: 872792 - DNA, 25 bp, Homo sapien
gaatctctgctggaagtcgaggtct

SEQ ID NO: 872793 - DNA, 25 bp, Homo sapien
cccaggatccagcctggtgcaggaa

SEQ ID NO: 872794 - DNA, 25 bp, Homo sapien
ccaggatccagcctggtgcaggaac

SEQ ID NO: 872795 - DNA, 25 bp, Homo sapien
gctgctcagaggatgccgacatgac

SEQ ID NO: 872796 - DNA, 25 bp, Homo sapien
cattgcaaacttgtcctcgctagag

SEQ ID NO: 872797 - DNA, 25 bp, Homo sapien
tgatagtgccatggaggtcagccag

SEQ ID NO: 872798 - DNA, 25 bp, Homo sapien
ggcatcctgtatctcgctgatagtg

SEQ ID NO: 872799 - DNA, 25 bp, Homo sapien
ttgcaaacttgtcctcgctagaggg

SEQ ID NO: 872800 - DNA, 25 bp, Homo sapien
aggtggacttcccatccactgtctt

SEQ ID NO: 872801 - DNA, 25 bp, Homo sapien
aggagttcagggaagtgctggctca

SEQ ID NO: 872802 - DNA, 25 bp, Homo sapien
gaagtgctggctcagcgatttggca

SEQ ID NO: 872803 - DNA, 25 bp, Homo sapien
gctcagcgatttggcaaggatgtgc

SEQ ID NO: 872804 - DNA, 25 bp, Homo sapien
ttttcctgctaggaggagagccctc

SEQ ID NO: 872805 - DNA, 25 bp, Homo sapien
cacaactgagctaggcctggcgtta

SEQ ID NO: 872806 - DNA, 25 bp, Homo sapien
tagcgccttgctggtagagcaaacc

SEQ ID NO: 872807 - DNA, 25 bp, Homo sapien
aaaccagtcgattgctgccggcagg

SEQ ID NO: 872808 - DNA, 25 bp, Homo sapien
gatagttgcccatggccaacacaaa

SEQ ID NO: 872809 - DNA, 25 bp, Homo sapien
tcttgaagcccgtagtcttgttggt

SEQ ID NO: 872810 - DNA, 25 bp, Homo sapien
cagaaagttgatcttgaagcccgta

SEQ ID NO: 872811 - DNA, 25 bp, Homo sapien
gttttgggctgtccatcgttgagat

SEQ ID NO: 872812 - DNA, 25 bp, Homo sapien
agggaggcctggcgcaagcattcaa

SEQ ID NO: 872813 - DNA, 25 bp, Homo sapien
atcttggcgagcttccgactgtttt

SEQ ID NO: 872814 - DNA, 25 bp, Homo sapien
gcaagcattcaaggctgcctcggat

SEQ ID NO: 872815 - DNA, 25 bp, Homo sapien
gaagtggaggctgcgcaggcgtgtc

SEQ ID NO: 872816 - DNA, 25 bp, Homo sapien
taggaagaataagcacgatccctgg

SEQ ID NO: 872817 - DNA, 25 bp, Homo sapien
tctgctggctgcttcggcccgatat

SEQ ID NO: 872818 - DNA, 25 bp, Homo sapien
tgcttcggcccgatattccggtagg

SEQ ID NO: 872819 - DNA, 25 bp, Homo sapien
tattccggtaggaagaataagcacg

SEQ ID NO: 872820 - DNA, 25 bp, Homo sapien
ttggacccctgataggacccggcca

SEQ ID NO: 872821 - DNA, 25 bp, Homo sapien
actcagaggcttgggcgcaatggcg

SEQ ID NO: 872822 - DNA, 25 bp, Homo sapien
tgataggacccggccattaaaggtg

SEQ ID NO: 872823 - DNA, 25 bp, Homo sapien
taaaggtgttaaactgggactcaga

SEQ ID NO: 872824 - DNA, 25 bp, Homo sapien
gccggggctccatgctcatcagcac

SEQ ID NO: 872825 - DNA, 25 bp, Homo sapien
tgcgcgagatgtgcgggctccaggc

SEQ ID NO: 872826 - DNA, 25 bp, Homo sapien
aggacgaactggtccggctcgctga

SEQ ID NO: 872827 - DNA, 25 bp, Homo sapien
tcctcgtcggcgtcgggcgcgaaga

SEQ ID NO: 872828 - DNA, 25 bp, Homo sapien
taggccttcttatgggacaggatct

SEQ ID NO: 872829 - DNA, 25 bp, Homo sapien
tgtaggccttcttatgggacaggat

SEQ ID NO: 872830 - DNA, 25 bp, Homo sapien
gccttcttatgggacaggatctcca

SEQ ID NO: 872831 - DNA, 25 bp, Homo sapien
ggtgttgtaggccttcttatgggac

SEQ ID NO: 872832 - DNA, 25 bp, Homo sapien
caccatgtcactcagcttatcgtag

SEQ ID NO: 872833 - DNA, 25 bp, Homo sapien
tatcgtagtcagagtcttccccgag

SEQ ID NO: 872834 - DNA, 25 bp, Homo sapien
agtggagctccaggtcgaggtattt

SEQ ID NO: 872835 - DNA, 25 bp, Homo sapien
ggtatttcaccatgtcactcagctt

SEQ ID NO: 872836 - DNA, 25 bp, Homo sapien
atgggaggttcagagtaggaggagc

SEQ ID NO: 872837 - DNA, 25 bp, Homo sapien
agggaggatgggaggttcagagtag

SEQ ID NO: 872838 - DNA, 25 bp, Homo sapien
ggatgggaggttcagagtaggagga

SEQ ID NO: 872839 - DNA, 25 bp, Homo sapien
gaggatgggaggttcagagtaggag

SEQ ID NO: 872840 - DNA, 25 bp, Homo sapien
gacacgtggctgtgatgaatggcat

SEQ ID NO: 872841 - DNA, 25 bp, Homo sapien
aatggcatagatgagaggtaacagc

SEQ ID NO: 872842 - DNA, 25 bp, Homo sapien
gaatgaagtcttagaacatggctgc

SEQ ID NO: 872843 - DNA, 25 bp, Homo sapien
gatggatttgggtttggccacatgt

SEQ ID NO: 872844 - DNA, 25 bp, Homo sapien
ctgttcccaccgcaagcgcttgacg

SEQ ID NO: 872845 - DNA, 25 bp, Homo sapien
caccgcaagcgcttgacgctcatgt

SEQ ID NO: 872846 - DNA, 25 bp, Homo sapien
cttgacgctcatgtggctggtctca

SEQ ID NO: 872847 - DNA, 25 bp, Homo sapien
atgtggctggtctcactgcgccggt

SEQ ID NO: 872848 - DNA, 25 bp, Homo sapien
ggtgcacagggcacgggtgggggca

SEQ ID NO: 872849 - DNA, 25 bp, Homo sapien
tggggggtgcacagggcacgggtgg

SEQ ID NO: 872850 - DNA, 25 bp, Homo sapien
gggtgcacagggcacgggtgggggc

SEQ ID NO: 872851 - DNA, 25 bp, Homo sapien
ctgagcagggccccgggaaccatca

SEQ ID NO: 872852 - DNA, 25 bp, Homo sapien
gctgcgggagctgggcttagcgtca

SEQ ID NO: 872853 - DNA, 25 bp, Homo sapien
ctgggcttagcgtcatggaaaggca

SEQ ID NO: 872854 - DNA, 25 bp, Homo sapien
agggccccgggaaccatcagagctg

SEQ ID NO: 872855 - DNA, 25 bp, Homo sapien
tggcggtggtggggggctgagcggg

SEQ ID NO: 872856 - DNA, 25 bp, Homo sapien
gtggcggtggtggggggctgagcgg

SEQ ID NO: 872857 - DNA, 25 bp, Homo sapien
ggtggcggtggtggggggctgagcg

SEQ ID NO: 872858 - DNA, 25 bp, Homo sapien
ctgctgctgatgcagtcgctggcgc

SEQ ID NO: 872859 - DNA, 25 bp, Homo sapien
ctgctgatgcagtcgctggcgctgc

SEQ ID NO: 872860 - DNA, 25 bp, Homo sapien
ggttacgaagctgccctggtcatca

SEQ ID NO: 872861 - DNA, 25 bp, Homo sapien
gcgctgctccgctcattggttacga

SEQ ID NO: 872862 - DNA, 25 bp, Homo sapien
ctgtgagtgggatagcctgagctaa

SEQ ID NO: 872863 - DNA, 25 bp, Homo sapien
agcctgagctaaggaatgggctaac

SEQ ID NO: 872864 - DNA, 25 bp, Homo sapien
cacgggttagcctcaggctgtgagt

SEQ ID NO: 872865 - DNA, 25 bp, Homo sapien
aggaccctgtcacgggttagcctca

SEQ ID NO: 872866 - DNA, 25 bp, Homo sapien
tatgggctagcctcagtcaaggagc

SEQ ID NO: 872867 - DNA, 25 bp, Homo sapien
gataaccttgaacaggagatagggt

SEQ ID NO: 872868 - DNA, 25 bp, Homo sapien
ctgcgacagggaatatgggctagcc

SEQ ID NO: 872869 - DNA, 25 bp, Homo sapien
tcagtcaaggagcatgataaccttg

SEQ ID NO: 872870 - DNA, 25 bp, Homo sapien
ggatagcttgagctagggagtggga

SEQ ID NO: 872871 - DNA, 25 bp, Homo sapien
tgggatagcttgagctagggagtgg

SEQ ID NO: 872872 - DNA, 25 bp, Homo sapien
gggatagcttgagctagggagtggg

SEQ ID NO: 872873 - DNA, 25 bp, Homo sapien
tcgtagtcgttctccggggtcagga

SEQ ID NO: 872874 - DNA, 25 bp, Homo sapien
tcagcacgtccaggaagcggtcagt

SEQ ID NO: 872875 - DNA, 25 bp, Homo sapien
gggtcaggaaatcatccacgatggt

SEQ ID NO: 872876 - DNA, 25 bp, Homo sapien
tcagtatcgcggcttcgcacagggt

SEQ ID NO: 872877 - DNA, 25 bp, Homo sapien
ggggctgtcggggcagatgggcccg

SEQ ID NO: 872878 - DNA, 25 bp, Homo sapien
ggggggctgtcggggcagatgggcc

SEQ ID NO: 872879 - DNA, 25 bp, Homo sapien
ggctgtcggggcagatgggcccggg

SEQ ID NO: 872880 - DNA, 25 bp, Homo sapien
ctgtcggggcagatgggcccggggc

SEQ ID NO: 872881 - DNA, 25 bp, Homo sapien
ccccgaacacagcgggtggtagcag

SEQ ID NO: 872882 - DNA, 25 bp, Homo sapien
gggagggcaagagtcgctcgctggg

SEQ ID NO: 872883 - DNA, 25 bp, Homo sapien
agagtcgctcgctgggccatgagac

SEQ ID NO: 872884 - DNA, 25 bp, Homo sapien
tcgctgggccatgagacgccggaca

SEQ ID NO: 872885 - DNA, 25 bp, Homo sapien
gaggagggatggagtatgaggattc

SEQ ID NO: 872886 - DNA, 25 bp, Homo sapien
ggatggagtatgaggattcctcttc

SEQ ID NO: 872887 - DNA, 25 bp, Homo sapien
gagggatggagtatgaggattcctc

SEQ ID NO: 872888 - DNA, 25 bp, Homo sapien
gggatggagtatgaggattcctctt

SEQ ID NO: 872889 - DNA, 25 bp, Homo sapien
ctggagagagggtcctaggacagac

SEQ ID NO: 872890 - DNA, 25 bp, Homo sapien
ggaagaccttgagcggccctgcctt

SEQ ID NO: 872891 - DNA, 25 bp, Homo sapien
tgcaggaagaccttgagcggccctg

SEQ ID NO: 872892 - DNA, 25 bp, Homo sapien
cctaggacagactggctctgtgtcc

SEQ ID NO: 872893 - DNA, 25 bp, Homo sapien
cttggaatggtcaccaggggtccca

SEQ ID NO: 872894 - DNA, 25 bp, Homo sapien
ttggaatggtcaccaggggtcccag

SEQ ID NO: 872895 - DNA, 25 bp, Homo sapien
tgaacaccattaactcaaagggtgg

SEQ ID NO: 872896 - DNA, 25 bp, Homo sapien
tggaggggtttctctagggcccaga

SEQ ID NO: 872897 - DNA, 25 bp, Homo sapien
gtcatggagcgtctcgcgcacccag

SEQ ID NO: 872898 - DNA, 25 bp, Homo sapien
cacagtcatggagcgtctcgcgcac

SEQ ID NO: 872899 - DNA, 25 bp, Homo sapien
atggagcagagaagcagctccaggg

SEQ ID NO: 872900 - DNA, 25 bp, Homo sapien
cctgatggagcagagaagcagctcc

SEQ ID NO: 872901 - DNA, 25 bp, Homo sapien
ctgatggagcagagaagcagctcca

SEQ ID NO: 872902 - DNA, 25 bp, Homo sapien
gagcagagaagcagctccagggctg

SEQ ID NO: 872903 - DNA, 25 bp, Homo sapien
agctgctgttcagtcgagactcaag

SEQ ID NO: 872904 - DNA, 25 bp, Homo sapien
tgctgttcagtcgagactcaagctc

SEQ ID NO: 872905 - DNA, 25 bp, Homo sapien
tgttcagtcgagactcaagctctgc

SEQ ID NO: 872906 - DNA, 25 bp, Homo sapien
actcaagctctgcatagacggctga

SEQ ID NO: 872907 - DNA, 25 bp, Homo sapien
cttcccctcgtagccctaatgtggt

SEQ ID NO: 872908 - DNA, 25 bp, Homo sapien
tgcttcccctcgtagccctaatgtg

SEQ ID NO: 872909 - DNA, 25 bp, Homo sapien
tctgcttcccctcgtagccctaatg

SEQ ID NO: 872910 - DNA, 25 bp, Homo sapien
ttctgcttcccctcgtagccctaat

SEQ ID NO: 872911 - DNA, 25 bp, Homo sapien
tcagggagggacgtgccgtcgcctg

SEQ ID NO: 872912 - DNA, 25 bp, Homo sapien
gtctcagggagggacgtgccgtcgc

SEQ ID NO: 872913 - DNA, 25 bp, Homo sapien
gggacgtgccgtcgcctgcctggcg

SEQ ID NO: 872914 - DNA, 25 bp, Homo sapien
gagggacgtgccgtcgcctgcctgg

SEQ ID NO: 872915 - DNA, 25 bp, Homo sapien
gggaagaggcatctcagggcactcg

SEQ ID NO: 872916 - DNA, 25 bp, Homo sapien
ggatcaggggaagaggcatctcagg

SEQ ID NO: 872917 - DNA, 25 bp, Homo sapien
gaagaggcatctcagggcactcgct

SEQ ID NO: 872918 - DNA, 25 bp, Homo sapien
agaggcatctcagggcactcgctgg

SEQ ID NO: 872919 - DNA, 25 bp, Homo sapien
ggagctccgcggctggggctcaggc

SEQ ID NO: 872920 - DNA, 25 bp, Homo sapien
ggctcaggcgtgggctcggactcca

SEQ ID NO: 872921 - DNA, 25 bp, Homo sapien
ggcggcacatggaggaagcccgcag

SEQ ID NO: 872922 - DNA, 25 bp, Homo sapien
gcacatggaggaagcccgcagggag

SEQ ID NO: 872923 - DNA, 25 bp, Homo sapien
gcatgcgattttctcctgacagagc

SEQ ID NO: 872924 - DNA, 25 bp, Homo sapien
gtccagcacagggtagacgtcaacg

SEQ ID NO: 872925 - DNA, 25 bp, Homo sapien
tagacgtcaacgatgagggtgtcga

SEQ ID NO: 872926 - DNA, 25 bp, Homo sapien
cccaggaagcatgcgattttctcct

SEQ ID NO: 872927 - DNA, 25 bp, Homo sapien
ccttggacccggatgctggacggca

SEQ ID NO: 872928 - DNA, 25 bp, Homo sapien
cgacgggttgggtgagtccagagaa

SEQ ID NO: 872929 - DNA, 25 bp, Homo sapien
tgctggctgaaggtcctcccttgga

SEQ ID NO: 872930 - DNA, 25 bp, Homo sapien
accccatagcgctcaggaggtgtga

SEQ ID NO: 872931 - DNA, 25 bp, Homo sapien
cagcgtgggcatggcaccactgccc

SEQ ID NO: 872932 - DNA, 25 bp, Homo sapien
actggcaaatgggacgagcccttcc

SEQ ID NO: 872933 - DNA, 25 bp, Homo sapien
ggacaccaccttgtcgtgggagcag

SEQ ID NO: 872934 - DNA, 25 bp, Homo sapien
tggcaaatgggacgagcccttcctc

SEQ ID NO: 872935 - DNA, 25 bp, Homo sapien
acccctggtgtccccaatagcctct

SEQ ID NO: 872936 - DNA, 25 bp, Homo sapien
tgaggaagaggatccggtcacctga

SEQ ID NO: 872937 - DNA, 25 bp, Homo sapien
gaggaagaggatccggtcacctgac

SEQ ID NO: 872938 - DNA, 25 bp, Homo sapien
tcttgttgcctttgtagactcggac

SEQ ID NO: 872939 - DNA, 25 bp, Homo sapien
ccgcgaagtgtgaagccgaagctct

SEQ ID NO: 872940 - DNA, 25 bp, Homo sapien
ccagacaggcccgtggccgcgaagt

SEQ ID NO: 872941 - DNA, 25 bp, Homo sapien
caggacagactcgatccagacaggc

SEQ ID NO: 872942 - DNA, 25 bp, Homo sapien
ggaaaaagaaggggcgagcagcatg

SEQ ID NO: 872943 - DNA, 25 bp, Homo sapien
gaaggggcgagcagcatgatggaga

SEQ ID NO: 872944 - DNA, 25 bp, Homo sapien
aaagaaggggcgagcagcatgatgg

SEQ ID NO: 872945 - DNA, 25 bp, Homo sapien
aaaaagaaggggcgagcagcatgat

SEQ ID NO: 872946 - DNA, 25 bp, Homo sapien
tggagatgtcccgtgtccctctccc

SEQ ID NO: 872947 - DNA, 25 bp, Homo sapien
ctggggcgcagaggttggagatgtc

SEQ ID NO: 872948 - DNA, 25 bp, Homo sapien
gcgcagaggttggagatgtcccgtg

SEQ ID NO: 872949 - DNA, 25 bp, Homo sapien
gttggagatgtcccgtgtccctctc

SEQ ID NO: 872950 - DNA, 25 bp, Homo sapien
cgggggcggctcatcggggcggcgc

SEQ ID NO: 872951 - DNA, 25 bp, Homo sapien
gggggcggctcatcggggcggcgcg

SEQ ID NO: 872952 - DNA, 25 bp, Homo sapien
ctgagacaccacctcgtcgaagcgc

SEQ ID NO: 872953 - DNA, 25 bp, Homo sapien
ggcccggcgtgcgcggcacagcttg

SEQ ID NO: 872954 - DNA, 25 bp, Homo sapien
ccggtgcttcttggggatgaagatc

SEQ ID NO: 872955 - DNA, 25 bp, Homo sapien
tcgtcgaagcgcgcccggtgcttct

SEQ ID NO: 872956 - DNA, 25 bp, Homo sapien
gcgggcgccgccctaggctctccca

SEQ ID NO: 872957 - DNA, 25 bp, Homo sapien
cgaggacggcggagtcggggcgcgt

SEQ ID NO: 872958 - DNA, 25 bp, Homo sapien
ggatctctgcaaaccgcggcccgaa

SEQ ID NO: 872959 - DNA, 25 bp, Homo sapien
cgcgttcccggaccccggatctctg

SEQ ID NO: 872960 - DNA, 25 bp, Homo sapien
atggcccgttcggaccgtcctccat

SEQ ID NO: 872961 - DNA, 25 bp, Homo sapien
cttccggctccagccacagactctg

SEQ ID NO: 872962 - DNA, 25 bp, Homo sapien
agactgtccacctcacttccggctc

SEQ ID NO: 872963 - DNA, 25 bp, Homo sapien
gagactgtccacctcacttccggct

SEQ ID NO: 872964 - DNA, 25 bp, Homo sapien
ggctccagccacagactctgaagac

SEQ ID NO: 872965 - DNA, 25 bp, Homo sapien
ccatgcacccaacccttgagtccaa

SEQ ID NO: 872966 - DNA, 25 bp, Homo sapien
gctctaaatcgagcgcgcccaaggg

SEQ ID NO: 872967 - DNA, 25 bp, Homo sapien
agctgcggggactgggcatccccag

SEQ ID NO: 872968 - DNA, 25 bp, Homo sapien
cgctgcccaggctctaaatcgagcg

SEQ ID NO: 872969 - DNA, 25 bp, Homo sapien
agaggctgccgtttcaagctgcggg

SEQ ID NO: 872970 - DNA, 25 bp, Homo sapien
ggcaggaacagacaccggcagcgct

SEQ ID NO: 872971 - DNA, 25 bp, Homo sapien
ggagacgagcgagccaacttcctgg

SEQ ID NO: 872972 - DNA, 25 bp, Homo sapien
aggagaaccgagagggcctccagcc

SEQ ID NO: 872973 - DNA, 25 bp, Homo sapien
cagccgggagacgagcgagccaact

SEQ ID NO: 872974 - DNA, 25 bp, Homo sapien
gtggtggtcgcctatgctccgctgc

SEQ ID NO: 872975 - DNA, 25 bp, Homo sapien
agcccagtccctgacattggccagg

SEQ ID NO: 872976 - DNA, 25 bp, Homo sapien
atggtggcctctttcggtggtggtc

SEQ ID NO: 872977 - DNA, 25 bp, Homo sapien
tatgctccgctgcagagccgagagc

SEQ ID NO: 872978 - DNA, 25 bp, Homo sapien
ctatcctgccccctgcccgcagtac

SEQ ID NO: 872979 - DNA, 25 bp, Homo sapien
ttcagtgcagcgaacacctgctcct

SEQ ID NO: 872980 - DNA, 25 bp, Homo sapien
cagctgcaaactgcttcagtgcagc

SEQ ID NO: 872981 - DNA, 25 bp, Homo sapien
tgcttcagtgcagcgaacacctgct

SEQ ID NO: 872982 - DNA, 25 bp, Homo sapien
tgcaaactgcttcagtgcagcgaac

SEQ ID NO: 872983 - DNA, 25 bp, Homo sapien
tccattccctgcagcttatataaat

SEQ ID NO: 872984 - DNA, 25 bp, Homo sapien
cattccctgcagcttatataaatgt

SEQ ID NO: 872985 - DNA, 25 bp, Homo sapien
ccattccctgcagcttatataaatg

SEQ ID NO: 872986 - DNA, 25 bp, Homo sapien
ttccctgcagcttatataaatgttc

SEQ ID NO: 872987 - DNA, 25 bp, Homo sapien
gcgaagaaccccagacagtgactct

SEQ ID NO: 872988 - DNA, 25 bp, Homo sapien
tccacgacccagctctggcgaagaa

SEQ ID NO: 872989 - DNA, 25 bp, Homo sapien
ctcttgaactctggaactgtatatc

SEQ ID NO: 872990 - DNA, 25 bp, Homo sapien
tcagacctcgatcttcagccgagag

SEQ ID NO: 872991 - DNA, 25 bp, Homo sapien
ttgcggctgaactcttgggccttgc

SEQ ID NO: 872992 - DNA, 25 bp, Homo sapien
ttcgtggccggcgtggcagtggtgg

SEQ ID NO: 872993 - DNA, 25 bp, Homo sapien
tctggccagccctggttcgtggccg

SEQ ID NO: 872994 - DNA, 25 bp, Homo sapien
acctagccggaagccaaagtcctct

SEQ ID NO: 872995 - DNA, 25 bp, Homo sapien
gggatttcttatgggagcccatggc

SEQ ID NO: 872996 - DNA, 25 bp, Homo sapien
ggatttcttatgggagcccatggcg

SEQ ID NO: 872997 - DNA, 25 bp, Homo sapien
gatttcttatgggagcccatggcgg

SEQ ID NO: 872998 - DNA, 25 bp, Homo sapien
atttcttatgggagcccatggcggc

SEQ ID NO: 872999 - DNA, 25 bp, Homo sapien
gcctatggccgtcttctttgcagaa

SEQ ID NO: 873000 - DNA, 25 bp, Homo sapien
ttggaagaacctctgagggctggtt

SEQ ID NO: 873001 - DNA, 25 bp, Homo sapien
gctgtgtggagatctgcctatggcc

SEQ ID NO: 873002 - DNA, 25 bp, Homo sapien
gcttcctgagctggcttggaagaac

SEQ ID NO: 873003 - DNA, 25 bp, Homo sapien
cagagggcccagtgagagaactcct

SEQ ID NO: 873004 - DNA, 25 bp, Homo sapien
gggcccagtgagagaactccttgca

SEQ ID NO: 873005 - DNA, 25 bp, Homo sapien
caccagagggcccagtgagagaact

SEQ ID NO: 873006 - DNA, 25 bp, Homo sapien
gccaccagagggcccagtgagagaa

SEQ ID NO: 873007 - DNA, 25 bp, Homo sapien
tttggttgggtcagcccgcagtact

SEQ ID NO: 873008 - DNA, 25 bp, Homo sapien
tgaaccctggcaagccctccgatgt

SEQ ID NO: 873009 - DNA, 25 bp, Homo sapien
agcccgcagtactgactctccaggg

SEQ ID NO: 873010 - DNA, 25 bp, Homo sapien
ccacacccagtttggttgggtcagc

SEQ ID NO: 873011 - DNA, 25 bp, Homo sapien
tcgctgatgactgcaatgaccacgg

SEQ ID NO: 873012 - DNA, 25 bp, Homo sapien
tgaccacggagttcagagcacagtg

SEQ ID NO: 873013 - DNA, 25 bp, Homo sapien
cagggccttggcatcagttaccgat

SEQ ID NO: 873014 - DNA, 25 bp, Homo sapien
agttaccgatgtgcccgcagtgaca

SEQ ID NO: 873015 - DNA, 25 bp, Homo sapien
ctacggcaaagtgatcccctgggta

SEQ ID NO: 873016 - DNA, 25 bp, Homo sapien
tcctggttgggggtgagccacggct

SEQ ID NO: 873017 - DNA, 25 bp, Homo sapien
ggcctggcccatgcacgaggtccca

SEQ ID NO: 873018 - DNA, 25 bp, Homo sapien
gcccatgcacgaggtcccagagcat

SEQ ID NO: 873019 - DNA, 25 bp, Homo sapien
ctggcccatgcacgaggtcccagag

SEQ ID NO: 873020 - DNA, 25 bp, Homo sapien
gcaggtaggtcgagaggattcaggg

SEQ ID NO: 873021 - DNA, 25 bp, Homo sapien
cacttagttcagagggaacagtgat

SEQ ID NO: 873022 - DNA, 25 bp, Homo sapien
gggtgtatcacttagttcagaggga

SEQ ID NO: 873023 - DNA, 25 bp, Homo sapien
ggtggggtgtatcacttagttcaga

SEQ ID NO: 873024 - DNA, 25 bp, Homo sapien
agttccacagagaatgccgcagtgg

SEQ ID NO: 873025 - DNA, 25 bp, Homo sapien
ctgtgagacccaaaagggcgtggga

SEQ ID NO: 873026 - DNA, 25 bp, Homo sapien
agaatgccgcagtgggagcccgaca

SEQ ID NO: 873027 - DNA, 25 bp, Homo sapien
aagggcgtgggaatccagttccaca

SEQ ID NO: 873028 - DNA, 25 bp, Homo sapien
tgtttttgcgagcctatgtaagcca

SEQ ID NO: 873029 - DNA, 25 bp, Homo sapien
gtttttgcgagcctatgtaagccat

SEQ ID NO: 873030 - DNA, 25 bp, Homo sapien
cttgtttttgcgagcctatgtaagc

SEQ ID NO: 873031 - DNA, 25 bp, Homo sapien
ttgtttttgcgagcctatgtaagcc

SEQ ID NO: 873032 - DNA, 25 bp, Homo sapien
caacactatgtattccagatgcctc

SEQ ID NO: 873033 - DNA, 25 bp, Homo sapien
tgtctgtgtgtgcaacaaccaccca

SEQ ID NO: 873034 - DNA, 25 bp, Homo sapien
gggctacggtgatcactagagccat

SEQ ID NO: 873035 - DNA, 25 bp, Homo sapien
actgcagtctcaggcagcacggctt

SEQ ID NO: 873036 - DNA, 25 bp, Homo sapien
acctgagcaactcatgtgctttggg

SEQ ID NO: 873037 - DNA, 25 bp, Homo sapien
gaaactgatcctctgtagcttcagc

SEQ ID NO: 873038 - DNA, 25 bp, Homo sapien
cctcacctgagcaactcatgtgctt

SEQ ID NO: 873039 - DNA, 25 bp, Homo sapien
gcccacacatccttccagaatccag

SEQ ID NO: 873040 - DNA, 25 bp, Homo sapien
tatgagctaggtgctaaaatagttg

SEQ ID NO: 873041 - DNA, 25 bp, Homo sapien
taagccaacacagatccagtccttt

SEQ ID NO: 873042 - DNA, 25 bp, Homo sapien
tagttgctactgatataacagtaag

SEQ ID NO: 873043 - DNA, 25 bp, Homo sapien
tgatataacagtaagccaacacaga

SEQ ID NO: 873044 - DNA, 25 bp, Homo sapien
agctactggtcatgccaggcacaca

SEQ ID NO: 873045 - DNA, 25 bp, Homo sapien
ccatgtccggcagctactggtcatg

SEQ ID NO: 873046 - DNA, 25 bp, Homo sapien
caggaaactcttgtatgtactggga

SEQ ID NO: 873047 - DNA, 25 bp, Homo sapien
tgtactgggattattctgggctgct

SEQ ID NO: 873048 - DNA, 25 bp, Homo sapien
catgctgggctttgtcgtggttctg

SEQ ID NO: 873049 - DNA, 25 bp, Homo sapien
ccagtgttcactctcatggatgtca

SEQ ID NO: 873050 - DNA, 25 bp, Homo sapien
tactaacgagtggtacagaggtgac

SEQ ID NO: 873051 - DNA, 25 bp, Homo sapien
tttgtcctgtatctggcggccacca

SEQ ID NO: 873052 - DNA, 25 bp, Homo sapien
ggcttcggagcaaccttcaagagat

SEQ ID NO: 873053 - DNA, 25 bp, Homo sapien
tggtgccagcgttgtccccttgtgg

SEQ ID NO: 873054 - DNA, 25 bp, Homo sapien
tataaatcactttcggtgggcaagg

SEQ ID NO: 873055 - DNA, 25 bp, Homo sapien
tgaaatcaaccagcggcagctctga

SEQ ID NO: 873056 - DNA, 25 bp, Homo sapien
gaccttggtgtctctaaactctggg

SEQ ID NO: 873057 - DNA, 25 bp, Homo sapien
tgaaaccgggcatctctgaagtcct

SEQ ID NO: 873058 - DNA, 25 bp, Homo sapien
gagttcgtgttccaggtgcccaagg

SEQ ID NO: 873059 - DNA, 25 bp, Homo sapien
ccatcgtggacaagggccccgtgga

SEQ ID NO: 873060 - DNA, 25 bp, Homo sapien
gaggagttcgtgttccaggtgccca

SEQ ID NO: 873061 - DNA, 25 bp, Homo sapien
gcgccgctgcccatcgtggacaagg

SEQ ID NO: 873062 - DNA, 25 bp, Homo sapien
agccctcaagggaacaaagccgatg

SEQ ID NO: 873063 - DNA, 25 bp, Homo sapien
accaaggactctgttcggcagatta

SEQ ID NO: 873064 - DNA, 25 bp, Homo sapien
caaagccgatgacagccggatgagc

SEQ ID NO: 873065 - DNA, 25 bp, Homo sapien
tggctgtgtgtcgaatcccggtgtt

SEQ ID NO: 873066 - DNA, 25 bp, Homo sapien
tcacctggatttttgaggacccaag

SEQ ID NO: 873067 - DNA, 25 bp, Homo sapien
gggctgatcctcttcgaccacatgg

SEQ ID NO: 873068 - DNA, 25 bp, Homo sapien
aataggattcttagagctcaccccg

SEQ ID NO: 873069 - DNA, 25 bp, Homo sapien
tcccgctggtagaggagatcaacag

SEQ ID NO: 873070 - DNA, 25 bp, Homo sapien
cccagtggccgtgtcaggtccagca

SEQ ID NO: 873071 - DNA, 25 bp, Homo sapien
cagaaacatgcataactcgagtcca

SEQ ID NO: 873072 - DNA, 25 bp, Homo sapien
gcagcgctcgcaggctgagacagaa

SEQ ID NO: 873073 - DNA, 25 bp, Homo sapien
gttcagccggatgctggtccacagc

SEQ ID NO: 873074 - DNA, 25 bp, Homo sapien
accgcatccttgtgtgggggttggg

SEQ ID NO: 873075 - DNA, 25 bp, Homo sapien
gttggggactcccatccgtgccaca

SEQ ID NO: 873076 - DNA, 25 bp, Homo sapien
gggttggggactcccatccgtgcca

SEQ ID NO: 873077 - DNA, 25 bp, Homo sapien
ggactcccatccgtgccacactcac

SEQ ID NO: 873078 - DNA, 25 bp, Homo sapien
gcagatgtctggatgggtacaaagc

SEQ ID NO: 873079 - DNA, 25 bp, Homo sapien
gagccggggcagatgtctggatggg

SEQ ID NO: 873080 - DNA, 25 bp, Homo sapien
ccggggcagatgtctggatgggtac

SEQ ID NO: 873081 - DNA, 25 bp, Homo sapien
gaggagccggggcagatgtctggat

SEQ ID NO: 873082 - DNA, 25 bp, Homo sapien
tctcggctctgaggagactgtggcc

SEQ ID NO: 873083 - DNA, 25 bp, Homo sapien
tctgcttggaattcaggtagggcgc

SEQ ID NO: 873084 - DNA, 25 bp, Homo sapien
ggtcgtttgcaaggccagcttcctg

SEQ ID NO: 873085 - DNA, 25 bp, Homo sapien
gtagggcgcggtcattctcggctct

SEQ ID NO: 873086 - DNA, 25 bp, Homo sapien
acgcatcctcgcctgtggggtcctg

SEQ ID NO: 873087 - DNA, 25 bp, Homo sapien
ccgggagtgctacggccggagctcc

SEQ ID NO: 873088 - DNA, 25 bp, Homo sapien
agctccgtgggccacaggccccgtg

SEQ ID NO: 873089 - DNA, 25 bp, Homo sapien
tggtccgtgcctgtgtcggtgcctc

SEQ ID NO: 873090 - DNA, 25 bp, Homo sapien
agctggtgatctcgggtcccgtgca

SEQ ID NO: 873091 - DNA, 25 bp, Homo sapien
tgcttgtgttcgcagcctcctccag

SEQ ID NO: 873092 - DNA, 25 bp, Homo sapien
cgcccgcgctgacgcttatgcttgt

SEQ ID NO: 873093 - DNA, 25 bp, Homo sapien
ctccagctggtgatctcgggtcccg

SEQ ID NO: 873094 - DNA, 25 bp, Homo sapien
cagaaccgtcttggtgtcacggagt

SEQ ID NO: 873095 - DNA, 25 bp, Homo sapien
taaaagatgccgatcctgggagcct

SEQ ID NO: 873096 - DNA, 25 bp, Homo sapien
tgtccccgccagaaaaagtgggctc

SEQ ID NO: 873097 - DNA, 25 bp, Homo sapien
tatgtgcagcactgctcagggaggc

SEQ ID NO: 873098 - DNA, 25 bp, Homo sapien
agctgcacggcgcgggccgctccag

SEQ ID NO: 873099 - DNA, 25 bp, Homo sapien
tgcacggcgcgggccgctccagggg

SEQ ID NO: 873100 - DNA, 25 bp, Homo sapien
gctgcacggcgcgggccgctccagg

SEQ ID NO: 873101 - DNA, 25 bp, Homo sapien
ctgcacggcgcgggccgctccaggg

SEQ ID NO: 873102 - DNA, 25 bp, Homo sapien
tatccgggctttccctcatctgcag

SEQ ID NO: 873103 - DNA, 25 bp, Homo sapien
ccgtggaaataacctgcaccaggag

SEQ ID NO: 873104 - DNA, 25 bp, Homo sapien
ggctgtcatcgtctaggtctctgca

SEQ ID NO: 873105 - DNA, 25 bp, Homo sapien
tggttcaacaagtgtgggcaggtct

SEQ ID NO: 873106 - DNA, 25 bp, Homo sapien
caggcttatccagctaggtgacggc

SEQ ID NO: 873107 - DNA, 25 bp, Homo sapien
tgcacaggtgcctcgcaaggctgaa

SEQ ID NO: 873108 - DNA, 25 bp, Homo sapien
tgcggctctaggtccccatatggaa

SEQ ID NO: 873109 - DNA, 25 bp, Homo sapien
ttttttcacagtgaagccgggcctg

SEQ ID NO: 873110 - DNA, 25 bp, Homo sapien
gacttccagcgccaccgacgcggcg

SEQ ID NO: 873111 - DNA, 25 bp, Homo sapien
cttccagcgccaccgacgcggcggg

SEQ ID NO: 873112 - DNA, 25 bp, Homo sapien
cgcgccgacttccagcgccaccgac

SEQ ID NO: 873113 - DNA, 25 bp, Homo sapien
cgccgacttccagcgccaccgacgc

SEQ ID NO: 873114 - DNA, 25 bp, Homo sapien
tgggcctacccgacttccgagagcg

SEQ ID NO: 873115 - DNA, 25 bp, Homo sapien
agtcctggctgcacccggacagctt

SEQ ID NO: 873116 - DNA, 25 bp, Homo sapien
tgctcggactgcggcaagacgtttg

SEQ ID NO: 873117 - DNA, 25 bp, Homo sapien
accgggctggcgtgcgaccctttcg

SEQ ID NO: 873118 - DNA, 25 bp, Homo sapien
cggagactgcgatatcccctgggtg

SEQ ID NO: 873119 - DNA, 25 bp, Homo sapien
gctatttatttcactcggattccga

SEQ ID NO: 873120 - DNA, 25 bp, Homo sapien
ttcgcgggcggcacaagcttcggct

SEQ ID NO: 873121 - DNA, 25 bp, Homo sapien
tccgtgtgctcagccggagacgtgg

SEQ ID NO: 873122 - DNA, 25 bp, Homo sapien
ttgaagccttattctcgagccgcct

SEQ ID NO: 873123 - DNA, 25 bp, Homo sapien
ccagataccaaacttacggccaggc

SEQ ID NO: 873124 - DNA, 25 bp, Homo sapien
cttgtatggcctgaagaatctagga

SEQ ID NO: 873125 - DNA, 25 bp, Homo sapien
ttggtactttcgtctccctcagccg

SEQ ID NO: 873126 - DNA, 25 bp, Homo sapien
tccctgcgggacaggagcctcagaa

SEQ ID NO: 873127 - DNA, 25 bp, Homo sapien
ccctgcgggacaggagcctcagaaa

SEQ ID NO: 873128 - DNA, 25 bp, Homo sapien
gggggctctgggaatctcagctcta

SEQ ID NO: 873129 - DNA, 25 bp, Homo sapien
ctctagccctgtatggccaggatct

SEQ ID NO: 873130 - DNA, 25 bp, Homo sapien
tacaaggtgtttgacttcaggcagg

SEQ ID NO: 873131 - DNA, 25 bp, Homo sapien
gaattgggccctgtgaccactgtaa

SEQ ID NO: 873132 - DNA, 25 bp, Homo sapien
tccaaaggaggagtggctacaaggc

SEQ ID NO: 873133 - DNA, 25 bp, Homo sapien
agattatgagtccaacacacaaggg

SEQ ID NO: 873134 - DNA, 25 bp, Homo sapien
catctattacattcatattgcctct

SEQ ID NO: 873135 - DNA, 25 bp, Homo sapien
tgatggctgttgaatgctgatttgt

SEQ ID NO: 873136 - DNA, 25 bp, Homo sapien
ccacatctattacattcatattgcc

SEQ ID NO: 873137 - DNA, 25 bp, Homo sapien
ctgatggctgttgaatgctgatttg

SEQ ID NO: 873138 - DNA, 25 bp, Homo sapien
tagaatttttttccacattcagtac

SEQ ID NO: 873139 - DNA, 25 bp, Homo sapien
gtagaatttttttccacattcagta

SEQ ID NO: 873140 - DNA, 25 bp, Homo sapien
ttcataacattcgtaggctttctct

SEQ ID NO: 873141 - DNA, 25 bp, Homo sapien
taggacatctgagagaagcacttcc

SEQ ID NO: 873142 - DNA, 25 bp, Homo sapien
cgatgtctacaaagggctgagttct

SEQ ID NO: 873143 - DNA, 25 bp, Homo sapien
gacaactgggagaataactttccac

SEQ ID NO: 873144 - DNA, 25 bp, Homo sapien
attcattacattcatagggtttctc

SEQ ID NO: 873145 - DNA, 25 bp, Homo sapien
acattcattacattcatagggtttc

SEQ ID NO: 873146 - DNA, 25 bp, Homo sapien
gtagaaggtttttccacattcatta

SEQ ID NO: 873147 - DNA, 25 bp, Homo sapien
tcattacattcatagggtttctctc

SEQ ID NO: 873148 - DNA, 25 bp, Homo sapien
gatatgacaaccgagagaagaattt

SEQ ID NO: 873149 - DNA, 25 bp, Homo sapien
taagtgctgacttctgcgagaaggt

SEQ ID NO: 873150 - DNA, 25 bp, Homo sapien
tagacttgcggcagaagcatttccc

SEQ ID NO: 873151 - DNA, 25 bp, Homo sapien
tccatatgagatgtctgatgtacag

SEQ ID NO: 873152 - DNA, 25 bp, Homo sapien
tccattccacttatagggcttttct

SEQ ID NO: 873153 - DNA, 25 bp, Homo sapien
atttcagatccattccacttatagg

SEQ ID NO: 873154 - DNA, 25 bp, Homo sapien
ttcagatccattccacttatagggc

SEQ ID NO: 873155 - DNA, 25 bp, Homo sapien
cagatccattccacttatagggctt

SEQ ID NO: 873156 - DNA, 25 bp, Homo sapien
caaaatacgaattttctgataaaga

SEQ ID NO: 873157 - DNA, 25 bp, Homo sapien
tcatttagagtataaggttccccat

SEQ ID NO: 873158 - DNA, 25 bp, Homo sapien
tagagtataaggttccccattttga

SEQ ID NO: 873159 - DNA, 25 bp, Homo sapien
ttcttcatttagagtataaggttcc

SEQ ID NO: 873160 - DNA, 25 bp, Homo sapien
tttgattaaattcataagcttgatc

SEQ ID NO: 873161 - DNA, 25 bp, Homo sapien
tcagctttcattcttgcatagcttc

SEQ ID NO: 873162 - DNA, 25 bp, Homo sapien
cacatccactacattcatcagcttt

SEQ ID NO: 873163 - DNA, 25 bp, Homo sapien
aagcttaatatggaggagtgatttc

SEQ ID NO: 873164 - DNA, 25 bp, Homo sapien
tctcaagcttaatatggaggagtga

SEQ ID NO: 873165 - DNA, 25 bp, Homo sapien
tgaaacagacgttaaacacttttca

SEQ ID NO: 873166 - DNA, 25 bp, Homo sapien
acagacgttaaacacttttcacatg

SEQ ID NO: 873167 - DNA, 25 bp, Homo sapien
tgaaggaacagggttcgtttctaca

SEQ ID NO: 873168 - DNA, 25 bp, Homo sapien
tctacatcaaaagttttaccaggaa

SEQ ID NO: 873169 - DNA, 25 bp, Homo sapien
attctctctattaggtcatcagttt

SEQ ID NO: 873170 - DNA, 25 bp, Homo sapien
acacagtttgccttgaaggtttatt

SEQ ID NO: 873171 - DNA, 25 bp, Homo sapien
tctattaggtcatcagtttgccaga

SEQ ID NO: 873172 - DNA, 25 bp, Homo sapien
atgaacacagtttgccttgaaggtt

SEQ ID NO: 873173 - DNA, 25 bp, Homo sapien
gataacatgcccctttccttacagg

SEQ ID NO: 873174 - DNA, 25 bp, Homo sapien
cacccctaggtgaaactgaagtcga

SEQ ID NO: 873175 - DNA, 25 bp, Homo sapien
tttggcccaggcatgcatatttaga

SEQ ID NO: 873176 - DNA, 25 bp, Homo sapien
agaaagttctttcacctgcctagct

SEQ ID NO: 873177 - DNA, 25 bp, Homo sapien
cattaggagtgtgaaccaaacggag

SEQ ID NO: 873178 - DNA, 25 bp, Homo sapien
gaggctagcgatgatatcaactgga

SEQ ID NO: 873179 - DNA, 25 bp, Homo sapien
tacaggcctaatattgttgagatcc

SEQ ID NO: 873180 - DNA, 25 bp, Homo sapien
tataggcttatcttgtgaggctagc

SEQ ID NO: 873181 - DNA, 25 bp, Homo sapien
atttctagtcacttctaaaggttcg

SEQ ID NO: 873182 - DNA, 25 bp, Homo sapien
tatttctagtcacttctaaaggttc

SEQ ID NO: 873183 - DNA, 25 bp, Homo sapien
tctagtcacttctaaaggttcggga

SEQ ID NO: 873184 - DNA, 25 bp, Homo sapien
ccaagttaccgatctcctcactgcc

SEQ ID NO: 873185 - DNA, 25 bp, Homo sapien
tcccaagttaccgatctcctcactg

SEQ ID NO: 873186 - DNA, 25 bp, Homo sapien
cccaagttaccgatctcctcactgc

SEQ ID NO: 873187 - DNA, 25 bp, Homo sapien
actcccaagttaccgatctcctcac

SEQ ID NO: 873188 - DNA, 25 bp, Homo sapien
ctggatagctctgaagtaggaattc

SEQ ID NO: 873189 - DNA, 25 bp, Homo sapien
ccaacttgctgataacatccggttt

SEQ ID NO: 873190 - DNA, 25 bp, Homo sapien
aacttgctgataacatccggtttga

SEQ ID NO: 873191 - DNA, 25 bp, Homo sapien
taggaattctccttctactatccat

SEQ ID NO: 873192 - DNA, 25 bp, Homo sapien
ctagattgctgtagttctccagcat

SEQ ID NO: 873193 - DNA, 25 bp, Homo sapien
aaactagattgctgtagttctccag

SEQ ID NO: 873194 - DNA, 25 bp, Homo sapien
aactagattgctgtagttctccagc

SEQ ID NO: 873195 - DNA, 25 bp, Homo sapien
agaaactagattgctgtagttctcc

SEQ ID NO: 873196 - DNA, 25 bp, Homo sapien
acatccctgtaagttatcttctgct

SEQ ID NO: 873197 - DNA, 25 bp, Homo sapien
tgctcaggatccagctgctgccatt

SEQ ID NO: 873198 - DNA, 25 bp, Homo sapien
ccctgtaagttatcttctgctcagg

SEQ ID NO: 873199 - DNA, 25 bp, Homo sapien
tccctgtaagttatcttctgctcag

SEQ ID NO: 873200 - DNA, 25 bp, Homo sapien
aaatggcaccgtgattggaattggg

SEQ ID NO: 873201 - DNA, 25 bp, Homo sapien
gaattgggtgacgtgaaataggcac

SEQ ID NO: 873202 - DNA, 25 bp, Homo sapien
aatggcaccgtgattggaattgggt

SEQ ID NO: 873203 - DNA, 25 bp, Homo sapien
cgtgaaataggcacataggtacaag

SEQ ID NO: 873204 - DNA, 25 bp, Homo sapien
gaatctcacccctgaggagcacagg

SEQ ID NO: 873205 - DNA, 25 bp, Homo sapien
ttaacaccagcagggacgaatctca

SEQ ID NO: 873206 - DNA, 25 bp, Homo sapien
tcctgaatgttgtgggcctacggct

SEQ ID NO: 873207 - DNA, 25 bp, Homo sapien
tgcacggtgagccagaaacaatcct

SEQ ID NO: 873208 - DNA, 25 bp, Homo sapien
tacatatgtgccagggacacgatct

SEQ ID NO: 873209 - DNA, 25 bp, Homo sapien
aaggcttgaagttctctgtaggaca

SEQ ID NO: 873210 - DNA, 25 bp, Homo sapien
gaatcccattagctaggagagtcct

SEQ ID NO: 873211 - DNA, 25 bp, Homo sapien
gggtccatctgggtatttatctgca

SEQ ID NO: 873212 - DNA, 25 bp, Homo sapien
tgccactaacccgaattattccagg

SEQ ID NO: 873213 - DNA, 25 bp, Homo sapien
aagcctctgccactaacccgaatta

SEQ ID NO: 873214 - DNA, 25 bp, Homo sapien
tggtctcctgagtgcctttacaagc

SEQ ID NO: 873215 - DNA, 25 bp, Homo sapien
ggctggcaaatgccacctttccctt

SEQ ID NO: 873216 - DNA, 25 bp, Homo sapien
ggcttcagaaactgcacgctcctgg

SEQ ID NO: 873217 - DNA, 25 bp, Homo sapien
ccagactgcacatgggagagtacca

SEQ ID NO: 873218 - DNA, 25 bp, Homo sapien
agagagtcacatgacctcccctgag

SEQ ID NO: 873219 - DNA, 25 bp, Homo sapien
gacacagttgatcacctgtccctga

SEQ ID NO: 873220 - DNA, 25 bp, Homo sapien
gcttgaatcagggatagcgccactg

SEQ ID NO: 873221 - DNA, 25 bp, Homo sapien
cgcttgaatcagggatagcgccact

SEQ ID NO: 873222 - DNA, 25 bp, Homo sapien
tttctgctgctcttggaaaaatctg

SEQ ID NO: 873223 - DNA, 25 bp, Homo sapien
gctgctcttggaaaaatctggagga

SEQ ID NO: 873224 - DNA, 25 bp, Homo sapien
tgctgctcttggaaaaatctggagg

SEQ ID NO: 873225 - DNA, 25 bp, Homo sapien
tctgctgctcttggaaaaatctgga

SEQ ID NO: 873226 - DNA, 25 bp, Homo sapien
ctcccggagcccagatccgtctccc

SEQ ID NO: 873227 - DNA, 25 bp, Homo sapien
gccggggcgggattgctgtcgcggg

SEQ ID NO: 873228 - DNA, 25 bp, Homo sapien
gcgtccctcccggagcccagatccg

SEQ ID NO: 873229 - DNA, 25 bp, Homo sapien
cgggattgctgtcgcgggcgcgcgt

SEQ ID NO: 873230 - DNA, 25 bp, Homo sapien
agcgccgtcggctccgggggtcgtg

SEQ ID NO: 873231 - DNA, 25 bp, Homo sapien
gggccgggccgtcgaggacgcacac

SEQ ID NO: 873232 - DNA, 25 bp, Homo sapien
ttcgcctccgccgtcgtcaccgccc

SEQ ID NO: 873233 - DNA, 25 bp, Homo sapien
gtcgaggacgcacacgggccgggcc

SEQ ID NO: 873234 - DNA, 25 bp, Homo sapien
gccggcccggctcttcggcgcccag

SEQ ID NO: 873235 - DNA, 25 bp, Homo sapien
ttgggtgccggcccggctcttcggc

SEQ ID NO: 873236 - DNA, 25 bp, Homo sapien
cccgcttgggtgccggcccggctct

SEQ ID NO: 873237 - DNA, 25 bp, Homo sapien
gtgccggcccggctcttcggcgccc

SEQ ID NO: 873238 - DNA, 25 bp, Homo sapien
ctggggacgcacaggaagcgagggc

SEQ ID NO: 873239 - DNA, 25 bp, Homo sapien
gaactagggcgagcggtgacctggg

SEQ ID NO: 873240 - DNA, 25 bp, Homo sapien
ggacgcacaggaagcgagggcactg

SEQ ID NO: 873241 - DNA, 25 bp, Homo sapien
gtgacctggggacgcacaggaagcg

SEQ ID NO: 873242 - DNA, 25 bp, Homo sapien
ggtgcacatgcgcaggaatgcaccg

SEQ ID NO: 873243 - DNA, 25 bp, Homo sapien
catgcgcaggaatgcaccggaagtc

SEQ ID NO: 873244 - DNA, 25 bp, Homo sapien
aggacaaataccgtgactctatttc

SEQ ID NO: 873245 - DNA, 25 bp, Homo sapien
tgcacatgcgcaggaatgcaccgga

SEQ ID NO: 873246 - DNA, 25 bp, Homo sapien
cttgctgaaaatctgcatctcccct

SEQ ID NO: 873247 - DNA, 25 bp, Homo sapien
gttcttgctgaaaatctgcatctcc

SEQ ID NO: 873248 - DNA, 25 bp, Homo sapien
gaataaagttcttgctgaaaatctg

SEQ ID NO: 873249 - DNA, 25 bp, Homo sapien
aaagttcttgctgaaaatctgcatc

SEQ ID NO: 873250 - DNA, 25 bp, Homo sapien
gaagcgtatggaacaaggcaatctg

SEQ ID NO: 873251 - DNA, 25 bp, Homo sapien
gacccggaaatgaagcgtatggaac

SEQ ID NO: 873252 - DNA, 25 bp, Homo sapien
cggaagacccggaaatgaagcgtat

SEQ ID NO: 873253 - DNA, 25 bp, Homo sapien
cagcacacagaacggaagacccgga

SEQ ID NO: 873254 - DNA, 25 bp, Homo sapien
ctggggacagctatcaggttactgc

SEQ ID NO: 873255 - DNA, 25 bp, Homo sapien
ggggacagctatcaggttactgctc

SEQ ID NO: 873256 - DNA, 25 bp, Homo sapien
gagacttctggctgacgtcagcttc

SEQ ID NO: 873257 - DNA, 25 bp, Homo sapien
tggggacagctatcaggttactgct

SEQ ID NO: 873258 - DNA, 25 bp, Homo sapien
cattggatattgaccgataggaggc

SEQ ID NO: 873259 - DNA, 25 bp, Homo sapien
ccagagcattggatattgaccgata

SEQ ID NO: 873260 - DNA, 25 bp, Homo sapien
gtcccagagcattggatattgaccg

SEQ ID NO: 873261 - DNA, 25 bp, Homo sapien
tattgaccgataggaggcagcaaac

SEQ ID NO: 873262 - DNA, 25 bp, Homo sapien
tctggcccggctaaaatacgctgac

SEQ ID NO: 873263 - DNA, 25 bp, Homo sapien
ggcccggctaaaatacgctgaccat

SEQ ID NO: 873264 - DNA, 25 bp, Homo sapien
ctggcccggctaaaatacgctgacc

SEQ ID NO: 873265 - DNA, 25 bp, Homo sapien
ggtctggcccggctaaaatacgctg

SEQ ID NO: 873266 - DNA, 25 bp, Homo sapien
ggccaggaatcttttaatcacagga

SEQ ID NO: 873267 - DNA, 25 bp, Homo sapien
gttgtctgacaccctcagatctttg

SEQ ID NO: 873268 - DNA, 25 bp, Homo sapien
caggccaggaatcttttaatcacag

SEQ ID NO: 873269 - DNA, 25 bp, Homo sapien
tcccaggccaggaatcttttaatca

SEQ ID NO: 873270 - DNA, 25 bp, Homo sapien
ctgttattagagggcagatgtcagc

SEQ ID NO: 873271 - DNA, 25 bp, Homo sapien
agggcagatgtcagcatgagaagct

SEQ ID NO: 873272 - DNA, 25 bp, Homo sapien
ggcagatgtcagcatgagaagcttt

SEQ ID NO: 873273 - DNA, 25 bp, Homo sapien
agagggcagatgtcagcatgagaag

SEQ ID NO: 873274 - DNA, 25 bp, Homo sapien
aatctgattattgaaggcctcgtgg

SEQ ID NO: 873275 - DNA, 25 bp, Homo sapien
caatctgattattgaaggcctcgtg

SEQ ID NO: 873276 - DNA, 25 bp, Homo sapien
ctcacatttgtccaaccactccctc

SEQ ID NO: 873277 - DNA, 25 bp, Homo sapien
tcctcctcacatttgtccaaccact

SEQ ID NO: 873278 - DNA, 25 bp, Homo sapien
ccagcaaaaatacctacatgggggg

SEQ ID NO: 873279 - DNA, 25 bp, Homo sapien
tcctcacatttgtccaaccactccc

SEQ ID NO: 873280 - DNA, 25 bp, Homo sapien
gatggctggttatgatctttcccaa

SEQ ID NO: 873281 - DNA, 25 bp, Homo sapien
gaggggtaccctgaggcgctgggct

SEQ ID NO: 873282 - DNA, 25 bp, Homo sapien
tgggggtgcggttgatggctggtta

SEQ ID NO: 873283 - DNA, 25 bp, Homo sapien
ggttgatggctggttatgatctttc

SEQ ID NO: 873284 - DNA, 25 bp, Homo sapien
ggtttccacaatgccccttatctta

SEQ ID NO: 873285 - DNA, 25 bp, Homo sapien
ccttggtttccacaatgccccttat

SEQ ID NO: 873286 - DNA, 25 bp, Homo sapien
cacaatgccccttatcttaactcaa

SEQ ID NO: 873287 - DNA, 25 bp, Homo sapien
caatgccccttatcttaactcaagc

SEQ ID NO: 873288 - DNA, 25 bp, Homo sapien
attcctgcctttgcaggccagagca

SEQ ID NO: 873289 - DNA, 25 bp, Homo sapien
ggttcttacgcaggagattcctgcc

SEQ ID NO: 873290 - DNA, 25 bp, Homo sapien
tttgtggttcttacgcaggagattc

SEQ ID NO: 873291 - DNA, 25 bp, Homo sapien
aggagattcctgcctttgcaggcca

SEQ ID NO: 873292 - DNA, 25 bp, Homo sapien
tctgtgacatttcaagttggcccag

SEQ ID NO: 873293 - DNA, 25 bp, Homo sapien
gccattcggcaaagataacctctca

SEQ ID NO: 873294 - DNA, 25 bp, Homo sapien
cccctgtgtagggtggccctgttga

SEQ ID NO: 873295 - DNA, 25 bp, Homo sapien
caggtaatcacagaccacttagggt

SEQ ID NO: 873296 - DNA, 25 bp, Homo sapien
tcttcatgctgagcgacagccctgg

SEQ ID NO: 873297 - DNA, 25 bp, Homo sapien
cttcggaccccaggacgtcgatgaa

SEQ ID NO: 873298 - DNA, 25 bp, Homo sapien
caactagtaaaagctggaccttcgg

SEQ ID NO: 873299 - DNA, 25 bp, Homo sapien
gccggccttcccgagtcaagcagat

SEQ ID NO: 873300 - DNA, 25 bp, Homo sapien
caagcagtctctagaacagggattc

SEQ ID NO: 873301 - DNA, 25 bp, Homo sapien
tgtgttccgcgaaaccggtctctgg

SEQ ID NO: 873302 - DNA, 25 bp, Homo sapien
ccagtccattgggtgagtccttcaa

SEQ ID NO: 873303 - DNA, 25 bp, Homo sapien
gaggtaccactagtcaaggattgca

SEQ ID NO: 873304 - DNA, 25 bp, Homo sapien
tggccggccacccactcaatggtgg

SEQ ID NO: 873305 - DNA, 25 bp, Homo sapien
gacggcgtctctctatggccggcca

SEQ ID NO: 873306 - DNA, 25 bp, Homo sapien
aactcctggatctgaacgccttgac

SEQ ID NO: 873307 - DNA, 25 bp, Homo sapien
cactcaatggtggacttttaaaggc

SEQ ID NO: 873308 - DNA, 25 bp, Homo sapien
tactcttcacagagattcggcctct

SEQ ID NO: 873309 - DNA, 25 bp, Homo sapien
tagcttttgctccacgtggcactgt

SEQ ID NO: 873310 - DNA, 25 bp, Homo sapien
cattcctgcggtgccgtaatcaaga

SEQ ID NO: 873311 - DNA, 25 bp, Homo sapien
tcatcagcagtgactccgtgttgcc

SEQ ID NO: 873312 - DNA, 25 bp, Homo sapien
gaagagttcaacacgtgggtcaata

SEQ ID NO: 873313 - DNA, 25 bp, Homo sapien
gacaggttacgtagcacagcacagg

SEQ ID NO: 873314 - DNA, 25 bp, Homo sapien
caaggatgatcgagaggaagagttc

SEQ ID NO: 873315 - DNA, 25 bp, Homo sapien
gaagatgacgaactggaagcaaggt

SEQ ID NO: 873316 - DNA, 25 bp, Homo sapien
tgtcttccgtagctgccagaacgca

SEQ ID NO: 873317 - DNA, 25 bp, Homo sapien
tcttccgtagctgccagaacgcatc

SEQ ID NO: 873318 - DNA, 25 bp, Homo sapien
cctgtcttccgtagctgccagaacg

SEQ ID NO: 873319 - DNA, 25 bp, Homo sapien
tcttcctgtcttccgtagctgccag

SEQ ID NO: 873320 - DNA, 25 bp, Homo sapien
atgggcgtcgttgacataaaaagga

SEQ ID NO: 873321 - DNA, 25 bp, Homo sapien
tgggcgtcgttgacataaaaaggaa

SEQ ID NO: 873322 - DNA, 25 bp, Homo sapien
ctatgggcgtcgttgacataaaaag

SEQ ID NO: 873323 - DNA, 25 bp, Homo sapien
tatgggcgtcgttgacataaaaagg

SEQ ID NO: 873324 - DNA, 25 bp, Homo sapien
cagtgctcaaggagccggcagacgt

SEQ ID NO: 873325 - DNA, 25 bp, Homo sapien
aaggaggatgtgaccgtgtccccat

SEQ ID NO: 873326 - DNA, 25 bp, Homo sapien
gacatgactatgaggtggacatcac

SEQ ID NO: 873327 - DNA, 25 bp, Homo sapien
ggcacgtgctgtaagatttcctgag

SEQ ID NO: 873328 - DNA, 25 bp, Homo sapien
ttggcccactgcatctcaggtttcc

SEQ ID NO: 873329 - DNA, 25 bp, Homo sapien
ggcccactgcatctcaggtttccta

SEQ ID NO: 873330 - DNA, 25 bp, Homo sapien
caggtttcctacatggctggattac

SEQ ID NO: 873331 - DNA, 25 bp, Homo sapien
acatggctggattacgggagttcga

SEQ ID NO: 873332 - DNA, 25 bp, Homo sapien
ctgcaaaattaaaacatcagccgac

SEQ ID NO: 873333 - DNA, 25 bp, Homo sapien
tctgcaaaattaaaacatcagccga

SEQ ID NO: 873334 - DNA, 25 bp, Homo sapien
tctctgcaaaattaaaacatcagcc

SEQ ID NO: 873335 - DNA, 25 bp, Homo sapien
ccatctctgcaaaattaaaacatca

SEQ ID NO: 873336 - DNA, 25 bp, Homo sapien
gtgtacatgtggttctagcttcttg

SEQ ID NO: 873337 - DNA, 25 bp, Homo sapien
gtgtgtacatgtggttctagcttct

SEQ ID NO: 873338 - DNA, 25 bp, Homo sapien
acatgtggttctagcttcttgggag

SEQ ID NO: 873339 - DNA, 25 bp, Homo sapien
gtacatgtggttctagcttcttggg

SEQ ID NO: 873340 - DNA, 25 bp, Homo sapien
ggtcacggagctggtggccagtgta

SEQ ID NO: 873341 - DNA, 25 bp, Homo sapien
ctgggtcacggagctggtggccagt

SEQ ID NO: 873342 - DNA, 25 bp, Homo sapien
tcacggagctggtggccagtgtaat

SEQ ID NO: 873343 - DNA, 25 bp, Homo sapien
tgggtcacggagctggtggccagtg

SEQ ID NO: 873344 - DNA, 25 bp, Homo sapien
gagagagactcaacaccaaaccaga

SEQ ID NO: 873345 - DNA, 25 bp, Homo sapien
ggagagagactcaacaccaaaccag

SEQ ID NO: 873346 - DNA, 25 bp, Homo sapien
agagagactcaacaccaaaccagaa

SEQ ID NO: 873347 - DNA, 25 bp, Homo sapien
caggagagagactcaacaccaaacc

SEQ ID NO: 873348 - DNA, 25 bp, Homo sapien
caatttattagtcttattttccagt

SEQ ID NO: 873349 - DNA, 25 bp, Homo sapien
gtcttattttccagtaaaatattca

SEQ ID NO: 873350 - DNA, 25 bp, Homo sapien
tattcaaataatgtcaaaagaatga

SEQ ID NO: 873351 - DNA, 25 bp, Homo sapien
aaatattcaaataatgtcaaaagaa

SEQ ID NO: 873352 - DNA, 25 bp, Homo sapien
tctaaaaacctcagatcagcagacc

SEQ ID NO: 873353 - DNA, 25 bp, Homo sapien
taaaaacctcagatcagcagaccga

SEQ ID NO: 873354 - DNA, 25 bp, Homo sapien
aacctcagatcagcagaccgagtcg

SEQ ID NO: 873355 - DNA, 25 bp, Homo sapien
tcagatcagcagaccgagtcgaaat

SEQ ID NO: 873356 - DNA, 25 bp, Homo sapien
aacttgcatgtgaccaaatgtttgc

SEQ ID NO: 873357 - DNA, 25 bp, Homo sapien
tatgctctcggtgagccgtcatccg

SEQ ID NO: 873358 - DNA, 25 bp, Homo sapien
gtcctgaatgcagtccgtcatatga

SEQ ID NO: 873359 - DNA, 25 bp, Homo sapien
gtcatatgaccactaacttgcatgt

SEQ ID NO: 873360 - DNA, 25 bp, Homo sapien
agaagatgttgttgaactgcgttgc

SEQ ID NO: 873361 - DNA, 25 bp, Homo sapien
aagatgttgttgaactgcgttgcac

SEQ ID NO: 873362 - DNA, 25 bp, Homo sapien
gttgaactgcgttgcacaaagtttc

SEQ ID NO: 873363 - DNA, 25 bp, Homo sapien
tgttgttgaactgcgttgcacaaag

SEQ ID NO: 873364 - DNA, 25 bp, Homo sapien
cctcaggagttttgagcctatcaac

SEQ ID NO: 873365 - DNA, 25 bp, Homo sapien
catcctgggacaactaatggaacaa

SEQ ID NO: 873366 - DNA, 25 bp, Homo sapien
aaagaaacggacagcaaccttgagc

SEQ ID NO: 873367 - DNA, 25 bp, Homo sapien
gagaaactgcaaagtgcccgggaca

SEQ ID NO: 873368 - DNA, 25 bp, Homo sapien
tcaaaataacatagagctcccgccg

SEQ ID NO: 873369 - DNA, 25 bp, Homo sapien
gagctcccgccgatcagacttcttt

SEQ ID NO: 873370 - DNA, 25 bp, Homo sapien
ataacatagagctcccgccgatcag

SEQ ID NO: 873371 - DNA, 25 bp, Homo sapien
tgattcaaaataacatagagctccc

SEQ ID NO: 873372 - DNA, 25 bp, Homo sapien
gaactgtgctcttctcggcgagatt

SEQ ID NO: 873373 - DNA, 25 bp, Homo sapien
gttgatgtcaccgagaatcttcatt

SEQ ID NO: 873374 - DNA, 25 bp, Homo sapien
atcttcattaaatccgggtgcacgg

SEQ ID NO: 873375 - DNA, 25 bp, Homo sapien
gctgggcgttttcctcatgtgaact

SEQ ID NO: 873376 - DNA, 25 bp, Homo sapien
tcacgaagacagtagcactcgggcc

SEQ ID NO: 873377 - DNA, 25 bp, Homo sapien
catgtcacgaagacagtagcactcg

SEQ ID NO: 873378 - DNA, 25 bp, Homo sapien
aaaacatgtcacgaagacagtagca

SEQ ID NO: 873379 - DNA, 25 bp, Homo sapien
gcactcgggccggatacaactagat

SEQ ID NO: 873380 - DNA, 25 bp, Homo sapien
tgagtgtcccgtggaaattaacctg

SEQ ID NO: 873381 - DNA, 25 bp, Homo sapien
aagtttcacgggaacctcgccattg

SEQ ID NO: 873382 - DNA, 25 bp, Homo sapien
gacatcactgtaaaacgcagtcgcc

SEQ ID NO: 873383 - DNA, 25 bp, Homo sapien
tgagggaagcctacgacactatgta

SEQ ID NO: 873384 - DNA, 25 bp, Homo sapien
aacgtggaggattgagtttccagga

SEQ ID NO: 873385 - DNA, 25 bp, Homo sapien
ttgagtttccaggaacatgtaaaga

SEQ ID NO: 873386 - DNA, 25 bp, Homo sapien
gggtactcatgaaatactctacgtc

SEQ ID NO: 873387 - DNA, 25 bp, Homo sapien
atactctacgtccaggcaaagaaag

SEQ ID NO: 873388 - DNA, 25 bp, Homo sapien
cattaagaccatgagcgtatgcaga

SEQ ID NO: 873389 - DNA, 25 bp, Homo sapien
tattgagaaaagataggcatggccg

SEQ ID NO: 873390 - DNA, 25 bp, Homo sapien
gcaggacttcaacttcgcaaagtgc

SEQ ID NO: 873391 - DNA, 25 bp, Homo sapien
gcaaagtgctttccatcgcctcact

SEQ ID NO: 873392 - DNA, 25 bp, Homo sapien
gggcccaacgatgctgtccagtctt

SEQ ID NO: 873393 - DNA, 25 bp, Homo sapien
gacatcctcttgttgatgttaaact

SEQ ID NO: 873394 - DNA, 25 bp, Homo sapien
tccagtcttcggcaaaaatccaacg

SEQ ID NO: 873395 - DNA, 25 bp, Homo sapien
aaatccaacgttgggtggacagagg

SEQ ID NO: 873396 - DNA, 25 bp, Homo sapien
tttactgtgcgacactgaacaacag

SEQ ID NO: 873397 - DNA, 25 bp, Homo sapien
gtaagattcattttactgtgcgaca

SEQ ID NO: 873398 - DNA, 25 bp, Homo sapien
gattcattttactgtgcgacactga

SEQ ID NO: 873399 - DNA, 25 bp, Homo sapien
agtattcaaacgaaaacttcactgg

SEQ ID NO: 873400 - DNA, 25 bp, Homo sapien
tcataaagcacacagccgcactcat

SEQ ID NO: 873401 - DNA, 25 bp, Homo sapien
tcgtcttaagatcctggacaacagg

SEQ ID NO: 873402 - DNA, 25 bp, Homo sapien
gatctcaaatcagtgacctgacctt

SEQ ID NO: 873403 - DNA, 25 bp, Homo sapien
cccacttccgagagcgagatcctgt

SEQ ID NO: 873404 - DNA, 25 bp, Homo sapien
tggacaacaggagtcaactaaacct

SEQ ID NO: 873405 - DNA, 25 bp, Homo sapien
tacaataccatgaaaaaccacgtgc

SEQ ID NO: 873406 - DNA, 25 bp, Homo sapien
gagacatcactactgactttacagg

SEQ ID NO: 873407 - DNA, 25 bp, Homo sapien
gattccagaagtatgaagaaccttt

SEQ ID NO: 873408 - DNA, 25 bp, Homo sapien
ccacgtgccgacaaatcaaataaat

SEQ ID NO: 873409 - DNA, 25 bp, Homo sapien
cagccatatttaacaatgagggaac

SEQ ID NO: 873410 - DNA, 25 bp, Homo sapien
tgagtgtaggatgaaggtctcagtt

SEQ ID NO: 873411 - DNA, 25 bp, Homo sapien
ccatttcgagaacaggcagcaccaa

SEQ ID NO: 873412 - DNA, 25 bp, Homo sapien
tacaagaccatgtcctgacagaaac

SEQ ID NO: 873413 - DNA, 25 bp, Homo sapien
cctttggtttgagagcacgtgagac

SEQ ID NO: 873414 - DNA, 25 bp, Homo sapien
tatggaattagcaagcctacagctt

SEQ ID NO: 873415 - DNA, 25 bp, Homo sapien
catctggatcattgaggttcaaggg

SEQ ID NO: 873416 - DNA, 25 bp, Homo sapien
gctcttcataagtgtcatctgtatt

SEQ ID NO: 873417 - DNA, 25 bp, Homo sapien
ttcataagtgtcatctgtatttaca

SEQ ID NO: 873418 - DNA, 25 bp, Homo sapien
ttataaacgattaaatggagctctt

SEQ ID NO: 873419 - DNA, 25 bp, Homo sapien
catatcagaataggccggctgggcg

SEQ ID NO: 873420 - DNA, 25 bp, Homo sapien
gacatgacttgattcaacgaggtga

SEQ ID NO: 873421 - DNA, 25 bp, Homo sapien
tagaaacagaacacactcccacttc

SEQ ID NO: 873422 - DNA, 25 bp, Homo sapien
cttaaaagcaagaacagacatgact

SEQ ID NO: 873423 - DNA, 25 bp, Homo sapien
catagtgttgaagatttcctggcat

SEQ ID NO: 873424 - DNA, 25 bp, Homo sapien
tctgctcttattggagaatcccttc

SEQ ID NO: 873425 - DNA, 25 bp, Homo sapien
ttattggagaatcccttcctgctaa

SEQ ID NO: 873426 - DNA, 25 bp, Homo sapien
gctcttattggagaatcccttcctg

SEQ ID NO: 873427 - DNA, 25 bp, Homo sapien
ttctgctcttattggagaatccctt

SEQ ID NO: 873428 - DNA, 25 bp, Homo sapien
tttgtataaaattctcatgtcatct

SEQ ID NO: 873429 - DNA, 25 bp, Homo sapien
ttatagtagtaccatatggccacac

SEQ ID NO: 873430 - DNA, 25 bp, Homo sapien
atagtagtaccatatggccacaccc

SEQ ID NO: 873431 - DNA, 25 bp, Homo sapien
cttatagtagtaccatatggccaca

SEQ ID NO: 873432 - DNA, 25 bp, Homo sapien
tatagtagtaccatatggccacacc

SEQ ID NO: 873433 - DNA, 25 bp, Homo sapien
atgcttcctacccatcctccccgct

SEQ ID NO: 873434 - DNA, 25 bp, Homo sapien
gacaatatctatgaagatgcttcct

SEQ ID NO: 873435 - DNA, 25 bp, Homo sapien
gttcctgtttgacaacctgtcatca

SEQ ID NO: 873436 - DNA, 25 bp, Homo sapien
ctccccgctgcaagttcctgtttga

SEQ ID NO: 873437 - DNA, 25 bp, Homo sapien
cagatgagctgatcgttatagagaa

SEQ ID NO: 873438 - DNA, 25 bp, Homo sapien
cattttatccaacgggaagaagctg

SEQ ID NO: 873439 - DNA, 25 bp, Homo sapien
ggtcacatgactgcaaatgtagcgt

SEQ ID NO: 873440 - DNA, 25 bp, Homo sapien
gattccaccaaaaatgtcaagtagg

SEQ ID NO: 873441 - DNA, 25 bp, Homo sapien
ccgatggaagaatttctctaatctt

SEQ ID NO: 873442 - DNA, 25 bp, Homo sapien
gatggaagaatttctctaatctttc

SEQ ID NO: 873443 - DNA, 25 bp, Homo sapien
gaagcttgacgcctccgtcttccat

SEQ ID NO: 873444 - DNA, 25 bp, Homo sapien
tttcagaagcttgacgcctccgtct

SEQ ID NO: 873445 - DNA, 25 bp, Homo sapien
gcagtcatttatagacttctcttta

SEQ ID NO: 873446 - DNA, 25 bp, Homo sapien
tctctaagacaaatacagagtcact

SEQ ID NO: 873447 - DNA, 25 bp, Homo sapien
gagttgagaaagaacgccacgctta

SEQ ID NO: 873448 - DNA, 25 bp, Homo sapien
agtggttggactctgagttgagaaa

SEQ ID NO: 873449 - DNA, 25 bp, Homo sapien
gcagcaccgagctataaaccttgtc

SEQ ID NO: 873450 - DNA, 25 bp, Homo sapien
actttaggagggctttcaatataga

SEQ ID NO: 873451 - DNA, 25 bp, Homo sapien
taaacctttgctatataccccgaga

SEQ ID NO: 873452 - DNA, 25 bp, Homo sapien
taaatccgaccaagtaaggcattca

SEQ ID NO: 873453 - DNA, 25 bp, Homo sapien
tgcaaaagcctcctagtttaaatcc

SEQ ID NO: 873454 - DNA, 25 bp, Homo sapien
gatattcaataactggttttccatc

SEQ ID NO: 873455 - DNA, 25 bp, Homo sapien
tttcaattataggattccgaacaac

SEQ ID NO: 873456 - DNA, 25 bp, Homo sapien
atacaatgaattcattagaccatgt

SEQ ID NO: 873457 - DNA, 25 bp, Homo sapien
tatacaatgaattcattagaccatg

SEQ ID NO: 873458 - DNA, 25 bp, Homo sapien
tacaatgaattcattagaccatgtt

SEQ ID NO: 873459 - DNA, 25 bp, Homo sapien
accatacaatttcagaaagatacac

SEQ ID NO: 873460 - DNA, 25 bp, Homo sapien
caccatacaatttcagaaagataca

SEQ ID NO: 873461 - DNA, 25 bp, Homo sapien
cttcaccatacaatttcagaaagat

SEQ ID NO: 873462 - DNA, 25 bp, Homo sapien
ttcaccatacaatttcagaaagata

SEQ ID NO: 873463 - DNA, 25 bp, Homo sapien
ttctggttcattgaagaactgtctg

SEQ ID NO: 873464 - DNA, 25 bp, Homo sapien
tctgtgtatgtaaagattttgcagg

SEQ ID NO: 873465 - DNA, 25 bp, Homo sapien
tgttcttctgtgtatgtaaagattt

SEQ ID NO: 873466 - DNA, 25 bp, Homo sapien
aattttcttctggttcattgaagaa

SEQ ID NO: 873467 - DNA, 25 bp, Homo sapien
taagaattcactgaacgctaaaggc

SEQ ID NO: 873468 - DNA, 25 bp, Homo sapien
ctgaacgctaaaggcacacttagag

SEQ ID NO: 873469 - DNA, 25 bp, Homo sapien
tctccagcagcagttttaagaattc

SEQ ID NO: 873470 - DNA, 25 bp, Homo sapien
attctccagcagcagttttaagaat

SEQ ID NO: 873471 - DNA, 25 bp, Homo sapien
cacacaatccgacatttctaatctt

SEQ ID NO: 873472 - DNA, 25 bp, Homo sapien
tgtacaatagcttcacacaatccga

SEQ ID NO: 873473 - DNA, 25 bp, Homo sapien
gcttcacacaatccgacatttctaa

SEQ ID NO: 873474 - DNA, 25 bp, Homo sapien
caatagcttcacacaatccgacatt

SEQ ID NO: 873475 - DNA, 25 bp, Homo sapien
aataagaagaagaacaggaatgatc

SEQ ID NO: 873476 - DNA, 25 bp, Homo sapien
aattaaatccagtcagttcccagcc

SEQ ID NO: 873477 - DNA, 25 bp, Homo sapien
agaagaagaacaggaatgatctcat

SEQ ID NO: 873478 - DNA, 25 bp, Homo sapien
acagtgagacgtctctattatttaa

SEQ ID NO: 873479 - DNA, 25 bp, Homo sapien
tgtccttcgcgcggcccgaagcgcg

SEQ ID NO: 873480 - DNA, 25 bp, Homo sapien
ctgtccttcgcgcggcccgaagcgc

SEQ ID NO: 873481 - DNA, 25 bp, Homo sapien
cggccccggccgccgctgcagccat

SEQ ID NO: 873482 - DNA, 25 bp, Homo sapien
ccgctcccggccccggccgccgctg

SEQ ID NO: 873483 - DNA, 25 bp, Homo sapien
ctgggccgcccagggcccgctcccg

SEQ ID NO: 873484 - DNA, 25 bp, Homo sapien
ctcccggccccggccgccgctgcag

SEQ ID NO: 873485 - DNA, 25 bp, Homo sapien
gccaccggctaaaacaccgcacttc

SEQ ID NO: 873486 - DNA, 25 bp, Homo sapien
tcccacggcccgcccagagacagca

SEQ ID NO: 873487 - DNA, 25 bp, Homo sapien
agcctcccacggcccgcccagagac

SEQ ID NO: 873488 - DNA, 25 bp, Homo sapien
agagacagcagccaccggctaaaac

SEQ ID NO: 873489 - DNA, 25 bp, Homo sapien
ttagactgtgctgccgtgtggccgc

SEQ ID NO: 873490 - DNA, 25 bp, Homo sapien
ctttctgggggaaaatgacacatcc

SEQ ID NO: 873491 - DNA, 25 bp, Homo sapien
tctgggggaaaatgacacatccgaa

SEQ ID NO: 873492 - DNA, 25 bp, Homo sapien
gccgccgcaggacacctttaacatc

SEQ ID NO: 873493 - DNA, 25 bp, Homo sapien
gtggagagggctttatacctcccac

SEQ ID NO: 873494 - DNA, 25 bp, Homo sapien
atggcggcagggaaatacatgatta

SEQ ID NO: 873495 - DNA, 25 bp, Homo sapien
gggaaatacatgattatgttaatgg

SEQ ID NO: 873496 - DNA, 25 bp, Homo sapien
atatggcggcagggaaatacatgat

SEQ ID NO: 873497 - DNA, 25 bp, Homo sapien
aatacatgattatgttaatggtgaa

SEQ ID NO: 873498 - DNA, 25 bp, Homo sapien
gacaacaaaactaggaagccacaga

SEQ ID NO: 873499 - DNA, 25 bp, Homo sapien
aagacaacaaaactaggaagccaca

SEQ ID NO: 873500 - DNA, 25 bp, Homo sapien
aaacacgggttcatgatggctgaat

SEQ ID NO: 873501 - DNA, 25 bp, Homo sapien
acagaaacacgggttcatgatggct

SEQ ID NO: 873502 - DNA, 25 bp, Homo sapien
cttccatgcctccaaaaatgacaaa

SEQ ID NO: 873503 - DNA, 25 bp, Homo sapien
tcaggagcatgcctctcttccatgc

SEQ ID NO: 873504 - DNA, 25 bp, Homo sapien
ccatgcctccaaaaatgacaaagag

SEQ ID NO: 873505 - DNA, 25 bp, Homo sapien
caggagcatgcctctcttccatgcc

SEQ ID NO: 873506 - DNA, 25 bp, Homo sapien
agcccagcgaggaccagctgcagtt

SEQ ID NO: 873507 - DNA, 25 bp, Homo sapien
aacagcccagcgaggaccagctgca

SEQ ID NO: 873508 - DNA, 25 bp, Homo sapien
accatgaccaggcagatggacagga

SEQ ID NO: 873509 - DNA, 25 bp, Homo sapien
cccagcgaggaccagctgcagttct

SEQ ID NO: 873510 - DNA, 25 bp, Homo sapien
ctctgcatagtttggataccttttg

SEQ ID NO: 873511 - DNA, 25 bp, Homo sapien
ttctgtggctctgcatagtttggat

SEQ ID NO: 873512 - DNA, 25 bp, Homo sapien
ctgtggctctgcatagtttggatac

SEQ ID NO: 873513 - DNA, 25 bp, Homo sapien
gtggctctgcatagtttggatacct

SEQ ID NO: 873514 - DNA, 25 bp, Homo sapien
aaccaacacccggcattgattgtgt

SEQ ID NO: 873515 - DNA, 25 bp, Homo sapien
gtaaaccaacacccggcattgattg

SEQ ID NO: 873516 - DNA, 25 bp, Homo sapien
agtaaaccaacacccggcattgatt

SEQ ID NO: 873517 - DNA, 25 bp, Homo sapien
taaaccaacacccggcattgattgt

SEQ ID NO: 873518 - DNA, 25 bp, Homo sapien
tcgtatttattatcatccttaggtt

SEQ ID NO: 873519 - DNA, 25 bp, Homo sapien
tttcgtatttattatcatccttagg

SEQ ID NO: 873520 - DNA, 25 bp, Homo sapien
attatcatccttaggttttctgaca

SEQ ID NO: 873521 - DNA, 25 bp, Homo sapien
tatttattatcatccttaggttttc

SEQ ID NO: 873522 - DNA, 25 bp, Homo sapien
gtctgcttgtcgctgaaggtcggca

SEQ ID NO: 873523 - DNA, 25 bp, Homo sapien
ttctgagtctgcttgtcgctgaagg

SEQ ID NO: 873524 - DNA, 25 bp, Homo sapien
tgagtctgcttgtcgctgaaggtcg

SEQ ID NO: 873525 - DNA, 25 bp, Homo sapien
tctgcttgtcgctgaaggtcggcat

SEQ ID NO: 873526 - DNA, 25 bp, Homo sapien
ttcagagctcttcatggcgggggtg

SEQ ID NO: 873527 - DNA, 25 bp, Homo sapien
agagctcttcatggcgggggtgtcc

SEQ ID NO: 873528 - DNA, 25 bp, Homo sapien
cgggtggaggaacggcaccttcagg

SEQ ID NO: 873529 - DNA, 25 bp, Homo sapien
aagaggagcgggtggaggaacggca

SEQ ID NO: 873530 - DNA, 25 bp, Homo sapien
ctactgggcacagggtgaccccacc

SEQ ID NO: 873531 - DNA, 25 bp, Homo sapien
tactgggcacagggtgaccccaccg

SEQ ID NO: 873532 - DNA, 25 bp, Homo sapien
gcgtcgctctcgtccgagttgtcct

SEQ ID NO: 873533 - DNA, 25 bp, Homo sapien
tccgcgtcgctctcgtccgagttgt

SEQ ID NO: 873534 - DNA, 25 bp, Homo sapien
ccctccgcgtcgctctcgtccgagt

SEQ ID NO: 873535 - DNA, 25 bp, Homo sapien
tcgccctccgcgtcgctctcgtccg

SEQ ID NO: 873536 - DNA, 25 bp, Homo sapien
ccacagcctgccaccagtggtagat

SEQ ID NO: 873537 - DNA, 25 bp, Homo sapien
ctgcctctgccatgtccacaggacc

SEQ ID NO: 873538 - DNA, 25 bp, Homo sapien
cccccagtgcccacagctatactca

SEQ ID NO: 873539 - DNA, 25 bp, Homo sapien
cccccccagtgcccacagctatact

SEQ ID NO: 873540 - DNA, 25 bp, Homo sapien
gcccccccccagtgcccacagctat

SEQ ID NO: 873541 - DNA, 25 bp, Homo sapien
ccccagtgcccacagctatactcac

SEQ ID NO: 873542 - DNA, 25 bp, Homo sapien
ccagcagaaccaggagtgaggcggc

SEQ ID NO: 873543 - DNA, 25 bp, Homo sapien
cagaaccaggagtgaggcggctgag

SEQ ID NO: 873544 - DNA, 25 bp, Homo sapien
ccacgaggggcaccgggtgtggcag

SEQ ID NO: 873545 - DNA, 25 bp, Homo sapien
cagcagaaccaggagtgaggcggct

SEQ ID NO: 873546 - DNA, 25 bp, Homo sapien
gccacgaggaggtaagccagccact

SEQ ID NO: 873547 - DNA, 25 bp, Homo sapien
cacgaggaggtaagccagccactcc

SEQ ID NO: 873548 - DNA, 25 bp, Homo sapien
acgaggaggtaagccagccactcca

SEQ ID NO: 873549 - DNA, 25 bp, Homo sapien
aagccacgaggaggtaagccagcca

SEQ ID NO: 873550 - DNA, 25 bp, Homo sapien
gtgagtgttgaagtctggaacagcc

SEQ ID NO: 873551 - DNA, 25 bp, Homo sapien
gaagtctggaacagcccagacccca

SEQ ID NO: 873552 - DNA, 25 bp, Homo sapien
ttgaagtctggaacagcccagaccc

SEQ ID NO: 873553 - DNA, 25 bp, Homo sapien
gtgttgaagtctggaacagcccaga

SEQ ID NO: 873554 - DNA, 25 bp, Homo sapien
acaggtccactgtcctccctgtgtg

SEQ ID NO: 873555 - DNA, 25 bp, Homo sapien
ggtccactgtcctccctgtgtggtg

SEQ ID NO: 873556 - DNA, 25 bp, Homo sapien
tgggccatgaccacggagaacaggt

SEQ ID NO: 873557 - DNA, 25 bp, Homo sapien
ccactgtcctccctgtgtggtgcac

SEQ ID NO: 873558 - DNA, 25 bp, Homo sapien
agcagcctccgcagggcgctttgaa

SEQ ID NO: 873559 - DNA, 25 bp, Homo sapien
tctgctgagcagcctccgcagggcg

SEQ ID NO: 873560 - DNA, 25 bp, Homo sapien
tgctgagcagcctccgcagggcgct

SEQ ID NO: 873561 - DNA, 25 bp, Homo sapien
ctgagcagcctccgcagggcgcttt

SEQ ID NO: 873562 - DNA, 25 bp, Homo sapien
cacagcgtacatcgctgacgccacc

SEQ ID NO: 873563 - DNA, 25 bp, Homo sapien
gcgtacatcgctgacgccaccacac

SEQ ID NO: 873564 - DNA, 25 bp, Homo sapien
gatgaaagggttcagcatggggtga

SEQ ID NO: 873565 - DNA, 25 bp, Homo sapien
atgaaagggttcagcatggggtgac

SEQ ID NO: 873566 - DNA, 25 bp, Homo sapien
ctgctaggtgagagccgcaggtggc

SEQ ID NO: 873567 - DNA, 25 bp, Homo sapien
taggtgagagccgcaggtggcgaag

SEQ ID NO: 873568 - DNA, 25 bp, Homo sapien
caactgctaggtgagagccgcaggt

SEQ ID NO: 873569 - DNA, 25 bp, Homo sapien
tgctaggtgagagccgcaggtggcg

SEQ ID NO: 873570 - DNA, 25 bp, Homo sapien
gtactatcgaaatatatgaatatgc

SEQ ID NO: 873571 - DNA, 25 bp, Homo sapien
catccttagaatggaggggacgatt

SEQ ID NO: 873572 - DNA, 25 bp, Homo sapien
acaggcaagtttgagaaattgagag

SEQ ID NO: 873573 - DNA, 25 bp, Homo sapien
tgacatccttagaatggaggggacg

SEQ ID NO: 873574 - DNA, 25 bp, Homo sapien
tgatggtgaattgtaacacaatcca

SEQ ID NO: 873575 - DNA, 25 bp, Homo sapien
tttccacattcttgatgatggtgaa

SEQ ID NO: 873576 - DNA, 25 bp, Homo sapien
tgatgatggtgaattgtaacacaat

SEQ ID NO: 873577 - DNA, 25 bp, Homo sapien
tcttgatgatggtgaattgtaacac

SEQ ID NO: 873578 - DNA, 25 bp, Homo sapien
tgggaatccaacaggctaaggaaaa

SEQ ID NO: 873579 - DNA, 25 bp, Homo sapien
tccaacaggctaaggaaaaaggaca

SEQ ID NO: 873580 - DNA, 25 bp, Homo sapien
gcagctgggaatccaacaggctaag

SEQ ID NO: 873581 - DNA, 25 bp, Homo sapien
gctgggaatccaacaggctaaggaa

SEQ ID NO: 873582 - DNA, 25 bp, Homo sapien
tacaaagcagtcataggccatcgca

SEQ ID NO: 873583 - DNA, 25 bp, Homo sapien
ctgggtagtgcagagggcgacagat

SEQ ID NO: 873584 - DNA, 25 bp, Homo sapien
tgcagagggcgacagatggctacaa

SEQ ID NO: 873585 - DNA, 25 bp, Homo sapien
agaggtgaagattcacgatgactgg

SEQ ID NO: 873586 - DNA, 25 bp, Homo sapien
ctgtgtcaggcagcccgcatgagag

SEQ ID NO: 873587 - DNA, 25 bp, Homo sapien
aaaggaccaagaaagacatctgtgt

SEQ ID NO: 873588 - DNA, 25 bp, Homo sapien
gcaaaaaggaccaagaaagacatct

SEQ ID NO: 873589 - DNA, 25 bp, Homo sapien
ctcagcagcatgccttctatacatg

SEQ ID NO: 873590 - DNA, 25 bp, Homo sapien
aaaccgatgtcagcccagcacagct

SEQ ID NO: 873591 - DNA, 25 bp, Homo sapien
tgtcagcccagcacagcttggagac

SEQ ID NO: 873592 - DNA, 25 bp, Homo sapien
cagcccagcacagcttggagacgaa

SEQ ID NO: 873593 - DNA, 25 bp, Homo sapien
cacagcttggagacgaagaagtaca

SEQ ID NO: 873594 - DNA, 25 bp, Homo sapien
ggggggagtcagagctgaagccagg

SEQ ID NO: 873595 - DNA, 25 bp, Homo sapien
tgaagccaggatgctgagcaggttc

SEQ ID NO: 873596 - DNA, 25 bp, Homo sapien
gaggggggagtcagagctgaagcca

SEQ ID NO: 873597 - DNA, 25 bp, Homo sapien
gtggaggggggagtcagagctgaag

SEQ ID NO: 873598 - DNA, 25 bp, Homo sapien
acacctgtgagattccgtggctctg

SEQ ID NO: 873599 - DNA, 25 bp, Homo sapien
ttccgtggctctgtgtgtcttggac

SEQ ID NO: 873600 - DNA, 25 bp, Homo sapien
gagattccgtggctctgtgtgtctt

SEQ ID NO: 873601 - DNA, 25 bp, Homo sapien
gattccgtggctctgtgtgtcttgg

SEQ ID NO: 873602 - DNA, 25 bp, Homo sapien
aaagataaaatccagcccttaatgc

SEQ ID NO: 873603 - DNA, 25 bp, Homo sapien
tccagcccttaatgctggatgcaag

SEQ ID NO: 873604 - DNA, 25 bp, Homo sapien
aaatccagcccttaatgctggatgc

SEQ ID NO: 873605 - DNA, 25 bp, Homo sapien
gcccttaatgctggatgcaagcaat

SEQ ID NO: 873606 - DNA, 25 bp, Homo sapien
gcgtggtggcaggtaaccctaaata

SEQ ID NO: 873607 - DNA, 25 bp, Homo sapien
caaagataggagctgtgtttccaaa

SEQ ID NO: 873608 - DNA, 25 bp, Homo sapien
tgaatctataactcttggcccagca

SEQ ID NO: 873609 - DNA, 25 bp, Homo sapien
tcttcataaaagtacatgcacactc

SEQ ID NO: 873610 - DNA, 25 bp, Homo sapien
ttagactgtgctgccgtgcggccgc

SEQ ID NO: 873611 - DNA, 25 bp, Homo sapien
ggccactgcactctttctcggggaa

SEQ ID NO: 873612 - DNA, 25 bp, Homo sapien
actgcactctttctcggggaagatg

SEQ ID NO: 873613 - DNA, 25 bp, Homo sapien
ctgaggccactgcactctttctcgg

SEQ ID NO: 873614 - DNA, 25 bp, Homo sapien
caaaaacaaagacaacaaatctagg

SEQ ID NO: 873615 - DNA, 25 bp, Homo sapien
gaagccacagaatcacgggttcaag

SEQ ID NO: 873616 - DNA, 25 bp, Homo sapien
gtgggagtctagaagactgagaaaa

SEQ ID NO: 873617 - DNA, 25 bp, Homo sapien
tcacgggttcaagatggctgaacga

SEQ ID NO: 873618 - DNA, 25 bp, Homo sapien
cttccatgcttccaaaaatggcaaa

SEQ ID NO: 873619 - DNA, 25 bp, Homo sapien
tcaggagcatgcctctcttccatgc

SEQ ID NO: 873620 - DNA, 25 bp, Homo sapien
caggagcatgcctctcttccatgct

SEQ ID NO: 873621 - DNA, 25 bp, Homo sapien
tgcttccaaaaatggcaaagagaga

SEQ ID NO: 873622 - DNA, 25 bp, Homo sapien
cccgcataggagaggactctgctgt

SEQ ID NO: 873623 - DNA, 25 bp, Homo sapien
gcagcccgcataggagaggactctg

SEQ ID NO: 873624 - DNA, 25 bp, Homo sapien
aggcagcccgcataggagaggactc

SEQ ID NO: 873625 - DNA, 25 bp, Homo sapien
agcccgcataggagaggactctgct

SEQ ID NO: 873626 - DNA, 25 bp, Homo sapien
gacaggaacagcccagcaacgaccg

SEQ ID NO: 873627 - DNA, 25 bp, Homo sapien
caggaacagcccagcaacgaccggc

SEQ ID NO: 873628 - DNA, 25 bp, Homo sapien
aacagcccagcaacgaccggctgca

SEQ ID NO: 873629 - DNA, 25 bp, Homo sapien
agcccagcaacgaccggctgcagtt

SEQ ID NO: 873630 - DNA, 25 bp, Homo sapien
tgtgggtctgtatagtttggacacc

SEQ ID NO: 873631 - DNA, 25 bp, Homo sapien
gtctgtatagtttggacaccttttg

SEQ ID NO: 873632 - DNA, 25 bp, Homo sapien
tgagagtttgaggaggaggaatata

SEQ ID NO: 873633 - DNA, 25 bp, Homo sapien
ctctgtgggtctgtatagtttggac

SEQ ID NO: 873634 - DNA, 25 bp, Homo sapien
ctggaaaagatggttgaaaaatcag

SEQ ID NO: 873635 - DNA, 25 bp, Homo sapien
ggaaaagatggttgaaaaatcagaa

SEQ ID NO: 873636 - DNA, 25 bp, Homo sapien
agtaaaccaatacccagccttgtgt

SEQ ID NO: 873637 - DNA, 25 bp, Homo sapien
acaagtaaaccaatacccagccttg

SEQ ID NO: 873638 - DNA, 25 bp, Homo sapien
caaactccgaattgatgactccttg

SEQ ID NO: 873639 - DNA, 25 bp, Homo sapien
aactccgaattgatgactccttgga

SEQ ID NO: 873640 - DNA, 25 bp, Homo sapien
ttaggaatggaagccaaactccgaa

SEQ ID NO: 873641 - DNA, 25 bp, Homo sapien
tggaagccaaactccgaattgatga

SEQ ID NO: 873642 - DNA, 25 bp, Homo sapien
gcaacgaacatgtgaacaatagaat

SEQ ID NO: 873643 - DNA, 25 bp, Homo sapien
cagcaacgaacatgtgaacaataga

SEQ ID NO: 873644 - DNA, 25 bp, Homo sapien
aacgaacatgtgaacaatagaatct

SEQ ID NO: 873645 - DNA, 25 bp, Homo sapien
gtcagcaacgaacatgtgaacaata

SEQ ID NO: 873646 - DNA, 25 bp, Homo sapien
gggcaaacacacactccagctcgtt

SEQ ID NO: 873647 - DNA, 25 bp, Homo sapien
caaacacacactccagctcgttcat

SEQ ID NO: 873648 - DNA, 25 bp, Homo sapien
ggcaaacacacactccagctcgttc

SEQ ID NO: 873649 - DNA, 25 bp, Homo sapien
ctggggcaaacacacactccagctc

SEQ ID NO: 873650 - DNA, 25 bp, Homo sapien
ttgacaatgatcaggaacagcaaga

SEQ ID NO: 873651 - DNA, 25 bp, Homo sapien
ggttcttaacattgacaatgatcag

SEQ ID NO: 873652 - DNA, 25 bp, Homo sapien
cattgacaatgatcaggaacagcaa

SEQ ID NO: 873653 - DNA, 25 bp, Homo sapien
taacattgacaatgatcaggaacag

SEQ ID NO: 873654 - DNA, 25 bp, Homo sapien
cttccccttgatgaagaggtccccg

SEQ ID NO: 873655 - DNA, 25 bp, Homo sapien
cggccttggtataagccttttggct

SEQ ID NO: 873656 - DNA, 25 bp, Homo sapien
gtgtggccggccttggtataagcct

SEQ ID NO: 873657 - DNA, 25 bp, Homo sapien
cttgatgaagaggtccccgtggtgt

SEQ ID NO: 873658 - DNA, 25 bp, Homo sapien
gagaaccgctggtagtaagccataa

SEQ ID NO: 873659 - DNA, 25 bp, Homo sapien
tacttaaagagaaccgctggtagta

SEQ ID NO: 873660 - DNA, 25 bp, Homo sapien
gaaccgctggtagtaagccataaaa

SEQ ID NO: 873661 - DNA, 25 bp, Homo sapien
taaagagaaccgctggtagtaagcc

SEQ ID NO: 873662 - DNA, 25 bp, Homo sapien
tggctggatcaatcactgtgagtat

SEQ ID NO: 873663 - DNA, 25 bp, Homo sapien
ttcaaagaaggttttagattagcaa

SEQ ID NO: 873664 - DNA, 25 bp, Homo sapien
aagaaggttttagattagcaatggc

SEQ ID NO: 873665 - DNA, 25 bp, Homo sapien
gattagcaatggctggatcaatcac

SEQ ID NO: 873666 - DNA, 25 bp, Homo sapien
gaacttggtcatgagttcagatgtc

SEQ ID NO: 873667 - DNA, 25 bp, Homo sapien
cattttctaagaacttggtcatgag

SEQ ID NO: 873668 - DNA, 25 bp, Homo sapien
agaacttggtcatgagttcagatgt

SEQ ID NO: 873669 - DNA, 25 bp, Homo sapien
tttctaagaacttggtcatgagttc

SEQ ID NO: 873670 - DNA, 25 bp, Homo sapien
aatgccgagggcactgtagattgaa

SEQ ID NO: 873671 - DNA, 25 bp, Homo sapien
ccatcacaggcatatgtggtgtggt

SEQ ID NO: 873672 - DNA, 25 bp, Homo sapien
ccgagggcactgtagattgaaatag

SEQ ID NO: 873673 - DNA, 25 bp, Homo sapien
gccgattggacacttatcgtagaat

SEQ ID NO: 873674 - DNA, 25 bp, Homo sapien
tattcagtcgggttacaagagttcc

SEQ ID NO: 873675 - DNA, 25 bp, Homo sapien
cagtcgggttacaagagttccagaa

SEQ ID NO: 873676 - DNA, 25 bp, Homo sapien
ctggtaaatattcagtcgggttaca

SEQ ID NO: 873677 - DNA, 25 bp, Homo sapien
acaagagttccagaaacccaccact

SEQ ID NO: 873678 - DNA, 25 bp, Homo sapien
gagtgtggctactaggcagcccgac

SEQ ID NO: 873679 - DNA, 25 bp, Homo sapien
gactctagcagaagatcaccttccc

SEQ ID NO: 873680 - DNA, 25 bp, Homo sapien
acccaattccacacgcttctgtggg

SEQ ID NO: 873681 - DNA, 25 bp, Homo sapien
caagtccacgggcaatctgattttt

SEQ ID NO: 873682 - DNA, 25 bp, Homo sapien
tttctagctcttggttgctggccat

SEQ ID NO: 873683 - DNA, 25 bp, Homo sapien
ttttttctagctcttggttgctggc

SEQ ID NO: 873684 - DNA, 25 bp, Homo sapien
aatccttttttctagctcttggttg

SEQ ID NO: 873685 - DNA, 25 bp, Homo sapien
caggaatccttttttctagctcttg

SEQ ID NO: 873686 - DNA, 25 bp, Homo sapien
tctgcatgaatatcagtgcccaggc

SEQ ID NO: 873687 - DNA, 25 bp, Homo sapien
gggtcagatcccttgcctgtgccaa

SEQ ID NO: 873688 - DNA, 25 bp, Homo sapien
ctaataagatgggagacgttgggtc

SEQ ID NO: 873689 - DNA, 25 bp, Homo sapien
gggtgaaactccagacatcggcatg

SEQ ID NO: 873690 - DNA, 25 bp, Homo sapien
gagagtagactctcatccaagaccc

SEQ ID NO: 873691 - DNA, 25 bp, Homo sapien
cagtaatgagttgcattccagaagg

SEQ ID NO: 873692 - DNA, 25 bp, Homo sapien
ttccatggaaagagaatatgtgggt

SEQ ID NO: 873693 - DNA, 25 bp, Homo sapien
gattggttctcaggtgtctgtctaa

SEQ ID NO: 873694 - DNA, 25 bp, Homo sapien
ttgttaacactgtgaaacctcgtct

SEQ ID NO: 873695 - DNA, 25 bp, Homo sapien
tgttaacactgtgaaacctcgtctc

SEQ ID NO: 873696 - DNA, 25 bp, Homo sapien
tccttgttaacactgtgaaacctcg

SEQ ID NO: 873697 - DNA, 25 bp, Homo sapien
ccttgttaacactgtgaaacctcgt

SEQ ID NO: 873698 - DNA, 25 bp, Homo sapien
cctgcaccctcatattgagtccagg

SEQ ID NO: 873699 - DNA, 25 bp, Homo sapien
tgcagatccacacaccctaaggtgt

SEQ ID NO: 873700 - DNA, 25 bp, Homo sapien
ctttgtgcagatccacacaccctaa

SEQ ID NO: 873701 - DNA, 25 bp, Homo sapien
tgtgcagatccacacaccctaaggt

SEQ ID NO: 873702 - DNA, 25 bp, Homo sapien
ctgattgatggcgattttcttcaga

SEQ ID NO: 873703 - DNA, 25 bp, Homo sapien
gattgatggcgattttcttcagaac

SEQ ID NO: 873704 - DNA, 25 bp, Homo sapien
tgtctgattgatggcgattttcttc

SEQ ID NO: 873705 - DNA, 25 bp, Homo sapien
ttgatggcgattttcttcagaacca

SEQ ID NO: 873706 - DNA, 25 bp, Homo sapien
ttctggtcatgacgagggttccact

SEQ ID NO: 873707 - DNA, 25 bp, Homo sapien
gtttctggtcatgacgagggttcca

SEQ ID NO: 873708 - DNA, 25 bp, Homo sapien
ctggtcatgacgagggttccacttc

SEQ ID NO: 873709 - DNA, 25 bp, Homo sapien
aatagtttctggtcatgacgagggt

SEQ ID NO: 873710 - DNA, 25 bp, Homo sapien
gggccagttcccctactctatagtc

SEQ ID NO: 873711 - DNA, 25 bp, Homo sapien
ggccagttcccctactctatagtca

SEQ ID NO: 873712 - DNA, 25 bp, Homo sapien
tggcatggtggatccgcctgtacag

SEQ ID NO: 873713 - DNA, 25 bp, Homo sapien
cctgctcgtcttccatcaactgggt

SEQ ID NO: 873714 - DNA, 25 bp, Homo sapien
caactgggtgctcaggacagtggca

SEQ ID NO: 873715 - DNA, 25 bp, Homo sapien
tggtggatccgcctgtacagcctgt

SEQ ID NO: 873716 - DNA, 25 bp, Homo sapien
gagtcccgcagggacagctccggga

SEQ ID NO: 873717 - DNA, 25 bp, Homo sapien
tttcacttccactggagtcccgcag

SEQ ID NO: 873718 - DNA, 25 bp, Homo sapien
ttccactggagtcccgcagggacag

SEQ ID NO: 873719 - DNA, 25 bp, Homo sapien
actggagtcccgcagggacagctcc

SEQ ID NO: 873720 - DNA, 25 bp, Homo sapien
tggttgcggacggtaagggccacat

SEQ ID NO: 873721 - DNA, 25 bp, Homo sapien
cacatagacttgaggagcccgttgg

SEQ ID NO: 873722 - DNA, 25 bp, Homo sapien
ttggtgttcccggtaggcagccagc

SEQ ID NO: 873723 - DNA, 25 bp, Homo sapien
ttggttgcggacggtaagggccaca

SEQ ID NO: 873724 - DNA, 25 bp, Homo sapien
agctgacggactgtcgcgacatccc

SEQ ID NO: 873725 - DNA, 25 bp, Homo sapien
gagagctgacggactgtcgcgacat

SEQ ID NO: 873726 - DNA, 25 bp, Homo sapien
agagctgacggactgtcgcgacatc

SEQ ID NO: 873727 - DNA, 25 bp, Homo sapien
agagagctgacggactgtcgcgaca

SEQ ID NO: 873728 - DNA, 25 bp, Homo sapien
agaaggctgccgggttctcaatggc

SEQ ID NO: 873729 - DNA, 25 bp, Homo sapien
tatgagagaaggctgccgggttctc

SEQ ID NO: 873730 - DNA, 25 bp, Homo sapien
caaggtagagggcagcatctcatgt

SEQ ID NO: 873731 - DNA, 25 bp, Homo sapien
aaggtagagggcagcatctcatgtg

SEQ ID NO: 873732 - DNA, 25 bp, Homo sapien
tgtgctctcagagagtgtgactgag

SEQ ID NO: 873733 - DNA, 25 bp, Homo sapien
caggcctgtgatgccgtgggagatg

SEQ ID NO: 873734 - DNA, 25 bp, Homo sapien
ggctgtgctctcagagagtgtgact

SEQ ID NO: 873735 - DNA, 25 bp, Homo sapien
cctgtgatgccgtgggagatgatgg

SEQ ID NO: 873736 - DNA, 25 bp, Homo sapien
agtattctttgaggaatggacacca

SEQ ID NO: 873737 - DNA, 25 bp, Homo sapien
gtattctttgaggaatggacaccag

SEQ ID NO: 873738 - DNA, 25 bp, Homo sapien
caagtattctttgaggaatggacac

SEQ ID NO: 873739 - DNA, 25 bp, Homo sapien
tgtcaagtattctttgaggaatgga

SEQ ID NO: 873740 - DNA, 25 bp, Homo sapien
tcagggtctccgccagcgcctcgta

SEQ ID NO: 873741 - DNA, 25 bp, Homo sapien
ctccgccagcgcctcgtacagctcg

SEQ ID NO: 873742 - DNA, 25 bp, Homo sapien
gggtctccgccagcgcctcgtacag

SEQ ID NO: 873743 - DNA, 25 bp, Homo sapien
catcagggtctccgccagcgcctcg

SEQ ID NO: 873744 - DNA, 25 bp, Homo sapien
accgggcatacttgactgacggccg

SEQ ID NO: 873745 - DNA, 25 bp, Homo sapien
catacttgactgacggccggtgctt

SEQ ID NO: 873746 - DNA, 25 bp, Homo sapien
cgggcatacttgactgacggccggt

SEQ ID NO: 873747 - DNA, 25 bp, Homo sapien
ggcatacttgactgacggccggtgc

SEQ ID NO: 873748 - DNA, 25 bp, Homo sapien
actcagagcagggtgcaagataact

SEQ ID NO: 873749 - DNA, 25 bp, Homo sapien
cagggtgcaagataactgcaggtat

SEQ ID NO: 873750 - DNA, 25 bp, Homo sapien
gaggctcagggtgaaactcagagca

SEQ ID NO: 873751 - DNA, 25 bp, Homo sapien
gcaagataactgcaggtatctccat

SEQ ID NO: 873752 - DNA, 25 bp, Homo sapien
ctctctgtgagattgaacgatagtg

SEQ ID NO: 873753 - DNA, 25 bp, Homo sapien
tccttgatcattttaacctcctatc

SEQ ID NO: 873754 - DNA, 25 bp, Homo sapien
cagcaggagacgtggtggtctcaca

SEQ ID NO: 873755 - DNA, 25 bp, Homo sapien
tttgagtctctctgtgagattgaac

SEQ ID NO: 873756 - DNA, 25 bp, Homo sapien
ccgtgggcacaaagaggctactttc

SEQ ID NO: 873757 - DNA, 25 bp, Homo sapien
tcaggccctgcaggttttatatggc

SEQ ID NO: 873758 - DNA, 25 bp, Homo sapien
taatgttcccatacattcataacta

SEQ ID NO: 873759 - DNA, 25 bp, Homo sapien
gcacaaagaggctactttccagtcc

SEQ ID NO: 873760 - DNA, 25 bp, Homo sapien
cgggtggaacggctggaccttgcct

SEQ ID NO: 873761 - DNA, 25 bp, Homo sapien
ggtggaacggctggaccttgcctcg

SEQ ID NO: 873762 - DNA, 25 bp, Homo sapien
tggaacggctggaccttgcctcgca

SEQ ID NO: 873763 - DNA, 25 bp, Homo sapien
ataagcttgtatgccgggtggaacg

SEQ ID NO: 873764 - DNA, 25 bp, Homo sapien
tcccagtaactgggtccttccatac

SEQ ID NO: 873765 - DNA, 25 bp, Homo sapien
tgcttggagcactctccgcctttca

SEQ ID NO: 873766 - DNA, 25 bp, Homo sapien
cctagaattgtgctggactttcttc

SEQ ID NO: 873767 - DNA, 25 bp, Homo sapien
tttggtagtcagctggtgcatgttc

SEQ ID NO: 873768 - DNA, 25 bp, Homo sapien
aatcgatcgggcattgtcagtcttc

SEQ ID NO: 873769 - DNA, 25 bp, Homo sapien
cttctgaggcaatcgatcgggcatt

SEQ ID NO: 873770 - DNA, 25 bp, Homo sapien
tctgaggcaatcgatcgggcattgt

SEQ ID NO: 873771 - DNA, 25 bp, Homo sapien
gaggcaatcgatcgggcattgtcag

SEQ ID NO: 873772 - DNA, 25 bp, Homo sapien
gcacctaatttcacatgcatctgtg

SEQ ID NO: 873773 - DNA, 25 bp, Homo sapien
cagcacctaatttcacatgcatctg

SEQ ID NO: 873774 - DNA, 25 bp, Homo sapien
cctaatttcacatgcatctgtgtga

SEQ ID NO: 873775 - DNA, 25 bp, Homo sapien
acctaatttcacatgcatctgtgtg

SEQ ID NO: 873776 - DNA, 25 bp, Homo sapien
taaaacctgagattgtgaagatgtt

SEQ ID NO: 873777 - DNA, 25 bp, Homo sapien
aaacctgagattgtgaagatgttca

SEQ ID NO: 873778 - DNA, 25 bp, Homo sapien
gatgttcattgtcattaccagtgat

SEQ ID NO: 873779 - DNA, 25 bp, Homo sapien
ttaccagtgatggagcagtaagtac

SEQ ID NO: 873780 - DNA, 25 bp, Homo sapien
gaattgcttttaatcttggtgagaa

SEQ ID NO: 873781 - DNA, 25 bp, Homo sapien
cagaattgcttttaatcttggtgag

SEQ ID NO: 873782 - DNA, 25 bp, Homo sapien
ctcagaattgcttttaatcttggtg

SEQ ID NO: 873783 - DNA, 25 bp, Homo sapien
cctcagaattgcttttaatcttggt

SEQ ID NO: 873784 - DNA, 25 bp, Homo sapien
tgctataagcatacgtgttcatgtg

SEQ ID NO: 873785 - DNA, 25 bp, Homo sapien
tcctaatgcagtctactgttgttgg

SEQ ID NO: 873786 - DNA, 25 bp, Homo sapien
gtgtcttttcatatccttcatccag

SEQ ID NO: 873787 - DNA, 25 bp, Homo sapien
attttcctaatgcagtctactgttg

SEQ ID NO: 873788 - DNA, 25 bp, Homo sapien
tggctggtaccaatttgcagtggct

SEQ ID NO: 873789 - DNA, 25 bp, Homo sapien
atgtggctggtaccaatttgcagtg

SEQ ID NO: 873790 - DNA, 25 bp, Homo sapien
tgtggctggtaccaatttgcagtgg

SEQ ID NO: 873791 - DNA, 25 bp, Homo sapien
gctggtaccaatttgcagtggctgg

SEQ ID NO: 873792 - DNA, 25 bp, Homo sapien
ttccttaagttgaatgttggcctgc

SEQ ID NO: 873793 - DNA, 25 bp, Homo sapien
ctctgtatttccttaagttgaatgt

SEQ ID NO: 873794 - DNA, 25 bp, Homo sapien
ttctctgtatttccttaagttgaat

SEQ ID NO: 873795 - DNA, 25 bp, Homo sapien
tgtatttccttaagttgaatgttgg

SEQ ID NO: 873796 - DNA, 25 bp, Homo sapien
tcacttcaacttcaaccccacaggt

SEQ ID NO: 873797 - DNA, 25 bp, Homo sapien
cttcaacttcaaccccacaggttca

SEQ ID NO: 873798 - DNA, 25 bp, Homo sapien
gctcacttcaacttcaaccccacag

SEQ ID NO: 873799 - DNA, 25 bp, Homo sapien
tcaacttcaaccccacaggttcaag

SEQ ID NO: 873800 - DNA, 25 bp, Homo sapien
aaattagacacggtggcttgtctgt

SEQ ID NO: 873801 - DNA, 25 bp, Homo sapien
cggggaggtcattgtgacaaggggt

SEQ ID NO: 873802 - DNA, 25 bp, Homo sapien
ctgtgatggcagtgaagtgggacgg

SEQ ID NO: 873803 - DNA, 25 bp, Homo sapien
tgtgacaaggggtggcatgaggtac

SEQ ID NO: 873804 - DNA, 25 bp, Homo sapien
tgtgatggcagtgaagtgggacggg

SEQ ID NO: 873805 - DNA, 25 bp, Homo sapien
ggttgggggtgtccacatcctcatc

SEQ ID NO: 873806 - DNA, 25 bp, Homo sapien
tccaggttgggggtgtccacatcct

SEQ ID NO: 873807 - DNA, 25 bp, Homo sapien
aggttgggggtgtccacatcctcat

SEQ ID NO: 873808 - DNA, 25 bp, Homo sapien
ctcggccagatggtccaggttgggg

SEQ ID NO: 873809 - DNA, 25 bp, Homo sapien
ggtagaaacagccagcagtcagaca

SEQ ID NO: 873810 - DNA, 25 bp, Homo sapien
tctctttgagaattgcatactaatt

SEQ ID NO: 873811 - DNA, 25 bp, Homo sapien
tgaaacaccagatgtgacccactag

SEQ ID NO: 873812 - DNA, 25 bp, Homo sapien
acatctctatattcctgaaacatgg

SEQ ID NO: 873813 - DNA, 25 bp, Homo sapien
tggaggatgaactgctgactatgtt

SEQ ID NO: 873814 - DNA, 25 bp, Homo sapien
agaagcatcttctgaccgcaccatc

SEQ ID NO: 873815 - DNA, 25 bp, Homo sapien
aaaaatacgtgagtctagcagagcc

SEQ ID NO: 873816 - DNA, 25 bp, Homo sapien
actccactgtgggacacgcaggctt

SEQ ID NO: 873817 - DNA, 25 bp, Homo sapien
gtggaaaaggactactcggatcatt

SEQ ID NO: 873818 - DNA, 25 bp, Homo sapien
gtaaacttgctgtggcaccggaaaa

SEQ ID NO: 873819 - DNA, 25 bp, Homo sapien
cctggagacggtaaacttgctgtgg

SEQ ID NO: 873820 - DNA, 25 bp, Homo sapien
ggactactcggatcatttttaagat

SEQ ID NO: 873821 - DNA, 25 bp, Homo sapien
ggtttggtgaaactcaccagaggct

SEQ ID NO: 873822 - DNA, 25 bp, Homo sapien
tagccatgcagaacagatactaaat

SEQ ID NO: 873823 - DNA, 25 bp, Homo sapien
cagcataacacagggattgggagga

SEQ ID NO: 873824 - DNA, 25 bp, Homo sapien
gactgccaggcatgaataatgagaa

SEQ ID NO: 873825 - DNA, 25 bp, Homo sapien
gagtttattagagagaatcggttca

SEQ ID NO: 873826 - DNA, 25 bp, Homo sapien
tagagagaatcggttcacaggatta

SEQ ID NO: 873827 - DNA, 25 bp, Homo sapien
gagaatcggttcacaggattacaag

SEQ ID NO: 873828 - DNA, 25 bp, Homo sapien
tgttttaattaggtgaaacgagaga

SEQ ID NO: 873829 - DNA, 25 bp, Homo sapien
gcaggtactgaagggcttgggatgt

SEQ ID NO: 873830 - DNA, 25 bp, Homo sapien
tttccataaaaaacaggaggctcat

SEQ ID NO: 873831 - DNA, 25 bp, Homo sapien
tccataaaaaacaggaggctcatct

SEQ ID NO: 873832 - DNA, 25 bp, Homo sapien
tgcaggtactgaagggcttgggatg

SEQ ID NO: 873833 - DNA, 25 bp, Homo sapien
caccgacacaagaagaagcccaggc

SEQ ID NO: 873834 - DNA, 25 bp, Homo sapien
gagaccaacggaaattacaatgagg

SEQ ID NO: 873835 - DNA, 25 bp, Homo sapien
ggcacggccatttatgtctctataa

SEQ ID NO: 873836 - DNA, 25 bp, Homo sapien
gaaaagctaaccttgacagctgtag

SEQ ID NO: 873837 - DNA, 25 bp, Homo sapien
agagacgcctctgtggtgacttgga

SEQ ID NO: 873838 - DNA, 25 bp, Homo sapien
ctgagctacatccagtgggtagttg

SEQ ID NO: 873839 - DNA, 25 bp, Homo sapien
ctgataaccctgaagtgtgtgagac

SEQ ID NO: 873840 - DNA, 25 bp, Homo sapien
ggattgggtgataacctggaagcca

SEQ ID NO: 873841 - DNA, 25 bp, Homo sapien
aacagactaagaacacacagagaca

SEQ ID NO: 873842 - DNA, 25 bp, Homo sapien
tcgtatttagcagataagcagcaga

SEQ ID NO: 873843 - DNA, 25 bp, Homo sapien
gatggtgtttggctgcacaaaaaag

SEQ ID NO: 873844 - DNA, 25 bp, Homo sapien
gatttcagagattttggtccacccg

SEQ ID NO: 873845 - DNA, 25 bp, Homo sapien
aatgatttcccaggccaacgtcaga

SEQ ID NO: 873846 - DNA, 25 bp, Homo sapien
tattttggatatcaacacctcatca

SEQ ID NO: 873847 - DNA, 25 bp, Homo sapien
tgtcattgaaattgctttcttgatt

SEQ ID NO: 873848 - DNA, 25 bp, Homo sapien
ttgatggtgtctttaggattcttct

SEQ ID NO: 873849 - DNA, 25 bp, Homo sapien
atggtgtctttaggattcttctgtg

SEQ ID NO: 873850 - DNA, 25 bp, Homo sapien
attgtcattgaaattgctttcttga

SEQ ID NO: 873851 - DNA, 25 bp, Homo sapien
tttaaaagtctgcaccctagggaca

SEQ ID NO: 873852 - DNA, 25 bp, Homo sapien
agggacaaattccacttaatcatgg

SEQ ID NO: 873853 - DNA, 25 bp, Homo sapien
tgagccttttaatgtcctgatgaat

SEQ ID NO: 873854 - DNA, 25 bp, Homo sapien
cctgagaattcctgcatctatgttc

SEQ ID NO: 873855 - DNA, 25 bp, Homo sapien
atgtcctcacgtggtggaagaggca

SEQ ID NO: 873856 - DNA, 25 bp, Homo sapien
tgaaccgacgccatacctgcattag

SEQ ID NO: 873857 - DNA, 25 bp, Homo sapien
catggtatccctagaactgaaacag

SEQ ID NO: 873858 - DNA, 25 bp, Homo sapien
catttgttaagccttggaagtgcaa

SEQ ID NO: 873859 - DNA, 25 bp, Homo sapien
tataaactgtagtgtccagggcagg

SEQ ID NO: 873860 - DNA, 25 bp, Homo sapien
tcagtagcgccttgatggcccagta

SEQ ID NO: 873861 - DNA, 25 bp, Homo sapien
tcattccagtcagctagattccagg

SEQ ID NO: 873862 - DNA, 25 bp, Homo sapien
tagatgtctctctcgtcatgcccca

SEQ ID NO: 873863 - DNA, 25 bp, Homo sapien
cagttccgggagtttgattaaagtg

SEQ ID NO: 873864 - DNA, 25 bp, Homo sapien
gcatccaaggccactgctatcagtt

SEQ ID NO: 873865 - DNA, 25 bp, Homo sapien
tatcagtttgtagccctgacccagt

SEQ ID NO: 873866 - DNA, 25 bp, Homo sapien
tgtcagcacaagcaaaggtacaatc

SEQ ID NO: 873867 - DNA, 25 bp, Homo sapien
ggtatgaatgctccgatattgaacc

SEQ ID NO: 873868 - DNA, 25 bp, Homo sapien
tcctatacattatttgatggtgaat

SEQ ID NO: 873869 - DNA, 25 bp, Homo sapien
cattacactcatgcagtttcattcc

SEQ ID NO: 873870 - DNA, 25 bp, Homo sapien
tccgatattgaaccaggtgtgctct

SEQ ID NO: 873871 - DNA, 25 bp, Homo sapien
ctgatgttcaagcagatatgaagga

SEQ ID NO: 873872 - DNA, 25 bp, Homo sapien
tgatgttcaagcagatatgaaggat

SEQ ID NO: 873873 - DNA, 25 bp, Homo sapien
tctggctgaagctcatgtcgttctt

SEQ ID NO: 873874 - DNA, 25 bp, Homo sapien
ctggctgaagctcatgtcgttctta

SEQ ID NO: 873875 - DNA, 25 bp, Homo sapien
gctcatgtcgttcttatcattatca

SEQ ID NO: 873876 - DNA, 25 bp, Homo sapien
gctgaagctcatgtcgttcttatca

SEQ ID NO: 873877 - DNA, 25 bp, Homo sapien
tccaggtacaggaatttccttagaa

SEQ ID NO: 873878 - DNA, 25 bp, Homo sapien
caggtacaggaatttccttagaatt

SEQ ID NO: 873879 - DNA, 25 bp, Homo sapien
ccaggtacaggaatttccttagaat

SEQ ID NO: 873880 - DNA, 25 bp, Homo sapien
ctccaggtacaggaatttccttaga

SEQ ID NO: 873881 - DNA, 25 bp, Homo sapien
taatctgtcctcagacttatacact

SEQ ID NO: 873882 - DNA, 25 bp, Homo sapien
ctgaagcctttctaatctgtcctca

SEQ ID NO: 873883 - DNA, 25 bp, Homo sapien
atctgtcctcagacttatacacttc

SEQ ID NO: 873884 - DNA, 25 bp, Homo sapien
tctaatctgtcctcagacttataca

SEQ ID NO: 873885 - DNA, 25 bp, Homo sapien
tctctagtcttagtttccagatcaa

SEQ ID NO: 873886 - DNA, 25 bp, Homo sapien
ccagatcaaagacctgtagatcctg

SEQ ID NO: 873887 - DNA, 25 bp, Homo sapien
gatcaaagacctgtagatcctgttc

SEQ ID NO: 873888 - DNA, 25 bp, Homo sapien
agtcatctcttaagacttctctagt

SEQ ID NO: 873889 - DNA, 25 bp, Homo sapien
aagagcagagtcacatgcctccctc

SEQ ID NO: 873890 - DNA, 25 bp, Homo sapien
agagcagagtcacatgcctccctcc

SEQ ID NO: 873891 - DNA, 25 bp, Homo sapien
gagcagagtcacatgcctccctcct

SEQ ID NO: 873892 - DNA, 25 bp, Homo sapien
atgaccattttcacaaaaatgattc

SEQ ID NO: 873893 - DNA, 25 bp, Homo sapien
ggctcttttttggttgcaatatgaa

SEQ ID NO: 873894 - DNA, 25 bp, Homo sapien
cagtatgaccattttcacaaaaatg

SEQ ID NO: 873895 - DNA, 25 bp, Homo sapien
tttggttgcaatatgaactttaaag

SEQ ID NO: 873896 - DNA, 25 bp, Homo sapien
actagccttgcatcctagtaatgaa

SEQ ID NO: 873897 - DNA, 25 bp, Homo sapien
ctagccttgcatcctagtaatgaag

SEQ ID NO: 873898 - DNA, 25 bp, Homo sapien
aaatctatatttttaaggccaccag

SEQ ID NO: 873899 - DNA, 25 bp, Homo sapien
ctatatttttaaggccaccagccac

SEQ ID NO: 873900 - DNA, 25 bp, Homo sapien
tctatatttttaaggccaccagcca

SEQ ID NO: 873901 - DNA, 25 bp, Homo sapien
tattggaaaagaaggaaaatctata

SEQ ID NO: 873902 - DNA, 25 bp, Homo sapien
gattcagcacatacccacagactgg

SEQ ID NO: 873903 - DNA, 25 bp, Homo sapien
gctcacggcaaaaaatggctcctcg

SEQ ID NO: 873904 - DNA, 25 bp, Homo sapien
tgagttctacagatcagcccatagc

SEQ ID NO: 873905 - DNA, 25 bp, Homo sapien
tcttactcgttagaaagctcacggc

SEQ ID NO: 873906 - DNA, 25 bp, Homo sapien
ttaggcctcattattatggttgtct

SEQ ID NO: 873907 - DNA, 25 bp, Homo sapien
ccattgatagtgatcctccccttgg

SEQ ID NO: 873908 - DNA, 25 bp, Homo sapien
tattatggttgtcttcgatttctcc

SEQ ID NO: 873909 - DNA, 25 bp, Homo sapien
gatagtgatcctccccttggatagt

SEQ ID NO: 873910 - DNA, 25 bp, Homo sapien
ttgagccctcctctagtatctacag

SEQ ID NO: 873911 - DNA, 25 bp, Homo sapien
cattgagccctcctctagtatctac

SEQ ID NO: 873912 - DNA, 25 bp, Homo sapien
cttcattgagccctcctctagtatc

SEQ ID NO: 873913 - DNA, 25 bp, Homo sapien
tcattgagccctcctctagtatcta

SEQ ID NO: 873914 - DNA, 25 bp, Homo sapien
caagtgcagtagagagaaggcaggg

SEQ ID NO: 873915 - DNA, 25 bp, Homo sapien
gcagggaagagtggaacaacaagtt

SEQ ID NO: 873916 - DNA, 25 bp, Homo sapien
gggaagagtggaacaacaagttcaa

SEQ ID NO: 873917 - DNA, 25 bp, Homo sapien
gaagagtggaacaacaagttcaatc

SEQ ID NO: 873918 - DNA, 25 bp, Homo sapien
tcttaagcaaacacagaagtcaacc

SEQ ID NO: 873919 - DNA, 25 bp, Homo sapien
agtcaaccattccagctttctaagg

SEQ ID NO: 873920 - DNA, 25 bp, Homo sapien
taatttccgcccatggttatctggg

SEQ ID NO: 873921 - DNA, 25 bp, Homo sapien
gactcctgtgagctatgtctttagg

SEQ ID NO: 873922 - DNA, 25 bp, Homo sapien
gtagtggggcctatattgattttcc

SEQ ID NO: 873923 - DNA, 25 bp, Homo sapien
caatttttcctaactgggagtcact

SEQ ID NO: 873924 - DNA, 25 bp, Homo sapien
tcctaactgggagtcactgaaaacc

SEQ ID NO: 873925 - DNA, 25 bp, Homo sapien
tcatacctgctactgatttatagac

SEQ ID NO: 873926 - DNA, 25 bp, Homo sapien
ccattggttgtttgatttccacgca

SEQ ID NO: 873927 - DNA, 25 bp, Homo sapien
tgattgattcttcgccccattggtt

SEQ ID NO: 873928 - DNA, 25 bp, Homo sapien
gaaatatcccctgtgtacttgagaa

SEQ ID NO: 873929 - DNA, 25 bp, Homo sapien
gcctaacatggtgtatcctgggaaa

SEQ ID NO: 873930 - DNA, 25 bp, Homo sapien
taagtgtttatatagctgacccctg

SEQ ID NO: 873931 - DNA, 25 bp, Homo sapien
acacagaggttagggatgctatccc

SEQ ID NO: 873932 - DNA, 25 bp, Homo sapien
gtttactaatagactgccgctggaa

SEQ ID NO: 873933 - DNA, 25 bp, Homo sapien
gaagtctcccaactgttatcataga

SEQ ID NO: 873934 - DNA, 25 bp, Homo sapien
gccatgatgttctacgctcgtcggg

SEQ ID NO: 873935 - DNA, 25 bp, Homo sapien
ttgggttgactaggcgcatcattca

SEQ ID NO: 873936 - DNA, 25 bp, Homo sapien
aagggatccccaagtgcggtggaca

SEQ ID NO: 873937 - DNA, 25 bp, Homo sapien
ttccaggaacatgtagggcaagggc

SEQ ID NO: 873938 - DNA, 25 bp, Homo sapien
tgccaagataatttccctttggtgg

SEQ ID NO: 873939 - DNA, 25 bp, Homo sapien
cccacaattagtatagtgattcaga

SEQ ID NO: 873940 - DNA, 25 bp, Homo sapien
cctttggtggtctatgaagctttgg

SEQ ID NO: 873941 - DNA, 25 bp, Homo sapien
tccctattgcaaacagtagagtgag

SEQ ID NO: 873942 - DNA, 25 bp, Homo sapien
tattctcagattgtagcctttcaga

SEQ ID NO: 873943 - DNA, 25 bp, Homo sapien
gatgactctaacgtagacttcagcc

SEQ ID NO: 873944 - DNA, 25 bp, Homo sapien
gacttcagccgttgtaaagattggt

SEQ ID NO: 873945 - DNA, 25 bp, Homo sapien
gagtccttgataagagcataggtgt

SEQ ID NO: 873946 - DNA, 25 bp, Homo sapien
gctcaggctccctgaatggactgaa

SEQ ID NO: 873947 - DNA, 25 bp, Homo sapien
catgctagccaattcgatttgtcag

SEQ ID NO: 873948 - DNA, 25 bp, Homo sapien
tgtacctgcactcaaccaaacttca

SEQ ID NO: 873949 - DNA, 25 bp, Homo sapien
cagtcctcagtgcatttccgattca

SEQ ID NO: 873950 - DNA, 25 bp, Homo sapien
ccacctcagggtacttgtagaaatt

SEQ ID NO: 873951 - DNA, 25 bp, Homo sapien
aagtaatctcaactcctgtgctttg

SEQ ID NO: 873952 - DNA, 25 bp, Homo sapien
tcagaaactcgttcagagcagtgag

SEQ ID NO: 873953 - DNA, 25 bp, Homo sapien
gagcactgctctagaccatcttgga

SEQ ID NO: 873954 - DNA, 25 bp, Homo sapien
tactttatagtaggcctgacagaaa

SEQ ID NO: 873955 - DNA, 25 bp, Homo sapien
gaataatgcctgctggctctcgaga

SEQ ID NO: 873956 - DNA, 25 bp, Homo sapien
caatctgggaggcaacctgtggtag

SEQ ID NO: 873957 - DNA, 25 bp, Homo sapien
gctctcgagatacttgccctactta

SEQ ID NO: 873958 - DNA, 25 bp, Homo sapien
cagtagatctaagtacctggaggat

SEQ ID NO: 873959 - DNA, 25 bp, Homo sapien
gaggatctgactctctttgacatag

SEQ ID NO: 873960 - DNA, 25 bp, Homo sapien
tctttgacatagagagactccccag

SEQ ID NO: 873961 - DNA, 25 bp, Homo sapien
tttgtctacttcatgaatctgtccg

SEQ ID NO: 873962 - DNA, 25 bp, Homo sapien
ccccagcatacttctctgtgggatg

SEQ ID NO: 873963 - DNA, 25 bp, Homo sapien
tcttcctaaacacatgctgtgtggc

SEQ ID NO: 873964 - DNA, 25 bp, Homo sapien
gagaatggagaagacctgcggtctc

SEQ ID NO: 873965 - DNA, 25 bp, Homo sapien
ctgtgtggcattgtggaacttgtcc

SEQ ID NO: 873966 - DNA, 25 bp, Homo sapien
agcagtcaatgtcaccagagtcaga

SEQ ID NO: 873967 - DNA, 25 bp, Homo sapien
gctgaggggatgaggaattacaaga

SEQ ID NO: 873968 - DNA, 25 bp, Homo sapien
aggaattacaagagcagtcaatgtc

SEQ ID NO: 873969 - DNA, 25 bp, Homo sapien
gtcaatgtcaccagagtcagagcca

SEQ ID NO: 873970 - DNA, 25 bp, Homo sapien
aaactcccgagtgcaaaggatcctc

SEQ ID NO: 873971 - DNA, 25 bp, Homo sapien
gctgccttaaactcccgagtgcaaa

SEQ ID NO: 873972 - DNA, 25 bp, Homo sapien
actgctgccttaaactcccgagtgc

SEQ ID NO: 873973 - DNA, 25 bp, Homo sapien
ccttaaactcccgagtgcaaaggat

SEQ ID NO: 873974 - DNA, 25 bp, Homo sapien
catataggtggtgcttgcatacaca

SEQ ID NO: 873975 - DNA, 25 bp, Homo sapien
ttagaagtatgatttccccaggagc

SEQ ID NO: 873976 - DNA, 25 bp, Homo sapien
tagtctctcagtaacatgtgttgcc

SEQ ID NO: 873977 - DNA, 25 bp, Homo sapien
gagtctaagggcatgtgaccataaa

SEQ ID NO: 873978 - DNA, 25 bp, Homo sapien
aagacagtcccctctgacattagga

SEQ ID NO: 873979 - DNA, 25 bp, Homo sapien
tgtctcaggccaagatacaaaggtg

SEQ ID NO: 873980 - DNA, 25 bp, Homo sapien
cattctgcccaaagtgtgaagggct

SEQ ID NO: 873981 - DNA, 25 bp, Homo sapien
caaagcgaaaggacactctgcaagc

SEQ ID NO: 873982 - DNA, 25 bp, Homo sapien
tgttttagttccttgagaaatcaca

SEQ ID NO: 873983 - DNA, 25 bp, Homo sapien
cttgagaaatcacagtggttgaact

SEQ ID NO: 873984 - DNA, 25 bp, Homo sapien
gagaaatcacagtggttgaactgat

SEQ ID NO: 873985 - DNA, 25 bp, Homo sapien
gaaatcacagtggttgaactgattt

SEQ ID NO: 873986 - DNA, 25 bp, Homo sapien
tagaaccgctactgatttttacaca

SEQ ID NO: 873987 - DNA, 25 bp, Homo sapien
tatagaaccgctactgatttttaca

SEQ ID NO: 873988 - DNA, 25 bp, Homo sapien
tctttaggggtttctaggtatcata

SEQ ID NO: 873989 - DNA, 25 bp, Homo sapien
tttctaggtatcatatctcagtgaa

SEQ ID NO: 873990 - DNA, 25 bp, Homo sapien
gccacacgggaagctgcaatagaat

SEQ ID NO: 873991 - DNA, 25 bp, Homo sapien
tatccctggcatggaatagagagct

SEQ ID NO: 873992 - DNA, 25 bp, Homo sapien
cactgttgaattgaatgagggtaga

SEQ ID NO: 873993 - DNA, 25 bp, Homo sapien
cagcacattgacatggtaaatacga

SEQ ID NO: 873994 - DNA, 25 bp, Homo sapien
cttgctgtgtcacccaggctggagt

SEQ ID NO: 873995 - DNA, 25 bp, Homo sapien
tgctgtgtcacccaggctggagtgc

SEQ ID NO: 873996 - DNA, 25 bp, Homo sapien
ctgatagaaggagaaagtattttgt

SEQ ID NO: 873997 - DNA, 25 bp, Homo sapien
gtcttgctgtgtcacccaggctgga

SEQ ID NO: 873998 - DNA, 25 bp, Homo sapien
tgaactcagctcagaactaatgctc

SEQ ID NO: 873999 - DNA, 25 bp, Homo sapien
ctccataaaatggaagggcccactg

SEQ ID NO: 874000 - DNA, 25 bp, Homo sapien
gaaatatgcaagtgctgtctgaact

SEQ ID NO: 874001 - DNA, 25 bp, Homo sapien
acactgttcaagagtggatgccaac

SEQ ID NO: 874002 - DNA, 25 bp, Homo sapien
tacatcttgctactgcgagggacat

SEQ ID NO: 874003 - DNA, 25 bp, Homo sapien
tggaggaatacaaagtgacagtctg

SEQ ID NO: 874004 - DNA, 25 bp, Homo sapien
cagcactcctgcgtaaacatttaca

SEQ ID NO: 874005 - DNA, 25 bp, Homo sapien
cagggcaagtgaggcaaaaatctaa

SEQ ID NO: 874006 - DNA, 25 bp, Homo sapien
ttcctgagccattacagccactgaa

SEQ ID NO: 874007 - DNA, 25 bp, Homo sapien
tctatttcctgagccattacagcca

SEQ ID NO: 874008 - DNA, 25 bp, Homo sapien
tatttcctgagccattacagccact

SEQ ID NO: 874009 - DNA, 25 bp, Homo sapien
gaatctatttcctgagccattacag

SEQ ID NO: 874010 - DNA, 25 bp, Homo sapien
ccaaaatcgggcacaagagttgacc

SEQ ID NO: 874011 - DNA, 25 bp, Homo sapien
catcgaaccacatattcaccacagt

SEQ ID NO: 874012 - DNA, 25 bp, Homo sapien
catattcaccacagtttccaggctt

SEQ ID NO: 874013 - DNA, 25 bp, Homo sapien
gacctgtttgtcataataccatcga

SEQ ID NO: 874014 - DNA, 25 bp, Homo sapien
ccacgttggctctggagccttatca

SEQ ID NO: 874015 - DNA, 25 bp, Homo sapien
tgccccatccacaggggtgctgagc

SEQ ID NO: 874016 - DNA, 25 bp, Homo sapien
ggctctggagccttatcatcttcat

SEQ ID NO: 874017 - DNA, 25 bp, Homo sapien
caggcagatcatcagcccacgttgg

SEQ ID NO: 874018 - DNA, 25 bp, Homo sapien
caaaaatttgaacgagataggaatc

SEQ ID NO: 874019 - DNA, 25 bp, Homo sapien
gaggtgacgatgaaccaaaaatttg

SEQ ID NO: 874020 - DNA, 25 bp, Homo sapien
ggctctggagtagattcactgagtt

SEQ ID NO: 874021 - DNA, 25 bp, Homo sapien
atcccaaatccaggttgaggtgacg

SEQ ID NO: 874022 - DNA, 25 bp, Homo sapien
cagccagcagggtactgatgaagta

SEQ ID NO: 874023 - DNA, 25 bp, Homo sapien
gatgaagtagaaccctaggttagaa

SEQ ID NO: 874024 - DNA, 25 bp, Homo sapien
agtcagccagcagggtactgatgaa

SEQ ID NO: 874025 - DNA, 25 bp, Homo sapien
tactgatgaagtagaaccctaggtt

SEQ ID NO: 874026 - DNA, 25 bp, Homo sapien
tgattatgcctatgcgggccgtggc

SEQ ID NO: 874027 - DNA, 25 bp, Homo sapien
gagcaacccggtcagccatagtctt

SEQ ID NO: 874028 - DNA, 25 bp, Homo sapien
gagtctctttgcatttgggcccaca

SEQ ID NO: 874029 - DNA, 25 bp, Homo sapien
cagatactgcatgttgtccacagcc

SEQ ID NO: 874030 - DNA, 25 bp, Homo sapien
ggctggccaatggatgaagtaatgg

SEQ ID NO: 874031 - DNA, 25 bp, Homo sapien
aggctggccaatggatgaagtaatg

SEQ ID NO: 874032 - DNA, 25 bp, Homo sapien
ttctgtaataagtttgataatttct

SEQ ID NO: 874033 - DNA, 25 bp, Homo sapien
tatacccctcaaaggattcacagtc

SEQ ID NO: 874034 - DNA, 25 bp, Homo sapien
gaagcagacaaacgaagactttcat

SEQ ID NO: 874035 - DNA, 25 bp, Homo sapien
gactgtggtccaaggaggcagactc

SEQ ID NO: 874036 - DNA, 25 bp, Homo sapien
agccaaggaaccatctcgatctgct

SEQ ID NO: 874037 - DNA, 25 bp, Homo sapien
tgtggcatagaggaacatatgtgca

SEQ ID NO: 874038 - DNA, 25 bp, Homo sapien
tccagagtgtggcatagaggaacat

SEQ ID NO: 874039 - DNA, 25 bp, Homo sapien
tctggaattgcatgcatccagagtg

SEQ ID NO: 874040 - DNA, 25 bp, Homo sapien
tatgtgcatgccctttggccccaag

SEQ ID NO: 874041 - DNA, 25 bp, Homo sapien
ttctttcccacatcgccccgttctc

SEQ ID NO: 874042 - DNA, 25 bp, Homo sapien
ccacatcgccccgttctccgtgctc

SEQ ID NO: 874043 - DNA, 25 bp, Homo sapien
ttcccacatcgccccgttctccgtg

SEQ ID NO: 874044 - DNA, 25 bp, Homo sapien
acatcgccccgttctccgtgctctc

SEQ ID NO: 874045 - DNA, 25 bp, Homo sapien
cacaatagggtaaaatgataggttc

SEQ ID NO: 874046 - DNA, 25 bp, Homo sapien
caatagggtaaaatgataggttcag

SEQ ID NO: 874047 - DNA, 25 bp, Homo sapien
tacacaatagggtaaaatgataggt

SEQ ID NO: 874048 - DNA, 25 bp, Homo sapien
ctttacacaatagggtaaaatgata

SEQ ID NO: 874049 - DNA, 25 bp, Homo sapien
ctttgggcctgggaagccttgtggt

SEQ ID NO: 874050 - DNA, 25 bp, Homo sapien
tgggaagccttgtggtccttgttcc

SEQ ID NO: 874051 - DNA, 25 bp, Homo sapien
gcctgggaagccttgtggtccttgt

SEQ ID NO: 874052 - DNA, 25 bp, Homo sapien
tgggcctgggaagccttgtggtcct

SEQ ID NO: 874053 - DNA, 25 bp, Homo sapien
caggcagaaggttggcaggctccat

SEQ ID NO: 874054 - DNA, 25 bp, Homo sapien
tctatttggccttcaagcatggcaa

SEQ ID NO: 874055 - DNA, 25 bp, Homo sapien
taaaagagcccttggagtttacaga

SEQ ID NO: 874056 - DNA, 25 bp, Homo sapien
gtgagatttccactacagaatcctg

SEQ ID NO: 874057 - DNA, 25 bp, Homo sapien
cacagtcccatattcattgatccaa

SEQ ID NO: 874058 - DNA, 25 bp, Homo sapien
gccacagtcccatattcattgatcc

SEQ ID NO: 874059 - DNA, 25 bp, Homo sapien
catattcattgatccaaacaacaga

SEQ ID NO: 874060 - DNA, 25 bp, Homo sapien
gtcccatattcattgatccaaacaa

SEQ ID NO: 874061 - DNA, 25 bp, Homo sapien
aggatggagtttagacacagcataa

SEQ ID NO: 874062 - DNA, 25 bp, Homo sapien
ggatggagtttagacacagcataac

SEQ ID NO: 874063 - DNA, 25 bp, Homo sapien
gatggagtttagacacagcataacc

SEQ ID NO: 874064 - DNA, 25 bp, Homo sapien
caggatggagtttagacacagcata

SEQ ID NO: 874065 - DNA, 25 bp, Homo sapien
gatgtctctaaacactggatgccat

SEQ ID NO: 874066 - DNA, 25 bp, Homo sapien
taactgcgaggctcacaataaatct

SEQ ID NO: 874067 - DNA, 25 bp, Homo sapien
tagcatttgctgaagtattgtactc

SEQ ID NO: 874068 - DNA, 25 bp, Homo sapien
gccatttttgcgttatctacaacct

SEQ ID NO: 874069 - DNA, 25 bp, Homo sapien
ctgtgatccatagccaggggggcca

SEQ ID NO: 874070 - DNA, 25 bp, Homo sapien
aattccctgtgatccatagccaggg

SEQ ID NO: 874071 - DNA, 25 bp, Homo sapien
tttaattccctgtgatccatagcca

SEQ ID NO: 874072 - DNA, 25 bp, Homo sapien
cctgtgatccatagccaggggggcc

SEQ ID NO: 874073 - DNA, 25 bp, Homo sapien
gacctggagggcctctgaccccagg

SEQ ID NO: 874074 - DNA, 25 bp, Homo sapien
tcctacgccccgaggcccagaagga

SEQ ID NO: 874075 - DNA, 25 bp, Homo sapien
aggacctggagggcctctgacccca

SEQ ID NO: 874076 - DNA, 25 bp, Homo sapien
gccccgaggcccagaaggacctgga

SEQ ID NO: 874077 - DNA, 25 bp, Homo sapien
tacctgatgagggtaggtgacgccc

SEQ ID NO: 874078 - DNA, 25 bp, Homo sapien
gacgccctgtggcaagacctactag

SEQ ID NO: 874079 - DNA, 25 bp, Homo sapien
ccagaaaattggtggtacctgatga

SEQ ID NO: 874080 - DNA, 25 bp, Homo sapien
gcttcactaaggcatgacagcttca

SEQ ID NO: 874081 - DNA, 25 bp, Homo sapien
gagcgggtcatagctttttctgtga

SEQ ID NO: 874082 - DNA, 25 bp, Homo sapien
ccaaggctttggagcgggtcatagc

SEQ ID NO: 874083 - DNA, 25 bp, Homo sapien
tcatagctttttctgtgatgatcca

SEQ ID NO: 874084 - DNA, 25 bp, Homo sapien
ggctaagttcaaccactccaaggct

SEQ ID NO: 874085 - DNA, 25 bp, Homo sapien
cgtacaacatcttttctctctaatg

SEQ ID NO: 874086 - DNA, 25 bp, Homo sapien
agcacgtacaacatcttttctctct

SEQ ID NO: 874087 - DNA, 25 bp, Homo sapien
cacgtacaacatcttttctctctaa

SEQ ID NO: 874088 - DNA, 25 bp, Homo sapien
ttaagcacgtacaacatcttttctc

SEQ ID NO: 874089 - DNA, 25 bp, Homo sapien
tcagaaagtgatacacgctacatgg

SEQ ID NO: 874090 - DNA, 25 bp, Homo sapien
ccattttggctgaatgtcggcagcc

SEQ ID NO: 874091 - DNA, 25 bp, Homo sapien
gctcctactgaatggtacacctagt

SEQ ID NO: 874092 - DNA, 25 bp, Homo sapien
tgagctgaagtagggcaggccattt

SEQ ID NO: 874093 - DNA, 25 bp, Homo sapien
gtctcccactccacgtaaacccatc

SEQ ID NO: 874094 - DNA, 25 bp, Homo sapien
actccacgtaaacccatcggcccag

SEQ ID NO: 874095 - DNA, 25 bp, Homo sapien
tcccactccacgtaaacccatcggc

SEQ ID NO: 874096 - DNA, 25 bp, Homo sapien
cactccacgtaaacccatcggccca

SEQ ID NO: 874097 - DNA, 25 bp, Homo sapien
tggagcacccactggtccccgaggg

SEQ ID NO: 874098 - DNA, 25 bp, Homo sapien
ccatcacctttgagtcctggagcac

SEQ ID NO: 874099 - DNA, 25 bp, Homo sapien
caggatagccatcacctttgagtcc

SEQ ID NO: 874100 - DNA, 25 bp, Homo sapien
gatagccatcacctttgagtcctgg

SEQ ID NO: 874101 - DNA, 25 bp, Homo sapien
gaacaattcgtccaagtttgcccaa

SEQ ID NO: 874102 - DNA, 25 bp, Homo sapien
ttcaatcccgggcaaactagggcag

SEQ ID NO: 874103 - DNA, 25 bp, Homo sapien
ttttagcccggaaagtcatgcgttc

SEQ ID NO: 874104 - DNA, 25 bp, Homo sapien
tctgtgggaagtagacgaacaattc

SEQ ID NO: 874105 - DNA, 25 bp, Homo sapien
ttctcccttaaatccaggtatccca

SEQ ID NO: 874106 - DNA, 25 bp, Homo sapien
caggttctcccttaaatccaggtat

SEQ ID NO: 874107 - DNA, 25 bp, Homo sapien
tttggtcctcgaatagaaagtccag

SEQ ID NO: 874108 - DNA, 25 bp, Homo sapien
ctttggtcctcgaatagaaagtcca

SEQ ID NO: 874109 - DNA, 25 bp, Homo sapien
aatctggtttctagtcttaactctg

SEQ ID NO: 874110 - DNA, 25 bp, Homo sapien
aaatctggtttctagtcttaactct

SEQ ID NO: 874111 - DNA, 25 bp, Homo sapien
gtttaggatttggaagacgtaatga

SEQ ID NO: 874112 - DNA, 25 bp, Homo sapien
tgaagggtaaagtgacaagcttggg

SEQ ID NO: 874113 - DNA, 25 bp, Homo sapien
gttccaggcattccaaaagggccca

SEQ ID NO: 874114 - DNA, 25 bp, Homo sapien
aggtggtccaggaattgatgttcca

SEQ ID NO: 874115 - DNA, 25 bp, Homo sapien
ccccttgttttgtacagccttgagc

SEQ ID NO: 874116 - DNA, 25 bp, Homo sapien
ttctctacggtaggtgggccaaatc

SEQ ID NO: 874117 - DNA, 25 bp, Homo sapien
tgggccacaggacctaaaatattta

SEQ ID NO: 874118 - DNA, 25 bp, Homo sapien
agccttgagctatgaacggctttca

SEQ ID NO: 874119 - DNA, 25 bp, Homo sapien
tggaagtcccctctgtccttgattt

SEQ ID NO: 874120 - DNA, 25 bp, Homo sapien
tccttgatttcctttgctccctttc

SEQ ID NO: 874121 - DNA, 25 bp, Homo sapien
tttgctccctttcttgccttcgtca

SEQ ID NO: 874122 - DNA, 25 bp, Homo sapien
cttcgggccctggaagtcccctctg

SEQ ID NO: 874123 - DNA, 25 bp, Homo sapien
agtatgaggaccagaacacaggctg

SEQ ID NO: 874124 - DNA, 25 bp, Homo sapien
ctcagtatgaggaccagaacacagg

SEQ ID NO: 874125 - DNA, 25 bp, Homo sapien
cctcagtatgaggaccagaacacag

SEQ ID NO: 874126 - DNA, 25 bp, Homo sapien
ctcctcagtatgaggaccagaacac

SEQ ID NO: 874127 - DNA, 25 bp, Homo sapien
cttggggccaggctgtccttttcca

SEQ ID NO: 874128 - DNA, 25 bp, Homo sapien
ctgggcctcttgctcccggaagccc

SEQ ID NO: 874129 - DNA, 25 bp, Homo sapien
aggctgtccttttccaggtggtcct

SEQ ID NO: 874130 - DNA, 25 bp, Homo sapien
ccttctgggcctcttgctcccggaa

SEQ ID NO: 874131 - DNA, 25 bp, Homo sapien
ctggtactcctggttgtcctgggag

SEQ ID NO: 874132 - DNA, 25 bp, Homo sapien
ctcctggtactcctggttgtcctgg

SEQ ID NO: 874133 - DNA, 25 bp, Homo sapien
cttctcctggtactcctggttgtcc

SEQ ID NO: 874134 - DNA, 25 bp, Homo sapien
ggtactcctggttgtcctgggagcc

SEQ ID NO: 874135 - DNA, 25 bp, Homo sapien
atttagagaaaggaacatcatcgcc

SEQ ID NO: 874136 - DNA, 25 bp, Homo sapien
catcatcgcctactgctagcaggaa

SEQ ID NO: 874137 - DNA, 25 bp, Homo sapien
tatcacaattgaagactcgcacgct

SEQ ID NO: 874138 - DNA, 25 bp, Homo sapien
caagacaaggaggtaatagcactga

SEQ ID NO: 874139 - DNA, 25 bp, Homo sapien
cgagggcctgtaggtcccatttggc

SEQ ID NO: 874140 - DNA, 25 bp, Homo sapien
taggtcccatttggcctacttctcc

SEQ ID NO: 874141 - DNA, 25 bp, Homo sapien
ttcccactggtcctcgagggcctgt

SEQ ID NO: 874142 - DNA, 25 bp, Homo sapien
ggaccttgtactccaattcccactg

SEQ ID NO: 874143 - DNA, 25 bp, Homo sapien
gtggaccaataggaccttggattcc

SEQ ID NO: 874144 - DNA, 25 bp, Homo sapien
gaccaggtggaccaataggaccttg

SEQ ID NO: 874145 - DNA, 25 bp, Homo sapien
tgcgggcccttgtggaccaggtgga

SEQ ID NO: 874146 - DNA, 25 bp, Homo sapien
caggtggaccaataggaccttggat

SEQ ID NO: 874147 - DNA, 25 bp, Homo sapien
tcatagatgtttgcaggactggcct

SEQ ID NO: 874148 - DNA, 25 bp, Homo sapien
tgaagaccaggattgggctggaatg

SEQ ID NO: 874149 - DNA, 25 bp, Homo sapien
gaagaccaggattgggctggaatgt

SEQ ID NO: 874150 - DNA, 25 bp, Homo sapien
tggggtcccacaggtcctatatccc

SEQ ID NO: 874151 - DNA, 25 bp, Homo sapien
ccagggatacccattggtccttggg

SEQ ID NO: 874152 - DNA, 25 bp, Homo sapien
cccgattccagggatacccattggt

SEQ ID NO: 874153 - DNA, 25 bp, Homo sapien
ttgactcccgattccagggataccc

SEQ ID NO: 874154 - DNA, 25 bp, Homo sapien
gatccaaacaagaagacatccttga

SEQ ID NO: 874155 - DNA, 25 bp, Homo sapien
cagcaatagatccaaacaagaagac

SEQ ID NO: 874156 - DNA, 25 bp, Homo sapien
agatccaaacaagaagacatccttg

SEQ ID NO: 874157 - DNA, 25 bp, Homo sapien
ccaaacaagaagacatccttgatct

SEQ ID NO: 874158 - DNA, 25 bp, Homo sapien
gtgcgcgagccgaagcagggcgagc

SEQ ID NO: 874159 - DNA, 25 bp, Homo sapien
tgcgcgagccgaagcagggcgagca

SEQ ID NO: 874160 - DNA, 25 bp, Homo sapien
gcgcgagccgaagcagggcgagcat

SEQ ID NO: 874161 - DNA, 25 bp, Homo sapien
tataaatggactaaattctgcaatt

SEQ ID NO: 874162 - DNA, 25 bp, Homo sapien
ttaaatataaatggactaaattctg

SEQ ID NO: 874163 - DNA, 25 bp, Homo sapien
aatataaatggactaaattctgcaa

SEQ ID NO: 874164 - DNA, 25 bp, Homo sapien
taaatataaatggactaaattctgc

SEQ ID NO: 874165 - DNA, 25 bp, Homo sapien
tgtaacctatcaccacctgttccca

SEQ ID NO: 874166 - DNA, 25 bp, Homo sapien
ctatcaccacctgttcccaaataac

SEQ ID NO: 874167 - DNA, 25 bp, Homo sapien
catgtaacctatcaccacctgttcc

SEQ ID NO: 874168 - DNA, 25 bp, Homo sapien
acctatcaccacctgttcccaaata

SEQ ID NO: 874169 - DNA, 25 bp, Homo sapien
ggcatggttgtcatgtatacagttc

SEQ ID NO: 874170 - DNA, 25 bp, Homo sapien
gcatggttgtcatgtatacagttca

SEQ ID NO: 874171 - DNA, 25 bp, Homo sapien
catggttgtcatgtatacagttcag

SEQ ID NO: 874172 - DNA, 25 bp, Homo sapien
tggttgtcatgtatacagttcagaa

SEQ ID NO: 874173 - DNA, 25 bp, Homo sapien
cagtgtacaccctattatacagtac

SEQ ID NO: 874174 - DNA, 25 bp, Homo sapien
tgtttccagtgtacaccctattata

SEQ ID NO: 874175 - DNA, 25 bp, Homo sapien
tgacaattttattggcattgtttcc

SEQ ID NO: 874176 - DNA, 25 bp, Homo sapien
ttggcattgtttccagtgtacaccc

SEQ ID NO: 874177 - DNA, 25 bp, Homo sapien
aggccttgtaatccctgtgggccag

SEQ ID NO: 874178 - DNA, 25 bp, Homo sapien
cccctttgattgacaggccttgtaa

SEQ ID NO: 874179 - DNA, 25 bp, Homo sapien
tgattgacaggccttgtaatccctg

SEQ ID NO: 874180 - DNA, 25 bp, Homo sapien
cttctcccctttgattgacaggcct

SEQ ID NO: 874181 - DNA, 25 bp, Homo sapien
ctttggtcctggaaatccttctccg

SEQ ID NO: 874182 - DNA, 25 bp, Homo sapien
tggtactccctcaggaccacgggga

SEQ ID NO: 874183 - DNA, 25 bp, Homo sapien
ctctcctggtactccctcaggacca

SEQ ID NO: 874184 - DNA, 25 bp, Homo sapien
tctccgggtaagcccctctctcctg

SEQ ID NO: 874185 - DNA, 25 bp, Homo sapien
ttctgatgttcagttgtgttcccag

SEQ ID NO: 874186 - DNA, 25 bp, Homo sapien
ttcagttgtgttcccagtttcttct

SEQ ID NO: 874187 - DNA, 25 bp, Homo sapien
gtgtcacagttctaaaaggcagcgc

SEQ ID NO: 874188 - DNA, 25 bp, Homo sapien
cacagttctaaaaggcagcgcgtcc

SEQ ID NO: 874189 - DNA, 25 bp, Homo sapien
tggagctcccggtcttccttcttgg

SEQ ID NO: 874190 - DNA, 25 bp, Homo sapien
tccaatgggtcctggagctcccggt

SEQ ID NO: 874191 - DNA, 25 bp, Homo sapien
gtcctggagctcccggtcttccttc

SEQ ID NO: 874192 - DNA, 25 bp, Homo sapien
caactccaatgggtcctggagctcc

SEQ ID NO: 874193 - DNA, 25 bp, Homo sapien
ggagaaccataaggaccaggaggac

SEQ ID NO: 874194 - DNA, 25 bp, Homo sapien
gagaaccataaggaccaggaggacc

SEQ ID NO: 874195 - DNA, 25 bp, Homo sapien
caggatgttgtgtagggacgtttag

SEQ ID NO: 874196 - DNA, 25 bp, Homo sapien
gatgttgtgtagggacgtttagcat

SEQ ID NO: 874197 - DNA, 25 bp, Homo sapien
ggatgttgtgtagggacgtttagca

SEQ ID NO: 874198 - DNA, 25 bp, Homo sapien
acaggatgttgtgtagggacgttta

SEQ ID NO: 874199 - DNA, 25 bp, Homo sapien
atatcctgcaggaatattatgaacg

SEQ ID NO: 874200 - DNA, 25 bp, Homo sapien
atcctgcaggaatattatgaacgtc

SEQ ID NO: 874201 - DNA, 25 bp, Homo sapien
ttaggacaaatatcctgcaggaata

SEQ ID NO: 874202 - DNA, 25 bp, Homo sapien
aggacaaatatcctgcaggaatatt

SEQ ID NO: 874203 - DNA, 25 bp, Homo sapien
atctgcaggttattatgcatttcca

SEQ ID NO: 874204 - DNA, 25 bp, Homo sapien
gcaggttattatgcatttccaaagg

SEQ ID NO: 874205 - DNA, 25 bp, Homo sapien
aggtacttcctcaaagaatccattg

SEQ ID NO: 874206 - DNA, 25 bp, Homo sapien
tacttcctcaaagaatccattgact

SEQ ID NO: 874207 - DNA, 25 bp, Homo sapien
ggtccctttggtccatatggccctg

SEQ ID NO: 874208 - DNA, 25 bp, Homo sapien
gtccctttggtccatatggccctgg

SEQ ID NO: 874209 - DNA, 25 bp, Homo sapien
tccctttggtccatatggccctggg

SEQ ID NO: 874210 - DNA, 25 bp, Homo sapien
tatccctggtttaccacattcccca

SEQ ID NO: 874211 - DNA, 25 bp, Homo sapien
tggtttaccacattccccacgttca

SEQ ID NO: 874212 - DNA, 25 bp, Homo sapien
ttgtcacccttgtacccaggaattc

SEQ ID NO: 874213 - DNA, 25 bp, Homo sapien
cttgtcacccttgtacccaggaatt

SEQ ID NO: 874214 - DNA, 25 bp, Homo sapien
tgtcacccttgtacccaggaattcc

SEQ ID NO: 874215 - DNA, 25 bp, Homo sapien
cagcttctcctttttgagcgttgcc

SEQ ID NO: 874216 - DNA, 25 bp, Homo sapien
tccttttggtcctcgctcacctttg

SEQ ID NO: 874217 - DNA, 25 bp, Homo sapien
tcgctcacctttgatacctggattt

SEQ ID NO: 874218 - DNA, 25 bp, Homo sapien
gtcctcgctcacctttgatacctgg

SEQ ID NO: 874219 - DNA, 25 bp, Homo sapien
tttggtcctcgctcacctttgatac

SEQ ID NO: 874220 - DNA, 25 bp, Homo sapien
cttctcacattcacaaatcttgcgt

SEQ ID NO: 874221 - DNA, 25 bp, Homo sapien
cacattcacaaatcttgcgttcaca

SEQ ID NO: 874222 - DNA, 25 bp, Homo sapien
tctcacattcacaaatcttgcgttc

SEQ ID NO: 874223 - DNA, 25 bp, Homo sapien
tcacattcacaaatcttgcgttcac

SEQ ID NO: 874224 - DNA, 25 bp, Homo sapien
ggatcaatttggacagagctgctaa

SEQ ID NO: 874225 - DNA, 25 bp, Homo sapien
cataataagagaaggtaccttgccc

SEQ ID NO: 874226 - DNA, 25 bp, Homo sapien
taaatgtctgcaggtccttccagga

SEQ ID NO: 874227 - DNA, 25 bp, Homo sapien
tgtcatattccaaggagcgaccagg

SEQ ID NO: 874228 - DNA, 25 bp, Homo sapien
tcgtaaacgctgacaaaagcaggag

SEQ ID NO: 874229 - DNA, 25 bp, Homo sapien
tatctgttccacattatggtagatg

SEQ ID NO: 874230 - DNA, 25 bp, Homo sapien
tttctttgtccggatactgtttgac

SEQ ID NO: 874231 - DNA, 25 bp, Homo sapien
cattatggtagatggtgaaaaatca

SEQ ID NO: 874232 - DNA, 25 bp, Homo sapien
cacggttgaccagatcctgtcccag

SEQ ID NO: 874233 - DNA, 25 bp, Homo sapien
ccagttcagggtcacggttgaccag

SEQ ID NO: 874234 - DNA, 25 bp, Homo sapien
cagcagctgaggatacaaggcagga

SEQ ID NO: 874235 - DNA, 25 bp, Homo sapien
ccagcagctgaggatacaaggcagg

SEQ ID NO: 874236 - DNA, 25 bp, Homo sapien
gggattcattatccttggacccaga

SEQ ID NO: 874237 - DNA, 25 bp, Homo sapien
tctgaaatttctgggattcattatc

SEQ ID NO: 874238 - DNA, 25 bp, Homo sapien
tcagtagaaaagcttgatatagtag

SEQ ID NO: 874239 - DNA, 25 bp, Homo sapien
agcttgatatagtagaatttctaac

SEQ ID NO: 874240 - DNA, 25 bp, Homo sapien
cgtgacttcagttcctatgccctca

SEQ ID NO: 874241 - DNA, 25 bp, Homo sapien
tatgccctcaccaaattctgattga

SEQ ID NO: 874242 - DNA, 25 bp, Homo sapien
taaaagcattcaaagacaataagaa

SEQ ID NO: 874243 - DNA, 25 bp, Homo sapien
tgcttaaatgtggaacagcgtgact

SEQ ID NO: 874244 - DNA, 25 bp, Homo sapien
actgtgtaaatcttagtgcctgggc

SEQ ID NO: 874245 - DNA, 25 bp, Homo sapien
gccattaaaggcaatgaacaccacc

SEQ ID NO: 874246 - DNA, 25 bp, Homo sapien
ggcaatgaacaccacctcttcgaac

SEQ ID NO: 874247 - DNA, 25 bp, Homo sapien
tcctccaggtttggacaggtttatc

SEQ ID NO: 874248 - DNA, 25 bp, Homo sapien
acagtttccacatccgcaagtgaag

SEQ ID NO: 874249 - DNA, 25 bp, Homo sapien
cagtttccacatccgcaagtgaaga

SEQ ID NO: 874250 - DNA, 25 bp, Homo sapien
gctataaagacacctgcacacgtat

SEQ ID NO: 874251 - DNA, 25 bp, Homo sapien
tatacccaaagaactctaaatcatg

SEQ ID NO: 874252 - DNA, 25 bp, Homo sapien
gtatatacccaaagaactctaaatc

SEQ ID NO: 874253 - DNA, 25 bp, Homo sapien
tacccaaagaactctaaatcatgct

SEQ ID NO: 874254 - DNA, 25 bp, Homo sapien
tagtataagtatgtcacatgcaaca

SEQ ID NO: 874255 - DNA, 25 bp, Homo sapien
gtaattttaggcatctctatatccc

SEQ ID NO: 874256 - DNA, 25 bp, Homo sapien
gtatgtcatgggaaccctatgcctc

SEQ ID NO: 874257 - DNA, 25 bp, Homo sapien
acatgtggaacatacttacactgag

SEQ ID NO: 874258 - DNA, 25 bp, Homo sapien
tgtcaaggccactgctgatacatca

SEQ ID NO: 874259 - DNA, 25 bp, Homo sapien
accacagaatgccttagaacttcag

SEQ ID NO: 874260 - DNA, 25 bp, Homo sapien
aaatgggagtcttatttcctagaca

SEQ ID NO: 874261 - DNA, 25 bp, Homo sapien
aaccttaagctgatcacaggagatg

SEQ ID NO: 874262 - DNA, 25 bp, Homo sapien
tactgcagtaggaaagcggacatag

SEQ ID NO: 874263 - DNA, 25 bp, Homo sapien
tgtcgagtagaagtccacaggatgc

SEQ ID NO: 874264 - DNA, 25 bp, Homo sapien
gcttgctcatcctgattacagttga

SEQ ID NO: 874265 - DNA, 25 bp, Homo sapien
aaatgtttatcacaggtagtagcca

SEQ ID NO: 874266 - DNA, 25 bp, Homo sapien
aacaatcgtgcatggtaggaatatt

SEQ ID NO: 874267 - DNA, 25 bp, Homo sapien
gatgattgtaaaatgtatcccaccc

SEQ ID NO: 874268 - DNA, 25 bp, Homo sapien
tccacaactaatgagagaaacagtg

SEQ ID NO: 874269 - DNA, 25 bp, Homo sapien
cacagtagaattccttgtagttcct

SEQ ID NO: 874270 - DNA, 25 bp, Homo sapien
tatcccacccttaaggaattcacag

SEQ ID NO: 874271 - DNA, 25 bp, Homo sapien
ggctggagggatgtatcttgaggga

SEQ ID NO: 874272 - DNA, 25 bp, Homo sapien
ggggctggagggatgtatcttgagg

SEQ ID NO: 874273 - DNA, 25 bp, Homo sapien
gggctggagggatgtatcttgaggg

SEQ ID NO: 874274 - DNA, 25 bp, Homo sapien
gctggagggatgtatcttgagggat

SEQ ID NO: 874275 - DNA, 25 bp, Homo sapien
cctctctgtgcctcagttttctcat

SEQ ID NO: 874276 - DNA, 25 bp, Homo sapien
cacctctctgtgcctcagttttctc

SEQ ID NO: 874277 - DNA, 25 bp, Homo sapien
cttatttcacctctctgtgcctcag

SEQ ID NO: 874278 - DNA, 25 bp, Homo sapien
ttcacctctctgtgcctcagttttc

SEQ ID NO: 874279 - DNA, 25 bp, Homo sapien
gaaactggcagcatggagctcacag

SEQ ID NO: 874280 - DNA, 25 bp, Homo sapien
tcaagagaggaagtagtcaagaaca

SEQ ID NO: 874281 - DNA, 25 bp, Homo sapien
tcccagaagaggagatatacatggg

SEQ ID NO: 874282 - DNA, 25 bp, Homo sapien
caacaaagtgaatgagacatgtcaa

SEQ ID NO: 874283 - DNA, 25 bp, Homo sapien
tgcattccagcctggcgatatagcc

SEQ ID NO: 874284 - DNA, 25 bp, Homo sapien
cctggcgatatagccagactccgtc

SEQ ID NO: 874285 - DNA, 25 bp, Homo sapien
attccagcctggcgatatagccaga

SEQ ID NO: 874286 - DNA, 25 bp, Homo sapien
agcctggcgatatagccagactccg

SEQ ID NO: 874287 - DNA, 25 bp, Homo sapien
tgtgttagccctaccaagtcaaggc

SEQ ID NO: 874288 - DNA, 25 bp, Homo sapien
gagtgtgtgaccctgcttaaaaacg

SEQ ID NO: 874289 - DNA, 25 bp, Homo sapien
aaaatggacccagtgagctagagtg

SEQ ID NO: 874290 - DNA, 25 bp, Homo sapien
tcaacctagtggtccttaaggaagc

SEQ ID NO: 874291 - DNA, 25 bp, Homo sapien
ggccgcacggccgcggccgccatct

SEQ ID NO: 874292 - DNA, 25 bp, Homo sapien
gggccgcacggccgcggccgccatc

SEQ ID NO: 874293 - DNA, 25 bp, Homo sapien
gccgcacggccgcggccgccatctt

SEQ ID NO: 874294 - DNA, 25 bp, Homo sapien
ttaaacggcctgtctcccggtgagc

SEQ ID NO: 874295 - DNA, 25 bp, Homo sapien
gaatagcaacgtgccctgttcccgt

SEQ ID NO: 874296 - DNA, 25 bp, Homo sapien
cgcgttccgcgctgtagggtaatcg

SEQ ID NO: 874297 - DNA, 25 bp, Homo sapien
gatagcctagttgaaaggcccgggc

SEQ ID NO: 874298 - DNA, 25 bp, Homo sapien
tgtctgctggcagttggacaagcaa

SEQ ID NO: 874299 - DNA, 25 bp, Homo sapien
tgatcacatcagtaaacatgagcgg

SEQ ID NO: 874300 - DNA, 25 bp, Homo sapien
aacctgatattttatgggcaccaca

SEQ ID NO: 874301 - DNA, 25 bp, Homo sapien
cactggatagtaactggctagctgc

SEQ ID NO: 874302 - DNA, 25 bp, Homo sapien
taactcccaaccgaacaatgtcaga

SEQ ID NO: 874303 - DNA, 25 bp, Homo sapien
gcgtggcatccaacaagtcaaaatc

SEQ ID NO: 874304 - DNA, 25 bp, Homo sapien
caaaagtagcatggtgtcccactag

SEQ ID NO: 874305 - DNA, 25 bp, Homo sapien
aattacattgcttcctttgcgtggc

SEQ ID NO: 874306 - DNA, 25 bp, Homo sapien
tcatttagatgtcgggatgatgtgg

SEQ ID NO: 874307 - DNA, 25 bp, Homo sapien
agatgtcgggatgatgtgggctgca

SEQ ID NO: 874308 - DNA, 25 bp, Homo sapien
gaatgaagtgaaaagaacatcatca

SEQ ID NO: 874309 - DNA, 25 bp, Homo sapien
gaacatcatcatttagatgtcggga

SEQ ID NO: 874310 - DNA, 25 bp, Homo sapien
agatggcagataatgtgggtctcca

SEQ ID NO: 874311 - DNA, 25 bp, Homo sapien
atggcagataatgtgggtctccata

SEQ ID NO: 874312 - DNA, 25 bp, Homo sapien
gatggcagataatgtgggtctccat

SEQ ID NO: 874313 - DNA, 25 bp, Homo sapien
tggcagataatgtgggtctccatag

SEQ ID NO: 874314 - DNA, 25 bp, Homo sapien
caatgtttaaccagattctccacac

SEQ ID NO: 874315 - DNA, 25 bp, Homo sapien
tcaatgtttaaccagattctccaca

SEQ ID NO: 874316 - DNA, 25 bp, Homo sapien
ggtgaggaggactaatagtactgcc

SEQ ID NO: 874317 - DNA, 25 bp, Homo sapien
agtactgccaaaggcccctgatggt

SEQ ID NO: 874318 - DNA, 25 bp, Homo sapien
acagcaattagggtgaggaggacta

SEQ ID NO: 874319 - DNA, 25 bp, Homo sapien
cattgcttagcccattatgctttat

SEQ ID NO: 874320 - DNA, 25 bp, Homo sapien
tggcaatgcccctcaagtaatgagc

SEQ ID NO: 874321 - DNA, 25 bp, Homo sapien
ttaactggccacgtaggtcatcggt

SEQ ID NO: 874322 - DNA, 25 bp, Homo sapien
caacatggtgctagagagagattcc

SEQ ID NO: 874323 - DNA, 25 bp, Homo sapien
gctttaccgtaaatggctatggcaa

SEQ ID NO: 874324 - DNA, 25 bp, Homo sapien
taaatcttgaccttatggctatgaa

SEQ ID NO: 874325 - DNA, 25 bp, Homo sapien
cattttgtaagtagggtatcaagga

SEQ ID NO: 874326 - DNA, 25 bp, Homo sapien
cagctggcccaaggttttatttggt

SEQ ID NO: 874327 - DNA, 25 bp, Homo sapien
taattatcaaggtatagtttgggaa

SEQ ID NO: 874328 - DNA, 25 bp, Homo sapien
tctaggttggaatatcttaaaaaca

SEQ ID NO: 874329 - DNA, 25 bp, Homo sapien
gctcatttacaatcgtatgaaaatc

SEQ ID NO: 874330 - DNA, 25 bp, Homo sapien
tagactttaatatagctcatttaca

SEQ ID NO: 874331 - DNA, 25 bp, Homo sapien
atatagctcatttacaatcgtatga

SEQ ID NO: 874332 - DNA, 25 bp, Homo sapien
tttacaatcgtatgaaaatccatca

SEQ ID NO: 874333 - DNA, 25 bp, Homo sapien
gagggaagtcatggataattttcac

SEQ ID NO: 874334 - DNA, 25 bp, Homo sapien
taaaggataaaactgagggaagtca

SEQ ID NO: 874335 - DNA, 25 bp, Homo sapien
tcaatcatgttgcacaatccctaaa

SEQ ID NO: 874336 - DNA, 25 bp, Homo sapien
tcacagcttcattgtaaagtccaag

SEQ ID NO: 874337 - DNA, 25 bp, Homo sapien
aagatgtacacaagatggtggcctt

SEQ ID NO: 874338 - DNA, 25 bp, Homo sapien
tgtacacaagatggtggccttggcg

SEQ ID NO: 874339 - DNA, 25 bp, Homo sapien
taagatgtacacaagatggtggcct

SEQ ID NO: 874340 - DNA, 25 bp, Homo sapien
gatgtacacaagatggtggccttgg

SEQ ID NO: 874341 - DNA, 25 bp, Homo sapien
cctttagcagtagcttcaagtccaa

SEQ ID NO: 874342 - DNA, 25 bp, Homo sapien
caagacatcgatttggtgatatcac

SEQ ID NO: 874343 - DNA, 25 bp, Homo sapien
tcaagtccaaagctacaattcaagt

SEQ ID NO: 874344 - DNA, 25 bp, Homo sapien
taagcagtaatatcctatgagagga

SEQ ID NO: 874345 - DNA, 25 bp, Homo sapien
ctgaggaacatagggagatgccatc

SEQ ID NO: 874346 - DNA, 25 bp, Homo sapien
agcctgaggaacatagggagatgcc

SEQ ID NO: 874347 - DNA, 25 bp, Homo sapien
cctgaggaacatagggagatgccat

SEQ ID NO: 874348 - DNA, 25 bp, Homo sapien
gaggaacatagggagatgccatctt

SEQ ID NO: 874349 - DNA, 25 bp, Homo sapien
tcatgacgcccaaaaaatcattggt

SEQ ID NO: 874350 - DNA, 25 bp, Homo sapien
gaaacatcggcaacaaaccaaatca

SEQ ID NO: 874351 - DNA, 25 bp, Homo sapien
gctgacatgggagcaacttgatctt

SEQ ID NO: 874352 - DNA, 25 bp, Homo sapien
tacagccagggacgttttaccagct

SEQ ID NO: 874353 - DNA, 25 bp, Homo sapien
ggttccatcaactcgatggttccat

SEQ ID NO: 874354 - DNA, 25 bp, Homo sapien
gggttccatcaactcgatggttcca

SEQ ID NO: 874355 - DNA, 25 bp, Homo sapien
tagacagtacatatcccacggaggg

SEQ ID NO: 874356 - DNA, 25 bp, Homo sapien
tgagtacattgatccttagttgagc

SEQ ID NO: 874357 - DNA, 25 bp, Homo sapien
actggttgctagaatatctgggtcc

SEQ ID NO: 874358 - DNA, 25 bp, Homo sapien
taaaggatgcccaccctaaaagtga

SEQ ID NO: 874359 - DNA, 25 bp, Homo sapien
ggcttgtcgatgaattgagctagca

SEQ ID NO: 874360 - DNA, 25 bp, Homo sapien
gcttgtcgatgaattgagctagcat

SEQ ID NO: 874361 - DNA, 25 bp, Homo sapien
cttgtcgatgaattgagctagcatg

SEQ ID NO: 874362 - DNA, 25 bp, Homo sapien
tgggcaagtccatcatgtccaccat

SEQ ID NO: 874363 - DNA, 25 bp, Homo sapien
ctgggcaagtccatcatgtccacca

SEQ ID NO: 874364 - DNA, 25 bp, Homo sapien
tggcgggaaacccacggacgactga

SEQ ID NO: 874365 - DNA, 25 bp, Homo sapien
ctggcgggaaacccacggacgactg

SEQ ID NO: 874366 - DNA, 25 bp, Homo sapien
ggaaacctaaatcgcaatcgcgctg

SEQ ID NO: 874367 - DNA, 25 bp, Homo sapien
tctatggggcagatttctcggcacc

SEQ ID NO: 874368 - DNA, 25 bp, Homo sapien
tctcggcaccaatcagcgaagacta

SEQ ID NO: 874369 - DNA, 25 bp, Homo sapien
tccagcttcgccaattaaatgcgcg

SEQ ID NO: 874370 - DNA, 25 bp, Homo sapien
cagatacagggcgagaggcagtgga

SEQ ID NO: 874371 - DNA, 25 bp, Homo sapien
gcggcgtcccggaagttgacagata

SEQ ID NO: 874372 - DNA, 25 bp, Homo sapien
cagtggaggcgggacttggataggg

SEQ ID NO: 874373 - DNA, 25 bp, Homo sapien
gctgcttagtgacgcgcggcgtccc

SEQ ID NO: 874374 - DNA, 25 bp, Homo sapien
actgcggggccagcctcaggtacct

SEQ ID NO: 874375 - DNA, 25 bp, Homo sapien
gatcacaggattcccggcggtgact

SEQ ID NO: 874376 - DNA, 25 bp, Homo sapien
tgtgaagctccggtgctggtgcggc

SEQ ID NO: 874377 - DNA, 25 bp, Homo sapien
caggtacctcgtctcgcgggaggcg

SEQ ID NO: 874378 - DNA, 25 bp, Homo sapien
ctaggcgggagtcggcactagctgc

SEQ ID NO: 874379 - DNA, 25 bp, Homo sapien
cattcttcccgcgaacagagtcaaa

SEQ ID NO: 874380 - DNA, 25 bp, Homo sapien
tgctgcgtaccagctgttcactgct

SEQ ID NO: 874381 - DNA, 25 bp, Homo sapien
acagagtcaaaagagctaggcggga

SEQ ID NO: 874382 - DNA, 25 bp, Homo sapien
gttgtgatacccgcccccttggaga

SEQ ID NO: 874383 - DNA, 25 bp, Homo sapien
gaatgatacgtggtgtggcgtcggg

SEQ ID NO: 874384 - DNA, 25 bp, Homo sapien
tgatacccgcccccttggagatggg

SEQ ID NO: 874385 - DNA, 25 bp, Homo sapien
tgggaggcgcgggagttttgcggaa

SEQ ID NO: 874386 - DNA, 25 bp, Homo sapien
tagctgcgtcactctactttctcca

SEQ ID NO: 874387 - DNA, 25 bp, Homo sapien
tgttggctgagggtcgatttactcc

SEQ ID NO: 874388 - DNA, 25 bp, Homo sapien
tttactcccttagctgcgtcactct

SEQ ID NO: 874389 - DNA, 25 bp, Homo sapien
ggctgagggtcgatttactccctta

SEQ ID NO: 874390 - DNA, 25 bp, Homo sapien
tatcagactgatcactctccatcca

SEQ ID NO: 874391 - DNA, 25 bp, Homo sapien
gatttcctccggcatcactgttaag

SEQ ID NO: 874392 - DNA, 25 bp, Homo sapien
cagaatggtccacctaaaatatcag

SEQ ID NO: 874393 - DNA, 25 bp, Homo sapien
taagaaagacattccaggttctggc

SEQ ID NO: 874394 - DNA, 25 bp, Homo sapien
cctgtattgcgtttaaggatttcat

SEQ ID NO: 874395 - DNA, 25 bp, Homo sapien
tgaaatccacgtgtctcatttggaa

SEQ ID NO: 874396 - DNA, 25 bp, Homo sapien
gctctataattgatttgtagctcac

SEQ ID NO: 874397 - DNA, 25 bp, Homo sapien
gtttggctcctgttgaaccctatac

SEQ ID NO: 874398 - DNA, 25 bp, Homo sapien
aaattctcagttggctgaaagcatc

SEQ ID NO: 874399 - DNA, 25 bp, Homo sapien
tgctgttttggctaaaagtaataac

SEQ ID NO: 874400 - DNA, 25 bp, Homo sapien
gattaggagtgttaaattagaggac

SEQ ID NO: 874401 - DNA, 25 bp, Homo sapien
ctcatataacttccctttttaatgg

SEQ ID NO: 874402 - DNA, 25 bp, Homo sapien
cagatggattcgtccttttaggtga

SEQ ID NO: 874403 - DNA, 25 bp, Homo sapien
tcttcagaaagcctccggaatctaa

SEQ ID NO: 874404 - DNA, 25 bp, Homo sapien
gccctcagtaccagagacagaagca

SEQ ID NO: 874405 - DNA, 25 bp, Homo sapien
ctaaaaagccctcagtaccagagac

SEQ ID NO: 874406 - DNA, 25 bp, Homo sapien
gtacccagcaccatatgtctagcag

SEQ ID NO: 874407 - DNA, 25 bp, Homo sapien
tgtctagcagttgaacagtcatggt

SEQ ID NO: 874408 - DNA, 25 bp, Homo sapien
gaatcacttccgtcgtagttccagg

SEQ ID NO: 874409 - DNA, 25 bp, Homo sapien
tagcataattggtgtcgtacccagc

SEQ ID NO: 874410 - DNA, 25 bp, Homo sapien
tgtcttcgttctcttttcatcattc

SEQ ID NO: 874411 - DNA, 25 bp, Homo sapien
cctctgtcttcgttctcttttcatc

SEQ ID NO: 874412 - DNA, 25 bp, Homo sapien
tcgttctcttttcatcattcatccc

SEQ ID NO: 874413 - DNA, 25 bp, Homo sapien
ctcttttcatcattcatcccctctt

SEQ ID NO: 874414 - DNA, 25 bp, Homo sapien
tggttagggatgctccagattcctg

SEQ ID NO: 874415 - DNA, 25 bp, Homo sapien
gaagaatagtatctcataaaataag

SEQ ID NO: 874416 - DNA, 25 bp, Homo sapien
tctcctgcttggttagggatgctcc

SEQ ID NO: 874417 - DNA, 25 bp, Homo sapien
gaatgtggtaaattagtgtcgtatc

SEQ ID NO: 874418 - DNA, 25 bp, Homo sapien
tgtgtgaaatgttaatgatatcatg

SEQ ID NO: 874419 - DNA, 25 bp, Homo sapien
cattgttgcaggagatgaagcaaaa

SEQ ID NO: 874420 - DNA, 25 bp, Homo sapien
tgtgaaatgttaatgatatcatggt

SEQ ID NO: 874421 - DNA, 25 bp, Homo sapien
cttcattacattgttgcaggagatg

SEQ ID NO: 874422 - DNA, 25 bp, Homo sapien
tactaatgctttgttgatataaggc

SEQ ID NO: 874423 - DNA, 25 bp, Homo sapien
gaaatttgtctgtgtgagtcatatt

SEQ ID NO: 874424 - DNA, 25 bp, Homo sapien
tgagtcattagacacttgaacaaga

SEQ ID NO: 874425 - DNA, 25 bp, Homo sapien
tgtgagtcatatttgagcattccaa

SEQ ID NO: 874426 - DNA, 25 bp, Homo sapien
tcctgaatcacaaaggtactgaaag

SEQ ID NO: 874427 - DNA, 25 bp, Homo sapien
tcattaaggtctgttgctgacactg

SEQ ID NO: 874428 - DNA, 25 bp, Homo sapien
aagtaatttgcttcattaaggtctg

SEQ ID NO: 874429 - DNA, 25 bp, Homo sapien
cagtcgtcattcttctcttagcctc

SEQ ID NO: 874430 - DNA, 25 bp, Homo sapien
tcacaccatctcttaagaagataag

SEQ ID NO: 874431 - DNA, 25 bp, Homo sapien
cagatgttggtgttgacttaaagca

SEQ ID NO: 874432 - DNA, 25 bp, Homo sapien
gataagtcctgtggataagctggag

SEQ ID NO: 874433 - DNA, 25 bp, Homo sapien
attgccacccgaggagggcagaatg

SEQ ID NO: 874434 - DNA, 25 bp, Homo sapien
gaaactattgtattccctgtgcatt

SEQ ID NO: 874435 - DNA, 25 bp, Homo sapien
tgaaactattgtattccctgtgcat

SEQ ID NO: 874436 - DNA, 25 bp, Homo sapien
ccctgtgcattgtcttcacatcctt

SEQ ID NO: 874437 - DNA, 25 bp, Homo sapien
tggagcctcttatctgagtagcttc

SEQ ID NO: 874438 - DNA, 25 bp, Homo sapien
gacgattgtaaatgtgtgttgtcct

SEQ ID NO: 874439 - DNA, 25 bp, Homo sapien
aatgtcctcttggagcctcttatct

SEQ ID NO: 874440 - DNA, 25 bp, Homo sapien
aattaagacgattgtaaatgtgtgt

SEQ ID NO: 874441 - DNA, 25 bp, Homo sapien
tgctgcataattgtgagccgtaggg

SEQ ID NO: 874442 - DNA, 25 bp, Homo sapien
acactactgctgcataattgtgagc

SEQ ID NO: 874443 - DNA, 25 bp, Homo sapien
cgtaggggatactgccattaggagc

SEQ ID NO: 874444 - DNA, 25 bp, Homo sapien
ctgcgtgaaaaccacactactgctg

SEQ ID NO: 874445 - DNA, 25 bp, Homo sapien
ttccaccccaggaaagatctctgca

SEQ ID NO: 874446 - DNA, 25 bp, Homo sapien
ctcctccttgatcttttttgtgatt

SEQ ID NO: 874447 - DNA, 25 bp, Homo sapien
gattgtccatgaggattttgctacc

SEQ ID NO: 874448 - DNA, 25 bp, Homo sapien
gattttgctacctgccctctcaggg

SEQ ID NO: 874449 - DNA, 25 bp, Homo sapien
tcttcctgagatggatccctttgga

SEQ ID NO: 874450 - DNA, 25 bp, Homo sapien
tttaaatgactcttcacctgccgag

SEQ ID NO: 874451 - DNA, 25 bp, Homo sapien
gcctcctgatgtgcatgatagccct

SEQ ID NO: 874452 - DNA, 25 bp, Homo sapien
taagaagcaacagactcattggtcc

SEQ ID NO: 874453 - DNA, 25 bp, Homo sapien
aaagctacattttgcgaatctgtcg

SEQ ID NO: 874454 - DNA, 25 bp, Homo sapien
catgcccctgtccagtaggttctct

SEQ ID NO: 874455 - DNA, 25 bp, Homo sapien
tccagtaggttctctaaagctacat

SEQ ID NO: 874456 - DNA, 25 bp, Homo sapien
tccttctttggcgtgggccatgccc

SEQ ID NO: 874457 - DNA, 25 bp, Homo sapien
tctgggatacttttagggctgtggc

SEQ ID NO: 874458 - DNA, 25 bp, Homo sapien
tttggaatttagacgacagctgcag

SEQ ID NO: 874459 - DNA, 25 bp, Homo sapien
gggctgtggctaccgagtgacatca

SEQ ID NO: 874460 - DNA, 25 bp, Homo sapien
tcctctcagcagtaaagtgccagtg

SEQ ID NO: 874461 - DNA, 25 bp, Homo sapien
ttaaatgaatactgatgtgagacag

SEQ ID NO: 874462 - DNA, 25 bp, Homo sapien
taaacgcttgttgatatgatgaaag

SEQ ID NO: 874463 - DNA, 25 bp, Homo sapien
tgatatgatgaaagtttggcaacat

SEQ ID NO: 874464 - DNA, 25 bp, Homo sapien
tgtgagacagttccattgtacagca

SEQ ID NO: 874465 - DNA, 25 bp, Homo sapien
gtgtagtggttaagcttgtttctcc

SEQ ID NO: 874466 - DNA, 25 bp, Homo sapien
agcggaaatttgatagtgtagtggt

SEQ ID NO: 874467 - DNA, 25 bp, Homo sapien
ccttcttggccttcgaagccttcac

SEQ ID NO: 874468 - DNA, 25 bp, Homo sapien
gccttcttggccttcgaagccttca

SEQ ID NO: 874469 - DNA, 25 bp, Homo sapien
tttggcttcagctgtaggaggggca

SEQ ID NO: 874470 - DNA, 25 bp, Homo sapien
cttccttcttcgctttcggcgccat

SEQ ID NO: 874471 - DNA, 25 bp, Homo sapien
gagcttccttcttcgctttcggcgc

SEQ ID NO: 874472 - DNA, 25 bp, Homo sapien
tggcttcagctgtaggaggggcagg

SEQ ID NO: 874473 - DNA, 25 bp, Homo sapien
cttgtgaaaagggtcaggacaattt

SEQ ID NO: 874474 - DNA, 25 bp, Homo sapien
tagtaataagccgaaaagaaccata

SEQ ID NO: 874475 - DNA, 25 bp, Homo sapien
tgaatgctgtttagtaataagccga

SEQ ID NO: 874476 - DNA, 25 bp, Homo sapien
aaagaaccataattttcaagtgatt

SEQ ID NO: 874477 - DNA, 25 bp, Homo sapien
tcaagtgattcttcatgattgccaa

SEQ ID NO: 874478 - DNA, 25 bp, Homo sapien
tcacacacgttgcttaaatatgtgc

SEQ ID NO: 874479 - DNA, 25 bp, Homo sapien
gagctacagtaaaattggcctgcaa

SEQ ID NO: 874480 - DNA, 25 bp, Homo sapien
tagtttttgccttagctactggcct

SEQ ID NO: 874481 - DNA, 25 bp, Homo sapien
tatcaccttgtaaagtagttaccag

SEQ ID NO: 874482 - DNA, 25 bp, Homo sapien
cataagagtccggttacatcgagca

SEQ ID NO: 874483 - DNA, 25 bp, Homo sapien
cttcatccggcatcagcctggacag

SEQ ID NO: 874484 - DNA, 25 bp, Homo sapien
ttccataagagtccggttacatcga

SEQ ID NO: 874485 - DNA, 25 bp, Homo sapien
cttgattccataagagtccggttac

SEQ ID NO: 874486 - DNA, 25 bp, Homo sapien
tcaggcttagatgctactctgactt

SEQ ID NO: 874487 - DNA, 25 bp, Homo sapien
gatgctactctgacttctcgacaga

SEQ ID NO: 874488 - DNA, 25 bp, Homo sapien
tctgacttctcgacagacttctgct

SEQ ID NO: 874489 - DNA, 25 bp, Homo sapien
gcttagatgctactctgacttctcg

SEQ ID NO: 874490 - DNA, 25 bp, Homo sapien
gtagcaggctctcagtgtctgattt

SEQ ID NO: 874491 - DNA, 25 bp, Homo sapien
agtagcaggctctcagtgtctgatt

SEQ ID NO: 874492 - DNA, 25 bp, Homo sapien
gtgtctgatttgtccactgcttcct

SEQ ID NO: 874493 - DNA, 25 bp, Homo sapien
gtctgatttgtccactgcttcctac

SEQ ID NO: 874494 - DNA, 25 bp, Homo sapien
gcaaagccagcagtcaggtaaaggg

SEQ ID NO: 874495 - DNA, 25 bp, Homo sapien
ctgtgatttctgcaggaagcaaagc

SEQ ID NO: 874496 - DNA, 25 bp, Homo sapien
tctcaactcctcagattttctgtga

SEQ ID NO: 874497 - DNA, 25 bp, Homo sapien
aggaagcaaagccagcagtcaggta

SEQ ID NO: 874498 - DNA, 25 bp, Homo sapien
caagcctcctctgggtgacctaagt

SEQ ID NO: 874499 - DNA, 25 bp, Homo sapien
ctcctctgggtgacctaagtaggta

SEQ ID NO: 874500 - DNA, 25 bp, Homo sapien
agcctcctctgggtgacctaagtag

SEQ ID NO: 874501 - DNA, 25 bp, Homo sapien
ctgggtgacctaagtaggtatttgg

SEQ ID NO: 874502 - DNA, 25 bp, Homo sapien
cactggaaatttctgtcctgtccaa

SEQ ID NO: 874503 - DNA, 25 bp, Homo sapien
tctgtcctgtccaatttcctttata

SEQ ID NO: 874504 - DNA, 25 bp, Homo sapien
tggaaatttctgtcctgtccaattt

SEQ ID NO: 874505 - DNA, 25 bp, Homo sapien
ctgtcctgtccaatttcctttatac

SEQ ID NO: 874506 - DNA, 25 bp, Homo sapien
agttccttacgcgtcataactacaa

SEQ ID NO: 874507 - DNA, 25 bp, Homo sapien
cataactacaaaggtagctgtgaga

SEQ ID NO: 874508 - DNA, 25 bp, Homo sapien
tacgcgtcataactacaaaggtagc

SEQ ID NO: 874509 - DNA, 25 bp, Homo sapien
taaaataagttccttacgcgtcata

SEQ ID NO: 874510 - DNA, 25 bp, Homo sapien
tgtgaaggtctttttcgtaacttca

SEQ ID NO: 874511 - DNA, 25 bp, Homo sapien
gactgccttgggatatatgccacca

SEQ ID NO: 874512 - DNA, 25 bp, Homo sapien
ctcagaggtgggaatgactgccttg

SEQ ID NO: 874513 - DNA, 25 bp, Homo sapien
ccagtgtcggtagcattcaaggaca

SEQ ID NO: 874514 - DNA, 25 bp, Homo sapien
gatatatgccaccagtgtcggtagc

SEQ ID NO: 874515 - DNA, 25 bp, Homo sapien
gaactttatcccatacgtcttgtgt

SEQ ID NO: 874516 - DNA, 25 bp, Homo sapien
gggattcgggttgactcatcattgt

SEQ ID NO: 874517 - DNA, 25 bp, Homo sapien
gccatttagtctcccctctggtccc

SEQ ID NO: 874518 - DNA, 25 bp, Homo sapien
tctgaccaggagtgccatgaagtgg

SEQ ID NO: 874519 - DNA, 25 bp, Homo sapien
tctggtcccttaacaccttgtacat

SEQ ID NO: 874520 - DNA, 25 bp, Homo sapien
tttgttatttctttcgcctcaattg

SEQ ID NO: 874521 - DNA, 25 bp, Homo sapien
atttctttcgcctcaattggtgaat

SEQ ID NO: 874522 - DNA, 25 bp, Homo sapien
ctttcgcctcaattggtgaatagaa

SEQ ID NO: 874523 - DNA, 25 bp, Homo sapien
ttcgcctcaattggtgaatagaaaa

SEQ ID NO: 874524 - DNA, 25 bp, Homo sapien
tggtagtatcttccccaacatcact

SEQ ID NO: 874525 - DNA, 25 bp, Homo sapien
tatagcagtgactggcgttggtagt

SEQ ID NO: 874526 - DNA, 25 bp, Homo sapien
gatgttaagatcaaaatgacagctc

SEQ ID NO: 874527 - DNA, 25 bp, Homo sapien
tgtatgacttcacctaacacatgat

SEQ ID NO: 874528 - DNA, 25 bp, Homo sapien
tcacaattaaaaccgaagcttctag

SEQ ID NO: 874529 - DNA, 25 bp, Homo sapien
cacaaatgggatacgtttgctcact

SEQ ID NO: 874530 - DNA, 25 bp, Homo sapien
gccaaaacctcagtaaacatcattc

SEQ ID NO: 874531 - DNA, 25 bp, Homo sapien
tgctcactatcatgtttttaatcac

SEQ ID NO: 874532 - DNA, 25 bp, Homo sapien
aatttttcctcgatatatatttaga

SEQ ID NO: 874533 - DNA, 25 bp, Homo sapien
gaagagttttcatgaaacagaccag

SEQ ID NO: 874534 - DNA, 25 bp, Homo sapien
tctaacccagtaagaaaaagtgcaa

SEQ ID NO: 874535 - DNA, 25 bp, Homo sapien
cagaccagagaactatgtataaaat

SEQ ID NO: 874536 - DNA, 25 bp, Homo sapien
ctaggaccctcccatcagagggaag

SEQ ID NO: 874537 - DNA, 25 bp, Homo sapien
cccatcagagggaaggcaaggtctt

SEQ ID NO: 874538 - DNA, 25 bp, Homo sapien
cctcccatcagagggaaggcaaggt

SEQ ID NO: 874539 - DNA, 25 bp, Homo sapien
gaccctcccatcagagggaaggcaa

SEQ ID NO: 874540 - DNA, 25 bp, Homo sapien
gtgtgtatcctgtataacactgctg

SEQ ID NO: 874541 - DNA, 25 bp, Homo sapien
tgataatgcatcatatcgtagtcaa

SEQ ID NO: 874542 - DNA, 25 bp, Homo sapien
ttcagcacatttttggccacgtgct

SEQ ID NO: 874543 - DNA, 25 bp, Homo sapien
taatgcatcatatcgtagtcaatga

SEQ ID NO: 874544 - DNA, 25 bp, Homo sapien
cttggatttggaaactagtataagc

SEQ ID NO: 874545 - DNA, 25 bp, Homo sapien
gatttgcaccaaccagtctaccagg

SEQ ID NO: 874546 - DNA, 25 bp, Homo sapien
taccaggatggtatgcttatgtcca

SEQ ID NO: 874547 - DNA, 25 bp, Homo sapien
tctcatccacctaagacatgtgggt

SEQ ID NO: 874548 - DNA, 25 bp, Homo sapien
taatccaaactagttgaagcttcct

SEQ ID NO: 874549 - DNA, 25 bp, Homo sapien
gagggttattccaatctttgttatc

SEQ ID NO: 874550 - DNA, 25 bp, Homo sapien
aaaaagctcggcagatgttctcttc

SEQ ID NO: 874551 - DNA, 25 bp, Homo sapien
tcacggaggcatcctcaggtatggg

SEQ ID NO: 874552 - DNA, 25 bp, Homo sapien
aagcatcagaaaaagctcggcagat

SEQ ID NO: 874553 - DNA, 25 bp, Homo sapien
aaaatggaatgcctaatagtcacat

SEQ ID NO: 874554 - DNA, 25 bp, Homo sapien
taaaatggaatgcctaatagtcaca

SEQ ID NO: 874555 - DNA, 25 bp, Homo sapien
ggaacttcatgaccagatactcaat

SEQ ID NO: 874556 - DNA, 25 bp, Homo sapien
cttcatgaccagatactcaattgta

SEQ ID NO: 874557 - DNA, 25 bp, Homo sapien
tcatgaccagatactcaattgtaaa

SEQ ID NO: 874558 - DNA, 25 bp, Homo sapien
atggctaacagcttttaggaacttc

SEQ ID NO: 874559 - DNA, 25 bp, Homo sapien
gatatggcagcataataaccaacca

SEQ ID NO: 874560 - DNA, 25 bp, Homo sapien
cgggaacaatctgatatggcagcat

SEQ ID NO: 874561 - DNA, 25 bp, Homo sapien
ttatgcaagacaataacgggaacaa

SEQ ID NO: 874562 - DNA, 25 bp, Homo sapien
gcagcataataaccaaccaaaatat

SEQ ID NO: 874563 - DNA, 25 bp, Homo sapien
ggttcacaagataacacccagcagc

SEQ ID NO: 874564 - DNA, 25 bp, Homo sapien
aaaacactgataatgcctaatagga

SEQ ID NO: 874565 - DNA, 25 bp, Homo sapien
ttttgcatgtaaccagaaagtcagg

SEQ ID NO: 874566 - DNA, 25 bp, Homo sapien
gacagcttctcactgtaaaaattgg

SEQ ID NO: 874567 - DNA, 25 bp, Homo sapien
taaagttgagaccatgtgactggac

SEQ ID NO: 874568 - DNA, 25 bp, Homo sapien
ggcccttgcctgctagctttagtga

SEQ ID NO: 874569 - DNA, 25 bp, Homo sapien
cacagttgcaacagaacatttagca

SEQ ID NO: 874570 - DNA, 25 bp, Homo sapien
tatttgctctctcaaggtgatgaaa

SEQ ID NO: 874571 - DNA, 25 bp, Homo sapien
ggatctgtgatatactccacctgca

SEQ ID NO: 874572 - DNA, 25 bp, Homo sapien
cccctgcttccgtgtcatcctctgg

SEQ ID NO: 874573 - DNA, 25 bp, Homo sapien
tcctgtcaccctcttaccatttttg

SEQ ID NO: 874574 - DNA, 25 bp, Homo sapien
ttgtcccctgcttccgtgtcatcct

SEQ ID NO: 874575 - DNA, 25 bp, Homo sapien
ctgagaagggttgagatggtcacag

SEQ ID NO: 874576 - DNA, 25 bp, Homo sapien
aagggttgagatggtcacagctgtg

SEQ ID NO: 874577 - DNA, 25 bp, Homo sapien
gaagggttgagatggtcacagctgt

SEQ ID NO: 874578 - DNA, 25 bp, Homo sapien
ctagtaatcacagtaacaccagccc

SEQ ID NO: 874579 - DNA, 25 bp, Homo sapien
taatcacagtaacaccagcccttct

SEQ ID NO: 874580 - DNA, 25 bp, Homo sapien
agtaatcacagtaacaccagccctt

SEQ ID NO: 874581 - DNA, 25 bp, Homo sapien
tcacagtaacaccagcccttctctg

SEQ ID NO: 874582 - DNA, 25 bp, Homo sapien
gttgcagttattgccccaggttggc

SEQ ID NO: 874583 - DNA, 25 bp, Homo sapien
gtgcacatatgtgctcctctgggcc

SEQ ID NO: 874584 - DNA, 25 bp, Homo sapien
tgtgcacatatgtgctcctctgggc

SEQ ID NO: 874585 - DNA, 25 bp, Homo sapien
ttcagttgcagttattgccccaggt

SEQ ID NO: 874586 - DNA, 25 bp, Homo sapien
tactaaagcatcagtacactgtggg

SEQ ID NO: 874587 - DNA, 25 bp, Homo sapien
taattacaactgcagctgtgcacag

SEQ ID NO: 874588 - DNA, 25 bp, Homo sapien
tgtgggcttccacttacaatgcaga

SEQ ID NO: 874589 - DNA, 25 bp, Homo sapien
tcaggtccccatgcgtacaaactac

SEQ ID NO: 874590 - DNA, 25 bp, Homo sapien
gacaatattcagtcatataccatga

SEQ ID NO: 874591 - DNA, 25 bp, Homo sapien
ttagcgcccactgcataataggtta

SEQ ID NO: 874592 - DNA, 25 bp, Homo sapien
taggttatgaacagagaagttccaa

SEQ ID NO: 874593 - DNA, 25 bp, Homo sapien
gtggcatttgtttaacacctacaca

SEQ ID NO: 874594 - DNA, 25 bp, Homo sapien
tcaggctgccagttagtgacttaat

SEQ ID NO: 874595 - DNA, 25 bp, Homo sapien
aagtcatcaggcttggaaaatgcag

SEQ ID NO: 874596 - DNA, 25 bp, Homo sapien
tacattgcagtctctaagtgggagc

SEQ ID NO: 874597 - DNA, 25 bp, Homo sapien
aaatatgttctttcagttgcctgag

SEQ ID NO: 874598 - DNA, 25 bp, Homo sapien
tatcttgttttcttgctttaaagtg

SEQ ID NO: 874599 - DNA, 25 bp, Homo sapien
tgttttcttgctttaaagtggatta

SEQ ID NO: 874600 - DNA, 25 bp, Homo sapien
cttgaattatcttgttttcttgctt

SEQ ID NO: 874601 - DNA, 25 bp, Homo sapien
tcttgttttcttgctttaaagtgga

SEQ ID NO: 874602 - DNA, 25 bp, Homo sapien
tcttcagacttacaagtttgagtag

SEQ ID NO: 874603 - DNA, 25 bp, Homo sapien
tgagtagattttagtatgtcatctg

SEQ ID NO: 874604 - DNA, 25 bp, Homo sapien
ctgtatggattatgaatttgtaggc

SEQ ID NO: 874605 - DNA, 25 bp, Homo sapien
cctaatgtaagtccaatagtgctga

SEQ ID NO: 874606 - DNA, 25 bp, Homo sapien
aggctgtgaagtccagtatcaaggt

SEQ ID NO: 874607 - DNA, 25 bp, Homo sapien
ggctcacaattctggaggctgtgaa

SEQ ID NO: 874608 - DNA, 25 bp, Homo sapien
gctcacaattctggaggctgtgaag

SEQ ID NO: 874609 - DNA, 25 bp, Homo sapien
tctggaggctgtgaagtccagtatc

SEQ ID NO: 874610 - DNA, 25 bp, Homo sapien
cctttgctcgatccaaaactctgtc

SEQ ID NO: 874611 - DNA, 25 bp, Homo sapien
tcaacctccctttgctcgatccaaa

SEQ ID NO: 874612 - DNA, 25 bp, Homo sapien
aaactctgtcttacttttgacctct

SEQ ID NO: 874613 - DNA, 25 bp, Homo sapien
gatcttctccttgacaattggtttg

SEQ ID NO: 874614 - DNA, 25 bp, Homo sapien
gccatgacctcattgcaaatactga

SEQ ID NO: 874615 - DNA, 25 bp, Homo sapien
tattaggaatcaatctacaagagag

SEQ ID NO: 874616 - DNA, 25 bp, Homo sapien
gacagcctggactgcctctcagatt

SEQ ID NO: 874617 - DNA, 25 bp, Homo sapien
tggatgggccttggatgctcagcca

SEQ ID NO: 874618 - DNA, 25 bp, Homo sapien
agcacgatgcctggagcggtggcgg

SEQ ID NO: 874619 - DNA, 25 bp, Homo sapien
tgaggagaaggctgcgagcggccct

SEQ ID NO: 874620 - DNA, 25 bp, Homo sapien
tggacgtttgttttcgcagccttcc

SEQ ID NO: 874621 - DNA, 25 bp, Homo sapien
gggccgttgccctgtcagcacgatg

SEQ ID NO: 874622 - DNA, 25 bp, Homo sapien
tccgtgtcggccggcggcgtccagg

SEQ ID NO: 874623 - DNA, 25 bp, Homo sapien
ggctcccacacgctcgcgcgcctcc

SEQ ID NO: 874624 - DNA, 25 bp, Homo sapien
cgcctccgtgtcggccggcggcgtc

SEQ ID NO: 874625 - DNA, 25 bp, Homo sapien
ctcccacacgctcgcgcgcctcccg

SEQ ID NO: 874626 - DNA, 25 bp, Homo sapien
cgtggaaacttcagcctcttcgggc

SEQ ID NO: 874627 - DNA, 25 bp, Homo sapien
gctagtgcattatcgaaggtgtgaa

SEQ ID NO: 874628 - DNA, 25 bp, Homo sapien
gagcagctcacctgagagacggagc

SEQ ID NO: 874629 - DNA, 25 bp, Homo sapien
ccgtgtgcagaggtagcgagcccaa

SEQ ID NO: 874630 - DNA, 25 bp, Homo sapien
acacagtgcatgatttagttgagcc

SEQ ID NO: 874631 - DNA, 25 bp, Homo sapien
ttaggtgtcaaaggtaatggtgagc

SEQ ID NO: 874632 - DNA, 25 bp, Homo sapien
gatgctgtgggtttcccttagtgtt

SEQ ID NO: 874633 - DNA, 25 bp, Homo sapien
ctggtggatgctgtgggtttccctt

SEQ ID NO: 874634 - DNA, 25 bp, Homo sapien
ttaatgccatatgcaactcctttgc

SEQ ID NO: 874635 - DNA, 25 bp, Homo sapien
atgaccacaactgaacacacatctt

SEQ ID NO: 874636 - DNA, 25 bp, Homo sapien
tgaatgaaaacaacgtgatcgccct

SEQ ID NO: 874637 - DNA, 25 bp, Homo sapien
aacgtgatcgccctaataatgacca

SEQ ID NO: 874638 - DNA, 25 bp, Homo sapien
gatgctgataccactatggcccaat

SEQ ID NO: 874639 - DNA, 25 bp, Homo sapien
tgttgtagatgccaatactccttga

SEQ ID NO: 874640 - DNA, 25 bp, Homo sapien
tctctggaccatcagaagcctgggt

SEQ ID NO: 874641 - DNA, 25 bp, Homo sapien
tagattggccctttacatttaccca

SEQ ID NO: 874642 - DNA, 25 bp, Homo sapien
gacaaggcaaaatctcagcaagttc

SEQ ID NO: 874643 - DNA, 25 bp, Homo sapien
caaggcaaaatctcagcaagttcgg

SEQ ID NO: 874644 - DNA, 25 bp, Homo sapien
cggacaaggcaaaatctcagcaagt

SEQ ID NO: 874645 - DNA, 25 bp, Homo sapien
ggacaaggcaaaatctcagcaagtt

SEQ ID NO: 874646 - DNA, 25 bp, Homo sapien
aaagaggtgacattactaccaactg

SEQ ID NO: 874647 - DNA, 25 bp, Homo sapien
tttgcagagatcactaaagttgaaa

SEQ ID NO: 874648 - DNA, 25 bp, Homo sapien
ttatgccatcaacgtagaaaactga

SEQ ID NO: 874649 - DNA, 25 bp, Homo sapien
cagtgtaactaaaagtttgcagaga

SEQ ID NO: 874650 - DNA, 25 bp, Homo sapien
gctgatgatttaagccagtgctcat

SEQ ID NO: 874651 - DNA, 25 bp, Homo sapien
ctatgtctattgtgcttgtacttta

SEQ ID NO: 874652 - DNA, 25 bp, Homo sapien
gcagctgatgatttaagccagtgct

SEQ ID NO: 874653 - DNA, 25 bp, Homo sapien
atcctggggatcttaaaaattatgc

SEQ ID NO: 874654 - DNA, 25 bp, Homo sapien
tgatccttctacctctcagtgtgct

SEQ ID NO: 874655 - DNA, 25 bp, Homo sapien
tacctctcagtgtgctgagtatctg

SEQ ID NO: 874656 - DNA, 25 bp, Homo sapien
ttgtagagacaatttttcggcatgt

SEQ ID NO: 874657 - DNA, 25 bp, Homo sapien
gagacaatttttcggcatgttgccc

SEQ ID NO: 874658 - DNA, 25 bp, Homo sapien
caccctatgttccatggattcggaa

SEQ ID NO: 874659 - DNA, 25 bp, Homo sapien
taatgcttgcaaaacgtgtgtgtca

SEQ ID NO: 874660 - DNA, 25 bp, Homo sapien
tctgcatgagtgacaaactttctga

SEQ ID NO: 874661 - DNA, 25 bp, Homo sapien
cactgatcttggcagggacggaact

SEQ ID NO: 874662 - DNA, 25 bp, Homo sapien
gctaaaaagctaaagagggaacatc

SEQ ID NO: 874663 - DNA, 25 bp, Homo sapien
gataatcctggacatgggtgaacat

SEQ ID NO: 874664 - DNA, 25 bp, Homo sapien
cctcaagcagtttaggtgcatgatc

SEQ ID NO: 874665 - DNA, 25 bp, Homo sapien
tacttgggtctcagaattgatgcaa

SEQ ID NO: 874666 - DNA, 25 bp, Homo sapien
cctaataatctcaggccttgatgaa

SEQ ID NO: 874667 - DNA, 25 bp, Homo sapien
gttatattgtaggagactgtcatgg

SEQ ID NO: 874668 - DNA, 25 bp, Homo sapien
cagcagatacctttaaccctaataa

SEQ ID NO: 874669 - DNA, 25 bp, Homo sapien
gttccgtaagataaatatgagctcc

SEQ ID NO: 874670 - DNA, 25 bp, Homo sapien
gaaccaaatgtgttaaagcttacgc

SEQ ID NO: 874671 - DNA, 25 bp, Homo sapien
gaagttgttgagctcaaatgtatcc

SEQ ID NO: 874672 - DNA, 25 bp, Homo sapien
aaatgtatcctacatccagctgtag

SEQ ID NO: 874673 - DNA, 25 bp, Homo sapien
gccattgcgctgaacagtatttgag

SEQ ID NO: 874674 - DNA, 25 bp, Homo sapien
agatggataaaggtgggtacagggc

SEQ ID NO: 874675 - DNA, 25 bp, Homo sapien
gatggataaaggtgggtacagggct

SEQ ID NO: 874676 - DNA, 25 bp, Homo sapien
tctcctgattgctcctccaaatctg

SEQ ID NO: 874677 - DNA, 25 bp, Homo sapien
tgctcctccaaatctgtggccagtg

SEQ ID NO: 874678 - DNA, 25 bp, Homo sapien
agcaagccccgggagctttgtatga

SEQ ID NO: 874679 - DNA, 25 bp, Homo sapien
ccccgggagctttgtatgaagaagc

SEQ ID NO: 874680 - DNA, 25 bp, Homo sapien
cacaggttcaccgtataagcccaag

SEQ ID NO: 874681 - DNA, 25 bp, Homo sapien
gggcttctcaccacaggttcaccgt

SEQ ID NO: 874682 - DNA, 25 bp, Homo sapien
agaacaactaggctgcttggctctg

SEQ ID NO: 874683 - DNA, 25 bp, Homo sapien
caagatcaagaagcaagggctccct

SEQ ID NO: 874684 - DNA, 25 bp, Homo sapien
tttgtgccatggacggaagacagcg

SEQ ID NO: 874685 - DNA, 25 bp, Homo sapien
cagcggaggaaactctcagtgcaga

SEQ ID NO: 874686 - DNA, 25 bp, Homo sapien
gatatatcagcaagaagacacctca

SEQ ID NO: 874687 - DNA, 25 bp, Homo sapien
tcaagtgctgtgtatgtcctaggaa

SEQ ID NO: 874688 - DNA, 25 bp, Homo sapien
aaggtacaccaaaagcccaagccag

SEQ ID NO: 874689 - DNA, 25 bp, Homo sapien
tataaggtacaccaaaagcccaagc

SEQ ID NO: 874690 - DNA, 25 bp, Homo sapien
ctataaggtacaccaaaagcccaag

SEQ ID NO: 874691 - DNA, 25 bp, Homo sapien
taaggtacaccaaaagcccaagcca

SEQ ID NO: 874692 - DNA, 25 bp, Homo sapien
ggtccgggaggtgcgtcctggaaga

SEQ ID NO: 874693 - DNA, 25 bp, Homo sapien
ccgcaggcacgcaggccacttaaaa

SEQ ID NO: 874694 - DNA, 25 bp, Homo sapien
aagaagccctttggccccgcaggca

SEQ ID NO: 874695 - DNA, 25 bp, Homo sapien
tggaagaagccctttggccccgcag

SEQ ID NO: 874696 - DNA, 25 bp, Homo sapien
ggcagcttgactcccccaatcatta

SEQ ID NO: 874697 - DNA, 25 bp, Homo sapien
tgactgcagggtgctgactgccgga

SEQ ID NO: 874698 - DNA, 25 bp, Homo sapien
caggatgaaaccaggactgagtcca

SEQ ID NO: 874699 - DNA, 25 bp, Homo sapien
ccattgctgacgaggtgactgcagg

SEQ ID NO: 874700 - DNA, 25 bp, Homo sapien
gtgatggcatcccagcagacgtgca

SEQ ID NO: 874701 - DNA, 25 bp, Homo sapien
ggctgagggtacagcaaggcctcct

SEQ ID NO: 874702 - DNA, 25 bp, Homo sapien
ctcacaaggtgaggctctggtactg

SEQ ID NO: 874703 - DNA, 25 bp, Homo sapien
cgtcggctctacagaggctctggaa

SEQ ID NO: 874704 - DNA, 25 bp, Homo sapien
tctaacaaaggagaccccctggata

SEQ ID NO: 874705 - DNA, 25 bp, Homo sapien
gtgagctccctaacatgccccattt

SEQ ID NO: 874706 - DNA, 25 bp, Homo sapien
cccctggatagctgatggtaggccc

SEQ ID NO: 874707 - DNA, 25 bp, Homo sapien
ccgggttgaggaatctgctaaatga

SEQ ID NO: 874708 - DNA, 25 bp, Homo sapien
ctccaccagtgtgagaacacgtggc

SEQ ID NO: 874709 - DNA, 25 bp, Homo sapien
gtcacaagaggcttcagaaatacat

SEQ ID NO: 874710 - DNA, 25 bp, Homo sapien
accagtgtgagaacacgtggcccac

SEQ ID NO: 874711 - DNA, 25 bp, Homo sapien
catagtaaggtttgtgccttggaca

SEQ ID NO: 874712 - DNA, 25 bp, Homo sapien
gagggaatcttcctacagccctcct

SEQ ID NO: 874713 - DNA, 25 bp, Homo sapien
cagccctcctccaagggggacagag

SEQ ID NO: 874714 - DNA, 25 bp, Homo sapien
ggcaggaagagggaatcttcctaca

SEQ ID NO: 874715 - DNA, 25 bp, Homo sapien
ttcatccagagctcactggaaggtg

SEQ ID NO: 874716 - DNA, 25 bp, Homo sapien
gatttcaacttggatctcacggtag

SEQ ID NO: 874717 - DNA, 25 bp, Homo sapien
tccacatagagatacacgaaaaccc

SEQ ID NO: 874718 - DNA, 25 bp, Homo sapien
cctctgaggctgtaggacacgtcat

SEQ ID NO: 874719 - DNA, 25 bp, Homo sapien
gacacgtcattcaaacctaccatca

SEQ ID NO: 874720 - DNA, 25 bp, Homo sapien
gagtgccctcccgaagggtacagat

SEQ ID NO: 874721 - DNA, 25 bp, Homo sapien
taattattaaaacagcatactgatc

SEQ ID NO: 874722 - DNA, 25 bp, Homo sapien
catgtgagtgccctcccgaagggta

SEQ ID NO: 874723 - DNA, 25 bp, Homo sapien
gcatactgatcactttatacttctg

SEQ ID NO: 874724 - DNA, 25 bp, Homo sapien
caggtctgaggcagccttagcaggt

SEQ ID NO: 874725 - DNA, 25 bp, Homo sapien
caggcagtcaggtctgaggcagcct

SEQ ID NO: 874726 - DNA, 25 bp, Homo sapien
tcgaggtcagcgaagaggctgaacc

SEQ ID NO: 874727 - DNA, 25 bp, Homo sapien
catcaggatttgagagtgggtcgag

SEQ ID NO: 874728 - DNA, 25 bp, Homo sapien
gagagaagaggaaacatgagcaaac

SEQ ID NO: 874729 - DNA, 25 bp, Homo sapien
gagaagaggaaacatgagcaaacgc

SEQ ID NO: 874730 - DNA, 25 bp, Homo sapien
ggagagaagaggaaacatgagcaaa

SEQ ID NO: 874731 - DNA, 25 bp, Homo sapien
gaagaggaaacatgagcaaacgcac

SEQ ID NO: 874732 - DNA, 25 bp, Homo sapien
tctgccatgcgggatgcaggcaggt

SEQ ID NO: 874733 - DNA, 25 bp, Homo sapien
tgccatgcgggatgcaggcaggtcc

SEQ ID NO: 874734 - DNA, 25 bp, Homo sapien
ctgccatgcgggatgcaggcaggtc

SEQ ID NO: 874735 - DNA, 25 bp, Homo sapien
cctctgccatgcgggatgcaggcag

SEQ ID NO: 874736 - DNA, 25 bp, Homo sapien
aatgcagattgttcaatcagacaaa

SEQ ID NO: 874737 - DNA, 25 bp, Homo sapien
attgttcaatcagacaaatcccttt

SEQ ID NO: 874738 - DNA, 25 bp, Homo sapien
agattgttcaatcagacaaatccct

SEQ ID NO: 874739 - DNA, 25 bp, Homo sapien
actctctctgacaatagttagggaa

SEQ ID NO: 874740 - DNA, 25 bp, Homo sapien
aacatttccaaaccagggcctgaag

SEQ ID NO: 874741 - DNA, 25 bp, Homo sapien
caaaagagtgcctcatgcaagtgat

SEQ ID NO: 874742 - DNA, 25 bp, Homo sapien
gctccgagaataacaagctcttgtg

SEQ ID NO: 874743 - DNA, 25 bp, Homo sapien
tcctgttaaaaggagggccctgaca

SEQ ID NO: 874744 - DNA, 25 bp, Homo sapien
ccatgtgcaattagccctggaatca

SEQ ID NO: 874745 - DNA, 25 bp, Homo sapien
aagatgctacatgcttgtttcccct

SEQ ID NO: 874746 - DNA, 25 bp, Homo sapien
taaagacgactctagtgaaaagatg

SEQ ID NO: 874747 - DNA, 25 bp, Homo sapien
aaaaaggcaatactgatttcgctgg

SEQ ID NO: 874748 - DNA, 25 bp, Homo sapien
tgctttgggacaatcctcacattcc

SEQ ID NO: 874749 - DNA, 25 bp, Homo sapien
gagccagtgattgtgctttgggaca

SEQ ID NO: 874750 - DNA, 25 bp, Homo sapien
tcaagggtcttaggaggtcttctga

SEQ ID NO: 874751 - DNA, 25 bp, Homo sapien
ctgagcgttctcatggccttgccgt

SEQ ID NO: 874752 - DNA, 25 bp, Homo sapien
tgtggccaacaagagaaagtcagtg

SEQ ID NO: 874753 - DNA, 25 bp, Homo sapien
tgatatcttcagtcgagcagaggct

SEQ ID NO: 874754 - DNA, 25 bp, Homo sapien
tttgacaactatgaaacctggccct

SEQ ID NO: 874755 - DNA, 25 bp, Homo sapien
cacttaaaagagcatcatgggaaca

SEQ ID NO: 874756 - DNA, 25 bp, Homo sapien
gcacaatcgtttcatgatcatacca

SEQ ID NO: 874757 - DNA, 25 bp, Homo sapien
gataggagatatgcatcatcgaacc

SEQ ID NO: 874758 - DNA, 25 bp, Homo sapien
gactagtaactgcacatcttctcga

SEQ ID NO: 874759 - DNA, 25 bp, Homo sapien
ccaaagattatcagtggtgctctaa

SEQ ID NO: 874760 - DNA, 25 bp, Homo sapien
gcactcctgttttagggacagcaaa

SEQ ID NO: 874761 - DNA, 25 bp, Homo sapien
ggttaagaggcattcagcactcctg

SEQ ID NO: 874762 - DNA, 25 bp, Homo sapien
tgcctgccccagaatggttaagagg

SEQ ID NO: 874763 - DNA, 25 bp, Homo sapien
tacacgttgtataacccaagcacat

SEQ ID NO: 874764 - DNA, 25 bp, Homo sapien
caatttgctccaaaatacttaacac

SEQ ID NO: 874765 - DNA, 25 bp, Homo sapien
tctcaatgagacaaggaattttttg

SEQ ID NO: 874766 - DNA, 25 bp, Homo sapien
tttgctccaaaatacttaacacagc

SEQ ID NO: 874767 - DNA, 25 bp, Homo sapien
cacagcacaggtagatgtttgctga

SEQ ID NO: 874768 - DNA, 25 bp, Homo sapien
taaaatgtagaccatcagaggatgc

SEQ ID NO: 874769 - DNA, 25 bp, Homo sapien
ctataaaatgtagaccatcagagga

SEQ ID NO: 874770 - DNA, 25 bp, Homo sapien
tgtagaccatcagaggatgcatcac

SEQ ID NO: 874771 - DNA, 25 bp, Homo sapien
aatgtagaccatcagaggatgcatc

SEQ ID NO: 874772 - DNA, 25 bp, Homo sapien
taggcaaatggcacaaacctcacga

SEQ ID NO: 874773 - DNA, 25 bp, Homo sapien
ggtggcctgcgacctatttactcaa

SEQ ID NO: 874774 - DNA, 25 bp, Homo sapien
tctgggaccgtggaaatgttctaac

SEQ ID NO: 874775 - DNA, 25 bp, Homo sapien
taacttaatgaaacaggtggcctgc

SEQ ID NO: 874776 - DNA, 25 bp, Homo sapien
gacatgaacgcattcctaagaggag

SEQ ID NO: 874777 - DNA, 25 bp, Homo sapien
agccaggtgaggagtagaaacccct

SEQ ID NO: 874778 - DNA, 25 bp, Homo sapien
tatgctcttcgatcctatggtcctc

SEQ ID NO: 874779 - DNA, 25 bp, Homo sapien
ctctgacagagttcctggagggcca

SEQ ID NO: 874780 - DNA, 25 bp, Homo sapien
ggtcctaatagaagaatagaaggca

SEQ ID NO: 874781 - DNA, 25 bp, Homo sapien
ggtagattttctaggccatgaatgc

SEQ ID NO: 874782 - DNA, 25 bp, Homo sapien
tagcacgtgccacactgagtgctgg

SEQ ID NO: 874783 - DNA, 25 bp, Homo sapien
cgcgcccagccgtgtataggtagat

SEQ ID NO: 874784 - DNA, 25 bp, Homo sapien
gctgaagtgcaattccccatggccg

SEQ ID NO: 874785 - DNA, 25 bp, Homo sapien
aaatggcctccctttgcagttcctg

SEQ ID NO: 874786 - DNA, 25 bp, Homo sapien
tcacagctctcaggcatagtctggc

SEQ ID NO: 874787 - DNA, 25 bp, Homo sapien
actgtgggcactgagatgaacttct

SEQ ID NO: 874788 - DNA, 25 bp, Homo sapien
tgctcaggaagtgggcgaggagctc

SEQ ID NO: 874789 - DNA, 25 bp, Homo sapien
gacttcttggctgtctgctgatgtg

SEQ ID NO: 874790 - DNA, 25 bp, Homo sapien
agtgggcgaggagctctgacttctt

SEQ ID NO: 874791 - DNA, 25 bp, Homo sapien
tgacttcttggctgtctgctgatgt

SEQ ID NO: 874792 - DNA, 25 bp, Homo sapien
gacctgaggttttaatagcccataa

SEQ ID NO: 874793 - DNA, 25 bp, Homo sapien
aaacatgctgtttattagggagaca

SEQ ID NO: 874794 - DNA, 25 bp, Homo sapien
caactcttgtgtccatgatctcatc

SEQ ID NO: 874795 - DNA, 25 bp, Homo sapien
tccagctttaccgttttgttctcag

SEQ ID NO: 874796 - DNA, 25 bp, Homo sapien
agcggcccactctttgctgaactcg

SEQ ID NO: 874797 - DNA, 25 bp, Homo sapien
ttcacttggccgtctccaaacacag

SEQ ID NO: 874798 - DNA, 25 bp, Homo sapien
catattttggtctaaaagctgcgaa

SEQ ID NO: 874799 - DNA, 25 bp, Homo sapien
aaagctgcgaaggaaggaaacctga

SEQ ID NO: 874800 - DNA, 25 bp, Homo sapien
tcaggttccggggtccctgccactg

SEQ ID NO: 874801 - DNA, 25 bp, Homo sapien
agcagcaggtcatctttgtcagcac

SEQ ID NO: 874802 - DNA, 25 bp, Homo sapien
tccggggtccctgccactggtccca

SEQ ID NO: 874803 - DNA, 25 bp, Homo sapien
tcatctttgtcagcaccttcaggtt

SEQ ID NO: 874804 - DNA, 25 bp, Homo sapien
cctcctcctattctggctgccctta

SEQ ID NO: 874805 - DNA, 25 bp, Homo sapien
gcctcctcctattctggctgccctt

SEQ ID NO: 874806 - DNA, 25 bp, Homo sapien
tgcctcctcctattctggctgccct

SEQ ID NO: 874807 - DNA, 25 bp, Homo sapien
ctggaactccatttgcaaattcctg

SEQ ID NO: 874808 - DNA, 25 bp, Homo sapien
tctggaactccatttgcaaattcct

SEQ ID NO: 874809 - DNA, 25 bp, Homo sapien
tgggagcccttctgggtttgcccat

SEQ ID NO: 874810 - DNA, 25 bp, Homo sapien
aaggtcagatggctccactggcagc

SEQ ID NO: 874811 - DNA, 25 bp, Homo sapien
gggaccccaactcacagtcaaggtg

SEQ ID NO: 874812 - DNA, 25 bp, Homo sapien
gcatgtttgccctgtactgcccaag

SEQ ID NO: 874813 - DNA, 25 bp, Homo sapien
gagaactgatcctgaaccaatgagc

SEQ ID NO: 874814 - DNA, 25 bp, Homo sapien
gggcctgcaggataacttcggccag

SEQ ID NO: 874815 - DNA, 25 bp, Homo sapien
agactgaactgagttgtctgccctg

SEQ ID NO: 874816 - DNA, 25 bp, Homo sapien
ggccagtctgtagtcctgtgagaaa

SEQ ID NO: 874817 - DNA, 25 bp, Homo sapien
caagcccagactgaactgagttgtc

SEQ ID NO: 874818 - DNA, 25 bp, Homo sapien
taaccctgtgttagaggccatcaag

SEQ ID NO: 874819 - DNA, 25 bp, Homo sapien
tgagaataacccaggcttagagagt

SEQ ID NO: 874820 - DNA, 25 bp, Homo sapien
tcaggtgtgcgacttaactaagcaa

SEQ ID NO: 874821 - DNA, 25 bp, Homo sapien
tgacaataacccaccaaggccgttg

SEQ ID NO: 874822 - DNA, 25 bp, Homo sapien
catgtctaatagttcatctatgggt

SEQ ID NO: 874823 - DNA, 25 bp, Homo sapien
cctcagatttcatgtctaatagttc

SEQ ID NO: 874824 - DNA, 25 bp, Homo sapien
cagatttcatgtctaatagttcatc

SEQ ID NO: 874825 - DNA, 25 bp, Homo sapien
gatttcatgtctaatagttcatcta

SEQ ID NO: 874826 - DNA, 25 bp, Homo sapien
catgcagtatgtgtagagcctttgt

SEQ ID NO: 874827 - DNA, 25 bp, Homo sapien
ctgagcatgcagtatgtgtagagcc

SEQ ID NO: 874828 - DNA, 25 bp, Homo sapien
cagtatgtgtagagcctttgtctaa

SEQ ID NO: 874829 - DNA, 25 bp, Homo sapien
tgtagagcctttgtctaaggcagat

SEQ ID NO: 874830 - DNA, 25 bp, Homo sapien
aactagaggattccttgcgctggtt

SEQ ID NO: 874831 - DNA, 25 bp, Homo sapien
cttaaaactagaggattccttgcgc

SEQ ID NO: 874832 - DNA, 25 bp, Homo sapien
gattccttgcgctggttttcttcct

SEQ ID NO: 874833 - DNA, 25 bp, Homo sapien
tagaggattccttgcgctggttttc

SEQ ID NO: 874834 - DNA, 25 bp, Homo sapien
tgttttcctaggtcggccagttcaa

SEQ ID NO: 874835 - DNA, 25 bp, Homo sapien
taaaaaggctaatattggcagcaac

SEQ ID NO: 874836 - DNA, 25 bp, Homo sapien
gctagcactattaccatcaccagga

SEQ ID NO: 874837 - DNA, 25 bp, Homo sapien
tagagaatagaaacgaggccatcca

SEQ ID NO: 874838 - DNA, 25 bp, Homo sapien
gtactttcctgctggttgattttct

SEQ ID NO: 874839 - DNA, 25 bp, Homo sapien
attttttcatagggtcttgtaagct

SEQ ID NO: 874840 - DNA, 25 bp, Homo sapien
gcacggctgcatctgtactttcctg

SEQ ID NO: 874841 - DNA, 25 bp, Homo sapien
tggctcggctcctgcacggctgcat

SEQ ID NO: 874842 - DNA, 25 bp, Homo sapien
aaaagacgttatataccttaagcag

SEQ ID NO: 874843 - DNA, 25 bp, Homo sapien
gaaacataatagaaccacatgcagc

SEQ ID NO: 874844 - DNA, 25 bp, Homo sapien
caaagtccagatcaattaccagcat

SEQ ID NO: 874845 - DNA, 25 bp, Homo sapien
tatcctgtattatgttttgtctccg

SEQ ID NO: 874846 - DNA, 25 bp, Homo sapien
tctgtaagcccagaccaaggtctgc

SEQ ID NO: 874847 - DNA, 25 bp, Homo sapien
gacaggtttgggaatcgagctgcca

SEQ ID NO: 874848 - DNA, 25 bp, Homo sapien
tatccctggtgggaattctgtaagc

SEQ ID NO: 874849 - DNA, 25 bp, Homo sapien
caggtttgggaatcgagctgccaga

SEQ ID NO: 874850 - DNA, 25 bp, Homo sapien
ttgggttaccctggggtgagatctg

SEQ ID NO: 874851 - DNA, 25 bp, Homo sapien
accctggggtgagatctggccagac

SEQ ID NO: 874852 - DNA, 25 bp, Homo sapien
taccctggggtgagatctggccaga

SEQ ID NO: 874853 - DNA, 25 bp, Homo sapien
ggttaccctggggtgagatctggcc

SEQ ID NO: 874854 - DNA, 25 bp, Homo sapien
tgtgaaactcacataaaactgacaa

SEQ ID NO: 874855 - DNA, 25 bp, Homo sapien
gtgaaactcacataaaactgacaat

SEQ ID NO: 874856 - DNA, 25 bp, Homo sapien
ctgtgaaactcacataaaactgaca

SEQ ID NO: 874857 - DNA, 25 bp, Homo sapien
ggaacatgtatctcaaggttcaagg

SEQ ID NO: 874858 - DNA, 25 bp, Homo sapien
gacttgtacaatctcccctttagca

SEQ ID NO: 874859 - DNA, 25 bp, Homo sapien
ggaccaatcattagactcaagttca

SEQ ID NO: 874860 - DNA, 25 bp, Homo sapien
aggacaccttctcaagtgaggatat

SEQ ID NO: 874861 - DNA, 25 bp, Homo sapien
tattgaatcctgatgcagtaaaaaa

SEQ ID NO: 874862 - DNA, 25 bp, Homo sapien
tcaattcgcgcttttggattgcagt

SEQ ID NO: 874863 - DNA, 25 bp, Homo sapien
tggattgcagtagattctcattgta

SEQ ID NO: 874864 - DNA, 25 bp, Homo sapien
ctcattgtattgaatcctgatgcag

SEQ ID NO: 874865 - DNA, 25 bp, Homo sapien
caatggactttgcttgtgatataaa

SEQ ID NO: 874866 - DNA, 25 bp, Homo sapien
gctttctgcaatggactttgcttgt

SEQ ID NO: 874867 - DNA, 25 bp, Homo sapien
tctgcaatggactttgcttgtgata

SEQ ID NO: 874868 - DNA, 25 bp, Homo sapien
ctttgcttgtgatataaacaaaact

SEQ ID NO: 874869 - DNA, 25 bp, Homo sapien
caagattttctagtggcccctctag

SEQ ID NO: 874870 - DNA, 25 bp, Homo sapien
tcaagattttctagtggcccctcta

SEQ ID NO: 874871 - DNA, 25 bp, Homo sapien
ttttctcaagattttctagtggccc

SEQ ID NO: 874872 - DNA, 25 bp, Homo sapien
tctcaagattttctagtggcccctc

SEQ ID NO: 874873 - DNA, 25 bp, Homo sapien
gtaaattcatatggttgataacctt

SEQ ID NO: 874874 - DNA, 25 bp, Homo sapien
taaattcatatggttgataaccttt

SEQ ID NO: 874875 - DNA, 25 bp, Homo sapien
gtagtaaattcatatggttgataac

SEQ ID NO: 874876 - DNA, 25 bp, Homo sapien
tagtaaattcatatggttgataacc

SEQ ID NO: 874877 - DNA, 25 bp, Homo sapien
gagatggacagacacaacgctaagt

SEQ ID NO: 874878 - DNA, 25 bp, Homo sapien
tgatgcagtgttatccggaaggaac

SEQ ID NO: 874879 - DNA, 25 bp, Homo sapien
tgagaaagatatgccacgagatgga

SEQ ID NO: 874880 - DNA, 25 bp, Homo sapien
gaggcttactgaaaaaggcgtgaca

SEQ ID NO: 874881 - DNA, 25 bp, Homo sapien
aaacgtagggccctagaaggcagag

SEQ ID NO: 874882 - DNA, 25 bp, Homo sapien
gtgaaattacggaaaggcattcaga

SEQ ID NO: 874883 - DNA, 25 bp, Homo sapien
tgggaagtgaaattacggaaaggca

SEQ ID NO: 874884 - DNA, 25 bp, Homo sapien
acgtagggccctagaaggcagagat

SEQ ID NO: 874885 - DNA, 25 bp, Homo sapien
ttgatgttatttaaaccttgtgcca

SEQ ID NO: 874886 - DNA, 25 bp, Homo sapien
tgatgttatttaaaccttgtgccat

SEQ ID NO: 874887 - DNA, 25 bp, Homo sapien
ccttggttcattgcaacaaacatta

SEQ ID NO: 874888 - DNA, 25 bp, Homo sapien
tcattgcaacaaacattattttgtt

SEQ ID NO: 874889 - DNA, 25 bp, Homo sapien
cttggttcattgcaacaaacattat

SEQ ID NO: 874890 - DNA, 25 bp, Homo sapien
ggttcattgcaacaaacattatttt

SEQ ID NO: 874891 - DNA, 25 bp, Homo sapien
gcatgtgagacaagagattgcatct

SEQ ID NO: 874892 - DNA, 25 bp, Homo sapien
gacaagagattgcatctgctcgctc

SEQ ID NO: 874893 - DNA, 25 bp, Homo sapien
ctggtatgttgctagcatgtgagac

SEQ ID NO: 874894 - DNA, 25 bp, Homo sapien
gctcgctccaagaagatccactttt

SEQ ID NO: 874895 - DNA, 25 bp, Homo sapien
ttttttttgcaaggcgcacttgtgt

SEQ ID NO: 874896 - DNA, 25 bp, Homo sapien
tttttgcaaggcgcacttgtgtttg

SEQ ID NO: 874897 - DNA, 25 bp, Homo sapien
ttgcaaggcgcacttgtgtttgtac

SEQ ID NO: 874898 - DNA, 25 bp, Homo sapien
tttgcaaggcgcacttgtgtttgta

SEQ ID NO: 874899 - DNA, 25 bp, Homo sapien
tgaagtcaaggtagctgacagtctt

SEQ ID NO: 874900 - DNA, 25 bp, Homo sapien
catttgcccctgctcttaattactg

SEQ ID NO: 874901 - DNA, 25 bp, Homo sapien
cagttgtagacaacattgggattgt

SEQ ID NO: 874902 - DNA, 25 bp, Homo sapien
tctggtaatagtccttgtgctgaag

SEQ ID NO: 874903 - DNA, 25 bp, Homo sapien
ttccatgttgttcccattggtgtca

SEQ ID NO: 874904 - DNA, 25 bp, Homo sapien
tgtaagttcccagtgttcatcccct

SEQ ID NO: 874905 - DNA, 25 bp, Homo sapien
tttgtaagttcccagtgttcatccc

SEQ ID NO: 874906 - DNA, 25 bp, Homo sapien
cccattggtgtcacgttgtttctcc

SEQ ID NO: 874907 - DNA, 25 bp, Homo sapien
tgtgtgccaagaaggaagcttgtcc

SEQ ID NO: 874908 - DNA, 25 bp, Homo sapien
gtaacgcttggtgtcagtgatggct

SEQ ID NO: 874909 - DNA, 25 bp, Homo sapien
gcgttttagcatgatgaccaggtgc

SEQ ID NO: 874910 - DNA, 25 bp, Homo sapien
tcataggcctgacagcatttcagcg

SEQ ID NO: 874911 - DNA, 25 bp, Homo sapien
agtctatgatccagccctagttaat

SEQ ID NO: 874912 - DNA, 25 bp, Homo sapien
tccctctctgcagtttgtccttatc

SEQ ID NO: 874913 - DNA, 25 bp, Homo sapien
gcagtttgcatcctgttaagaactc

SEQ ID NO: 874914 - DNA, 25 bp, Homo sapien
tttcttttatggtggtgcagtttgc

SEQ ID NO: 874915 - DNA, 25 bp, Homo sapien
tcttcaggctcaacttaaatcgtag

SEQ ID NO: 874916 - DNA, 25 bp, Homo sapien
ggacaaagttagtcatccctgctac

SEQ ID NO: 874917 - DNA, 25 bp, Homo sapien
tctctgagaagcctatctggaccca

SEQ ID NO: 874918 - DNA, 25 bp, Homo sapien
tctgagcatacgttattactggagc

SEQ ID NO: 874919 - DNA, 25 bp, Homo sapien
gccacagtagagtggtttttcagga

SEQ ID NO: 874920 - DNA, 25 bp, Homo sapien
agtggccacagtagagtggtttttc

SEQ ID NO: 874921 - DNA, 25 bp, Homo sapien
cacagtagagtggtttttcaggaag

SEQ ID NO: 874922 - DNA, 25 bp, Homo sapien
gaagtggccacagtagagtggtttt

SEQ ID NO: 874923 - DNA, 25 bp, Homo sapien
taatgtccgatatcaaggcacagag

SEQ ID NO: 874924 - DNA, 25 bp, Homo sapien
gattccaacctgaaccactctgtta

SEQ ID NO: 874925 - DNA, 25 bp, Homo sapien
ggcacagagtcaagattccaacctg

SEQ ID NO: 874926 - DNA, 25 bp, Homo sapien
ctttgaatcacttcgattgttacta

SEQ ID NO: 874927 - DNA, 25 bp, Homo sapien
gagaaccttttttggccatggctcc

SEQ ID NO: 874928 - DNA, 25 bp, Homo sapien
tcaagactatggtttggtgggagca

SEQ ID NO: 874929 - DNA, 25 bp, Homo sapien
gaatcaagactatggtttggtggga

SEQ ID NO: 874930 - DNA, 25 bp, Homo sapien
caagactatggtttggtgggagcat

SEQ ID NO: 874931 - DNA, 25 bp, Homo sapien
atcaagactatggtttggtgggagc

SEQ ID NO: 874932 - DNA, 25 bp, Homo sapien
gccaggggaccatgccaaactgtta

SEQ ID NO: 874933 - DNA, 25 bp, Homo sapien
ttcccagtgaaccagatttgatacc

SEQ ID NO: 874934 - DNA, 25 bp, Homo sapien
ttctatctttcagtgacgcaaagag

SEQ ID NO: 874935 - DNA, 25 bp, Homo sapien
tgttaggatggtagatgcagaagct

SEQ ID NO: 874936 - DNA, 25 bp, Homo sapien
acctttcatatttacccagaggaga

SEQ ID NO: 874937 - DNA, 25 bp, Homo sapien
cctttcatatttacccagaggagac

SEQ ID NO: 874938 - DNA, 25 bp, Homo sapien
ctttcatatttacccagaggagaca

SEQ ID NO: 874939 - DNA, 25 bp, Homo sapien
tttcatatttacccagaggagacat

SEQ ID NO: 874940 - DNA, 25 bp, Homo sapien
tattccatagttacaggtcagcaga

SEQ ID NO: 874941 - DNA, 25 bp, Homo sapien
ggaaccatcgtctgactccaataag

SEQ ID NO: 874942 - DNA, 25 bp, Homo sapien
tgatagctgtccatcgttcctgccc

SEQ ID NO: 874943 - DNA, 25 bp, Homo sapien
gttcctgccctccactttatacgag

SEQ ID NO: 874944 - DNA, 25 bp, Homo sapien
taataatgtgtcaaccttggctcat

SEQ ID NO: 874945 - DNA, 25 bp, Homo sapien
aaagatcagtgcttgccaggcgctc

SEQ ID NO: 874946 - DNA, 25 bp, Homo sapien
catatgctactagaatggtgggtac

SEQ ID NO: 874947 - DNA, 25 bp, Homo sapien
cacagatgactgctcgggcaatgaa

SEQ ID NO: 874948 - DNA, 25 bp, Homo sapien
tctgacagcccaaaattgggttctc

SEQ ID NO: 874949 - DNA, 25 bp, Homo sapien
cttctgacagcccaaaattgggttc

SEQ ID NO: 874950 - DNA, 25 bp, Homo sapien
tgacagcccaaaattgggttctcaa

SEQ ID NO: 874951 - DNA, 25 bp, Homo sapien
ttctgacagcccaaaattgggttct

SEQ ID NO: 874952 - DNA, 25 bp, Homo sapien
taaagacacatggagcccaactttg

SEQ ID NO: 874953 - DNA, 25 bp, Homo sapien
ttttaaagacacatggagcccaact

SEQ ID NO: 874954 - DNA, 25 bp, Homo sapien
ccttttaaagacacatggagcccaa

SEQ ID NO: 874955 - DNA, 25 bp, Homo sapien
ggagcccaactttgtctcagggagg

SEQ ID NO: 874956 - DNA, 25 bp, Homo sapien
acagggagtggcctcaaggacacca

SEQ ID NO: 874957 - DNA, 25 bp, Homo sapien
agataagcaagaaaccgggggacag

SEQ ID NO: 874958 - DNA, 25 bp, Homo sapien
gcagcaagataagcaagaaaccggg

SEQ ID NO: 874959 - DNA, 25 bp, Homo sapien
gatgctgcagcaagataagcaagaa

SEQ ID NO: 874960 - DNA, 25 bp, Homo sapien
ccctttccggataagcataactgct

SEQ ID NO: 874961 - DNA, 25 bp, Homo sapien
ttccctttccggataagcataactg

SEQ ID NO: 874962 - DNA, 25 bp, Homo sapien
tccctttccggataagcataactgc

SEQ ID NO: 874963 - DNA, 25 bp, Homo sapien
ctagaacagtggaggcttttaaaag

SEQ ID NO: 874964 - DNA, 25 bp, Homo sapien
aggcttttaaaagaaacactctcat

SEQ ID NO: 874965 - DNA, 25 bp, Homo sapien
gaggcttttaaaagaaacactctca

SEQ ID NO: 874966 - DNA, 25 bp, Homo sapien
tagaacagtggaggcttttaaaaga

SEQ ID NO: 874967 - DNA, 25 bp, Homo sapien
ttctgagtttcactgagagacaggg

SEQ ID NO: 874968 - DNA, 25 bp, Homo sapien
tgactccattatagggccaatactg

SEQ ID NO: 874969 - DNA, 25 bp, Homo sapien
tatagatagacttaggacctgggac

SEQ ID NO: 874970 - DNA, 25 bp, Homo sapien
gacagggaacctatgaaatcatgac

SEQ ID NO: 874971 - DNA, 25 bp, Homo sapien
gaacttgatggttccactcagtaaa

SEQ ID NO: 874972 - DNA, 25 bp, Homo sapien
ttccactcagtaaaacctgttatgt

SEQ ID NO: 874973 - DNA, 25 bp, Homo sapien
ttttgactgttgtcatccatgaaat

SEQ ID NO: 874974 - DNA, 25 bp, Homo sapien
caatttacggcagtattttgacctg

SEQ ID NO: 874975 - DNA, 25 bp, Homo sapien
gtagtttgtccagcattatgccctg

SEQ ID NO: 874976 - DNA, 25 bp, Homo sapien
gatcttctggtttgtagatcaggtc

SEQ ID NO: 874977 - DNA, 25 bp, Homo sapien
gcaagggaggcttagcgtggttaat

SEQ ID NO: 874978 - DNA, 25 bp, Homo sapien
taccatgggccctggatttcatttg

SEQ ID NO: 874979 - DNA, 25 bp, Homo sapien
tcctgactctgaggtcacgctcctt

SEQ ID NO: 874980 - DNA, 25 bp, Homo sapien
ggcctatcggacctatccaagtggt

SEQ ID NO: 874981 - DNA, 25 bp, Homo sapien
actgcaataggcctatcggacctat

SEQ ID NO: 874982 - DNA, 25 bp, Homo sapien
gggacggagtgtagcaccatcctga

SEQ ID NO: 874983 - DNA, 25 bp, Homo sapien
agaagtcagatgttgctgacacatg

SEQ ID NO: 874984 - DNA, 25 bp, Homo sapien
tcacacctcattaccttccagcagg

SEQ ID NO: 874985 - DNA, 25 bp, Homo sapien
gcaggtaccccttctgctaaccctc

SEQ ID NO: 874986 - DNA, 25 bp, Homo sapien
gtaccccttctgctaaccctcataa

SEQ ID NO: 874987 - DNA, 25 bp, Homo sapien
tgctaaccctcataaaacctcctac

SEQ ID NO: 874988 - DNA, 25 bp, Homo sapien
ccaagtatctgagatggcccgatgc

SEQ ID NO: 874989 - DNA, 25 bp, Homo sapien
tctggatcaagctcctgagacacgt

SEQ ID NO: 874990 - DNA, 25 bp, Homo sapien
gacacaaaggatttcgtaaggccaa

SEQ ID NO: 874991 - DNA, 25 bp, Homo sapien
tgcggttcaccgtcagccaagtatc

SEQ ID NO: 874992 - DNA, 25 bp, Homo sapien
gattagcatctctccgactaggcca

SEQ ID NO: 874993 - DNA, 25 bp, Homo sapien
tgctactaactggaccactggcaag

SEQ ID NO: 874994 - DNA, 25 bp, Homo sapien
tcccgtgttcatggaggatggccaa

SEQ ID NO: 874995 - DNA, 25 bp, Homo sapien
tagtcagccagagaagattatccat

SEQ ID NO: 874996 - DNA, 25 bp, Homo sapien
ttcccagttcgttttcttcttgaga

SEQ ID NO: 874997 - DNA, 25 bp, Homo sapien
cttgggatcgaagaaattttcccag

SEQ ID NO: 874998 - DNA, 25 bp, Homo sapien
agcagagggcctttcctgtcgcttg

SEQ ID NO: 874999 - DNA, 25 bp, Homo sapien
ttcctgtcgcttgcatcatctttcc

SEQ ID NO: 875000 - DNA, 25 bp, Homo sapien
gaaacgtaagcccatagtgtgcggc

SEQ ID NO: 875001 - DNA, 25 bp, Homo sapien
tactgaaacgtaagcccatagtgtg

SEQ ID NO: 875002 - DNA, 25 bp, Homo sapien
ctctgtactgaaacgtaagcccata

SEQ ID NO: 875003 - DNA, 25 bp, Homo sapien
taagcccatagtgtgcggcttcgag

SEQ ID NO: 875004 - DNA, 25 bp, Homo sapien
gccaagccacaggcaccagagtgac

SEQ ID NO: 875005 - DNA, 25 bp, Homo sapien
agccaagccacaggcaccagagtga

SEQ ID NO: 875006 - DNA, 25 bp, Homo sapien
tagcttcctcggatgtgctttcccc

SEQ ID NO: 875007 - DNA, 25 bp, Homo sapien
acttagcttcctcggatgtgctttc

SEQ ID NO: 875008 - DNA, 25 bp, Homo sapien
tatgggaaggtatctcatagctccc

SEQ ID NO: 875009 - DNA, 25 bp, Homo sapien
tgcacaatgagcaggcttgctctct

SEQ ID NO: 875010 - DNA, 25 bp, Homo sapien
tttatgaatcagagctatgggaagg

SEQ ID NO: 875011 - DNA, 25 bp, Homo sapien
ccacatctggctgggtttaagtatt

SEQ ID NO: 875012 - DNA, 25 bp, Homo sapien
gcacaacggctcattataggtcact

SEQ ID NO: 875013 - DNA, 25 bp, Homo sapien
tgggactgcacatgcacggtacccg

SEQ ID NO: 875014 - DNA, 25 bp, Homo sapien
gctggagcacaacggctcattatag

SEQ ID NO: 875015 - DNA, 25 bp, Homo sapien
tataggtcactgtgatcctcctgcc

SEQ ID NO: 875016 - DNA, 25 bp, Homo sapien
tatttgatcaatattcatactgatg

SEQ ID NO: 875017 - DNA, 25 bp, Homo sapien
tgctttcgataagtccagacaggtt

SEQ ID NO: 875018 - DNA, 25 bp, Homo sapien
tcctcttttgatagagtacaattgc

SEQ ID NO: 875019 - DNA, 25 bp, Homo sapien
cagacaggttctctgaattgaatga

SEQ ID NO: 875020 - DNA, 25 bp, Homo sapien
gacaggttctctgaattgaatgaaa

SEQ ID NO: 875021 - DNA, 25 bp, Homo sapien
taataaaggcctgcttcgtctccca

SEQ ID NO: 875022 - DNA, 25 bp, Homo sapien
gcttcgtctcccaatatttctgttg

SEQ ID NO: 875023 - DNA, 25 bp, Homo sapien
aggtccgcgtcagaggcaacaacat

SEQ ID NO: 875024 - DNA, 25 bp, Homo sapien
ttggcatccaggtccgcgtcagagg

SEQ ID NO: 875025 - DNA, 25 bp, Homo sapien
ctgacttatcttgagcatatcgatc

SEQ ID NO: 875026 - DNA, 25 bp, Homo sapien
ttacaactgacttatcttgagcata

SEQ ID NO: 875027 - DNA, 25 bp, Homo sapien
acaactgacttatcttgagcatatc

SEQ ID NO: 875028 - DNA, 25 bp, Homo sapien
aactgacttatcttgagcatatcga

SEQ ID NO: 875029 - DNA, 25 bp, Homo sapien
catgagaggataagttatattataa

SEQ ID NO: 875030 - DNA, 25 bp, Homo sapien
gcatgagaggataagttatattata

SEQ ID NO: 875031 - DNA, 25 bp, Homo sapien
atgagaggataagttatattataac

SEQ ID NO: 875032 - DNA, 25 bp, Homo sapien
aaagctcactactcaaaggaatggt

SEQ ID NO: 875033 - DNA, 25 bp, Homo sapien
gaaagctcactactcaaaggaatgg

SEQ ID NO: 875034 - DNA, 25 bp, Homo sapien
tagttaacaaaaattgctgagcaaa

SEQ ID NO: 875035 - DNA, 25 bp, Homo sapien
ccttctacctagatttccaggctat

SEQ ID NO: 875036 - DNA, 25 bp, Homo sapien
taatttgcaggagttattgcaggag

SEQ ID NO: 875037 - DNA, 25 bp, Homo sapien
cagatcatgataccatacggcagtg

SEQ ID NO: 875038 - DNA, 25 bp, Homo sapien
acgtgacgcatttacaagcttcaac

SEQ ID NO: 875039 - DNA, 25 bp, Homo sapien
gacgcatttacaagcttcaacagct

SEQ ID NO: 875040 - DNA, 25 bp, Homo sapien
aaaagtaactagcaaagcctccaag

SEQ ID NO: 875041 - DNA, 25 bp, Homo sapien
taaaaagtaactagcaaagcctcca

SEQ ID NO: 875042 - DNA, 25 bp, Homo sapien
caacttgatcgcatgaatgtttgtg

SEQ ID NO: 875043 - DNA, 25 bp, Homo sapien
ccaagatattgtcacagtcagcaca

SEQ ID NO: 875044 - DNA, 25 bp, Homo sapien
gatgctgatggactgtgagcgccaa

SEQ ID NO: 875045 - DNA, 25 bp, Homo sapien
cttgggagataagcaaagaagggca

SEQ ID NO: 875046 - DNA, 25 bp, Homo sapien
gaggcccaaggatgaatagatcaat

SEQ ID NO: 875047 - DNA, 25 bp, Homo sapien
agttgcaccaataattaagatctgc

SEQ ID NO: 875048 - DNA, 25 bp, Homo sapien
ctcaaagaagacaaagcagttgcac

SEQ ID NO: 875049 - DNA, 25 bp, Homo sapien
gcagaggcccaaggatgaatagatc

SEQ ID NO: 875050 - DNA, 25 bp, Homo sapien
ccagttaacaatttggtgctctcct

SEQ ID NO: 875051 - DNA, 25 bp, Homo sapien
cagttaacaatttggtgctctcctc

SEQ ID NO: 875052 - DNA, 25 bp, Homo sapien
gccagttaacaatttggtgctctcc

SEQ ID NO: 875053 - DNA, 25 bp, Homo sapien
cagccagttaacaatttggtgctct

SEQ ID NO: 875054 - DNA, 25 bp, Homo sapien
cacttctttggagctatccagaatc

SEQ ID NO: 875055 - DNA, 25 bp, Homo sapien
tgggcaccttctgtcacagtttcca

SEQ ID NO: 875056 - DNA, 25 bp, Homo sapien
actctggggaaccatggccttggca

SEQ ID NO: 875057 - DNA, 25 bp, Homo sapien
cagaatcatgaccacaacctgctgt

SEQ ID NO: 875058 - DNA, 25 bp, Homo sapien
tgtttcaggctcaactcaagggcaa

SEQ ID NO: 875059 - DNA, 25 bp, Homo sapien
ggaactgccacttctcagacactgg

SEQ ID NO: 875060 - DNA, 25 bp, Homo sapien
ttagcaagagagacagatgattccc

SEQ ID NO: 875061 - DNA, 25 bp, Homo sapien
tctagctcactaggtttacactggg

SEQ ID NO: 875062 - DNA, 25 bp, Homo sapien
ggtctctccacaaatagcccgctgt

SEQ ID NO: 875063 - DNA, 25 bp, Homo sapien
tcagatagttactcaggtgttccaa

SEQ ID NO: 875064 - DNA, 25 bp, Homo sapien
tatgcactgcggtaaagatgcgtag

SEQ ID NO: 875065 - DNA, 25 bp, Homo sapien
ttagcactcaatgatccacgggtgg

SEQ ID NO: 875066 - DNA, 25 bp, Homo sapien
ttcactccctaaccacagaacagtt

SEQ ID NO: 875067 - DNA, 25 bp, Homo sapien
gatctcagattcaaaccagagggcc

SEQ ID NO: 875068 - DNA, 25 bp, Homo sapien
ggtatgaaattgcatcgggagccta

SEQ ID NO: 875069 - DNA, 25 bp, Homo sapien
ggtattctctacaaagggtgtttca

SEQ ID NO: 875070 - DNA, 25 bp, Homo sapien
ttgtcaacaagtcaaccctggacgc

SEQ ID NO: 875071 - DNA, 25 bp, Homo sapien
ggccggagcgcggaacgcttcccta

SEQ ID NO: 875072 - DNA, 25 bp, Homo sapien
catgggtgccggtgctcccagcgct

SEQ ID NO: 875073 - DNA, 25 bp, Homo sapien
ccgcggcaggtgaacttgtcaacaa

SEQ ID NO: 875074 - DNA, 25 bp, Homo sapien
caggcgtccccgaccgtcccggctg

SEQ ID NO: 875075 - DNA, 25 bp, Homo sapien
gcgtccctccggatcactcatccga

SEQ ID NO: 875076 - DNA, 25 bp, Homo sapien
tcatccgacgtcagcgtcagccgaa

SEQ ID NO: 875077 - DNA, 25 bp, Homo sapien
cgacgtcagcgtcagccgaaggcga

SEQ ID NO: 875078 - DNA, 25 bp, Homo sapien
cggatcactcatccgacgtcagcgt

SEQ ID NO: 875079 - DNA, 25 bp, Homo sapien
gccggagcgacccctcccagggtga

SEQ ID NO: 875080 - DNA, 25 bp, Homo sapien
ccttccccgcttctaccctccagca

SEQ ID NO: 875081 - DNA, 25 bp, Homo sapien
cgcccggctacctaccgccgcctgg

SEQ ID NO: 875082 - DNA, 25 bp, Homo sapien
ccgcttctaccctccagcagacgcc

SEQ ID NO: 875083 - DNA, 25 bp, Homo sapien
tctctctctctactccccggggtct

SEQ ID NO: 875084 - DNA, 25 bp, Homo sapien
gggtctctcctcgacccccatctcc

SEQ ID NO: 875085 - DNA, 25 bp, Homo sapien
tctctctctactccccggggtctct

SEQ ID NO: 875086 - DNA, 25 bp, Homo sapien
ctcctggggtatcccccgctcggat

SEQ ID NO: 875087 - DNA, 25 bp, Homo sapien
ggagacttcatgacttcactgccaa

SEQ ID NO: 875088 - DNA, 25 bp, Homo sapien
tttgcgtcacaatgacctggcggac

SEQ ID NO: 875089 - DNA, 25 bp, Homo sapien
ccacgtggccatagcgtttgcgtca

SEQ ID NO: 875090 - DNA, 25 bp, Homo sapien
tagtgcctactgcttgcttccaggt

SEQ ID NO: 875091 - DNA, 25 bp, Homo sapien
gagctgatataggagacctgcagca

SEQ ID NO: 875092 - DNA, 25 bp, Homo sapien
cctgcagcaagacactggaatttga

SEQ ID NO: 875093 - DNA, 25 bp, Homo sapien
ccttggtgacatccttgagctgata

SEQ ID NO: 875094 - DNA, 25 bp, Homo sapien
ggagtctcatcacctctttggcggc

SEQ ID NO: 875095 - DNA, 25 bp, Homo sapien
tgtgatccactcttgaagaaacacc

SEQ ID NO: 875096 - DNA, 25 bp, Homo sapien
tctttcctcaacgtaacctcttcca

SEQ ID NO: 875097 - DNA, 25 bp, Homo sapien
ttgtgatccactcttgaagaaacac

SEQ ID NO: 875098 - DNA, 25 bp, Homo sapien
tcctcaacgtaacctcttccatcta

SEQ ID NO: 875099 - DNA, 25 bp, Homo sapien
tctgagtgcagttgctggaaatgac

SEQ ID NO: 875100 - DNA, 25 bp, Homo sapien
gagtgcagttgctggaaatgacttt

SEQ ID NO: 875101 - DNA, 25 bp, Homo sapien
tgcagttgctggaaatgactttgct

SEQ ID NO: 875102 - DNA, 25 bp, Homo sapien
gttgctggaaatgactttgcttgtc

SEQ ID NO: 875103 - DNA, 25 bp, Homo sapien
gagtaatggcaagcataggatgaaa

SEQ ID NO: 875104 - DNA, 25 bp, Homo sapien
taggatgaaaacatgcagaacctgg

SEQ ID NO: 875105 - DNA, 25 bp, Homo sapien
tctggcagcagtggatagagaccat

SEQ ID NO: 875106 - DNA, 25 bp, Homo sapien
cactagcttcctcatatgttgccat

SEQ ID NO: 875107 - DNA, 25 bp, Homo sapien
tatgcaataacagacggtaaactct

SEQ ID NO: 875108 - DNA, 25 bp, Homo sapien
gaacaccaggtgttagagacaggtt

SEQ ID NO: 875109 - DNA, 25 bp, Homo sapien
tcctttgttattggaaggtggcctg

SEQ ID NO: 875110 - DNA, 25 bp, Homo sapien
caggttttcctgtcactcgtctaac

SEQ ID NO: 875111 - DNA, 25 bp, Homo sapien
cgatttaacgggcagagctcccttg

SEQ ID NO: 875112 - DNA, 25 bp, Homo sapien
ctcgatttaacgggcagagctccct

SEQ ID NO: 875113 - DNA, 25 bp, Homo sapien
gatttaacgggcagagctcccttgg

SEQ ID NO: 875114 - DNA, 25 bp, Homo sapien
atttaacgggcagagctcccttggc

SEQ ID NO: 875115 - DNA, 25 bp, Homo sapien
tgtttgtccctaaaagggctctcat

SEQ ID NO: 875116 - DNA, 25 bp, Homo sapien
gggctctcattagctattctctgtt

SEQ ID NO: 875117 - DNA, 25 bp, Homo sapien
cctgctgtttgtccctaaaagggct

SEQ ID NO: 875118 - DNA, 25 bp, Homo sapien
aagggctctcattagctattctctg

SEQ ID NO: 875119 - DNA, 25 bp, Homo sapien
tgcagtcacgcacagcatcagagtt

SEQ ID NO: 875120 - DNA, 25 bp, Homo sapien
ctcaagatttcggtgaagagccact

SEQ ID NO: 875121 - DNA, 25 bp, Homo sapien
cacaggcttgtcactaaaaggtcct

SEQ ID NO: 875122 - DNA, 25 bp, Homo sapien
tggagctgaggagttaatggacccc

SEQ ID NO: 875123 - DNA, 25 bp, Homo sapien
cagtatttacctccttactcaggga

SEQ ID NO: 875124 - DNA, 25 bp, Homo sapien
gattcatcttggctacacacagagt

SEQ ID NO: 875125 - DNA, 25 bp, Homo sapien
cacacagagagaagacctgttctag

SEQ ID NO: 875126 - DNA, 25 bp, Homo sapien
tttatcagccatccgtgagcacaag

SEQ ID NO: 875127 - DNA, 25 bp, Homo sapien
tacttgcctgaggagagagcaacgt

SEQ ID NO: 875128 - DNA, 25 bp, Homo sapien
taaccctgttagtggcctcaaaatg

SEQ ID NO: 875129 - DNA, 25 bp, Homo sapien
gcaacgttgagtagaggaaccccag

SEQ ID NO: 875130 - DNA, 25 bp, Homo sapien
aatttgtgcgatgttctggtaagcc

SEQ ID NO: 875131 - DNA, 25 bp, Homo sapien
tttgatgtctattggcactgaagca

SEQ ID NO: 875132 - DNA, 25 bp, Homo sapien
tttttccgtcactagaatggttggc

SEQ ID NO: 875133 - DNA, 25 bp, Homo sapien
tactgacttttaggtgggctcgagc

SEQ ID NO: 875134 - DNA, 25 bp, Homo sapien
tccctccgcatgttccaagtgattg

SEQ ID NO: 875135 - DNA, 25 bp, Homo sapien
tcctttttcatagacctgtttggtg

SEQ ID NO: 875136 - DNA, 25 bp, Homo sapien
tcatagacctgtttggtgatttccg

SEQ ID NO: 875137 - DNA, 25 bp, Homo sapien
agacctgtttggtgatttccgtcag

SEQ ID NO: 875138 - DNA, 25 bp, Homo sapien
tttcatagacctgtttggtgatttc

SEQ ID NO: 875139 - DNA, 25 bp, Homo sapien
ctcatccaaggcagacatagctaac

SEQ ID NO: 875140 - DNA, 25 bp, Homo sapien
caaggcagacatagctaacggatcc

SEQ ID NO: 875141 - DNA, 25 bp, Homo sapien
cagacatagctaacggatccagagt

SEQ ID NO: 875142 - DNA, 25 bp, Homo sapien
tagctaacggatccagagtcttttt

SEQ ID NO: 875143 - DNA, 25 bp, Homo sapien
ccactagcattggccagccatactt

SEQ ID NO: 875144 - DNA, 25 bp, Homo sapien
catccccactagcattggccagcca

SEQ ID NO: 875145 - DNA, 25 bp, Homo sapien
gagccatttcgagggaaccaatcct

SEQ ID NO: 875146 - DNA, 25 bp, Homo sapien
catttcgagggaaccaatcctctca

SEQ ID NO: 875147 - DNA, 25 bp, Homo sapien
tgaacgagtaagtgcaggtattcct

SEQ ID NO: 875148 - DNA, 25 bp, Homo sapien
ggtattccttcaggatccctgcata

SEQ ID NO: 875149 - DNA, 25 bp, Homo sapien
cttgaacgagtaagtgcaggtattc

SEQ ID NO: 875150 - DNA, 25 bp, Homo sapien
aacgagtaagtgcaggtattccttc

SEQ ID NO: 875151 - DNA, 25 bp, Homo sapien
aaagaggcgcaatgatttctctcca

SEQ ID NO: 875152 - DNA, 25 bp, Homo sapien
tgcaccttgtgcagtggtccccatc

SEQ ID NO: 875153 - DNA, 25 bp, Homo sapien
tgaactggccaatctctgacactga

SEQ ID NO: 875154 - DNA, 25 bp, Homo sapien
tggcccaaaagaggcgcaatgattt

SEQ ID NO: 875155 - DNA, 25 bp, Homo sapien
gatattaaaatcttggcatctttgc

SEQ ID NO: 875156 - DNA, 25 bp, Homo sapien
tagtctctgttgtagcggcttttgg

SEQ ID NO: 875157 - DNA, 25 bp, Homo sapien
gcttgatatccttacgtgtcctctc

SEQ ID NO: 875158 - DNA, 25 bp, Homo sapien
aaaatcttggcatctttgcttgata

SEQ ID NO: 875159 - DNA, 25 bp, Homo sapien
ctgcattaacaatttcctgcttcac

SEQ ID NO: 875160 - DNA, 25 bp, Homo sapien
tgctgcattaacaatttcctgcttc

SEQ ID NO: 875161 - DNA, 25 bp, Homo sapien
tatgctgcattaacaatttcctgct

SEQ ID NO: 875162 - DNA, 25 bp, Homo sapien
atatgctgcattaacaatttcctgc

SEQ ID NO: 875163 - DNA, 25 bp, Homo sapien
caaggattctctgagtcctatcggg

SEQ ID NO: 875164 - DNA, 25 bp, Homo sapien
tggcctcctcaaggattctctgagt

SEQ ID NO: 875165 - DNA, 25 bp, Homo sapien
gggaatttgggtagttctgatagac

SEQ ID NO: 875166 - DNA, 25 bp, Homo sapien
gggtagttctgatagacaaatccat

SEQ ID NO: 875167 - DNA, 25 bp, Homo sapien
gcagaagctcatatttttcatgtct

SEQ ID NO: 875168 - DNA, 25 bp, Homo sapien
tgcagaagctcatatttttcatgtc

SEQ ID NO: 875169 - DNA, 25 bp, Homo sapien
agttggtggtcgttatgataatggt

SEQ ID NO: 875170 - DNA, 25 bp, Homo sapien
gttggtggtcgttatgataatggta

SEQ ID NO: 875171 - DNA, 25 bp, Homo sapien
tcccaggtccagagttggtggtcgt

SEQ ID NO: 875172 - DNA, 25 bp, Homo sapien
cacttggctgatgtttgcctgaaaa

SEQ ID NO: 875173 - DNA, 25 bp, Homo sapien
tttgcggtgaaggagcttgtgcctt

SEQ ID NO: 875174 - DNA, 25 bp, Homo sapien
tgaaaacttcctccaactacgcact

SEQ ID NO: 875175 - DNA, 25 bp, Homo sapien
cacgaggctgtttttcggacactga

SEQ ID NO: 875176 - DNA, 25 bp, Homo sapien
aaaaagtaatatgatgaattcaata

SEQ ID NO: 875177 - DNA, 25 bp, Homo sapien
aaaagtaatatgatgaattcaatac

SEQ ID NO: 875178 - DNA, 25 bp, Homo sapien
aagtaatatgatgaattcaatacag

SEQ ID NO: 875179 - DNA, 25 bp, Homo sapien
gtaatatgatgaattcaatacagtc

SEQ ID NO: 875180 - DNA, 25 bp, Homo sapien
aattgtccgtgtcaggaaggtaggc

SEQ ID NO: 875181 - DNA, 25 bp, Homo sapien
caaagtaattgtccgtgtcaggaag

SEQ ID NO: 875182 - DNA, 25 bp, Homo sapien
tgccaaagtaattgtccgtgtcagg

SEQ ID NO: 875183 - DNA, 25 bp, Homo sapien
gaaggtaggcgtgccaagccgcggc

SEQ ID NO: 875184 - DNA, 25 bp, Homo sapien
tgggacggcgactccgccaaagctg

SEQ ID NO: 875185 - DNA, 25 bp, Homo sapien
acccgtctgcgctcgagcatggaga

SEQ ID NO: 875186 - DNA, 25 bp, Homo sapien
ctggagacgccaggcccgagtagct

SEQ ID NO: 875187 - DNA, 25 bp, Homo sapien
cgtgaatccaactgtgccaagcctt

SEQ ID NO: 875188 - DNA, 25 bp, Homo sapien
catttgagtgccgaaagcatttgga

SEQ ID NO: 875189 - DNA, 25 bp, Homo sapien
taaccgtcgtcgacaatattttcga

SEQ ID NO: 875190 - DNA, 25 bp, Homo sapien
ttttctgcagactacagaaattgac

SEQ ID NO: 875191 - DNA, 25 bp, Homo sapien
agcattgtccgggtaataaccgtcg

SEQ ID NO: 875192 - DNA, 25 bp, Homo sapien
gaattcctggatctgaagagccctc

SEQ ID NO: 875193 - DNA, 25 bp, Homo sapien
gaaggagcctcgcattggcaaagag

SEQ ID NO: 875194 - DNA, 25 bp, Homo sapien
ataccaaggtgcttgtcagcttcac

SEQ ID NO: 875195 - DNA, 25 bp, Homo sapien
tcccagtcctggaataccaaggtgc

SEQ ID NO: 875196 - DNA, 25 bp, Homo sapien
tctgcctcagattggcatgttgacg

SEQ ID NO: 875197 - DNA, 25 bp, Homo sapien
cttggtaaacacagcgcgcgcattt

SEQ ID NO: 875198 - DNA, 25 bp, Homo sapien
ttttctggatgtcagcactaacccc

SEQ ID NO: 875199 - DNA, 25 bp, Homo sapien
catgttgacgactctgcttgaagga

SEQ ID NO: 875200 - DNA, 25 bp, Homo sapien
tatgcaagctttccaagagcggctt

SEQ ID NO: 875201 - DNA, 25 bp, Homo sapien
caagagcggctttttattgagataa

SEQ ID NO: 875202 - DNA, 25 bp, Homo sapien
gcgcgcccaagagcgcgtttgcgca

SEQ ID NO: 875203 - DNA, 25 bp, Homo sapien
gataatatattttggcggcttcttc

SEQ ID NO: 875204 - DNA, 25 bp, Homo sapien
gaaaagctttcctagctccttcttc

SEQ ID NO: 875205 - DNA, 25 bp, Homo sapien
tgctttcagtcgcaggtgacctcga

SEQ ID NO: 875206 - DNA, 25 bp, Homo sapien
caagtccccatgcaaaagcgctgtt

SEQ ID NO: 875207 - DNA, 25 bp, Homo sapien
tgggtaattttcgtcgacgccacca

SEQ ID NO: 875208 - DNA, 25 bp, Homo sapien
caagcttcggtgcttttgggacagc

SEQ ID NO: 875209 - DNA, 25 bp, Homo sapien
tgtctgcacgccctagagcagacac

SEQ ID NO: 875210 - DNA, 25 bp, Homo sapien
tcacaccgttgatttgatccagaaa

SEQ ID NO: 875211 - DNA, 25 bp, Homo sapien
gacactgcggtcacttaaagtgcgc

SEQ ID NO: 875212 - DNA, 25 bp, Homo sapien
cggatagtaccgagcgttggcgcta

SEQ ID NO: 875213 - DNA, 25 bp, Homo sapien
ttaacccgtagcataagttagctcg

SEQ ID NO: 875214 - DNA, 25 bp, Homo sapien
taagttagctcggacataaggcaag

SEQ ID NO: 875215 - DNA, 25 bp, Homo sapien
gcatgtagtgctccattaacccgta

SEQ ID NO: 875216 - DNA, 25 bp, Homo sapien
caaattctcgctgtattaaaggagc

SEQ ID NO: 875217 - DNA, 25 bp, Homo sapien
caatactaggactgtatgatgtagg

SEQ ID NO: 875218 - DNA, 25 bp, Homo sapien
ttgtggtcagagacagctagccaac

SEQ ID NO: 875219 - DNA, 25 bp, Homo sapien
gacagctagccaacacaatactagg

SEQ ID NO: 875220 - DNA, 25 bp, Homo sapien
tatgatgtagggcatgatttcctcc

SEQ ID NO: 875221 - DNA, 25 bp, Homo sapien
tggccagggggctttttcctattga

SEQ ID NO: 875222 - DNA, 25 bp, Homo sapien
tgctgacaaacccatccagtctttt

SEQ ID NO: 875223 - DNA, 25 bp, Homo sapien
catggacctgttgaatattcctcct

SEQ ID NO: 875224 - DNA, 25 bp, Homo sapien
gttaaatagctgtaccatggacctg

SEQ ID NO: 875225 - DNA, 25 bp, Homo sapien
taacaatccaataaccgaatccaag

SEQ ID NO: 875226 - DNA, 25 bp, Homo sapien
aggaaattgcctgctgcttatcagc

SEQ ID NO: 875227 - DNA, 25 bp, Homo sapien
agttgggaggaaattgcctgctgct

SEQ ID NO: 875228 - DNA, 25 bp, Homo sapien
tcacggtcgctttccagctgttggc

SEQ ID NO: 875229 - DNA, 25 bp, Homo sapien
gcattttcacggtcgctttccagct

SEQ ID NO: 875230 - DNA, 25 bp, Homo sapien
ttttcacggtcgctttccagctgtt

SEQ ID NO: 875231 - DNA, 25 bp, Homo sapien
gcagggggcattttcacggtcgctt

SEQ ID NO: 875232 - DNA, 25 bp, Homo sapien
aaacatcaggtgatgaagcctcttc

SEQ ID NO: 875233 - DNA, 25 bp, Homo sapien
agaaacatcaggtgatgaagcctct

SEQ ID NO: 875234 - DNA, 25 bp, Homo sapien
gaaacatcaggtgatgaagcctctt

SEQ ID NO: 875235 - DNA, 25 bp, Homo sapien
gagagctcagtgatagcagctgtca

SEQ ID NO: 875236 - DNA, 25 bp, Homo sapien
caccatcaagcaggatgatggcaat

SEQ ID NO: 875237 - DNA, 25 bp, Homo sapien
ggtctaggtctacaccatcaagcag

SEQ ID NO: 875238 - DNA, 25 bp, Homo sapien
gcagctgtcaaaggatatgtaattt

SEQ ID NO: 875239 - DNA, 25 bp, Homo sapien
aacagtgcggattttcttaactgag

SEQ ID NO: 875240 - DNA, 25 bp, Homo sapien
ttggacatttccagccaggcataat

SEQ ID NO: 875241 - DNA, 25 bp, Homo sapien
ccctatccttggctgtgaaacagtg

SEQ ID NO: 875242 - DNA, 25 bp, Homo sapien
aactgagtccctgacagatggtttc

SEQ ID NO: 875243 - DNA, 25 bp, Homo sapien
cgtcgccttttagtttatgatcaaa

SEQ ID NO: 875244 - DNA, 25 bp, Homo sapien
gtttatgatcaaaatcaatgaggac

SEQ ID NO: 875245 - DNA, 25 bp, Homo sapien
tcaaaatcaatgaggactgaagctt

SEQ ID NO: 875246 - DNA, 25 bp, Homo sapien
tttcgtcgccttttagtttatgatc

SEQ ID NO: 875247 - DNA, 25 bp, Homo sapien
tctgtgaatgttttacaaaagggtc

SEQ ID NO: 875248 - DNA, 25 bp, Homo sapien
agaggtatcgatctttttctgtgaa

SEQ ID NO: 875249 - DNA, 25 bp, Homo sapien
ctccagaggtatcgatctttttctg

SEQ ID NO: 875250 - DNA, 25 bp, Homo sapien
ctgtgaatgttttacaaaagggtct

SEQ ID NO: 875251 - DNA, 25 bp, Homo sapien
cttgagtgcaagcacaaggaaatat

SEQ ID NO: 875252 - DNA, 25 bp, Homo sapien
caagcacaaggaaatatgtggccat

SEQ ID NO: 875253 - DNA, 25 bp, Homo sapien
tgagtgcaagcacaaggaaatatgt

SEQ ID NO: 875254 - DNA, 25 bp, Homo sapien
gtgcaagcacaaggaaatatgtggc

SEQ ID NO: 875255 - DNA, 25 bp, Homo sapien
gacgtgctaatcttgttacttgcct

SEQ ID NO: 875256 - DNA, 25 bp, Homo sapien
acttttattgtgatccgacattaga

SEQ ID NO: 875257 - DNA, 25 bp, Homo sapien
tagttattcctacgttttgacgtgc

SEQ ID NO: 875258 - DNA, 25 bp, Homo sapien
tctttccagaagcatagttattcct

SEQ ID NO: 875259 - DNA, 25 bp, Homo sapien
gtgttacacgattttgatgcaggtc

SEQ ID NO: 875260 - DNA, 25 bp, Homo sapien
cccatttttcagacatgtgatcaat

SEQ ID NO: 875261 - DNA, 25 bp, Homo sapien
gggtcccttagcttgtggttgcagc

SEQ ID NO: 875262 - DNA, 25 bp, Homo sapien
aatgacgtaggggtcccttagcttg

SEQ ID NO: 875263 - DNA, 25 bp, Homo sapien
tgcttgttagggagcttgcaaggat

SEQ ID NO: 875264 - DNA, 25 bp, Homo sapien
tgtgtgcttgttagggagcttgcaa

SEQ ID NO: 875265 - DNA, 25 bp, Homo sapien
ggaaattggtagtcctctgattctt

SEQ ID NO: 875266 - DNA, 25 bp, Homo sapien
gcaattggaggcaatcgtaaggaaa

SEQ ID NO: 875267 - DNA, 25 bp, Homo sapien
agatgccaaagctcaagatgcataa

SEQ ID NO: 875268 - DNA, 25 bp, Homo sapien
gctgccaaactagccccctgagtgt

SEQ ID NO: 875269 - DNA, 25 bp, Homo sapien
ctcaagatgcataatcctgagcttg

SEQ ID NO: 875270 - DNA, 25 bp, Homo sapien
cccctgagtgtccaaatgagttggc

SEQ ID NO: 875271 - DNA, 25 bp, Homo sapien
gctgataaaactcatacgggtggtt

SEQ ID NO: 875272 - DNA, 25 bp, Homo sapien
tttgacctagctccaaaagcacaat

SEQ ID NO: 875273 - DNA, 25 bp, Homo sapien
catacgggtggttctttgacctagc

SEQ ID NO: 875274 - DNA, 25 bp, Homo sapien
taaccgatggttcgaatgagagaga

SEQ ID NO: 875275 - DNA, 25 bp, Homo sapien
cacgggatgtagagaaaaaccaatc

SEQ ID NO: 875276 - DNA, 25 bp, Homo sapien
catgaagagcctgttggaagtggac

SEQ ID NO: 875277 - DNA, 25 bp, Homo sapien
tcatcatgaagagcctgttggaagt

SEQ ID NO: 875278 - DNA, 25 bp, Homo sapien
aaaccaatcatcatgaagagcctgt

SEQ ID NO: 875279 - DNA, 25 bp, Homo sapien
tttgatcttggagtataaaaatcag

SEQ ID NO: 875280 - DNA, 25 bp, Homo sapien
ccagaaggtcgtctctgaggagatg

SEQ ID NO: 875281 - DNA, 25 bp, Homo sapien
gcagttgctccagaaggtcgtctct

SEQ ID NO: 875282 - DNA, 25 bp, Homo sapien
tgagcagcagttgctccagaaggtc

SEQ ID NO: 875283 - DNA, 25 bp, Homo sapien
gctgcaaagcagtattgatggaaca

SEQ ID NO: 875284 - DNA, 25 bp, Homo sapien
gtaaaatagctgcaaagcagtattg

SEQ ID NO: 875285 - DNA, 25 bp, Homo sapien
taaatctatgtatcaattcatccag

SEQ ID NO: 875286 - DNA, 25 bp, Homo sapien
aatagctgcaaagcagtattgatgg

SEQ ID NO: 875287 - DNA, 25 bp, Homo sapien
ttgccagaagcatctcctttgttcc

SEQ ID NO: 875288 - DNA, 25 bp, Homo sapien
cctttgccagaagcatctcctttgt

SEQ ID NO: 875289 - DNA, 25 bp, Homo sapien
ccagaagcatctcctttgttcccat

SEQ ID NO: 875290 - DNA, 25 bp, Homo sapien
gccagaagcatctcctttgttccca

SEQ ID NO: 875291 - DNA, 25 bp, Homo sapien
tagggaagggcagtccttggaaggc

SEQ ID NO: 875292 - DNA, 25 bp, Homo sapien
agagcttgatagtagggaagggcag

SEQ ID NO: 875293 - DNA, 25 bp, Homo sapien
tgccatgacgtcttgaatcacaggg

SEQ ID NO: 875294 - DNA, 25 bp, Homo sapien
aattgatggaaattgccatgacgtc

SEQ ID NO: 875295 - DNA, 25 bp, Homo sapien
gaatccacattattactgttacgcc

SEQ ID NO: 875296 - DNA, 25 bp, Homo sapien
ttattactgttacgccctccaatgg

SEQ ID NO: 875297 - DNA, 25 bp, Homo sapien
tccaatggtaggttgttggcaagta

SEQ ID NO: 875298 - DNA, 25 bp, Homo sapien
tacgccctccaatggtaggttgttg

SEQ ID NO: 875299 - DNA, 25 bp, Homo sapien
tgctaataatgcacgcagaaattct

SEQ ID NO: 875300 - DNA, 25 bp, Homo sapien
atgccacttattgtggttaactggc

SEQ ID NO: 875301 - DNA, 25 bp, Homo sapien
tggttaactggcttgcccaaaccat

SEQ ID NO: 875302 - DNA, 25 bp, Homo sapien
cttattgtggttaactggcttgccc

SEQ ID NO: 875303 - DNA, 25 bp, Homo sapien
ctggagggagcttagttaaaaattg

SEQ ID NO: 875304 - DNA, 25 bp, Homo sapien
gagggagcttagttaaaaattgatg

SEQ ID NO: 875305 - DNA, 25 bp, Homo sapien
tggagggagcttagttaaaaattga

SEQ ID NO: 875306 - DNA, 25 bp, Homo sapien
gccagaagctgtgttgattgtaggt

SEQ ID NO: 875307 - DNA, 25 bp, Homo sapien
tctcaaactgagggatcctggctgc

SEQ ID NO: 875308 - DNA, 25 bp, Homo sapien
aagttggcaacacctagttgaaagc

SEQ ID NO: 875309 - DNA, 25 bp, Homo sapien
ggcaacacctagttgaaagcatatc

SEQ ID NO: 875310 - DNA, 25 bp, Homo sapien
ctagaagcgggtcaggcatttgtct

SEQ ID NO: 875311 - DNA, 25 bp, Homo sapien
ccttggaaaattgcaaagctgctga

SEQ ID NO: 875312 - DNA, 25 bp, Homo sapien
tactctgcttggagattagggggct

SEQ ID NO: 875313 - DNA, 25 bp, Homo sapien
gattagggggctgagaatgggagag

SEQ ID NO: 875314 - DNA, 25 bp, Homo sapien
gaggcagcagctgaacatattttcc

SEQ ID NO: 875315 - DNA, 25 bp, Homo sapien
gttgtttatagccaacccaggtctg

SEQ ID NO: 875316 - DNA, 25 bp, Homo sapien
gtttatagccaacccaggtctggta

SEQ ID NO: 875317 - DNA, 25 bp, Homo sapien
acccaggtctggtagattccaaggt

SEQ ID NO: 875318 - DNA, 25 bp, Homo sapien
caggtctggtagattccaaggtcca

SEQ ID NO: 875319 - DNA, 25 bp, Homo sapien
agggccgttttgaagtttcacatat

SEQ ID NO: 875320 - DNA, 25 bp, Homo sapien
tagaaacatgaaagggccgttttga

SEQ ID NO: 875321 - DNA, 25 bp, Homo sapien
gttgacgatggtaaacagctggtaa

SEQ ID NO: 875322 - DNA, 25 bp, Homo sapien
gtaaagataactgcctggaacagct

SEQ ID NO: 875323 - DNA, 25 bp, Homo sapien
tggtaaagataactgcctggaacag

SEQ ID NO: 875324 - DNA, 25 bp, Homo sapien
tgttgacgatggtaaacagctggta

SEQ ID NO: 875325 - DNA, 25 bp, Homo sapien
gaaaagttctcagtcccttcaccat

SEQ ID NO: 875326 - DNA, 25 bp, Homo sapien
tgaaaagttctcagtcccttcacca

SEQ ID NO: 875327 - DNA, 25 bp, Homo sapien
gatgaaaagttctcagtcccttcac

SEQ ID NO: 875328 - DNA, 25 bp, Homo sapien
aggatgaaaagttctcagtcccttc

SEQ ID NO: 875329 - DNA, 25 bp, Homo sapien
ggaaggagaggattgtcattctcac

SEQ ID NO: 875330 - DNA, 25 bp, Homo sapien
ctggaaggagaggattgtcattctc

SEQ ID NO: 875331 - DNA, 25 bp, Homo sapien
agtctggaaggagaggattgtcatt

SEQ ID NO: 875332 - DNA, 25 bp, Homo sapien
tctggaaggagaggattgtcattct

SEQ ID NO: 875333 - DNA, 25 bp, Homo sapien
gttgtgaagactcatttactgtcag

SEQ ID NO: 875334 - DNA, 25 bp, Homo sapien
tcatagctccaatatcatgttcctg

SEQ ID NO: 875335 - DNA, 25 bp, Homo sapien
gttctccactctgctattatctgta

SEQ ID NO: 875336 - DNA, 25 bp, Homo sapien
gcagggtccaccttcatagctccaa

SEQ ID NO: 875337 - DNA, 25 bp, Homo sapien
tcatatgttgggaagacccattctt

SEQ ID NO: 875338 - DNA, 25 bp, Homo sapien
gttgggaagacccattctttctgca

SEQ ID NO: 875339 - DNA, 25 bp, Homo sapien
taagcacgtggacttcactggcaaa

SEQ ID NO: 875340 - DNA, 25 bp, Homo sapien
aggatgtatttaacctgatgaggaa

SEQ ID NO: 875341 - DNA, 25 bp, Homo sapien
tatacagcccatggttcatcaagct

SEQ ID NO: 875342 - DNA, 25 bp, Homo sapien
tcttgagttgaaccctctttttgtg

SEQ ID NO: 875343 - DNA, 25 bp, Homo sapien
agctgaaccttgcatgagctgacaa

SEQ ID NO: 875344 - DNA, 25 bp, Homo sapien
gagctgacaacaatgcatgtttgac

SEQ ID NO: 875345 - DNA, 25 bp, Homo sapien
ctgaagttgtcaacccgtaggccat

SEQ ID NO: 875346 - DNA, 25 bp, Homo sapien
tgtctgaagttgtcaacccgtaggc

SEQ ID NO: 875347 - DNA, 25 bp, Homo sapien
ctgtctgaagttgtcaacccgtagg

SEQ ID NO: 875348 - DNA, 25 bp, Homo sapien
tctgaagttgtcaacccgtaggcca

SEQ ID NO: 875349 - DNA, 25 bp, Homo sapien
aacgttggagagtgactgtgatgac

SEQ ID NO: 875350 - DNA, 25 bp, Homo sapien
tgccagaacgttggagagtgactgt

SEQ ID NO: 875351 - DNA, 25 bp, Homo sapien
gagagtgactgtgatgacaccgggt

SEQ ID NO: 875352 - DNA, 25 bp, Homo sapien
ctgccagaacgttggagagtgactg

SEQ ID NO: 875353 - DNA, 25 bp, Homo sapien
ttaacctgggaagcaaatgtcagtg

SEQ ID NO: 875354 - DNA, 25 bp, Homo sapien
acctgggaagcaaatgtcagtgttc

SEQ ID NO: 875355 - DNA, 25 bp, Homo sapien
aacctgggaagcaaatgtcagtgtt

SEQ ID NO: 875356 - DNA, 25 bp, Homo sapien
taacctgggaagcaaatgtcagtgt

SEQ ID NO: 875357 - DNA, 25 bp, Homo sapien
ggagggccaacactgacacagcagt

SEQ ID NO: 875358 - DNA, 25 bp, Homo sapien
taattaattgtacccatgaatgtcc

SEQ ID NO: 875359 - DNA, 25 bp, Homo sapien
gcagttgctgtttgactgatggtat

SEQ ID NO: 875360 - DNA, 25 bp, Homo sapien
cccatgaatgtcctgctgtttgaat

SEQ ID NO: 875361 - DNA, 25 bp, Homo sapien
tttctctcaggcctactttcggttg

SEQ ID NO: 875362 - DNA, 25 bp, Homo sapien
tctctcaggcctactttcggttgaa

SEQ ID NO: 875363 - DNA, 25 bp, Homo sapien
ctcaggcctactttcggttgaagtt

SEQ ID NO: 875364 - DNA, 25 bp, Homo sapien
ctctcaggcctactttcggttgaag

SEQ ID NO: 875365 - DNA, 25 bp, Homo sapien
aatatttgccctcttgaatgcagaa

SEQ ID NO: 875366 - DNA, 25 bp, Homo sapien
caatttctgtcctctaaatcctggg

SEQ ID NO: 875367 - DNA, 25 bp, Homo sapien
ggaatatttgccctcttgaatgcag

SEQ ID NO: 875368 - DNA, 25 bp, Homo sapien
gggaatatttgccctcttgaatgca

SEQ ID NO: 875369 - DNA, 25 bp, Homo sapien
aaggtcttcaccactctgcgagttt

SEQ ID NO: 875370 - DNA, 25 bp, Homo sapien
tgaaggtcttcaccactctgcgagt

SEQ ID NO: 875371 - DNA, 25 bp, Homo sapien
ggtcttcaccactctgcgagtttcc

SEQ ID NO: 875372 - DNA, 25 bp, Homo sapien
catgaaggtcttcaccactctgcga

SEQ ID NO: 875373 - DNA, 25 bp, Homo sapien
gagattggtagacatcagggtcccc

SEQ ID NO: 875374 - DNA, 25 bp, Homo sapien
tatcatccctttcgcactcacagtg

SEQ ID NO: 875375 - DNA, 25 bp, Homo sapien
tttggaagaggatgcacttgacatt

SEQ ID NO: 875376 - DNA, 25 bp, Homo sapien
acttgacatttaactatgggcccca

SEQ ID NO: 875377 - DNA, 25 bp, Homo sapien
tctcttattaatctcactcccactg

SEQ ID NO: 875378 - DNA, 25 bp, Homo sapien
ttacggtccttttgcatctccagtg

SEQ ID NO: 875379 - DNA, 25 bp, Homo sapien
gatgggcagctatgccagtgttcag

SEQ ID NO: 875380 - DNA, 25 bp, Homo sapien
cctctcgtgatcaccaaaaatctct

SEQ ID NO: 875381 - DNA, 25 bp, Homo sapien
tgaggtagctcccatcaaggatacc

SEQ ID NO: 875382 - DNA, 25 bp, Homo sapien
gctcccatcaaggatacctgtgatc

SEQ ID NO: 875383 - DNA, 25 bp, Homo sapien
ccatcaaggatacctgtgatcagca

SEQ ID NO: 875384 - DNA, 25 bp, Homo sapien
ggtagctcccatcaaggatacctgt

SEQ ID NO: 875385 - DNA, 25 bp, Homo sapien
ctgtgtgtataagggtgtcttcaaa

SEQ ID NO: 875386 - DNA, 25 bp, Homo sapien
ctgatgttcttgatgtaggtaagac

SEQ ID NO: 875387 - DNA, 25 bp, Homo sapien
aaatgcacagctgactgatcaaagg

SEQ ID NO: 875388 - DNA, 25 bp, Homo sapien
gtaagactcattattcagaaacttg

SEQ ID NO: 875389 - DNA, 25 bp, Homo sapien
tgacagggctgttacctcaaagaag

SEQ ID NO: 875390 - DNA, 25 bp, Homo sapien
aactggtacagaaagtgtgccctga

SEQ ID NO: 875391 - DNA, 25 bp, Homo sapien
tccctcgggatgaaggtgaacatgg

SEQ ID NO: 875392 - DNA, 25 bp, Homo sapien
gaagaaggtcacatctgttgcctgg

SEQ ID NO: 875393 - DNA, 25 bp, Homo sapien
agtgcccactcgctggggatgtaga

SEQ ID NO: 875394 - DNA, 25 bp, Homo sapien
tgtagagaggaatagagagatgctc

SEQ ID NO: 875395 - DNA, 25 bp, Homo sapien
ccagtgcccactcgctggggatgta

SEQ ID NO: 875396 - DNA, 25 bp, Homo sapien
tagagaggaatagagagatgctcca

SEQ ID NO: 875397 - DNA, 25 bp, Homo sapien
tgagctggacggcagttaaatagga

SEQ ID NO: 875398 - DNA, 25 bp, Homo sapien
tctgctgcattgttggagcatggct

SEQ ID NO: 875399 - DNA, 25 bp, Homo sapien
taatagcactctggtcttaatagag

SEQ ID NO: 875400 - DNA, 25 bp, Homo sapien
gtgtctctcagggtccggcatctgc

SEQ ID NO: 875401 - DNA, 25 bp, Homo sapien
cattttgtatttgccacagatcttt

SEQ ID NO: 875402 - DNA, 25 bp, Homo sapien
aactttttgttacacttctgattgg

SEQ ID NO: 875403 - DNA, 25 bp, Homo sapien
cttggctttgtaagggcattttgta

SEQ ID NO: 875404 - DNA, 25 bp, Homo sapien
tctgattggtataatagggtgccat

SEQ ID NO: 875405 - DNA, 25 bp, Homo sapien
tgtacgttgggaatgaacttgacct

SEQ ID NO: 875406 - DNA, 25 bp, Homo sapien
cttacacttgtacgttgggaatgaa

SEQ ID NO: 875407 - DNA, 25 bp, Homo sapien
cacttgtacgttgggaatgaacttg

SEQ ID NO: 875408 - DNA, 25 bp, Homo sapien
tcaatatcatggcatagattttcat

SEQ ID NO: 875409 - DNA, 25 bp, Homo sapien
gccaattgtccttttgtcataatct

SEQ ID NO: 875410 - DNA, 25 bp, Homo sapien
gggaatgccaaacatccatgatact

SEQ ID NO: 875411 - DNA, 25 bp, Homo sapien
ttagtccactctgaacaatttgttg

SEQ ID NO: 875412 - DNA, 25 bp, Homo sapien
ccatgatactattaattaccatacc

SEQ ID NO: 875413 - DNA, 25 bp, Homo sapien
caaatctcgcagcattgacttgttg

SEQ ID NO: 875414 - DNA, 25 bp, Homo sapien
gcattgacttgttgagcacttggta

SEQ ID NO: 875415 - DNA, 25 bp, Homo sapien
cttggtataatgaactaagttgcag

SEQ ID NO: 875416 - DNA, 25 bp, Homo sapien
tgagcacttggtataatgaactaag

SEQ ID NO: 875417 - DNA, 25 bp, Homo sapien
tatttatgcaaagacgttctctagg

SEQ ID NO: 875418 - DNA, 25 bp, Homo sapien
taaacatctgcttaagtagggagcg

SEQ ID NO: 875419 - DNA, 25 bp, Homo sapien
cttcattagcagaataaaaccaagt

SEQ ID NO: 875420 - DNA, 25 bp, Homo sapien
catggtggaagatataacccgagag

SEQ ID NO: 875421 - DNA, 25 bp, Homo sapien
catggttttaacagtatgagaggta

SEQ ID NO: 875422 - DNA, 25 bp, Homo sapien
gttttaacagtatgagaggtaatag

SEQ ID NO: 875423 - DNA, 25 bp, Homo sapien
cagcatggttttaacagtatgagag

SEQ ID NO: 875424 - DNA, 25 bp, Homo sapien
gggcagcatggttttaacagtatga

SEQ ID NO: 875425 - DNA, 25 bp, Homo sapien
tgttttggtcaacttctacagctat

SEQ ID NO: 875426 - DNA, 25 bp, Homo sapien
ggatatgtataaggaaactatttcg

SEQ ID NO: 875427 - DNA, 25 bp, Homo sapien
tctacagctatttggtacatcatct

SEQ ID NO: 875428 - DNA, 25 bp, Homo sapien
tatttcgctgaatacctccagctct

SEQ ID NO: 875429 - DNA, 25 bp, Homo sapien
ggtaggacactattttgctatggga

SEQ ID NO: 875430 - DNA, 25 bp, Homo sapien
agtgccttcagacacccagctaggc

SEQ ID NO: 875431 - DNA, 25 bp, Homo sapien
cactattttgctatgggagaattca

SEQ ID NO: 875432 - DNA, 25 bp, Homo sapien
ctggtctggctaggtaggacactat

SEQ ID NO: 875433 - DNA, 25 bp, Homo sapien
tatgtggtcacagcatagtacctgc

SEQ ID NO: 875434 - DNA, 25 bp, Homo sapien
tgggctggcctcaggtcatttaaac

SEQ ID NO: 875435 - DNA, 25 bp, Homo sapien
tacctgatgccacttgcggaagtct

SEQ ID NO: 875436 - DNA, 25 bp, Homo sapien
gaagtctcacaactggtcctcctga

SEQ ID NO: 875437 - DNA, 25 bp, Homo sapien
aagatactcacactcaatggcatca

SEQ ID NO: 875438 - DNA, 25 bp, Homo sapien
actcaatggcatcatatcttaacag

SEQ ID NO: 875439 - DNA, 25 bp, Homo sapien
caatggcatcatatcttaacagaca

SEQ ID NO: 875440 - DNA, 25 bp, Homo sapien
ttcaagatactcacactcaatggca

SEQ ID NO: 875441 - DNA, 25 bp, Homo sapien
ttagccgtagacgaatattcctggg

SEQ ID NO: 875442 - DNA, 25 bp, Homo sapien
ggtcttggctactatcaaaatccat

SEQ ID NO: 875443 - DNA, 25 bp, Homo sapien
aatgtttatggtcttggctactatc

SEQ ID NO: 875444 - DNA, 25 bp, Homo sapien
ttccaaagaaattagccgtagacga

SEQ ID NO: 875445 - DNA, 25 bp, Homo sapien
ataatccgatttgttcttcagggcc

SEQ ID NO: 875446 - DNA, 25 bp, Homo sapien
gaccataatccgatttgttcttcag

SEQ ID NO: 875447 - DNA, 25 bp, Homo sapien
caaatgaccataatccgatttgttc

SEQ ID NO: 875448 - DNA, 25 bp, Homo sapien
taagtacttctattgtataaacttc

SEQ ID NO: 875449 - DNA, 25 bp, Homo sapien
tcaaagccacaactaacagcatgga

SEQ ID NO: 875450 - DNA, 25 bp, Homo sapien
taacaaccagattgagagaatcagg

SEQ ID NO: 875451 - DNA, 25 bp, Homo sapien
gtgaacctcaagctattgcagctct

SEQ ID NO: 875452 - DNA, 25 bp, Homo sapien
ccttgttgccatccaatcttgattt

SEQ ID NO: 875453 - DNA, 25 bp, Homo sapien
actgccaaacaatggtaatagtcat

SEQ ID NO: 875454 - DNA, 25 bp, Homo sapien
aaactgccaaacaatggtaatagtc

SEQ ID NO: 875455 - DNA, 25 bp, Homo sapien
aactgccaaacaatggtaatagtca

SEQ ID NO: 875456 - DNA, 25 bp, Homo sapien
ttccatgaccgagtttttcttggca

SEQ ID NO: 875457 - DNA, 25 bp, Homo sapien
aaatgctaggtcttccatgaccgag

SEQ ID NO: 875458 - DNA, 25 bp, Homo sapien
taggtcttccatgaccgagtttttc

SEQ ID NO: 875459 - DNA, 25 bp, Homo sapien
cattgctacaaatgctaggtcttcc

SEQ ID NO: 875460 - DNA, 25 bp, Homo sapien
cacatatgctgacacaactgtcagt

SEQ ID NO: 875461 - DNA, 25 bp, Homo sapien
catatgctgacacaactgtcagttt

SEQ ID NO: 875462 - DNA, 25 bp, Homo sapien
atcacatatgctgacacaactgtca

SEQ ID NO: 875463 - DNA, 25 bp, Homo sapien
tcacatatgctgacacaactgtcag

SEQ ID NO: 875464 - DNA, 25 bp, Homo sapien
ccagcaaaagctttgacgaaaaatc

SEQ ID NO: 875465 - DNA, 25 bp, Homo sapien
aaactaaaaacgtgatactctccag

SEQ ID NO: 875466 - DNA, 25 bp, Homo sapien
aaatctgctgagtgaactctgcggg

SEQ ID NO: 875467 - DNA, 25 bp, Homo sapien
aacgtgatactctccagcaaaagct

SEQ ID NO: 875468 - DNA, 25 bp, Homo sapien
ggctcattcacagttgtcaaagtac

SEQ ID NO: 875469 - DNA, 25 bp, Homo sapien
ctgtaggctcattcacagttgtcaa

SEQ ID NO: 875470 - DNA, 25 bp, Homo sapien
aattctgcttaatgtgcatggaatc

SEQ ID NO: 875471 - DNA, 25 bp, Homo sapien
gactcggagaagttgcatgaatttc

SEQ ID NO: 875472 - DNA, 25 bp, Homo sapien
catttccctgtgactgaatgctttg

SEQ ID NO: 875473 - DNA, 25 bp, Homo sapien
tcatttccctgtgactgaatgcttt

SEQ ID NO: 875474 - DNA, 25 bp, Homo sapien
gtgactgaatgctttgccgcatgac

SEQ ID NO: 875475 - DNA, 25 bp, Homo sapien
cctgtgactgaatgctttgccgcat

SEQ ID NO: 875476 - DNA, 25 bp, Homo sapien
ccaagtttcccagtccgctgaggac

SEQ ID NO: 875477 - DNA, 25 bp, Homo sapien
tctctgttgtctctagtcttccatg

SEQ ID NO: 875478 - DNA, 25 bp, Homo sapien
tcccagtccgctgaggactctaggt

SEQ ID NO: 875479 - DNA, 25 bp, Homo sapien
tttcccagtccgctgaggactctag

SEQ ID NO: 875480 - DNA, 25 bp, Homo sapien
tcatcagaattcttacccttcactg

SEQ ID NO: 875481 - DNA, 25 bp, Homo sapien
gttcatcagaattcttacccttcac

SEQ ID NO: 875482 - DNA, 25 bp, Homo sapien
tcagaattcttacccttcactggat

SEQ ID NO: 875483 - DNA, 25 bp, Homo sapien
gtgttcatcagaattcttacccttc

SEQ ID NO: 875484 - DNA, 25 bp, Homo sapien
tatcaagccaatgggcatcacattg

SEQ ID NO: 875485 - DNA, 25 bp, Homo sapien
caatgggcatcacattgatcgccat

SEQ ID NO: 875486 - DNA, 25 bp, Homo sapien
tgctttgagttcttcgtatcaagcc

SEQ ID NO: 875487 - DNA, 25 bp, Homo sapien
gagttcttcgtatcaagccaatggg

SEQ ID NO: 875488 - DNA, 25 bp, Homo sapien
cagctgtttgactctctaaacttga

SEQ ID NO: 875489 - DNA, 25 bp, Homo sapien
aatgattgtgcgttgtttggtctgc

SEQ ID NO: 875490 - DNA, 25 bp, Homo sapien
tgctgttttctcgtagttcttaacc

SEQ ID NO: 875491 - DNA, 25 bp, Homo sapien
gatctacatctcatcaactcactaa

SEQ ID NO: 875492 - DNA, 25 bp, Homo sapien
tgttggtgcatttagtacaaacagc

SEQ ID NO: 875493 - DNA, 25 bp, Homo sapien
tattccatcatcacgaaggtccctg

SEQ ID NO: 875494 - DNA, 25 bp, Homo sapien
agtttccatatatcccgtctccaca

SEQ ID NO: 875495 - DNA, 25 bp, Homo sapien
gctaggattctttgacagctactga

SEQ ID NO: 875496 - DNA, 25 bp, Homo sapien
tattgagacgccagtgttattacac

SEQ ID NO: 875497 - DNA, 25 bp, Homo sapien
gaaaaaatgagcaggcttaccttac

SEQ ID NO: 875498 - DNA, 25 bp, Homo sapien
catatttcatgcctggaatcaacca

SEQ ID NO: 875499 - DNA, 25 bp, Homo sapien
gaatcaaccatctatccaaggaact

SEQ ID NO: 875500 - DNA, 25 bp, Homo sapien
ttgcagatgatcctgctaccaccag

SEQ ID NO: 875501 - DNA, 25 bp, Homo sapien
ggaggctgctacagctctacagaca

SEQ ID NO: 875502 - DNA, 25 bp, Homo sapien
acgatcttgcagatgatcctgctac

SEQ ID NO: 875503 - DNA, 25 bp, Homo sapien
gctctacagacatttgccgctgcag

SEQ ID NO: 875504 - DNA, 25 bp, Homo sapien
cagagagtgagctatgataaagaca

SEQ ID NO: 875505 - DNA, 25 bp, Homo sapien
ggcaattttgaaagatcccctggca

SEQ ID NO: 875506 - DNA, 25 bp, Homo sapien
gagctatgataaagacattgaagtt

SEQ ID NO: 875507 - DNA, 25 bp, Homo sapien
cccctggcattgttgggagaaagag

SEQ ID NO: 875508 - DNA, 25 bp, Homo sapien
gcttcccgtgctgatgctttcctca

SEQ ID NO: 875509 - DNA, 25 bp, Homo sapien
tactcttgctagattgcttcccgtg

SEQ ID NO: 875510 - DNA, 25 bp, Homo sapien
tcctcaccttgctgaatctctggca

SEQ ID NO: 875511 - DNA, 25 bp, Homo sapien
ttgctagattgcttcccgtgctgat

SEQ ID NO: 875512 - DNA, 25 bp, Homo sapien
gatggaagctcgtcatggactccca

SEQ ID NO: 875513 - DNA, 25 bp, Homo sapien
tatccaaggttagcttccaggcagg

SEQ ID NO: 875514 - DNA, 25 bp, Homo sapien
caagcccgtggctgctagtagagca

SEQ ID NO: 875515 - DNA, 25 bp, Homo sapien
ggaagttgtagcactcttggcccat

SEQ ID NO: 875516 - DNA, 25 bp, Homo sapien
tctctgttgaaattattctctggaa

SEQ ID NO: 875517 - DNA, 25 bp, Homo sapien
gcttcagtgttaagcaagtcaatca

SEQ ID NO: 875518 - DNA, 25 bp, Homo sapien
ttcttgtatgtagagcaatcttctc

SEQ ID NO: 875519 - DNA, 25 bp, Homo sapien
gacatttcttgatggtttttaccta

SEQ ID NO: 875520 - DNA, 25 bp, Homo sapien
ggagttgcctgtgacccactgagca

SEQ ID NO: 875521 - DNA, 25 bp, Homo sapien
tgccaaatcagtagaacccctaggg

SEQ ID NO: 875522 - DNA, 25 bp, Homo sapien
ccaactagctggatatgaagtgcca

SEQ ID NO: 875523 - DNA, 25 bp, Homo sapien
caatatcactaaagatgcggctggg

SEQ ID NO: 875524 - DNA, 25 bp, Homo sapien
gctttagaaatgcacggcaaaagaa

SEQ ID NO: 875525 - DNA, 25 bp, Homo sapien
cctgtggtccacactgtactaggca

SEQ ID NO: 875526 - DNA, 25 bp, Homo sapien
tgatgtgggaacactattgaacgac

SEQ ID NO: 875527 - DNA, 25 bp, Homo sapien
tgaacgacttttggcaactactaat

SEQ ID NO: 875528 - DNA, 25 bp, Homo sapien
tgctgtccaggcttcattcgagctc

SEQ ID NO: 875529 - DNA, 25 bp, Homo sapien
tattattcttgccaccatatcatgc

SEQ ID NO: 875530 - DNA, 25 bp, Homo sapien
ttcggctggaactatgagcatgtgc

SEQ ID NO: 875531 - DNA, 25 bp, Homo sapien
tgctctttccttccgttcatcagtc

SEQ ID NO: 875532 - DNA, 25 bp, Homo sapien
tgaggtggcattatctcggctccct

SEQ ID NO: 875533 - DNA, 25 bp, Homo sapien
gagtgaggtggcattatctcggctc

SEQ ID NO: 875534 - DNA, 25 bp, Homo sapien
taggctggagtgaggtggcattatc

SEQ ID NO: 875535 - DNA, 25 bp, Homo sapien
gaggtggcattatctcggctccctg

SEQ ID NO: 875536 - DNA, 25 bp, Homo sapien
accattattgagagactgtcttttt

SEQ ID NO: 875537 - DNA, 25 bp, Homo sapien
tgatctttccaatgcattgttcaac

SEQ ID NO: 875538 - DNA, 25 bp, Homo sapien
catcctgaggataaaccccaattgg

SEQ ID NO: 875539 - DNA, 25 bp, Homo sapien
gattgattattgaaccatcaatatc

SEQ ID NO: 875540 - DNA, 25 bp, Homo sapien
cattgttcaactcggtttgctagca

SEQ ID NO: 875541 - DNA, 25 bp, Homo sapien
taggactggtgttacttcttaaatg

SEQ ID NO: 875542 - DNA, 25 bp, Homo sapien
tatcagagtaactggccttgtagaa

SEQ ID NO: 875543 - DNA, 25 bp, Homo sapien
taaaattcatcagtgaagccacggg

SEQ ID NO: 875544 - DNA, 25 bp, Homo sapien
gaattagattagaagtattccctcc

SEQ ID NO: 875545 - DNA, 25 bp, Homo sapien
tcaaattctacactgacccactggt

SEQ ID NO: 875546 - DNA, 25 bp, Homo sapien
gctgtattccgtaagtttgatatgt

SEQ ID NO: 875547 - DNA, 25 bp, Homo sapien
taggcagttatagctataaaagtcc

SEQ ID NO: 875548 - DNA, 25 bp, Homo sapien
cagttatagctataaaagtccctct

SEQ ID NO: 875549 - DNA, 25 bp, Homo sapien
gctgtactcatcaaaccgtcatcca

SEQ ID NO: 875550 - DNA, 25 bp, Homo sapien
tgtactcatcaaaccgtcatccaca

SEQ ID NO: 875551 - DNA, 25 bp, Homo sapien
tgctgtactcatcaaaccgtcatcc

SEQ ID NO: 875552 - DNA, 25 bp, Homo sapien
tactcatcaaaccgtcatccacatt

SEQ ID NO: 875553 - DNA, 25 bp, Homo sapien
tagttctgctctgatgttagttttt

SEQ ID NO: 875554 - DNA, 25 bp, Homo sapien
gctcttacttctctacttcttttta

SEQ ID NO: 875555 - DNA, 25 bp, Homo sapien
cattgattttgtgaaggctttttca

SEQ ID NO: 875556 - DNA, 25 bp, Homo sapien
catgtctctatctccgttagttctg

SEQ ID NO: 875557 - DNA, 25 bp, Homo sapien
tgtagtactggcagcaaaagccttc

SEQ ID NO: 875558 - DNA, 25 bp, Homo sapien
tctggctatgggcacacagaaactt

SEQ ID NO: 875559 - DNA, 25 bp, Homo sapien
gaatctaaagatatggctcccatca

SEQ ID NO: 875560 - DNA, 25 bp, Homo sapien
gactggagtacctgtattaatcaca

SEQ ID NO: 875561 - DNA, 25 bp, Homo sapien
ctttctaaccctatcctacctgctc

SEQ ID NO: 875562 - DNA, 25 bp, Homo sapien
tgctagatgtattggttctccattc

SEQ ID NO: 875563 - DNA, 25 bp, Homo sapien
actttctaaccctatcctacctgct

SEQ ID NO: 875564 - DNA, 25 bp, Homo sapien
gctgctagatgtattggttctccat

SEQ ID NO: 875565 - DNA, 25 bp, Homo sapien
gatgctgatagatgttcttcagtat

SEQ ID NO: 875566 - DNA, 25 bp, Homo sapien
ggtattgatgctgatagatgttctt

SEQ ID NO: 875567 - DNA, 25 bp, Homo sapien
cttctctgcgttattctgaatttct

SEQ ID NO: 875568 - DNA, 25 bp, Homo sapien
ttggtattgatgctgatagatgttc

SEQ ID NO: 875569 - DNA, 25 bp, Homo sapien
acttccggtacaacaaatatatcag

SEQ ID NO: 875570 - DNA, 25 bp, Homo sapien
tggtacttccggtacaacaaatata

SEQ ID NO: 875571 - DNA, 25 bp, Homo sapien
tgtctttggtacttccggtacaaca

SEQ ID NO: 875572 - DNA, 25 bp, Homo sapien
agatgtctttggtacttccggtaca

SEQ ID NO: 875573 - DNA, 25 bp, Homo sapien
actggatttggcctagtttgtgcat

SEQ ID NO: 875574 - DNA, 25 bp, Homo sapien
gattcaaaggttctatatgccagaa

SEQ ID NO: 875575 - DNA, 25 bp, Homo sapien
tacgcaaacaattgtgcaatggtgc

SEQ ID NO: 875576 - DNA, 25 bp, Homo sapien
tagaaaaatagcctgcagaaaatgc

SEQ ID NO: 875577 - DNA, 25 bp, Homo sapien
ccccatgacaggcccggtttgtgat

SEQ ID NO: 875578 - DNA, 25 bp, Homo sapien
tgacaggcccggtttgtgatgttcc

SEQ ID NO: 875579 - DNA, 25 bp, Homo sapien
ccctccttctcccaccccatgacag

SEQ ID NO: 875580 - DNA, 25 bp, Homo sapien
tccctccttctcccaccccatgaca

SEQ ID NO: 875581 - DNA, 25 bp, Homo sapien
attaaggacatagacacccaagagg

SEQ ID NO: 875582 - DNA, 25 bp, Homo sapien
gatgaatgtaccttgggatcctggc

SEQ ID NO: 875583 - DNA, 25 bp, Homo sapien
cccgggtttgtagtctctcgctaag

SEQ ID NO: 875584 - DNA, 25 bp, Homo sapien
gctgagattcccaatatgaagcggg

SEQ ID NO: 875585 - DNA, 25 bp, Homo sapien
tgtgtacaataatatgtgcagttgg

SEQ ID NO: 875586 - DNA, 25 bp, Homo sapien
aaagccctcctttcgcattgctaaa

SEQ ID NO: 875587 - DNA, 25 bp, Homo sapien
tggtccaccagacctttcttgaagt

SEQ ID NO: 875588 - DNA, 25 bp, Homo sapien
tggcgtaagcaggaaatagtttgac

SEQ ID NO: 875589 - DNA, 25 bp, Homo sapien
tgaactgaggcttttagtggagcga

SEQ ID NO: 875590 - DNA, 25 bp, Homo sapien
gcgatgcagtcaactaatcctggag

SEQ ID NO: 875591 - DNA, 25 bp, Homo sapien
ggcactgaggaagtcttccataccc

SEQ ID NO: 875592 - DNA, 25 bp, Homo sapien
actaatcctggagacttggcactga

SEQ ID NO: 875593 - DNA, 25 bp, Homo sapien
gctcccgagcatctagttcattaca

SEQ ID NO: 875594 - DNA, 25 bp, Homo sapien
agccggctcccgagcatctagttca

SEQ ID NO: 875595 - DNA, 25 bp, Homo sapien
ccggctcccgagcatctagttcatt

SEQ ID NO: 875596 - DNA, 25 bp, Homo sapien
cggctcccgagcatctagttcatta

SEQ ID NO: 875597 - DNA, 25 bp, Homo sapien
tatcattagtcaacttcacaactat

SEQ ID NO: 875598 - DNA, 25 bp, Homo sapien
cattagtcaacttcacaactattac

SEQ ID NO: 875599 - DNA, 25 bp, Homo sapien
tagtcaacttcacaactattaccat

SEQ ID NO: 875600 - DNA, 25 bp, Homo sapien
ttagtcaacttcacaactattacca

SEQ ID NO: 875601 - DNA, 25 bp, Homo sapien
caaatagtcaattcatgctttgtac

SEQ ID NO: 875602 - DNA, 25 bp, Homo sapien
tcagcccctaatgcccaatttgaag

SEQ ID NO: 875603 - DNA, 25 bp, Homo sapien
aacactcagaccaacatcagcacaa

SEQ ID NO: 875604 - DNA, 25 bp, Homo sapien
gaagatgattttagacatactcaac

SEQ ID NO: 875605 - DNA, 25 bp, Homo sapien
ctatgatggaggccctatattgtct

SEQ ID NO: 875606 - DNA, 25 bp, Homo sapien
tgatggaggccctatattgtctatg

SEQ ID NO: 875607 - DNA, 25 bp, Homo sapien
gaacgcatctaaattacactgtttt

SEQ ID NO: 875608 - DNA, 25 bp, Homo sapien
tatattgtctatgaacgcatctaaa

SEQ ID NO: 875609 - DNA, 25 bp, Homo sapien
agcagctcctaagaacacggactgt

SEQ ID NO: 875610 - DNA, 25 bp, Homo sapien
taagaacacggactgtgcagtgact

SEQ ID NO: 875611 - DNA, 25 bp, Homo sapien
tatgactgccctttggatttggaag

SEQ ID NO: 875612 - DNA, 25 bp, Homo sapien
tagcgagggtatgactgccctttgg

SEQ ID NO: 875613 - DNA, 25 bp, Homo sapien
tgatgatgccagagtggaagaccct

SEQ ID NO: 875614 - DNA, 25 bp, Homo sapien
gtggaagaccctcctactgcagcat

SEQ ID NO: 875615 - DNA, 25 bp, Homo sapien
ttccaatccccttttgatgatgcca

SEQ ID NO: 875616 - DNA, 25 bp, Homo sapien
gaagaccctcctactgcagcatttt

SEQ ID NO: 875617 - DNA, 25 bp, Homo sapien
tattccggcagaaaggacatgtgca

SEQ ID NO: 875618 - DNA, 25 bp, Homo sapien
tataattgggagaatgacgccatca

SEQ ID NO: 875619 - DNA, 25 bp, Homo sapien
taagtgcgactgatatttggcccaa

SEQ ID NO: 875620 - DNA, 25 bp, Homo sapien
caataaacgataaggacggtagcct

SEQ ID NO: 875621 - DNA, 25 bp, Homo sapien
catactatgatatcgaatagcattt

SEQ ID NO: 875622 - DNA, 25 bp, Homo sapien
aatccatactatgatatcgaatagc

SEQ ID NO: 875623 - DNA, 25 bp, Homo sapien
catcattgtgcctcaggaaatttgc

SEQ ID NO: 875624 - DNA, 25 bp, Homo sapien
acacttcgagcatcatcattgtgcc

SEQ ID NO: 875625 - DNA, 25 bp, Homo sapien
tctccgtttctgtttagatccatgg

SEQ ID NO: 875626 - DNA, 25 bp, Homo sapien
tcttaacaacatcctcagtgctctt

SEQ ID NO: 875627 - DNA, 25 bp, Homo sapien
ttttctccgtttctgtttagatcca

SEQ ID NO: 875628 - DNA, 25 bp, Homo sapien
ggttcctaagattaaggattcattc

SEQ ID NO: 875629 - DNA, 25 bp, Homo sapien
ggattctgcttgcaaaatttcccag

SEQ ID NO: 875630 - DNA, 25 bp, Homo sapien
taacaccagaatgccgctagagtgg

SEQ ID NO: 875631 - DNA, 25 bp, Homo sapien
gctagagtggcaaatccctgaatcc

SEQ ID NO: 875632 - DNA, 25 bp, Homo sapien
cacagatccatagtgcatgtggctg

SEQ ID NO: 875633 - DNA, 25 bp, Homo sapien
tcatacacatacaagccctcacaga

SEQ ID NO: 875634 - DNA, 25 bp, Homo sapien
agaatcatacacatacaagccctca

SEQ ID NO: 875635 - DNA, 25 bp, Homo sapien
cacatacaagccctcacagatgtac

SEQ ID NO: 875636 - DNA, 25 bp, Homo sapien
atacaagccctcacagatgtacaca

SEQ ID NO: 875637 - DNA, 25 bp, Homo sapien
cacagatgcatcctttcggtctttt

SEQ ID NO: 875638 - DNA, 25 bp, Homo sapien
atcagacataataggttcctggttc

SEQ ID NO: 875639 - DNA, 25 bp, Homo sapien
gcatcctttcggtcttttatcacat

SEQ ID NO: 875640 - DNA, 25 bp, Homo sapien
gacataataggttcctggttcacag

SEQ ID NO: 875641 - DNA, 25 bp, Homo sapien
caatggtagtaataaggttccatga

SEQ ID NO: 875642 - DNA, 25 bp, Homo sapien
taaggttccatgaaccatagtgatt

SEQ ID NO: 875643 - DNA, 25 bp, Homo sapien
tccatgaaccatagtgattcatagg

SEQ ID NO: 875644 - DNA, 25 bp, Homo sapien
ctcaatggtagtaataaggttccat

SEQ ID NO: 875645 - DNA, 25 bp, Homo sapien
cattcctttgtggacaagtttttgg

SEQ ID NO: 875646 - DNA, 25 bp, Homo sapien
ggaatattgcgggtgtcagctttga

SEQ ID NO: 875647 - DNA, 25 bp, Homo sapien
aagctcatgggaatattgcgggtgt

SEQ ID NO: 875648 - DNA, 25 bp, Homo sapien
ggaattcattcctttgtggacaagt

SEQ ID NO: 875649 - DNA, 25 bp, Homo sapien
ttctatttgcatcttggctccggtc

SEQ ID NO: 875650 - DNA, 25 bp, Homo sapien
attgcttctatttgcatcttggctc

SEQ ID NO: 875651 - DNA, 25 bp, Homo sapien
ctatttgcatcttggctccggtcat

SEQ ID NO: 875652 - DNA, 25 bp, Homo sapien
gcttctatttgcatcttggctccgg

SEQ ID NO: 875653 - DNA, 25 bp, Homo sapien
tcaatgaggccagctctcaaaacct

SEQ ID NO: 875654 - DNA, 25 bp, Homo sapien
tagccatctgccctcccatatggga

SEQ ID NO: 875655 - DNA, 25 bp, Homo sapien
tcagggcaattaggttcaatgaggc

SEQ ID NO: 875656 - DNA, 25 bp, Homo sapien
aactccaaggtagaccacttcaggg

SEQ ID NO: 875657 - DNA, 25 bp, Homo sapien
tcttcatgagaatttcatagtttgt

SEQ ID NO: 875658 - DNA, 25 bp, Homo sapien
tcatagtttgtatatggatcttcaa

SEQ ID NO: 875659 - DNA, 25 bp, Homo sapien
tcagttggaggagtagtctgattct

SEQ ID NO: 875660 - DNA, 25 bp, Homo sapien
atcttcaagcgtaggtggatcatga

SEQ ID NO: 875661 - DNA, 25 bp, Homo sapien
tttgtaatctctggcgtacaagtaa

SEQ ID NO: 875662 - DNA, 25 bp, Homo sapien
ctggcgtttgtgtaaacactttgta

SEQ ID NO: 875663 - DNA, 25 bp, Homo sapien
caccagagaatgtagtggaatacat

SEQ ID NO: 875664 - DNA, 25 bp, Homo sapien
ggcgtacaagtaatacaccagagaa

SEQ ID NO: 875665 - DNA, 25 bp, Homo sapien
tcagtttgctaccttttcctgacta

SEQ ID NO: 875666 - DNA, 25 bp, Homo sapien
gtttgctaccttttcctgactacag

SEQ ID NO: 875667 - DNA, 25 bp, Homo sapien
ttcttgtagtgattgcaattctttt

SEQ ID NO: 875668 - DNA, 25 bp, Homo sapien
tcttgtagtgattgcaattcttttt

SEQ ID NO: 875669 - DNA, 25 bp, Homo sapien
gaaccattcacatcatactttatct

SEQ ID NO: 875670 - DNA, 25 bp, Homo sapien
aacagaaccattcacatcatacttt

SEQ ID NO: 875671 - DNA, 25 bp, Homo sapien
ttgtcaaaatatcctccaaaacaga

SEQ ID NO: 875672 - DNA, 25 bp, Homo sapien
tttgtcaaaatatcctccaaaacag

SEQ ID NO: 875673 - DNA, 25 bp, Homo sapien
ttaattaagctctggatatggattg

SEQ ID NO: 875674 - DNA, 25 bp, Homo sapien
attaagctctggatatggattgcca

SEQ ID NO: 875675 - DNA, 25 bp, Homo sapien
ttaagctctggatatggattgccat

SEQ ID NO: 875676 - DNA, 25 bp, Homo sapien
aattaagctctggatatggattgcc

SEQ ID NO: 875677 - DNA, 25 bp, Homo sapien
catgtttgagagtaatagggttccc

SEQ ID NO: 875678 - DNA, 25 bp, Homo sapien
cacttcagagtgcatgacatgtttg

SEQ ID NO: 875679 - DNA, 25 bp, Homo sapien
gtcaaaccaattcccttcttgcctg

SEQ ID NO: 875680 - DNA, 25 bp, Homo sapien
tgcctgcttggagcaaagtcaaacc

SEQ ID NO: 875681 - DNA, 25 bp, Homo sapien
aaacaagagacccaacattcttcat

SEQ ID NO: 875682 - DNA, 25 bp, Homo sapien
cctttatgccaaatgtatacaggtg

SEQ ID NO: 875683 - DNA, 25 bp, Homo sapien
tgccaaatgtatacaggtgagtcat

SEQ ID NO: 875684 - DNA, 25 bp, Homo sapien
tatgccaaatgtatacaggtgagtc

SEQ ID NO: 875685 - DNA, 25 bp, Homo sapien
ttcctttatgccaaatgtatacagg

SEQ ID NO: 875686 - DNA, 25 bp, Homo sapien
taatatctctgacaggtttatttct

SEQ ID NO: 875687 - DNA, 25 bp, Homo sapien
tcctgtaatatctctgacaggttta

SEQ ID NO: 875688 - DNA, 25 bp, Homo sapien
tgtaatatctctgacaggtttattt

SEQ ID NO: 875689 - DNA, 25 bp, Homo sapien
tatctctgacaggtttatttctatt

SEQ ID NO: 875690 - DNA, 25 bp, Homo sapien
cattggcatccctgacacactatgg

SEQ ID NO: 875691 - DNA, 25 bp, Homo sapien
catgaaaattataggctctctgctc

SEQ ID NO: 875692 - DNA, 25 bp, Homo sapien
gcatcttctcgtgcagcgccattgg

SEQ ID NO: 875693 - DNA, 25 bp, Homo sapien
tacccgtggcaaatgccatggcagc

SEQ ID NO: 875694 - DNA, 25 bp, Homo sapien
gagtacatagtggacgccaccagtt

SEQ ID NO: 875695 - DNA, 25 bp, Homo sapien
gtacatagtggacgccaccagtttc

SEQ ID NO: 875696 - DNA, 25 bp, Homo sapien
ctgagtacatagtggacgccaccag

SEQ ID NO: 875697 - DNA, 25 bp, Homo sapien
catagtggacgccaccagtttcttc

SEQ ID NO: 875698 - DNA, 25 bp, Homo sapien
gaaccatgagaagtaggataagagc

SEQ ID NO: 875699 - DNA, 25 bp, Homo sapien
ccccatgttcgttgtggttatgaac

SEQ ID NO: 875700 - DNA, 25 bp, Homo sapien
tcgttgtggttatgaaccatgagaa

SEQ ID NO: 875701 - DNA, 25 bp, Homo sapien
aagagcctcgaggttgtcagcaatg

SEQ ID NO: 875702 - DNA, 25 bp, Homo sapien
accaactgcttaatgcctctggcca

SEQ ID NO: 875703 - DNA, 25 bp, Homo sapien
tgtgggctaatcagaacatcatccc

SEQ ID NO: 875704 - DNA, 25 bp, Homo sapien
caacgtgtcggtcgtggacctgact

SEQ ID NO: 875705 - DNA, 25 bp, Homo sapien
gcatctactggagctaccaaaggtg

SEQ ID NO: 875706 - DNA, 25 bp, Homo sapien
tccaccttcgattctagggctggca

SEQ ID NO: 875707 - DNA, 25 bp, Homo sapien
caccttcgattctagggctggcatt

SEQ ID NO: 875708 - DNA, 25 bp, Homo sapien
caagctcatttcctgatatgacaat

SEQ ID NO: 875709 - DNA, 25 bp, Homo sapien
tcttccaccttcgattctagggctg

SEQ ID NO: 875710 - DNA, 25 bp, Homo sapien
ccccaacgagagtgcaagaggaaga

SEQ ID NO: 875711 - DNA, 25 bp, Homo sapien
ccaacgagagtgcaagaggaagaga

SEQ ID NO: 875712 - DNA, 25 bp, Homo sapien
caccaaccccaacgagagtgcaaga

SEQ ID NO: 875713 - DNA, 25 bp, Homo sapien
caaccccaacgagagtgcaagagga

SEQ ID NO: 875714 - DNA, 25 bp, Homo sapien
tcccaattgaaggacttctaaacat

SEQ ID NO: 875715 - DNA, 25 bp, Homo sapien
ttcccaattgaaggacttctaaaca

SEQ ID NO: 875716 - DNA, 25 bp, Homo sapien
aactctcgcgattttgtgctttgca

SEQ ID NO: 875717 - DNA, 25 bp, Homo sapien
tggcaagcttttgaactctcgcgat

SEQ ID NO: 875718 - DNA, 25 bp, Homo sapien
gcgattttgtgctttgcatcattca

SEQ ID NO: 875719 - DNA, 25 bp, Homo sapien
cttttgaactctcgcgattttgtgc

SEQ ID NO: 875720 - DNA, 25 bp, Homo sapien
tgcattcccctcttgctcagacagg

SEQ ID NO: 875721 - DNA, 25 bp, Homo sapien
caaagcctctttaaccttcatttca

SEQ ID NO: 875722 - DNA, 25 bp, Homo sapien
gctttccccaggctgatagctctgg

SEQ ID NO: 875723 - DNA, 25 bp, Homo sapien
tcagacatggtgtccatatctcccc

SEQ ID NO: 875724 - DNA, 25 bp, Homo sapien
tctcctacttggcagcttatcagct

SEQ ID NO: 875725 - DNA, 25 bp, Homo sapien
cagcttatcagctgctgctactttt

SEQ ID NO: 875726 - DNA, 25 bp, Homo sapien
caatcaactttcctattccccaaat

SEQ ID NO: 875727 - DNA, 25 bp, Homo sapien
tttgaacatgtcttgcaagatcctg

SEQ ID NO: 875728 - DNA, 25 bp, Homo sapien
tttgtgatgcccgttgtctgctccc

SEQ ID NO: 875729 - DNA, 25 bp, Homo sapien
gatgcccgttgtctgctcccaagac

SEQ ID NO: 875730 - DNA, 25 bp, Homo sapien
gttgtctgctcccaagactctccag

SEQ ID NO: 875731 - DNA, 25 bp, Homo sapien
taacattttgtgatgcccgttgtct

SEQ ID NO: 875732 - DNA, 25 bp, Homo sapien
tatttacctagaccgatgtcctggt

SEQ ID NO: 875733 - DNA, 25 bp, Homo sapien
tttgcagtcaggtagggtaaagtgc

SEQ ID NO: 875734 - DNA, 25 bp, Homo sapien
aatcttctgatccatgggcatgaga

SEQ ID NO: 875735 - DNA, 25 bp, Homo sapien
ggtaaagtgctttggctattaaggc

SEQ ID NO: 875736 - DNA, 25 bp, Homo sapien
ccgcaacatggcctttgtctgacat

SEQ ID NO: 875737 - DNA, 25 bp, Homo sapien
tccgcaacatggcctttgtctgaca

SEQ ID NO: 875738 - DNA, 25 bp, Homo sapien
tgtttcaaatacaagctgagatatt

SEQ ID NO: 875739 - DNA, 25 bp, Homo sapien
gtccactctaaatttgttctgctga

SEQ ID NO: 875740 - DNA, 25 bp, Homo sapien
caagctgagatattaggtaagtcat

SEQ ID NO: 875741 - DNA, 25 bp, Homo sapien
cactctaaatttgttctgctgacaa

SEQ ID NO: 875742 - DNA, 25 bp, Homo sapien
cagatggatgggtgcactgaagtcg

SEQ ID NO: 875743 - DNA, 25 bp, Homo sapien
ctgagaggatatgggtcaactgctg

SEQ ID NO: 875744 - DNA, 25 bp, Homo sapien
aatgaccatggatggtgtgttgctg

SEQ ID NO: 875745 - DNA, 25 bp, Homo sapien
tgacagggaatggttgccctgctga

SEQ ID NO: 875746 - DNA, 25 bp, Homo sapien
cgttgctgacgaggtggatgagtgc

SEQ ID NO: 875747 - DNA, 25 bp, Homo sapien
ggaagggtacgttgctgacgaggtg

SEQ ID NO: 875748 - DNA, 25 bp, Homo sapien
gaagaggaagggtacgttgctgacg

SEQ ID NO: 875749 - DNA, 25 bp, Homo sapien
ctggaagaggaagggtacgttgctg

SEQ ID NO: 875750 - DNA, 25 bp, Homo sapien
tgctgatactaaattccccctgaag

SEQ ID NO: 875751 - DNA, 25 bp, Homo sapien
gaaaggctggacttggtaagggaga

SEQ ID NO: 875752 - DNA, 25 bp, Homo sapien
gctgatggtttgactgttaactgga

SEQ ID NO: 875753 - DNA, 25 bp, Homo sapien
taggtggtaggtgcaactgctgata

SEQ ID NO: 875754 - DNA, 25 bp, Homo sapien
agaggtggacgcagagatgggctca

SEQ ID NO: 875755 - DNA, 25 bp, Homo sapien
acgagaggtggacgcagagatgggc

SEQ ID NO: 875756 - DNA, 25 bp, Homo sapien
catacgagaggtggacgcagagatg

SEQ ID NO: 875757 - DNA, 25 bp, Homo sapien
aggtggacgcagagatgggctcatt

SEQ ID NO: 875758 - DNA, 25 bp, Homo sapien
tactccatgatatgacagaaaattg

SEQ ID NO: 875759 - DNA, 25 bp, Homo sapien
tattggtacccaaattcatcacacc

SEQ ID NO: 875760 - DNA, 25 bp, Homo sapien
cctaaggtgtcattctaatatcaaa

SEQ ID NO: 875761 - DNA, 25 bp, Homo sapien
tgttctctaaaggaaactattgaag

SEQ ID NO: 875762 - DNA, 25 bp, Homo sapien
tgatggccagaggtattgcgactga

SEQ ID NO: 875763 - DNA, 25 bp, Homo sapien
gagctttgctttgactcagttattg

SEQ ID NO: 875764 - DNA, 25 bp, Homo sapien
gttcttatcctcgttgtcatcatca

SEQ ID NO: 875765 - DNA, 25 bp, Homo sapien
cagttattgctgaaattgactgcag

SEQ ID NO: 875766 - DNA, 25 bp, Homo sapien
tgtaatgcagagtagcaacttcttc

SEQ ID NO: 875767 - DNA, 25 bp, Homo sapien
tatccttgtaatgcagagtagcaac

SEQ ID NO: 875768 - DNA, 25 bp, Homo sapien
tccttgtaatgcagagtagcaactt

SEQ ID NO: 875769 - DNA, 25 bp, Homo sapien
cttgtaatgcagagtagcaacttct

SEQ ID NO: 875770 - DNA, 25 bp, Homo sapien
tccttctccccactaccattgggac

SEQ ID NO: 875771 - DNA, 25 bp, Homo sapien
gaaagagtactcattgggtccctcc

SEQ ID NO: 875772 - DNA, 25 bp, Homo sapien
tccctgaaagagtactcattgggtc

SEQ ID NO: 875773 - DNA, 25 bp, Homo sapien
tgtgcttccctgaaagagtactcat

SEQ ID NO: 875774 - DNA, 25 bp, Homo sapien
aactccattttatcctcactgtctc

SEQ ID NO: 875775 - DNA, 25 bp, Homo sapien
ctgagtcaatgactgtttcctgctg

SEQ ID NO: 875776 - DNA, 25 bp, Homo sapien
tgagtcaatgactgtttcctgctgc

SEQ ID NO: 875777 - DNA, 25 bp, Homo sapien
gagtcaatgactgtttcctgctgca

SEQ ID NO: 875778 - DNA, 25 bp, Homo sapien
agtcaatgactgtttcctgctgcat

SEQ ID NO: 875779 - DNA, 25 bp, Homo sapien
gcagctgtgcacataaggattggta

SEQ ID NO: 875780 - DNA, 25 bp, Homo sapien
taaggattggtagtttctgtgttgg

SEQ ID NO: 875781 - DNA, 25 bp, Homo sapien
ttcagagattcccaaatagcagctg

SEQ ID NO: 875782 - DNA, 25 bp, Homo sapien
caaatagcagctgtgcacataagga

SEQ ID NO: 875783 - DNA, 25 bp, Homo sapien
caataggggatttaacgtcaagagt

SEQ ID NO: 875784 - DNA, 25 bp, Homo sapien
ttaacgtcaagagtatgtctgttga

SEQ ID NO: 875785 - DNA, 25 bp, Homo sapien
gggatttaacgtcaagagtatgtct

SEQ ID NO: 875786 - DNA, 25 bp, Homo sapien
gctacaataggggatttaacgtcaa

SEQ ID NO: 875787 - DNA, 25 bp, Homo sapien
tggcatctcagggtcgcatccggtg

SEQ ID NO: 875788 - DNA, 25 bp, Homo sapien
tcagggtcgcatccggtgtgacact

SEQ ID NO: 875789 - DNA, 25 bp, Homo sapien
gcatccggtgtgacactgagctttc

SEQ ID NO: 875790 - DNA, 25 bp, Homo sapien
ccataggactggcatctcagggtcg

SEQ ID NO: 875791 - DNA, 25 bp, Homo sapien
ctccatgaagatttagcaaagcctt

SEQ ID NO: 875792 - DNA, 25 bp, Homo sapien
ccatgaagatttagcaaagccttcc

SEQ ID NO: 875793 - DNA, 25 bp, Homo sapien
catgaagatttagcaaagccttcct

SEQ ID NO: 875794 - DNA, 25 bp, Homo sapien
tgaagatttagcaaagccttcctct

SEQ ID NO: 875795 - DNA, 25 bp, Homo sapien
cctaccatagtaactgtatccgcat

SEQ ID NO: 875796 - DNA, 25 bp, Homo sapien
cctctgttgagcttatcaacggatc

SEQ ID NO: 875797 - DNA, 25 bp, Homo sapien
tgtgttatcaactgctgtgtatttc

SEQ ID NO: 875798 - DNA, 25 bp, Homo sapien
cagcctcgctttcattcaatttcag

SEQ ID NO: 875799 - DNA, 25 bp, Homo sapien
agatctgataaaaagtctcaacctc

SEQ ID NO: 875800 - DNA, 25 bp, Homo sapien
ctcttctgtacagatctgataaaaa

SEQ ID NO: 875801 - DNA, 25 bp, Homo sapien
tctcttctgtacagatctgataaaa

SEQ ID NO: 875802 - DNA, 25 bp, Homo sapien
ggtcttgatgataacacaaactgat

SEQ ID NO: 875803 - DNA, 25 bp, Homo sapien
gtcttgatgataacacaaactgatt

SEQ ID NO: 875804 - DNA, 25 bp, Homo sapien
ttcttttgtcaaaactggaaatcag

SEQ ID NO: 875805 - DNA, 25 bp, Homo sapien
ctggaaatcaggctacactttcctt

SEQ ID NO: 875806 - DNA, 25 bp, Homo sapien
tcaaaactggaaatcaggctacact

SEQ ID NO: 875807 - DNA, 25 bp, Homo sapien
aaaactggaaatcaggctacacttt

SEQ ID NO: 875808 - DNA, 25 bp, Homo sapien
ttattatgtgagcatagagcctcat

SEQ ID NO: 875809 - DNA, 25 bp, Homo sapien
ggatacattttctcagtgtcatgac

SEQ ID NO: 875810 - DNA, 25 bp, Homo sapien
tctgaactaagtagtagaattatta

SEQ ID NO: 875811 - DNA, 25 bp, Homo sapien
aagtagtagaattattatgtgagca

SEQ ID NO: 875812 - DNA, 25 bp, Homo sapien
gtggatacaaagcattgcaatatga

SEQ ID NO: 875813 - DNA, 25 bp, Homo sapien
tcttgaagtggaatataattgcacc

SEQ ID NO: 875814 - DNA, 25 bp, Homo sapien
catgggcttagtggttatctgtaca

SEQ ID NO: 875815 - DNA, 25 bp, Homo sapien
acattctcagcaagactaggtatta

SEQ ID NO: 875816 - DNA, 25 bp, Homo sapien
aagtgagtttcttgtgtagagcaca

SEQ ID NO: 875817 - DNA, 25 bp, Homo sapien
ttctccagtaggctgaaatgtgttt

SEQ ID NO: 875818 - DNA, 25 bp, Homo sapien
tgctctgatgcctatttgtctggta

SEQ ID NO: 875819 - DNA, 25 bp, Homo sapien
tatgctattgccttgactgtatgga

SEQ ID NO: 875820 - DNA, 25 bp, Homo sapien
caactgtgtgatccttggtggtgag

SEQ ID NO: 875821 - DNA, 25 bp, Homo sapien
acaactgaaatctgggatgtcaaca

SEQ ID NO: 875822 - DNA, 25 bp, Homo sapien
gtccacagtggccataagggctctt

SEQ ID NO: 875823 - DNA, 25 bp, Homo sapien
caacaacttgggttcagcagcaagg

SEQ ID NO: 875824 - DNA, 25 bp, Homo sapien
agcacatgcgtagcagcagagtgcc

SEQ ID NO: 875825 - DNA, 25 bp, Homo sapien
gacagcacatgcgtagcagcagagt

SEQ ID NO: 875826 - DNA, 25 bp, Homo sapien
catgcgtagcagcagagtgccagct

SEQ ID NO: 875827 - DNA, 25 bp, Homo sapien
ggctgacagcacatgcgtagcagca

SEQ ID NO: 875828 - DNA, 25 bp, Homo sapien
caatccatagctgtcattcacacac

SEQ ID NO: 875829 - DNA, 25 bp, Homo sapien
gccaatccatagctgtcattcacac

SEQ ID NO: 875830 - DNA, 25 bp, Homo sapien
ccaatccatagctgtcattcacaca

SEQ ID NO: 875831 - DNA, 25 bp, Homo sapien
taacagaaattcgtttatcccatct

SEQ ID NO: 875832 - DNA, 25 bp, Homo sapien
gaaattcgtttatcccatctgcctt

SEQ ID NO: 875833 - DNA, 25 bp, Homo sapien
tgatcatgaacagtgacagatccca

SEQ ID NO: 875834 - DNA, 25 bp, Homo sapien
ctttaatgatcatgaacagtgacag

SEQ ID NO: 875835 - DNA, 25 bp, Homo sapien
taagaatcctgtgtacggcacgcta

SEQ ID NO: 875836 - DNA, 25 bp, Homo sapien
gatgagcagataagaatcctgtgta

SEQ ID NO: 875837 - DNA, 25 bp, Homo sapien
tcctgtgtacggcacgctattatca

SEQ ID NO: 875838 - DNA, 25 bp, Homo sapien
cggcacgctattatcagcaaccaca

SEQ ID NO: 875839 - DNA, 25 bp, Homo sapien
gcatttttatagcaaggctgttcat

SEQ ID NO: 875840 - DNA, 25 bp, Homo sapien
ggacataaaggtcaccccagatagc

SEQ ID NO: 875841 - DNA, 25 bp, Homo sapien
taagaactgaggatataagggctga

SEQ ID NO: 875842 - DNA, 25 bp, Homo sapien
tcagactggtaagaactgaggatat

SEQ ID NO: 875843 - DNA, 25 bp, Homo sapien
acataaaggtcaccccagatagcca

SEQ ID NO: 875844 - DNA, 25 bp, Homo sapien
tttctttcttttttctcctgtatca

SEQ ID NO: 875845 - DNA, 25 bp, Homo sapien
ttctttcttttttctcctgtatcat

SEQ ID NO: 875846 - DNA, 25 bp, Homo sapien
gcatcgtctcaatgtctcaatgtta

SEQ ID NO: 875847 - DNA, 25 bp, Homo sapien
gtctcaatgtctcaatgttacaagc

SEQ ID NO: 875848 - DNA, 25 bp, Homo sapien
gttgccaaaatcaggcatcgtctca

SEQ ID NO: 875849 - DNA, 25 bp, Homo sapien
aatcaggcatcgtctcaatgtctca

SEQ ID NO: 875850 - DNA, 25 bp, Homo sapien
gcattttcagtttctatgatgttta

SEQ ID NO: 875851 - DNA, 25 bp, Homo sapien
tttcagtttctatgatgtttaacat

SEQ ID NO: 875852 - DNA, 25 bp, Homo sapien
gaagcattttcagtttctatgatgt

SEQ ID NO: 875853 - DNA, 25 bp, Homo sapien
ctgaagcattttcagtttctatgat

SEQ ID NO: 875854 - DNA, 25 bp, Homo sapien
tagtaataagtgttctcctgaaaga

SEQ ID NO: 875855 - DNA, 25 bp, Homo sapien
cagttcaagtccagaggtgtaataa

SEQ ID NO: 875856 - DNA, 25 bp, Homo sapien
caatcagcaatctggagaccaaaga

SEQ ID NO: 875857 - DNA, 25 bp, Homo sapien
caagaggtttaactaattggcgaag

SEQ ID NO: 875858 - DNA, 25 bp, Homo sapien
tagccacaacctaccagaatgcact

SEQ ID NO: 875859 - DNA, 25 bp, Homo sapien
tctgttatatgcttcagcagaccat

SEQ ID NO: 875860 - DNA, 25 bp, Homo sapien
gaactgtaggcattatattgaactg

SEQ ID NO: 875861 - DNA, 25 bp, Homo sapien
gataattgtcgttcctaccccataa

SEQ ID NO: 875862 - DNA, 25 bp, Homo sapien
tggtatcacgtgcaaataaagagct

SEQ ID NO: 875863 - DNA, 25 bp, Homo sapien
caataaatcagcaggaaggaccaga

SEQ ID NO: 875864 - DNA, 25 bp, Homo sapien
gggatttatcaccagcatactcaca

SEQ ID NO: 875865 - DNA, 25 bp, Homo sapien
cacaaaaatgagcaccagaaatggc

SEQ ID NO: 875866 - DNA, 25 bp, Homo sapien
attgtagttgacttgcatatcagac

SEQ ID NO: 875867 - DNA, 25 bp, Homo sapien
taatacacagaattgtagttgactt

SEQ ID NO: 875868 - DNA, 25 bp, Homo sapien
gacttgcatatcagacccattttct

SEQ ID NO: 875869 - DNA, 25 bp, Homo sapien
tacacagaattgtagttgacttgca

SEQ ID NO: 875870 - DNA, 25 bp, Homo sapien
gtagataaatgctaacccagtaata

SEQ ID NO: 875871 - DNA, 25 bp, Homo sapien
taaatgctaacccagtaatactgat

SEQ ID NO: 875872 - DNA, 25 bp, Homo sapien
aatactgataatctccttcaaatac

SEQ ID NO: 875873 - DNA, 25 bp, Homo sapien
taacccagtaatactgataatctcc

SEQ ID NO: 875874 - DNA, 25 bp, Homo sapien
gctctccaaactttgcatcctactt

SEQ ID NO: 875875 - DNA, 25 bp, Homo sapien
gtgatgtcgtcctctagaaaatgaa

SEQ ID NO: 875876 - DNA, 25 bp, Homo sapien
ccaaactttgcatcctactttcatc

SEQ ID NO: 875877 - DNA, 25 bp, Homo sapien
ctttcatcattatctgtgatgtcgt

SEQ ID NO: 875878 - DNA, 25 bp, Homo sapien
aatacagggatgggccaccatgctc

SEQ ID NO: 875879 - DNA, 25 bp, Homo sapien
tattagtaccgtgttggattcttag

SEQ ID NO: 875880 - DNA, 25 bp, Homo sapien
tatttggctatgtggaagtttttca

SEQ ID NO: 875881 - DNA, 25 bp, Homo sapien
tagatcaattgtccagagtttttcc

SEQ ID NO: 875882 - DNA, 25 bp, Homo sapien
tcttcggaggatcccaagtttgcca

SEQ ID NO: 875883 - DNA, 25 bp, Homo sapien
gaggatcccaagtttgccagagcca

SEQ ID NO: 875884 - DNA, 25 bp, Homo sapien
tggactcttcggaggatcccaagtt

SEQ ID NO: 875885 - DNA, 25 bp, Homo sapien
cggaggatcccaagtttgccagagc

SEQ ID NO: 875886 - DNA, 25 bp, Homo sapien
tcagcagcccaactgaagaagcagc

SEQ ID NO: 875887 - DNA, 25 bp, Homo sapien
cgcttagagctccacttcaccttta

SEQ ID NO: 875888 - DNA, 25 bp, Homo sapien
tagagctccacttcacctttacagc

SEQ ID NO: 875889 - DNA, 25 bp, Homo sapien
tatgaaacgaggtcccgcttagagc

SEQ ID NO: 875890 - DNA, 25 bp, Homo sapien
actttgtactcagccatgctgtttg

SEQ ID NO: 875891 - DNA, 25 bp, Homo sapien
ctcagccatgctgtttgcctttaca

SEQ ID NO: 875892 - DNA, 25 bp, Homo sapien
ttgaatgtactttgtactcagccat

SEQ ID NO: 875893 - DNA, 25 bp, Homo sapien
cagccatgctgtttgcctttacagt

SEQ ID NO: 875894 - DNA, 25 bp, Homo sapien
tagatgtgctttaccaggctgagga

SEQ ID NO: 875895 - DNA, 25 bp, Homo sapien
aacatttaacctagcatccttggga

SEQ ID NO: 875896 - DNA, 25 bp, Homo sapien
taagttgtctggaatatgtaatacc

SEQ ID NO: 875897 - DNA, 25 bp, Homo sapien
tgaggaagatcctttctatttctac

SEQ ID NO: 875898 - DNA, 25 bp, Homo sapien
gttgactgcttcttccatgcacatc

SEQ ID NO: 875899 - DNA, 25 bp, Homo sapien
tctcccattcgtctcttttctgtga

SEQ ID NO: 875900 - DNA, 25 bp, Homo sapien
ttctctcccattcgtctcttttctg

SEQ ID NO: 875901 - DNA, 25 bp, Homo sapien
cttcaattgctttagttgactgctt

SEQ ID NO: 875902 - DNA, 25 bp, Homo sapien
aaaggcctcaaagcgttcacttctg

SEQ ID NO: 875903 - DNA, 25 bp, Homo sapien
gaggaaatggggctgtcccagttcc

SEQ ID NO: 875904 - DNA, 25 bp, Homo sapien
tctgggaaccttgagggaacatgca

SEQ ID NO: 875905 - DNA, 25 bp, Homo sapien
ctcaaagcgttcacttctgtgcctc

SEQ ID NO: 875906 - DNA, 25 bp, Homo sapien
tctgatgaatcaagcacggagaaat

SEQ ID NO: 875907 - DNA, 25 bp, Homo sapien
taccatatctgatgaatcaagcacg

SEQ ID NO: 875908 - DNA, 25 bp, Homo sapien
gaatcaagcacggagaaataatctc

SEQ ID NO: 875909 - DNA, 25 bp, Homo sapien
caagcacggagaaataatctcatag

SEQ ID NO: 875910 - DNA, 25 bp, Homo sapien
aaacaagtgggctggaatcagcccc

SEQ ID NO: 875911 - DNA, 25 bp, Homo sapien
gaaaccgaccctcagcatgcatgtc

SEQ ID NO: 875912 - DNA, 25 bp, Homo sapien
gtcccctggaaaccgaccctcagca

SEQ ID NO: 875913 - DNA, 25 bp, Homo sapien
atttggcggcagcacaaaacaagtg

SEQ ID NO: 875914 - DNA, 25 bp, Homo sapien
gacggttgacttctccagtacgatg

SEQ ID NO: 875915 - DNA, 25 bp, Homo sapien
gatgatctttcctatagacttgaag

SEQ ID NO: 875916 - DNA, 25 bp, Homo sapien
tccagatagggctatgggagagcca

SEQ ID NO: 875917 - DNA, 25 bp, Homo sapien
tagacttgaagtcgagacatataaa

SEQ ID NO: 875918 - DNA, 25 bp, Homo sapien
aattgaggcaataattagtagctta

SEQ ID NO: 875919 - DNA, 25 bp, Homo sapien
atatctgaatggaccaataacaggc

SEQ ID NO: 875920 - DNA, 25 bp, Homo sapien
gaggcaataattagtagcttaccaa

SEQ ID NO: 875921 - DNA, 25 bp, Homo sapien
ttgaggcaataattagtagcttacc

SEQ ID NO: 875922 - DNA, 25 bp, Homo sapien
tgtaccattcagagtttcagccctg

SEQ ID NO: 875923 - DNA, 25 bp, Homo sapien
ggtcgccccacactatagcctgtaa

SEQ ID NO: 875924 - DNA, 25 bp, Homo sapien
taaagcatggaaacgtgtaccattc

SEQ ID NO: 875925 - DNA, 25 bp, Homo sapien
tacgcatttcttaggtgggtcgccc

SEQ ID NO: 875926 - DNA, 25 bp, Homo sapien
tgaatttcagcatcaggaatttcaa

SEQ ID NO: 875927 - DNA, 25 bp, Homo sapien
ggagcaaatcatagtatccctttgg

SEQ ID NO: 875928 - DNA, 25 bp, Homo sapien
tatgacacatgatggagcaaatcat

SEQ ID NO: 875929 - DNA, 25 bp, Homo sapien
tccaaagagatggggatatgacaca

SEQ ID NO: 875930 - DNA, 25 bp, Homo sapien
catgatggagcaaatcatagtatcc

SEQ ID NO: 875931 - DNA, 25 bp, Homo sapien
agctcgtcaaagcttgcacagatca

SEQ ID NO: 875932 - DNA, 25 bp, Homo sapien
tctcccaccagcacgagggactgca

SEQ ID NO: 875933 - DNA, 25 bp, Homo sapien
ccaccagcacgagggactgcaacat

SEQ ID NO: 875934 - DNA, 25 bp, Homo sapien
cagtcccccagctcgtcaaagcttg

SEQ ID NO: 875935 - DNA, 25 bp, Homo sapien
gtgtatgggaattatcaacgcatac

SEQ ID NO: 875936 - DNA, 25 bp, Homo sapien
ttcattccagtgtagtgtatgggaa

SEQ ID NO: 875937 - DNA, 25 bp, Homo sapien
actatgttccttgctagattcatga

SEQ ID NO: 875938 - DNA, 25 bp, Homo sapien
cataaaatcaatcaaactatgttcc

SEQ ID NO: 875939 - DNA, 25 bp, Homo sapien
tagagtcaactttacccgatgcaca

SEQ ID NO: 875940 - DNA, 25 bp, Homo sapien
tatcaggaagctcgtacatggtgtt

SEQ ID NO: 875941 - DNA, 25 bp, Homo sapien
taagccatgtgccttacccgtggat

SEQ ID NO: 875942 - DNA, 25 bp, Homo sapien
cctgtaactaaacggtacggctgag

SEQ ID NO: 875943 - DNA, 25 bp, Homo sapien
aatgccttggaagctacagtttctt

SEQ ID NO: 875944 - DNA, 25 bp, Homo sapien
gctctttctgaggacgtctgcttct

SEQ ID NO: 875945 - DNA, 25 bp, Homo sapien
aaaccagttgaggtcagcgacatca

SEQ ID NO: 875946 - DNA, 25 bp, Homo sapien
atgtctgtgaaatgacactcccctt

SEQ ID NO: 875947 - DNA, 25 bp, Homo sapien
taacaaatacactttcttcacagtc

SEQ ID NO: 875948 - DNA, 25 bp, Homo sapien
gaccctttccagtgtgcactctgaa

SEQ ID NO: 875949 - DNA, 25 bp, Homo sapien
ttattaacaaatacactttcttcac

SEQ ID NO: 875950 - DNA, 25 bp, Homo sapien
acctttgaccctttccagtgtgcac

SEQ ID NO: 875951 - DNA, 25 bp, Homo sapien
ctgccacatctcccgcttttctgac

SEQ ID NO: 875952 - DNA, 25 bp, Homo sapien
gctgccacatctcccgcttttctga

SEQ ID NO: 875953 - DNA, 25 bp, Homo sapien
agctgccacatctcccgcttttctg

SEQ ID NO: 875954 - DNA, 25 bp, Homo sapien
cttgacaaaccggttgtatgaactg

SEQ ID NO: 875955 - DNA, 25 bp, Homo sapien
aaccggttgtatgaactgtctcttc

SEQ ID NO: 875956 - DNA, 25 bp, Homo sapien
acaaaccggttgtatgaactgtctc

SEQ ID NO: 875957 - DNA, 25 bp, Homo sapien
ttctccttgacaaaccggttgtatg

SEQ ID NO: 875958 - DNA, 25 bp, Homo sapien
tatttataatacattgcactgctgg

SEQ ID NO: 875959 - DNA, 25 bp, Homo sapien
agcaaagcagatttccatagtccca

SEQ ID NO: 875960 - DNA, 25 bp, Homo sapien
gaatagtgctcataactgcatttgg

SEQ ID NO: 875961 - DNA, 25 bp, Homo sapien
gaaatgactatctatactgcagctt

SEQ ID NO: 875962 - DNA, 25 bp, Homo sapien
tgaaaagagaatagcacatgatggg

SEQ ID NO: 875963 - DNA, 25 bp, Homo sapien
aagagaatagcacatgatgggttcc

SEQ ID NO: 875964 - DNA, 25 bp, Homo sapien
gaatagcacatgatgggttccacca

SEQ ID NO: 875965 - DNA, 25 bp, Homo sapien
ctgagtgaaaagagaatagcacatg

SEQ ID NO: 875966 - DNA, 25 bp, Homo sapien
ttctagtacagggaaagactccagt

SEQ ID NO: 875967 - DNA, 25 bp, Homo sapien
caattatagagcgtgcctgcggaga

SEQ ID NO: 875968 - DNA, 25 bp, Homo sapien
aagtcaagcctttacatcacgcgaa

SEQ ID NO: 875969 - DNA, 25 bp, Homo sapien
tctgaaatgagccactaagccatgc

SEQ ID NO: 875970 - DNA, 25 bp, Homo sapien
ttatttagatcatccttgtaatcac

SEQ ID NO: 875971 - DNA, 25 bp, Homo sapien
ttaacaatgtgagctgccatttgac

SEQ ID NO: 875972 - DNA, 25 bp, Homo sapien
aatgcaggcacactagagattccag

SEQ ID NO: 875973 - DNA, 25 bp, Homo sapien
aggatcgtgcatcctccagacaagg

SEQ ID NO: 875974 - DNA, 25 bp, Homo sapien
tagtgttgtgcagtagatctctaga

SEQ ID NO: 875975 - DNA, 25 bp, Homo sapien
ggtgttaaaaccttgctacagaaga

SEQ ID NO: 875976 - DNA, 25 bp, Homo sapien
cacagcgctgttaaatataggtata

SEQ ID NO: 875977 - DNA, 25 bp, Homo sapien
cagtttttggcgcatagtacccagc

SEQ ID NO: 875978 - DNA, 25 bp, Homo sapien
ggcttgaggctatgcagggcaggaa

SEQ ID NO: 875979 - DNA, 25 bp, Homo sapien
aagttctaggttcccagatatctgg

SEQ ID NO: 875980 - DNA, 25 bp, Homo sapien
taaggagttgtatagcaggagtgaa

SEQ ID NO: 875981 - DNA, 25 bp, Homo sapien
caccccagacttctacaggtctaag

SEQ ID NO: 875982 - DNA, 25 bp, Homo sapien
tgagcgtgccatgtccaaggataac

SEQ ID NO: 875983 - DNA, 25 bp, Homo sapien
tcttctttatcggagccagggctac

SEQ ID NO: 875984 - DNA, 25 bp, Homo sapien
gaccaaaagcttctatccagaggag

SEQ ID NO: 875985 - DNA, 25 bp, Homo sapien
gccccaggtccaagtagaatacaag

SEQ ID NO: 875986 - DNA, 25 bp, Homo sapien
taagccaacccaagtatagatgtag

SEQ ID NO: 875987 - DNA, 25 bp, Homo sapien
aagccaacccaagtatagatgtagc

SEQ ID NO: 875988 - DNA, 25 bp, Homo sapien
tctaaagttggtgttctgacagcca

SEQ ID NO: 875989 - DNA, 25 bp, Homo sapien
tacagactgctcatgtcaacaatgg

SEQ ID NO: 875990 - DNA, 25 bp, Homo sapien
catgattgcctagattgtatcccaa

SEQ ID NO: 875991 - DNA, 25 bp, Homo sapien
gagacaggacaaagctacagataca

SEQ ID NO: 875992 - DNA, 25 bp, Homo sapien
catggagcgcctgaagagaggtatc

SEQ ID NO: 875993 - DNA, 25 bp, Homo sapien
aagagatccggcctgcctatgctgg

SEQ ID NO: 875994 - DNA, 25 bp, Homo sapien
ctatgtgcaggcgatgaagccaccg

SEQ ID NO: 875995 - DNA, 25 bp, Homo sapien
cctgctgtcggtcatagaggagaag

SEQ ID NO: 875996 - DNA, 25 bp, Homo sapien
gccttcatcccgagctgcgctagcc

SEQ ID NO: 875997 - DNA, 25 bp, Homo sapien
cttcatcccgagctgcgctagccat

SEQ ID NO: 875998 - DNA, 25 bp, Homo sapien
cactgcagagcacccgcttctccct

SEQ ID NO: 875999 - DNA, 25 bp, Homo sapien
ggccttcatcccgagctgcgctagc

SEQ ID NO: 876000 - DNA, 25 bp, Homo sapien
cctgaatcaaaccttgctgtgcctg

SEQ ID NO: 876001 - DNA, 25 bp, Homo sapien
ccaaaaaggcttccatggtatgaga

SEQ ID NO: 876002 - DNA, 25 bp, Homo sapien
tctgtgtgaattcctcggaagtcac

SEQ ID NO: 876003 - DNA, 25 bp, Homo sapien
cttgctgtgcctgaataagctcttc

SEQ ID NO: 876004 - DNA, 25 bp, Homo sapien
tacaggagctgataaccagaataac

SEQ ID NO: 876005 - DNA, 25 bp, Homo sapien
ggcttagatggatgaattgacagaa

SEQ ID NO: 876006 - DNA, 25 bp, Homo sapien
aaaccatgataaaaacattacagga

SEQ ID NO: 876007 - DNA, 25 bp, Homo sapien
atgaactttgctgaactaaaggagc

SEQ ID NO: 876008 - DNA, 25 bp, Homo sapien
gtacatgatgcacaacgggctcttt

SEQ ID NO: 876009 - DNA, 25 bp, Homo sapien
cgttttccataggatccaaagcaga

SEQ ID NO: 876010 - DNA, 25 bp, Homo sapien
gcctgagtacttcatctgttacacg

SEQ ID NO: 876011 - DNA, 25 bp, Homo sapien
taaagtgcaatgtttcacaatccca

SEQ ID NO: 876012 - DNA, 25 bp, Homo sapien
ctggactttttgcaaagtcgaaagc

SEQ ID NO: 876013 - DNA, 25 bp, Homo sapien
gatcctttatatttaaacgtgtcac

SEQ ID NO: 876014 - DNA, 25 bp, Homo sapien
tgcaaagtcgaaagcaagttctgtg

SEQ ID NO: 876015 - DNA, 25 bp, Homo sapien
ttatatttaaacgtgtcacagaagg

SEQ ID NO: 876016 - DNA, 25 bp, Homo sapien
tgagagattgggctatatgcactag

SEQ ID NO: 876017 - DNA, 25 bp, Homo sapien
tggtctttggcctgagagattgggc

SEQ ID NO: 876018 - DNA, 25 bp, Homo sapien
gagattgggctatatgcactagttc

SEQ ID NO: 876019 - DNA, 25 bp, Homo sapien
gattgggctatatgcactagttcca

SEQ ID NO: 876020 - DNA, 25 bp, Homo sapien
ttccactttgtagcagtagaaggac

SEQ ID NO: 876021 - DNA, 25 bp, Homo sapien
ccactttgtagcagtagaaggacac

SEQ ID NO: 876022 - DNA, 25 bp, Homo sapien
actttgtagcagtagaaggacacat

SEQ ID NO: 876023 - DNA, 25 bp, Homo sapien
cactttgtagcagtagaaggacaca

SEQ ID NO: 876024 - DNA, 25 bp, Homo sapien
cagtaatacccagattctccacata

SEQ ID NO: 876025 - DNA, 25 bp, Homo sapien
gagcagtaggtcagtaatacccaga

SEQ ID NO: 876026 - DNA, 25 bp, Homo sapien
tatcaagagcagtaggtcagtaata

SEQ ID NO: 876027 - DNA, 25 bp, Homo sapien
tctccacatactggcatgggggcat

SEQ ID NO: 876028 - DNA, 25 bp, Homo sapien
caggtcagaggtcctggtacaggca

SEQ ID NO: 876029 - DNA, 25 bp, Homo sapien
cctgatgaagcagccttgttgtctg

SEQ ID NO: 876030 - DNA, 25 bp, Homo sapien
ggtggtacttgaggttcatcatctc

SEQ ID NO: 876031 - DNA, 25 bp, Homo sapien
ggcaggtttgtgtcctgatgaagca

SEQ ID NO: 876032 - DNA, 25 bp, Homo sapien
ttacttctctgagactgggaactgc

SEQ ID NO: 876033 - DNA, 25 bp, Homo sapien
ggaactgccgtagtcatcatcttga

SEQ ID NO: 876034 - DNA, 25 bp, Homo sapien
agactgggaactgccgtagtcatca

SEQ ID NO: 876035 - DNA, 25 bp, Homo sapien
ccgtagtcatcatcttgatgtgaga

SEQ ID NO: 876036 - DNA, 25 bp, Homo sapien
ccatcctcagaagggtgtgtaacag

SEQ ID NO: 876037 - DNA, 25 bp, Homo sapien
caagtttatgaaggttgtcagtggc

SEQ ID NO: 876038 - DNA, 25 bp, Homo sapien
cctgcattattacgcaatgggaacg

SEQ ID NO: 876039 - DNA, 25 bp, Homo sapien
cgttacttgttttaggaccctgcat

SEQ ID NO: 876040 - DNA, 25 bp, Homo sapien
atttggggtcaccttctgagttaat

SEQ ID NO: 876041 - DNA, 25 bp, Homo sapien
gcactcagcttctctaccacattag

SEQ ID NO: 876042 - DNA, 25 bp, Homo sapien
actttcttgatggtagccctgaagc

SEQ ID NO: 876043 - DNA, 25 bp, Homo sapien
gcttctctaccacattagtgaccat

SEQ ID NO: 876044 - DNA, 25 bp, Homo sapien
ttcttgatggtagccctgaagcact

SEQ ID NO: 876045 - DNA, 25 bp, Homo sapien
tgttgacttcccaaggtctttaaca

SEQ ID NO: 876046 - DNA, 25 bp, Homo sapien
caagtcatatggtgtatctgatgtt

SEQ ID NO: 876047 - DNA, 25 bp, Homo sapien
taacaacagtataactgcctgctgc

SEQ ID NO: 876048 - DNA, 25 bp, Homo sapien
tctttaacaacagtataactgcctg

SEQ ID NO: 876049 - DNA, 25 bp, Homo sapien
acagcacgagaactttgcgaagcat

SEQ ID NO: 876050 - DNA, 25 bp, Homo sapien
cacgagaactttgcgaagcatacac

SEQ ID NO: 876051 - DNA, 25 bp, Homo sapien
aacacagcacgagaactttgcgaag

SEQ ID NO: 876052 - DNA, 25 bp, Homo sapien
aaaacacagcacgagaactttgcga

SEQ ID NO: 876053 - DNA, 25 bp, Homo sapien
aataagggtagtgctcagcagggat

SEQ ID NO: 876054 - DNA, 25 bp, Homo sapien
ttggaataagggtagtgctcagcag

SEQ ID NO: 876055 - DNA, 25 bp, Homo sapien
ctctggtctatcagcaacagccagg

SEQ ID NO: 876056 - DNA, 25 bp, Homo sapien
ggcttgtctctggtctatcagcaac

SEQ ID NO: 876057 - DNA, 25 bp, Homo sapien
taaccttggaaatcatgtgtagcct

SEQ ID NO: 876058 - DNA, 25 bp, Homo sapien
tccagcatgctgaattaagggtagc

SEQ ID NO: 876059 - DNA, 25 bp, Homo sapien
acaagatgaatgtcccaagaggaac

SEQ ID NO: 876060 - DNA, 25 bp, Homo sapien
gctcctgagacatctattcctgtga

SEQ ID NO: 876061 - DNA, 25 bp, Homo sapien
gttcagaaatctccagctcatacga

SEQ ID NO: 876062 - DNA, 25 bp, Homo sapien
gcaggtagtttcacgctgggcacca

SEQ ID NO: 876063 - DNA, 25 bp, Homo sapien
cagctgctagttggtactgggagta

SEQ ID NO: 876064 - DNA, 25 bp, Homo sapien
tgccgggcactgcttgaagcagcag

SEQ ID NO: 876065 - DNA, 25 bp, Homo sapien
ttttcactgaatttgcagcgaacag

SEQ ID NO: 876066 - DNA, 25 bp, Homo sapien
cactgaatttgcagcgaacagagag

SEQ ID NO: 876067 - DNA, 25 bp, Homo sapien
tgaatttgcagcgaacagagagagt

SEQ ID NO: 876068 - DNA, 25 bp, Homo sapien
tttgcagcgaacagagagagtttta

SEQ ID NO: 876069 - DNA, 25 bp, Homo sapien
gagggtttatcagtgtaggtataag

SEQ ID NO: 876070 - DNA, 25 bp, Homo sapien
ctcggattaagagaagggtgccact

SEQ ID NO: 876071 - DNA, 25 bp, Homo sapien
gtttctcggattaagagaagggtgc

SEQ ID NO: 876072 - DNA, 25 bp, Homo sapien
cagtgtaggtataaggggtttctcg

SEQ ID NO: 876073 - DNA, 25 bp, Homo sapien
gcagactaattgcttttttcccaca

SEQ ID NO: 876074 - DNA, 25 bp, Homo sapien
aatttcttccccaagtgaagacaag

SEQ ID NO: 876075 - DNA, 25 bp, Homo sapien
gaagacaagtagtcctgagttccat

SEQ ID NO: 876076 - DNA, 25 bp, Homo sapien
ttcctaggctcctaagatcaataaa

SEQ ID NO: 876077 - DNA, 25 bp, Homo sapien
tttataatatactgtcagccctctg

SEQ ID NO: 876078 - DNA, 25 bp, Homo sapien
gcagaaagtggaatgggagtataaa

SEQ ID NO: 876079 - DNA, 25 bp, Homo sapien
gacagatgatggttatcaaactact

SEQ ID NO: 876080 - DNA, 25 bp, Homo sapien
tagggtgatcaataaaaatcctgca

SEQ ID NO: 876081 - DNA, 25 bp, Homo sapien
ttctaaccacgctctaccatttatg

SEQ ID NO: 876082 - DNA, 25 bp, Homo sapien
aatgatcactcccttagagtcagat

SEQ ID NO: 876083 - DNA, 25 bp, Homo sapien
tgtttgtccatatctgggaactgtg

SEQ ID NO: 876084 - DNA, 25 bp, Homo sapien
catttatgatttgtgtgaccttagc

SEQ ID NO: 876085 - DNA, 25 bp, Homo sapien
ataaaccaataacaagttatgaaat

SEQ ID NO: 876086 - DNA, 25 bp, Homo sapien
ggacacatacactctaccaagtcta

SEQ ID NO: 876087 - DNA, 25 bp, Homo sapien
gaagtcaaatccctgaataaaccaa

SEQ ID NO: 876088 - DNA, 25 bp, Homo sapien
attattccaaacaatagaaaaacag

SEQ ID NO: 876089 - DNA, 25 bp, Homo sapien
tctaaaggtgagctcaaagatttac

SEQ ID NO: 876090 - DNA, 25 bp, Homo sapien
taatgtgctttctaaaggtgagctc

SEQ ID NO: 876091 - DNA, 25 bp, Homo sapien
ctttctaaaggtgagctcaaagatt

SEQ ID NO: 876092 - DNA, 25 bp, Homo sapien
aaagattctcttccagaatgtttaa

SEQ ID NO: 876093 - DNA, 25 bp, Homo sapien
gactacatgtcattgctggccgctg

SEQ ID NO: 876094 - DNA, 25 bp, Homo sapien
gccacacgcagtagggactacatgt

SEQ ID NO: 876095 - DNA, 25 bp, Homo sapien
gtaagtaaatgtgcctttagcttgc

SEQ ID NO: 876096 - DNA, 25 bp, Homo sapien
aatactgctttgtaagtaaatgtgc

SEQ ID NO: 876097 - DNA, 25 bp, Homo sapien
aatattgatgggaggcccagatgtg

SEQ ID NO: 876098 - DNA, 25 bp, Homo sapien
ggcagtacaaattggggaagcaata

SEQ ID NO: 876099 - DNA, 25 bp, Homo sapien
ggtaaacatgacctgacaagtgtga

SEQ ID NO: 876100 - DNA, 25 bp, Homo sapien
gggtgaccaggtaaacatgacctga

SEQ ID NO: 876101 - DNA, 25 bp, Homo sapien
taccacaaactgagtaattcagaaa

SEQ ID NO: 876102 - DNA, 25 bp, Homo sapien
cagagaaaggtttcatgcttcccaa

SEQ ID NO: 876103 - DNA, 25 bp, Homo sapien
cagcctctgactaggatcatcccat

SEQ ID NO: 876104 - DNA, 25 bp, Homo sapien
taattcttgccatgtacagttagtg

SEQ ID NO: 876105 - DNA, 25 bp, Homo sapien
tgcggcagcctgtcagaaacggtct

SEQ ID NO: 876106 - DNA, 25 bp, Homo sapien
tcaggttgtgcccaatgcggcagcc

SEQ ID NO: 876107 - DNA, 25 bp, Homo sapien
cttgacctcagcagaatgagttggc

SEQ ID NO: 876108 - DNA, 25 bp, Homo sapien
gaaacggtctactgccagcgcagag

SEQ ID NO: 876109 - DNA, 25 bp, Homo sapien
tgaggagcatctgggctacttttgc

SEQ ID NO: 876110 - DNA, 25 bp, Homo sapien
gaggagcatctgggctacttttgcc

SEQ ID NO: 876111 - DNA, 25 bp, Homo sapien
tcatcactcacggatttactcttcc

SEQ ID NO: 876112 - DNA, 25 bp, Homo sapien
caggctctgacaaactctgcctctt

SEQ ID NO: 876113 - DNA, 25 bp, Homo sapien
tttcatcactcacggatttactctt

SEQ ID NO: 876114 - DNA, 25 bp, Homo sapien
atcactcacggatttactcttccca

SEQ ID NO: 876115 - DNA, 25 bp, Homo sapien
cgaagaaaggagatcagagattgaa

SEQ ID NO: 876116 - DNA, 25 bp, Homo sapien
gagatcagagattgaagatcaactt

SEQ ID NO: 876117 - DNA, 25 bp, Homo sapien
acgaagaaaggagatcagagattga

SEQ ID NO: 876118 - DNA, 25 bp, Homo sapien
aaggagatcagagattgaagatcaa

SEQ ID NO: 876119 - DNA, 25 bp, Homo sapien
aacaccaggtagttactagaaacat

SEQ ID NO: 876120 - DNA, 25 bp, Homo sapien
acaccaggtagttactagaaacatc

SEQ ID NO: 876121 - DNA, 25 bp, Homo sapien
acacacaggcatcaactttgagtgt

SEQ ID NO: 876122 - DNA, 25 bp, Homo sapien
caccaggtagttactagaaacatca

SEQ ID NO: 876123 - DNA, 25 bp, Homo sapien
taacggccctttgccaattttgcta

SEQ ID NO: 876124 - DNA, 25 bp, Homo sapien
tttgctaaacagtgaatatactggt

SEQ ID NO: 876125 - DNA, 25 bp, Homo sapien
cagtgaatatactggttggatgaca

SEQ ID NO: 876126 - DNA, 25 bp, Homo sapien
gccctttgccaattttgctaaacag

SEQ ID NO: 876127 - DNA, 25 bp, Homo sapien
aaaggatgttgtaatggcccataat

SEQ ID NO: 876128 - DNA, 25 bp, Homo sapien
ccacgcatggcgaattttattattt

SEQ ID NO: 876129 - DNA, 25 bp, Homo sapien
caatgtcccaattctttacctacaa

SEQ ID NO: 876130 - DNA, 25 bp, Homo sapien
aaagcctggaatcagtgctagcacc

SEQ ID NO: 876131 - DNA, 25 bp, Homo sapien
taactgtgtccaagtagagtttcat

SEQ ID NO: 876132 - DNA, 25 bp, Homo sapien
ataactgtgtccaagtagagtttca

SEQ ID NO: 876133 - DNA, 25 bp, Homo sapien
aactgtgtccaagtagagtttcata

SEQ ID NO: 876134 - DNA, 25 bp, Homo sapien
catttgcaactaagaataactgtgt

SEQ ID NO: 876135 - DNA, 25 bp, Homo sapien
gttttcagatccagtaataaacata

SEQ ID NO: 876136 - DNA, 25 bp, Homo sapien
agtccttccacaagatttctctttg

SEQ ID NO: 876137 - DNA, 25 bp, Homo sapien
tttcagatccagtaataaacataca

SEQ ID NO: 876138 - DNA, 25 bp, Homo sapien
taaacatacaatgaccttcaagtcc

SEQ ID NO: 876139 - DNA, 25 bp, Homo sapien
atgttatctcttgccaaaatttagc

SEQ ID NO: 876140 - DNA, 25 bp, Homo sapien
ctcaatgttatctcttgccaaaatt

SEQ ID NO: 876141 - DNA, 25 bp, Homo sapien
ccactcaatgttatctcttgccaaa

SEQ ID NO: 876142 - DNA, 25 bp, Homo sapien
caatgttatctcttgccaaaattta

SEQ ID NO: 876143 - DNA, 25 bp, Homo sapien
ttcactgccactgaaacctgacctt

SEQ ID NO: 876144 - DNA, 25 bp, Homo sapien
actgccactgaaacctgacctttca

SEQ ID NO: 876145 - DNA, 25 bp, Homo sapien
tgccactgaaacctgacctttcatt

SEQ ID NO: 876146 - DNA, 25 bp, Homo sapien
cttcactgccactgaaacctgacct

SEQ ID NO: 876147 - DNA, 25 bp, Homo sapien
cagaaaaagtccagacagcaggagc

SEQ ID NO: 876148 - DNA, 25 bp, Homo sapien
tcaccacgtgggcaaaggggccgac

SEQ ID NO: 876149 - DNA, 25 bp, Homo sapien
cggccgtgtctcagtaggacagaaa

SEQ ID NO: 876150 - DNA, 25 bp, Homo sapien
gacgcccagggcacatgcgcagtga

SEQ ID NO: 876151 - DNA, 25 bp, Homo sapien
gggactcccacgacagcaaggccat

SEQ ID NO: 876152 - DNA, 25 bp, Homo sapien
tgggactcccacgacagcaaggcca

SEQ ID NO: 876153 - DNA, 25 bp, Homo sapien
gatttcacctatccttaaagcctca

SEQ ID NO: 876154 - DNA, 25 bp, Homo sapien
tgaataagataaggttcttgtcctc

SEQ ID NO: 876155 - DNA, 25 bp, Homo sapien
tcattttataactgacccagagaag

SEQ ID NO: 876156 - DNA, 25 bp, Homo sapien
cctcaaagagtttagcttctatagg

SEQ ID NO: 876157 - DNA, 25 bp, Homo sapien
ttatagccttttcactcaatgacac

SEQ ID NO: 876158 - DNA, 25 bp, Homo sapien
ggctagcatagaactgttgccactc

SEQ ID NO: 876159 - DNA, 25 bp, Homo sapien
ttgcaaaagatctaagctaacattc

SEQ ID NO: 876160 - DNA, 25 bp, Homo sapien
cctggactcctatcttccgactttt

SEQ ID NO: 876161 - DNA, 25 bp, Homo sapien
tcattttactctcttgcccttgctg

SEQ ID NO: 876162 - DNA, 25 bp, Homo sapien
ttacaacattcccagtaactaacat

SEQ ID NO: 876163 - DNA, 25 bp, Homo sapien
tcaaatcacttatcattttactctc

SEQ ID NO: 876164 - DNA, 25 bp, Homo sapien
ctgggcagagttcacttcaaatata

SEQ ID NO: 876165 - DNA, 25 bp, Homo sapien
gcacctagccctttttagcaatctt

SEQ ID NO: 876166 - DNA, 25 bp, Homo sapien
actcctctattttgttggcctctca

SEQ ID NO: 876167 - DNA, 25 bp, Homo sapien
aagttggtgatgcttccaagtcttc

SEQ ID NO: 876168 - DNA, 25 bp, Homo sapien
tttaaggtaagtgcctgttaagcac

SEQ ID NO: 876169 - DNA, 25 bp, Homo sapien
tagcctatcgaagctagtgcttttc

SEQ ID NO: 876170 - DNA, 25 bp, Homo sapien
tgaacagatggttccccagacgtgg

SEQ ID NO: 876171 - DNA, 25 bp, Homo sapien
tcgaagctagtgcttttcctgccag

SEQ ID NO: 876172 - DNA, 25 bp, Homo sapien
acgtggcagagcctctttagcctat

SEQ ID NO: 876173 - DNA, 25 bp, Homo sapien
tccacacagccaagttataacagcc

SEQ ID NO: 876174 - DNA, 25 bp, Homo sapien
cagagggcagcccaattgatgccca

SEQ ID NO: 876175 - DNA, 25 bp, Homo sapien
ttgatgcccacaagaagtgatgagt

SEQ ID NO: 876176 - DNA, 25 bp, Homo sapien
tgcccattacacacaatgagccagg

SEQ ID NO: 876177 - DNA, 25 bp, Homo sapien
catgggatggtctgctaaaccaaac

SEQ ID NO: 876178 - DNA, 25 bp, Homo sapien
tcagaaatagtcaacagtggcaagg

SEQ ID NO: 876179 - DNA, 25 bp, Homo sapien
tgtagtggcagagcccaagttagct

SEQ ID NO: 876180 - DNA, 25 bp, Homo sapien
tactaaacaagctaaagcgcatggg

SEQ ID NO: 876181 - DNA, 25 bp, Homo sapien
aaagcagcttaaagtcgtattttca

SEQ ID NO: 876182 - DNA, 25 bp, Homo sapien
cagttccagttgttatgtatgctct

SEQ ID NO: 876183 - DNA, 25 bp, Homo sapien
tgtatgctctagtgaagttaccaac

SEQ ID NO: 876184 - DNA, 25 bp, Homo sapien
tggaagtgttttactaaagcagctt

SEQ ID NO: 876185 - DNA, 25 bp, Homo sapien
aaaattgtgcggatgtggcttctgg

SEQ ID NO: 876186 - DNA, 25 bp, Homo sapien
gatctccaacatgatttcatgcatt

SEQ ID NO: 876187 - DNA, 25 bp, Homo sapien
gattacaatagagatctccaacatg

SEQ ID NO: 876188 - DNA, 25 bp, Homo sapien
tctccaatagagattacaatagaga

SEQ ID NO: 876189 - DNA, 25 bp, Homo sapien
gcttgctgtaatccacattcactga

SEQ ID NO: 876190 - DNA, 25 bp, Homo sapien
tgtaatccacattcactgagtagaa

SEQ ID NO: 876191 - DNA, 25 bp, Homo sapien
tcagcttgctgtaatccacattcac

SEQ ID NO: 876192 - DNA, 25 bp, Homo sapien
ctggacgttccttcttcagcttgct

SEQ ID NO: 876193 - DNA, 25 bp, Homo sapien
tgtacacctgtcaagcagtgctgga

SEQ ID NO: 876194 - DNA, 25 bp, Homo sapien
ggacacaactggattgggccctcat

SEQ ID NO: 876195 - DNA, 25 bp, Homo sapien
tctacgatttgcaggatcaaggccc

SEQ ID NO: 876196 - DNA, 25 bp, Homo sapien
taaaagttgctatcaggctgcgggc

SEQ ID NO: 876197 - DNA, 25 bp, Homo sapien
gtattgatcattgggacccagtttg

SEQ ID NO: 876198 - DNA, 25 bp, Homo sapien
agggctctgggttatttctgtccca

SEQ ID NO: 876199 - DNA, 25 bp, Homo sapien
ttccagggctctgggttatttctgt

SEQ ID NO: 876200 - DNA, 25 bp, Homo sapien
tgttccagggctctgggttatttct

SEQ ID NO: 876201 - DNA, 25 bp, Homo sapien
gactgtggctcctaaactgccttga

SEQ ID NO: 876202 - DNA, 25 bp, Homo sapien
ttagcagttctactttaccaaagag

SEQ ID NO: 876203 - DNA, 25 bp, Homo sapien
taccctaatgttatcgccctacaga

SEQ ID NO: 876204 - DNA, 25 bp, Homo sapien
aacatttacatgtgccgagaaccat

SEQ ID NO: 876205 - DNA, 25 bp, Homo sapien
tgccagacgcaagagatacagtgtt

SEQ ID NO: 876206 - DNA, 25 bp, Homo sapien
agtgttgctccagtagctccagttc

SEQ ID NO: 876207 - DNA, 25 bp, Homo sapien
gacgcaagagatacagtgttgctcc

SEQ ID NO: 876208 - DNA, 25 bp, Homo sapien
ccagtagctccagttccaataaata

SEQ ID NO: 876209 - DNA, 25 bp, Homo sapien
gaaaatgtatcgagtcttcttcacc

SEQ ID NO: 876210 - DNA, 25 bp, Homo sapien
aaaacactggccaacgagagattac

SEQ ID NO: 876211 - DNA, 25 bp, Homo sapien
ttaatgtggagcaaattataggtac

SEQ ID NO: 876212 - DNA, 25 bp, Homo sapien
gagagattacagtagtttctgcaca

SEQ ID NO: 876213 - DNA, 25 bp, Homo sapien
cttgctgcgtatttagggaaccgga

SEQ ID NO: 876214 - DNA, 25 bp, Homo sapien
gcaaattatttaagggtgcctctat

SEQ ID NO: 876215 - DNA, 25 bp, Homo sapien
tctattacaaatactggctttaagc

SEQ ID NO: 876216 - DNA, 25 bp, Homo sapien
tatctctgaaaacgtaatgctacca

SEQ ID NO: 876217 - DNA, 25 bp, Homo sapien
ttcttggcctgaccgatgatctggc

SEQ ID NO: 876218 - DNA, 25 bp, Homo sapien
atgcttcttggcctgaccgatgatc

SEQ ID NO: 876219 - DNA, 25 bp, Homo sapien
cctgaccgatgatctggcggagcat

SEQ ID NO: 876220 - DNA, 25 bp, Homo sapien
ttggcctgaccgatgatctggcgga

SEQ ID NO: 876221 - DNA, 25 bp, Homo sapien
ccaggccctaagctaaaaattatct

SEQ ID NO: 876222 - DNA, 25 bp, Homo sapien
caccaggccctaagctaaaaattat

SEQ ID NO: 876223 - DNA, 25 bp, Homo sapien
caggccctaagctaaaaattatctg

SEQ ID NO: 876224 - DNA, 25 bp, Homo sapien
aggccctaagctaaaaattatctgc

SEQ ID NO: 876225 - DNA, 25 bp, Homo sapien
cacccaggacctcctacctgaagga

SEQ ID NO: 876226 - DNA, 25 bp, Homo sapien
caggacctcctacctgaaggaccct

SEQ ID NO: 876227 - DNA, 25 bp, Homo sapien
cggatgcgactgtctttaatagtgc

SEQ ID NO: 876228 - DNA, 25 bp, Homo sapien
cagcttgcggcaggagggcccggat

SEQ ID NO: 876229 - DNA, 25 bp, Homo sapien
agctctgtgtgggatctttctgccc

SEQ ID NO: 876230 - DNA, 25 bp, Homo sapien
gcatggctagtagtatgaaaatctg

SEQ ID NO: 876231 - DNA, 25 bp, Homo sapien
tgcttactctggtactgtaaaacca

SEQ ID NO: 876232 - DNA, 25 bp, Homo sapien
gccgcaattttagatgttatacaca

SEQ ID NO: 876233 - DNA, 25 bp, Homo sapien
caagtcaactttgaagcatggctag

SEQ ID NO: 876234 - DNA, 25 bp, Homo sapien
gcaaagcagatcaacagtagttagt

SEQ ID NO: 876235 - DNA, 25 bp, Homo sapien
cagtagttagttgcatgcgtgcttt

SEQ ID NO: 876236 - DNA, 25 bp, Homo sapien
agttgcatgcgtgctttttcatatc

SEQ ID NO: 876237 - DNA, 25 bp, Homo sapien
tagcaaagcagatcaacagtagtta

SEQ ID NO: 876238 - DNA, 25 bp, Homo sapien
caaagtatggatgctatttttcagg

SEQ ID NO: 876239 - DNA, 25 bp, Homo sapien
gctgactgtggctcttttacatttg

SEQ ID NO: 876240 - DNA, 25 bp, Homo sapien
aaggtggttctacaatatttcatgg

SEQ ID NO: 876241 - DNA, 25 bp, Homo sapien
tatttcatggtgtttcggttgaaat

SEQ ID NO: 876242 - DNA, 25 bp, Homo sapien
gagcccacaagataggtgcccaggg

SEQ ID NO: 876243 - DNA, 25 bp, Homo sapien
gaacatacaggagcaagtatgcctg

SEQ ID NO: 876244 - DNA, 25 bp, Homo sapien
taggcacactctcaggaacatacag

SEQ ID NO: 876245 - DNA, 25 bp, Homo sapien
gctaatgctgcggttgtgagaacca

SEQ ID NO: 876246 - DNA, 25 bp, Homo sapien
tttgcaaagttctggcggcactagg

SEQ ID NO: 876247 - DNA, 25 bp, Homo sapien
caatctgctggagctgaataaggct

SEQ ID NO: 876248 - DNA, 25 bp, Homo sapien
ccctgatagtaaggcctgtggtctc

SEQ ID NO: 876249 - DNA, 25 bp, Homo sapien
tttgttagttgcctagtccctggag

SEQ ID NO: 876250 - DNA, 25 bp, Homo sapien
ttgtaatcaggagccagtcgaacat

SEQ ID NO: 876251 - DNA, 25 bp, Homo sapien
tgttggcaagattcaaagcattgta

SEQ ID NO: 876252 - DNA, 25 bp, Homo sapien
ttggcaagattcaaagcattgtaat

SEQ ID NO: 876253 - DNA, 25 bp, Homo sapien
tttgttggcaagattcaaagcattg

SEQ ID NO: 876254 - DNA, 25 bp, Homo sapien
atggtatagtagtcaagcttgtttc

SEQ ID NO: 876255 - DNA, 25 bp, Homo sapien
ttaacttcctcagtgaacacaagca

SEQ ID NO: 876256 - DNA, 25 bp, Homo sapien
aaacttgatgatggtatagtagtca

SEQ ID NO: 876257 - DNA, 25 bp, Homo sapien
acttcctcagtgaacacaagcatgt

SEQ ID NO: 876258 - DNA, 25 bp, Homo sapien
cttggccttgaaagccttcggtttg

SEQ ID NO: 876259 - DNA, 25 bp, Homo sapien
ctttcaacactgccttcttggcctt

SEQ ID NO: 876260 - DNA, 25 bp, Homo sapien
cttcttttttggtggctgtggacac

SEQ ID NO: 876261 - DNA, 25 bp, Homo sapien
gccttcttggccttgaaagccttcg

SEQ ID NO: 876262 - DNA, 25 bp, Homo sapien
tccttcactttcggcactgtcttgt

SEQ ID NO: 876263 - DNA, 25 bp, Homo sapien
ccttcactttcggcactgtcttgtg

SEQ ID NO: 876264 - DNA, 25 bp, Homo sapien
ttccttcactttcggcactgtcttg

SEQ ID NO: 876265 - DNA, 25 bp, Homo sapien
ttctgattatctctcccttggatcc

SEQ ID NO: 876266 - DNA, 25 bp, Homo sapien
cttctgattatctctcccttggatc

SEQ ID NO: 876267 - DNA, 25 bp, Homo sapien
ggtctgaagaaagtgacaggtaatt

SEQ ID NO: 876268 - DNA, 25 bp, Homo sapien
tttcttagattttgcacatcatagg

SEQ ID NO: 876269 - DNA, 25 bp, Homo sapien
cagcaggatgagattgtctgaaacg

SEQ ID NO: 876270 - DNA, 25 bp, Homo sapien
ggtcttgttattccaactgatgcaa

SEQ ID NO: 876271 - DNA, 25 bp, Homo sapien
gatatgtcaggaatgtgattcttca

SEQ ID NO: 876272 - DNA, 25 bp, Homo sapien
tcctaaacagacaggctacggatgg

SEQ ID NO: 876273 - DNA, 25 bp, Homo sapien
gctacggatggatatgtcaggaatg

SEQ ID NO: 876274 - DNA, 25 bp, Homo sapien
caggaatgtgattcttcatcttcca

SEQ ID NO: 876275 - DNA, 25 bp, Homo sapien
ttatccccatcccaccaacgctgtc

SEQ ID NO: 876276 - DNA, 25 bp, Homo sapien
ccccatcccaccaacgctgtcctct

SEQ ID NO: 876277 - DNA, 25 bp, Homo sapien
agtcttgctctttaacgggcccaca

SEQ ID NO: 876278 - DNA, 25 bp, Homo sapien
cttgctctttaacgggcccacattt

SEQ ID NO: 876279 - DNA, 25 bp, Homo sapien
accttcgagagattaccgctgcttg

SEQ ID NO: 876280 - DNA, 25 bp, Homo sapien
tgttttctatcaataaccatgaaac

SEQ ID NO: 876281 - DNA, 25 bp, Homo sapien
taagtgacagatcacttcaagaaat

SEQ ID NO: 876282 - DNA, 25 bp, Homo sapien
taaaagtcatgacctaccttcgaga

SEQ ID NO: 876283 - DNA, 25 bp, Homo sapien
aatactctggtattcttgcaggtca

SEQ ID NO: 876284 - DNA, 25 bp, Homo sapien
tcctcttgatgtttatggcctataa

SEQ ID NO: 876285 - DNA, 25 bp, Homo sapien
tgtaacacccactaatagtacaggg

SEQ ID NO: 876286 - DNA, 25 bp, Homo sapien
aaatgtatctagacaagtgacatga

SEQ ID NO: 876287 - DNA, 25 bp, Homo sapien
taccaccatggatgtttgcctgctg

SEQ ID NO: 876288 - DNA, 25 bp, Homo sapien
tacacttgttccgtagctaccagca

SEQ ID NO: 876289 - DNA, 25 bp, Homo sapien
cattaactttgagaggctgctacta

SEQ ID NO: 876290 - DNA, 25 bp, Homo sapien
gctaccagcagttagaacaggttga

SEQ ID NO: 876291 - DNA, 25 bp, Homo sapien
ctcaggagctcaacatggaacagaa

SEQ ID NO: 876292 - DNA, 25 bp, Homo sapien
gaaaagtttgcagcttatgtaatag

SEQ ID NO: 876293 - DNA, 25 bp, Homo sapien
aatatatctcaggagctcaacatgg

SEQ ID NO: 876294 - DNA, 25 bp, Homo sapien
tgcagcttatgtaatagcagataaa

SEQ ID NO: 876295 - DNA, 25 bp, Homo sapien
gcaggcataacatcctaacagttgg

SEQ ID NO: 876296 - DNA, 25 bp, Homo sapien
ttttctggcaatgacgataggcata

SEQ ID NO: 876297 - DNA, 25 bp, Homo sapien
cacagcatattctgtgggagcttga

SEQ ID NO: 876298 - DNA, 25 bp, Homo sapien
gcttgaaatgtcatcagaacaggct

SEQ ID NO: 876299 - DNA, 25 bp, Homo sapien
ctgacagcccacaccaactcttctg

SEQ ID NO: 876300 - DNA, 25 bp, Homo sapien
gaatctgacagcccacaccaactct

SEQ ID NO: 876301 - DNA, 25 bp, Homo sapien
atctgacagcccacaccaactcttc

SEQ ID NO: 876302 - DNA, 25 bp, Homo sapien
aatctgacagcccacaccaactctt

SEQ ID NO: 876303 - DNA, 25 bp, Homo sapien
tggcaccttgaatccaaactcatct

SEQ ID NO: 876304 - DNA, 25 bp, Homo sapien
tcctggcaccttgaatccaaactca

SEQ ID NO: 876305 - DNA, 25 bp, Homo sapien
ggtccagctgtctctctaatggtat

SEQ ID NO: 876306 - DNA, 25 bp, Homo sapien
tttcagatctttatctcctggcacc

SEQ ID NO: 876307 - DNA, 25 bp, Homo sapien
cggagacgtccaagccaggtttgct

SEQ ID NO: 876308 - DNA, 25 bp, Homo sapien
tcagcctctgtttgcaagagttgat

SEQ ID NO: 876309 - DNA, 25 bp, Homo sapien
gagtggaagtaaacttcaggaaagc

SEQ ID NO: 876310 - DNA, 25 bp, Homo sapien
tttgcaagagttgatgggcctgagt

SEQ ID NO: 876311 - DNA, 25 bp, Homo sapien
gaggagctatacgttgttgtaaaat

SEQ ID NO: 876312 - DNA, 25 bp, Homo sapien
gagctatacgttgttgtaaaatcaa

SEQ ID NO: 876313 - DNA, 25 bp, Homo sapien
ctaagaggagctatacgttgttgta

SEQ ID NO: 876314 - DNA, 25 bp, Homo sapien
aagaggagctatacgttgttgtaaa

SEQ ID NO: 876315 - DNA, 25 bp, Homo sapien
tcccattctatgtgtggagtgtgcg

SEQ ID NO: 876316 - DNA, 25 bp, Homo sapien
gatgagacaggtgtgggtgttttgt

SEQ ID NO: 876317 - DNA, 25 bp, Homo sapien
tgtggctgacactgcaggttgttct

SEQ ID NO: 876318 - DNA, 25 bp, Homo sapien
gtgggtgttttgttctaatgccttc

SEQ ID NO: 876319 - DNA, 25 bp, Homo sapien
gtgttgctaccatgtcaacatcaca

SEQ ID NO: 876320 - DNA, 25 bp, Homo sapien
ccctcagatgagagtgttgctacca

SEQ ID NO: 876321 - DNA, 25 bp, Homo sapien
gactgatggaccctcagatgagagt

SEQ ID NO: 876322 - DNA, 25 bp, Homo sapien
ttgggaaaaatgactgatggaccct

SEQ ID NO: 876323 - DNA, 25 bp, Homo sapien
aaatgatgagttttttgaatcttac

SEQ ID NO: 876324 - DNA, 25 bp, Homo sapien
taaaatgatgagttttttgaatctt

SEQ ID NO: 876325 - DNA, 25 bp, Homo sapien
cataaaatgatgagttttttgaatc

SEQ ID NO: 876326 - DNA, 25 bp, Homo sapien
ctacataaaatgatgagttttttga

SEQ ID NO: 876327 - DNA, 25 bp, Homo sapien
cagatttctctgacctgttatctat

SEQ ID NO: 876328 - DNA, 25 bp, Homo sapien
gatttctctgacctgttatctatta

SEQ ID NO: 876329 - DNA, 25 bp, Homo sapien
ggtatcagatttctctgacctgtta

SEQ ID NO: 876330 - DNA, 25 bp, Homo sapien
ggcggtggggaatttgtgtataata

SEQ ID NO: 876331 - DNA, 25 bp, Homo sapien
agaaaagaccagataggccaggaac

SEQ ID NO: 876332 - DNA, 25 bp, Homo sapien
gaaaagaccagataggccaggaaca

SEQ ID NO: 876333 - DNA, 25 bp, Homo sapien
tgtcttcttccacagaacaaggtcc

SEQ ID NO: 876334 - DNA, 25 bp, Homo sapien
gaagcagtccttcacgtgattgata

SEQ ID NO: 876335 - DNA, 25 bp, Homo sapien
tcagcaatgtgcgattcatcctatg

SEQ ID NO: 876336 - DNA, 25 bp, Homo sapien
gaacagcttcctggtcggtcatcca

SEQ ID NO: 876337 - DNA, 25 bp, Homo sapien
ttatggaagctggcatctgtcccac

SEQ ID NO: 876338 - DNA, 25 bp, Homo sapien
tgtttgcagtcccagcatggtccct

SEQ ID NO: 876339 - DNA, 25 bp, Homo sapien
aagctggcatctgtcccaccaccat

SEQ ID NO: 876340 - DNA, 25 bp, Homo sapien
accaccatctactgctgctgtttgc

SEQ ID NO: 876341 - DNA, 25 bp, Homo sapien
cagtacacctttgtcgaaaccatgg

SEQ ID NO: 876342 - DNA, 25 bp, Homo sapien
gttgtgttcatcttgggtaaccagg

SEQ ID NO: 876343 - DNA, 25 bp, Homo sapien
tacacctttgtcgaaaccatgggac

SEQ ID NO: 876344 - DNA, 25 bp, Homo sapien
catcttgggtaaccaggaaatagta

SEQ ID NO: 876345 - DNA, 25 bp, Homo sapien
tactgcaggttataagctgtaacct

SEQ ID NO: 876346 - DNA, 25 bp, Homo sapien
ctctgagggtttgttgtcctgggaa

SEQ ID NO: 876347 - DNA, 25 bp, Homo sapien
tggcagtgacgcttttgatgtgaaa

SEQ ID NO: 876348 - DNA, 25 bp, Homo sapien
aagattttggcagtgacgcttttga

SEQ ID NO: 876349 - DNA, 25 bp, Homo sapien
gcagattactttacgactggataag

SEQ ID NO: 876350 - DNA, 25 bp, Homo sapien
tcaatggctggtcctggaaacctcg

SEQ ID NO: 876351 - DNA, 25 bp, Homo sapien
aaacctcgtctctgtttgatataag

SEQ ID NO: 876352 - DNA, 25 bp, Homo sapien
taaaccttgagtacactctgcctgg

SEQ ID NO: 876353 - DNA, 25 bp, Homo sapien
tacatcattaacttgatcctgtgga

SEQ ID NO: 876354 - DNA, 25 bp, Homo sapien
gctttacatcattaacttgatcctg

SEQ ID NO: 876355 - DNA, 25 bp, Homo sapien
cattaacttgatcctgtggagtcag

SEQ ID NO: 876356 - DNA, 25 bp, Homo sapien
taacttgatcctgtggagtcagagc

SEQ ID NO: 876357 - DNA, 25 bp, Homo sapien
tactcttgcattgcttgggagaagg

SEQ ID NO: 876358 - DNA, 25 bp, Homo sapien
tgggtctccccaaaaagaagagcca

SEQ ID NO: 876359 - DNA, 25 bp, Homo sapien
caggagtcagaggattcaacggtga

SEQ ID NO: 876360 - DNA, 25 bp, Homo sapien
ttcgggcaaagctacggcattctgt

SEQ ID NO: 876361 - DNA, 25 bp, Homo sapien
tgtagcatagatcacctgaactccc

SEQ ID NO: 876362 - DNA, 25 bp, Homo sapien
ctgacctctgtagcatagatcacct

SEQ ID NO: 876363 - DNA, 25 bp, Homo sapien
tctggcttctcattgagtcttggta

SEQ ID NO: 876364 - DNA, 25 bp, Homo sapien
cttctcattgagtcttggtaccaga

SEQ ID NO: 876365 - DNA, 25 bp, Homo sapien
caacttcaaaacaacatcagaatcc

SEQ ID NO: 876366 - DNA, 25 bp, Homo sapien
acattctttgacacccagggttcat

SEQ ID NO: 876367 - DNA, 25 bp, Homo sapien
cagtgaagtgtcaggtctgaaatcc

SEQ ID NO: 876368 - DNA, 25 bp, Homo sapien
tgtaagagccagtgaagtgtcaggt

SEQ ID NO: 876369 - DNA, 25 bp, Homo sapien
gagccagtgaagtgtcaggtctgaa

SEQ ID NO: 876370 - DNA, 25 bp, Homo sapien
gccagaccctgacatggcttcaggc

SEQ ID NO: 876371 - DNA, 25 bp, Homo sapien
tgggcttcagggattaagtgaatag

SEQ ID NO: 876372 - DNA, 25 bp, Homo sapien
cttcagggattaagtgaatagcagc

SEQ ID NO: 876373 - DNA, 25 bp, Homo sapien
gggattaagtgaatagcagccatgg

SEQ ID NO: 876374 - DNA, 25 bp, Homo sapien
ccttgggttctcaggtggtttagtg

SEQ ID NO: 876375 - DNA, 25 bp, Homo sapien
gcattcctgaaataactgaagcctg

SEQ ID NO: 876376 - DNA, 25 bp, Homo sapien
ttgggttctcaggtggtttagtgct

SEQ ID NO: 876377 - DNA, 25 bp, Homo sapien
gggttctcaggtggtttagtgctgc

SEQ ID NO: 876378 - DNA, 25 bp, Homo sapien
gcttggcaagtttatcctcaaaacc

SEQ ID NO: 876379 - DNA, 25 bp, Homo sapien
gctgctaggcaaaacaggcttggca

SEQ ID NO: 876380 - DNA, 25 bp, Homo sapien
gcccatttttctgtcagagctgcta

SEQ ID NO: 876381 - DNA, 25 bp, Homo sapien
catttagagtaatttgtgagggaga

SEQ ID NO: 876382 - DNA, 25 bp, Homo sapien
gcgcccggccttctattgagtttag

SEQ ID NO: 876383 - DNA, 25 bp, Homo sapien
tagactccagtgtatagtatcctcc

SEQ ID NO: 876384 - DNA, 25 bp, Homo sapien
ggataattaagctggtacctgggaa

SEQ ID NO: 876385 - DNA, 25 bp, Homo sapien
tcctccttgcgtaggtccacttgga

SEQ ID NO: 876386 - DNA, 25 bp, Homo sapien
gatgagggataaccaaaacttgcta

SEQ ID NO: 876387 - DNA, 25 bp, Homo sapien
tatatacacgtagtaagaaaatccc

SEQ ID NO: 876388 - DNA, 25 bp, Homo sapien
agtgaactatccaaataacaggcag

SEQ ID NO: 876389 - DNA, 25 bp, Homo sapien
taacaggcagaaatagtcacaaagg

SEQ ID NO: 876390 - DNA, 25 bp, Homo sapien
gattaagctacaatgaccactgcca

SEQ ID NO: 876391 - DNA, 25 bp, Homo sapien
cagaccttcattctagggaacagca

SEQ ID NO: 876392 - DNA, 25 bp, Homo sapien
gagacccacgtcagctttagaacag

SEQ ID NO: 876393 - DNA, 25 bp, Homo sapien
ccctcggtgaggtaaaagtgtcaat

SEQ ID NO: 876394 - DNA, 25 bp, Homo sapien
tctatggcaatactggttaagcgcc

SEQ ID NO: 876395 - DNA, 25 bp, Homo sapien
caaaatatgacctgcaaaggtggcc

SEQ ID NO: 876396 - DNA, 25 bp, Homo sapien
tggattaacactgcagacggtcttg

SEQ ID NO: 876397 - DNA, 25 bp, Homo sapien
tgtatcaggcatcctaactggccaa

SEQ ID NO: 876398 - DNA, 25 bp, Homo sapien
cagtcggttgttttgccttctttgg

SEQ ID NO: 876399 - DNA, 25 bp, Homo sapien
tacatgtcggcatctccatcatagg

SEQ ID NO: 876400 - DNA, 25 bp, Homo sapien
ggcatctccatcataggctaaggtt

SEQ ID NO: 876401 - DNA, 25 bp, Homo sapien
tgtcggcatctccatcataggctaa

SEQ ID NO: 876402 - DNA, 25 bp, Homo sapien
ctgctacaccgtaaacccaggtctt

SEQ ID NO: 876403 - DNA, 25 bp, Homo sapien
agctgctacaccgtaaacccaggtc

SEQ ID NO: 876404 - DNA, 25 bp, Homo sapien
agtaacacaaatgccccagctgcta

SEQ ID NO: 876405 - DNA, 25 bp, Homo sapien
aagatgagtaacacaaatgccccag

SEQ ID NO: 876406 - DNA, 25 bp, Homo sapien
ttcaacactagtctagtcagttcac

SEQ ID NO: 876407 - DNA, 25 bp, Homo sapien
ttctctttcaacactagtctagtca

SEQ ID NO: 876408 - DNA, 25 bp, Homo sapien
ttaatcctttggcattgcctaaaag

SEQ ID NO: 876409 - DNA, 25 bp, Homo sapien
ctttggcattgcctaaaagaactaa

SEQ ID NO: 876410 - DNA, 25 bp, Homo sapien
ttgggttggatgtacagcccgactg

SEQ ID NO: 876411 - DNA, 25 bp, Homo sapien
atggctgtagaaaccaggtccttcc

SEQ ID NO: 876412 - DNA, 25 bp, Homo sapien
tgctcaagggtgctgttagaagaca

SEQ ID NO: 876413 - DNA, 25 bp, Homo sapien
tgtcctccatggtgggtaataccac

SEQ ID NO: 876414 - DNA, 25 bp, Homo sapien
gttgactacacggtgggttacaaga

SEQ ID NO: 876415 - DNA, 25 bp, Homo sapien
gttacaagacctgtcggcatcaggc

SEQ ID NO: 876416 - DNA, 25 bp, Homo sapien
tacagtacgagtggggttgactaca

SEQ ID NO: 876417 - DNA, 25 bp, Homo sapien
tcaggctggctcatcaccaagcagc

SEQ ID NO: 876418 - DNA, 25 bp, Homo sapien
cagaaaatcatgttttgacaaataa

SEQ ID NO: 876419 - DNA, 25 bp, Homo sapien
cacaggcgcctattgctaattgtct

SEQ ID NO: 876420 - DNA, 25 bp, Homo sapien
gggaatagccccaattgcagtggaa

SEQ ID NO: 876421 - DNA, 25 bp, Homo sapien
cattggtgacgtgaaggaagctcct

SEQ ID NO: 876422 - DNA, 25 bp, Homo sapien
gcaatcgcagttaattggccacact

SEQ ID NO: 876423 - DNA, 25 bp, Homo sapien
gacaccacactgttcgggaagagcc

SEQ ID NO: 876424 - DNA, 25 bp, Homo sapien
tcgggaagagcccttccaagcactg

SEQ ID NO: 876425 - DNA, 25 bp, Homo sapien
atctgacctttgacaccacactgtt

SEQ ID NO: 876426 - DNA, 25 bp, Homo sapien
cactgttcgggaagagcccttccaa

SEQ ID NO: 876427 - DNA, 25 bp, Homo sapien
caaaatttttctcccaatcggcagg

SEQ ID NO: 876428 - DNA, 25 bp, Homo sapien
tttttctcccaatcggcaggttgcc

SEQ ID NO: 876429 - DNA, 25 bp, Homo sapien
aatttttctcccaatcggcaggttg

SEQ ID NO: 876430 - DNA, 25 bp, Homo sapien
tgcaaaatttttctcccaatcggca

SEQ ID NO: 876431 - DNA, 25 bp, Homo sapien
cccttgctggtgaggaggtgtgatc

SEQ ID NO: 876432 - DNA, 25 bp, Homo sapien
agtaactggcagcaatcttcgctgt

SEQ ID NO: 876433 - DNA, 25 bp, Homo sapien
ggaagtaactggcagcaatcttcgc

SEQ ID NO: 876434 - DNA, 25 bp, Homo sapien
gaagtaactggcagcaatcttcgct

SEQ ID NO: 876435 - DNA, 25 bp, Homo sapien
taactggcagcaatcttcgctgttc

SEQ ID NO: 876436 - DNA, 25 bp, Homo sapien
gctgcatcccatataacatttgctg

SEQ ID NO: 876437 - DNA, 25 bp, Homo sapien
tactctctaaggtgtgcgtgtggag

SEQ ID NO: 876438 - DNA, 25 bp, Homo sapien
tctcccttctgtagaagcgtttaaa

SEQ ID NO: 876439 - DNA, 25 bp, Homo sapien
catttgctggataatgctttagagg

SEQ ID NO: 876440 - DNA, 25 bp, Homo sapien
gaacatcagcagcattaagggttgt

SEQ ID NO: 876441 - DNA, 25 bp, Homo sapien
gctaagtcatctagcccatttggtt

SEQ ID NO: 876442 - DNA, 25 bp, Homo sapien
tccatctaattcttgggctaagtca

SEQ ID NO: 876443 - DNA, 25 bp, Homo sapien
gaagatcaaattgacagagcaggta

SEQ ID NO: 876444 - DNA, 25 bp, Homo sapien
tctctagttcttgtataatcaccgg

SEQ ID NO: 876445 - DNA, 25 bp, Homo sapien
caccaaagcctagatcctcaccatt

SEQ ID NO: 876446 - DNA, 25 bp, Homo sapien
accggtctggatctgacctgtattc

SEQ ID NO: 876447 - DNA, 25 bp, Homo sapien
ggatctgacctgtattccaccaaag

SEQ ID NO: 876448 - DNA, 25 bp, Homo sapien
aattgttgcccctatctataccttg

SEQ ID NO: 876449 - DNA, 25 bp, Homo sapien
tcgatgagtgaataaatagctagcc

SEQ ID NO: 876450 - DNA, 25 bp, Homo sapien
caggttttagggactcaatcccatt

SEQ ID NO: 876451 - DNA, 25 bp, Homo sapien
tccagtccactaataaattgttgcc

SEQ ID NO: 876452 - DNA, 25 bp, Homo sapien
ccacatgggagacctggacttcaac

SEQ ID NO: 876453 - DNA, 25 bp, Homo sapien
tggcagtaatgagacagcgtcccgt

SEQ ID NO: 876454 - DNA, 25 bp, Homo sapien
ggacttcaaccctacctggcagtaa

SEQ ID NO: 876455 - DNA, 25 bp, Homo sapien
tccagagggtgttgagaggccacat

SEQ ID NO: 876456 - DNA, 25 bp, Homo sapien
taccatctataatgagttcaatgtc

SEQ ID NO: 876457 - DNA, 25 bp, Homo sapien
gctgcaggattcctccagaaccata

SEQ ID NO: 876458 - DNA, 25 bp, Homo sapien
gttcaatgtcagcacagaattcctc

SEQ ID NO: 876459 - DNA, 25 bp, Homo sapien
tgaaatcatcagctgacccatcact

SEQ ID NO: 876460 - DNA, 25 bp, Homo sapien
caccgataacaaggcttcactgggc

SEQ ID NO: 876461 - DNA, 25 bp, Homo sapien
cagggtttggactggtccatcaggg

SEQ ID NO: 876462 - DNA, 25 bp, Homo sapien
gagaccactggccatattgccaccg

SEQ ID NO: 876463 - DNA, 25 bp, Homo sapien
gctgggtcactgttcgtcttcggat

SEQ ID NO: 876464 - DNA, 25 bp, Homo sapien
caccatgcaggacgtgttcatctgc

SEQ ID NO: 876465 - DNA, 25 bp, Homo sapien
aaagctgacagttcacagggcattc

SEQ ID NO: 876466 - DNA, 25 bp, Homo sapien
gaacattctgaccaaggagaccaat

SEQ ID NO: 876467 - DNA, 25 bp, Homo sapien
cagggcattccaccatgcaggacgt

SEQ ID NO: 876468 - DNA, 25 bp, Homo sapien
tattgaaagtataaagtggtttgac

SEQ ID NO: 876469 - DNA, 25 bp, Homo sapien
actattgaaagtataaagtggtttg

SEQ ID NO: 876470 - DNA, 25 bp, Homo sapien
ctattgaaagtataaagtggtttga

SEQ ID NO: 876471 - DNA, 25 bp, Homo sapien
tactcgcgaagatataacacagcat

SEQ ID NO: 876472 - DNA, 25 bp, Homo sapien
catctgctggcaatgagctgcatgg

SEQ ID NO: 876473 - DNA, 25 bp, Homo sapien
ttagggaagaatttactcgcgaaga

SEQ ID NO: 876474 - DNA, 25 bp, Homo sapien
cacgggtcacttggctcagcatgaa

SEQ ID NO: 876475 - DNA, 25 bp, Homo sapien
caatatttcaggtcaactgacttgc

SEQ ID NO: 876476 - DNA, 25 bp, Homo sapien
cttcgaacacaatccaacatccttg

SEQ ID NO: 876477 - DNA, 25 bp, Homo sapien
ttcaggtcaactgacttgccatcac

SEQ ID NO: 876478 - DNA, 25 bp, Homo sapien
tgacttgccatcacttcgaacacaa

SEQ ID NO: 876479 - DNA, 25 bp, Homo sapien
catcagctggttgtctgatgggatc

SEQ ID NO: 876480 - DNA, 25 bp, Homo sapien
ggttctttctcaacagcattagggc

SEQ ID NO: 876481 - DNA, 25 bp, Homo sapien
tgacctttgccggaaactgctttga

SEQ ID NO: 876482 - DNA, 25 bp, Homo sapien
gcattagggcaagatcttccttcat

SEQ ID NO: 876483 - DNA, 25 bp, Homo sapien
gtctttaaagcttcagtggcaaata

SEQ ID NO: 876484 - DNA, 25 bp, Homo sapien
atgtctttaaagcttcagtggcaaa

SEQ ID NO: 876485 - DNA, 25 bp, Homo sapien
tgtctttaaagcttcagtggcaaat

SEQ ID NO: 876486 - DNA, 25 bp, Homo sapien
catggaccccattcagatatcacac

SEQ ID NO: 876487 - DNA, 25 bp, Homo sapien
aaacacattgggtccatggacccca

SEQ ID NO: 876488 - DNA, 25 bp, Homo sapien
gtaatttgcacactctagagcccag

SEQ ID NO: 876489 - DNA, 25 bp, Homo sapien
cagggcatggtaatttgcacactct

SEQ ID NO: 876490 - DNA, 25 bp, Homo sapien
gaagggccatctgctgtattctgca

SEQ ID NO: 876491 - DNA, 25 bp, Homo sapien
tcagaagggccatctgctgtattct

SEQ ID NO: 876492 - DNA, 25 bp, Homo sapien
tctgggtcacagaggtaatcctcta

SEQ ID NO: 876493 - DNA, 25 bp, Homo sapien
ggtaatcctctacatgttcagaagg

SEQ ID NO: 876494 - DNA, 25 bp, Homo sapien
aattagaatgaccaacccacaggac

SEQ ID NO: 876495 - DNA, 25 bp, Homo sapien
gcatgttatgcaagcttcctctgaa

SEQ ID NO: 876496 - DNA, 25 bp, Homo sapien
ggtcatttatacacatatgagggag

SEQ ID NO: 876497 - DNA, 25 bp, Homo sapien
ggacagatggttctccttaagacat

SEQ ID NO: 876498 - DNA, 25 bp, Homo sapien
cagggctctgtgacccataggtact

SEQ ID NO: 876499 - DNA, 25 bp, Homo sapien
aggtactggttgcagtcactgtggc

SEQ ID NO: 876500 - DNA, 25 bp, Homo sapien
tgtggcatgggacaacctcatacac

SEQ ID NO: 876501 - DNA, 25 bp, Homo sapien
gggtttgcacgccctctccacagtt

SEQ ID NO: 876502 - DNA, 25 bp, Homo sapien
tttagaacgaaccttcacaccactc

SEQ ID NO: 876503 - DNA, 25 bp, Homo sapien
gtttttcacgcagccatttagaacg

SEQ ID NO: 876504 - DNA, 25 bp, Homo sapien
aggccttcctccattatatggtttt

SEQ ID NO: 876505 - DNA, 25 bp, Homo sapien
acaggacttgctgcagcgcgaccag

SEQ ID NO: 876506 - DNA, 25 bp, Homo sapien
aggggatgatgcaggcctcctcaat

SEQ ID NO: 876507 - DNA, 25 bp, Homo sapien
ggcaggggatgatgcaggcctcctc

SEQ ID NO: 876508 - DNA, 25 bp, Homo sapien
gaggggcaggggatgatgcaggcct

SEQ ID NO: 876509 - DNA, 25 bp, Homo sapien
ggggcaggggatgatgcaggcctcc

SEQ ID NO: 876510 - DNA, 25 bp, Homo sapien
gccatgtgatctgcttaggattcat

SEQ ID NO: 876511 - DNA, 25 bp, Homo sapien
tgccatgtgatctgcttaggattca

SEQ ID NO: 876512 - DNA, 25 bp, Homo sapien
ctgccatgtgatctgcttaggattc

SEQ ID NO: 876513 - DNA, 25 bp, Homo sapien
tcaacatttctgactgacagctcgt

SEQ ID NO: 876514 - DNA, 25 bp, Homo sapien
cctgtctgctgccatatcattctca

SEQ ID NO: 876515 - DNA, 25 bp, Homo sapien
ttaattgacaataacctgtctgctg

SEQ ID NO: 876516 - DNA, 25 bp, Homo sapien
tgacagctcgtgtttaattgacaat

SEQ ID NO: 876517 - DNA, 25 bp, Homo sapien
agatgccactgctaagtttctaatg

SEQ ID NO: 876518 - DNA, 25 bp, Homo sapien
cctaaaatagtatgagatgcccaaa

SEQ ID NO: 876519 - DNA, 25 bp, Homo sapien
ggagtatcgataatgatccagagga

SEQ ID NO: 876520 - DNA, 25 bp, Homo sapien
gctgaggcagtaaattaattgacct

SEQ ID NO: 876521 - DNA, 25 bp, Homo sapien
tccccacgaagtcaatgtcatcatg

SEQ ID NO: 876522 - DNA, 25 bp, Homo sapien
gaaaggaatgatgcaggacatgcag

SEQ ID NO: 876523 - DNA, 25 bp, Homo sapien
ggacattccgtcagataccagattg

SEQ ID NO: 876524 - DNA, 25 bp, Homo sapien
gagatcctttcggaatccccacgaa

SEQ ID NO: 876525 - DNA, 25 bp, Homo sapien
ctccacactcccgaagatagcaaat

SEQ ID NO: 876526 - DNA, 25 bp, Homo sapien
gcattttccctccacactcccgaag

SEQ ID NO: 876527 - DNA, 25 bp, Homo sapien
tttccctccacactcccgaagatag

SEQ ID NO: 876528 - DNA, 25 bp, Homo sapien
cactcccgaagatagcaaatatgta

SEQ ID NO: 876529 - DNA, 25 bp, Homo sapien
cctgccattttgatcgtagcatgcc

SEQ ID NO: 876530 - DNA, 25 bp, Homo sapien
cgatatccttgtccgcattccttga

SEQ ID NO: 876531 - DNA, 25 bp, Homo sapien
tgccattgcttggtaacgatatcct

SEQ ID NO: 876532 - DNA, 25 bp, Homo sapien
taaaatacagtctgaccagttcccc

SEQ ID NO: 876533 - DNA, 25 bp, Homo sapien
ttgacgtgtactggctttggcatcc

SEQ ID NO: 876534 - DNA, 25 bp, Homo sapien
tgacgtgtactggctttggcatccc

SEQ ID NO: 876535 - DNA, 25 bp, Homo sapien
tttgacgtgtactggctttggcatc

SEQ ID NO: 876536 - DNA, 25 bp, Homo sapien
gaccagctggtcaattgacagtcat

SEQ ID NO: 876537 - DNA, 25 bp, Homo sapien
cagggcctgcatactgtaggcactc

SEQ ID NO: 876538 - DNA, 25 bp, Homo sapien
taggcactcatggattccagcctgt

SEQ ID NO: 876539 - DNA, 25 bp, Homo sapien
tgtcctccatcttgcttgcgacaag

SEQ ID NO: 876540 - DNA, 25 bp, Homo sapien
cttcagcgtgtaaggccatgcactc

SEQ ID NO: 876541 - DNA, 25 bp, Homo sapien
ttcagcgtgtaaggccatgcactca

SEQ ID NO: 876542 - DNA, 25 bp, Homo sapien
tcagcgtgtaaggccatgcactcat

SEQ ID NO: 876543 - DNA, 25 bp, Homo sapien
ccttcagcgtgtaaggccatgcact

SEQ ID NO: 876544 - DNA, 25 bp, Homo sapien
aaaattctactcttcgtagaaacat

SEQ ID NO: 876545 - DNA, 25 bp, Homo sapien
gatcaaatcagcaaaaactggaatt

SEQ ID NO: 876546 - DNA, 25 bp, Homo sapien
tgaaatacgtaactacacatgggag

SEQ ID NO: 876547 - DNA, 25 bp, Homo sapien
acatgggagagcaaaatacgttttt

SEQ ID NO: 876548 - DNA, 25 bp, Homo sapien
tggaattctgctctacatcttcaaa

SEQ ID NO: 876549 - DNA, 25 bp, Homo sapien
gggctgtcttgttgcacgctccaag

SEQ ID NO: 876550 - DNA, 25 bp, Homo sapien
gggactaattggcatctgcgccatt

SEQ ID NO: 876551 - DNA, 25 bp, Homo sapien
gttgcacgctccaagggactaattg

SEQ ID NO: 876552 - DNA, 25 bp, Homo sapien
catctgcgccatttgtgagtcttcc

SEQ ID NO: 876553 - DNA, 25 bp, Homo sapien
aatgatgacccgatgcctagactgc

SEQ ID NO: 876554 - DNA, 25 bp, Homo sapien
ggcagctgaatgatgacccgatgcc

SEQ ID NO: 876555 - DNA, 25 bp, Homo sapien
cgcttgaggtgcctcacaggccttc

SEQ ID NO: 876556 - DNA, 25 bp, Homo sapien
ctgtagctttggcacgcttgaggtg

SEQ ID NO: 876557 - DNA, 25 bp, Homo sapien
gttggtcaaaattcttagaggcaat

SEQ ID NO: 876558 - DNA, 25 bp, Homo sapien
aggtaagacgtaaagggctcaaatg

SEQ ID NO: 876559 - DNA, 25 bp, Homo sapien
cagttggtcaaaattcttagaggca

SEQ ID NO: 876560 - DNA, 25 bp, Homo sapien
ttcccagttggtcaaaattcttaga

SEQ ID NO: 876561 - DNA, 25 bp, Homo sapien
gagcacaaagcatcttggcactgtt

SEQ ID NO: 876562 - DNA, 25 bp, Homo sapien
tggcactgttatccaacaatgaccc

SEQ ID NO: 876563 - DNA, 25 bp, Homo sapien
cttgctccggatgacatgacctgtg

SEQ ID NO: 876564 - DNA, 25 bp, Homo sapien
gttacagcagtctacaggcaaaaca

SEQ ID NO: 876565 - DNA, 25 bp, Homo sapien
caggtttacatagccctgtgcaaaa

SEQ ID NO: 876566 - DNA, 25 bp, Homo sapien
gtttacatagccctgtgcaaaactc

SEQ ID NO: 876567 - DNA, 25 bp, Homo sapien
aatcaggtttacatagccctgtgca

SEQ ID NO: 876568 - DNA, 25 bp, Homo sapien
tcaaatcaggtttacatagccctgt

SEQ ID NO: 876569 - DNA, 25 bp, Homo sapien
gaagacctcagaagtctaccgagga

SEQ ID NO: 876570 - DNA, 25 bp, Homo sapien
gttttctaggtgaacagccttccta

SEQ ID NO: 876571 - DNA, 25 bp, Homo sapien
acattgctaggccagaagacctcag

SEQ ID NO: 876572 - DNA, 25 bp, Homo sapien
tctaccgaggaggttttctaggtga

SEQ ID NO: 876573 - DNA, 25 bp, Homo sapien
agcagacaaggccttacagtttcag

SEQ ID NO: 876574 - DNA, 25 bp, Homo sapien
tctttacacgaagaggggcatgatg

SEQ ID NO: 876575 - DNA, 25 bp, Homo sapien
gatgtccagtcactatatggggtca

SEQ ID NO: 876576 - DNA, 25 bp, Homo sapien
cagtttcaggtcgaaggctttcagg

SEQ ID NO: 876577 - DNA, 25 bp, Homo sapien
tctgcatgccgacagagcaggaggc

SEQ ID NO: 876578 - DNA, 25 bp, Homo sapien
tgttgaaggacgatactgaggtgtc

SEQ ID NO: 876579 - DNA, 25 bp, Homo sapien
ccagtggtacactgtgcaaggatgc

SEQ ID NO: 876580 - DNA, 25 bp, Homo sapien
ggcccacattgactcgcacacagat

SEQ ID NO: 876581 - DNA, 25 bp, Homo sapien
gaagactgtccaccgtgaagcctgc

SEQ ID NO: 876582 - DNA, 25 bp, Homo sapien
gcagaagactgtccaccgtgaagcc

SEQ ID NO: 876583 - DNA, 25 bp, Homo sapien
aacaggcagaagactgtccaccgtg

SEQ ID NO: 876584 - DNA, 25 bp, Homo sapien
tgtccaccgtgaagcctgcgtaagt

SEQ ID NO: 876585 - DNA, 25 bp, Homo sapien
cagatagcaaatttgactaggaaca

SEQ ID NO: 876586 - DNA, 25 bp, Homo sapien
tataggtgtgcacagttgttacaca

SEQ ID NO: 876587 - DNA, 25 bp, Homo sapien
gttttacgcatgtaacactcatgtg

SEQ ID NO: 876588 - DNA, 25 bp, Homo sapien
tgcaaaggccaaggtaattataggt

SEQ ID NO: 876589 - DNA, 25 bp, Homo sapien
gatgcacactaacttttgaaacgaa

SEQ ID NO: 876590 - DNA, 25 bp, Homo sapien
aaattgctcaacacatcaacagata

SEQ ID NO: 876591 - DNA, 25 bp, Homo sapien
gatggcgtctgaagctggcgactca

SEQ ID NO: 876592 - DNA, 25 bp, Homo sapien
aatcttggatggctgaatttctggt

SEQ ID NO: 876593 - DNA, 25 bp, Homo sapien
tcttcacccgcataggccagaatgg

SEQ ID NO: 876594 - DNA, 25 bp, Homo sapien
gtgagcaggaggaccacgtagacca

SEQ ID NO: 876595 - DNA, 25 bp, Homo sapien
ttctgtcgttttccctgagcaggtg

SEQ ID NO: 876596 - DNA, 25 bp, Homo sapien
gatcgtgctcgtatctgtttccctt

SEQ ID NO: 876597 - DNA, 25 bp, Homo sapien
gaccaccaacagctattattgttaa

SEQ ID NO: 876598 - DNA, 25 bp, Homo sapien
ttgttaaattaatgtaaaatgagca

SEQ ID NO: 876599 - DNA, 25 bp, Homo sapien
caccaacagctattattgttaaatt

SEQ ID NO: 876600 - DNA, 25 bp, Homo sapien
ttaatgtaaaatgagcaatttaaac

SEQ ID NO: 876601 - DNA, 25 bp, Homo sapien
cttctctcacttttgtttccaatat

SEQ ID NO: 876602 - DNA, 25 bp, Homo sapien
ttctctcacttttgtttccaatatt

SEQ ID NO: 876603 - DNA, 25 bp, Homo sapien
tctctgtggagattctccttatact

SEQ ID NO: 876604 - DNA, 25 bp, Homo sapien
atttgcttctctgtggagattctcc

SEQ ID NO: 876605 - DNA, 25 bp, Homo sapien
ccttatacttctcttcacacagagt

SEQ ID NO: 876606 - DNA, 25 bp, Homo sapien
tacttctcttcacacagagtatcca

SEQ ID NO: 876607 - DNA, 25 bp, Homo sapien
cagtaggagtactaagacacatggc

SEQ ID NO: 876608 - DNA, 25 bp, Homo sapien
tctggactacgtaattaacatgaac

SEQ ID NO: 876609 - DNA, 25 bp, Homo sapien
ggttctaagtatctttgggcttcaa

SEQ ID NO: 876610 - DNA, 25 bp, Homo sapien
gacacatggcattctataaagttcc

SEQ ID NO: 876611 - DNA, 25 bp, Homo sapien
gaaggcaaagtaattctcatacttg

SEQ ID NO: 876612 - DNA, 25 bp, Homo sapien
taaagaattcacataataaaaggct

SEQ ID NO: 876613 - DNA, 25 bp, Homo sapien
taaaaggcttggatgggttcaggaa

SEQ ID NO: 876614 - DNA, 25 bp, Homo sapien
gaatagaaaccctgccaaagataga

SEQ ID NO: 876615 - DNA, 25 bp, Homo sapien
tgctaataatactaatttggcatat

SEQ ID NO: 876616 - DNA, 25 bp, Homo sapien
tgataaaagcttaacatgtaaaata

SEQ ID NO: 876617 - DNA, 25 bp, Homo sapien
tattattcacaacttatggatggga

SEQ ID NO: 876618 - DNA, 25 bp, Homo sapien
taaggaactcttatgtattaatctg

SEQ ID NO: 876619 - DNA, 25 bp, Homo sapien
tgtcaacatgtggtaacaacctaag

SEQ ID NO: 876620 - DNA, 25 bp, Homo sapien
atataacactataccaacagccaag

SEQ ID NO: 876621 - DNA, 25 bp, Homo sapien
gcaatatgaatactgcacgattcca

SEQ ID NO: 876622 - DNA, 25 bp, Homo sapien
tgttttggtttacggcatgcatagc

SEQ ID NO: 876623 - DNA, 25 bp, Homo sapien
tccagggatataagctcacaagtta

SEQ ID NO: 876624 - DNA, 25 bp, Homo sapien
atccagggatataagctcacaagtt

SEQ ID NO: 876625 - DNA, 25 bp, Homo sapien
tatccagggatataagctcacaagt

SEQ ID NO: 876626 - DNA, 25 bp, Homo sapien
ctttacatgtatttaatgcacttac

SEQ ID NO: 876627 - DNA, 25 bp, Homo sapien
aactcagttgtttagctttgtctag

SEQ ID NO: 876628 - DNA, 25 bp, Homo sapien
taaaagttatagacagtaatgttct

SEQ ID NO: 876629 - DNA, 25 bp, Homo sapien
gggtaatcgctttgcagatcacaaa

SEQ ID NO: 876630 - DNA, 25 bp, Homo sapien
gagagacacaggcactagaaataca

SEQ ID NO: 876631 - DNA, 25 bp, Homo sapien
cactagaaatacaagtaatggcaaa

SEQ ID NO: 876632 - DNA, 25 bp, Homo sapien
aatgattactaaatgagagacacag

SEQ ID NO: 876633 - DNA, 25 bp, Homo sapien
tgggggtacaccgaactctggatgg

SEQ ID NO: 876634 - DNA, 25 bp, Homo sapien
cgacatctggtaggcaaagtttgaa

SEQ ID NO: 876635 - DNA, 25 bp, Homo sapien
taattacgacatgatacctacccca

SEQ ID NO: 876636 - DNA, 25 bp, Homo sapien
taccccatagtaagcaaccatatag

SEQ ID NO: 876637 - DNA, 25 bp, Homo sapien
tggaacacagtgctaggaaacagtc

SEQ ID NO: 876638 - DNA, 25 bp, Homo sapien
tctcttctcaaattcgcatagggct

SEQ ID NO: 876639 - DNA, 25 bp, Homo sapien
ctacctctgggtcttgcatttaatg

SEQ ID NO: 876640 - DNA, 25 bp, Homo sapien
aatgttccttctgccctaaatgttc

SEQ ID NO: 876641 - DNA, 25 bp, Homo sapien
cctgaatgatctcaagcctctgcag

SEQ ID NO: 876642 - DNA, 25 bp, Homo sapien
ggtttggctggcacttccgggtata

SEQ ID NO: 876643 - DNA, 25 bp, Homo sapien
tttggctggcacttccgggtatagc

SEQ ID NO: 876644 - DNA, 25 bp, Homo sapien
ttggctggcacttccgggtatagct

SEQ ID NO: 876645 - DNA, 25 bp, Homo sapien
tcagtagggtttggctggcacttcc

SEQ ID NO: 876646 - DNA, 25 bp, Homo sapien
atagcagagcgttgaaatgaaatat

SEQ ID NO: 876647 - DNA, 25 bp, Homo sapien
tatagcagagcgttgaaatgaaata

SEQ ID NO: 876648 - DNA, 25 bp, Homo sapien
ctatagcagagcgttgaaatgaaat

SEQ ID NO: 876649 - DNA, 25 bp, Homo sapien
tcagcattactagaagccagccggt

SEQ ID NO: 876650 - DNA, 25 bp, Homo sapien
taacaatctgggtcaaggaggaaag

SEQ ID NO: 876651 - DNA, 25 bp, Homo sapien
tctttggatagcagagttactccca

SEQ ID NO: 876652 - DNA, 25 bp, Homo sapien
tggccctagccggtgaccttcatta

SEQ ID NO: 876653 - DNA, 25 bp, Homo sapien
gactgagtcacaggaggaaacaatt

SEQ ID NO: 876654 - DNA, 25 bp, Homo sapien
ctaggacattcctaaatagtggagc

SEQ ID NO: 876655 - DNA, 25 bp, Homo sapien
taggacattcctaaatagtggagcc

SEQ ID NO: 876656 - DNA, 25 bp, Homo sapien
acaacctcttgaacttgcgtgcctg

SEQ ID NO: 876657 - DNA, 25 bp, Homo sapien
gtaatgcgccgcttcctcagtttga

SEQ ID NO: 876658 - DNA, 25 bp, Homo sapien
ccagtgggctcattggtaatgcgcc

SEQ ID NO: 876659 - DNA, 25 bp, Homo sapien
ttccagtaagtgagggcagtttccg

SEQ ID NO: 876660 - DNA, 25 bp, Homo sapien
tttcataagtacaaggtccccaagc

SEQ ID NO: 876661 - DNA, 25 bp, Homo sapien
ggtccccaagctgaccaaggtgaaa

SEQ ID NO: 876662 - DNA, 25 bp, Homo sapien
cagttggacaaggaatgtggcacag

SEQ ID NO: 876663 - DNA, 25 bp, Homo sapien
cccttgctgatcattacagttttca

SEQ ID NO: 876664 - DNA, 25 bp, Homo sapien
tattagggataggtccagtgcataa

SEQ ID NO: 876665 - DNA, 25 bp, Homo sapien
ctgtgtagtattagggataggtcca

SEQ ID NO: 876666 - DNA, 25 bp, Homo sapien
ggataggtccagtgcataattttaa

SEQ ID NO: 876667 - DNA, 25 bp, Homo sapien
cataattttaagtccattggctttg

SEQ ID NO: 876668 - DNA, 25 bp, Homo sapien
gctgcctgaatgctgcgtgtcagca

SEQ ID NO: 876669 - DNA, 25 bp, Homo sapien
aatgctgcgtgtcagcaagttagga

SEQ ID NO: 876670 - DNA, 25 bp, Homo sapien
caagttaggaggatatttgagcgat

SEQ ID NO: 876671 - DNA, 25 bp, Homo sapien
tatttgagcgatgggtcctgactgc

SEQ ID NO: 876672 - DNA, 25 bp, Homo sapien
aaattgcaagtgacagcaatcaccc

SEQ ID NO: 876673 - DNA, 25 bp, Homo sapien
aaaattgcaagtgacagcaatcacc

SEQ ID NO: 876674 - DNA, 25 bp, Homo sapien
ttgcaagtgacagcaatcaccccaa

SEQ ID NO: 876675 - DNA, 25 bp, Homo sapien
aattgcaagtgacagcaatcacccc

SEQ ID NO: 876676 - DNA, 25 bp, Homo sapien
gcaatgatggttggaaattgtgtct

SEQ ID NO: 876677 - DNA, 25 bp, Homo sapien
cgcaatgatggttggaaattgtgtc

SEQ ID NO: 876678 - DNA, 25 bp, Homo sapien
tggactactacttaaaattcgcaag

SEQ ID NO: 876679 - DNA, 25 bp, Homo sapien
ccgagggttactacaagcatctttg

SEQ ID NO: 876680 - DNA, 25 bp, Homo sapien
caatggactactacttaaaattcgc

SEQ ID NO: 876681 - DNA, 25 bp, Homo sapien
ctaacaatccgagggttactacaag

SEQ ID NO: 876682 - DNA, 25 bp, Homo sapien
agttttcttttcccattgctattct

SEQ ID NO: 876683 - DNA, 25 bp, Homo sapien
tgctattctccttggtttatttccc

SEQ ID NO: 876684 - DNA, 25 bp, Homo sapien
tcttttcccattgctattctccttg

SEQ ID NO: 876685 - DNA, 25 bp, Homo sapien
tcccattgctattctccttggttta

SEQ ID NO: 876686 - DNA, 25 bp, Homo sapien
cctaggccagtgtggacgtacgttt

SEQ ID NO: 876687 - DNA, 25 bp, Homo sapien
aaacgtacgtccacactggcctagg

SEQ ID NO: 876688 - DNA, 25 bp, Homo sapien
attcttttgtacacttcctatatct

SEQ ID NO: 876689 - DNA, 25 bp, Homo sapien
tcacttattcttttgtacacttcct

SEQ ID NO: 876690 - DNA, 25 bp, Homo sapien
cacttattcttttgtacacttccta

SEQ ID NO: 876691 - DNA, 25 bp, Homo sapien
ttttgtacacttcctatatctggtc

SEQ ID NO: 876692 - DNA, 25 bp, Homo sapien
acattattcctgctaaactttgatg

SEQ ID NO: 876693 - DNA, 25 bp, Homo sapien
gaggttgagtcaagaaggcctttaa

SEQ ID NO: 876694 - DNA, 25 bp, Homo sapien
gtaaaccagaactgaccaaagatgg

SEQ ID NO: 876695 - DNA, 25 bp, Homo sapien
taaagaaacttgtcagtaaaccaga

SEQ ID NO: 876696 - DNA, 25 bp, Homo sapien
cttcataagtgaatccttgagaaga

SEQ ID NO: 876697 - DNA, 25 bp, Homo sapien
ataagtgaatccttgagaagaaagc

SEQ ID NO: 876698 - DNA, 25 bp, Homo sapien
gctgactgagcaaagggtccacacg

SEQ ID NO: 876699 - DNA, 25 bp, Homo sapien
tggttgccgcgcctcttgtcctgct

SEQ ID NO: 876700 - DNA, 25 bp, Homo sapien
gcagtacacctctcgggtctggatg

SEQ ID NO: 876701 - DNA, 25 bp, Homo sapien
gttttcgttggcctgcacgcagtac

SEQ ID NO: 876702 - DNA, 25 bp, Homo sapien
tgtccttacacgagtgcctgcaggg

SEQ ID NO: 876703 - DNA, 25 bp, Homo sapien
ttttcactgccaatgggaaactgcc

SEQ ID NO: 876704 - DNA, 25 bp, Homo sapien
gggacaactccatctccttgagaca

SEQ ID NO: 876705 - DNA, 25 bp, Homo sapien
tcggaaacctggcactctttggtga

SEQ ID NO: 876706 - DNA, 25 bp, Homo sapien
agtagtgacaacatccactccccaa

SEQ ID NO: 876707 - DNA, 25 bp, Homo sapien
gtttgtaaactctgatgaatctttt

SEQ ID NO: 876708 - DNA, 25 bp, Homo sapien
atgcagacgtgtggggggaccctga

SEQ ID NO: 876709 - DNA, 25 bp, Homo sapien
caacttggaatgcagacgtgtgggg

SEQ ID NO: 876710 - DNA, 25 bp, Homo sapien
ggacactgtgaacacctggtaagca

SEQ ID NO: 876711 - DNA, 25 bp, Homo sapien
taagcagtcgcagctttgggcttct

SEQ ID NO: 876712 - DNA, 25 bp, Homo sapien
ctggtaagcagtcgcagctttgggc

SEQ ID NO: 876713 - DNA, 25 bp, Homo sapien
gaacacctggtaagcagtcgcagct

SEQ ID NO: 876714 - DNA, 25 bp, Homo sapien
agtagatgagcgctcacacactggg

SEQ ID NO: 876715 - DNA, 25 bp, Homo sapien
tccagtaggcagaaatgttgagcag

SEQ ID NO: 876716 - DNA, 25 bp, Homo sapien
catggccttaaagtggacctcggtg

SEQ ID NO: 876717 - DNA, 25 bp, Homo sapien
cacaagcatatcagagttcaaagcc

SEQ ID NO: 876718 - DNA, 25 bp, Homo sapien
gagtgatcatatgctccctatgaaa

SEQ ID NO: 876719 - DNA, 25 bp, Homo sapien
gctggagtgatcatatgctccctat

SEQ ID NO: 876720 - DNA, 25 bp, Homo sapien
catatgctccctatgaaagctgagg

SEQ ID NO: 876721 - DNA, 25 bp, Homo sapien
tgccagctggagtgatcatatgctc

SEQ ID NO: 876722 - DNA, 25 bp, Homo sapien
caactccaaactattatatcctgaa

SEQ ID NO: 876723 - DNA, 25 bp, Homo sapien
caaaggttctactgaatcgcaccca

SEQ ID NO: 876724 - DNA, 25 bp, Homo sapien
tagcacggcctaactgattctgaca

SEQ ID NO: 876725 - DNA, 25 bp, Homo sapien
aaggcttgagcccttcatgacattg

SEQ ID NO: 876726 - DNA, 25 bp, Homo sapien
cccagggcacagcaagctcgactga

SEQ ID NO: 876727 - DNA, 25 bp, Homo sapien
agggcacagcaagctcgactgacac

SEQ ID NO: 876728 - DNA, 25 bp, Homo sapien
atcccagggcacagcaagctcgact

SEQ ID NO: 876729 - DNA, 25 bp, Homo sapien
ggcacagcaagctcgactgacacca

SEQ ID NO: 876730 - DNA, 25 bp, Homo sapien
aactcaggagatgaagaggtctcat

SEQ ID NO: 876731 - DNA, 25 bp, Homo sapien
ccagaactcaggagatgaagaggtc

SEQ ID NO: 876732 - DNA, 25 bp, Homo sapien
gctctcactctctaggttcccagaa

SEQ ID NO: 876733 - DNA, 25 bp, Homo sapien
gaactcaggagatgaagaggtctca

SEQ ID NO: 876734 - DNA, 25 bp, Homo sapien
ggactcctgcggtggaatcatagtt

SEQ ID NO: 876735 - DNA, 25 bp, Homo sapien
caagtattcctgctatctaaatcag

SEQ ID NO: 876736 - DNA, 25 bp, Homo sapien
tagaggcctcagtatcttgtccagg

SEQ ID NO: 876737 - DNA, 25 bp, Homo sapien
gatagacaatatgaagaaaggtaga

SEQ ID NO: 876738 - DNA, 25 bp, Homo sapien
tttggttgttcaaatgcagtttcag

SEQ ID NO: 876739 - DNA, 25 bp, Homo sapien
tgtttcacaacacattgctttggtt

SEQ ID NO: 876740 - DNA, 25 bp, Homo sapien
attgctttggttgttcaaatgcagt

SEQ ID NO: 876741 - DNA, 25 bp, Homo sapien
attgatctgtttcacaacacattgc

SEQ ID NO: 876742 - DNA, 25 bp, Homo sapien
tctagaatttgacccctccaatcca

SEQ ID NO: 876743 - DNA, 25 bp, Homo sapien
tacttgtggctgtccaaactctaga

SEQ ID NO: 876744 - DNA, 25 bp, Homo sapien
cattgctgctactttgatccagggc

SEQ ID NO: 876745 - DNA, 25 bp, Homo sapien
gattataaccacgaccttacttgtg

SEQ ID NO: 876746 - DNA, 25 bp, Homo sapien
aaaatacccagagaacatcatgtct

SEQ ID NO: 876747 - DNA, 25 bp, Homo sapien
caataagtaaatcatacatgagata

SEQ ID NO: 876748 - DNA, 25 bp, Homo sapien
acccagagaacatcatgtctttcag

SEQ ID NO: 876749 - DNA, 25 bp, Homo sapien
taagtaaatcatacatgagatagtt

SEQ ID NO: 876750 - DNA, 25 bp, Homo sapien
ggcttgggctcaaagtactcacaga

SEQ ID NO: 876751 - DNA, 25 bp, Homo sapien
ctcgcatggactggattggcacacc

SEQ ID NO: 876752 - DNA, 25 bp, Homo sapien
tcacagatgatatcctccgcaggaa

SEQ ID NO: 876753 - DNA, 25 bp, Homo sapien
gaactccgtcaggtttggacagcca

SEQ ID NO: 876754 - DNA, 25 bp, Homo sapien
tagtatgcagtgtagtccatccctc

SEQ ID NO: 876755 - DNA, 25 bp, Homo sapien
agccctcgtttggatgcctccggga

SEQ ID NO: 876756 - DNA, 25 bp, Homo sapien
tggttattgggtctctcggcctgct

SEQ ID NO: 876757 - DNA, 25 bp, Homo sapien
tcacgggctgacactgattccaagg

SEQ ID NO: 876758 - DNA, 25 bp, Homo sapien
ccacagtacacacgatgaagggctg

SEQ ID NO: 876759 - DNA, 25 bp, Homo sapien
gaagggctgtctacttcttccctcc

SEQ ID NO: 876760 - DNA, 25 bp, Homo sapien
gaaagatcagatcttccccacagta

SEQ ID NO: 876761 - DNA, 25 bp, Homo sapien
caagcagtcttgacacaagtacaca

SEQ ID NO: 876762 - DNA, 25 bp, Homo sapien
tgaagtcggaaggtgggtttgtaga

SEQ ID NO: 876763 - DNA, 25 bp, Homo sapien
ctgaagtcggaaggtgggtttgtag

SEQ ID NO: 876764 - DNA, 25 bp, Homo sapien
tactgtatcttaagattcagagcag

SEQ ID NO: 876765 - DNA, 25 bp, Homo sapien
ttcttgcggttttcatgacataagg

SEQ ID NO: 876766 - DNA, 25 bp, Homo sapien
taaagcagaggctactagtgtggga

SEQ ID NO: 876767 - DNA, 25 bp, Homo sapien
gttattcgatttcttgcggttttca

SEQ ID NO: 876768 - DNA, 25 bp, Homo sapien
aaataattggtgtttgcctccatac

SEQ ID NO: 876769 - DNA, 25 bp, Homo sapien
caaataattggtgtttgcctccata

SEQ ID NO: 876770 - DNA, 25 bp, Homo sapien
tcaaataattggtgtttgcctccat

SEQ ID NO: 876771 - DNA, 25 bp, Homo sapien
caactgtatgtttttcccaggccac

SEQ ID NO: 876772 - DNA, 25 bp, Homo sapien
agcaagggtgaaaagtagcccaact

SEQ ID NO: 876773 - DNA, 25 bp, Homo sapien
acagttgggcctgcgggaccaccac

SEQ ID NO: 876774 - DNA, 25 bp, Homo sapien
gaagccacagttgggcctgcgggac

SEQ ID NO: 876775 - DNA, 25 bp, Homo sapien
gattcttgtctcttgcttggttcca

SEQ ID NO: 876776 - DNA, 25 bp, Homo sapien
ttcttgtctcttgcttggttccaaa

SEQ ID NO: 876777 - DNA, 25 bp, Homo sapien
tttgattcttgtctcttgcttggtt

SEQ ID NO: 876778 - DNA, 25 bp, Homo sapien
tgtttgattcttgtctcttgcttgg

SEQ ID NO: 876779 - DNA, 25 bp, Homo sapien
ggaatcataaaacataaataccgca

SEQ ID NO: 876780 - DNA, 25 bp, Homo sapien
aatagcactgacttgggaatcataa

SEQ ID NO: 876781 - DNA, 25 bp, Homo sapien
ataaataccgcatccctagtgggtc

SEQ ID NO: 876782 - DNA, 25 bp, Homo sapien
agaaaatagcactgacttgggaatc

SEQ ID NO: 876783 - DNA, 25 bp, Homo sapien
tgcgttaaactgtacctcctggagg

SEQ ID NO: 876784 - DNA, 25 bp, Homo sapien
tcatgacctcgacatgttttgagga

SEQ ID NO: 876785 - DNA, 25 bp, Homo sapien
caggtaccccagagatggagtggtc

SEQ ID NO: 876786 - DNA, 25 bp, Homo sapien
tacagtttatactctagagggtgcg

SEQ ID NO: 876787 - DNA, 25 bp, Homo sapien
ctggtaaaatttacagggagccaca

SEQ ID NO: 876788 - DNA, 25 bp, Homo sapien
gagacaagcatgtagcataccaacg

SEQ ID NO: 876789 - DNA, 25 bp, Homo sapien
tgcgtagtacaaatcaggacggtat

SEQ ID NO: 876790 - DNA, 25 bp, Homo sapien
caagcagagggtatagttgtcactg

SEQ ID NO: 876791 - DNA, 25 bp, Homo sapien
tctacctcctgtccaagaagtatca

SEQ ID NO: 876792 - DNA, 25 bp, Homo sapien
tttgcagacacgagattaccatggg

SEQ ID NO: 876793 - DNA, 25 bp, Homo sapien
gacaatagagtcaaagagtcactga

SEQ ID NO: 876794 - DNA, 25 bp, Homo sapien
tcagtaagactagtctaacggcaga

SEQ ID NO: 876795 - DNA, 25 bp, Homo sapien
gctcccctggccgtaagccggatag

SEQ ID NO: 876796 - DNA, 25 bp, Homo sapien
ccctggccgtaagccggatagttgt

SEQ ID NO: 876797 - DNA, 25 bp, Homo sapien
ggccgtaagccggatagttgtctgt

SEQ ID NO: 876798 - DNA, 25 bp, Homo sapien
cgtaagccggatagttgtctgttgg

SEQ ID NO: 876799 - DNA, 25 bp, Homo sapien
tcatcaacactagaaaaagtgtctt

SEQ ID NO: 876800 - DNA, 25 bp, Homo sapien
ggaaaaggctgcactctgtcctcat

SEQ ID NO: 876801 - DNA, 25 bp, Homo sapien
tctttatgccctactgaatggaatg

SEQ ID NO: 876802 - DNA, 25 bp, Homo sapien
ggaggagcccctccctgttgttctg

SEQ ID NO: 876803 - DNA, 25 bp, Homo sapien
tgagtctgtaaggtcaccagtgggc

SEQ ID NO: 876804 - DNA, 25 bp, Homo sapien
tgtgtctcaagaaagggtccttagg

SEQ ID NO: 876805 - DNA, 25 bp, Homo sapien
tgaaagcaatcacctgtagagcagc

SEQ ID NO: 876806 - DNA, 25 bp, Homo sapien
tcaattgtgttgatcccttggctgg

SEQ ID NO: 876807 - DNA, 25 bp, Homo sapien
gtaatggagcacataaagctgctgt

SEQ ID NO: 876808 - DNA, 25 bp, Homo sapien
gctgctgtgactacaatgcctgcaa

SEQ ID NO: 876809 - DNA, 25 bp, Homo sapien
gaaattttgccccagagactgcatc

SEQ ID NO: 876810 - DNA, 25 bp, Homo sapien
tctgcatatgaaatcagtcccagta

SEQ ID NO: 876811 - DNA, 25 bp, Homo sapien
taaattgaggccagaaactgtttta

SEQ ID NO: 876812 - DNA, 25 bp, Homo sapien
caaagcctctgtttcatggtatctt

SEQ ID NO: 876813 - DNA, 25 bp, Homo sapien
gaatgacagaaattgtaatccaaag

SEQ ID NO: 876814 - DNA, 25 bp, Homo sapien
cagtgatcatcaccgaaattaacca

SEQ ID NO: 876815 - DNA, 25 bp, Homo sapien
cccaaagtttagttgatcatcatat

SEQ ID NO: 876816 - DNA, 25 bp, Homo sapien
aatttctggagcataagcagtaaga

SEQ ID NO: 876817 - DNA, 25 bp, Homo sapien
ggagcataagcagtaagatcaaata

SEQ ID NO: 876818 - DNA, 25 bp, Homo sapien
ttatcctttgttgagggttgaagga

SEQ ID NO: 876819 - DNA, 25 bp, Homo sapien
tattacatggtgaggccttatcttg

SEQ ID NO: 876820 - DNA, 25 bp, Homo sapien
gcatgaaatgagtgtgtatacagta

SEQ ID NO: 876821 - DNA, 25 bp, Homo sapien
agaggaactgcatgaaatgagtgtg

SEQ ID NO: 876822 - DNA, 25 bp, Homo sapien
tgtgtatacagtaacggtgcgttgc

SEQ ID NO: 876823 - DNA, 25 bp, Homo sapien
tatacagtaacggtgcgttgctcca

SEQ ID NO: 876824 - DNA, 25 bp, Homo sapien
caaatttatctggtatcatatttca

SEQ ID NO: 876825 - DNA, 25 bp, Homo sapien
aaacaattcattgactagtgaaata

SEQ ID NO: 876826 - DNA, 25 bp, Homo sapien
gggaattctcatatttgaaacttta

SEQ ID NO: 876827 - DNA, 25 bp, Homo sapien
tcatatttcataatgctgttgttaa

SEQ ID NO: 876828 - DNA, 25 bp, Homo sapien
cattagcatgctaaattaatttcta

SEQ ID NO: 876829 - DNA, 25 bp, Homo sapien
atactcattagcatgctaaattaat

SEQ ID NO: 876830 - DNA, 25 bp, Homo sapien
tactcattagcatgctaaattaatt

SEQ ID NO: 876831 - DNA, 25 bp, Homo sapien
ctcattagcatgctaaattaatttc

SEQ ID NO: 876832 - DNA, 25 bp, Homo sapien
catagagggcctaagaaacttgtcc

SEQ ID NO: 876833 - DNA, 25 bp, Homo sapien
taaccctggtgcatatgagttcaaa

SEQ ID NO: 876834 - DNA, 25 bp, Homo sapien
ggtaacaacgttagaaagtgccaga

SEQ ID NO: 876835 - DNA, 25 bp, Homo sapien
tgctgacaaagcatgtgcgaagtat

SEQ ID NO: 876836 - DNA, 25 bp, Homo sapien
atcagcttagctgcctgtggacaaa

SEQ ID NO: 876837 - DNA, 25 bp, Homo sapien
aaatataatgatgcttgcaggtttt

SEQ ID NO: 876838 - DNA, 25 bp, Homo sapien
ctgcctgtggacaaatataatgatg

SEQ ID NO: 876839 - DNA, 25 bp, Homo sapien
aatgcgttgtgttccgctcaagagc

SEQ ID NO: 876840 - DNA, 25 bp, Homo sapien
cgttgtgttccgctcaagagctggg

SEQ ID NO: 876841 - DNA, 25 bp, Homo sapien
cccaatgcgttgtgttccgctcaag

SEQ ID NO: 876842 - DNA, 25 bp, Homo sapien
ttgtgttccgctcaagagctgggcc

SEQ ID NO: 876843 - DNA, 25 bp, Homo sapien
ctgaacttgtcatgggcccacttgg

SEQ ID NO: 876844 - DNA, 25 bp, Homo sapien
actgaacttgtcatgggcccacttg

SEQ ID NO: 876845 - DNA, 25 bp, Homo sapien
cactgaacttgtcatgggcccactt

SEQ ID NO: 876846 - DNA, 25 bp, Homo sapien
tgaacttgtcatgggcccacttggg

SEQ ID NO: 876847 - DNA, 25 bp, Homo sapien
ctgacccggaggtcatcatgcaagt

SEQ ID NO: 876848 - DNA, 25 bp, Homo sapien
gaggtcatcatgcaagtaatacttc

SEQ ID NO: 876849 - DNA, 25 bp, Homo sapien
tcttgcttttgggtgtgtaatctag

SEQ ID NO: 876850 - DNA, 25 bp, Homo sapien
tgtaatctaggtcccactcctctta

SEQ ID NO: 876851 - DNA, 25 bp, Homo sapien
aaagtttcctcgagcgctctgccac

SEQ ID NO: 876852 - DNA, 25 bp, Homo sapien
ttgaaattgaaagtttcctcgagcg

SEQ ID NO: 876853 - DNA, 25 bp, Homo sapien
tgaaagtttcctcgagcgctctgcc

SEQ ID NO: 876854 - DNA, 25 bp, Homo sapien
aattgaaagtttcctcgagcgctct

SEQ ID NO: 876855 - DNA, 25 bp, Homo sapien
tctggacgtgcctctcgctctccgg

SEQ ID NO: 876856 - DNA, 25 bp, Homo sapien
gtgcctctcgctctccggtgcttct

SEQ ID NO: 876857 - DNA, 25 bp, Homo sapien
tggacgtgcctctcgctctccggtg

SEQ ID NO: 876858 - DNA, 25 bp, Homo sapien
gcctctcgctctccggtgcttcttc

SEQ ID NO: 876859 - DNA, 25 bp, Homo sapien
ctctctccttatgttttttatgacg

SEQ ID NO: 876860 - DNA, 25 bp, Homo sapien
tatgacgttcaatatcaaggcggag

SEQ ID NO: 876861 - DNA, 25 bp, Homo sapien
cagccttgtagccaggttttctggg

SEQ ID NO: 876862 - DNA, 25 bp, Homo sapien
tgtattttccctcagccttgtagcc

SEQ ID NO: 876863 - DNA, 25 bp, Homo sapien
ttttatgaaagtactgcgggaaatg

SEQ ID NO: 876864 - DNA, 25 bp, Homo sapien
agtactgcgggaaatgtctattgtc

SEQ ID NO: 876865 - DNA, 25 bp, Homo sapien
gcgggaaatgtctattgtcctgtaa

SEQ ID NO: 876866 - DNA, 25 bp, Homo sapien
gaaatgtctattgtcctgtaacttg

SEQ ID NO: 876867 - DNA, 25 bp, Homo sapien
ctgagactgagctgactgtatgtgc

SEQ ID NO: 876868 - DNA, 25 bp, Homo sapien
tgttgggctaacagttctgagggtc

SEQ ID NO: 876869 - DNA, 25 bp, Homo sapien
ctgtatgtgctggaaaatggaacga

SEQ ID NO: 876870 - DNA, 25 bp, Homo sapien
tgctctttaacatggtgaacaatgg

SEQ ID NO: 876871 - DNA, 25 bp, Homo sapien
ttccacagatagagggtgggcgcct

SEQ ID NO: 876872 - DNA, 25 bp, Homo sapien
tcttccacagatagagggtgggcgc

SEQ ID NO: 876873 - DNA, 25 bp, Homo sapien
tccacagatagagggtgggcgcctc

SEQ ID NO: 876874 - DNA, 25 bp, Homo sapien
cagtcttccacagatagagggtggg

SEQ ID NO: 876875 - DNA, 25 bp, Homo sapien
ccagggaacaatagcgtccgcggtg

SEQ ID NO: 876876 - DNA, 25 bp, Homo sapien
cagggaatttttctccgctcttgga

SEQ ID NO: 876877 - DNA, 25 bp, Homo sapien
tattgttcgcttcagatgagaagga

SEQ ID NO: 876878 - DNA, 25 bp, Homo sapien
ggagagcgcgtctaacaccagggaa

SEQ ID NO: 876879 - DNA, 25 bp, Homo sapien
taaatttacgtatgagggacgagca

SEQ ID NO: 876880 - DNA, 25 bp, Homo sapien
gaggaagaacctcatcccagatgga

SEQ ID NO: 876881 - DNA, 25 bp, Homo sapien
ttgctcactgcaggacttacaatga

SEQ ID NO: 876882 - DNA, 25 bp, Homo sapien
cgtaaggaatcaaaagaccctggca

SEQ ID NO: 876883 - DNA, 25 bp, Homo sapien
tcttaatggttactctatggactac

SEQ ID NO: 876884 - DNA, 25 bp, Homo sapien
gggtagagttactgtctggtttcac

SEQ ID NO: 876885 - DNA, 25 bp, Homo sapien
cctataagatagagaattattgccc

SEQ ID NO: 876886 - DNA, 25 bp, Homo sapien
tatctacgtcatcctttcacagcca

SEQ ID NO: 876887 - DNA, 25 bp, Homo sapien
agtaggtataatcggcattccagag

SEQ ID NO: 876888 - DNA, 25 bp, Homo sapien
gagctagatggtatggagccaaagt

SEQ ID NO: 876889 - DNA, 25 bp, Homo sapien
tgataaagatgggagctagatggta

SEQ ID NO: 876890 - DNA, 25 bp, Homo sapien
tgaccaaagtgatgataaagatggg

SEQ ID NO: 876891 - DNA, 25 bp, Homo sapien
ggctttgggcccactaaccacagaa

SEQ ID NO: 876892 - DNA, 25 bp, Homo sapien
tctctgcaatagtggtgcatgcttc

SEQ ID NO: 876893 - DNA, 25 bp, Homo sapien
tttgcctttagaacacttctctgca

SEQ ID NO: 876894 - DNA, 25 bp, Homo sapien
caagtcaacttccattaacttggct

SEQ ID NO: 876895 - DNA, 25 bp, Homo sapien
cagtggaacagaatacaggacctag

SEQ ID NO: 876896 - DNA, 25 bp, Homo sapien
tacactgttcctcaatcggttcttg

SEQ ID NO: 876897 - DNA, 25 bp, Homo sapien
taagagatccagaatagtcacagtt

SEQ ID NO: 876898 - DNA, 25 bp, Homo sapien
tgacaatctaaagtagggaccctaa

SEQ ID NO: 876899 - DNA, 25 bp, Homo sapien
tctaattccttaatttttggtgtca

SEQ ID NO: 876900 - DNA, 25 bp, Homo sapien
gaacagtgctatactgacaacagct

SEQ ID NO: 876901 - DNA, 25 bp, Homo sapien
caacagctaaaacagctaaatttag

SEQ ID NO: 876902 - DNA, 25 bp, Homo sapien
tattccaataggtgaacagtgctat

SEQ ID NO: 876903 - DNA, 25 bp, Homo sapien
cttcttattccaataggtgaacagt

SEQ ID NO: 876904 - DNA, 25 bp, Homo sapien
aataggagggatgcacttctaaaac

SEQ ID NO: 876905 - DNA, 25 bp, Homo sapien
aagtgcacttgccaaaaatgtcaaa

SEQ ID NO: 876906 - DNA, 25 bp, Homo sapien
ggctggatctcattaagaacaacat

SEQ ID NO: 876907 - DNA, 25 bp, Homo sapien
caaaacagatcataggcactcgaga

SEQ ID NO: 876908 - DNA, 25 bp, Homo sapien
taattttgcagttgaccgacctggg

SEQ ID NO: 876909 - DNA, 25 bp, Homo sapien
ctaatgagacatgaggaaaagggcc

SEQ ID NO: 876910 - DNA, 25 bp, Homo sapien
tctagaagggcatacacatgtgtag

SEQ ID NO: 876911 - DNA, 25 bp, Homo sapien
gaaaacctctgacctattcctagaa

SEQ ID NO: 876912 - DNA, 25 bp, Homo sapien
ctcagacggtttcccctaaattcag

SEQ ID NO: 876913 - DNA, 25 bp, Homo sapien
tataccaggacacacttggtggtcc

SEQ ID NO: 876914 - DNA, 25 bp, Homo sapien
tgttgatttccccaagtctattgtt

SEQ ID NO: 876915 - DNA, 25 bp, Homo sapien
taattgcaagaacgaaaacctattc

SEQ ID NO: 876916 - DNA, 25 bp, Homo sapien
cacttaatcacatttctcttataat

SEQ ID NO: 876917 - DNA, 25 bp, Homo sapien
aaccacttaatcacatttctcttat

SEQ ID NO: 876918 - DNA, 25 bp, Homo sapien
ccacttaatcacatttctcttataa

SEQ ID NO: 876919 - DNA, 25 bp, Homo sapien
aaaccacttaatcacatttctctta

SEQ ID NO: 876920 - DNA, 25 bp, Homo sapien
gtaggatctccacgtataccaaaat

SEQ ID NO: 876921 - DNA, 25 bp, Homo sapien
ggagtttatccacacgtaactatag

SEQ ID NO: 876922 - DNA, 25 bp, Homo sapien
caaaatctgacatactcaattcctg

SEQ ID NO: 876923 - DNA, 25 bp, Homo sapien
tcaattcctgcagtttacctggcag

SEQ ID NO: 876924 - DNA, 25 bp, Homo sapien
gattcgtgaaagctgctcagttgcc

SEQ ID NO: 876925 - DNA, 25 bp, Homo sapien
atgagtgtgaggattcgtgaaagct

SEQ ID NO: 876926 - DNA, 25 bp, Homo sapien
aggtccctttttatgggatgtgatg

SEQ ID NO: 876927 - DNA, 25 bp, Homo sapien
caataaggtccctttttatgggatg

SEQ ID NO: 876928 - DNA, 25 bp, Homo sapien
gctgagaaatcgagctggttctgct

SEQ ID NO: 876929 - DNA, 25 bp, Homo sapien
tcctgctgagaaatcgagctggttc

SEQ ID NO: 876930 - DNA, 25 bp, Homo sapien
ttttattgtcccgtcctgctgagaa

SEQ ID NO: 876931 - DNA, 25 bp, Homo sapien
tgtcccgtcctgctgagaaatcgag

SEQ ID NO: 876932 - DNA, 25 bp, Homo sapien
caacactttctgctatcatatggaa

SEQ ID NO: 876933 - DNA, 25 bp, Homo sapien
cagagatgagccatgatatctaggt

SEQ ID NO: 876934 - DNA, 25 bp, Homo sapien
tatagccaacgtaattacaatcaca

SEQ ID NO: 876935 - DNA, 25 bp, Homo sapien
taggttgctttgacaagaatagctg

SEQ ID NO: 876936 - DNA, 25 bp, Homo sapien
tttcccaccaagataatagtagcat

SEQ ID NO: 876937 - DNA, 25 bp, Homo sapien
tattatttaaactatgggcagcttg

SEQ ID NO: 876938 - DNA, 25 bp, Homo sapien
tctggaaatttccaactcgcatgtg

SEQ ID NO: 876939 - DNA, 25 bp, Homo sapien
cagccttgttacagcattgaaggag

SEQ ID NO: 876940 - DNA, 25 bp, Homo sapien
ctattccatacagtttccagcttga

SEQ ID NO: 876941 - DNA, 25 bp, Homo sapien
gatctgggcagagcgtgggagggcc

SEQ ID NO: 876942 - DNA, 25 bp, Homo sapien
actatgtgattcgagcccgctgcgc

SEQ ID NO: 876943 - DNA, 25 bp, Homo sapien
gttctctctgcgcacgaaatccggg

SEQ ID NO: 876944 - DNA, 25 bp, Homo sapien
tggactcttgcccagggatctgggc

SEQ ID NO: 876945 - DNA, 25 bp, Homo sapien
agcctcagctctgcgcacagcggtc

SEQ ID NO: 876946 - DNA, 25 bp, Homo sapien
tgcatgtccgcactcctgttctgta

SEQ ID NO: 876947 - DNA, 25 bp, Homo sapien
gtcgccggtcctgtgcgcctctggt

SEQ ID NO: 876948 - DNA, 25 bp, Homo sapien
tgttctgtactgcacgctcgccaga

SEQ ID NO: 876949 - DNA, 25 bp, Homo sapien
acgaaacagtgcgtgaaaagcagcc

SEQ ID NO: 876950 - DNA, 25 bp, Homo sapien
ttctccaaaaatgtgatatgtctct

SEQ ID NO: 876951 - DNA, 25 bp, Homo sapien
tgtctctactttacggatttcacga

SEQ ID NO: 876952 - DNA, 25 bp, Homo sapien
tttacggatttcacgaaacagtgcg

SEQ ID NO: 876953 - DNA, 25 bp, Homo sapien
tatgcaggtaagaaaagtgcaatca

SEQ ID NO: 876954 - DNA, 25 bp, Homo sapien
aactgtatgcaggtaagaaaagtgc

SEQ ID NO: 876955 - DNA, 25 bp, Homo sapien
gaaaaactgtatgcaggtaagaaaa

SEQ ID NO: 876956 - DNA, 25 bp, Homo sapien
cttgaaaaactgtatgcaggtaaga

SEQ ID NO: 876957 - DNA, 25 bp, Homo sapien
caaggggtggtgcatgtatcagaca

SEQ ID NO: 876958 - DNA, 25 bp, Homo sapien
tcagggtgcctttcgggtagcataa

SEQ ID NO: 876959 - DNA, 25 bp, Homo sapien
gatggaacaatactccacatacatg

SEQ ID NO: 876960 - DNA, 25 bp, Homo sapien
tcgggtagcataaaattggcaaggg

SEQ ID NO: 876961 - DNA, 25 bp, Homo sapien
tacgcgtacaaatattcatacatcc

SEQ ID NO: 876962 - DNA, 25 bp, Homo sapien
catacgcgtacaaatattcatacat

SEQ ID NO: 876963 - DNA, 25 bp, Homo sapien
acacatacgcgtacaaatattcata

SEQ ID NO: 876964 - DNA, 25 bp, Homo sapien
cgcgtacaaatattcatacatccac

SEQ ID NO: 876965 - DNA, 25 bp, Homo sapien
tggtgccgggatcttattttgcagc

SEQ ID NO: 876966 - DNA, 25 bp, Homo sapien
gatgaatgttcttgccgtggtgccg

SEQ ID NO: 876967 - DNA, 25 bp, Homo sapien
ggtgatcgagttgctgtgtcgcctc

SEQ ID NO: 876968 - DNA, 25 bp, Homo sapien
agccctacctctgggttgcctctag

SEQ ID NO: 876969 - DNA, 25 bp, Homo sapien
gatgacatcatagttacttgctact

SEQ ID NO: 876970 - DNA, 25 bp, Homo sapien
tttggcatctgtagagatgacatca

SEQ ID NO: 876971 - DNA, 25 bp, Homo sapien
gatgagatctcgcaattgttggcca

SEQ ID NO: 876972 - DNA, 25 bp, Homo sapien
tgcccagccagagttaatgtgtaag

SEQ ID NO: 876973 - DNA, 25 bp, Homo sapien
aagagcacggtttgctaactattga

SEQ ID NO: 876974 - DNA, 25 bp, Homo sapien
tttgaaaggaccgtgtagccttgcc

SEQ ID NO: 876975 - DNA, 25 bp, Homo sapien
catgttaacgtttgtttgaaaagag

SEQ ID NO: 876976 - DNA, 25 bp, Homo sapien
tgaaaggaccgtgtagccttgccac

SEQ ID NO: 876977 - DNA, 25 bp, Homo sapien
ggccactctgaacagatatcccagg

SEQ ID NO: 876978 - DNA, 25 bp, Homo sapien
tcccctacagggaaaagctgatact

SEQ ID NO: 876979 - DNA, 25 bp, Homo sapien
cccaggagaggtatcagtatgtcga

SEQ ID NO: 876980 - DNA, 25 bp, Homo sapien
taaaagtatgtggacctgcagttct

SEQ ID NO: 876981 - DNA, 25 bp, Homo sapien
cccatagactgggaataggttccag

SEQ ID NO: 876982 - DNA, 25 bp, Homo sapien
taaactgtgcatggcttttatacag

SEQ ID NO: 876983 - DNA, 25 bp, Homo sapien
taaagtggtacagactcattacaac

SEQ ID NO: 876984 - DNA, 25 bp, Homo sapien
cagttacagcttggatctggcataa

SEQ ID NO: 876985 - DNA, 25 bp, Homo sapien
aagaatggtgtagacatgttttgca

SEQ ID NO: 876986 - DNA, 25 bp, Homo sapien
caagaaatccttaattgaatgtcat

SEQ ID NO: 876987 - DNA, 25 bp, Homo sapien
gcaactgttaggtacccagttatca

SEQ ID NO: 876988 - DNA, 25 bp, Homo sapien
gttgcttttcatactaaagaatggt

SEQ ID NO: 876989 - DNA, 25 bp, Homo sapien
cctaacttaggtctgaaacagcctg

SEQ ID NO: 876990 - DNA, 25 bp, Homo sapien
agctgggttgagattaatttcgttc

SEQ ID NO: 876991 - DNA, 25 bp, Homo sapien
tctcatgacagaaatcaggtttccc

SEQ ID NO: 876992 - DNA, 25 bp, Homo sapien
tagtctgactctctcaaccataaaa

SEQ ID NO: 876993 - DNA, 25 bp, Homo sapien
taattcattgctaactcaagccatc

SEQ ID NO: 876994 - DNA, 25 bp, Homo sapien
gatataggtccccttttgtctcaaa

SEQ ID NO: 876995 - DNA, 25 bp, Homo sapien
gctacgtttcctgactactactgca

SEQ ID NO: 876996 - DNA, 25 bp, Homo sapien
tctgtagtagggcttccaaatctgc

SEQ ID NO: 876997 - DNA, 25 bp, Homo sapien
taagtaactgtcagaataagcctgg

SEQ ID NO: 876998 - DNA, 25 bp, Homo sapien
tcttaggtcaatgtccagtgtgctt

SEQ ID NO: 876999 - DNA, 25 bp, Homo sapien
gatggtatgtgactactttcagaga

SEQ ID NO: 877000 - DNA, 25 bp, Homo sapien
tctcagaccttatccagaggacatg

SEQ ID NO: 877001 - DNA, 25 bp, Homo sapien
tactgaataaccatcttaagtatgg

SEQ ID NO: 877002 - DNA, 25 bp, Homo sapien
aatgctttggaacataatctttagc

SEQ ID NO: 877003 - DNA, 25 bp, Homo sapien
taagactgatccattgtctaaggaa

SEQ ID NO: 877004 - DNA, 25 bp, Homo sapien
taagtatggaacatttaaatggcta

SEQ ID NO: 877005 - DNA, 25 bp, Homo sapien
cagatgagatgtttatcttagacta

SEQ ID NO: 877006 - DNA, 25 bp, Homo sapien
gtgtcccagatctactttcaaagtg

SEQ ID NO: 877007 - DNA, 25 bp, Homo sapien
gcttagtcggaatacaaatttcaca

SEQ ID NO: 877008 - DNA, 25 bp, Homo sapien
tgagatggtggagtaaaaagactgt

SEQ ID NO: 877009 - DNA, 25 bp, Homo sapien
gaagtctgggaggtactatatcagc

SEQ ID NO: 877010 - DNA, 25 bp, Homo sapien
ggaaaatgatttgacgtgcttgctc

SEQ ID NO: 877011 - DNA, 25 bp, Homo sapien
gattagtattgagccagtggccaaa

SEQ ID NO: 877012 - DNA, 25 bp, Homo sapien
tatcagctgtagttgggtaattcca

SEQ ID NO: 877013 - DNA, 25 bp, Homo sapien
agggacccctgaacattggcctaga

SEQ ID NO: 877014 - DNA, 25 bp, Homo sapien
tttgagagcagaagacctgcagccc

SEQ ID NO: 877015 - DNA, 25 bp, Homo sapien
gaggaaccttgatatgtgacaaaac

SEQ ID NO: 877016 - DNA, 25 bp, Homo sapien
ggcctagagggtagtgtacagtcac

SEQ ID NO: 877017 - DNA, 25 bp, Homo sapien
taatcagtcatctcttcatgaggag

SEQ ID NO: 877018 - DNA, 25 bp, Homo sapien
ggaggtgggaagacatcaatactaa

SEQ ID NO: 877019 - DNA, 25 bp, Homo sapien
tgggtgtgacaattctgtaccaagg

SEQ ID NO: 877020 - DNA, 25 bp, Homo sapien
caaggtttgagcagatttcacttcc

SEQ ID NO: 877021 - DNA, 25 bp, Homo sapien
caaaggcaaagttgtgaagtaagtc

SEQ ID NO: 877022 - DNA, 25 bp, Homo sapien
cactttctagcaggttcaaaggcaa

SEQ ID NO: 877023 - DNA, 25 bp, Homo sapien
aggcaaagttgtgaagtaagtcctt

SEQ ID NO: 877024 - DNA, 25 bp, Homo sapien
ttctagcaggttcaaaggcaaagtt

SEQ ID NO: 877025 - DNA, 25 bp, Homo sapien
tcagcaagagaggagtaagtgtgtc

SEQ ID NO: 877026 - DNA, 25 bp, Homo sapien
cctaggcagacgaacaggtccctgt

SEQ ID NO: 877027 - DNA, 25 bp, Homo sapien
tggtgtctcgatgatagcaatagga

SEQ ID NO: 877028 - DNA, 25 bp, Homo sapien
gaccagagtaagaacctcctcgatg

SEQ ID NO: 877029 - DNA, 25 bp, Homo sapien
catggaggtctagccattgcatgga

SEQ ID NO: 877030 - DNA, 25 bp, Homo sapien
gctgaggctatactttgatgttacc

SEQ ID NO: 877031 - DNA, 25 bp, Homo sapien
gaatgttggctttgcttcaatccag

SEQ ID NO: 877032 - DNA, 25 bp, Homo sapien
tagggtgttggtgttaggacctcca

SEQ ID NO: 877033 - DNA, 25 bp, Homo sapien
catgcctgagctcacttggccaatt

SEQ ID NO: 877034 - DNA, 25 bp, Homo sapien
ctaagacttttatgtgctggcccac

SEQ ID NO: 877035 - DNA, 25 bp, Homo sapien
tgcatgcccacctgggttttccctt

SEQ ID NO: 877036 - DNA, 25 bp, Homo sapien
gaaagccatactctgctattttgtc

SEQ ID NO: 877037 - DNA, 25 bp, Homo sapien
taaaaacgtcccgtgcattcacaac

SEQ ID NO: 877038 - DNA, 25 bp, Homo sapien
ccgtatgtgtttactggagtggcac

SEQ ID NO: 877039 - DNA, 25 bp, Homo sapien
tctttcattgaacattagaggccat

SEQ ID NO: 877040 - DNA, 25 bp, Homo sapien
tattagtgcaatttgtggaactcca

SEQ ID NO: 877041 - DNA, 25 bp, Homo sapien
ctgtccccattagggagtctagaag

SEQ ID NO: 877042 - DNA, 25 bp, Homo sapien
tgtccccattagggagtctagaaga

SEQ ID NO: 877043 - DNA, 25 bp, Homo sapien
cattagggagtctagaagaggcact

SEQ ID NO: 877044 - DNA, 25 bp, Homo sapien
ccccattagggagtctagaagaggc

SEQ ID NO: 877045 - DNA, 25 bp, Homo sapien
tttattcggagcaaaatgagtcatc

SEQ ID NO: 877046 - DNA, 25 bp, Homo sapien
aacacgtgcccaaggatgtcgggct

SEQ ID NO: 877047 - DNA, 25 bp, Homo sapien
tttctggtaacataaaacatagtga

SEQ ID NO: 877048 - DNA, 25 bp, Homo sapien
catcatggcctgtgacatggcccca

SEQ ID NO: 877049 - DNA, 25 bp, Homo sapien
tacaggcttgtaattcatatacttg

SEQ ID NO: 877050 - DNA, 25 bp, Homo sapien
atttccattcttaagatacaggctt

SEQ ID NO: 877051 - DNA, 25 bp, Homo sapien
caatatgtaaatatcctatcccatc

SEQ ID NO: 877052 - DNA, 25 bp, Homo sapien
caaataaactccaagttatctccaa

SEQ ID NO: 877053 - DNA, 25 bp, Homo sapien
tattttctctttaaactctgaaata

SEQ ID NO: 877054 - DNA, 25 bp, Homo sapien
attcagtgcggcaggaacacacatt

SEQ ID NO: 877055 - DNA, 25 bp, Homo sapien
tctgcctccataaagacattttggg

SEQ ID NO: 877056 - DNA, 25 bp, Homo sapien
agtattcagtgcggcaggaacacac

SEQ ID NO: 877057 - DNA, 25 bp, Homo sapien
attgggaaatatgcatctgcctcca

SEQ ID NO: 877058 - DNA, 25 bp, Homo sapien
ccaatgcagtcataagaatctatta

SEQ ID NO: 877059 - DNA, 25 bp, Homo sapien
tctatcctagtggtctggggctatc

SEQ ID NO: 877060 - DNA, 25 bp, Homo sapien
gggctatctggtgattggacaccaa

SEQ ID NO: 877061 - DNA, 25 bp, Homo sapien
catgaaatgcttgtggcatattcta

SEQ ID NO: 877062 - DNA, 25 bp, Homo sapien
aattcacataaaaatgctgcaggat

SEQ ID NO: 877063 - DNA, 25 bp, Homo sapien
gcaggatgcagaaacagggtgcaca

SEQ ID NO: 877064 - DNA, 25 bp, Homo sapien
tacaacaattttccaacagatggta

SEQ ID NO: 877065 - DNA, 25 bp, Homo sapien
caacagatggtagtaacatattttg

SEQ ID NO: 877066 - DNA, 25 bp, Homo sapien
cagtttacaatacacttggccacca

SEQ ID NO: 877067 - DNA, 25 bp, Homo sapien
tgcatggaaacaagggtatggttca

SEQ ID NO: 877068 - DNA, 25 bp, Homo sapien
tatggtccgcatagagcttactcca

SEQ ID NO: 877069 - DNA, 25 bp, Homo sapien
tccagaacaagcacccaagttgagg

SEQ ID NO: 877070 - DNA, 25 bp, Homo sapien
caatgcattcaccaccgtttttaca

SEQ ID NO: 877071 - DNA, 25 bp, Homo sapien
tatgctgggcgcaatgcattcacca

SEQ ID NO: 877072 - DNA, 25 bp, Homo sapien
atggcatatgctgggcgcaatgcat

SEQ ID NO: 877073 - DNA, 25 bp, Homo sapien
tgggcgcaatgcattcaccaccgtt

SEQ ID NO: 877074 - DNA, 25 bp, Homo sapien
cattcccatgaaggacgaaagcttc

SEQ ID NO: 877075 - DNA, 25 bp, Homo sapien
ttcccatgaaggacgaaagcttcag

SEQ ID NO: 877076 - DNA, 25 bp, Homo sapien
cccatgaaggacgaaagcttcagtg

SEQ ID NO: 877077 - DNA, 25 bp, Homo sapien
catgaaggacgaaagcttcagtgtt

SEQ ID NO: 877078 - DNA, 25 bp, Homo sapien
tgtgttgcatcgtttcccactccaa

SEQ ID NO: 877079 - DNA, 25 bp, Homo sapien
gtgcttggtcccacacattttcctc

SEQ ID NO: 877080 - DNA, 25 bp, Homo sapien
cattcatgcacgtaggatcacagat

SEQ ID NO: 877081 - DNA, 25 bp, Homo sapien
accagaaggacaagagcaagtgctt

SEQ ID NO: 877082 - DNA, 25 bp, Homo sapien
accagtgtatccttcacgacagacg

SEQ ID NO: 877083 - DNA, 25 bp, Homo sapien
gcacacattatttctcatgcagtgg

SEQ ID NO: 877084 - DNA, 25 bp, Homo sapien
tgcagtggccaccattcttacaggg

SEQ ID NO: 877085 - DNA, 25 bp, Homo sapien
tcacgacagacgcacacattatttc

SEQ ID NO: 877086 - DNA, 25 bp, Homo sapien
ccatttggacagaggcaagtatttg

SEQ ID NO: 877087 - DNA, 25 bp, Homo sapien
cattgaggcagacagggtcgcacaa

SEQ ID NO: 877088 - DNA, 25 bp, Homo sapien
tatttggcttattacacgaaccacc

SEQ ID NO: 877089 - DNA, 25 bp, Homo sapien
tattacacgaaccaccattgaggca

SEQ ID NO: 877090 - DNA, 25 bp, Homo sapien
ttgcactggcaaatatctggtgtaa

SEQ ID NO: 877091 - DNA, 25 bp, Homo sapien
ccattttcacagtgcctgttacaaa

SEQ ID NO: 877092 - DNA, 25 bp, Homo sapien
tactacaggtgggtccataccagcc

SEQ ID NO: 877093 - DNA, 25 bp, Homo sapien
ggtttgcactggcaaatatctggtg

SEQ ID NO: 877094 - DNA, 25 bp, Homo sapien
accatgttgacaaggtgggttacaa

SEQ ID NO: 877095 - DNA, 25 bp, Homo sapien
catgttgacaaggtgggttacaatg

SEQ ID NO: 877096 - DNA, 25 bp, Homo sapien
cataaggacaagtgcagagattccc

SEQ ID NO: 877097 - DNA, 25 bp, Homo sapien
ccataaggacaagtgcagagattcc

SEQ ID NO: 877098 - DNA, 25 bp, Homo sapien
actgacaaatgttaggcttaataca

SEQ ID NO: 877099 - DNA, 25 bp, Homo sapien
ggtttttgcaatcagggtcacaaag

SEQ ID NO: 877100 - DNA, 25 bp, Homo sapien
tcacaggttgctccaccatgtcctg

SEQ ID NO: 877101 - DNA, 25 bp, Homo sapien
ttcatcacaggttgctccaccatgt

SEQ ID NO: 877102 - DNA, 25 bp, Homo sapien
aacacactccctactttttccacat

SEQ ID NO: 877103 - DNA, 25 bp, Homo sapien
gcaacacactccctactttttccac

SEQ ID NO: 877104 - DNA, 25 bp, Homo sapien
cactccctactttttccacatggat

SEQ ID NO: 877105 - DNA, 25 bp, Homo sapien
cacactccctactttttccacatgg

SEQ ID NO: 877106 - DNA, 25 bp, Homo sapien
ccataatacccaaaggggcagcgtc

SEQ ID NO: 877107 - DNA, 25 bp, Homo sapien
cataatacccaaaggggcagcgtcc

SEQ ID NO: 877108 - DNA, 25 bp, Homo sapien
cagcgtccacattggaagtgaccat

SEQ ID NO: 877109 - DNA, 25 bp, Homo sapien
gggcagcgtccacattggaagtgac

SEQ ID NO: 877110 - DNA, 25 bp, Homo sapien
tgtaaccttgggaagacctgctaat

SEQ ID NO: 877111 - DNA, 25 bp, Homo sapien
ttgtttgggttcctgcttaaagagc

SEQ ID NO: 877112 - DNA, 25 bp, Homo sapien
caaggtgatattttggttgatccaa

SEQ ID NO: 877113 - DNA, 25 bp, Homo sapien
gctaatttgagaatataccctcctg

SEQ ID NO: 877114 - DNA, 25 bp, Homo sapien
cagactgagatttgtactgagacta

SEQ ID NO: 877115 - DNA, 25 bp, Homo sapien
cgatccacatgttcaatatctgata

SEQ ID NO: 877116 - DNA, 25 bp, Homo sapien
gatttgtactgagactacgatccac

SEQ ID NO: 877117 - DNA, 25 bp, Homo sapien
aaataggctttactgaattatccat

SEQ ID NO: 877118 - DNA, 25 bp, Homo sapien
taactttttgatagtagcgggagta

SEQ ID NO: 877119 - DNA, 25 bp, Homo sapien
tagtagcgggagtaggagtaaatct

SEQ ID NO: 877120 - DNA, 25 bp, Homo sapien
cgggagatgttgttagttgtgctca

SEQ ID NO: 877121 - DNA, 25 bp, Homo sapien
gagtaaatcttgtactaattagtga

SEQ ID NO: 877122 - DNA, 25 bp, Homo sapien
gatattggccttacagatactaaaa

SEQ ID NO: 877123 - DNA, 25 bp, Homo sapien
aatgtagtataaagccacactaatc

SEQ ID NO: 877124 - DNA, 25 bp, Homo sapien
tatctcaacatataagggactttaa

SEQ ID NO: 877125 - DNA, 25 bp, Homo sapien
atgatatttaatcgtgaaaatggcc

SEQ ID NO: 877126 - DNA, 25 bp, Homo sapien
cttgttggcttaacatgcctctttc

SEQ ID NO: 877127 - DNA, 25 bp, Homo sapien
ttgttggcttaacatgcctctttct

SEQ ID NO: 877128 - DNA, 25 bp, Homo sapien
gaaccacagtttgtgtagtaaattg

SEQ ID NO: 877129 - DNA, 25 bp, Homo sapien
cagtttgtgtagtaaattgatttac

SEQ ID NO: 877130 - DNA, 25 bp, Homo sapien
ttccatccccataaaatccttctgg

SEQ ID NO: 877131 - DNA, 25 bp, Homo sapien
ggcttggagtcacactcatcaacat

SEQ ID NO: 877132 - DNA, 25 bp, Homo sapien
tggacatgaaccacaatgataggaa

SEQ ID NO: 877133 - DNA, 25 bp, Homo sapien
ggtattcaggcatgctactccctca

SEQ ID NO: 877134 - DNA, 25 bp, Homo sapien
tcaggtggacaatcacaggaataac

SEQ ID NO: 877135 - DNA, 25 bp, Homo sapien
tgtgaaaaccactaatatagctgcc

SEQ ID NO: 877136 - DNA, 25 bp, Homo sapien
tatagctgccaagaccacaagggtt

SEQ ID NO: 877137 - DNA, 25 bp, Homo sapien
caagggttggattggcacccactaa

SEQ ID NO: 877138 - DNA, 25 bp, Homo sapien
gaggaaacacttgccccttcaggac

SEQ ID NO: 877139 - DNA, 25 bp, Homo sapien
cgtgactctagtttcagcatcgcag

SEQ ID NO: 877140 - DNA, 25 bp, Homo sapien
ccaacgtaaaatggatgtcagaacc

SEQ ID NO: 877141 - DNA, 25 bp, Homo sapien
gatcgaaggccacgaactgatactc

SEQ ID NO: 877142 - DNA, 25 bp, Homo sapien
aggaatgaagtgtacttctgagagc

SEQ ID NO: 877143 - DNA, 25 bp, Homo sapien
aaggaatgaagtgtacttctgagag

SEQ ID NO: 877144 - DNA, 25 bp, Homo sapien
taaatcttgaaattttgggtctaca

SEQ ID NO: 877145 - DNA, 25 bp, Homo sapien
tgaccaagtaaatcttgaaattttg

SEQ ID NO: 877146 - DNA, 25 bp, Homo sapien
gggtctacaaatcaaacaagggctg

SEQ ID NO: 877147 - DNA, 25 bp, Homo sapien
catagcagagtccatcaataatgca

SEQ ID NO: 877148 - DNA, 25 bp, Homo sapien
cttgataatggatatcattacacca

SEQ ID NO: 877149 - DNA, 25 bp, Homo sapien
gatctttggcataattatatccaca

SEQ ID NO: 877150 - DNA, 25 bp, Homo sapien
tggcataattatatccacacttgat

SEQ ID NO: 877151 - DNA, 25 bp, Homo sapien
tatccacacttgataatggatatca

SEQ ID NO: 877152 - DNA, 25 bp, Homo sapien
tttttatagagaccacaaacttggc

SEQ ID NO: 877153 - DNA, 25 bp, Homo sapien
gcaccatcatatatgaccgttattt

SEQ ID NO: 877154 - DNA, 25 bp, Homo sapien
tactgaatttataaccatcattaga

SEQ ID NO: 877155 - DNA, 25 bp, Homo sapien
tgaatttataaccatcattagatac

SEQ ID NO: 877156 - DNA, 25 bp, Homo sapien
caggcatccattcactgctattata

SEQ ID NO: 877157 - DNA, 25 bp, Homo sapien
gaaaacagtctgtgtatagatgggt

SEQ ID NO: 877158 - DNA, 25 bp, Homo sapien
aactgctgaacatcagtgggcagct

SEQ ID NO: 877159 - DNA, 25 bp, Homo sapien
ggcagctgacaatcaacagctctgc

SEQ ID NO: 877160 - DNA, 25 bp, Homo sapien
aattgaaggtaattctttgaagcct

SEQ ID NO: 877161 - DNA, 25 bp, Homo sapien
ctgtagcttagtaacttcacattta

SEQ ID NO: 877162 - DNA, 25 bp, Homo sapien
tagtaacttcacatttaattgaagg

SEQ ID NO: 877163 - DNA, 25 bp, Homo sapien
gcttagtaacttcacatttaattga

SEQ ID NO: 877164 - DNA, 25 bp, Homo sapien
caaggtgctatactcggtgaggcca

SEQ ID NO: 877165 - DNA, 25 bp, Homo sapien
tcactgcagtcataggaactaaagc

SEQ ID NO: 877166 - DNA, 25 bp, Homo sapien
aagacacagccttcctatgctggag

SEQ ID NO: 877167 - DNA, 25 bp, Homo sapien
cattttctaaaagggccacacctgc

SEQ ID NO: 877168 - DNA, 25 bp, Homo sapien
actcatgaaagttctgccgtttcca

SEQ ID NO: 877169 - DNA, 25 bp, Homo sapien
aactcatgaaagttctgccgtttcc

SEQ ID NO: 877170 - DNA, 25 bp, Homo sapien
ctcatgaaagttctgccgtttccat

SEQ ID NO: 877171 - DNA, 25 bp, Homo sapien
gaaactcatgaaagttctgccgttt

SEQ ID NO: 877172 - DNA, 25 bp, Homo sapien
gattgaggtctttgcaacccaaggc

SEQ ID NO: 877173 - DNA, 25 bp, Homo sapien
tatctctctgacaagagtgtctgaa

SEQ ID NO: 877174 - DNA, 25 bp, Homo sapien
acatttaagccgagtttagtcaggt

SEQ ID NO: 877175 - DNA, 25 bp, Homo sapien
tttctgatcgagaaacactgtccag

SEQ ID NO: 877176 - DNA, 25 bp, Homo sapien
ggaagacggatacgctgcagtgtcc

SEQ ID NO: 877177 - DNA, 25 bp, Homo sapien
cggaagacggatacgctgcagtgtc

SEQ ID NO: 877178 - DNA, 25 bp, Homo sapien
tcggaagacggatacgctgcagtgt

SEQ ID NO: 877179 - DNA, 25 bp, Homo sapien
agaaactggcagtgtgtcagacatg

SEQ ID NO: 877180 - DNA, 25 bp, Homo sapien
actggcagtgtgtcagacatgcttt

SEQ ID NO: 877181 - DNA, 25 bp, Homo sapien
aaactggcagtgtgtcagacatgct

SEQ ID NO: 877182 - DNA, 25 bp, Homo sapien
ctacaataggatggctttccaggtg

SEQ ID NO: 877183 - DNA, 25 bp, Homo sapien
tgatcgttagactcatgccccattc

SEQ ID NO: 877184 - DNA, 25 bp, Homo sapien
tcagcacggataaatgccccagaag

SEQ ID NO: 877185 - DNA, 25 bp, Homo sapien
agtgtttctgtaatctacactaggg

SEQ ID NO: 877186 - DNA, 25 bp, Homo sapien
ttttcatcaaaggttccacaaagtc

SEQ ID NO: 877187 - DNA, 25 bp, Homo sapien
cacttatcttgatattcctggttac

SEQ ID NO: 877188 - DNA, 25 bp, Homo sapien
tcacttatcttgatattcctggtta

SEQ ID NO: 877189 - DNA, 25 bp, Homo sapien
tgacttttcttcctaagtaagattc

SEQ ID NO: 877190 - DNA, 25 bp, Homo sapien
tcttcctaagtaagattcacttatc

SEQ ID NO: 877191 - DNA, 25 bp, Homo sapien
ggttgtgattcacgtagctgaccat

SEQ ID NO: 877192 - DNA, 25 bp, Homo sapien
tagctgaccattgcacatatcaaaa

SEQ ID NO: 877193 - DNA, 25 bp, Homo sapien
tgcacatatcaaaagtaactatatc

SEQ ID NO: 877194 - DNA, 25 bp, Homo sapien
gctttttatgaacaaatatggttgt

SEQ ID NO: 877195 - DNA, 25 bp, Homo sapien
ctgggcaacaaacccacaattacat

SEQ ID NO: 877196 - DNA, 25 bp, Homo sapien
attacatgacactggatagtgaagg

SEQ ID NO: 877197 - DNA, 25 bp, Homo sapien
ggcttctgcagtcccactgacgtac

SEQ ID NO: 877198 - DNA, 25 bp, Homo sapien
gaaggcttctgcagtcccactgacg

SEQ ID NO: 877199 - DNA, 25 bp, Homo sapien
aatcacgtgacatactcttataaag

SEQ ID NO: 877200 - DNA, 25 bp, Homo sapien
gacttcaaaatcacgtgacatactc

SEQ ID NO: 877201 - DNA, 25 bp, Homo sapien
atggacttcaaaatcacgtgacata

SEQ ID NO: 877202 - DNA, 25 bp, Homo sapien
cgtgacatactcttataaagcacaa

SEQ ID NO: 877203 - DNA, 25 bp, Homo sapien
aattatatgtgggtcagtaaatgta

SEQ ID NO: 877204 - DNA, 25 bp, Homo sapien
agtaaatgtatagcagtaagcagtt

SEQ ID NO: 877205 - DNA, 25 bp, Homo sapien
atgtaattatatgtgggtcagtaaa

SEQ ID NO: 877206 - DNA, 25 bp, Homo sapien
cagttgggacatcctttactttgat

SEQ ID NO: 877207 - DNA, 25 bp, Homo sapien
catctcgagaaaaatctgtgacagc

SEQ ID NO: 877208 - DNA, 25 bp, Homo sapien
ctgtgacagcagtgtagtacacaaa

SEQ ID NO: 877209 - DNA, 25 bp, Homo sapien
tacacaaaagtgtggctacaggttc

SEQ ID NO: 877210 - DNA, 25 bp, Homo sapien
cagtgccaaatttaagcctaggtgc

SEQ ID NO: 877211 - DNA, 25 bp, Homo sapien
tcagtttggccgagtattagtaata

SEQ ID NO: 877212 - DNA, 25 bp, Homo sapien
ttatatgagtacactccagtgactt

SEQ ID NO: 877213 - DNA, 25 bp, Homo sapien
tgtgaattgctttggcaatcgtcag

SEQ ID NO: 877214 - DNA, 25 bp, Homo sapien
ttgatgtcaacatgcaacatgattt

SEQ ID NO: 877215 - DNA, 25 bp, Homo sapien
gctttctatcctcaggtagtattct

SEQ ID NO: 877216 - DNA, 25 bp, Homo sapien
catcctctgatatagtgctcaattc

SEQ ID NO: 877217 - DNA, 25 bp, Homo sapien
gatatagtgctcaattcaggctgta

SEQ ID NO: 877218 - DNA, 25 bp, Homo sapien
tttcccatcctctgatatagtgctc

SEQ ID NO: 877219 - DNA, 25 bp, Homo sapien
tgtacatgaggattctccaagaaaa

SEQ ID NO: 877220 - DNA, 25 bp, Homo sapien
ggctttcgatggctacactttgtac

SEQ ID NO: 877221 - DNA, 25 bp, Homo sapien
aaaattcttggctttcgatggctac

SEQ ID NO: 877222 - DNA, 25 bp, Homo sapien
tacactttgtacatgaggattctcc

SEQ ID NO: 877223 - DNA, 25 bp, Homo sapien
ctgagttttttgtagcgggaacatc

SEQ ID NO: 877224 - DNA, 25 bp, Homo sapien
ccaagtctgagatttatgccatcaa

SEQ ID NO: 877225 - DNA, 25 bp, Homo sapien
caagctatgtgaaatcccactgagt

SEQ ID NO: 877226 - DNA, 25 bp, Homo sapien
gcctagaccaagctatgtgaaatcc

SEQ ID NO: 877227 - DNA, 25 bp, Homo sapien
ctggactcaatcaactccaccagaa

SEQ ID NO: 877228 - DNA, 25 bp, Homo sapien
tggactcaatcaactccaccagaac

SEQ ID NO: 877229 - DNA, 25 bp, Homo sapien
aagcctggactcaatcaactccacc

SEQ ID NO: 877230 - DNA, 25 bp, Homo sapien
gcctggactcaatcaactccaccag

SEQ ID NO: 877231 - DNA, 25 bp, Homo sapien
ggtggaggtggcaatgaggcagcca

SEQ ID NO: 877232 - DNA, 25 bp, Homo sapien
ggaggtggcaatgaggcagccagct

SEQ ID NO: 877233 - DNA, 25 bp, Homo sapien
caggtggaggtggcaatgaggcagc

SEQ ID NO: 877234 - DNA, 25 bp, Homo sapien
tggaggtggcaatgaggcagccagc

SEQ ID NO: 877235 - DNA, 25 bp, Homo sapien
gtttcatcagaaccacatgggtgta

SEQ ID NO: 877236 - DNA, 25 bp, Homo sapien
gaaccacatgggtgtaatcgtgcat

SEQ ID NO: 877237 - DNA, 25 bp, Homo sapien
cacaatcacctcctgtttcagtttc

SEQ ID NO: 877238 - DNA, 25 bp, Homo sapien
catgggtgtaatcgtgcatcagaaa

SEQ ID NO: 877239 - DNA, 25 bp, Homo sapien
cacactcaatcattatgtccagtgg

SEQ ID NO: 877240 - DNA, 25 bp, Homo sapien
ttttaacacactcaatcattatgtc

SEQ ID NO: 877241 - DNA, 25 bp, Homo sapien
tcaatcattatgtccagtggaaaaa

SEQ ID NO: 877242 - DNA, 25 bp, Homo sapien
taacacactcaatcattatgtccag

SEQ ID NO: 877243 - DNA, 25 bp, Homo sapien
tgtggggggactttacaatcttggc

SEQ ID NO: 877244 - DNA, 25 bp, Homo sapien
ggggactttacaatcttggcaaaga

SEQ ID NO: 877245 - DNA, 25 bp, Homo sapien
ggactttacaatcttggcaaagaac

SEQ ID NO: 877246 - DNA, 25 bp, Homo sapien
tggggggactttacaatcttggcaa

SEQ ID NO: 877247 - DNA, 25 bp, Homo sapien
gcacagtagcccatacatccctgag

SEQ ID NO: 877248 - DNA, 25 bp, Homo sapien
ttgtagtgctgaacaaaaactgcca

SEQ ID NO: 877249 - DNA, 25 bp, Homo sapien
catccctgagttggttgtagtaagt

SEQ ID NO: 877250 - DNA, 25 bp, Homo sapien
aagctgtcaattgcttgatctcccc

SEQ ID NO: 877251 - DNA, 25 bp, Homo sapien
gccatgagtcaaaacggacacttct

SEQ ID NO: 877252 - DNA, 25 bp, Homo sapien
tttggttggcatctcggcaggtctg

SEQ ID NO: 877253 - DNA, 25 bp, Homo sapien
gatgagaaatctataccatccaggg

SEQ ID NO: 877254 - DNA, 25 bp, Homo sapien
tataaggactccgaagaaactggtg

SEQ ID NO: 877255 - DNA, 25 bp, Homo sapien
caggaacatcagcgcgatcaccagc

SEQ ID NO: 877256 - DNA, 25 bp, Homo sapien
aggaacatcagcgcgatcaccagca

SEQ ID NO: 877257 - DNA, 25 bp, Homo sapien
ctgcttccgcaggtggggcgaaagg

SEQ ID NO: 877258 - DNA, 25 bp, Homo sapien
ggcgaaaggcgtcgcagagcccggg

SEQ ID NO: 877259 - DNA, 25 bp, Homo sapien
gcttccgcaggtggggcgaaaggcg

SEQ ID NO: 877260 - DNA, 25 bp, Homo sapien
gaaaggcgtcgcagagcccgggccg

SEQ ID NO: 877261 - DNA, 25 bp, Homo sapien
cctttcgtgggatagagccttcgcg

SEQ ID NO: 877262 - DNA, 25 bp, Homo sapien
ggaagctccgcgtcctcgttctggg

SEQ ID NO: 877263 - DNA, 25 bp, Homo sapien
gcacccagtcctttcgtgggataga

SEQ ID NO: 877264 - DNA, 25 bp, Homo sapien
ttcgcgtaatccgtctgcgactcct

SEQ ID NO: 877265 - DNA, 25 bp, Homo sapien
gttatttacatagattgtgaaagac

SEQ ID NO: 877266 - DNA, 25 bp, Homo sapien
tatttacatagattgtgaaagacat

SEQ ID NO: 877267 - DNA, 25 bp, Homo sapien
ttatttacatagattgtgaaagaca

SEQ ID NO: 877268 - DNA, 25 bp, Homo sapien
caaacctgcacatctccctgcttcc

SEQ ID NO: 877269 - DNA, 25 bp, Homo sapien
ccctgcttccctgagccctcacagc

SEQ ID NO: 877270 - DNA, 25 bp, Homo sapien
gcttccctgagccctcacagctcac

SEQ ID NO: 877271 - DNA, 25 bp, Homo sapien
tcaaacctgcacatctccctgcttc

SEQ ID NO: 877272 - DNA, 25 bp, Homo sapien
tacgctctaagaggtcacctgcaaa

SEQ ID NO: 877273 - DNA, 25 bp, Homo sapien
tgccctgggctgcatacagaagagt

SEQ ID NO: 877274 - DNA, 25 bp, Homo sapien
gctgcatacagaagagtacgctcta

SEQ ID NO: 877275 - DNA, 25 bp, Homo sapien
aggatgcaggggatgccctgaccct

SEQ ID NO: 877276 - DNA, 25 bp, Homo sapien
tttgcatatacctcgggacgtttct

SEQ ID NO: 877277 - DNA, 25 bp, Homo sapien
gccatcattctgtagaagtcaatgt

SEQ ID NO: 877278 - DNA, 25 bp, Homo sapien
tctcagttgacagagttgccaagca

SEQ ID NO: 877279 - DNA, 25 bp, Homo sapien
gatcattgagctttctctcagttga

SEQ ID NO: 877280 - DNA, 25 bp, Homo sapien
aactgccaatcagcaacttctgctg

SEQ ID NO: 877281 - DNA, 25 bp, Homo sapien
aagacaactgccaatcagcaacttc

SEQ ID NO: 877282 - DNA, 25 bp, Homo sapien
gccaaagaaacagcactataagaca

SEQ ID NO: 877283 - DNA, 25 bp, Homo sapien
gaaacagcactataagacaactgcc

SEQ ID NO: 877284 - DNA, 25 bp, Homo sapien
tctacccatgatacagaagctggca

SEQ ID NO: 877285 - DNA, 25 bp, Homo sapien
tagtgtaaggctctacccatgatac

SEQ ID NO: 877286 - DNA, 25 bp, Homo sapien
tatcttcagatttgcattgctccag

SEQ ID NO: 877287 - DNA, 25 bp, Homo sapien
gacttctcggtgctgtatgttccca

SEQ ID NO: 877288 - DNA, 25 bp, Homo sapien
ttctgggaagcgttctggcctctgt

SEQ ID NO: 877289 - DNA, 25 bp, Homo sapien
tgcttctgggaagcgttctggcctc

SEQ ID NO: 877290 - DNA, 25 bp, Homo sapien
tagattacgctaaaaatgtggaaga

SEQ ID NO: 877291 - DNA, 25 bp, Homo sapien
gcattgcatctgtgtgtcgaggtag

SEQ ID NO: 877292 - DNA, 25 bp, Homo sapien
atgttcacccaccatgtgtccaaca

SEQ ID NO: 877293 - DNA, 25 bp, Homo sapien
ttcacccaccatgtgtccaacagag

SEQ ID NO: 877294 - DNA, 25 bp, Homo sapien
cattcatccgggggatattaaaagg

SEQ ID NO: 877295 - DNA, 25 bp, Homo sapien
ccaccatgtgtccaacagagtgtcc

SEQ ID NO: 877296 - DNA, 25 bp, Homo sapien
cctaagtgggaagcctcattgtaac

SEQ ID NO: 877297 - DNA, 25 bp, Homo sapien
ctctaactgactaaacctatgggtt

SEQ ID NO: 877298 - DNA, 25 bp, Homo sapien
ggaaaactcttgtccatgtgtaaga

SEQ ID NO: 877299 - DNA, 25 bp, Homo sapien
tgtatcaaaaagaacagtctatggg

SEQ ID NO: 877300 - DNA, 25 bp, Homo sapien
tgcgtgagcattttgagggttcttc

SEQ ID NO: 877301 - DNA, 25 bp, Homo sapien
ttttgctctctaattcaggtcgctg

SEQ ID NO: 877302 - DNA, 25 bp, Homo sapien
tcatgcgtgagcattttgagggttc

SEQ ID NO: 877303 - DNA, 25 bp, Homo sapien
gctgaattctaactttgatctgtaa

SEQ ID NO: 877304 - DNA, 25 bp, Homo sapien
ccagctgtttgcttcttgctgcttc

SEQ ID NO: 877305 - DNA, 25 bp, Homo sapien
cacattccacatagttgatggccat

SEQ ID NO: 877306 - DNA, 25 bp, Homo sapien
ccaaaccacattccacatagttgat

SEQ ID NO: 877307 - DNA, 25 bp, Homo sapien
tgcagacaatgaacactcttccaaa

SEQ ID NO: 877308 - DNA, 25 bp, Homo sapien
gacaatgaacactcttccaaaccac

SEQ ID NO: 877309 - DNA, 25 bp, Homo sapien
tattctagaacacttaccttgagtc

SEQ ID NO: 877310 - DNA, 25 bp, Homo sapien
cattcccctctaggtattaatattc

SEQ ID NO: 877311 - DNA, 25 bp, Homo sapien
taccttgagtccaatcacattggcc

SEQ ID NO: 877312 - DNA, 25 bp, Homo sapien
cccattttagtgaattgcacaatac

SEQ ID NO: 877313 - DNA, 25 bp, Homo sapien
gagagttgctataacccaacaggag

SEQ ID NO: 877314 - DNA, 25 bp, Homo sapien
tcaggatctcaacttacaacagagc

SEQ ID NO: 877315 - DNA, 25 bp, Homo sapien
aaaagtcagacacagttattcgcct

SEQ ID NO: 877316 - DNA, 25 bp, Homo sapien
ctcaagccagaggacatcagagccc

SEQ ID NO: 877317 - DNA, 25 bp, Homo sapien
tataccagcttgttaaatgaatgcc

SEQ ID NO: 877318 - DNA, 25 bp, Homo sapien
gaagtccggccaagcataaaattac

SEQ ID NO: 877319 - DNA, 25 bp, Homo sapien
tgaagctaggtaacaggtaacccag

SEQ ID NO: 877320 - DNA, 25 bp, Homo sapien
aagcaggtgttaagagagctcaacc

SEQ ID NO: 877321 - DNA, 25 bp, Homo sapien
aacggcaggtgttgctattagcaga

SEQ ID NO: 877322 - DNA, 25 bp, Homo sapien
tgatgggtatgcacaaaggagtgcc

SEQ ID NO: 877323 - DNA, 25 bp, Homo sapien
gaaagaacaggtattgctccacccg

SEQ ID NO: 877324 - DNA, 25 bp, Homo sapien
taatgttcttcgtctattgctagag

SEQ ID NO: 877325 - DNA, 25 bp, Homo sapien
tggtgtgagtgcacacccattttct

SEQ ID NO: 877326 - DNA, 25 bp, Homo sapien
cactatgtaaacaatattgttgtct

SEQ ID NO: 877327 - DNA, 25 bp, Homo sapien
ctcttagagttcactatgtaaacaa

SEQ ID NO: 877328 - DNA, 25 bp, Homo sapien
tattgcagtggttagaacttgctgt

SEQ ID NO: 877329 - DNA, 25 bp, Homo sapien
taattttcgcatccaaaggctgaca

SEQ ID NO: 877330 - DNA, 25 bp, Homo sapien
tagggttcggatcccaaatcggcag

SEQ ID NO: 877331 - DNA, 25 bp, Homo sapien
aatacttaactttgaccacagcgag

SEQ ID NO: 877332 - DNA, 25 bp, Homo sapien
aattgtaccgctaatgagagcctga

SEQ ID NO: 877333 - DNA, 25 bp, Homo sapien
tttccgaaatcaaacacgctccagc

SEQ ID NO: 877334 - DNA, 25 bp, Homo sapien
cagttaaagtgtgaggaataccctc

SEQ ID NO: 877335 - DNA, 25 bp, Homo sapien
tactaagtccgcctactaagatggc

SEQ ID NO: 877336 - DNA, 25 bp, Homo sapien
tagagcttcactacaattctgactg

SEQ ID NO: 877337 - DNA, 25 bp, Homo sapien
gagcctaaaaggatgccagtgcagt

SEQ ID NO: 877338 - DNA, 25 bp, Homo sapien
taattgcgctagttatccaaagaca

SEQ ID NO: 877339 - DNA, 25 bp, Homo sapien
aacatgaaatgtggccagatcttac

SEQ ID NO: 877340 - DNA, 25 bp, Homo sapien
gttatcacccagctaaggccacctg

SEQ ID NO: 877341 - DNA, 25 bp, Homo sapien
tgacccctggtaaatccggtggaca

SEQ ID NO: 877342 - DNA, 25 bp, Homo sapien
ccggtggacaccgtgacattatgca

SEQ ID NO: 877343 - DNA, 25 bp, Homo sapien
gagttactgatcctgatgttcccca

SEQ ID NO: 877344 - DNA, 25 bp, Homo sapien
gaagaattctatttcccaggagtag

SEQ ID NO: 877345 - DNA, 25 bp, Homo sapien
tactgtcttagtacccagtgcctga

SEQ ID NO: 877346 - DNA, 25 bp, Homo sapien
ggattcctttgctagaatactcgcc

SEQ ID NO: 877347 - DNA, 25 bp, Homo sapien
ggaactcttatacgctgtggtaatg

SEQ ID NO: 877348 - DNA, 25 bp, Homo sapien
cataaagtatatggctcatgcagcc

SEQ ID NO: 877349 - DNA, 25 bp, Homo sapien
gacccacaccgtactgcttaagatg

SEQ ID NO: 877350 - DNA, 25 bp, Homo sapien
cagtggcttggatgctaccctcagt

SEQ ID NO: 877351 - DNA, 25 bp, Homo sapien
ccagacatttgctagggaatatcca

SEQ ID NO: 877352 - DNA, 25 bp, Homo sapien
tagaattgtgggacacggtatcctc

SEQ ID NO: 877353 - DNA, 25 bp, Homo sapien
catgctgcccgtagggctgtaagca

SEQ ID NO: 877354 - DNA, 25 bp, Homo sapien
gggttctggtgcaacttgttcctaa

SEQ ID NO: 877355 - DNA, 25 bp, Homo sapien
gctgtagtgcctagataagggtcca

SEQ ID NO: 877356 - DNA, 25 bp, Homo sapien
tctcgtgaccaggttacaatatagg

SEQ ID NO: 877357 - DNA, 25 bp, Homo sapien
ggtgcccaggagttacgaaatcacc

SEQ ID NO: 877358 - DNA, 25 bp, Homo sapien
gaagagggtaatggcagggcctagg

SEQ ID NO: 877359 - DNA, 25 bp, Homo sapien
aggagttacgaaatcacctgggccg

SEQ ID NO: 877360 - DNA, 25 bp, Homo sapien
cgggaatctgaaaggcgctgcctga

SEQ ID NO: 877361 - DNA, 25 bp, Homo sapien
caggcaaagctgagtaggtggcccc

SEQ ID NO: 877362 - DNA, 25 bp, Homo sapien
aaatgtggctgtacgtggtccagga

SEQ ID NO: 877363 - DNA, 25 bp, Homo sapien
tccccttgaaaggaggctgcttgct

SEQ ID NO: 877364 - DNA, 25 bp, Homo sapien
cttgtttacgatgggctgtaggccc

SEQ ID NO: 877365 - DNA, 25 bp, Homo sapien
ccaaggagctatgggagtgcaagtg

SEQ ID NO: 877366 - DNA, 25 bp, Homo sapien
gtggctaggccaaggagctatggga

SEQ ID NO: 877367 - DNA, 25 bp, Homo sapien
tctgaggagcatgcttgtctgccca

SEQ ID NO: 877368 - DNA, 25 bp, Homo sapien
tttttgtcttgttgaagggatggtg

SEQ ID NO: 877369 - DNA, 25 bp, Homo sapien
tagactgacagatagccactgctgg

SEQ ID NO: 877370 - DNA, 25 bp, Homo sapien
gctggcagactaggcaagggctctt

SEQ ID NO: 877371 - DNA, 25 bp, Homo sapien
ccttgggtactatggctagactgac

SEQ ID NO: 877372 - DNA, 25 bp, Homo sapien
gatgaaggtcatcggcatatgcctg

SEQ ID NO: 877373 - DNA, 25 bp, Homo sapien
catgatgctgtcgaggagggagaaa

SEQ ID NO: 877374 - DNA, 25 bp, Homo sapien
ctgtaagagatcgtagaaggagaaa

SEQ ID NO: 877375 - DNA, 25 bp, Homo sapien
ctcccgctacttcccggagaggaag

SEQ ID NO: 877376 - DNA, 25 bp, Homo sapien
acgtggacatggacgatcccctcaa

SEQ ID NO: 877377 - DNA, 25 bp, Homo sapien
gagagaatcctctaaggacgcccag

SEQ ID NO: 877378 - DNA, 25 bp, Homo sapien
taagcttattatcctgctgagctgc

SEQ ID NO: 877379 - DNA, 25 bp, Homo sapien
ccaaggtcaggcgagtaagcttatt

SEQ ID NO: 877380 - DNA, 25 bp, Homo sapien
ggcaccaaaatgaaggttagccaag

SEQ ID NO: 877381 - DNA, 25 bp, Homo sapien
ctttagattaatacatgcccattgg

SEQ ID NO: 877382 - DNA, 25 bp, Homo sapien
ggtatgtattaccaatgggtggatg

SEQ ID NO: 877383 - DNA, 25 bp, Homo sapien
ggtggatgaagctaacccttccatt

SEQ ID NO: 877384 - DNA, 25 bp, Homo sapien
gcaaatattatgttataatgtcatc

SEQ ID NO: 877385 - DNA, 25 bp, Homo sapien
cactacaagtgaaagtaagacctac

SEQ ID NO: 877386 - DNA, 25 bp, Homo sapien
tgctagggatgacctacattcacta

SEQ ID NO: 877387 - DNA, 25 bp, Homo sapien
ttgcttttcgcaacacaaccttctg

SEQ ID NO: 877388 - DNA, 25 bp, Homo sapien
taagacctacatacagtcctgctgt

SEQ ID NO: 877389 - DNA, 25 bp, Homo sapien
cataagcaccctgaaattaccgctg

SEQ ID NO: 877390 - DNA, 25 bp, Homo sapien
tatcactggcaatagcggtcttgag

SEQ ID NO: 877391 - DNA, 25 bp, Homo sapien
caattcagtgaggacgattctgcaa

SEQ ID NO: 877392 - DNA, 25 bp, Homo sapien
cagggaagactgtgcaaggaacact

SEQ ID NO: 877393 - DNA, 25 bp, Homo sapien
tcatccaatgaaaagcattttgcat

SEQ ID NO: 877394 - DNA, 25 bp, Homo sapien
ggctgcggagagaaaatccaatctg

SEQ ID NO: 877395 - DNA, 25 bp, Homo sapien
ttagatgaacagttccaggaccacc

SEQ ID NO: 877396 - DNA, 25 bp, Homo sapien
tctgttctgcgcgtttgcctcgccg

SEQ ID NO: 877397 - DNA, 25 bp, Homo sapien
caggaccaccactaattttccttgg

SEQ ID NO: 877398 - DNA, 25 bp, Homo sapien
ggaggagcagcagcgattttcttag

SEQ ID NO: 877399 - DNA, 25 bp, Homo sapien
ggagcagcagcgattttcttagcca

SEQ ID NO: 877400 - DNA, 25 bp, Homo sapien
cagcagcgattttcttagccatttt

SEQ ID NO: 877401 - DNA, 25 bp, Homo sapien
tggaggagcagcagcgattttctta

SEQ ID NO: 877402 - DNA, 25 bp, Homo sapien
tcattgcagcaatttcggagctgac

SEQ ID NO: 877403 - DNA, 25 bp, Homo sapien
gcagcagtggactacactgtgggtt

SEQ ID NO: 877404 - DNA, 25 bp, Homo sapien
tgggttgtctttgcgaggaagtggc

SEQ ID NO: 877405 - DNA, 25 bp, Homo sapien
cggagctgacttttcgacagtgcaa

SEQ ID NO: 877406 - DNA, 25 bp, Homo sapien
gaatgaaggcgcagttaccaggcca

SEQ ID NO: 877407 - DNA, 25 bp, Homo sapien
gaattaaactctcccgctgcttgga

SEQ ID NO: 877408 - DNA, 25 bp, Homo sapien
tgctagaaacacgtgagacagcgcg

SEQ ID NO: 877409 - DNA, 25 bp, Homo sapien
gaagagcttgcgcagattaacctag

SEQ ID NO: 877410 - DNA, 25 bp, Homo sapien
caggtgggatctctagcgcctcagg

SEQ ID NO: 877411 - DNA, 25 bp, Homo sapien
ggtcgtgtgcggagggacagggtga

SEQ ID NO: 877412 - DNA, 25 bp, Homo sapien
ggaggatgggcttatcccggcgggc

SEQ ID NO: 877413 - DNA, 25 bp, Homo sapien
gagaagagccggtcgtgtgcggagg

SEQ ID NO: 877414 - DNA, 25 bp, Homo sapien
gagtccaaggtttctcgtgcggcaa

SEQ ID NO: 877415 - DNA, 25 bp, Homo sapien
gcgtagaaacgcctgccaatgcttt

SEQ ID NO: 877416 - DNA, 25 bp, Homo sapien
gaagggtgcttatccctgcgtagaa

SEQ ID NO: 877417 - DNA, 25 bp, Homo sapien
catggcttccctgatgcgggtgacc

SEQ ID NO: 877418 - DNA, 25 bp, Homo sapien
agcatgttttggtgtgtagtcttac

SEQ ID NO: 877419 - DNA, 25 bp, Homo sapien
gatttatgaagaaggcgatttagtc

SEQ ID NO: 877420 - DNA, 25 bp, Homo sapien
tagctatgcatcgttctacacaggt

SEQ ID NO: 877421 - DNA, 25 bp, Homo sapien
tgtcagaagcactttcacttgaaga

SEQ ID NO: 877422 - DNA, 25 bp, Homo sapien
ccattgcaaaagtcacacaagtgaa

SEQ ID NO: 877423 - DNA, 25 bp, Homo sapien
tgtaactatacatagctgagagtgt

SEQ ID NO: 877424 - DNA, 25 bp, Homo sapien
caccataaggccgagctgaggtacc

SEQ ID NO: 877425 - DNA, 25 bp, Homo sapien
cacaagtgaagccaggtgtaactat

SEQ ID NO: 877426 - DNA, 25 bp, Homo sapien
gctgaagttgagtaaagagttttca

SEQ ID NO: 877427 - DNA, 25 bp, Homo sapien
cattgatgtcaaagttgcttgagct

SEQ ID NO: 877428 - DNA, 25 bp, Homo sapien
ttatcgtttgtgctcattgatgtca

SEQ ID NO: 877429 - DNA, 25 bp, Homo sapien
ctgaagttgagtaaagagttttcaa

SEQ ID NO: 877430 - DNA, 25 bp, Homo sapien
caggaggaaacccttctctgtgaac

SEQ ID NO: 877431 - DNA, 25 bp, Homo sapien
tgggaatgaggccatccaggaggaa

SEQ ID NO: 877432 - DNA, 25 bp, Homo sapien
ggaggaaacccttctctgtgaacat

SEQ ID NO: 877433 - DNA, 25 bp, Homo sapien
aatgaggccatccaggaggaaaccc

SEQ ID NO: 877434 - DNA, 25 bp, Homo sapien
tcaggttctgcctttattggactct

SEQ ID NO: 877435 - DNA, 25 bp, Homo sapien
gtggacatcgacaatcaaagcttct

SEQ ID NO: 877436 - DNA, 25 bp, Homo sapien
gcagttgctaaaagtggctccacat

SEQ ID NO: 877437 - DNA, 25 bp, Homo sapien
gcaatccacccaatgctaactggga

SEQ ID NO: 877438 - DNA, 25 bp, Homo sapien
caatattttgctcccggcacacaga

SEQ ID NO: 877439 - DNA, 25 bp, Homo sapien
catccatactaagcgcatcacagaa

SEQ ID NO: 877440 - DNA, 25 bp, Homo sapien
gagagctggtttgtacaatctatct

SEQ ID NO: 877441 - DNA, 25 bp, Homo sapien
ttcatccatactaagcgcatcacag

SEQ ID NO: 877442 - DNA, 25 bp, Homo sapien
tgtatcttcatccatactaagcgca

SEQ ID NO: 877443 - DNA, 25 bp, Homo sapien
tagtggttatagtacctctccccta

SEQ ID NO: 877444 - DNA, 25 bp, Homo sapien
ctattcctgacacccatggatacca

SEQ ID NO: 877445 - DNA, 25 bp, Homo sapien
taatgtctttaaactacagtggttc

SEQ ID NO: 877446 - DNA, 25 bp, Homo sapien
catgcctagccttcgatggctttta

SEQ ID NO: 877447 - DNA, 25 bp, Homo sapien
aattgtaattttgttctttggccat

SEQ ID NO: 877448 - DNA, 25 bp, Homo sapien
tttataccaattattacaattgtaa

SEQ ID NO: 877449 - DNA, 25 bp, Homo sapien
tacaattgtaattttgttctttggc

SEQ ID NO: 877450 - DNA, 25 bp, Homo sapien
ctttttataccaattattacaattg

SEQ ID NO: 877451 - DNA, 25 bp, Homo sapien
gtcatcagattgtcaacagctgcac

SEQ ID NO: 877452 - DNA, 25 bp, Homo sapien
tcagattgtcaacagctgcaccttt

SEQ ID NO: 877453 - DNA, 25 bp, Homo sapien
ctttctgacttgaagcaggtcatca

SEQ ID NO: 877454 - DNA, 25 bp, Homo sapien
tgtcaacagctgcacctttcctcat

SEQ ID NO: 877455 - DNA, 25 bp, Homo sapien
tagcctgacaccgtgactgatcttg

SEQ ID NO: 877456 - DNA, 25 bp, Homo sapien
tatgtgtctttggaactaactccac

SEQ ID NO: 877457 - DNA, 25 bp, Homo sapien
tacatcctgctctaaggcgagtggg

SEQ ID NO: 877458 - DNA, 25 bp, Homo sapien
cgagtgggttataggtatatccagc

SEQ ID NO: 877459 - DNA, 25 bp, Homo sapien
ttctctgagatactttgattccagc

SEQ ID NO: 877460 - DNA, 25 bp, Homo sapien
tttctctgagatactttgattccag

SEQ ID NO: 877461 - DNA, 25 bp, Homo sapien
tctctgagatactttgattccagcc

SEQ ID NO: 877462 - DNA, 25 bp, Homo sapien
tgtgaaactgattacattgcttctt

SEQ ID NO: 877463 - DNA, 25 bp, Homo sapien
actcttcaaaatgtgaaactgatta

SEQ ID NO: 877464 - DNA, 25 bp, Homo sapien
tattttgctgtcttcccgtttgcat

SEQ ID NO: 877465 - DNA, 25 bp, Homo sapien
caaaatgtgaaactgattacattgc

SEQ ID NO: 877466 - DNA, 25 bp, Homo sapien
ggctgatgcattcatatacaatagg

SEQ ID NO: 877467 - DNA, 25 bp, Homo sapien
caggcctgtcaaccaattttcttga

SEQ ID NO: 877468 - DNA, 25 bp, Homo sapien
gcttttgctgtataaggctgatgca

SEQ ID NO: 877469 - DNA, 25 bp, Homo sapien
ttgagttagtttctcatgggagctg

SEQ ID NO: 877470 - DNA, 25 bp, Homo sapien
gcacgatctcaatgcactgcaacct

SEQ ID NO: 877471 - DNA, 25 bp, Homo sapien
gttcgagtgattctctgcttcagcc

SEQ ID NO: 877472 - DNA, 25 bp, Homo sapien
agtggcacgatctcaatgcactgca

SEQ ID NO: 877473 - DNA, 25 bp, Homo sapien
agtctctctctcttgccgcccaggc

SEQ ID NO: 877474 - DNA, 25 bp, Homo sapien
gctcctggtaaacgatgattacaca

SEQ ID NO: 877475 - DNA, 25 bp, Homo sapien
catgaaataataagtcaccagtgta

SEQ ID NO: 877476 - DNA, 25 bp, Homo sapien
acatccacaactcttcgtgctcctg

SEQ ID NO: 877477 - DNA, 25 bp, Homo sapien
cacaatttctaaggaatgccatgaa

SEQ ID NO: 877478 - DNA, 25 bp, Homo sapien
tccctccaattcatcatgctttgtt

SEQ ID NO: 877479 - DNA, 25 bp, Homo sapien
tactgtagacattgaccttcatttg

SEQ ID NO: 877480 - DNA, 25 bp, Homo sapien
agacattgaccttcatttgtctaca

SEQ ID NO: 877481 - DNA, 25 bp, Homo sapien
ctgtagacattgaccttcatttgtc

SEQ ID NO: 877482 - DNA, 25 bp, Homo sapien
tctgtatgctgtttactccagttag

SEQ ID NO: 877483 - DNA, 25 bp, Homo sapien
tgaagcatatttctgtcaacttgtg

SEQ ID NO: 877484 - DNA, 25 bp, Homo sapien
ctgtatgctgtttactccagttagc

SEQ ID NO: 877485 - DNA, 25 bp, Homo sapien
tgttctgtgctgatctagcctggcc

SEQ ID NO: 877486 - DNA, 25 bp, Homo sapien
ccggagaaatgggatctgaaaggcc

SEQ ID NO: 877487 - DNA, 25 bp, Homo sapien
gacctgggcaggtagcttgatctct

SEQ ID NO: 877488 - DNA, 25 bp, Homo sapien
gcttagagaagtgccacagcagtct

SEQ ID NO: 877489 - DNA, 25 bp, Homo sapien
tcattctttatagtgtgccagaagt

SEQ ID NO: 877490 - DNA, 25 bp, Homo sapien
aagttgttcctggtgtactgggaca

SEQ ID NO: 877491 - DNA, 25 bp, Homo sapien
actgggacatgcattctggtgggtg

SEQ ID NO: 877492 - DNA, 25 bp, Homo sapien
ttctgtgtgaaaagccctggtatct

SEQ ID NO: 877493 - DNA, 25 bp, Homo sapien
aggatggagggattagcaacagact

SEQ ID NO: 877494 - DNA, 25 bp, Homo sapien
gagggattagcaacagacttggatg

SEQ ID NO: 877495 - DNA, 25 bp, Homo sapien
ggattagcaacagacttggatgaag

SEQ ID NO: 877496 - DNA, 25 bp, Homo sapien
gggaagtgtcacatgatgtatgtac

SEQ ID NO: 877497 - DNA, 25 bp, Homo sapien
ctcttcatctgtgaatactttctcc

SEQ ID NO: 877498 - DNA, 25 bp, Homo sapien
cctttccttggcattggcttcctgg

SEQ ID NO: 877499 - DNA, 25 bp, Homo sapien
ttccttggcattggcttcctggaaa

SEQ ID NO: 877500 - DNA, 25 bp, Homo sapien
ttctcctttccttggcattggcttc

SEQ ID NO: 877501 - DNA, 25 bp, Homo sapien
gagaatgaaagtagccttcagattt

SEQ ID NO: 877502 - DNA, 25 bp, Homo sapien
tagccttcagatttatttccctgaa

SEQ ID NO: 877503 - DNA, 25 bp, Homo sapien
tatgagaatgaaagtagccttcaga

SEQ ID NO: 877504 - DNA, 25 bp, Homo sapien
ttatgagaatgaaagtagccttcag

SEQ ID NO: 877505 - DNA, 25 bp, Homo sapien
tcatcagaccattggcagtagggtt

SEQ ID NO: 877506 - DNA, 25 bp, Homo sapien
gcagtagggtttataatcccatttg

SEQ ID NO: 877507 - DNA, 25 bp, Homo sapien
ttccacttcatcagaccattggcag

SEQ ID NO: 877508 - DNA, 25 bp, Homo sapien
ggtttataatcccatttggcatgag

SEQ ID NO: 877509 - DNA, 25 bp, Homo sapien
gacctttgccagtaagaaatagctt

SEQ ID NO: 877510 - DNA, 25 bp, Homo sapien
cagagaggtataagaacgacctttg

SEQ ID NO: 877511 - DNA, 25 bp, Homo sapien
ggtataagaacgacctttgccagta

SEQ ID NO: 877512 - DNA, 25 bp, Homo sapien
taagaacgacctttgccagtaagaa

SEQ ID NO: 877513 - DNA, 25 bp, Homo sapien
aggattccagtctgtttgttttaag

SEQ ID NO: 877514 - DNA, 25 bp, Homo sapien
ttgtggatctgagtcatccacagct

SEQ ID NO: 877515 - DNA, 25 bp, Homo sapien
tctgagtcatccacagctgtaggat

SEQ ID NO: 877516 - DNA, 25 bp, Homo sapien
cttttgaagttgtctcctttgtgga

SEQ ID NO: 877517 - DNA, 25 bp, Homo sapien
catgtttatgttcttctgccagttt

SEQ ID NO: 877518 - DNA, 25 bp, Homo sapien
ttatgttcttctgccagtttgagtc

SEQ ID NO: 877519 - DNA, 25 bp, Homo sapien
tgtttatgttcttctgccagtttga

SEQ ID NO: 877520 - DNA, 25 bp, Homo sapien
gtttatgttcttctgccagtttgag

SEQ ID NO: 877521 - DNA, 25 bp, Homo sapien
gaaatgctgggaaataatgtcttcc

SEQ ID NO: 877522 - DNA, 25 bp, Homo sapien
agtcacaagggcaactggtgaccat

SEQ ID NO: 877523 - DNA, 25 bp, Homo sapien
cttgttcagcatggtaacttctggc

SEQ ID NO: 877524 - DNA, 25 bp, Homo sapien
tccttctagcttgttcagcatggta

SEQ ID NO: 877525 - DNA, 25 bp, Homo sapien
ctagcttgttcagcatggtaacttc

SEQ ID NO: 877526 - DNA, 25 bp, Homo sapien
ccttctagcttgttcagcatggtaa

SEQ ID NO: 877527 - DNA, 25 bp, Homo sapien
tggctccatcaaaccgtagtttctg

SEQ ID NO: 877528 - DNA, 25 bp, Homo sapien
agaaaaaattggctccatcaaaccg

SEQ ID NO: 877529 - DNA, 25 bp, Homo sapien
aaaaattggctccatcaaaccgtag

SEQ ID NO: 877530 - DNA, 25 bp, Homo sapien
aaattggctccatcaaaccgtagtt

SEQ ID NO: 877531 - DNA, 25 bp, Homo sapien
cccagacaccgtagagcgcgtagct

SEQ ID NO: 877532 - DNA, 25 bp, Homo sapien
agacaccgtagagcgcgtagctcat

SEQ ID NO: 877533 - DNA, 25 bp, Homo sapien
gccccagacaccgtagagcgcgtag

SEQ ID NO: 877534 - DNA, 25 bp, Homo sapien
gttgccccagacaccgtagagcgcg

SEQ ID NO: 877535 - DNA, 25 bp, Homo sapien
acaagcaagataggtctaattccag

SEQ ID NO: 877536 - DNA, 25 bp, Homo sapien
gaacaagcaagataggtctaattcc

SEQ ID NO: 877537 - DNA, 25 bp, Homo sapien
caagcaagataggtctaattccaga

SEQ ID NO: 877538 - DNA, 25 bp, Homo sapien
agcaagataggtctaattccagatg

SEQ ID NO: 877539 - DNA, 25 bp, Homo sapien
ctcttgcttatttaacaattcccaa

SEQ ID NO: 877540 - DNA, 25 bp, Homo sapien
tcttgcttatttaacaattcccaac

SEQ ID NO: 877541 - DNA, 25 bp, Homo sapien
cttgcttatttaacaattcccaact

SEQ ID NO: 877542 - DNA, 25 bp, Homo sapien
cgttgatgaatgaaggtaaaaagct

SEQ ID NO: 877543 - DNA, 25 bp, Homo sapien
agggacaactgtaactggtctacca

SEQ ID NO: 877544 - DNA, 25 bp, Homo sapien
gagcctctaagtatccactatggga

SEQ ID NO: 877545 - DNA, 25 bp, Homo sapien
tatctatttggctaatatttgaggg

SEQ ID NO: 877546 - DNA, 25 bp, Homo sapien
tcacaatggtatgccatggtataca

SEQ ID NO: 877547 - DNA, 25 bp, Homo sapien
gctctgcagaggtattctttggata

SEQ ID NO: 877548 - DNA, 25 bp, Homo sapien
cttgctctgcagaggtattctttgg

SEQ ID NO: 877549 - DNA, 25 bp, Homo sapien
ggtatgccatggtatacatgatggt

SEQ ID NO: 877550 - DNA, 25 bp, Homo sapien
aagtgagtgtgggtcgttattaatg

SEQ ID NO: 877551 - DNA, 25 bp, Homo sapien
gaaaagtgagtgtgggtcgttatta

SEQ ID NO: 877552 - DNA, 25 bp, Homo sapien
gtgagtgtgggtcgttattaatgaa

SEQ ID NO: 877553 - DNA, 25 bp, Homo sapien
gagtgtgggtcgttattaatgaaaa

SEQ ID NO: 877554 - DNA, 25 bp, Homo sapien
ctgcactggactcttctagaaaagc

SEQ ID NO: 877555 - DNA, 25 bp, Homo sapien
ctagaaaagccagggatacagagtg

SEQ ID NO: 877556 - DNA, 25 bp, Homo sapien
gccctgcactggactcttctagaaa

SEQ ID NO: 877557 - DNA, 25 bp, Homo sapien
gccagggatacagagtgggttttaa

SEQ ID NO: 877558 - DNA, 25 bp, Homo sapien
taatgttggttgaatgagcaagtga

SEQ ID NO: 877559 - DNA, 25 bp, Homo sapien
cacttgatagggacttcactggagc

SEQ ID NO: 877560 - DNA, 25 bp, Homo sapien
actggagctatcttcaatctttgca

SEQ ID NO: 877561 - DNA, 25 bp, Homo sapien
gcagagcctcgttcagcaactgaca

SEQ ID NO: 877562 - DNA, 25 bp, Homo sapien
ctctcagtaatacttctttagcccc

SEQ ID NO: 877563 - DNA, 25 bp, Homo sapien
tcagtaatacttctttagcccctac

SEQ ID NO: 877564 - DNA, 25 bp, Homo sapien
atacttctttagcccctacacccat

SEQ ID NO: 877565 - DNA, 25 bp, Homo sapien
cagtaatacttctttagcccctaca

SEQ ID NO: 877566 - DNA, 25 bp, Homo sapien
ttctacggctttcaaactagtggaa

SEQ ID NO: 877567 - DNA, 25 bp, Homo sapien
agaagtctctccattctacggcttt

SEQ ID NO: 877568 - DNA, 25 bp, Homo sapien
agggagattcaagtgcgctaataaa

SEQ ID NO: 877569 - DNA, 25 bp, Homo sapien
gaaaagggagattcaagtgcgctaa

SEQ ID NO: 877570 - DNA, 25 bp, Homo sapien
tacacaaggaccttgatccgtaggg

SEQ ID NO: 877571 - DNA, 25 bp, Homo sapien
ctgaacatcaaacatacacaaggac

SEQ ID NO: 877572 - DNA, 25 bp, Homo sapien
caaggaccttgatccgtagggaatt

SEQ ID NO: 877573 - DNA, 25 bp, Homo sapien
tcaaacatacacaaggaccttgatc

SEQ ID NO: 877574 - DNA, 25 bp, Homo sapien
aggtctgctagtaagcagctccatt

SEQ ID NO: 877575 - DNA, 25 bp, Homo sapien
tgtcaggtctgctagtaagcagctc

SEQ ID NO: 877576 - DNA, 25 bp, Homo sapien
ggtctccaaggcacagttgtcaggt

SEQ ID NO: 877577 - DNA, 25 bp, Homo sapien
atctctgaacaaagacaatcccctt

SEQ ID NO: 877578 - DNA, 25 bp, Homo sapien
gatggaagcactttcagggtcaaac

SEQ ID NO: 877579 - DNA, 25 bp, Homo sapien
ggaagcactttcagggtcaaacagg

SEQ ID NO: 877580 - DNA, 25 bp, Homo sapien
agatggaagcactttcagggtcaaa

SEQ ID NO: 877581 - DNA, 25 bp, Homo sapien
ctgcagatggaagcactttcagggt

SEQ ID NO: 877582 - DNA, 25 bp, Homo sapien
tcagaatcattttcttggatcccca

SEQ ID NO: 877583 - DNA, 25 bp, Homo sapien
ttgtagacacccctgcattttcaga

SEQ ID NO: 877584 - DNA, 25 bp, Homo sapien
gtagacacccctgcattttcagaat

SEQ ID NO: 877585 - DNA, 25 bp, Homo sapien
cattttgtagacacccctgcatttt

SEQ ID NO: 877586 - DNA, 25 bp, Homo sapien
cttctctcctgtggtatcaagattt

SEQ ID NO: 877587 - DNA, 25 bp, Homo sapien
tctgaaccatttgtattgatctcct

SEQ ID NO: 877588 - DNA, 25 bp, Homo sapien
gactgtccatgtgcaatattaaggc

SEQ ID NO: 877589 - DNA, 25 bp, Homo sapien
aggcactcattgtcaaatctcgaaa

SEQ ID NO: 877590 - DNA, 25 bp, Homo sapien
cttgagaagcacagcccctaaagac

SEQ ID NO: 877591 - DNA, 25 bp, Homo sapien
ttgagaagcacagcccctaaagaca

SEQ ID NO: 877592 - DNA, 25 bp, Homo sapien
tgagaagcacagcccctaaagacat

SEQ ID NO: 877593 - DNA, 25 bp, Homo sapien
ctactgaatttagcccaaatgcctt

SEQ ID NO: 877594 - DNA, 25 bp, Homo sapien
gcatactactgaatttagcccaaat

SEQ ID NO: 877595 - DNA, 25 bp, Homo sapien
gaatttagcccaaatgccttttgtg

SEQ ID NO: 877596 - DNA, 25 bp, Homo sapien
tactactgaatttagcccaaatgcc

SEQ ID NO: 877597 - DNA, 25 bp, Homo sapien
tcaggcctggaaaccttacattagg

SEQ ID NO: 877598 - DNA, 25 bp, Homo sapien
gcatctgtgcccaatacaaagcata

SEQ ID NO: 877599 - DNA, 25 bp, Homo sapien
gatgattagggatactctcagcagt

SEQ ID NO: 877600 - DNA, 25 bp, Homo sapien
ttagaccttgtctgccattgtagca

SEQ ID NO: 877601 - DNA, 25 bp, Homo sapien
tcaaccttagaaactgagtgagtat

SEQ ID NO: 877602 - DNA, 25 bp, Homo sapien
cttgcttaatggctgtcaggtgtcc

SEQ ID NO: 877603 - DNA, 25 bp, Homo sapien
agtacagacattccatcaaccttag

SEQ ID NO: 877604 - DNA, 25 bp, Homo sapien
tgaaaaatgggctagacacagaatg

SEQ ID NO: 877605 - DNA, 25 bp, Homo sapien
cataggcaaataattggcatctgtt

SEQ ID NO: 877606 - DNA, 25 bp, Homo sapien
cattcctcatctaataacttgttga

SEQ ID NO: 877607 - DNA, 25 bp, Homo sapien
aaccggctgctgataatttgactag

SEQ ID NO: 877608 - DNA, 25 bp, Homo sapien
gctgcagtcgtgatttctgaaacag

SEQ ID NO: 877609 - DNA, 25 bp, Homo sapien
aatgacactgacatcataaacctgc

SEQ ID NO: 877610 - DNA, 25 bp, Homo sapien
tgtgaagaattctggaatgacactg

SEQ ID NO: 877611 - DNA, 25 bp, Homo sapien
tgacactgacatcataaacctgcat

SEQ ID NO: 877612 - DNA, 25 bp, Homo sapien
gaagaattctggaatgacactgaca

SEQ ID NO: 877613 - DNA, 25 bp, Homo sapien
aatttgatacctttagtatctcaag

SEQ ID NO: 877614 - DNA, 25 bp, Homo sapien
tatactcaatttgatacctttagta

SEQ ID NO: 877615 - DNA, 25 bp, Homo sapien
ctcaatttgatacctttagtatctc

SEQ ID NO: 877616 - DNA, 25 bp, Homo sapien
tttatactcaatttgatacctttag

SEQ ID NO: 877617 - DNA, 25 bp, Homo sapien
tgtaatcagcctcaatgaagaaagg

SEQ ID NO: 877618 - DNA, 25 bp, Homo sapien
gctgtgattcttgtctcggaaatga

SEQ ID NO: 877619 - DNA, 25 bp, Homo sapien
tgaatgtattccaccctgtaatcag

SEQ ID NO: 877620 - DNA, 25 bp, Homo sapien
aaccgggaatagtaccagacagagg

SEQ ID NO: 877621 - DNA, 25 bp, Homo sapien
tgctgtgccaccctgtggcgtcccc

SEQ ID NO: 877622 - DNA, 25 bp, Homo sapien
ctgtgccaccctgtggcgtcccctt

SEQ ID NO: 877623 - DNA, 25 bp, Homo sapien
gtgccaccctgtggcgtccccttct

SEQ ID NO: 877624 - DNA, 25 bp, Homo sapien
aacatatggcagagcagcggaggcc

SEQ ID NO: 877625 - DNA, 25 bp, Homo sapien
cacagtactaatgctgagaagcaaa

SEQ ID NO: 877626 - DNA, 25 bp, Homo sapien
gtcacacagtactaatgctgagaag

SEQ ID NO: 877627 - DNA, 25 bp, Homo sapien
catctgtcacacagtactaatgctg

SEQ ID NO: 877628 - DNA, 25 bp, Homo sapien
cagccatctgtcacacagtactaat

SEQ ID NO: 877629 - DNA, 25 bp, Homo sapien
tgggcagctctccataacagttgtc

SEQ ID NO: 877630 - DNA, 25 bp, Homo sapien
caaatgtacactcagcattgcaggc

SEQ ID NO: 877631 - DNA, 25 bp, Homo sapien
aaaatccattctaggtctgggcagc

SEQ ID NO: 877632 - DNA, 25 bp, Homo sapien
tttggcaccgccatatgaacatgag

SEQ ID NO: 877633 - DNA, 25 bp, Homo sapien
gggattcgtgtccttgccctcagca

SEQ ID NO: 877634 - DNA, 25 bp, Homo sapien
tttatcataaacaattgccagatgg

SEQ ID NO: 877635 - DNA, 25 bp, Homo sapien
tcagaatgagaagtaagacaaaggc

SEQ ID NO: 877636 - DNA, 25 bp, Homo sapien
gctcatcagtgtgataacacttcat

SEQ ID NO: 877637 - DNA, 25 bp, Homo sapien
ggcagttaaaggaagtccgtgcaga

SEQ ID NO: 877638 - DNA, 25 bp, Homo sapien
gaggagacaaacagtctgcattttc

SEQ ID NO: 877639 - DNA, 25 bp, Homo sapien
tccgtgcagagggaacattaacatt

SEQ ID NO: 877640 - DNA, 25 bp, Homo sapien
cattaacattagcaatgtccatcat

SEQ ID NO: 877641 - DNA, 25 bp, Homo sapien
ccatctatggtgttgtccgtagaca

SEQ ID NO: 877642 - DNA, 25 bp, Homo sapien
gagtctaggaagacagagctagcac

SEQ ID NO: 877643 - DNA, 25 bp, Homo sapien
tgctgtccaccatacatgactgttg

SEQ ID NO: 877644 - DNA, 25 bp, Homo sapien
aaagcaatttcgtagacagtccatg

SEQ ID NO: 877645 - DNA, 25 bp, Homo sapien
taattgtgtttcatatttttgccaa

SEQ ID NO: 877646 - DNA, 25 bp, Homo sapien
tgtgtttcatatttttgccaactca

SEQ ID NO: 877647 - DNA, 25 bp, Homo sapien
aattgtgtttcatatttttgccaac

SEQ ID NO: 877648 - DNA, 25 bp, Homo sapien
ctgttaagtataattgtgtttcata

SEQ ID NO: 877649 - DNA, 25 bp, Homo sapien
gatactgaatgatgtgaaccaactc

SEQ ID NO: 877650 - DNA, 25 bp, Homo sapien
tagaaacagtttcttgtcactcagg

SEQ ID NO: 877651 - DNA, 25 bp, Homo sapien
tatgcactctgttcaaccagcagga

SEQ ID NO: 877652 - DNA, 25 bp, Homo sapien
tatagctagctaatcacagtcccat

SEQ ID NO: 877653 - DNA, 25 bp, Homo sapien
ccctgtcgttgtctgcatgtgagaa

SEQ ID NO: 877654 - DNA, 25 bp, Homo sapien
tgagtacttccacgtttccctgtcg

SEQ ID NO: 877655 - DNA, 25 bp, Homo sapien
ggcagaggtgcaccctttacatatt

SEQ ID NO: 877656 - DNA, 25 bp, Homo sapien
gagatgcccaatagctgtggcagag

SEQ ID NO: 877657 - DNA, 25 bp, Homo sapien
tacacctgggtcttaggaggtagca

SEQ ID NO: 877658 - DNA, 25 bp, Homo sapien
agtgccagcacatcacagatctaag

SEQ ID NO: 877659 - DNA, 25 bp, Homo sapien
ttggaaggagatatgtacacctggg

SEQ ID NO: 877660 - DNA, 25 bp, Homo sapien
gacaatgtgcccatatctacttagg

SEQ ID NO: 877661 - DNA, 25 bp, Homo sapien
atcccagtctcctacgtccgtagcc

SEQ ID NO: 877662 - DNA, 25 bp, Homo sapien
ccagtctcctacgtccgtagccaaa

SEQ ID NO: 877663 - DNA, 25 bp, Homo sapien
agtctcctacgtccgtagccaaaca

SEQ ID NO: 877664 - DNA, 25 bp, Homo sapien
tcaatgccttcatcccagtctccta

SEQ ID NO: 877665 - DNA, 25 bp, Homo sapien
tagtaataatgccttagcagagccc

SEQ ID NO: 877666 - DNA, 25 bp, Homo sapien
cccaaagagatagtccacgagatca

SEQ ID NO: 877667 - DNA, 25 bp, Homo sapien
taagaccaagattaggcaagacttt

SEQ ID NO: 877668 - DNA, 25 bp, Homo sapien
tataagtttcagaactctgtctgtc

SEQ ID NO: 877669 - DNA, 25 bp, Homo sapien
cagtctgggttacatgtcctcccac

SEQ ID NO: 877670 - DNA, 25 bp, Homo sapien
gaaaaatgctgattagtccagtctg

SEQ ID NO: 877671 - DNA, 25 bp, Homo sapien
gtctcagccatcgtcttaaagaaaa

SEQ ID NO: 877672 - DNA, 25 bp, Homo sapien
gattcacttgcgaccatttcttctc

SEQ ID NO: 877673 - DNA, 25 bp, Homo sapien
tgacaccagcaacatcgtagctgag

SEQ ID NO: 877674 - DNA, 25 bp, Homo sapien
gagctgtgatgcataatgcatccca

SEQ ID NO: 877675 - DNA, 25 bp, Homo sapien
acatcgtgaattggctccattgctg

SEQ ID NO: 877676 - DNA, 25 bp, Homo sapien
tattgttatatgtctggtggaatga

SEQ ID NO: 877677 - DNA, 25 bp, Homo sapien
ttgaacagtttccactctttctgct

SEQ ID NO: 877678 - DNA, 25 bp, Homo sapien
aacagtttccactctttctgctgaa

SEQ ID NO: 877679 - DNA, 25 bp, Homo sapien
attttgaacagtttccactctttct

SEQ ID NO: 877680 - DNA, 25 bp, Homo sapien
gtttccactctttctgctgaatttt

SEQ ID NO: 877681 - DNA, 25 bp, Homo sapien
taattcctaaagcaaaagtctctaa

SEQ ID NO: 877682 - DNA, 25 bp, Homo sapien
aaattttaatcacctccacgcatac

SEQ ID NO: 877683 - DNA, 25 bp, Homo sapien
gcaatgaggtaagcacagaaatttt

SEQ ID NO: 877684 - DNA, 25 bp, Homo sapien
catagtatccaaatcccagttgttg

SEQ ID NO: 877685 - DNA, 25 bp, Homo sapien
tatgggagctgcattaggaaccaca

SEQ ID NO: 877686 - DNA, 25 bp, Homo sapien
tgtacagcagattgtggcaccagat

SEQ ID NO: 877687 - DNA, 25 bp, Homo sapien
gatgcctacgtctactgctgagtaa

SEQ ID NO: 877688 - DNA, 25 bp, Homo sapien
cacagctgttgagatgaagccgaga

SEQ ID NO: 877689 - DNA, 25 bp, Homo sapien
ttcgacatgttatccaaggttcttc

SEQ ID NO: 877690 - DNA, 25 bp, Homo sapien
aggttcttcctaagaaccttgtcat

SEQ ID NO: 877691 - DNA, 25 bp, Homo sapien
aaccttgtcatggaaatagctgtca

SEQ ID NO: 877692 - DNA, 25 bp, Homo sapien
gctgtattcgacatgttatccaagg

SEQ ID NO: 877693 - DNA, 25 bp, Homo sapien
tcaagcaaatggaaacatgagtgga

SEQ ID NO: 877694 - DNA, 25 bp, Homo sapien
aatgggttggaagtgcctgacaagc

SEQ ID NO: 877695 - DNA, 25 bp, Homo sapien
gctgctccaattggcaatgtggatc

SEQ ID NO: 877696 - DNA, 25 bp, Homo sapien
gcaatgtgttctcctggaatgggtt

SEQ ID NO: 877697 - DNA, 25 bp, Homo sapien
gggtgcgcgcaccttgtgcgagccg

SEQ ID NO: 877698 - DNA, 25 bp, Homo sapien
tgcgcgcaccttgtgcgagccgaag

SEQ ID NO: 877699 - DNA, 25 bp, Homo sapien
ggggaggggcacatgccattgccca

SEQ ID NO: 877700 - DNA, 25 bp, Homo sapien
ggctgggggaggggcacatgccatt

SEQ ID NO: 877701 - DNA, 25 bp, Homo sapien
tagtaaatcttcctcgaataaattc

SEQ ID NO: 877702 - DNA, 25 bp, Homo sapien
tcctcttgaccaaatatgagttgtg

SEQ ID NO: 877703 - DNA, 25 bp, Homo sapien
tctgttctctagtaaatcttcctcg

SEQ ID NO: 877704 - DNA, 25 bp, Homo sapien
ctttctaacggtttgagtccttcag

SEQ ID NO: 877705 - DNA, 25 bp, Homo sapien
tgtcttttctcgctgaaattccctg

SEQ ID NO: 877706 - DNA, 25 bp, Homo sapien
caaagagctgttttaaatcggaagc

SEQ ID NO: 877707 - DNA, 25 bp, Homo sapien
tgctaaatggcaccgtatctcctct

SEQ ID NO: 877708 - DNA, 25 bp, Homo sapien
cgtttgggtgccagacagcatgctg

SEQ ID NO: 877709 - DNA, 25 bp, Homo sapien
ccagctgcttttctggcaccagaca

SEQ ID NO: 877710 - DNA, 25 bp, Homo sapien
tgccagctgcttttctggcaccaga

SEQ ID NO: 877711 - DNA, 25 bp, Homo sapien
gatgccagctgcttttctggcacca

SEQ ID NO: 877712 - DNA, 25 bp, Homo sapien
cagctgcttttctggcaccagacat

SEQ ID NO: 877713 - DNA, 25 bp, Homo sapien
cactgtctcaggaatggttcacaca

SEQ ID NO: 877714 - DNA, 25 bp, Homo sapien
tactccatgaggtcaattgcaccac

SEQ ID NO: 877715 - DNA, 25 bp, Homo sapien
ggctttatcctgaatgacatgtgct

SEQ ID NO: 877716 - DNA, 25 bp, Homo sapien
tcttggaggagacactaaacatatc

SEQ ID NO: 877717 - DNA, 25 bp, Homo sapien
ggaaacttgggtccttcactggcag

SEQ ID NO: 877718 - DNA, 25 bp, Homo sapien
caaagatgggagaatcttccaagtc

SEQ ID NO: 877719 - DNA, 25 bp, Homo sapien
actgtgactgataccactctctagg

SEQ ID NO: 877720 - DNA, 25 bp, Homo sapien
ggccctttgcaccaggaggacagct

SEQ ID NO: 877721 - DNA, 25 bp, Homo sapien
gactgcaatgttaacaagaaaaggg

SEQ ID NO: 877722 - DNA, 25 bp, Homo sapien
tattcaccgaaagcagtcactcctg

SEQ ID NO: 877723 - DNA, 25 bp, Homo sapien
tcctcttaaccatgatagtggcttc

SEQ ID NO: 877724 - DNA, 25 bp, Homo sapien
gaagggattcttggtcaacattgtg

SEQ ID NO: 877725 - DNA, 25 bp, Homo sapien
tgcctggtggtcacaaaagtatccc

SEQ ID NO: 877726 - DNA, 25 bp, Homo sapien
acaaaagtatccctgaagtgtcaac

SEQ ID NO: 877727 - DNA, 25 bp, Homo sapien
tcaacttggttgacggaaactgcag

SEQ ID NO: 877728 - DNA, 25 bp, Homo sapien
gaactttgaggatccttgtaatgcc

SEQ ID NO: 877729 - DNA, 25 bp, Homo sapien
ttcatcacctgcatgccgcttgctt

SEQ ID NO: 877730 - DNA, 25 bp, Homo sapien
atcacctgcatgccgcttgcttaca

SEQ ID NO: 877731 - DNA, 25 bp, Homo sapien
gccgcttgcttacactgaccttcat

SEQ ID NO: 877732 - DNA, 25 bp, Homo sapien
cacctgcatgccgcttgcttacact

SEQ ID NO: 877733 - DNA, 25 bp, Homo sapien
aatcactttctcaggcaagaggagt

SEQ ID NO: 877734 - DNA, 25 bp, Homo sapien
tgtggcaacatatatccaatcttca

SEQ ID NO: 877735 - DNA, 25 bp, Homo sapien
ggtgacgtttggcattcactggctt

SEQ ID NO: 877736 - DNA, 25 bp, Homo sapien
tcagattagattagagcccacctta

SEQ ID NO: 877737 - DNA, 25 bp, Homo sapien
gggaaactttatgatggattccaat

SEQ ID NO: 877738 - DNA, 25 bp, Homo sapien
catctccactatgggaaactttatg

SEQ ID NO: 877739 - DNA, 25 bp, Homo sapien
tctcactatgaatatcggtgtagtc

SEQ ID NO: 877740 - DNA, 25 bp, Homo sapien
gacgcaaagcagttctatccatgtg

SEQ ID NO: 877741 - DNA, 25 bp, Homo sapien
ttcatcataggctgatcctgccgct

SEQ ID NO: 877742 - DNA, 25 bp, Homo sapien
cttcatcatcattccggttgctatg

SEQ ID NO: 877743 - DNA, 25 bp, Homo sapien
catcattccggttgctatgctctga

SEQ ID NO: 877744 - DNA, 25 bp, Homo sapien
taggctgatcctgccgcttcatcat

SEQ ID NO: 877745 - DNA, 25 bp, Homo sapien
aaatgattctaaagagaataaattc

SEQ ID NO: 877746 - DNA, 25 bp, Homo sapien
gatgaatcttgttcgtcctcttcta

SEQ ID NO: 877747 - DNA, 25 bp, Homo sapien
tgttcgtcctcttctaatagatcaa

SEQ ID NO: 877748 - DNA, 25 bp, Homo sapien
gaaactgatgaatcttgttcgtcct

SEQ ID NO: 877749 - DNA, 25 bp, Homo sapien
caagctgccatatcacggttgatta

SEQ ID NO: 877750 - DNA, 25 bp, Homo sapien
catatcacggttgattatcacttct

SEQ ID NO: 877751 - DNA, 25 bp, Homo sapien
gctgccatatcacggttgattatca

SEQ ID NO: 877752 - DNA, 25 bp, Homo sapien
ttcccaagctgccatatcacggttg

SEQ ID NO: 877753 - DNA, 25 bp, Homo sapien
taactaatactggagtctatatgca

SEQ ID NO: 877754 - DNA, 25 bp, Homo sapien
tctatatgcaaaaaagaccctacct

SEQ ID NO: 877755 - DNA, 25 bp, Homo sapien
tcctaaaagtactagttgagctctg

SEQ ID NO: 877756 - DNA, 25 bp, Homo sapien
caatagccacggtatatacacttgt

SEQ ID NO: 877757 - DNA, 25 bp, Homo sapien
taaaggcttgatgtgattaccagac

SEQ ID NO: 877758 - DNA, 25 bp, Homo sapien
tatgtgaccatggaagcagagattg

SEQ ID NO: 877759 - DNA, 25 bp, Homo sapien
ggttacagcatctacgggaaactag

SEQ ID NO: 877760 - DNA, 25 bp, Homo sapien
tcctccgtgcggtgttctgaataac

SEQ ID NO: 877761 - DNA, 25 bp, Homo sapien
tcatcatcaagagacagcaaacagc

SEQ ID NO: 877762 - DNA, 25 bp, Homo sapien
gaagcacttttcatggacataacaa

SEQ ID NO: 877763 - DNA, 25 bp, Homo sapien
tgtttgagtagccaattcaatgaga

SEQ ID NO: 877764 - DNA, 25 bp, Homo sapien
tctattgggtattaacatgtcatca

SEQ ID NO: 877765 - DNA, 25 bp, Homo sapien
gagtcactacgttaaaacagcaaaa

SEQ ID NO: 877766 - DNA, 25 bp, Homo sapien
gctgccagatttattaatctacctg

SEQ ID NO: 877767 - DNA, 25 bp, Homo sapien
tgtgataacgttagcatggcccaat

SEQ ID NO: 877768 - DNA, 25 bp, Homo sapien
tgtatttagttcagtgagtcactac

SEQ ID NO: 877769 - DNA, 25 bp, Homo sapien
gaaaagcgcaaaaacgccctgcttg

SEQ ID NO: 877770 - DNA, 25 bp, Homo sapien
cctatgactcagtttggcgccagag

SEQ ID NO: 877771 - DNA, 25 bp, Homo sapien
gcaaggtggcaccagatacacgtaa

SEQ ID NO: 877772 - DNA, 25 bp, Homo sapien
tcaaataaagtgcacagtccatggc

SEQ ID NO: 877773 - DNA, 25 bp, Homo sapien
tgattatctggaaaggccatggaga

SEQ ID NO: 877774 - DNA, 25 bp, Homo sapien
catgtaggccatgctctcatcaaag

SEQ ID NO: 877775 - DNA, 25 bp, Homo sapien
aatacacgtagccttcgttgtaggg

SEQ ID NO: 877776 - DNA, 25 bp, Homo sapien
tcctcgttgatgtgacgttccatgt

SEQ ID NO: 877777 - DNA, 25 bp, Homo sapien
gcaatgcaatgatatgtggcgttta

SEQ ID NO: 877778 - DNA, 25 bp, Homo sapien
gagtgaaaaactcgcttcagcaatg

SEQ ID NO: 877779 - DNA, 25 bp, Homo sapien
ggcttgtaataccaaaaccaagagc

SEQ ID NO: 877780 - DNA, 25 bp, Homo sapien
caaagtaggaccttccagaaagcct

SEQ ID NO: 877781 - DNA, 25 bp, Homo sapien
ttctgaatgccccaacgtcgggcca

SEQ ID NO: 877782 - DNA, 25 bp, Homo sapien
gcataattcctttctcatagtaata

SEQ ID NO: 877783 - DNA, 25 bp, Homo sapien
tagtaatagcggagtgaacggctaa

SEQ ID NO: 877784 - DNA, 25 bp, Homo sapien
cggagtgaacggctaagtttatcat

SEQ ID NO: 877785 - DNA, 25 bp, Homo sapien
agtttaaattccatgcctcgaccag

SEQ ID NO: 877786 - DNA, 25 bp, Homo sapien
ctcttcaggctcaatcagtttaaat

SEQ ID NO: 877787 - DNA, 25 bp, Homo sapien
aatttgaagggtcatccagaagagc

SEQ ID NO: 877788 - DNA, 25 bp, Homo sapien
gctgaagtgatcctcgccgttggta

SEQ ID NO: 877789 - DNA, 25 bp, Homo sapien
tctaggcaacactgaagagggaata

SEQ ID NO: 877790 - DNA, 25 bp, Homo sapien
taattcagggcatactgcattatcg

SEQ ID NO: 877791 - DNA, 25 bp, Homo sapien
aatgctattacccactgctctaggc

SEQ ID NO: 877792 - DNA, 25 bp, Homo sapien
gaataatcaatcttaagctctgggc

SEQ ID NO: 877793 - DNA, 25 bp, Homo sapien
tggtcagtagagagacatatacctc

SEQ ID NO: 877794 - DNA, 25 bp, Homo sapien
ctatggtcagtagagagacatatac

SEQ ID NO: 877795 - DNA, 25 bp, Homo sapien
tagagagacatatacctcttaaaat

SEQ ID NO: 877796 - DNA, 25 bp, Homo sapien
cagtagagagacatatacctcttaa

SEQ ID NO: 877797 - DNA, 25 bp, Homo sapien
gactttggcctgtcagattatattg

SEQ ID NO: 877798 - DNA, 25 bp, Homo sapien
caagatctctgcaaatatgaagctc

SEQ ID NO: 877799 - DNA, 25 bp, Homo sapien
gactgatcacactgaccatgtacag

SEQ ID NO: 877800 - DNA, 25 bp, Homo sapien
gaagggaataaataatcaaggcagc

SEQ ID NO: 877801 - DNA, 25 bp, Homo sapien
catcgaatttttctgggacaacaca

SEQ ID NO: 877802 - DNA, 25 bp, Homo sapien
gcctggggcccttttcaaacataca

SEQ ID NO: 877803 - DNA, 25 bp, Homo sapien
ctgggacaacacaggtgtcatcata

SEQ ID NO: 877804 - DNA, 25 bp, Homo sapien
caggtgtcatcataaaactgcctgg

SEQ ID NO: 877805 - DNA, 25 bp, Homo sapien
acggaatttcagtggtggacaactt

SEQ ID NO: 877806 - DNA, 25 bp, Homo sapien
cggaatttcagtggtggacaactta

SEQ ID NO: 877807 - DNA, 25 bp, Homo sapien
gccttcttgcctcatataaatggag

SEQ ID NO: 877808 - DNA, 25 bp, Homo sapien
ttcttgcctcatataaatggagtgg

SEQ ID NO: 877809 - DNA, 25 bp, Homo sapien
ccttcttgcctcatataaatggagt

SEQ ID NO: 877810 - DNA, 25 bp, Homo sapien
tcttgcctcatataaatggagtggc

SEQ ID NO: 877811 - DNA, 25 bp, Homo sapien
gccagactctccagtagatgcttta

SEQ ID NO: 877812 - DNA, 25 bp, Homo sapien
tgttagctcctaaagcgctctggtt

SEQ ID NO: 877813 - DNA, 25 bp, Homo sapien
tcaaaacttgtggatcaaaatgctc

SEQ ID NO: 877814 - DNA, 25 bp, Homo sapien
ggccaaatcagcttacagaaattaa

SEQ ID NO: 877815 - DNA, 25 bp, Homo sapien
cagctttctttacatcgatttgaga

SEQ ID NO: 877816 - DNA, 25 bp, Homo sapien
ttctttacatcgatttgagatcctg

SEQ ID NO: 877817 - DNA, 25 bp, Homo sapien
tttacatcgatttgagatcctgtag

SEQ ID NO: 877818 - DNA, 25 bp, Homo sapien
ctttctttacatcgatttgagatcc

SEQ ID NO: 877819 - DNA, 25 bp, Homo sapien
tgaaaaatggattcagctgacaatg

SEQ ID NO: 877820 - DNA, 25 bp, Homo sapien
aaaaatggattcagctgacaatggt

SEQ ID NO: 877821 - DNA, 25 bp, Homo sapien
ttgtgaaaaatggattcagctgaca

SEQ ID NO: 877822 - DNA, 25 bp, Homo sapien
tgtgaaaaatggattcagctgacaa

SEQ ID NO: 877823 - DNA, 25 bp, Homo sapien
tactttaccgttcacctattatata

SEQ ID NO: 877824 - DNA, 25 bp, Homo sapien
taaaaactcagtagtctcatttcat

SEQ ID NO: 877825 - DNA, 25 bp, Homo sapien
aatttgcatgagttatgccttgcat

SEQ ID NO: 877826 - DNA, 25 bp, Homo sapien
ggaaagcagcacataagcattgtta

SEQ ID NO: 877827 - DNA, 25 bp, Homo sapien
gacatggcatacttaacttacaaaa

SEQ ID NO: 877828 - DNA, 25 bp, Homo sapien
cgatgctggactatgttttgaagat

SEQ ID NO: 877829 - DNA, 25 bp, Homo sapien
tatatgactcaatctgtgcttttga

SEQ ID NO: 877830 - DNA, 25 bp, Homo sapien
gagatgccatacataccttcgacaa

SEQ ID NO: 877831 - DNA, 25 bp, Homo sapien
ccagtggacgatacaaaaggttcta

SEQ ID NO: 877832 - DNA, 25 bp, Homo sapien
gcccactgtattgcagggttcttaa

SEQ ID NO: 877833 - DNA, 25 bp, Homo sapien
ttataaatcggccaagcaaactgat

SEQ ID NO: 877834 - DNA, 25 bp, Homo sapien
tcttaattagagacaccagtggacg

SEQ ID NO: 877835 - DNA, 25 bp, Homo sapien
aatgtgacaagggaggtgaaaaagt

SEQ ID NO: 877836 - DNA, 25 bp, Homo sapien
tgaatgtaatttgcgcagagcgcag

SEQ ID NO: 877837 - DNA, 25 bp, Homo sapien
taatttgcgcagagcgcaggcctac

SEQ ID NO: 877838 - DNA, 25 bp, Homo sapien
gccttgaatgtaatttgcgcagagc

SEQ ID NO: 877839 - DNA, 25 bp, Homo sapien
gacatctggcgttggtacataggac

SEQ ID NO: 877840 - DNA, 25 bp, Homo sapien
cactgggtcgtggtactcctgctta

SEQ ID NO: 877841 - DNA, 25 bp, Homo sapien
gagttacagggttcagaaagctggc

SEQ ID NO: 877842 - DNA, 25 bp, Homo sapien
ccttggcatcgtcggcaaaggagga

SEQ ID NO: 877843 - DNA, 25 bp, Homo sapien
gacactggcgtgctggatggtgtgg

SEQ ID NO: 877844 - DNA, 25 bp, Homo sapien
cccggtcaggtttcggtgtatgagt

SEQ ID NO: 877845 - DNA, 25 bp, Homo sapien
aggtgagctgggaaggcccggtcag

SEQ ID NO: 877846 - DNA, 25 bp, Homo sapien
tctggtatggactgcgatggaggga

SEQ ID NO: 877847 - DNA, 25 bp, Homo sapien
atttaaagggctgttcttgactgca

SEQ ID NO: 877848 - DNA, 25 bp, Homo sapien
ctgacattgtacaggcacttttctc

SEQ ID NO: 877849 - DNA, 25 bp, Homo sapien
atagctgaatttaaagggctgttct

SEQ ID NO: 877850 - DNA, 25 bp, Homo sapien
agggctgttcttgactgcaggcaga

SEQ ID NO: 877851 - DNA, 25 bp, Homo sapien
ttgattttcagtggcaggccatgaa

SEQ ID NO: 877852 - DNA, 25 bp, Homo sapien
gattttcagtggcaggccatgaaaa

SEQ ID NO: 877853 - DNA, 25 bp, Homo sapien
ttttcagtggcaggccatgaaaagc

SEQ ID NO: 877854 - DNA, 25 bp, Homo sapien
cttgattttcagtggcaggccatga

SEQ ID NO: 877855 - DNA, 25 bp, Homo sapien
tctggtacaagaattccaagggcat

SEQ ID NO: 877856 - DNA, 25 bp, Homo sapien
caaaggtctggtacaagaattccaa

SEQ ID NO: 877857 - DNA, 25 bp, Homo sapien
gtctggtacaagaattccaagggca

SEQ ID NO: 877858 - DNA, 25 bp, Homo sapien
tggcaaaggtctggtacaagaattc

SEQ ID NO: 877859 - DNA, 25 bp, Homo sapien
ctcattctgttgtaagtcaggcttc

SEQ ID NO: 877860 - DNA, 25 bp, Homo sapien
tcattgagtagatttctcattctgt

SEQ ID NO: 877861 - DNA, 25 bp, Homo sapien
tcattctgttgtaagtcaggcttca

SEQ ID NO: 877862 - DNA, 25 bp, Homo sapien
tctcattctgttgtaagtcaggctt

SEQ ID NO: 877863 - DNA, 25 bp, Homo sapien
gaagaattttccgtacagctaaaga

SEQ ID NO: 877864 - DNA, 25 bp, Homo sapien
caaggcttcggttgtagaagaattt

SEQ ID NO: 877865 - DNA, 25 bp, Homo sapien
gttgtagaagaattttccgtacagc

SEQ ID NO: 877866 - DNA, 25 bp, Homo sapien
tcaaggcttcggttgtagaagaatt

SEQ ID NO: 877867 - DNA, 25 bp, Homo sapien
tctaatctgcacagggacactagca

SEQ ID NO: 877868 - DNA, 25 bp, Homo sapien
tggaagacatcgctgttcaaagctg

SEQ ID NO: 877869 - DNA, 25 bp, Homo sapien
tccaatggacagcttcggagggaag

SEQ ID NO: 877870 - DNA, 25 bp, Homo sapien
gccagtagccagtatccagacatgt

SEQ ID NO: 877871 - DNA, 25 bp, Homo sapien
aactttcagcctgatagtctggtac

SEQ ID NO: 877872 - DNA, 25 bp, Homo sapien
tcagcctgatagtctggtacaaact

SEQ ID NO: 877873 - DNA, 25 bp, Homo sapien
ctttcagcctgatagtctggtacaa

SEQ ID NO: 877874 - DNA, 25 bp, Homo sapien
ttcagcctgatagtctggtacaaac

SEQ ID NO: 877875 - DNA, 25 bp, Homo sapien
tttctgcccgtgaatgagacagctg

SEQ ID NO: 877876 - DNA, 25 bp, Homo sapien
gagacagctgatctcctcagcaatt

SEQ ID NO: 877877 - DNA, 25 bp, Homo sapien
tccagcatatgagccatgtggccca

SEQ ID NO: 877878 - DNA, 25 bp, Homo sapien
tggagccaaacaaggcggaagatgt

SEQ ID NO: 877879 - DNA, 25 bp, Homo sapien
gttgtgaacaaggtggaaagaagac

SEQ ID NO: 877880 - DNA, 25 bp, Homo sapien
tgttgtgaacaaggtggaaagaaga

SEQ ID NO: 877881 - DNA, 25 bp, Homo sapien
ggaaagaagacacttgcacttaaat

SEQ ID NO: 877882 - DNA, 25 bp, Homo sapien
cacttgcacttaaatcttgaagcat

SEQ ID NO: 877883 - DNA, 25 bp, Homo sapien
tagttcttgccaaaagcagatgtga

SEQ ID NO: 877884 - DNA, 25 bp, Homo sapien
ttagaacttgaagtcttggtgcatt

SEQ ID NO: 877885 - DNA, 25 bp, Homo sapien
tcttgccaaaagcagatgtgattgt

SEQ ID NO: 877886 - DNA, 25 bp, Homo sapien
aagtcttggtgcattagttcttgcc

SEQ ID NO: 877887 - DNA, 25 bp, Homo sapien
ttcctgtaattgacttagatcttga

SEQ ID NO: 877888 - DNA, 25 bp, Homo sapien
gtttcctgtaattgacttagatctt

SEQ ID NO: 877889 - DNA, 25 bp, Homo sapien
tttcctgtaattgacttagatcttg

SEQ ID NO: 877890 - DNA, 25 bp, Homo sapien
tcatgagccagatctctgttaatga

SEQ ID NO: 877891 - DNA, 25 bp, Homo sapien
tgagccagatctctgttaatgaatt

SEQ ID NO: 877892 - DNA, 25 bp, Homo sapien
gccagatctctgttaatgaattttc

SEQ ID NO: 877893 - DNA, 25 bp, Homo sapien
tgaatcatgagccagatctctgtta

SEQ ID NO: 877894 - DNA, 25 bp, Homo sapien
aaagaatgtaaacctcagatcacac

SEQ ID NO: 877895 - DNA, 25 bp, Homo sapien
ctttaaaagaatgtaaacctcagat

SEQ ID NO: 877896 - DNA, 25 bp, Homo sapien
taaaagaatgtaaacctcagatcac

SEQ ID NO: 877897 - DNA, 25 bp, Homo sapien
aagaatgtaaacctcagatcacaca

SEQ ID NO: 877898 - DNA, 25 bp, Homo sapien
catggtatctcagcatcaaaacaac

SEQ ID NO: 877899 - DNA, 25 bp, Homo sapien
cttatgttaagcaggcagggagagt

SEQ ID NO: 877900 - DNA, 25 bp, Homo sapien
ttgcttcccagtgccgatcttagca

SEQ ID NO: 877901 - DNA, 25 bp, Homo sapien
catgcatacataagtctaatggatc

SEQ ID NO: 877902 - DNA, 25 bp, Homo sapien
gcaaaaagagtagagaaatgaaaaa

SEQ ID NO: 877903 - DNA, 25 bp, Homo sapien
aagcaaaaagagtagagaaatgaaa

SEQ ID NO: 877904 - DNA, 25 bp, Homo sapien
aaagcaaaaagagtagagaaatgaa

SEQ ID NO: 877905 - DNA, 25 bp, Homo sapien
aaaaagcaaaaagagtagagaaatg

SEQ ID NO: 877906 - DNA, 25 bp, Homo sapien
tgtcagcatttgtctcaacttcatt

SEQ ID NO: 877907 - DNA, 25 bp, Homo sapien
tgtggcagacaaacccagccaaaaa

SEQ ID NO: 877908 - DNA, 25 bp, Homo sapien
cagccaaaaactttgagtgcagcag

SEQ ID NO: 877909 - DNA, 25 bp, Homo sapien
tttcaatgtggcagacaaacccagc

SEQ ID NO: 877910 - DNA, 25 bp, Homo sapien
aaactatgccttatccaaatcactg

SEQ ID NO: 877911 - DNA, 25 bp, Homo sapien
actatgccttatccaaatcactgaa

SEQ ID NO: 877912 - DNA, 25 bp, Homo sapien
aactatgccttatccaaatcactga

SEQ ID NO: 877913 - DNA, 25 bp, Homo sapien
attggtgaccatgtaaggcacttgc

SEQ ID NO: 877914 - DNA, 25 bp, Homo sapien
tcttcgcaaatctcagctcagtatt

SEQ ID NO: 877915 - DNA, 25 bp, Homo sapien
gctgctgctcttcgcaaatctcagc

SEQ ID NO: 877916 - DNA, 25 bp, Homo sapien
cctcaggatctggacttctatcaac

SEQ ID NO: 877917 - DNA, 25 bp, Homo sapien
catttagctggagatttcctcagga

SEQ ID NO: 877918 - DNA, 25 bp, Homo sapien
ggcagctctgattcgcaaacgtgtg

SEQ ID NO: 877919 - DNA, 25 bp, Homo sapien
tagcaatggcgatcaacgagacttg

SEQ ID NO: 877920 - DNA, 25 bp, Homo sapien
caaaaatccgaacaagaggcgatgt

SEQ ID NO: 877921 - DNA, 25 bp, Homo sapien
tacactctcgatgtttccctgcgcg

SEQ ID NO: 877922 - DNA, 25 bp, Homo sapien
aaacattaattatagcccagcactt

SEQ ID NO: 877923 - DNA, 25 bp, Homo sapien
ccccttggaagccgaaagcgcctct

SEQ ID NO: 877924 - DNA, 25 bp, Homo sapien
ctgaaggccacgctaggcgaaaggc

SEQ ID NO: 877925 - DNA, 25 bp, Homo sapien
acattaattatagcccagcacttcc

SEQ ID NO: 877926 - DNA, 25 bp, Homo sapien
cattggctccgcgtctctttcacaa

SEQ ID NO: 877927 - DNA, 25 bp, Homo sapien
caagatcagatttcgggctgtcaat

SEQ ID NO: 877928 - DNA, 25 bp, Homo sapien
caatccaaactgatggatcgctgcc

SEQ ID NO: 877929 - DNA, 25 bp, Homo sapien
ggctgtcaatcaggcggcttgctgc

SEQ ID NO: 877930 - DNA, 25 bp, Homo sapien
ctagggggtgctcggccggtaggcg

SEQ ID NO: 877931 - DNA, 25 bp, Homo sapien
ggtgctcggccggtaggcgctgggt

SEQ ID NO: 877932 - DNA, 25 bp, Homo sapien
gctcggccggtaggcgctgggtcct

SEQ ID NO: 877933 - DNA, 25 bp, Homo sapien
ggccggtaggcgctgggtcctcagc

SEQ ID NO: 877934 - DNA, 25 bp, Homo sapien
ctcgctctctatcctcattcccact

SEQ ID NO: 877935 - DNA, 25 bp, Homo sapien
tcgctctctatcctcattcccactc

SEQ ID NO: 877936 - DNA, 25 bp, Homo sapien
cactcagcttttggcccaatttatt

SEQ ID NO: 877937 - DNA, 25 bp, Homo sapien
attcccactcagcttttggcccaat

SEQ ID NO: 877938 - DNA, 25 bp, Homo sapien
tcctatcgttcgtgggacagaaaca

SEQ ID NO: 877939 - DNA, 25 bp, Homo sapien
tataaggaaggcacctaggagatgc

SEQ ID NO: 877940 - DNA, 25 bp, Homo sapien
gaaaaggtacttccagtccactgtg

SEQ ID NO: 877941 - DNA, 25 bp, Homo sapien
aaaatggtccctacgtgtgcactgg

SEQ ID NO: 877942 - DNA, 25 bp, Homo sapien
caaggacaataactaggacgttaag

SEQ ID NO: 877943 - DNA, 25 bp, Homo sapien
gagcggtgagatggctcgggtttca

SEQ ID NO: 877944 - DNA, 25 bp, Homo sapien
aactaggacgttaagcagtgagggc

SEQ ID NO: 877945 - DNA, 25 bp, Homo sapien
tgtacttgacgctttcacttcctct

SEQ ID NO: 877946 - DNA, 25 bp, Homo sapien
tataagcattttgagcgggaactgc

SEQ ID NO: 877947 - DNA, 25 bp, Homo sapien
gccccgaggctgaacagtgaagctc

SEQ ID NO: 877948 - DNA, 25 bp, Homo sapien
tgaagctcatgggtactatctgagg

SEQ ID NO: 877949 - DNA, 25 bp, Homo sapien
gagattccaggaagcgcctgggccc

SEQ ID NO: 877950 - DNA, 25 bp, Homo sapien
catccgtgtaggagcaaattcctga

SEQ ID NO: 877951 - DNA, 25 bp, Homo sapien
taggactgtcctttacatctggcaa

SEQ ID NO: 877952 - DNA, 25 bp, Homo sapien
gagatctatccataagaccttccgg

SEQ ID NO: 877953 - DNA, 25 bp, Homo sapien
tgacatcccgcctacgtttagaaaa

SEQ ID NO: 877954 - DNA, 25 bp, Homo sapien
ctagcacaacaggagaattagtctt

SEQ ID NO: 877955 - DNA, 25 bp, Homo sapien
cacaacaggagaattagtcttaagg

SEQ ID NO: 877956 - DNA, 25 bp, Homo sapien
gttaaacacaatagtgatccaaaac

SEQ ID NO: 877957 - DNA, 25 bp, Homo sapien
taaacacaatagtgatccaaaacca

SEQ ID NO: 877958 - DNA, 25 bp, Homo sapien
aaagggggcaaaagaatggcctcat

SEQ ID NO: 877959 - DNA, 25 bp, Homo sapien
ctacaggcatttcatgtgagcacat

SEQ ID NO: 877960 - DNA, 25 bp, Homo sapien
tctttgtgatctccctgaattccct

SEQ ID NO: 877961 - DNA, 25 bp, Homo sapien
tgtgatctccctgaattccctttta

SEQ ID NO: 877962 - DNA, 25 bp, Homo sapien
taaaaatagccgtttgactacaggc

SEQ ID NO: 877963 - DNA, 25 bp, Homo sapien
tgttacgtttttactctgagtcctc

SEQ ID NO: 877964 - DNA, 25 bp, Homo sapien
ctgttacgtttttactctgagtcct

SEQ ID NO: 877965 - DNA, 25 bp, Homo sapien
ttacgtttttactctgagtcctcat

SEQ ID NO: 877966 - DNA, 25 bp, Homo sapien
gttacgtttttactctgagtcctca

SEQ ID NO: 877967 - DNA, 25 bp, Homo sapien
gggaactttgctaagtccttcagga

SEQ ID NO: 877968 - DNA, 25 bp, Homo sapien
gatagtgacagccatagggaacttt

SEQ ID NO: 877969 - DNA, 25 bp, Homo sapien
taagtccttcaggaacgtccctgga

SEQ ID NO: 877970 - DNA, 25 bp, Homo sapien
cttcaggaacgtccctggacatctc

SEQ ID NO: 877971 - DNA, 25 bp, Homo sapien
gttctgataatccataataatcaga

SEQ ID NO: 877972 - DNA, 25 bp, Homo sapien
ttctgataatccataataatcagac

SEQ ID NO: 877973 - DNA, 25 bp, Homo sapien
ctgataatccataataatcagacca

SEQ ID NO: 877974 - DNA, 25 bp, Homo sapien
agttctgataatccataataatcag

SEQ ID NO: 877975 - DNA, 25 bp, Homo sapien
tcctggtgtgtgggcttccatagcc

SEQ ID NO: 877976 - DNA, 25 bp, Homo sapien
ctggtgtgtgggcttccatagccgc

SEQ ID NO: 877977 - DNA, 25 bp, Homo sapien
tggtgtgtgggcttccatagccgct

SEQ ID NO: 877978 - DNA, 25 bp, Homo sapien
gtgtgtgggcttccatagccgcttc

SEQ ID NO: 877979 - DNA, 25 bp, Homo sapien
aattgagggccagagatccagtcac

SEQ ID NO: 877980 - DNA, 25 bp, Homo sapien
actgatattaattttggttgagatg

SEQ ID NO: 877981 - DNA, 25 bp, Homo sapien
ttactgatattaattttggttgaga

SEQ ID NO: 877982 - DNA, 25 bp, Homo sapien
aggaactcaattgagggccagagat

SEQ ID NO: 877983 - DNA, 25 bp, Homo sapien
gtttaactatctgggcaccaccctg

SEQ ID NO: 877984 - DNA, 25 bp, Homo sapien
gtagcactcagtgagaatgatcaga

SEQ ID NO: 877985 - DNA, 25 bp, Homo sapien
tcttgcctctgtagcactcagtgag

SEQ ID NO: 877986 - DNA, 25 bp, Homo sapien
tgtggctcgtagttttctcaagtgc

SEQ ID NO: 877987 - DNA, 25 bp, Homo sapien
tgtcaccacacacctttccttcatt

SEQ ID NO: 877988 - DNA, 25 bp, Homo sapien
ttgtcaccacacacctttccttcat

SEQ ID NO: 877989 - DNA, 25 bp, Homo sapien
cttgtcaccacacacctttccttca

SEQ ID NO: 877990 - DNA, 25 bp, Homo sapien
atgaagcttccctttcgtgggcttt

SEQ ID NO: 877991 - DNA, 25 bp, Homo sapien
gtgcatggcccttctgcaatatgta

SEQ ID NO: 877992 - DNA, 25 bp, Homo sapien
aatgaagcttccctttcgtgggctt

SEQ ID NO: 877993 - DNA, 25 bp, Homo sapien
caatgaagcttccctttcgtgggct

SEQ ID NO: 877994 - DNA, 25 bp, Homo sapien
tctttagtatccagtttatcagctt

SEQ ID NO: 877995 - DNA, 25 bp, Homo sapien
ctctttagtatccagtttatcagct

SEQ ID NO: 877996 - DNA, 25 bp, Homo sapien
gaatctggactgttgctgctgagca

SEQ ID NO: 877997 - DNA, 25 bp, Homo sapien
gcagatgtagttgctcatttccccc

SEQ ID NO: 877998 - DNA, 25 bp, Homo sapien
tcaggcttcaaggatccgttcaggt

SEQ ID NO: 877999 - DNA, 25 bp, Homo sapien
cgttcaggtctgaccacatttgtga

SEQ ID NO: 878000 - DNA, 25 bp, Homo sapien
ttggatacgttcactgtagcaccat

SEQ ID NO: 878001 - DNA, 25 bp, Homo sapien
ggatacgttcactgtagcaccatca

SEQ ID NO: 878002 - DNA, 25 bp, Homo sapien
tggatacgttcactgtagcaccatc

SEQ ID NO: 878003 - DNA, 25 bp, Homo sapien
tttggatacgttcactgtagcacca

SEQ ID NO: 878004 - DNA, 25 bp, Homo sapien
cttttttctaatctagcacatatta

SEQ ID NO: 878005 - DNA, 25 bp, Homo sapien
ttttttctaatctagcacatattag

SEQ ID NO: 878006 - DNA, 25 bp, Homo sapien
aatgaaggttgaataaacctatggg

SEQ ID NO: 878007 - DNA, 25 bp, Homo sapien
gtactttataaatgaaggttgaata

SEQ ID NO: 878008 - DNA, 25 bp, Homo sapien
tcacacgaaggttgctgagggctgt

SEQ ID NO: 878009 - DNA, 25 bp, Homo sapien
gctgagggctgtccaacttccttgg

SEQ ID NO: 878010 - DNA, 25 bp, Homo sapien
acttccttgggtatattgtcttcta

SEQ ID NO: 878011 - DNA, 25 bp, Homo sapien
tgtcttctactaagaacttcattgt

SEQ ID NO: 878012 - DNA, 25 bp, Homo sapien
ctttttccacttcgcctcaggcctg

SEQ ID NO: 878013 - DNA, 25 bp, Homo sapien
tcctttttccacttcgcctcaggcc

SEQ ID NO: 878014 - DNA, 25 bp, Homo sapien
cctttttccacttcgcctcaggcct

SEQ ID NO: 878015 - DNA, 25 bp, Homo sapien
actcagatggggcttcgcttctatt

SEQ ID NO: 878016 - DNA, 25 bp, Homo sapien
gcttctattgtctctcttaaacatc

SEQ ID NO: 878017 - DNA, 25 bp, Homo sapien
gggcttcgcttctattgtctctctt

SEQ ID NO: 878018 - DNA, 25 bp, Homo sapien
cagatggggcttcgcttctattgtc

SEQ ID NO: 878019 - DNA, 25 bp, Homo sapien
gaaagttcttttgatgccagtcttt

SEQ ID NO: 878020 - DNA, 25 bp, Homo sapien
tgccagtgaaagttcttttgatgcc

SEQ ID NO: 878021 - DNA, 25 bp, Homo sapien
cttcactgccagtgaaagttctttt

SEQ ID NO: 878022 - DNA, 25 bp, Homo sapien
tcttttgatgccagtctttgatcca

SEQ ID NO: 878023 - DNA, 25 bp, Homo sapien
tctctagttagtttcatgagcttca

SEQ ID NO: 878024 - DNA, 25 bp, Homo sapien
cagagagtttatgaagtcacttaca

SEQ ID NO: 878025 - DNA, 25 bp, Homo sapien
gctagtgactgtgccaccagttgta

SEQ ID NO: 878026 - DNA, 25 bp, Homo sapien
aagagagagagctttttggacctgc

SEQ ID NO: 878027 - DNA, 25 bp, Homo sapien
ggttatacgtgccatgaaaagtaca

SEQ ID NO: 878028 - DNA, 25 bp, Homo sapien
tgaaaaataacggagaacatgattc

SEQ ID NO: 878029 - DNA, 25 bp, Homo sapien
ggttatacagaatctctcaaatgtg

SEQ ID NO: 878030 - DNA, 25 bp, Homo sapien
taaggtactataattaagttccatg

SEQ ID NO: 878031 - DNA, 25 bp, Homo sapien
aaaaattgcaactacttcccatatg

SEQ ID NO: 878032 - DNA, 25 bp, Homo sapien
gattcattagccctcactggattta

SEQ ID NO: 878033 - DNA, 25 bp, Homo sapien
tctggctatgatcacatgaacctgt

SEQ ID NO: 878034 - DNA, 25 bp, Homo sapien
tctgcagtagactaggctaaacatc

SEQ ID NO: 878035 - DNA, 25 bp, Homo sapien
ggaatctcatcaactcagtgcctag

SEQ ID NO: 878036 - DNA, 25 bp, Homo sapien
gaagcgtggatatcaaggtttactc

SEQ ID NO: 878037 - DNA, 25 bp, Homo sapien
taaaagagggcgactcaatagctga

SEQ ID NO: 878038 - DNA, 25 bp, Homo sapien
catggtgtacacaaggaagtggaaa

SEQ ID NO: 878039 - DNA, 25 bp, Homo sapien
taattaatgggcaactcactcgctt

SEQ ID NO: 878040 - DNA, 25 bp, Homo sapien
aaagggaaacgtatagcaatctgca

SEQ ID NO: 878041 - DNA, 25 bp, Homo sapien
tattttataccagcgcaagtgattg

SEQ ID NO: 878042 - DNA, 25 bp, Homo sapien
gcatgcatgattcgcttccaagagc

SEQ ID NO: 878043 - DNA, 25 bp, Homo sapien
ttattccttgcttcggtttcttgtc

SEQ ID NO: 878044 - DNA, 25 bp, Homo sapien
tttttggaggcgggcccatcagcat

SEQ ID NO: 878045 - DNA, 25 bp, Homo sapien
tttgacgagggagcagaataaaccg

SEQ ID NO: 878046 - DNA, 25 bp, Homo sapien
cattggggcttggttcttgtgtgta

SEQ ID NO: 878047 - DNA, 25 bp, Homo sapien
ccaaatggaggcatagaaaagctga

SEQ ID NO: 878048 - DNA, 25 bp, Homo sapien
tgttcatgtgtctactcccagtgcc

SEQ ID NO: 878049 - DNA, 25 bp, Homo sapien
tcaaagaggtctcccttatctcaag

SEQ ID NO: 878050 - DNA, 25 bp, Homo sapien
aacctaaatgtagtggctctgacac

SEQ ID NO: 878051 - DNA, 25 bp, Homo sapien
catcaatttgcattggcagagactt

SEQ ID NO: 878052 - DNA, 25 bp, Homo sapien
tccatggctccccatcaatttgcat

SEQ ID NO: 878053 - DNA, 25 bp, Homo sapien
tgcatggggtctgcatccatggctc

SEQ ID NO: 878054 - DNA, 25 bp, Homo sapien
ttgcattggcagagacttgctcgtc

SEQ ID NO: 878055 - DNA, 25 bp, Homo sapien
gctacaatccgtggcttcacctggg

SEQ ID NO: 878056 - DNA, 25 bp, Homo sapien
gagcttcctggtaagtgtagtgaca

SEQ ID NO: 878057 - DNA, 25 bp, Homo sapien
gatataagatgatgagaccagggaa

SEQ ID NO: 878058 - DNA, 25 bp, Homo sapien
taaccctacattgcaaactgggaga

SEQ ID NO: 878059 - DNA, 25 bp, Homo sapien
ctgatgaccacgcaggagcactgag

SEQ ID NO: 878060 - DNA, 25 bp, Homo sapien
cacttttcaggcctgtgtatatttg

SEQ ID NO: 878061 - DNA, 25 bp, Homo sapien
tggctccttccaagccgaccacctc

SEQ ID NO: 878062 - DNA, 25 bp, Homo sapien
gcctgtgtatatttgccccatctcc

SEQ ID NO: 878063 - DNA, 25 bp, Homo sapien
cttcttggtagcctatatattctat

SEQ ID NO: 878064 - DNA, 25 bp, Homo sapien
tgcttcttggtagcctatatattct

SEQ ID NO: 878065 - DNA, 25 bp, Homo sapien
ggcttgcttcttggtagcctatata

SEQ ID NO: 878066 - DNA, 25 bp, Homo sapien
gcttgcttcttggtagcctatatat

SEQ ID NO: 878067 - DNA, 25 bp, Homo sapien
taaattactggagtaatatcgacat

SEQ ID NO: 878068 - DNA, 25 bp, Homo sapien
catacttgcatacatcgtttctctt

SEQ ID NO: 878069 - DNA, 25 bp, Homo sapien
tactggagtaatatcgacatacttg

SEQ ID NO: 878070 - DNA, 25 bp, Homo sapien
ggagtaatatcgacatacttgcata

SEQ ID NO: 878071 - DNA, 25 bp, Homo sapien
tccacttcagtaggacagcaactac

SEQ ID NO: 878072 - DNA, 25 bp, Homo sapien
gatacagacactgcttgcaactata

SEQ ID NO: 878073 - DNA, 25 bp, Homo sapien
caggaggtcatatgcagtcttcagc

SEQ ID NO: 878074 - DNA, 25 bp, Homo sapien
gagagatatatacgacaagattggg

SEQ ID NO: 878075 - DNA, 25 bp, Homo sapien
tttacataaccacctaaattgtcat

SEQ ID NO: 878076 - DNA, 25 bp, Homo sapien
taattgctagaaagtgctgaaaaag

SEQ ID NO: 878077 - DNA, 25 bp, Homo sapien
cctaaattgtcataattgctagaaa

SEQ ID NO: 878078 - DNA, 25 bp, Homo sapien
agtgctgaaaaagcatacggtaggc

SEQ ID NO: 878079 - DNA, 25 bp, Homo sapien
tatgcgaggttggataaatcagcca

SEQ ID NO: 878080 - DNA, 25 bp, Homo sapien
tactggagcagggtgtatgcgaggt

SEQ ID NO: 878081 - DNA, 25 bp, Homo sapien
ggttggataaatcagccaaaccgaa

SEQ ID NO: 878082 - DNA, 25 bp, Homo sapien
ggtgtatgcgaggttggataaatca

SEQ ID NO: 878083 - DNA, 25 bp, Homo sapien
tgtgtgactttctgtgaggtaagag

SEQ ID NO: 878084 - DNA, 25 bp, Homo sapien
gctttgagcaaatcctgacggttgt

SEQ ID NO: 878085 - DNA, 25 bp, Homo sapien
tcctgacggttgttcataaattata

SEQ ID NO: 878086 - DNA, 25 bp, Homo sapien
ctttgagcaaatcctgacggttgtt

SEQ ID NO: 878087 - DNA, 25 bp, Homo sapien
gacggttgttcataaattatattac

SEQ ID NO: 878088 - DNA, 25 bp, Homo sapien
gattataatgtatctccatgaagat

SEQ ID NO: 878089 - DNA, 25 bp, Homo sapien
atgtcttacagagatttcctttgtg

SEQ ID NO: 878090 - DNA, 25 bp, Homo sapien
tgggcttcatggattgggatgttca

SEQ ID NO: 878091 - DNA, 25 bp, Homo sapien
actcattctgaatcttgtataatgc

SEQ ID NO: 878092 - DNA, 25 bp, Homo sapien
gggaaaactcttcacaagtcagcct

SEQ ID NO: 878093 - DNA, 25 bp, Homo sapien
cagtgggtaaacattgctggcacct

SEQ ID NO: 878094 - DNA, 25 bp, Homo sapien
tgttagaatactccaacaggctggc

SEQ ID NO: 878095 - DNA, 25 bp, Homo sapien
ggaatgggcttagaacttaggtcca

SEQ ID NO: 878096 - DNA, 25 bp, Homo sapien
taagtcggtaaatgctactgagtgc

SEQ ID NO: 878097 - DNA, 25 bp, Homo sapien
tatcagtgtgtagagaagccatcaa

SEQ ID NO: 878098 - DNA, 25 bp, Homo sapien
aacagtggcgaaagagggtagccta

SEQ ID NO: 878099 - DNA, 25 bp, Homo sapien
gcaaccttttctgtggcggcctgtt

SEQ ID NO: 878100 - DNA, 25 bp, Homo sapien
ctgtgctggaatttgcgggtcttga

SEQ ID NO: 878101 - DNA, 25 bp, Homo sapien
gcttaaggagatttcctgccttcga

SEQ ID NO: 878102 - DNA, 25 bp, Homo sapien
aggcctattgcctgtgaagccctgt

SEQ ID NO: 878103 - DNA, 25 bp, Homo sapien
tttgcgggtcttgaaagttgcttaa

SEQ ID NO: 878104 - DNA, 25 bp, Homo sapien
cattacacaggctgtggtgtacaca

SEQ ID NO: 878105 - DNA, 25 bp, Homo sapien
tacacaggctgtggtgtacacatac

SEQ ID NO: 878106 - DNA, 25 bp, Homo sapien
cacaggctgtggtgtacacatacat

SEQ ID NO: 878107 - DNA, 25 bp, Homo sapien
ctgtcattacacaggctgtggtgta

SEQ ID NO: 878108 - DNA, 25 bp, Homo sapien
ttctagacctcatgacaaatgtccc

SEQ ID NO: 878109 - DNA, 25 bp, Homo sapien
tccaggatttacagtagcaggtgat

SEQ ID NO: 878110 - DNA, 25 bp, Homo sapien
gggctttggctaataggagttcata

SEQ ID NO: 878111 - DNA, 25 bp, Homo sapien
tgctcaactgcaagacggttccagg

SEQ ID NO: 878112 - DNA, 25 bp, Homo sapien
aaaggcactaatcccgtcatagagg

SEQ ID NO: 878113 - DNA, 25 bp, Homo sapien
ccttgaaggtgatacgcagtgatag

SEQ ID NO: 878114 - DNA, 25 bp, Homo sapien
catctcttacagtttagaaggctgg

SEQ ID NO: 878115 - DNA, 25 bp, Homo sapien
tggcatggcataaaaggccctccct

SEQ ID NO: 878116 - DNA, 25 bp, Homo sapien
taagttctatgtttattctcatgac

SEQ ID NO: 878117 - DNA, 25 bp, Homo sapien
ttctctgttgtcctagatgaaagta

SEQ ID NO: 878118 - DNA, 25 bp, Homo sapien
tatgttaccattgccttgaatatac

SEQ ID NO: 878119 - DNA, 25 bp, Homo sapien
tctctgttgtcctagatgaaagtat

SEQ ID NO: 878120 - DNA, 25 bp, Homo sapien
gcaaccaacttcttgtctatgttca

SEQ ID NO: 878121 - DNA, 25 bp, Homo sapien
gaaaagctgtgtgcctcattccaag

SEQ ID NO: 878122 - DNA, 25 bp, Homo sapien
tctatgttcacagacaaactgcagg

SEQ ID NO: 878123 - DNA, 25 bp, Homo sapien
tcagagtttcaatggatttaagacc

SEQ ID NO: 878124 - DNA, 25 bp, Homo sapien
tgccaatctgtgaaatataatataa

SEQ ID NO: 878125 - DNA, 25 bp, Homo sapien
ggaattgttcaaagatacattttct

SEQ ID NO: 878126 - DNA, 25 bp, Homo sapien
gtagaaagtacgtaatagacctgtc

SEQ ID NO: 878127 - DNA, 25 bp, Homo sapien
tttaatgaatctctcaacgaggagc

SEQ ID NO: 878128 - DNA, 25 bp, Homo sapien
tgacagccaatcagatacacagtct

SEQ ID NO: 878129 - DNA, 25 bp, Homo sapien
tcccaacagtgcatagagagatcaa

SEQ ID NO: 878130 - DNA, 25 bp, Homo sapien
tcaccaccagtgagctcttccaaaa

SEQ ID NO: 878131 - DNA, 25 bp, Homo sapien
tatacaaagtgtacaattatctggg

SEQ ID NO: 878132 - DNA, 25 bp, Homo sapien
gaaattctgcccgaagaaaagagta

SEQ ID NO: 878133 - DNA, 25 bp, Homo sapien
gaatataattactttcgctcagtgg

SEQ ID NO: 878134 - DNA, 25 bp, Homo sapien
taaacttttgcatgatgggtacctg

SEQ ID NO: 878135 - DNA, 25 bp, Homo sapien
gtatccatatgcagggtagacagtc

SEQ ID NO: 878136 - DNA, 25 bp, Homo sapien
caaaagtacctgaatttgctggcct

SEQ ID NO: 878137 - DNA, 25 bp, Homo sapien
gttttcatgtccactgattgccata

SEQ ID NO: 878138 - DNA, 25 bp, Homo sapien
ctgattgccatatgttgtttggtgc

SEQ ID NO: 878139 - DNA, 25 bp, Homo sapien
gccttttaattgcatgtggttccca

SEQ ID NO: 878140 - DNA, 25 bp, Homo sapien
tttagtatggtccttaagctaattg

SEQ ID NO: 878141 - DNA, 25 bp, Homo sapien
tgtactaatacaattctccaagatt

SEQ ID NO: 878142 - DNA, 25 bp, Homo sapien
aattgatttgttataaacatgcttg

SEQ ID NO: 878143 - DNA, 25 bp, Homo sapien
tggtccttaagctaattgcaatact

SEQ ID NO: 878144 - DNA, 25 bp, Homo sapien
aaaaccacctgtcattggcaggttg

SEQ ID NO: 878145 - DNA, 25 bp, Homo sapien
tgaaacttgaaccaggtactcaaag

SEQ ID NO: 878146 - DNA, 25 bp, Homo sapien
acctgtcattggcaggttgtgataa

SEQ ID NO: 878147 - DNA, 25 bp, Homo sapien
agtcactgcttgttactgaaacttg

SEQ ID NO: 878148 - DNA, 25 bp, Homo sapien
caccataaagcccaccaaccatctt

SEQ ID NO: 878149 - DNA, 25 bp, Homo sapien
cataaagcccaccaaccatcttctc

SEQ ID NO: 878150 - DNA, 25 bp, Homo sapien
accaccataaagcccaccaaccatc

SEQ ID NO: 878151 - DNA, 25 bp, Homo sapien
agcccaccaaccatcttctcacttt

SEQ ID NO: 878152 - DNA, 25 bp, Homo sapien
tgacggtggtccttttgtcagaccc

SEQ ID NO: 878153 - DNA, 25 bp, Homo sapien
ttttctctattcgtcgatggcttcg

SEQ ID NO: 878154 - DNA, 25 bp, Homo sapien
tccccaaagattggatcctccatgc

SEQ ID NO: 878155 - DNA, 25 bp, Homo sapien
gatggcttcgtcttttcttagactc

SEQ ID NO: 878156 - DNA, 25 bp, Homo sapien
ttaaatctatctgtactccatcaca

SEQ ID NO: 878157 - DNA, 25 bp, Homo sapien
tcaaaatagcaattccttccagaga

SEQ ID NO: 878158 - DNA, 25 bp, Homo sapien
tccagagagatgtttattaaatcta

SEQ ID NO: 878159 - DNA, 25 bp, Homo sapien
aatagcaattccttccagagagatg

SEQ ID NO: 878160 - DNA, 25 bp, Homo sapien
tttctacagattcatgtagcttctt

SEQ ID NO: 878161 - DNA, 25 bp, Homo sapien
tatttctacagattcatgtagcttc

SEQ ID NO: 878162 - DNA, 25 bp, Homo sapien
ctatttctacagattcatgtagctt

SEQ ID NO: 878163 - DNA, 25 bp, Homo sapien
atttctacagattcatgtagcttct

SEQ ID NO: 878164 - DNA, 25 bp, Homo sapien
ttgaaaatgccaatcaccttaaaac

SEQ ID NO: 878165 - DNA, 25 bp, Homo sapien
tttcttcacacatcagcagtctttt

SEQ ID NO: 878166 - DNA, 25 bp, Homo sapien
cacacatcagcagtctttttccaat

SEQ ID NO: 878167 - DNA, 25 bp, Homo sapien
tgtaacaagaagcataactttgcat

SEQ ID NO: 878168 - DNA, 25 bp, Homo sapien
tcaagaaccaaaagtcgtggagcaa

SEQ ID NO: 878169 - DNA, 25 bp, Homo sapien
tcgtggagcaacagacctcagaaaa

SEQ ID NO: 878170 - DNA, 25 bp, Homo sapien
gcacaggagcataaatctcaagaac

SEQ ID NO: 878171 - DNA, 25 bp, Homo sapien
ggcccagactgcacaggagcataaa

SEQ ID NO: 878172 - DNA, 25 bp, Homo sapien
ttaacttcacgtcttgctcactcat

SEQ ID NO: 878173 - DNA, 25 bp, Homo sapien
gtctctcagtaattataatccttaa

SEQ ID NO: 878174 - DNA, 25 bp, Homo sapien
taatccttaacttcacgtcttgctc

SEQ ID NO: 878175 - DNA, 25 bp, Homo sapien
tgtctctcagtaattataatcctta

SEQ ID NO: 878176 - DNA, 25 bp, Homo sapien
aagggatccagtggctgtgcataac

SEQ ID NO: 878177 - DNA, 25 bp, Homo sapien
tcaagggatccagtggctgtgcata

SEQ ID NO: 878178 - DNA, 25 bp, Homo sapien
caagggatccagtggctgtgcataa

SEQ ID NO: 878179 - DNA, 25 bp, Homo sapien
gattaagtctaactcaagatattct

SEQ ID NO: 878180 - DNA, 25 bp, Homo sapien
ttctaaggatgctaggttcaacagc

SEQ ID NO: 878181 - DNA, 25 bp, Homo sapien
gctcccatacccctcattgattaag

SEQ ID NO: 878182 - DNA, 25 bp, Homo sapien
caacccatcgaacatgaatgccatg

SEQ ID NO: 878183 - DNA, 25 bp, Homo sapien
acacaatcttgaatccaaaaatgag

SEQ ID NO: 878184 - DNA, 25 bp, Homo sapien
tcttgaatgatttcgatcaatggta

SEQ ID NO: 878185 - DNA, 25 bp, Homo sapien
ttgaatgatttcgatcaatggtaat

SEQ ID NO: 878186 - DNA, 25 bp, Homo sapien
ctcttgaatgatttcgatcaatggt

SEQ ID NO: 878187 - DNA, 25 bp, Homo sapien
cttgaatgatttcgatcaatggtaa

SEQ ID NO: 878188 - DNA, 25 bp, Homo sapien
gatttagtagtaactttattctgat

SEQ ID NO: 878189 - DNA, 25 bp, Homo sapien
caaatcatctacagaagtaaaagat

SEQ ID NO: 878190 - DNA, 25 bp, Homo sapien
gatgtgtgaaggcaaaatcttggac

SEQ ID NO: 878191 - DNA, 25 bp, Homo sapien
tgagcaaatcatctacagaagtaaa

SEQ ID NO: 878192 - DNA, 25 bp, Homo sapien
agatctggcaagtaacagacttcat

SEQ ID NO: 878193 - DNA, 25 bp, Homo sapien
gagatctggcaagtaacagacttca

SEQ ID NO: 878194 - DNA, 25 bp, Homo sapien
agagatctggcaagtaacagacttc

SEQ ID NO: 878195 - DNA, 25 bp, Homo sapien
ttaattattgtcattgtctcatcaa

SEQ ID NO: 878196 - DNA, 25 bp, Homo sapien
actgtgaggctctatatcccattaa

SEQ ID NO: 878197 - DNA, 25 bp, Homo sapien
agtgggatgttctgtcaaggccatc

SEQ ID NO: 878198 - DNA, 25 bp, Homo sapien
gctgacaggaatagtgggatgttct

SEQ ID NO: 878199 - DNA, 25 bp, Homo sapien
cttccttagtctctcctggtttggg

SEQ ID NO: 878200 - DNA, 25 bp, Homo sapien
aaactttcaagtcttctaggatgac

SEQ ID NO: 878201 - DNA, 25 bp, Homo sapien
cataatgtatagagtaaaaactttc

SEQ ID NO: 878202 - DNA, 25 bp, Homo sapien
aatgtatagagtaaaaactttcaag

SEQ ID NO: 878203 - DNA, 25 bp, Homo sapien
tgtatagagtaaaaactttcaagtc

SEQ ID NO: 878204 - DNA, 25 bp, Homo sapien
ctttttcttgactttgacggtgtcg

SEQ ID NO: 878205 - DNA, 25 bp, Homo sapien
gggaaatcctaatttccgcagttca

SEQ ID NO: 878206 - DNA, 25 bp, Homo sapien
gctccttttgtgtatcagaagcttt

SEQ ID NO: 878207 - DNA, 25 bp, Homo sapien
tgactttgacggtgtcgggaaatcc

SEQ ID NO: 878208 - DNA, 25 bp, Homo sapien
ttatcaccatcgatatgcttgcaat

SEQ ID NO: 878209 - DNA, 25 bp, Homo sapien
ttaattatcaccatcgatatgcttg

SEQ ID NO: 878210 - DNA, 25 bp, Homo sapien
accatcgatatgcttgcaatatttc

SEQ ID NO: 878211 - DNA, 25 bp, Homo sapien
tcaccatcgatatgcttgcaatatt

SEQ ID NO: 878212 - DNA, 25 bp, Homo sapien
catcggatttgcatgagttggaagt

SEQ ID NO: 878213 - DNA, 25 bp, Homo sapien
gatgcattatccatcggatttgcat

SEQ ID NO: 878214 - DNA, 25 bp, Homo sapien
ctagctgctggtgtacacaattatt

SEQ ID NO: 878215 - DNA, 25 bp, Homo sapien
tgtacacaattattgagactttctg

SEQ ID NO: 878216 - DNA, 25 bp, Homo sapien
acagggctccttagtaaatgtttgc

SEQ ID NO: 878217 - DNA, 25 bp, Homo sapien
ccaaatcaatagcagataagcagta

SEQ ID NO: 878218 - DNA, 25 bp, Homo sapien
gctgaatgcccatcaaacaaacagg

SEQ ID NO: 878219 - DNA, 25 bp, Homo sapien
agcagtattttatccaagcttcaga

SEQ ID NO: 878220 - DNA, 25 bp, Homo sapien
gaactcgcaatagaaacctgtgact

SEQ ID NO: 878221 - DNA, 25 bp, Homo sapien
ctcgcaatagaaacctgtgactttg

SEQ ID NO: 878222 - DNA, 25 bp, Homo sapien
tcttgaactcgcaatagaaacctgt

SEQ ID NO: 878223 - DNA, 25 bp, Homo sapien
ctggttcttgaactcgcaatagaaa

SEQ ID NO: 878224 - DNA, 25 bp, Homo sapien
ggaatctgtgtgcaatggaggcatc

SEQ ID NO: 878225 - DNA, 25 bp, Homo sapien
ttttctctcatgatgtggaatctgt

SEQ ID NO: 878226 - DNA, 25 bp, Homo sapien
tctcatgatgtggaatctgtgtgca

SEQ ID NO: 878227 - DNA, 25 bp, Homo sapien
ctctgggtgtttttctctcatgatg

SEQ ID NO: 878228 - DNA, 25 bp, Homo sapien
aagcggtatgagtggtcaccagtaa

SEQ ID NO: 878229 - DNA, 25 bp, Homo sapien
aagtggggaatgaccaaagcggtat

SEQ ID NO: 878230 - DNA, 25 bp, Homo sapien
tttgcaatcattaaactgaagtggg

SEQ ID NO: 878231 - DNA, 25 bp, Homo sapien
tcatgtgcgtttgcaatcattaaac

SEQ ID NO: 878232 - DNA, 25 bp, Homo sapien
gatgagatgggagagtaagaggtag

SEQ ID NO: 878233 - DNA, 25 bp, Homo sapien
tgggagagtaagaggtagggataca

SEQ ID NO: 878234 - DNA, 25 bp, Homo sapien
taagaggtagggatacaggcagcag

SEQ ID NO: 878235 - DNA, 25 bp, Homo sapien
aggtagggatacaggcagcagtgga

SEQ ID NO: 878236 - DNA, 25 bp, Homo sapien
tcacagaattaatgggtattagatg

SEQ ID NO: 878237 - DNA, 25 bp, Homo sapien
attcacagaattaatgggtattaga

SEQ ID NO: 878238 - DNA, 25 bp, Homo sapien
cagaattaatgggtattagatgtaa

SEQ ID NO: 878239 - DNA, 25 bp, Homo sapien
tttctgcaaatcatgaacccccgcc

SEQ ID NO: 878240 - DNA, 25 bp, Homo sapien
gagtccagttagaaaacctttgcag

SEQ ID NO: 878241 - DNA, 25 bp, Homo sapien
ctatagtaatgtaaggcagcgagtg

SEQ ID NO: 878242 - DNA, 25 bp, Homo sapien
gactaaagggcagagtccagttaga

SEQ ID NO: 878243 - DNA, 25 bp, Homo sapien
tttgcagaagtccagagaagatatc

SEQ ID NO: 878244 - DNA, 25 bp, Homo sapien
ttccccactcattgtcattacagac

SEQ ID NO: 878245 - DNA, 25 bp, Homo sapien
tccccactcattgtcattacagact

SEQ ID NO: 878246 - DNA, 25 bp, Homo sapien
ccactcattgtcattacagactcac

SEQ ID NO: 878247 - DNA, 25 bp, Homo sapien
cccactcattgtcattacagactca

SEQ ID NO: 878248 - DNA, 25 bp, Homo sapien
gctgccttgtgaaggttttgaaaac

SEQ ID NO: 878249 - DNA, 25 bp, Homo sapien
ggcaaaattcccagaaatgcaggtc

SEQ ID NO: 878250 - DNA, 25 bp, Homo sapien
agtcaactgtgggtactgatggcaa

SEQ ID NO: 878251 - DNA, 25 bp, Homo sapien
ctgtgggtactgatggcaaaattcc

SEQ ID NO: 878252 - DNA, 25 bp, Homo sapien
tggcaaaattcccagaaatgcaggt

SEQ ID NO: 878253 - DNA, 25 bp, Homo sapien
gtcatcacagttgctaattcgttta

SEQ ID NO: 878254 - DNA, 25 bp, Homo sapien
cttttctgttttgactgcttgtgca

SEQ ID NO: 878255 - DNA, 25 bp, Homo sapien
gactgcttgtgcaaagtcatcacag

SEQ ID NO: 878256 - DNA, 25 bp, Homo sapien
cataattcctatcatacttttctgt

SEQ ID NO: 878257 - DNA, 25 bp, Homo sapien
catattccctgtggctcaagtagaa

SEQ ID NO: 878258 - DNA, 25 bp, Homo sapien
gggcctcctcacaatttaatgctca

SEQ ID NO: 878259 - DNA, 25 bp, Homo sapien
actgagacttgagtacatgcagggc

SEQ ID NO: 878260 - DNA, 25 bp, Homo sapien
gcagtgcaggtcttagccttcagca

SEQ ID NO: 878261 - DNA, 25 bp, Homo sapien
gcctttacaattcttattgccttgc

SEQ ID NO: 878262 - DNA, 25 bp, Homo sapien
cttctcgcagtgctgacttctgtgt

SEQ ID NO: 878263 - DNA, 25 bp, Homo sapien
gaggacctttccagaagcctttaca

SEQ ID NO: 878264 - DNA, 25 bp, Homo sapien
tctgtgttgaagagtgtccaaattg

SEQ ID NO: 878265 - DNA, 25 bp, Homo sapien
taacagctgctacaaaatcaatact

SEQ ID NO: 878266 - DNA, 25 bp, Homo sapien
tgggatgattaacagctgctacaaa

SEQ ID NO: 878267 - DNA, 25 bp, Homo sapien
gatgattaacagctgctacaaaatc

SEQ ID NO: 878268 - DNA, 25 bp, Homo sapien
gattaacagctgctacaaaatcaat

SEQ ID NO: 878269 - DNA, 25 bp, Homo sapien
tcagcgttgttatggaccgggaaag

SEQ ID NO: 878270 - DNA, 25 bp, Homo sapien
catgataaggcagggtcagcgttgt

SEQ ID NO: 878271 - DNA, 25 bp, Homo sapien
ccgggaaagccacagctatcaataa

SEQ ID NO: 878272 - DNA, 25 bp, Homo sapien
cctgtagctcaaagccacaaggaca

SEQ ID NO: 878273 - DNA, 25 bp, Homo sapien
agtcccgaacaactccttaagatag

SEQ ID NO: 878274 - DNA, 25 bp, Homo sapien
taggagacagctaggtaaagacatt

SEQ ID NO: 878275 - DNA, 25 bp, Homo sapien
gacatttatgtttgatcaccactgt

SEQ ID NO: 878276 - DNA, 25 bp, Homo sapien
ccattacacaatatggatgtggtga

SEQ ID NO: 878277 - DNA, 25 bp, Homo sapien
aaaatatgtcaattgctgatactct

SEQ ID NO: 878278 - DNA, 25 bp, Homo sapien
aattggtaagcgatgataataatga

SEQ ID NO: 878279 - DNA, 25 bp, Homo sapien
tcaattgctgatactctgacttcaa

SEQ ID NO: 878280 - DNA, 25 bp, Homo sapien
gacttcaaattggtaagcgatgata

SEQ ID NO: 878281 - DNA, 25 bp, Homo sapien
ctttctcatctttgtcattaggtat

SEQ ID NO: 878282 - DNA, 25 bp, Homo sapien
atgatactgtaaggcactgggtctc

SEQ ID NO: 878283 - DNA, 25 bp, Homo sapien
taattattgatgatactgtaaggca

SEQ ID NO: 878284 - DNA, 25 bp, Homo sapien
ggtatgacttcaaacttccacctgt

SEQ ID NO: 878285 - DNA, 25 bp, Homo sapien
tagatcattgccagtcccaagaggc

SEQ ID NO: 878286 - DNA, 25 bp, Homo sapien
tggaggatgcttgcctacattggcc

SEQ ID NO: 878287 - DNA, 25 bp, Homo sapien
tcccaagaggcagaatcgcaactgg

SEQ ID NO: 878288 - DNA, 25 bp, Homo sapien
ccccatcgcaggcatcttgctagat

SEQ ID NO: 878289 - DNA, 25 bp, Homo sapien
caaaacccagcccacggttccatct

SEQ ID NO: 878290 - DNA, 25 bp, Homo sapien
tccaccacaggctaacactctgaag

SEQ ID NO: 878291 - DNA, 25 bp, Homo sapien
tcaggaacatcacggaaaaagttta

SEQ ID NO: 878292 - DNA, 25 bp, Homo sapien
acaggctaacactctgaagtcagga

SEQ ID NO: 878293 - DNA, 25 bp, Homo sapien
ctgtgaggcttccacattacaggtc

SEQ ID NO: 878294 - DNA, 25 bp, Homo sapien
agctgtgaggcttccacattacagg

SEQ ID NO: 878295 - DNA, 25 bp, Homo sapien
gctgtgaggcttccacattacaggt

SEQ ID NO: 878296 - DNA, 25 bp, Homo sapien
tctgagtctgacactagggatgcag

SEQ ID NO: 878297 - DNA, 25 bp, Homo sapien
cagtgtgggcatcagtatcagaggc

SEQ ID NO: 878298 - DNA, 25 bp, Homo sapien
aacaggacattctcatgttgatcaa

SEQ ID NO: 878299 - DNA, 25 bp, Homo sapien
cattctcatgttgatcaagatgaag

SEQ ID NO: 878300 - DNA, 25 bp, Homo sapien
gactgtaaacctgacgaggatttaa

SEQ ID NO: 878301 - DNA, 25 bp, Homo sapien
gaaagactgtaaacctgacgaggat

SEQ ID NO: 878302 - DNA, 25 bp, Homo sapien
cctgacgaggatttaatagatactg

SEQ ID NO: 878303 - DNA, 25 bp, Homo sapien
tgtaaacctgacgaggatttaatag

SEQ ID NO: 878304 - DNA, 25 bp, Homo sapien
cagccttcctctatactgttgtcta

SEQ ID NO: 878305 - DNA, 25 bp, Homo sapien
tactgttgtctaagtacagccatgc

SEQ ID NO: 878306 - DNA, 25 bp, Homo sapien
cctctatactgttgtctaagtacag

SEQ ID NO: 878307 - DNA, 25 bp, Homo sapien
ctgttgtctaagtacagccatgcct

SEQ ID NO: 878308 - DNA, 25 bp, Homo sapien
ttggttgacaccctgccatttcaca

SEQ ID NO: 878309 - DNA, 25 bp, Homo sapien
catcccggtaaattcctcttggttg

SEQ ID NO: 878310 - DNA, 25 bp, Homo sapien
tttcacaagtctgcctttctccttc

SEQ ID NO: 878311 - DNA, 25 bp, Homo sapien
ttgtcatcccggtaaattcctcttg

SEQ ID NO: 878312 - DNA, 25 bp, Homo sapien
catgtttgttatgagtgctttcatc

SEQ ID NO: 878313 - DNA, 25 bp, Homo sapien
atgtttgttatgagtgctttcatct

SEQ ID NO: 878314 - DNA, 25 bp, Homo sapien
tgcctagatgttgggtataaattcg

SEQ ID NO: 878315 - DNA, 25 bp, Homo sapien
caggaaatatggcatcatgttctcc

SEQ ID NO: 878316 - DNA, 25 bp, Homo sapien
tataaattcggttcctcagtactga

SEQ ID NO: 878317 - DNA, 25 bp, Homo sapien
catgttctccaaaatgcacatgcag

SEQ ID NO: 878318 - DNA, 25 bp, Homo sapien
ggtgagtaccaggcacaggagtgac

SEQ ID NO: 878319 - DNA, 25 bp, Homo sapien
actaaaagtgggtgagtaccaggca

SEQ ID NO: 878320 - DNA, 25 bp, Homo sapien
taaaagtgggtgagtaccaggcaca

SEQ ID NO: 878321 - DNA, 25 bp, Homo sapien
tgggtgagtaccaggcacaggagtg

SEQ ID NO: 878322 - DNA, 25 bp, Homo sapien
gtaagttgccaaaattctactccat

SEQ ID NO: 878323 - DNA, 25 bp, Homo sapien
gatatgaggtaccaatgtagttagg

SEQ ID NO: 878324 - DNA, 25 bp, Homo sapien
gatgaaacctaaatgggatatgagg

SEQ ID NO: 878325 - DNA, 25 bp, Homo sapien
taggtaccaacgttatattcaagct

SEQ ID NO: 878326 - DNA, 25 bp, Homo sapien
taaacctatggtgtgagcgatgaca

SEQ ID NO: 878327 - DNA, 25 bp, Homo sapien
tctcttgcatggtaagaagtcgcag

SEQ ID NO: 878328 - DNA, 25 bp, Homo sapien
tatttcttcacatgtgggagagcca

SEQ ID NO: 878329 - DNA, 25 bp, Homo sapien
gatgacaaagacagagtgcctaacc

SEQ ID NO: 878330 - DNA, 25 bp, Homo sapien
ttggtaaatattcccagagaatgtg

SEQ ID NO: 878331 - DNA, 25 bp, Homo sapien
gaagtataggcagttggaacacaaa

SEQ ID NO: 878332 - DNA, 25 bp, Homo sapien
ttcaagatgataaagaagcaagcat

SEQ ID NO: 878333 - DNA, 25 bp, Homo sapien
tctgtgccctgaactgtgctctcat

SEQ ID NO: 878334 - DNA, 25 bp, Homo sapien
gccacaggcggtaaagataacttac

SEQ ID NO: 878335 - DNA, 25 bp, Homo sapien
aatgctattcttgatgccacaggcg

SEQ ID NO: 878336 - DNA, 25 bp, Homo sapien
catatgcccctttagagcctagaag

SEQ ID NO: 878337 - DNA, 25 bp, Homo sapien
tactctgtcaatcaaccgtaagact

SEQ ID NO: 878338 - DNA, 25 bp, Homo sapien
ccttgtccatctacagtaacagagt

SEQ ID NO: 878339 - DNA, 25 bp, Homo sapien
cttgtccatctacagtaacagagtt

SEQ ID NO: 878340 - DNA, 25 bp, Homo sapien
tggcaaactgcaagcagcaagtgat

SEQ ID NO: 878341 - DNA, 25 bp, Homo sapien
gcaaagcacctccactggtacaaag

SEQ ID NO: 878342 - DNA, 25 bp, Homo sapien
aggaggcagctctcttatgctcaca

SEQ ID NO: 878343 - DNA, 25 bp, Homo sapien
ttctccaatccctttgtaaaccata

SEQ ID NO: 878344 - DNA, 25 bp, Homo sapien
ctccaatccctttgtaaaccatact

SEQ ID NO: 878345 - DNA, 25 bp, Homo sapien
ggaggcagctctcttatgctcacac

SEQ ID NO: 878346 - DNA, 25 bp, Homo sapien
gaactgaaactcctgaagtgggcag

SEQ ID NO: 878347 - DNA, 25 bp, Homo sapien
caggaactgaaactcctgaagtggg

SEQ ID NO: 878348 - DNA, 25 bp, Homo sapien
ggaactgaaactcctgaagtgggca

SEQ ID NO: 878349 - DNA, 25 bp, Homo sapien
ctcaggaactgaaactcctgaagtg

SEQ ID NO: 878350 - DNA, 25 bp, Homo sapien
aatggttcagaataacaaccaaatg

SEQ ID NO: 878351 - DNA, 25 bp, Homo sapien
ttcagatagatcctggtccactttc

SEQ ID NO: 878352 - DNA, 25 bp, Homo sapien
ccaagtgaaaagattatggctgtct

SEQ ID NO: 878353 - DNA, 25 bp, Homo sapien
aatgcaattcaagagcttcagatag

SEQ ID NO: 878354 - DNA, 25 bp, Homo sapien
aaagtccaattctgtactcacgtta

SEQ ID NO: 878355 - DNA, 25 bp, Homo sapien
aagtccaattctgtactcacgttag

SEQ ID NO: 878356 - DNA, 25 bp, Homo sapien
agtccaattctgtactcacgttagg

SEQ ID NO: 878357 - DNA, 25 bp, Homo sapien
ctccccaccagactctgcatttctg

SEQ ID NO: 878358 - DNA, 25 bp, Homo sapien
catttctggaagttttataactagc

SEQ ID NO: 878359 - DNA, 25 bp, Homo sapien
cccaccagactctgcatttctggaa

SEQ ID NO: 878360 - DNA, 25 bp, Homo sapien
gcatttctggaagttttataactag

SEQ ID NO: 878361 - DNA, 25 bp, Homo sapien
tagcagcacgactaagtgataaaac

SEQ ID NO: 878362 - DNA, 25 bp, Homo sapien
taagtgataaaacctgagtcagcgt

SEQ ID NO: 878363 - DNA, 25 bp, Homo sapien
tcagcgtcatttcaagcatatcgtt

SEQ ID NO: 878364 - DNA, 25 bp, Homo sapien
caattcctggtaagtagcagcacga

SEQ ID NO: 878365 - DNA, 25 bp, Homo sapien
tgttgtgggtggtaaaatatggtcc

SEQ ID NO: 878366 - DNA, 25 bp, Homo sapien
ttgttgtgggtggtaaaatatggtc

SEQ ID NO: 878367 - DNA, 25 bp, Homo sapien
taccactggacagattgttgtgggt

SEQ ID NO: 878368 - DNA, 25 bp, Homo sapien
cagtaccactggacagattgttgtg

SEQ ID NO: 878369 - DNA, 25 bp, Homo sapien
taaatctagtatgggatttcccagt

SEQ ID NO: 878370 - DNA, 25 bp, Homo sapien
tgtctaggcggtcgtaaggcactcc

SEQ ID NO: 878371 - DNA, 25 bp, Homo sapien
ggtactgacagttgattccatgaaa

SEQ ID NO: 878372 - DNA, 25 bp, Homo sapien
gagtttcagagcataggtactgaca

SEQ ID NO: 878373 - DNA, 25 bp, Homo sapien
taagtgttcttcatggagtgccctc

SEQ ID NO: 878374 - DNA, 25 bp, Homo sapien
taagagcttgcactagggctgcgaa

SEQ ID NO: 878375 - DNA, 25 bp, Homo sapien
cagaaatacacagctatggcagagg

SEQ ID NO: 878376 - DNA, 25 bp, Homo sapien
tgacatggacaagcaacaggagcgg

SEQ ID NO: 878377 - DNA, 25 bp, Homo sapien
tgtggcacttatcacacttggttgg

SEQ ID NO: 878378 - DNA, 25 bp, Homo sapien
acacaatgcagtcctgtcaggccct

SEQ ID NO: 878379 - DNA, 25 bp, Homo sapien
cctgtcaggccctggtaacatttaa

SEQ ID NO: 878380 - DNA, 25 bp, Homo sapien
acatttaacagttttgtggcactta

SEQ ID NO: 878381 - DNA, 25 bp, Homo sapien
cttcaacccagtaatggtgcatgac

SEQ ID NO: 878382 - DNA, 25 bp, Homo sapien
agtgttccttttggacttcacatag

SEQ ID NO: 878383 - DNA, 25 bp, Homo sapien
ggaggtgctcgagccacacagcgct

SEQ ID NO: 878384 - DNA, 25 bp, Homo sapien
cgctcatggactgtgtacttgcaga

SEQ ID NO: 878385 - DNA, 25 bp, Homo sapien
cacataggtcttgatgcaagaggga

SEQ ID NO: 878386 - DNA, 25 bp, Homo sapien
aaaggaaacaggtacacaaattcag

SEQ ID NO: 878387 - DNA, 25 bp, Homo sapien
aacaggtacacaaattcagagctaa

SEQ ID NO: 878388 - DNA, 25 bp, Homo sapien
ctgaaaggaaacaggtacacaaatt

SEQ ID NO: 878389 - DNA, 25 bp, Homo sapien
caggtacacaaattcagagctaatc

SEQ ID NO: 878390 - DNA, 25 bp, Homo sapien
agtcgccacacgtgctgtccatcat

SEQ ID NO: 878391 - DNA, 25 bp, Homo sapien
ggcaaaggttgcaataggcaggttt

SEQ ID NO: 878392 - DNA, 25 bp, Homo sapien
gcttccccacgccaatcagcatgtt

SEQ ID NO: 878393 - DNA, 25 bp, Homo sapien
ttgttaaagtgcttcagtcgccaca

SEQ ID NO: 878394 - DNA, 25 bp, Homo sapien
caccctcctctgtggaaatgcttac

SEQ ID NO: 878395 - DNA, 25 bp, Homo sapien
caggccaccctcctctgtggaaatg

SEQ ID NO: 878396 - DNA, 25 bp, Homo sapien
gccaccctcctctgtggaaatgctt

SEQ ID NO: 878397 - DNA, 25 bp, Homo sapien
caccaggccaccctcctctgtggaa

SEQ ID NO: 878398 - DNA, 25 bp, Homo sapien
catcatgatcatagtcaatttcttc

SEQ ID NO: 878399 - DNA, 25 bp, Homo sapien
ttcctccagagacacggttccatca

SEQ ID NO: 878400 - DNA, 25 bp, Homo sapien
caggagcacaagaagtggaatcgtt

SEQ ID NO: 878401 - DNA, 25 bp, Homo sapien
ggaatcgttgtcattcctccttgaa

SEQ ID NO: 878402 - DNA, 25 bp, Homo sapien
tctgcaacatgcatcatctgactga

SEQ ID NO: 878403 - DNA, 25 bp, Homo sapien
gacatcccactcaaggtattctgca

SEQ ID NO: 878404 - DNA, 25 bp, Homo sapien
cactcaaggtattctgcaacatgca

SEQ ID NO: 878405 - DNA, 25 bp, Homo sapien
tggattaagttcagtgacatcccac

SEQ ID NO: 878406 - DNA, 25 bp, Homo sapien
catccgtgtcataaaggcgaaacat

SEQ ID NO: 878407 - DNA, 25 bp, Homo sapien
agccattcccatccgtgtcataaag

SEQ ID NO: 878408 - DNA, 25 bp, Homo sapien
cattcccatccgtgtcataaaggcg

SEQ ID NO: 878409 - DNA, 25 bp, Homo sapien
tcccatccgtgtcataaaggcgaaa

SEQ ID NO: 878410 - DNA, 25 bp, Homo sapien
ttcaagcagagacaggtaacagaca

SEQ ID NO: 878411 - DNA, 25 bp, Homo sapien
ggtcttcctctttcaagcagagaca

SEQ ID NO: 878412 - DNA, 25 bp, Homo sapien
acttctggggaacacgtatttgcag

SEQ ID NO: 878413 - DNA, 25 bp, Homo sapien
gacaatgtccttcagatggattact

SEQ ID NO: 878414 - DNA, 25 bp, Homo sapien
aagcttaggagacaacatgtacggc

SEQ ID NO: 878415 - DNA, 25 bp, Homo sapien
caaaggccaattttacacacccagt

SEQ ID NO: 878416 - DNA, 25 bp, Homo sapien
tctagcagcaatagcctctggtgag

SEQ ID NO: 878417 - DNA, 25 bp, Homo sapien
cttcttgactacagctgagatggta

SEQ ID NO: 878418 - DNA, 25 bp, Homo sapien
tacactggatgactcctgcaacggt

SEQ ID NO: 878419 - DNA, 25 bp, Homo sapien
aaatggcacacctatcaattgagtg

SEQ ID NO: 878420 - DNA, 25 bp, Homo sapien
tatttgggctcctgtaggcacctca

SEQ ID NO: 878421 - DNA, 25 bp, Homo sapien
caaaaactgttacgctgacctgcaa

SEQ ID NO: 878422 - DNA, 25 bp, Homo sapien
tgaggaaacttgttgctaaatgaca

SEQ ID NO: 878423 - DNA, 25 bp, Homo sapien
gaaatcatcaggaagctcggcttcc

SEQ ID NO: 878424 - DNA, 25 bp, Homo sapien
acatgaaaaggtgtgcagtgaaatc

SEQ ID NO: 878425 - DNA, 25 bp, Homo sapien
gcaggcttactttttaccattggac

SEQ ID NO: 878426 - DNA, 25 bp, Homo sapien
cccttcaggattatactttgcaagc

SEQ ID NO: 878427 - DNA, 25 bp, Homo sapien
ggattatactttgcaagcacaccat

SEQ ID NO: 878428 - DNA, 25 bp, Homo sapien
caccattaccatggaattcttcaag

SEQ ID NO: 878429 - DNA, 25 bp, Homo sapien
ttcaggattatactttgcaagcaca

SEQ ID NO: 878430 - DNA, 25 bp, Homo sapien
cttggagatcagtttagtaaataca

SEQ ID NO: 878431 - DNA, 25 bp, Homo sapien
agcttcgggaaagagcacagtgaca

SEQ ID NO: 878432 - DNA, 25 bp, Homo sapien
acagatactaggctgagcaatgctg

SEQ ID NO: 878433 - DNA, 25 bp, Homo sapien
acatgtctgtaatgggagaaagaac

SEQ ID NO: 878434 - DNA, 25 bp, Homo sapien
cagcaggtttagttcttgggataag

SEQ ID NO: 878435 - DNA, 25 bp, Homo sapien
ggacagatgcgcagcacaaaagatt

SEQ ID NO: 878436 - DNA, 25 bp, Homo sapien
ggccagtgaagtgctaggcagccca

SEQ ID NO: 878437 - DNA, 25 bp, Homo sapien
gcagccaggttgaaaacagcaggtt

SEQ ID NO: 878438 - DNA, 25 bp, Homo sapien
acattctggcaacaattctgtattc

SEQ ID NO: 878439 - DNA, 25 bp, Homo sapien
caaacattctggcaacaattctgta

SEQ ID NO: 878440 - DNA, 25 bp, Homo sapien
tgtattctctagtcacaacactaat

SEQ ID NO: 878441 - DNA, 25 bp, Homo sapien
ctctagtcacaacactaataacatc

SEQ ID NO: 878442 - DNA, 25 bp, Homo sapien
cttgtgactttatgcatccactcat

SEQ ID NO: 878443 - DNA, 25 bp, Homo sapien
tttttacatttgtattcctccatgg

SEQ ID NO: 878444 - DNA, 25 bp, Homo sapien
tttacatttgtattcctccatggag

SEQ ID NO: 878445 - DNA, 25 bp, Homo sapien
atttgtattcctccatggagattcc

SEQ ID NO: 878446 - DNA, 25 bp, Homo sapien
tacatttgtattcctccatggagat

SEQ ID NO: 878447 - DNA, 25 bp, Homo sapien
gagacttgaaagaattcgtgcacgt

SEQ ID NO: 878448 - DNA, 25 bp, Homo sapien
tcctggagacttgaaagaattcgtg

SEQ ID NO: 878449 - DNA, 25 bp, Homo sapien
gaaagaattcgtgcacgttgcaaac

SEQ ID NO: 878450 - DNA, 25 bp, Homo sapien
tgcaaacacgaattactttttatat

SEQ ID NO: 878451 - DNA, 25 bp, Homo sapien
aacactcggcgttccttgctttaag

SEQ ID NO: 878452 - DNA, 25 bp, Homo sapien
caacctcaggctagcggagtgtgcc

SEQ ID NO: 878453 - DNA, 25 bp, Homo sapien
tgagaacacatgatccaaaccaagg

SEQ ID NO: 878454 - DNA, 25 bp, Homo sapien
tcccagggtcccagataaattatcc

SEQ ID NO: 878455 - DNA, 25 bp, Homo sapien
ggtaatccaagccaactagagactg

SEQ ID NO: 878456 - DNA, 25 bp, Homo sapien
tctggacattggctacgaccattac

SEQ ID NO: 878457 - DNA, 25 bp, Homo sapien
tattaccagagtgaggtcaaaccag

SEQ ID NO: 878458 - DNA, 25 bp, Homo sapien
aaggatatccttcagagagcttcca

SEQ ID NO: 878459 - DNA, 25 bp, Homo sapien
caatactctgagaaaagtgtaagca

SEQ ID NO: 878460 - DNA, 25 bp, Homo sapien
tgtaggacattatctgcatctgggc

SEQ ID NO: 878461 - DNA, 25 bp, Homo sapien
cactcagtagtctgaatgtaggaca

SEQ ID NO: 878462 - DNA, 25 bp, Homo sapien
tctggacaaagactctcaagtcacc

SEQ ID NO: 878463 - DNA, 25 bp, Homo sapien
gaggctgccaattacaccagaagct

SEQ ID NO: 878464 - DNA, 25 bp, Homo sapien
ccttcggcatttgtagggacaacac

SEQ ID NO: 878465 - DNA, 25 bp, Homo sapien
ggctccgtatcagctgccttcggca

SEQ ID NO: 878466 - DNA, 25 bp, Homo sapien
gcagtcacagcaggctccgtatcag

SEQ ID NO: 878467 - DNA, 25 bp, Homo sapien
ctgcgcccgtttgtccttctccctg

SEQ ID NO: 878468 - DNA, 25 bp, Homo sapien
gtctgttacagtattaccactctcc

SEQ ID NO: 878469 - DNA, 25 bp, Homo sapien
tctctgcgcccgtttgtccttctcc

SEQ ID NO: 878470 - DNA, 25 bp, Homo sapien
caagcacagcattgcttttttctcc

SEQ ID NO: 878471 - DNA, 25 bp, Homo sapien
gctgaggtgggcccatttttcctgg

SEQ ID NO: 878472 - DNA, 25 bp, Homo sapien
ctgaggtgggcccatttttcctggt

SEQ ID NO: 878473 - DNA, 25 bp, Homo sapien
gaggtctatgcttcaaagattccac

SEQ ID NO: 878474 - DNA, 25 bp, Homo sapien
ctttattcaggtgttgcgcagaggt

SEQ ID NO: 878475 - DNA, 25 bp, Homo sapien
ggtgttgcgcagaggtctatgcttc

SEQ ID NO: 878476 - DNA, 25 bp, Homo sapien
gtcacataccaggtaaaagattctt

SEQ ID NO: 878477 - DNA, 25 bp, Homo sapien
cacatgaaactgctttggatgcttg

SEQ ID NO: 878478 - DNA, 25 bp, Homo sapien
actgctttggatgcttgtaatttca

SEQ ID NO: 878479 - DNA, 25 bp, Homo sapien
tgcaatctgtccacatgaaactgct

SEQ ID NO: 878480 - DNA, 25 bp, Homo sapien
tcaaaatatgcaatctgtccacatg

SEQ ID NO: 878481 - DNA, 25 bp, Homo sapien
tatgtccatgtaactagaccttctt

SEQ ID NO: 878482 - DNA, 25 bp, Homo sapien
aataatgtgaattttgtggatgctt

SEQ ID NO: 878483 - DNA, 25 bp, Homo sapien
ccctcctagggtcagtctttcactg

SEQ ID NO: 878484 - DNA, 25 bp, Homo sapien
tcctagggtcagtctttcactgaca

SEQ ID NO: 878485 - DNA, 25 bp, Homo sapien
ataatacctaattatgtgccacatt

SEQ ID NO: 878486 - DNA, 25 bp, Homo sapien
tgtgccacatttaactaaggtcata

SEQ ID NO: 878487 - DNA, 25 bp, Homo sapien
ttatgtgccacatttaactaaggtc

SEQ ID NO: 878488 - DNA, 25 bp, Homo sapien
gccacatttaactaaggtcataaca

SEQ ID NO: 878489 - DNA, 25 bp, Homo sapien
ggcccattggaactagtgtctgaaa

SEQ ID NO: 878490 - DNA, 25 bp, Homo sapien
tgcaactaaaaaacagcggaggctg

SEQ ID NO: 878491 - DNA, 25 bp, Homo sapien
gagagccactgcttttccggagagg

SEQ ID NO: 878492 - DNA, 25 bp, Homo sapien
aaagctgagcgcatctctgaagcga

SEQ ID NO: 878493 - DNA, 25 bp, Homo sapien
tactttatgccacccctatgggcaa

SEQ ID NO: 878494 - DNA, 25 bp, Homo sapien
ccaaagtatcataagggtcaccaga

SEQ ID NO: 878495 - DNA, 25 bp, Homo sapien
tatagcacctaaggcttgagaacca

SEQ ID NO: 878496 - DNA, 25 bp, Homo sapien
gctaatctgttgaccaccaaagggc

SEQ ID NO: 878497 - DNA, 25 bp, Homo sapien
tgttgtccccacatagcgtgctgga

SEQ ID NO: 878498 - DNA, 25 bp, Homo sapien
gactgcgggagtattatgcacatcc

SEQ ID NO: 878499 - DNA, 25 bp, Homo sapien
cctgtttgtggcatatgactgcggg

SEQ ID NO: 878500 - DNA, 25 bp, Homo sapien
taaagcaagtttcctgacacctgct

SEQ ID NO: 878501 - DNA, 25 bp, Homo sapien
ttaatgtttgttggggctgccactg

SEQ ID NO: 878502 - DNA, 25 bp, Homo sapien
tgcaactgtttccaatagagttgag

SEQ ID NO: 878503 - DNA, 25 bp, Homo sapien
tgtttgttggggctgccactgaagc

SEQ ID NO: 878504 - DNA, 25 bp, Homo sapien
ctgtttccaatagagttgagccaga

SEQ ID NO: 878505 - DNA, 25 bp, Homo sapien
tcaggatgtggcgattcagaaggta

SEQ ID NO: 878506 - DNA, 25 bp, Homo sapien
tgtcaagctcatacacaatagcatg

SEQ ID NO: 878507 - DNA, 25 bp, Homo sapien
gatgaacctgcatctgtcctcccag

SEQ ID NO: 878508 - DNA, 25 bp, Homo sapien
cagaaggtagctcctgatgaaggct

SEQ ID NO: 878509 - DNA, 25 bp, Homo sapien
aaagtgtggcagatttatccgggtg

SEQ ID NO: 878510 - DNA, 25 bp, Homo sapien
cattgaaagaacgtttcctgcagaa

SEQ ID NO: 878511 - DNA, 25 bp, Homo sapien
gcaggtcaggctgtctctaggctgt

SEQ ID NO: 878512 - DNA, 25 bp, Homo sapien
ggctgttcagtgtctatcatcctgt

SEQ ID NO: 878513 - DNA, 25 bp, Homo sapien
tcacactctgtgacagccttttttg

SEQ ID NO: 878514 - DNA, 25 bp, Homo sapien
gtcacactctgtgacagcctttttt

SEQ ID NO: 878515 - DNA, 25 bp, Homo sapien
gtcctgcaagccatggaaggtggct

SEQ ID NO: 878516 - DNA, 25 bp, Homo sapien
ggtcctgcaagccatggaaggtggc

SEQ ID NO: 878517 - DNA, 25 bp, Homo sapien
ctggtcctgcaagccatggaaggtg

SEQ ID NO: 878518 - DNA, 25 bp, Homo sapien
tcctgcaagccatggaaggtggctc

SEQ ID NO: 878519 - DNA, 25 bp, Homo sapien
ggaacagtaggtgcaaagaggtcac

SEQ ID NO: 878520 - DNA, 25 bp, Homo sapien
gatttcaaactctaattcagacaat

SEQ ID NO: 878521 - DNA, 25 bp, Homo sapien
ggagccgacctgatactctctggcc

SEQ ID NO: 878522 - DNA, 25 bp, Homo sapien
tgaagattcaggagccgacctgata

SEQ ID NO: 878523 - DNA, 25 bp, Homo sapien
ttctcatgagagatgatccaccttt

SEQ ID NO: 878524 - DNA, 25 bp, Homo sapien
gatcattgcactctcttggtcataa

SEQ ID NO: 878525 - DNA, 25 bp, Homo sapien
taacaacagctaacaagctttcttg

SEQ ID NO: 878526 - DNA, 25 bp, Homo sapien
tcttgagctattttctcatgagaga

SEQ ID NO: 878527 - DNA, 25 bp, Homo sapien
gtcagggttttgatgtaaaaggatg

SEQ ID NO: 878528 - DNA, 25 bp, Homo sapien
ttctaagtgatacatttcctcctcc

SEQ ID NO: 878529 - DNA, 25 bp, Homo sapien
ttctcctctatttctaagtgataca

SEQ ID NO: 878530 - DNA, 25 bp, Homo sapien
ggttttgatgtaaaaggatgatgct

SEQ ID NO: 878531 - DNA, 25 bp, Homo sapien
gtttcaaaggaagcttttgaatctc

SEQ ID NO: 878532 - DNA, 25 bp, Homo sapien
gagtttcaaaggaagcttttgaatc

SEQ ID NO: 878533 - DNA, 25 bp, Homo sapien
tcaaaggaagcttttgaatctcaat

SEQ ID NO: 878534 - DNA, 25 bp, Homo sapien
ctggagtttcaaaggaagcttttga

SEQ ID NO: 878535 - DNA, 25 bp, Homo sapien
cttcaaattgatatttgactgataa

SEQ ID NO: 878536 - DNA, 25 bp, Homo sapien
ttaacgagcttcttcaaattgatat

SEQ ID NO: 878537 - DNA, 25 bp, Homo sapien
tcttctctaaaaggagatgtcaatt

SEQ ID NO: 878538 - DNA, 25 bp, Homo sapien
gtaatcttctctaaaaggagatgtc

SEQ ID NO: 878539 - DNA, 25 bp, Homo sapien
agcttctcggacaaagagcttcttg

SEQ ID NO: 878540 - DNA, 25 bp, Homo sapien
ccagcagcttctcggacaaagagct

SEQ ID NO: 878541 - DNA, 25 bp, Homo sapien
gattctctttacaattggcctcttt

SEQ ID NO: 878542 - DNA, 25 bp, Homo sapien
tctgtccctttaggtcccacattct

SEQ ID NO: 878543 - DNA, 25 bp, Homo sapien
cagaaatggatagggtagaatggaa

SEQ ID NO: 878544 - DNA, 25 bp, Homo sapien
aaagaaacagaaatggatagggtag

SEQ ID NO: 878545 - DNA, 25 bp, Homo sapien
tatatacatctaacaaaaattgact

SEQ ID NO: 878546 - DNA, 25 bp, Homo sapien
tagggtagaatggaatacacataaa

SEQ ID NO: 878547 - DNA, 25 bp, Homo sapien
catcccactaagtgacccggtaact

SEQ ID NO: 878548 - DNA, 25 bp, Homo sapien
gagcatcccactaagtgacccggta

SEQ ID NO: 878549 - DNA, 25 bp, Homo sapien
agcatcccactaagtgacccggtaa

SEQ ID NO: 878550 - DNA, 25 bp, Homo sapien
gcatcccactaagtgacccggtaac

SEQ ID NO: 878551 - DNA, 25 bp, Homo sapien
ctgatgacaatcctagcctgaagtg

SEQ ID NO: 878552 - DNA, 25 bp, Homo sapien
tgcacctggcataagattagtagct

SEQ ID NO: 878553 - DNA, 25 bp, Homo sapien
gaaaacgttatttccggcattcagc

SEQ ID NO: 878554 - DNA, 25 bp, Homo sapien
gccagagggcacactaagaagacat

SEQ ID NO: 878555 - DNA, 25 bp, Homo sapien
ttccccatgccccatcataattgtc

SEQ ID NO: 878556 - DNA, 25 bp, Homo sapien
cttactcatctcacagaatctatct

SEQ ID NO: 878557 - DNA, 25 bp, Homo sapien
gatacaattgcatgaaagcttgaca

SEQ ID NO: 878558 - DNA, 25 bp, Homo sapien
cttgatgttactaggcacagaatgc

SEQ ID NO: 878559 - DNA, 25 bp, Homo sapien
caaaatttcgtctggtcacaacctc

SEQ ID NO: 878560 - DNA, 25 bp, Homo sapien
catgaacagtgaaggagttctgggc

SEQ ID NO: 878561 - DNA, 25 bp, Homo sapien
aatccccaatgctggtcgtgggccc

SEQ ID NO: 878562 - DNA, 25 bp, Homo sapien
ggagttctgggcatctgatatggtt

SEQ ID NO: 878563 - DNA, 25 bp, Homo sapien
tgtgaagtgcctcacttcccatttg

SEQ ID NO: 878564 - DNA, 25 bp, Homo sapien
tgagccacttatctctgtggtagcc

SEQ ID NO: 878565 - DNA, 25 bp, Homo sapien
tttcacctgagccacttatctctgt

SEQ ID NO: 878566 - DNA, 25 bp, Homo sapien
ttgcctttcacctgagccacttatc

SEQ ID NO: 878567 - DNA, 25 bp, Homo sapien
cctgagccacttatctctgtggtag

SEQ ID NO: 878568 - DNA, 25 bp, Homo sapien
cagtgccacccaagtttgcctcttg

SEQ ID NO: 878569 - DNA, 25 bp, Homo sapien
gtgccacccaagtttgcctcttgtt

SEQ ID NO: 878570 - DNA, 25 bp, Homo sapien
gccagtgccacccaagtttgcctct

SEQ ID NO: 878571 - DNA, 25 bp, Homo sapien
gccacccaagtttgcctcttgttac

SEQ ID NO: 878572 - DNA, 25 bp, Homo sapien
tcctactctggcagacaccttcaga

SEQ ID NO: 878573 - DNA, 25 bp, Homo sapien
cgagtgtgataatagacgtgcttgg

SEQ ID NO: 878574 - DNA, 25 bp, Homo sapien
ggtggcaccaatccaaacgagtgtg

SEQ ID NO: 878575 - DNA, 25 bp, Homo sapien
cagctgtggttatatctccatacag

SEQ ID NO: 878576 - DNA, 25 bp, Homo sapien
gaagaggttcttcagatctagaaag

SEQ ID NO: 878577 - DNA, 25 bp, Homo sapien
aaacattactgtacagctctgaaga

SEQ ID NO: 878578 - DNA, 25 bp, Homo sapien
tatgaaccataacagtcatagctat

SEQ ID NO: 878579 - DNA, 25 bp, Homo sapien
caacttatgaaccataacagtcata

SEQ ID NO: 878580 - DNA, 25 bp, Homo sapien
ttttcaacttgcttcctactaatag

SEQ ID NO: 878581 - DNA, 25 bp, Homo sapien
tcaacttgcttcctactaatagtat

SEQ ID NO: 878582 - DNA, 25 bp, Homo sapien
attttcaacttgcttcctactaata

SEQ ID NO: 878583 - DNA, 25 bp, Homo sapien
cttgcttcctactaatagtatttga

SEQ ID NO: 878584 - DNA, 25 bp, Homo sapien
taaacttcacaatgtcaacctccat

SEQ ID NO: 878585 - DNA, 25 bp, Homo sapien
agatataaagattattacccgtagg

SEQ ID NO: 878586 - DNA, 25 bp, Homo sapien
cacagtagaagatataaagattatt

SEQ ID NO: 878587 - DNA, 25 bp, Homo sapien
tcacagtagaagatataaagattat

SEQ ID NO: 878588 - DNA, 25 bp, Homo sapien
agaagatataaagattattacccgt

SEQ ID NO: 878589 - DNA, 25 bp, Homo sapien
ctgctttggcaattacaacctccaa

SEQ ID NO: 878590 - DNA, 25 bp, Homo sapien
tactgctttggcaattacaacctcc

SEQ ID NO: 878591 - DNA, 25 bp, Homo sapien
ctttggcaattacaacctccaaaca

SEQ ID NO: 878592 - DNA, 25 bp, Homo sapien
ttatactgctttggcaattacaacc

SEQ ID NO: 878593 - DNA, 25 bp, Homo sapien
tggagtcagtaatgtgatcaccaag

SEQ ID NO: 878594 - DNA, 25 bp, Homo sapien
cagtaatgtgatcaccaagtcccat

SEQ ID NO: 878595 - DNA, 25 bp, Homo sapien
ttacttggaacagttggagtcagta

SEQ ID NO: 878596 - DNA, 25 bp, Homo sapien
cagttggagtcagtaatgtgatcac

SEQ ID NO: 878597 - DNA, 25 bp, Homo sapien
caagaaagcaggttgtcatgtaatt

SEQ ID NO: 878598 - DNA, 25 bp, Homo sapien
cttccacggatataaacaagaaagc

SEQ ID NO: 878599 - DNA, 25 bp, Homo sapien
ggagattggagtagatgttttcccc

SEQ ID NO: 878600 - DNA, 25 bp, Homo sapien
tgagttgactcaaatcttttaggga

SEQ ID NO: 878601 - DNA, 25 bp, Homo sapien
caggttgaagatggtacttagttac

SEQ ID NO: 878602 - DNA, 25 bp, Homo sapien
ggccacaactgggattgcagcaatc

SEQ ID NO: 878603 - DNA, 25 bp, Homo sapien
gccacaactgggattgcagcaatca

SEQ ID NO: 878604 - DNA, 25 bp, Homo sapien
ccacaactgggattgcagcaatcat

SEQ ID NO: 878605 - DNA, 25 bp, Homo sapien
gggccacaactgggattgcagcaat

SEQ ID NO: 878606 - DNA, 25 bp, Homo sapien
gttcagtaacatgagaggacacagg

SEQ ID NO: 878607 - DNA, 25 bp, Homo sapien
tgtctaaagatctccaactagttct

SEQ ID NO: 878608 - DNA, 25 bp, Homo sapien
gacagagtctaccataaagttcagt

SEQ ID NO: 878609 - DNA, 25 bp, Homo sapien
tagttctaaacaaatgcaaccaagt

SEQ ID NO: 878610 - DNA, 25 bp, Homo sapien
gcctattacgtaggccaagccaagg

SEQ ID NO: 878611 - DNA, 25 bp, Homo sapien
catttttagatgatctccaataccc

SEQ ID NO: 878612 - DNA, 25 bp, Homo sapien
caagccaaggtttcctagtgtgccg

SEQ ID NO: 878613 - DNA, 25 bp, Homo sapien
cccctttaggctccgattgtctcag

SEQ ID NO: 878614 - DNA, 25 bp, Homo sapien
cataggcaaagctcaatgaagaaca

SEQ ID NO: 878615 - DNA, 25 bp, Homo sapien
tatcctcagttcacatagacacctg

SEQ ID NO: 878616 - DNA, 25 bp, Homo sapien
taagtcaggctccttaacccagtga

SEQ ID NO: 878617 - DNA, 25 bp, Homo sapien
gccagcagagggctccctactgtaa

SEQ ID NO: 878618 - DNA, 25 bp, Homo sapien
cagtcataatatgcgtgtggacaac

SEQ ID NO: 878619 - DNA, 25 bp, Homo sapien
tccccagaaagcaatgcaaatggaa

SEQ ID NO: 878620 - DNA, 25 bp, Homo sapien
gaggtgagttgtttcatgcttctaa

SEQ ID NO: 878621 - DNA, 25 bp, Homo sapien
tatacttgtcatataaggctatcag

SEQ ID NO: 878622 - DNA, 25 bp, Homo sapien
ggatagaggtgtccattgtgccccg

SEQ ID NO: 878623 - DNA, 25 bp, Homo sapien
tgtgccccgagtttcctgttcagtg

SEQ ID NO: 878624 - DNA, 25 bp, Homo sapien
tgtttaccatcaagtgctctctgct

SEQ ID NO: 878625 - DNA, 25 bp, Homo sapien
taatagccaattgcagtaaaagcag

SEQ ID NO: 878626 - DNA, 25 bp, Homo sapien
cagctgcattctgccctggaacatg

SEQ ID NO: 878627 - DNA, 25 bp, Homo sapien
tcacaccacaggggccacagtttgc

SEQ ID NO: 878628 - DNA, 25 bp, Homo sapien
tccctgtgccaacacttcttcacag

SEQ ID NO: 878629 - DNA, 25 bp, Homo sapien
tctgccctggaacatgaccccagtg

SEQ ID NO: 878630 - DNA, 25 bp, Homo sapien
taaatgcatcgtagaaacatcaggg

SEQ ID NO: 878631 - DNA, 25 bp, Homo sapien
tctggtaaaaactcataaaggacat

SEQ ID NO: 878632 - DNA, 25 bp, Homo sapien
aatgccaagaagctagaggcctgtg

SEQ ID NO: 878633 - DNA, 25 bp, Homo sapien
cagaagatgaacatataaatgcatc

SEQ ID NO: 878634 - DNA, 25 bp, Homo sapien
agcaatgaaggcaaaacaggagctt

SEQ ID NO: 878635 - DNA, 25 bp, Homo sapien
ctgaaagaagagcaatgaaggcaaa

SEQ ID NO: 878636 - DNA, 25 bp, Homo sapien
gaaagaagagcaatgaaggcaaaac

SEQ ID NO: 878637 - DNA, 25 bp, Homo sapien
aatgaaggcaaaacaggagcttcct

SEQ ID NO: 878638 - DNA, 25 bp, Homo sapien
tctccagctctctcgatcccctcaa

SEQ ID NO: 878639 - DNA, 25 bp, Homo sapien
ccagctctctcgatcccctcaactc

SEQ ID NO: 878640 - DNA, 25 bp, Homo sapien
tccagctctctcgatcccctcaact

SEQ ID NO: 878641 - DNA, 25 bp, Homo sapien
ttctccagctctctcgatcccctca

SEQ ID NO: 878642 - DNA, 25 bp, Homo sapien
tcatggatcaaaaagaccccttggg

SEQ ID NO: 878643 - DNA, 25 bp, Homo sapien
gcctggagcccaatttcacttataa
